United States Patent Application Publication US 2024/0327476 A1 - sequence listing, part 87

SEQ ID NO: 166693 - DNA, 318 bp, synthetic construct
  misc_feature 1..318: note = Description of Artificial Sequence: Synthetic coding sequence
  source 1..318: mol_type = other DNA
atggccagcaatgaaagagatgccatctcctggtaccagaagaagatcggggcctatgaccagcagatctgggagaagagcattgagcagacccagatcaagggcctgaagaacaagcccaagaagatgggccacatcaagccagacctgattgatgtggacctgatccggggcagcacctttgccaaggccaagccagagatcccctggaccagcctgaccaggaagggcctggtgcgggtggtgttcttccccctcttcagcaactggtggatccaggtgaccagcctgcgcatctttgtgtggctgctgctgtag

SEQ ID NO: 166694 - DNA, 702 bp, synthetic construct
  misc_feature 1..702: note = Description of Artificial Sequence: Synthetic coding sequence
  source 1..702: mol_type = other DNA
atggccagcaatgaaagagatgccatctcctggtaccagaagaagatcggggcctatgaccagcagatctgggagaagagcattgagcagacccagatcaagggcctgaagaacaagcccaagaagatgggccacatcaagccagacctgattgatgtggacctgatccggggcagcacctttgccaaggccaagccagagatcccctggaccagcctgaccaggaagggcctggtgcgggtggtgttcttccccctcttcagcaactggtggatccaggtgaccagcctgcgcatctttgtgtggctgctgctgctgtacttcatgcaggtgattgccatcgtgctgtacctgatgatgcccatcgtgaacatcagcgaggtgctgggccccctgtgcctgatgctgctgatgggcaccgtgcactgccagatcgtgtccacccagatcacccggcccagcggcaacaatggaaacagaagaagaaggaagctgaggaagacagtgaatggagatggcagccgggagaatggaaacaacagcagtgacaaggtgcggggcatcgagaccctggagagcgtgcccatcattggaggcttctgggagaccatctttggaaacagaaggctgctgggcgtgtgggtgatgggctgcctgatgacctgccaggtgaagaagatggtgaagcacggccacaggtag

SEQ ID NO: 166695 - DNA, 2760 bp, synthetic construct
  misc_feature 1..2760: note = Description of Artificial Sequence: Synthetic coding sequence
  source 1..2760: mol_type = other DNA
atgaagtttgcctaccgcttcagcaacctgctgggcaccgtgtaccgccggggcaacctgaacttcacctgtgatggcaacagcgtcatcagccctgtgggcaacagagtgacagtgtttgacctgaagaacaacaagagtgacaccctgcccctggccacccgctacaacgtgaagtgtgtgggcctgagcccagatggccgcctggccatcatcgtggatgagggcggagatgccctgctggtgtccctggtgtgccgctctgtgctgcaccacttccacttcaagggctctgtgcacagcgtgtccttctccccagatggcaggaagtttgtggtgaccaagggcaacatcgcccagatgtaccacgcccctgggaagaagcgggagttcaatgcctttgtgctggacaagacctacttcggcccctatgatgagaccacctgcatcgactggacagatgacagccgctgctttgtggtgggcagcaaggacatgagcacctgggtgtttggagctgagcgctgggacaacctgatctactatgccctgggcggccacaaggatgccatcgtggcctgcttctttgagagcaacagcctggacctgtacagcctgagccaggatggagtgctgtgcatgtggcagtgtgacaccccacctgagggcctgcggctgaagcccccagctggctggaaggctgacctgctgcagcgggaggaggaggaggaggaggaggaggaccaggagggggaccgggagaccaccatccggggcaaggccaccccagctgaggaggagaagacaggcaaggtgaagtacagccggctggccaagtacttcttcaacaaggagggggacttcaacaacctgacagctgctgccttccacaagaagagccacctgctggtgactggatttgccagcggcatcttccacctgcacgagctgcctgagttcaacctgatccacagcctgagcatcagtgaccagagcatcgcctctgtggccatcaacagcagcggggactggatcgccttcggctgcagcggcctgggccagctgctggtgtgggagtggcagagcgagagctatgtgctgaagcagcagggccacttcaacagcatggtggccctggcctacagcccagatggccagtacatcgtgactggaggagatgatggcaaggtgaaggtgtggaacaccctgagcggcttctgctttgtgaccttcacagagcacagcagcggcgtgactggagtgaccttcaccgccaccggctacgtggtggtgaccagctccatggatggcaccgtgcgggcctttgacctgcaccgctacagaaacttccgcaccttcaccagcccccggcccacccagttcagctgtgtggccgtggatgccagcggggagatcgtgtctgctggggcccaggacagctttgagatctttgtgtggagcatgcagacaggccgcctgctggatgtgctgagcggccacgagggccccatcagcggcctgtgcttcaaccccatgaagtctgtgctggccagcgcctcctgggacaagacagtgcggctgtgggacatgtttgacagctggaggaccaaggagaccctggccctgaccagtgatgccctggccgtgaccttccggccagatggagctgagctggccgtggccaccctgaacagccagatcaccttctgggaccctgaaaatgctgtgcagacaggcagcattgagggcagacatgacctgaagacaggcaggaaggagctggacaagatcacagccaagcacgccgccaagggcaaggccttcaccgccctgtgctacagcgcagatggccacagcatcctggccggcggcatgagcaagtttgtgtgcatctaccacgtgcgggagcagatcctgatgaagagatttgagatcagctgcaacctgagcctggatgccatggaggagttcctgaacagaaggaagatgacagaatttggaaacctggccctgattgaccaggatgctggccaggaggatggagtggccatccccctgcccggggtgaggaaaggagacatgagcagccgccacttcaagccagagatccgggtgaccagcctgcgcttcagccccaccggccgctgctgggccgccaccaccacagagggcctgctgatctacagcctggacaccagggtgctgtttgacccctttgagctggacacctctgtgaccccaggccgggtgcgggaggccctgcggcagcaggacttcacccgggccatcctgatggccctgcggctgaatgaaagcaagctggtgcaggaggccctggaggccgtgcccagaggagaaattgaggtggtgaccagcagcctgcctgagctgtatgtggagaaggtgctggagttcctggccagcagctttgaggtgagccgccacctggagttctacctgctgtggacccacaagctgctgatgctgcacggccagaagctgaagagccgggccggcaccctgctgcctgtgatccagttcctgcagaagagcatccagaggcacctggatgacctgagcaagctgtgctcctggaaccactacaacatgcagtatgccctggccgtgtccaagcagaggggcaccaagaggagcctggaccccctgggcagcgaggaggaggccgaggcctctgaagatgacagcctgcacctgctgggcggcggcggccgggacagcgaggaggagatgctggcctag

SEQ ID NO: 166696 - DNA, 1686 bp, synthetic construct
  misc_feature 1..1686: note = Description of Artificial Sequence: Synthetic coding sequence
  source 1..1686: mol_type = other DNA
atggccttcatggagaagcccccagctgggaaggtgctgctggatgacacagtgcccctgacagctgccatcgaggccagccagagcctgcagagccacaccatcgtgcggcgctacagcgactttgacctgctgaacaacagcctgcagattgctggcctgagcctgcccctgccccccaagaagctgattggcaacatggaccgggagttcatcgccgagcggcagaagggcctgcagaactacctgaatgtcatcaccaccaaccacatcctgagcaactgtgagctggtgaagaagttcctggaccccaacaactacagcgccaactacacagagatcgccctgcagcaggtgtccatgttcttccgctctgagcccaagtgggaggtggtggagcccctgaaggacatcggctggaggatcaggaagaagtacttcctgatgaagatcaagaaccagcccaaggagcggctggtgctgtcctgggccgacctgggccctgacaagtacctgagtgacaaggacttccagtgcctgatcaagctgctgcccagctgcctgcacccctacatctacagagtgacctttgccacagccaatgaaagcagcgccctgctgatccgcatgtttaatgagaagggcaccctgaaggacctgatctacaaggccaagcccaaggaccccttcctgaagaagtactgcaaccccaagaagatccagggcctggagctgcagcagatcaagacctacggccggcagatcctggaggtgctgaagttcctgcatgacaagggcttcccctacggccacctgcacgccagcaatgtgatgctggatggagacacctgccgcctgctggacctggagaacagcctgctgggcctgcccagcttctaccgcagctacttcagccagttcaggaagatcaacaccctggagagcgtggatgtgcactgcttcggccacctgctgtatgagatgacctacggccggcccccagacagcgtgcctgtggacagcttccccccagcccccagcatggctgtggtggccgtgctggagagcaccctgagctgtgaggcctgcaagaatggcatgcccaccatcagccggctgctgcagatgcccctcttcagtgatgtgctgctgaccaccagcgagaagccccagttcaagatccccaccaagctgaaggaggccctgcgcatcgccaaggaatgtattgagaagaggctcatcgaggagcagaagcagatccaccagcaccggcggctgacccgggcccagagccaccacggcagcgaggaggagaggaagaagaggaagatcctggccaggaagaagagcaagaggtctgccctggagaacagcgaggagcacagcgccaagtacagcaacagcaacaacagcgctggcagcggggccagcagccccctgaccagccccagcagccccaccccacccagcaccagcggcatcagcgccctgcccccacctcctcctcctcctcctcctcctgctgcccccctgcccccagccagcacagaggccccagcccagctgagcagccaggccgtgaatggcatgagcagaggagccctgctgagcagcatccagaacttccagaagggcaccctgaggaaggccaagacctgtgaccacagcgcccccaagattggatag

SEQ ID NO: 166697 - DNA, 1737 bp, synthetic construct
  misc_feature 1..1737: note = Description of Artificial Sequence: Synthetic coding sequence
  source 1..1737: mol_type = other DNA
atggccttcatggagaagcccccagctgggaaggtgctgctggatgacacagtgcccctgacagctgccatcgaggccagccagagcctgcagagccacacagagtacatcatccgggtgcagaggggcatctctgtggagaacagctggcagatcgtgcggcgctacagcgactttgacctgctgaacaacagcctgcagattgctggcctgagcctgcccctgccccccaagaagctgattggcaacatggaccgggagttcatcgccgagcggcagaagggcctgcagaactacctgaatgtcatcaccaccaaccacatcctgagcaactgtgagctggtgaagaagttcctggaccccaacaactacagcgccaactacacagaaattgccctgcagcaggtgtccatgttcttccgctctgagcccaagtgggaggtggtggagcccctgaaggacatcggctggaggatcaggaagaagtacttcctgatgaagatcaagaaccagcccaaggagcggctggtgctgtcctgggccgacctgggccctgacaagtacctgagtgacaaggacttccagtgcctgatcaagctgctgcccagctgcctgcacccctacatctacagagtgacctttgccacagccaatgaatcttctgccctgctgatccgcatgtttaatgagaagggcaccctgaaggacctgatctacaaggccaagcccaaggaccccttcctgaagaagtactgcaaccccaagaagatccagggcctggagctgcagcagatcaagacctacggccggcagatcctggaggtgctgaagttcctgcatgacaagggcttcccctacggccacctgcacgccagcaatgtgatgctggatggagacacctgccgcctgctggacctggagaacagcctgctgggcctgcccagcttctaccgcagctacttcagccagttcaggaagatcaacaccctggagagcgtggatgtgcactgcttcggccacctgctgtatgagatgacctacggccggcccccagattctgtgcctgtggacagcttccccccagcccccagcatggctgtggtggccgtgctggagagcaccctgagctgtgaggcctgcaagaatggcatgcccaccatcagccggctgctgcagatgcccctcttcagtgatgtgctgctgaccaccagcgagaagccccagttcaagatccccaccaagctgaaggaggccctgagaattgccaaggagtgcatcgagaagaggctgattgaggagcagaagcagatccaccagcaccggcggctgacccgggcccagagccaccacggcagcgaggaggagaggaagaagaggaagatcctggccaggaagaagagcaagaggtctgccctggagaacagcgaggagcacagcgccaagtacagcaacagcaacaacagcgctggcagcggggccagcagccccctgaccagccccagcagccccaccccacccagcaccagcggcatcagcgccctgcccccacctcctcctcctcctcctcctcctgctgcccccctgcccccagccagcacagaggccccagcccagctgagcagccaggccgtgaatggcatgagcagaggagccctgctgagcagcatccagaacttccagaagggcaccctgaggaaggccaagacctgtgaccacagcgcccccaagattggatag

SEQ ID NO: 166698 - DNA, 1638 bp, synthetic construct
  misc_feature 1..1638: note = Description of Artificial Sequence: Synthetic coding sequence
  source 1..1638: mol_type = other DNA
atggccttcatggagaagcccccagctgggaaggtgctgctggatgacacagtgcccctgacagctgccatcgaggccagccagagcctgcagagccacaccatcgccggcctgagcctgcccctgccccccaagaagctgattggcaacatggaccgggagttcatcgccgagcggcagaagggcctgcagaactacctgaatgtcatcaccaccaaccacatcctgagcaactgtgagctggtgaagaagttcctggaccccaacaactacagcgccaactacacagagatcgccctgcagcaggtgtccatgttcttccgctctgagcccaagtgggaggtggtggagcccctgaaggacatcggctggaggatcaggaagaagtacttcctgatgaagatcaagaaccagcccaaggagcggctggtgctgtcctgggccgacctgggccctgacaagtacctgagtgacaaggacttccagtgcctgatcaagctgctgcccagctgcctgcacccctacatctacagagtgacctttgccacagccaatgaaagcagcgccctgctgatccgcatgtttaatgagaagggcaccctgaaggacctgatctacaaggccaagcccaaggaccccttcctgaagaagtactgcaaccccaagaagatccagggcctggagctgcagcagatcaagacctacggccggcagatcctggaggtgctgaagttcctgcatgacaagggcttcccctacggccacctgcacgccagcaatgtgatgctggatggagacacctgccgcctgctggacctggagaacagcctgctgggcctgcccagcttctaccgcagctacttcagccagttcaggaagatcaacaccctggagagcgtggatgtgcactgcttcggccacctgctgtatgagatgacctacggccggcccccagacagcgtgcctgtggacagcttccccccagcccccagcatggctgtggtggccgtgctggagagcaccctgagctgtgaggcctgcaagaatggcatgcccaccatcagccggctgctgcagatgcccctcttcagtgatgtgctgctgaccaccagcgagaagccccagttcaagatccccaccaagctgaaggaggccctgcgcatcgccaaggaatgtattgagaagaggctcatcgaggagcagaagcagatccaccagcaccggcggctgacccgggcccagagccaccacggcagcgaggaggagaggaagaagaggaagatcctggccaggaagaagagcaagaggtctgccctggagaacagcgaggagcacagcgccaagtacagcaacagcaacaacagcgctggcagcggggccagcagccccctgaccagccccagcagccccaccccacccagcaccagcggcatcagcgccctgcccccacctcctcctcctcctcctcctcctgctgcccccctgcccccagccagcacagaggccccagcccagctgagcagccaggccgtgaatggcatgagcagaggagccctgctgagcagcatccagaacttccagaagggcaccctgaggaaggccaagacctgtgaccacagcgcccccaagattggatag

SEQ ID NO: 166699 - DNA, 1548 bp, synthetic construct
  misc_feature 1..1548: note = Description of Artificial Sequence: Synthetic coding sequence
  source 1..1548: mol_type = other DNA
atggccttcatggagaagcccccagctgggaaggtgctgctggatgacacagtgcccctgacagctgccatcgaggccagccagagcctgcagagccacacagagtacatcatccgggtgcagaggggcatctctgtggagaacagctggcagatcgtgcggcgctacagcgactttgacctgctgaacaacagcctgcagattgctggcctgagcctgcccctgccccccaagaagctgattggcaacatggaccgggagttcatcgccgagcggcagaagggcctgcagaactacctgaatgtcatcaccaccaaccacatcctgagcaactgtgagctggtgaagaagttcctggaccccaacaactacagcgccaactacacagaaattgccctgcagcaggtgtccatgttcttccgctctgagcccaagtgggaggtggtggagcccctgaaggacatcggctggaggatcaggaagaagtacttcctgatgaagatcaagaaccagcccaaggagcggctggtgctgtcctgggccgacctgggccctgacaagtacctgagtgacaaggacttccagtgcctgatcaagctgctgcccagctgcctgcacccctacatctacagagtgacctttgccacagccaatgaatcttctgccctgctgatccgcatgtttaatgagaagggcaccctgaaggacctgatctacaaggccaagcccaaggaccccttcctgaagaagtactgcaaccccaagaagatccagggcctggagctgcagcagatcaagacctacggccggcagatcctggaggtgctgaagttcctgcatgacaagggcttcccctacggccacctgcacgccagcaatgtgatgctggatggagacacctgccgcctgctggacctggagaacagcctgctgggcctgcccagcttctaccgcagctacttcagccagttcaggaagatcaacaccctggagagcgtggatgtgcactgcttcggccacctgctgtatgagatgacctacggccggcccccagattctgtgcctgtggacagcttccccccagcccccagcatggctgtggtggccgtgctggagagcaccctgagctgtgaggcctgcaagaatggcatgcccaccatcagccggctgctgcagatgcccctcttcagtgatgtgctgctgaccaccagcgagaagccccagttcaagatccccaccaagctgaaggaggccctgagaattgccaaggagtgcatcgagaagaggctgattgaggagcagaagcagatccaccagcaccggcggctgacccgggcccagagccaccacggcagcgaggaggagaggaagaagaggaagatcctggccaggaagaagagcaagaggtctgccctggagaacagcgaggagcacagcgccaagtacagcaacagcaacaacagcgctggcagcggggccagcagccccctgaccagccccagcagccccaccccacccagcacctctgtggagcacgcccccttctag

SEQ ID NO: 166700 - DNA, 1326 bp, synthetic construct
  misc_feature 1..1326: note = Description of Artificial Sequence: Synthetic coding sequence
  source 1..1326: mol_type = other DNA
atgttcttccgctctgagcccaagtgggaggtggtggagcccctgaaggacatcggctggaggatcaggaagaagtacttcctgatgaagatcaagaaccagcccaaggagcggctggtgctgtcctgggccgacctgggccctgacaagtacctgagtgacaaggacttccagtgcctgatcaagctgctgcccagctgcctgcacccctacatctacagagtgacctttgccacagccaatgaaagcagcgccctgctgatccgcatgtttaatgagaagggcaccctgaaggacctgatctacaaggccaagcccaaggaccccttcctgaagaagtactgcaaccccaagaagatccagggcctggagctgcagcagatcaagacctacggccggcagatcctggaggtgctgaagttcctgcatgacaagggcttcccctacggccacctgcacgccagcaatgtgatgctggatggagacacctgccgcctgctggacctggagaacagcctgctgggcctgcccagcttctaccgcagctacttcagccagttcaggaagatcaacaccctggagagcgtggatgtgcactgcttcggccacctgctgtatgagatgacctacggccggcccccagacagcgtgcctgtggacagcttccccccagcccccagcatggctgtggtggccgtgctggagagcaccctgagctgtgaggcctgcaagaatggcatgcccaccatcagccggctgctgcagatgcccctcttcagtgatgtgctgctgaccaccagcgagaagccccagttcaagatccccaccaagctgaaggaggccctgcgcatcgccaaggaatgtattgagaagaggctcatcgaggagcagaagcagatccaccagcaccggcggctgacccgggcccagagccaccacggcagcgaggaggagaggaagaagaggaagatcctggccaggaagaagagcaagaggtctgccctggagaacagcgaggagcacagcgccaagtacagcaacagcaacaacagcgctggcagcggggccagcagccccctgaccagccccagcagccccaccccacccagcaccagcggcatcagcgccctgcccccacctcctcctcctcctcctcctcctgctgcccccctgcccccagccagcacagaggccccagcccagctgagcagccaggccgtgaatggcatgagcagaggagccctgctgagcagcatccagaacttccagaagggcaccctgaggaaggccaagacctgtgaccacagcgcccccaagattggatag

SEQ ID NO: 166701 - DNA, 1005 bp, synthetic construct
  misc_feature 1..1005: note = Description of Artificial Sequence: Synthetic coding sequence
  source 1..1005: mol_type = other DNA
atgttcttccgctctgagcccaagtgggaggtggtggagcccctgaaggacatcggctggaggatcaggaagaagtacttcctgatgaagatcaagaaccagcccaaggagcggctggtgctgtcctgggccgacctgggccctgacaagtacctgagtgacaaggacttccagtgcctgatcaagctgctgcccagctgcctgcacccctacatctacagagtgacctttgccacagccaatgaaagcagcgccctgctgatccgcatgtttaatgagaagggcaccctgaaggacctgatctacaaggccaagcccaaggaccccttcctgaagaagtactgcaaccccaagaagatccagggcctggagctgcagcagatcaagacctacggccggcagatcctggaggtgctgaagttcctgcatgacaagggcttcccctacggccacctgcacgccagcaatgtgatgctggatggagacacctgccgcctgctggacctggagaacagcctgctgggcctgcccagcttctaccgcagctacttcagccagttcaggaagatcaacaccctggagagcgtggatgtgcactgcttcggccacctgctgtatgagatgacctacggccggcccccagacagcgtgcctgtggacagcttccccccagcccccagcatggctgtggtggccgtgctggagagcaccctgagctgtgaggcctgcaagaatggcatgcccaccatcagccggctgctgcagatgcccctcttcagtgatgtgctgctgaccaccagcgagaagccccagttcaagatccccaccaagctgaaggaggccctgcgcatcgccaaggaatgtattgagaagaggctcatcgaggagcagaagcagatccaccagcaccggcggctgacccgggcccagagccaccacggcagcgaggaggagaggaagaagaaggacttcagcagcaaggaggtgaagaccatctgcagctag

SEQ ID NO: 166702 - DNA, 1110 bp, synthetic construct
  misc_feature 1..1110: note = Description of Artificial Sequence: Synthetic coding sequence
  source 1..1110: mol_type = other DNA
atgaagagccctgagaagaagaggaggaagagcaacacccagggccctgcctacagccacctgacagaatttgcccccccacccacccccatggtggaccacctggtggccagcaacccctttgaagatgactttggagcccccaaggtgggcgtggccgccccacccttcctgggcagccctgtgccctttggaggcttccgggtgcagggcggcatggccggccaggtgcccccaggctacagcactggaggcggcggcggcccccagcccctgcggcggcagcccccacccttcccccccaaccccatgggccctgccttcaacatgccaccccagggccctggctacccacctcctggcaacatgaacttccccagccagcccttcaaccagcccctgggccagaacttcagcccccccagcggccagatgatgcctggccctgtgggcggcttcggccccatgatcagccccaccatgggccagccccccagggctgagctgggcccccccagcctgagccagagatttgcccagcccggggcccccttcggccccagccccctgcagaggcctggccagggcctgcccagcctgccccccaacaccagccccttccctggccctgaccccggcttccctggccctggaggagaagatggcggcaagcccctgaaccccccagccagcacagccttcccccaggagccccacagcggcagccctgctgctgctgtgaatggaaaccagcccagcttcccccccaacagcagcggccggggcggcggcaccccagatgccaacagcctggcccctcctgggaaggccggcggcggcagcggcccccagcccccacctggcctggtgtacccctgtggggcctgccgctctgaggtgaatgatgaccaggatgccatcctgtgtgaggccagctgccagaagtggttccaccgggagtgcaccggcatgacagaaagtgcctacggcctgctgaccacagaggccagcgctgtgtgggcctgtgacctgtgcctgaagaccaaggagatccagagcgtgtacatccgggagggcatgggccagctggtggccgccaatgatggatag

SEQ ID NO: 166703 - DNA, 1221 bp, synthetic construct
  misc_feature 1..1221: note = Description of Artificial Sequence: Synthetic coding sequence
  source 1..1221: mol_type = other DNA
atggccgccagcgcccctcctcctccagacaagctggagggcggcggcggccctgcccctcctccagccccacccagcactggaaggaagcagggcaaggccggcctgcagatgaagagccctgagaagaagaggaggaagagcaacacccagggccctgcctacagccacctgacagaatttgcccccccacccacccccatggtggaccacctggtggccagcaacccctttgaagatgactttggagcccccaaggtgggcgtggccgccccacccttcctgggcagccctgtgccctttggaggcttccgggtgcagggcggcatggccggccaggtgcccccaggctacagcactggaggcggcggcggcccccagcccctgcggcggcagcccccacccttcccccccaaccccatgggccctgccttcaacatgccaccccagggccctggctacccacctcctggcaacatgaacttccccagccagcccttcaaccagcccctgggccagaacttcagccccccatctggccagatgatgcctggccctgtgggcggcttcggccccatgatcagccccaccatgggccagccccccagggctgagctgggcccccccagcctgagccagagatttgcccagcccggggcccccttcggccccagccccctgcagaggcctggccagggcctgcccagcctgccccccaacaccagccccttccctggccctgaccccggcttccctggccctggaggagaagatggcggcaagcccctgaaccccccagccagcacagccttcccccaggagccccacagcggcagccctgctgctgctgtgaatggaaaccagcccagcttcccccccaacagcagcggccggggcggcggcaccccagatgccaacagcctggcccctcctgggaaggccggcggcggcagcggcccccagcccccacctggcctggtgtacccctgtggggcctgccgctctgaggtgaatgatgaccaggatgccatcctgtgtgaggccagctgccagaagtggttccacagagaatgtacaggcatgacagagagcgcctacggcctgctgaccacagaggccagcgctgtgtgggcctgtgacctgtgcctgaagaccaaggagatccagagcgtgtacatccgggagggcatgggccagctggtggccgccaatgatggatag

SEQ ID NO: 166704 - DNA, 939 bp, synthetic construct
  misc_feature 1..939: note = Description of Artificial Sequence: Synthetic coding sequence
  source 1..939: mol_type = other DNA
atggaggaggagtgccgggtgctgagcatccagagccacgtgatccggggctacgtgggcaacagagctgccaccttccccctgcaggtgctgggctttgaaattgatgctgtgaacagcgtgcagttcagcaaccacacaggctacgcccactggaagggccaggtgctgaacagtgatgagctgcaggagctgtatgagggcctgcggctgaacaacatgaacaagtatgactatgtgctgaccggctacacccgggacaagagcttcctggccatggtggtggacatcgtgcaggagctgaagcagcagaacccccggctggtgtatgtgtgtgaccctgtgctgggggacaagtgggatggagagggctccatgtatgtgcctgaggacctgctgcctgtgtacaaggagaaggtggtgcccctggccgacatcatcacccccaaccagtttgaggccgagctgctgagcggcaggaagatccacagccaggaggaggccctgcgggtgatggacatgctgcacagcatgggccctgacacagtggtgatcaccagcagtgacctgcccagcccccagggcagcaactacctgattgtgctgggcagccagaggagaagaaatcctgctggctctgtggtgatggagcgcatccgcatggacatcaggaaggtggatgctgtgtttgtgggcactggagacctgtttgctgccatgctgctggcctggacccacaagcaccccaacaacctgaaggtggcctgtgagaagacagtgtccaccctgcaccacgtgctgcagaggaccatccagtgtgccaaggcccaggccggggagggcgtgcggcccagccccatgcagctggagctgaggatggtgcagagcaagagggacattgaagatcctgagatcgtggtgcaggccaccgtgctgtag

SEQ ID NO: 166705 - DNA, 855 bp, synthetic construct
  misc_feature 1..855: note = Description of Artificial Sequence: Synthetic coding sequence
  source 1..855: mol_type = other DNA
atggaggaggagtgccgggtgctgagcatccagagccacgtgatccggggctacgtgggcaacagagctgccaccttccccctgcaggtgctgggctttgaaattgatgctgtgaacagcgtgcagttcagcaaccacacaggctacgcccactggaagggccaggtgctgaacagtgatgagctgcaggagctgtatgagggcctgcggctgaacaacatgaacaagtatgactatgtgctgactgtgtgtgaccctgtgctgggggacaagtgggatggagagggctccatgtatgtgcctgaggacctgctgcctgtgtacaaggagaaggtggtgcccctggccgacatcatcacccccaaccagtttgaggccgagctgctgagcggcaggaagatccacagccaggaggaggccctgcgggtgatggacatgctgcacagcatgggccctgacacagtggtgatcaccagcagtgacctgcccagcccccagggcagcaactacctgattgtgctgggcagccagaggagaagaaatcctgctggctctgtggtgatggagcgcatccgcatggacatcaggaaggtggatgctgtgtttgtgggcactggagacctgtttgctgccatgctgctggcctggacccacaagcaccccaacaacctgaaggtggcctgtgagaagacagtgtccaccctgcaccacgtgctgcagaggaccatccagtgtgccaaggcccaggccggggagggcgtgcggcccagccccatgcagctggagctgaggatggtgcagagcaagagggacattgaagatcctgagatcgtggtgcaggccaccgtgctgtag

SEQ ID NO: 166706 - DNA, 2322 bp, synthetic construct
  misc_feature 1..2322: note = Description of Artificial Sequence: Synthetic coding sequence
  source 1..2322: mol_type = other DNA
atgggcaagaacctgaaggaggccgtgaagatgctggaggacagccagaggagaacagaggaggagaatggcaagaagctgatcagcggggacatccctggccccctgcagggcagcggccaggacatggtgtccatcctgcagctggtgcagaacctgatgcatggagatgaagatgaggagccccagagcccccgcatccagaacatcggggagcagggccacatggccctgctgggccacagcctgggcgcctacatcagcaccctggacaaggagaagctgaggaagctgaccacccgcatcctgagtgacaccaccctgtggctgtgccgcatcttccgctatgaaaatggctgtgcctacttccacgaggaggagcgggagggcctggccaagatctgccgcctggccatccacagccgctatgaggactttgtggtggatggcttcaacgtgctgtacaacaagaagcctgtgatctacctgtctgctgctgcccggcccggcctgggccagtacctgtgcaaccagctgggcctgcccttcccctgcctgtgccgggtgccctgcaacacagtgtttggcagccagcaccagatggatgtggccttcctggagaagctgatcaaggatgacatcgagcggggccgcctgcccctgctgctggtggccaatgccggcacagctgctgtgggccacacagacaagattggccgcctgaaggagctgtgtgagcagtatggcatctggctgcacgtggagggcgtgaacctggccaccctggccctgggctacgtgagcagctctgtgctggccgccgccaagtgtgacagcatgaccatgaccccaggcccctggctgggcctgcctgctgtgcctgctgtgaccctgtacaagcatgatgatcctgccctgaccctggtggccggcctgaccagcaacaagcccacagacaagctgcgggccctgcccctgtggctgagcctgcagtacctgggcctggatggctttgtggagcgcatcaagcacgcctgccagctgagccagaggctgcaggagagcctgaagaaggtgaactacatcaagatcctggtggaggatgagctgagcagccctgtggtggtgttccgcttcttccaggagctgcccggcagtgaccccgtcttcaaggctgtgcctgtgcccaacatgaccccatctggagtgggccgggagcggcacagctgtgatgccctgaaccgctggctgggggagcagctgaagcagctggtgcctgccagcggcctgactgtgatggacctggaggccgagggcacctgcctgcgcttcagccccctgatgacagctgctgtgctgggcaccagaggagaagatgtggaccagctggtggcctgcatcgagagcaagctgcctgtgctgtgctgcaccctgcagctgcgggaggagttcaagcaggaggtggaggccacagctggcctgctgtatgtggatgaccccaactggagcggcattggagtggtgcgctatgagcacgccaatgatgacaagagcagcctgaagagtgaccctgaaggagagaacatccatgctggcctgctgaagaagctgaatgagctggagagtgacctgaccttcaagattggccctgagtacaagtccatgaagagctgcctgtatgtgggcatggccagtgacaacgtggatgctgctgagctggtggagaccatcgccgccacagcccgggagattgaggagaacagccggctgctggagaacatgacagaggtggtgaggaagggcatccaggaggcccaggtggagctgcagaaggccagcgaggagcggctgctggaggagggcgtgctgcggcagatccctgtggtgggctctgtgctgaactggttcagccctgtgcaggccctgcagaagggccgcaccttcaacctgacagctggcagcctggagagcacagagcccatctacgtgtacaaggcccagggcgctggggtgaccctgccccccacccccagcggcagcaggaccaagcagaggctgcccggccagaagcccttcaagaggagcctgcggggcagtgatgccctgtctgagaccagctctgtgagccacatcgaggacctggagaaggtggagcggctgagcagcggccctgagcagatcaccctggaggccagcagcacagagggccaccctggggcccccagcccccagcacacagaccagacagaggccttccagaagggcgtgccccacccagaagatgaccacagccaggtggagggccctgagagcctgaggtag

SEQ ID NO: 166707 - DNA, 2367 bp, synthetic construct
  misc_feature 1..2367: note = Description of Artificial Sequence: Synthetic coding sequence
  source 1..2367: mol_type = other DNA
atggatgccagcctggagaagattgctgaccccaccctggccgagatgggcaagaacctgaaggaggccgtgaagatgctggaggacagccagaggagaacagaggaggagaatggcaagaagctgatcagcggggacatccctggccccctgcagggcagcggccaggacatggtgtccatcctgcagctggtgcagaacctgatgcatggagatgaagatgaggagccccagagcccccgcatccagaacattggagagcagggccacatggccctgctgggccacagcctgggcgcctacatcagcaccctggacaaggagaagctgaggaagctgaccacccgcatcctgagtgacaccaccctgtggctgtgccgcatcttccgctatgaaaatggctgtgcctacttccacgaggaggagcgggagggcctggccaagatctgccgcctggccatccacagccgctatgaagattttgtggtggatggcttcaacgtgctgtacaacaagaagcctgtgatctacctgtctgctgctgcccggcccggcctgggccagtacctgtgcaaccagctgggcctgcccttcccctgcctgtgccgggtgccctgcaacacagtgtttggcagccagcaccagatggatgtggccttcctggagaagctgatcaaggatgacatcgagcggggccgcctgcccctgctgctggtggccaatgccggcacagctgctgtgggccacacagacaagattggccgcctgaaggagctgtgtgagcagtatggcatctggctgcacgtggagggcgtgaacctggccaccctggccctgggctacgtgagcagctctgtgctggccgccgccaagtgtgacagcatgaccatgaccccaggcccctggctgggcctgcctgctgtgcctgctgtgaccctgtacaagcatgatgatcctgccctgaccctggtggccggcctgaccagcaacaagcccacagacaagctgcgggccctgcccctgtggctgagcctgcagtacctgggcctggatggctttgtggagcgcatcaagcacgcctgccagctgagccagaggctgcaggagagcctgaagaaggtgaactacatcaagatcctggtggaggatgagctgagcagccctgtggtggtgttccgcttcttccaggagctgcccggcagtgaccctgtgttcaaggctgtgcctgtgcccaacatgacccccagcggcgtgggccgggagcggcacagctgtgatgccctgaaccgctggctgggggagcagctgaagcagctggtgcctgccagcggcctgactgtgatggacctggaggccgagggcacctgcctgcgcttcagccccctgatgacagctgctgtgctgggcaccagaggagaagatgtggaccagctggtggcctgcatcgagagcaagctgcctgtgctgtgctgcaccctgcagctgcgggaggagttcaagcaggaggtggaggccacagctggcctgctgtatgtggatgaccccaactggagcggcatcggcgtggtgcgctatgaacatgccaatgatgacaagagcagcctgaagagtgaccctgagggggagaacatccacgccggcctgctgaagaagctgaatgagctggagagtgacctgaccttcaagattggccctgagtacaagtccatgaagagctgcctgtatgtgggcatggccagtgacaacgtggatgctgctgagctggtggagaccatcgccgccacagcccgggagattgaggagaacagccggctgctggagaacatgacagaggtggtgaggaagggcatccaggaggcccaggtggagctgcagaaggccagcgaggagcggctgctggaggagggcgtgctgcggcagatccctgtggtgggctctgtgctgaactggttcagccctgtgcaggccctgcagaagggccgcaccttcaacctgacagctggcagcctggagagcacagagcccatctacgtgtacaaggcccagggcgctggggtgaccctgccccccaccccatctggcagcaggaccaagcagaggctgcccggccagaagcccttcaagaggagcctgcggggcagtgatgccctgtctgagaccagctctgtgagccacatcgaggacctggagaaggtggagcggctgagcagcggccctgagcagatcaccctggaggccagcagcacagagggccaccctggggcccccagcccccagcacacagaccagacagaggccttccagaagggcgtgccccacccagaagatgaccacagccaggtggagggccctgagagcctgaggtag

SEQ ID NO: 166708 - DNA, 2094 bp, synthetic construct
  misc_feature 1..2094: note = Description of Artificial Sequence: Synthetic coding sequence
  source 1..2094: mol_type = other DNA
atgggcaagaacctgaaggaggccgtgaagatgctggaggacagccagaggagaacagaggaggagaatggcaagaagctgatcagcggggacatccctggccccctgcagggccgctatgaaaatggctgtgcctacttccacgaggaggagcgggagggcctggccaagatctgccgcctggccatccacagccgctatgaggactttgtggtggatggcttcaacgtgctgtacaacaagaagcctgtgatctacctgtctgctgctgcccggcccggcctgggccagtacctgtgcaaccagctgggcctgcccttcccctgcctgtgccgggtgccctgcaacacagtgtttggcagccagcaccagatggatgtggccttcctggagaagctgatcaaggatgacatcgagcggggccgcctgcccctgctgctggtggccaatgccggcacagctgctgtgggccacacagacaagattggccgcctgaaggagctgtgtgagcagtatggcatctggctgcacgtggagggcgtgaacctggccaccctggccctgggctacgtgagcagctctgtgctggccgccgccaagtgtgacagcatgaccatgaccccaggcccctggctgggcctgcctgctgtgcctgctgtgaccctgtacaagcatgatgatcctgccctgaccctggtggccggcctgaccagcaacaagcccacagacaagctgcgggccctgcccctgtggctgagcctgcagtacctgggcctggatggctttgtggagcgcatcaagcacgcctgccagctgagccagaggctgcaggagagcctgaagaaggtgaactacatcaagatcctggtggaggatgagctgagcagccctgtggtggtgttccgcttcttccaggagctgcccggcagtgaccccgtcttcaaggctgtgcctgtgcccaacatgaccccatctggagtgggccgggagcggcacagctgtgatgccctgaaccgctggctgggggagcagctgaagcagctggtgcctgccagcggcctgactgtgatggacctggaggccgagggcacctgcctgcgcttcagccccctgatgacagctgctgtgctgggcaccagaggagaagatgtggaccagctggtggcctgcatcgagagcaagctgcctgtgctgtgctgcaccctgcagctgcgggaggagttcaagcaggaggtggaggccacagctggcctgctgtatgtggatgaccccaactggagcggcattggagtggtgcgctatgagcacgccaatgatgacaagagcagcctgaagagtgaccctgaaggagagaacatccatgctggcctgctgaagaagctgaatgagctggagagtgacctgaccttcaagattggccctgagtacaagtccatgaagagctgcctgtatgtgggcatggccagtgacaacgtggatgctgctgagctggtggagaccatcgccgccacagcccgggagattgaggagaacagccggctgctggagaacatgacagaggtggtgaggaagggcatccaggaggcccaggtggagctgcagaaggccagcgaggagcggctgctggaggagggcgtgctgcggcagatccctgtggtgggctctgtgctgaactggttcagccctgtgcaggccctgcagaagggccgcaccttcaacctgacagctggcagcctggagagcacagagcccatctacgtgtacaaggcccagggcgctggggtgaccctgccccccacccccagcggcagcaggaccaagcagaggctgcccggccagaagcccttcaagaggagcctgcggggcagtgatgccctgtctgagaccagctctgtgagccacatcgaggacctggagaaggtggagcggctgagcagcggccctgagcagatcaccctggaggccagcagcacagagggccaccctggggcccccagcccccagcacacagaccagacagaggccttccagaagggcgtgccccacccagaagatgaccacagccaggtggagggccctgagagcctgaggtag

SEQ ID NO: 166709 - DNA, 2283 bp, synthetic construct
  misc_feature 1..2283: note = Description of Artificial Sequence: Synthetic coding sequence
  source 1..2283: mol_type = other DNA
atggatgccagcctggagaagattgctgaccccaccctggccgagatgggcaagaacctgaaggaggccgtgaagatgctggaggacagccagaggacagaggaggagaatggcaagaagctgatcagcggggacatccctggccccctgcagggccgcatccagaacattggagagcagggccacatggccctgctgggccacagcctgggcgcctacatcagcaccctggacaaggagaagctgaggaagctgaccacccgcatcctgagtgacaccaccctgtggctgtgccgcatcttccgctatgaaaatggctgtgcctacttccacgaggaggagcgggagggcctggccaagatctgccgcctggccatccacagccgctatgaagattttgtggtggatggcttcaacgtgctgtacaacaagaagcctgtgatctacctgtctgctgctgcccggcccggcctgggccagtacctgtgcaaccagctgggcctgcccttcccctgcctgtgccgggtgccctgcaacacagtgtttggcagccagcaccagatggatgtggccttcctggagaagctgatcaaggatgacatcgagcggggccgcctgcccctgctgctggtggccaatgccggcacagctgctgtgggccacacagacaagattggccgcctgaaggagctgtgtgagcagtatggcatctggctgcacgtggagggcgtgaacctggccaccctggccctgggctacgtgagcagctctgtgctggccgccgccaagtgtgacagcatgaccatgaccccaggcccctggctgggcctgcctgctgtgcctgctgtgaccctgtacaagcatgatgatcctgccctgaccctggtggccggcctgaccagcaacaagcccacagacaagctgcgggccctgcccctgtggctgagcctgcagtacctgggcctggatggctttgtggagcgcatcaagcacgcctgccagctgagccagaggctgcaggagagcctgaagaaggtgaactacatcaagatcctggtggaggatgagctgagcagccctgtggtggtgttccgcttcttccaggagctgcccggcagtgaccctgtgttcaaggctgtgcctgtgcccaacatgacccccagcggcgtgggccgggagcggcacagctgtgatgccctgaaccgctggctgggggagcagctgaagcagctggtgcctgccagcggcctgactgtgatggacctggaggccgagggcacctgcctgcgcttcagccccctgatgacagctgctgtgctgggcaccagaggagaagatgtggaccagctggtggcctgcatcgagagcaagctgcctgtgctgtgctgcaccctgcagctgcgggaggagttcaagcaggaggtggaggccacagctggcctgctgtatgtggatgaccccaactggagcggcatcggcgtggtgcgctatgaacatgccaatgatgacaagagcagcctgaagagtgaccctgagggggagaacatccacgccggcctgctgaagaagctgaatgagctggagagtgacctgaccttcaagattggccctgagtacaagtccatgaagagctgcctgtatgtgggcatggccagtgacaacgtggatgctgctgagctggtggagaccatcgccgccacagcccgggagattgaggagaacagccggctgctggagaacatgacagaggtggtgaggaagggcatccaggaggcccaggtggagctgcagaaggccagcgaggagcggctgctggaggagggcgtgctgcggcagatccctgtggtgggctctgtgctgaactggttcagccctgtgcaggccctgcagaagggccgcaccttcaacctgacagctggcagcctggagagcacagagcccatctacgtgtacaaggcccagggcgctggggtgaccctgccccccaccccatctggcagcaggaccaagcagaggctgcccggccagaagcccttcaagaggagcctgcggggcagtgatgccctgtctgagaccagctctgtgagccacatcgaggacctggagaaggtggagcggctgagcagcggccctgagcagatcaccctggaggccagcagcacagagggccaccctggggcccccagcccccagcacacagaccagacagaggccttccagaagggcgtgccccacccagaagatgaccacagccaggtggagggccctgagagcctgaggtag

SEQ ID NO: 166710 - DNA, 1290 bp, synthetic construct
  misc_feature 1..1290: note = Description of Artificial Sequence: Synthetic coding sequence
  source 1..1290: mol_type = other DNA
ctgagcagcaccctgcggagaattgctgaccccaccctggccgagatgggcaagaacctgaaggaggccgtgaagatgctggaggacagccagaggagaacagaggaggagaatggcaagaagctgatcagcggggacatccctggccccctgcagggcagcggccaggacatggtgtccatcctgcagctggtgcagaacctgatgcatggagatgaagatgaggagccccagagcccccgcatccagaacattggagagcagggccacatggccctgctgggccacagcctgggcgcctacatcagcaccctggacaaggagaagctgaggaagctgaccacccgcatcctgagtgacaccaccctgtggctgtgccgcatcttccgctatgaaaatggctgtgcctacttccacgaggaggagcgggagggcctggccaagatctgccgcctggccatccacagccgctatgaagattttgtggtggatggcttcaacgtgctgtacaacaagaagcctgtgatctacctgtctgctgctgcccggcccggcctgggccagtacctgtgcaaccaggatgtggccttcctggagaagctgatcaaggatgacatcgagcggggccgcctgcccctgctgctggtggccaatgccggcacagctgctgtgggccacacagacaagattggccgcctgaaggagctgtgtgagcagtatggcatctggctgcacgtggagggcgtgaacctggccaccctggccctgggctacgtgagcagctctgtgctggccgccgccaagtgtgacagcatgaccatgaccccaggcccctggctgggcctgcctgctgtgcctgctgtgaccctgtacaagcatgatgatcctgccctgaccctggtggccggcctgaccagcaacaagcccacagacaagctgcgggccctgcccctgtggctgagcctgcagtacctgggcctggatggctttgtggagcgcatcaagcacgcctgccagctgagccagaggctgcaggagagcctgaagaaggtgaactacatcaagatcctggtggaggatgagctgagcagccctgtggtggtgttccgcttcttccaggagctgcccggcagtgaccccgtcttcaaggctgtgcctgtgcccaacatgaccccatctggagtgggccgggagcggcacagctgtgatgccctgaaccgctgggtgaggatggctgtgacccccctgtccttccaggtgcctgtgcaccaccaccccacctgctggtag

SEQ ID NO: 166711 - DNA, 1497 bp, synthetic construct
  misc_feature 1..1497: note = Description of Artificial Sequence: Synthetic coding sequence
  source 1..1497: mol_type = other DNA
atggatgccagcctggagaagattgctgaccccaccctggccgagatgggcaagaacctgaaggaggccgtgaagatgctggaggacagccagaggagaacagaggaggagaatggcaagaagctgatcagcggggacatccctggccccctgcagggcagcggccaggacatggtgtccatcctgcagctggtgcagaacctgatgcatggagatgaagatgaggagccccagagcccccgcatccagaacattggagagcagggccacatggccctgctgggccacagcctgggcgcctacatcagcaccctggacaaggagaagctgaggaagctgaccacccgcatcctgagtgacaccaccctgtggctgtgccgcatcttccgctatgaaaatggctgtgcctacttccacgaggaggagcgggagggcctggccaagatctgccgcctggccatccacagccgctatgaagattttgtggtggatggcttcaacgtgctgtacaacaagaagcctgtgatctacctgtctgctgctgcccggcccggcctgggccagtacctgtgcaaccagctgggcctgcccttcccctgcctgtgccgggtgccctgcaacacagtgtttggcagccagcaccagatggatgtggccttcctggagaagctgatcaaggatgacatcgagcggggccgcctgcccctgctgctggtggccaatgccggcacagctgctgtgggccacacagacaagattggccgcctgaaggagctgtgtgagcagtatggcatctggctgcacgtggagggcgtgaacctggccaccctggccctgggctacgtgagcagctctgtgctggccgccgccaagtgtgacagcatgaccatgaccccaggcccctggctgggcctgcctgctgtgcctgctgtgaccctgtacaagcatgatgatcctgccctgaccctggtggccggcctgaccagcaacaagcccacagacaagctgcgggccctgcccctgtggctgagcctgcagtacctgggcctggatggctttgtggagcgcatcaagcacgcctgccagctgagccagaggctgcaggagagcctgaagaaggtgaactacatcaagatcctggtggaggatgagctgagcagccctgtggtggtgttccgcttcttccaggagctgcccggcagtgaccctgtgttcaaggctgtgcctgtgcccaacatgacccccagcggcgtgggccgggagcggcacagctgtgatgccctgaaccgctggctgggggagcagctgaagcagctggtgcctgccagcggcctgactgtgatggacctggaggccgagggcacctgcctgcgcttcagccccctgatgacagctgctggctggagccactgcggcaccaccaccaggtatgactgtgtgcgcagccggctgaccacccggctgcccggcagcactggagagcaggcccctccttag

SEQ ID NO: 166712 - DNA, 615 bp, synthetic construct
  misc_feature 1..615: note = Description of Artificial Sequence: Synthetic coding sequence
  source 1..615: mol_type = other DNA
atgaccatgaccccaggcccctggctgggcctgcctgctgtgcctgctgtgaccctgtacaagcatgatgatcctgccctgaccctggtggccggcctgaccagcaacaagcccacagacaagctgcgggccctgcccctgtggctgagcctgcagtacctgggcctggatggctttgtggagcgcatcaagcacgcctgccagctgagccagaggctgcaggagagcctgaagaaggtgaactacatcaagatcctggtggaggatgagctgagcagccctgtggtggtgttccgcttcttccaggagctgcccggcagtgaccctgtgttcaaggctgtgcctgtgcccaacatgacccccagcggcgtgggccgggagcggcacagctgtgatgccctgaaccgctggctgggggagcagctgaagcagctggtgcctgccagcggcctgactgtgatggacctggaggccgagggcacctgcctgcgcttcagccccctgatgacagctgctggctggagccactgcggcaccaccaccaggtatgactgtgtgcgcagccggctgaccacccggctgcccggcagcactggagagcaggcccctccttag

SEQ ID NO: 166713 - DNA, 642 bp, synthetic construct
  misc_feature 1..642: note = Description of Artificial Sequence: Synthetic coding sequence
  source 1..642: mol_type = other DNA
atggaccccctcttccagcagacccacaagcaggtgcatgagatccagagctgcatgggccgcctggagacagctgacaagcagagcgtgcacatcgtggagaatgagatccaggccagcattgaccagatcttcagccggctggagcggctggagatcctgagcagcaaggagccccccaacaagaggcagaatgcccggctgcgggtggaccagctgaagtatgatgtgcagcacctgcagacagccctgaggaacttccagcacagaagacatgcccgggagcagcaggagcggcagcgggaggagctgctgagcaggaccttcaccaccaatgacagcgacaccaccatccccatggatgagagcctgcagttcaacagcagcctgcagaaggtgcacaacggcatggatgacctgatcctggatggccacaacatcctggatggcctgcggacccagaggctgaccctgaagggcacccagaagaagatcctggacatcgccaacatgctgggcctgagcaacacagtgatgaggctcatcgagaagagggccttccaggacaagtacttcatgattggcacccagggcagctgccagacagcccactttggaggccgctctgctggcagcagctag

SEQ ID NO: 166714 - DNA, 657 bp, synthetic construct
  misc_feature 1..657: note = Description of Artificial Sequence: Synthetic coding sequence
  source 1..657: mol_type = other DNA
atgacctgctggctgcggggcgtgacagccaccttcggccggcctgctgagtggccaggctacctgagccacctgtgtggccgctctgctgccatggacctgggccccatgaggaagagctacagaggagaccgggaggcctttgaggagacccacctgaccagcctggaccctgtgaagcagtttgctgcctggtttgaggaggccgtgcagtgcccagacattggagaggccaatgccatgtgcctggccacctgcaccagagatggcaagcccagcgccaggatgctgctgctgaagggctttgggaaggatggcttccgcttcttcaccaactttgagagcaggaagggcaaggagctggacagcaacccctttgccagcctggtgttctactgggagcccctgaaccggcagtacctgaggaagaagaatgaggagctggagcagctgtaccaggaccaggaggtgcccaagcccaagtcctggggcggctacgtgctgtacccccaggtgatggagttctggcagggccagaccaaccggctgcatgacagaattgtgttccggcggggcctgcccactggagacagccccctgggccccatgacccacagaggagaggaggactggctgtatgagcggctggccccctag

SEQ ID NO: 166715 - DNA, 501 bp, synthetic construct
  misc_feature 1..501: note = Description of Artificial Sequence: Synthetic coding sequence
  source 1..501: mol_type = other DNA
atgctgctgctgaagggctttgggaaggatggcttccgcttcttcaccaactttgagagcaggaagggcaaggagctggacagcaacccctttgccagcctggtgttctactgggagcccctgaaccggcaggtgcgggtggagggccctgtgaagaagctgcctgaggaggaggccgagtgctacttccacagccggcccaagagcagccagatcggggctgtggtgagccaccagagcagcgtcatcccagaccgggagtacctgaggaagaagaatgaggagctggagcagctgtaccaggaccaggaggtgcccaagcccaagtcctggggcggctacgtgctgtacccccaggtgatggagttctggcagggccagaccaaccggctgcatgacagaattgtgttccggcggggcctgcccactggagacagccccctgggccccatgacccacagaggagaggaggactggctgtatgagcggctggccccctag

SEQ ID NO: 166716 - DNA, 732 bp, synthetic construct
  misc_feature 1..732: note = Description of Artificial Sequence: Synthetic coding sequence
  source 1..732: mol_type = other DNA
atgacctgctggctgcggggcgtgacagccaccttcggccggcctgctgagtggccaggctacctgagccacctgtgtggccgctctgctgccatggacctgggccccatgaggaagagctacagaggagaccgggaggcctttgaggagacccacctgaccagcctggaccctgtgaagcagtttgctgcctggtttgaggaggccgtgcagtgcccagacattggagaggccaatgccatgtgcctggccacctgcaccagagatggcaagcccagcgccaggatgctgctgctgaagggctttgggaaggatggcttccgcttcttcaccaactttgagagcaggaagggcaaggagctggtgcgggtggagggccctgtgaagaagctgcctgaggaggaggccgagtgctacttccacagccggcccaagagcagccagattggagctgtggtgagccaccagagcagcgtcatcccagaccgggagtacctgaggaagaagaatgaggagctggagcagctgtaccaggaccaggaggtgcccaagcccaagtcctggggcggctacgtgctgtacccccaggtgatggagttctggcagggccagaccaaccggctgcatgaccgcatcgtgttcagaagaggcctgcccaccggggacagccccctgggccccatgacccacagaggagaggaggactggctgtatgaaaggctggccccctag

SEQ ID NO: 166717 - DNA, 1098 bp, synthetic construct
  misc_feature 1..1098: note = Description of Artificial Sequence: Synthetic coding sequence
  source 1..1098: mol_type = other DNA
atggccagcacagagagcagcctgctgcggagcctgggcctgagccctggccctggcagcagcgaggtggagctggactgctggtttgatgaggacttcaagttcatcctgctgcctgtgtcctatgctgtggtgtttgtgctgggcctgggcctgaatgcccccaccctgtggctgttcatcttccggctgcggccctgggatgccacagccacctacatgttccacctggccctgagtgacaccctgtatgtgctgagcctgcccaccctcatctactactatgctgcccacaaccactggccctttggaacagagatctgcaagtttgtgcgcttcctgttctactggaacctgtactgcagcgtgctcttcctgacctgcatctctgtgcaccgctacctgggcatctgccaccccctgcgggccctgcgctggggccggccccggctggccggcctgctgtgcctggccgtgtggctggtggtggccggctgcctggtgcccaacctcttctttgtgaccaccagcaacaagggcaccaccgtgctgtgccacgacaccaccaggcctgaggagtttgaccactacgtgcacttcagcagcgctgtgatgggcctgctgtttggagtgccctgcctggtgaccctggtgtgctacggcctgatggcccggcggctgtaccagcccctgcccggcagcgcccagagcagcagccggctgcggagcctgcggaccatcgctgtggtgctgactgtgtttgctgtgtgctttgtgcccttccacatcaccaggaccatctactacctggcccggctgctggaggccgactgccgggtgctgaacatcgtgaatgtggtgtacaaggtgacccggcccctggccagcgccaacagctgcctggaccctgtgctgtacctgctgactggagacaagtaccgccggcagctgcggcagctgtgtggcggcggcaagccccagcccaggacagctgccagcagcctggccctggtgtccctgcctgaggacagcagctgccgctgggccgccaccccccaggacagcagctgcagcacccccagggctgaccggctgtag

SEQ ID NO: 166718 - DNA, 987 bp, synthetic construct
  misc_feature 1..987: note = Description of Artificial Sequence: Synthetic coding sequence
  source 1..987: mol_type = other DNA
atggagtgggacaatggaacaggccaggccctgggcctgccccccaccacctgtgtgtaccgggagaacttcaagcagctgctgctgccccctgtgtacagcgctgtgctggccgccggcctgcccctgaacatctgtgtgatcacccagatctgcaccagcagaagagccctgaccaggacagctgtgtacaccctgaacctggccctggccgacctgctgtatgcctgcagcctgcccctgctgatctacaactatgcccagggcgaccactggccctttggagactttgcctgccgcctggtgcgcttcctgttctacgccaacctgcacggcagcatcctcttcctgacctgcatctccttccagcgctacctgggcatctgccaccccctggccccctggcacaagagaggaggaagaagagctgcctggctggtgtgtgtggccgtgtggctggccgtgaccacccagtgcctgcccacagccatctttgctgccaccggcatccagaggaacagaacagtgtgctatgacctgagccccccagccctggccacccactacatgccctacggcatggccctgactgtgattggcttcctgctgccctttgctgccctgctggcctgctactgcctgctggcctgccgcctgtgccggcaggacggccctgctgagcctgtggcccaggagcggcggggcaaggccgccaggatggctgtggtggtggccgccgcctttgccatctccttcctgcccttccacatcaccaagacagcctacctggccgtgcgcagcaccccaggagtgccctgcaccgtgctggaggcctttgctgctgcctacaagggcacccggccctttgccagcgccaacagcgtgctggaccccatcctcttctacttcacccagaagaagttcagaagaagacctcatgagctgctgcagaagctgacagccaagtggcagaggcagggccgctag

SEQ ID NO: 166719 - DNA, 987 bp, synthetic construct; identical to SEQ ID NO: 166718
  misc_feature 1..987: note = Description of Artificial Sequence: Synthetic coding sequence
  source 1..987: mol_type = other DNA

SEQ ID NO: 166720 - DNA, 987 bp, synthetic construct; identical to SEQ ID NO: 166718
  misc_feature 1..987: note = Description of Artificial Sequence: Synthetic coding sequence
  source 1..987: mol_type = other DNA

SEQ ID NO: 166721 - DNA, 987 bp, synthetic construct; identical to SEQ ID NO: 166718
  misc_feature 1..987: note = Description of Artificial Sequence: Synthetic coding sequence
  source 1..987: mol_type = other DNA

SEQ ID NO: 166722 - DNA, 738 bp, synthetic construct
  misc_feature 1..738: note = Description of Artificial Sequence: Synthetic coding sequence
  source 1..738: mol_type = other DNA
atggagtgggacaatggaacaggccaggccctgggcctgccccccaccacctgtgtgtaccgggagaacttcaagcagctgctgctgccccctgtgtacagcgctgtgctggccgccggcctgcccctgaacatctgtgtgatcacccagatctgcaccagcagaagagccctgaccaggacagctgtgtacaccctgaacctggccctggccgacctgctgtatgcctgcagcctgcccctgctgatctacaactatgcccagggcgaccactggccctttggagactttgcctgccgcctggtgcgcttcctgttctacgccaacctgcacggcagcatcctcttcctgacctgcatctccttccagcgctacctgggcatctgccaccccctggccccctggcacaagagaggaggaagaagagctgcctggctggtgtgtgtggccgtgtggctggccgtgaccacccagtgcctgcccacagccatctttgctgccaccggcatccagaggaacagaacagtgtgctatgacctgagccccccagccctggccacccactacatgccctacggcatggccctgactgtgattggcttcctgctgccctttgctgccctgctggcctgctactgcctgctggcctgccgcctgtgccggcaggacggccctgctgagcctgtggcccaggagcggcggggcaaggccgccaggatggctgtggtggtggcctag

SEQ ID NO: 166723 - DNA, 987 bp, synthetic construct; identical to SEQ ID NO: 166718
  misc_feature 1..987: note = Description of Artificial Sequence: Synthetic coding sequence
  source 1..987: mol_type = other DNA

SEQ ID NO: 166724 - DNA, 987 bp, synthetic construct; identical to SEQ ID NO: 166718
  misc_feature 1..987: note = Description of Artificial Sequence: Synthetic coding sequence
  source 1..987: mol_type = other DNA

SEQ ID NO: 166725 - DNA, 987 bp, synthetic construct; identical to SEQ ID NO: 166718
  misc_feature 1..987: note = Description of Artificial Sequence: Synthetic coding sequence
  source 1..987: mol_type = other DNA

SEQ ID NO: 166726 - DNA, 987 bp, synthetic construct; identical to SEQ ID NO: 166718
  misc_feature 1..987: note = Description of Artificial Sequence: Synthetic coding sequence
  source 1..987: mol_type = other DNA

SEQ ID NO: 166727 - DNA, 387 bp, synthetic construct
  misc_feature 1..387: note = Description of Artificial Sequence: Synthetic coding sequence
  source 1..387: mol_type = other DNA
atggagtgggacaatggaacaggccaggccctgggcctgccccccaccacctgtgtgtaccgggagaacttcaagcagctgctgctgccccctgtgtacagcgctgtgctggccgccggcctgcccctgaacatctgtgtgatcacccagatctgcaccagcagaagagccctgaccaggacagctgtgtacaccctgaacctggccctggccgacctgctgtatgcctgcagcctgcccctgctgatctacaactatgcccagggcgaccactggccctttggagactttgcctgccgcctggtgcgcttcctgttctacgccaacctgcacggcagcatcctcttcctgacctgcatctccttccagcgctacctgggcatctag

SEQ ID NO: 166728 - DNA, 738 bp, synthetic construct
  misc_feature 1..738: note = Description of Artificial Sequence: Synthetic coding sequence
  source 1..738: mol_type = other DNA
atggccaacaactacaagaagatcgtgctgctgaagggcctggaggtgatcaatgactaccacttccgcatcgtgaagagcctgctgagcaatgacctgaagctgaaccccaagatgaaggaggagtatgacaagatccagattgctgacctgatggaggagaagtttcctggagatgctggcctgggcaagctgattgagttcttcaaggagatccccaccctgggggacctggccgagaccctgaagcgggagaagctgaaggtggccaacaagattgagagcatccctgtgaagggcatcatccccagcaagaagaccaagcagaaggaggtgtacccagccaccccagcctgcacccccagcaaccggctgacagccaagggagctgaggagaccctgggcccccagaagaggaagaagcccagcgaggaggagaccggcaccaagaggagcaagatgagcaaggagcagacccggcccagctgcagcgctggggccagcaccagcacagccatgggccgcagccccccaccccagaccagcagcagcgccccacccaacaccagcagcacagaggcctacctgatgaacctgaccctgagcctgacagctggcagcttcctgagctgtgctgtgtggggccgggaccgggagctgaggaacctggagctgagcgccacagacagcctgagcacagcccccatctactacacccccatcccctttgcccactag

SEQ ID NO: 166729 - DNA, 1452 bp, synthetic construct
  misc_feature 1..1452: note = Description of Artificial Sequence: Synthetic coding sequence
  source 1..1452: mol_type = other DNA
atggccaacaactacaagaagatcgtgctgctgaagggcctggaggtgatcaatgactaccacttccgcatcgtgaagagcctgctgagcaatgacctgaagctgaaccccaagatgaaggaggagtatgacaagatccagattgctgacctgatggaggagaagtttcctggagatgctggcctgggcaagctgattgagttcttcaaggagatccccaccctgggggacctggccgagaccctgaagcgggagaagctgaaggtgaagggcatcatccccagcaagaagaccaagcagaaggaggtgtacccagccaccccagcctgcacccccagcaaccggctgacagccaagggagctgaggagaccctgggcccccagaagaggaagaagcccagcgaggaggagaccggcaccaagaggagcaagatgagcaaggagcagacccggcccagctgcagcgctggggccagcaccagcacagccatgggccgcagccccccaccccagaccagcagcagcgccccacccaacaccagcagcacagagagcctgaagcccctggccaacagacatgccacagccagcaagaacatcttccgggaggaccccatcatcgccatggtgctgaatgccaccaaggtgttcaagtatgagagcagtgaaaatgagcagaggaggatgtttcatgccaccgtggccacccagacccagttcttccacgtgaaggtgctgaacatcaacctgaagaggaagttcatcaagaagaggatcatcatcatcagcaactacagcaagaggaacagcctgctggaggtgaatgaggccagctctgtgtctgaggccggccctgaccagacctttgaggtgcccaaggacatcatcagaagagccaagaagatccccaagatcaacatcctgcacaagcagaccagcggctacatcgtgtatggcctcttcatgctgcacaccaagatcgtgaacaggaagaccaccatctatgagatccaggacaagacaggctccatggctgtggtgggcaaaggagagtgccacaacatcccctgtgagaagggggacaagctgcggctcttctgcttccggctgaggaagcgggagaacatgagcaagctgatgtctgagatgcacagcttcatccagatccagaagaacaccaaccagaggagccatgacagccgctccatggccctgccccaggagcagagccagcaccccaagcccagcgaggccagcaccaccctgcctgagagccacctgaagaccccccagatgccacccaccacccccagcagcagcagcttcaccaagaaggatgagacccaccctggggcccagagcagccctgccaacttccgcatcaccagccccaccgtggccccacccctgagcagtgacaccagcaccaacagacaccctgctgtgccctag

SEQ ID NO: 166730 - DNA, 1479 bp, synthetic construct
  misc_feature 1..1479: note = Description of Artificial Sequence: Synthetic coding sequence
  source 1..1479: mol_type = other DNA
atggccaacaactacaagaagatcgtgctgctgaagggcctggaggtgatcaatgactaccacttccgcatcgtgaagagcctgctgagcaatgacctgaagctgaaccccaagatgaaggaggagtatgacaagatccagattgctgacctgatggaggagaagtttcctggagatgctggcctgggcaagctgattgagttcttcaaggagatccccaccctgggggacctggccgagaccctgaagcgggagaagctgaaggtggccaacaagattgagagcatccctgtgaagggcatcatccccagcaagaagaccaagcagaaggaggtgtacccagccaccccagcctgcacccccagcaaccggctgacagccaagggagctgaggagaccctgggcccccagaagaggaagaagcccagcgaggaggagaccggcaccaagaggagcaagatgagcaaggagcagacccggcccagctgcagcgctggggccagcaccagcacagccatgggccgcagccccccaccccagaccagcagcagcgccccacccaacaccagcagcacagagagcctgaagcccctggccaacagacatgccacagccagcaagaacatcttccgggaggaccccatcatcgccatggtgctgaatgccaccaaggtgttcaagtatgagagcagtgaaaatgagcagaggaggatgttccacgccaccgtggccacccagacccagttcttccacgtgaaggtgctgaacatcaacctgaagaggaagttcatcaagaagaggatcatcatcatcagcaactacagcaagaggaacagcctgctggaggtgaatgaggccagctctgtgtctgaggccggccctgaccagacctttgaggtgcccaaggacatcatccggcgggccaagaagatccccaagatcaacatcctgcacaagcagaccagcggctacatcgtgtatggcctcttcatgctgcacaccaagatcgtgaacaggaagaccaccatctatgagatccaggacaagacaggctccatggctgtggtgggcaagggggagtgccacaacatcccctgtgagaagggggacaagctgcggctcttctgcttccggctgaggaagcgggagaacatgagcaagctgatgtctgagatgcacagcttcatccagatccagaagaacaccaaccagaggagccatgacagccgctccatggccctgccccaggagcagagccagcaccccaagcccagcgaggccagcaccaccctgcctgagagccacctgaagaccccccagatgccacccaccacccccagcagcagcagcttcaccaagaaggatgagacccaccctggggcccagagcagccctgccaacttccgcatcaccagccccaccgtggccccacccctgagcagtgacaccagcaccaacagacaccctgctgtgccctag

SEQ ID NO: 166731 - DNA, 1359 bp, synthetic construct
  misc_feature 1..1359: note = Description of Artificial Sequence: Synthetic coding sequence
  source 1..1359: mol_type = other DNA
atggccaacaactacaagaagatcgtgctgctgaagggcctggaggtgatcaatgactaccacttccgcatcgtgaagagcctgctgagcaatgacctgaagctgaaccccaagatgaaggaggagtatgacaagatccagattgctgacctgatggaggagaagtttcctggagatgctggcctgggcaagctgattgagttcttcaaggagatccccaccctgggggacctggccgagaccctgaagcgggagaagctgaaggtgaagggcatcatccccagcaagaagaccaagcagaaggaggtgtacccagccaccccagcctgcacccccagcaaccggctgacagccaagggagctgaggagaccctgggcccccagaagaggaagaagcccagcgaggaggagaccggcaccaagaggagcaagatgagcaaggagcagacccggcccagctgcagcgctggggccagcaccagcacagccatgggccgcagccccccaccccagaccagcagcagcgccccacccaacaccagcagcacagagagcctgaagcccctggccaacagacatgccacagccagcaagaacatcttccgggaggaccccatcatcgccatggtgctgaatgccaccaaggtgttcaagtatgagagcagtgaaaatgagcagaggaggatgtttcatgccaccgtggccacccagacccagttcttccacgtgaaggtgctgaacatcaacctgaagaggaagttcatcaagaagaggatcatcatcatcagcaactacagcaagaggaacagcctgctggaggtgaatgaggccagctctgtgtctgaggccggccctgaccagacctttgaggtgcccaaggacatcatcagaagagccaagaagatccccaagatcaacatcctgcacaagcagaccagcggctacatcgtgtatggcctcttcatgctgcacaccaagatcgtgaacaggaagaccaccatctatgagatccaggacaagacaggctccatggctgtggtgggcaaaggagagtgccacaacatcccctgtgagaagggggacaagctgcggctcttctgcttccggctgaggaagcgggagaacatgagcaagctgatgtctgagatgcacagcttcatccagatccagaagaacaccaaccagaggagccatgacagccgctccatggccctgccccaggagcagagccagcaccccaagcccagcgaggccagcaccaccctgcctgagagccacctgaagaccccccagatgccacccaccacccccagcagcagcagcttcaccaaggtgaccaaggacaaggacatcaagtag

SEQ ID NO: 166732 - DNA, 1386 bp, synthetic construct
  misc_feature 1..1386: note = Description of Artificial Sequence: Synthetic coding sequence
  source 1..1386: mol_type = other DNA
atggccaacaactacaagaagatcgtgctgctgaagggcctggaggtgatcaatgactaccacttccgcatcgtgaagagcctgctgagcaatgacctgaagctgaaccccaagatgaaggaggagtatgacaagatccagattgctgacctgatggaggagaagtttcctggagatgctggcctgggcaagctgattgagttcttcaaggagatccccaccctgggggacctggccgagaccctgaagcgggagaagctgaaggtggccaacaagattgagagcatccctgtgaagggcatcatccccagcaagaagaccaagcagaaggaggtgtacccagccaccccagcctgcacccccagcaaccggctgacagccaagggagctgaggagaccctgggcccccagaagaggaagaagcccagcgaggaggagaccggcaccaagaggagcaagatgagcaaggagcagacccggcccagctgcagcgctggggccagcaccagcacagccatgggccgcagccccccaccccagaccagcagcagcgccccacccaacaccagcagcacagagagcctgaagcccctggccaacagacatgccacagccagcaagaacatcttccgggaggaccccatcatcgccatggtgctgaatgccaccaaggtgttcaagtatgagagcagtgaaaatgagcagaggaggatgttccacgccaccgtggccacccagacccagttcttccacgtgaaggtgctgaacatcaacctgaagaggaagttcatcaagaagaggatcatcatcatcagcaactacagcaagaggaacagcctgctggaggtgaatgaggccagctctgtgtctgaggccggccctgaccagacctttgaggtgcccaaggacatcatccggcgggccaagaagatccccaagatcaacatcctgcacaagcagaccagcggctacatcgtgtatggcctcttcatgctgcacaccaagatcgtgaacaggaagaccaccatctatgagatccaggacaagacaggctccatggctgtggtgggcaagggggagtgccacaacatcccctgtgagaagggggacaagctgcggctcttctgcttccggctgaggaagcgggagaacatgagcaagctgatgtctgagatgcacagcttcatccagatccagaagaacaccaaccagaggagccatgacagccgctccatggccctgccccaggagcagagccagcaccccaagcccagcgaggccagcaccaccctgcctgagagccacctgaagaccccccagatgccacccaccacccccagcagcagcagcttcaccaaggtgaccaaggacaaggacatcaagtag

SEQ ID NO: 166733 - DNA, 453 bp, synthetic construct
  misc_feature 1..453: note = Description of Artificial Sequence: Synthetic coding sequence
  source 1..453: mol_type = other DNA
atggccaacaactacaagaagatcgtgctgctgaagggcctggaggtgatcaatgactaccacttccgcatcgtgaagagcctgctgagcaatgacctgaagctgaaccccaagatgaaggaggagtatgacaagatccagattgctgacctgatggaggagaagtttcctggagatgctggcctgggcaagctgattgagttcttcaaggagatccccaccctgggggacctggccgagaccctgaagcgggagaagctgaaggtggccaacaagattgagagcatccctgtgaagggcatcatccccagcaagaagaccaagcagaaggaggtgtacccagccaccccagcctgcacccccagcaaccggctgacagccaagggagctgaggagaccctgggcccccagaagaggaagaagcccagcgaggaggagaccggcaccaagtag

SEQ ID NO: 166734 - DNA, 399 bp, synthetic construct
  misc_feature 1..399: note = Description of Artificial Sequence: Synthetic coding sequence
  source 1..399: mol_type = other DNA
atggccaccaccgtgaccctggagaagtgtggccacaacaagggctacaagggcctggacaactgccgcttctgccccggcagccagtgctgcgtggaggatggccctgagagcattgacagcatcatcgacatggatgctgtgtgcaagagggtgaccaccctgggcctggatgtgtctgtgaccatcagccaggatgctggccgctacctgtgtgacttcacctactacaccagcctgtaccagagccacggccgcagcgcctttgtgcacgtgccccccctgggcaagccctacaatgctgaccagctgggccgggccctgcgggccatcatcgaggagatgctggacctgctggagcagagcgagggcaagatcaactactgccacaagcactag

SEQ ID NO: 166735 - DNA, 630 bp, synthetic construct
  misc_feature 1..630: note = Description of Artificial Sequence: Synthetic coding sequence
  source 1..630: mol_type = other DNA
atggagcagcccaggaaggctgtggtggtgactggatttggcccctttggagagcacacagtgaatgcctcctggattgctgtgcaggagctggagaagctgggcctgggggacagcgtggacctgcacgtgtatgagatccctgtggagtaccagacagtgcagaggctcatcccagccctgtgggagaagcacagcccccagctggtggtgcacgtgggcgtgtctggcatggccaccaccgtgaccctggagaagtgtggccacaacaagggctacaagggcctggacaactgccgcttctgccccggcagccagtgctgcgtggaggatggccctgagagcattgacagcatcatcgacatggatgctgtgtgcaagagggtgaccaccctgggcctggatgtgtctgtgaccatcagccaggatgctggccgctacctgtgtgacttcacctactacaccagcctgtaccagagccacggccgcagcgcctttgtgcacgtgccccccctgggcaagccctacaatgctgaccagctgggccgggccctgcgggccatcatcgaggagatgctggacctgctggagcagagcgagggcaagatcaactactgccacaagcactag

SEQ ID NO: 166736 - DNA, 609 bp, synthetic construct
  misc_feature 1..609: note = Description of Artificial Sequence: Synthetic coding sequence
  source 1..609: mol_type = other DNA
atgaagaaggccagaaatgatgaatatgagaacctcttcaacatgattgtggagatcccccgctggaccaatgccaagatggagatcgccaccaaggagcccatgaaccccatcaagcagtatgtgaaggatggcaagctgcgctacgtggccaacatcttcccctacaagggctacatctggaactacggcaccctgccccagacctgggaggacccccatgagaaggacaagagcaccaactgctttggagacaatgaccccattgatgtgtgtgagatcggcagcaagatcctgagctgtggggaggtgatccacgtgaagatcctgggcatcctggccctgattgatgaaggagaaacagactggaagctgattgccatcaatgccaatgaccctgaggccagcaagttccacggcctgaggaacatccctgtgtacaccatcaaccgcatcgtcatcctgcccagcctggacaggagccagaccagcagcctgagctacctgcctgcccaccaggacagctgtgtgcccctggatgctgccctgcacgtggtgctgtacttctgcagcctgctgggcctgcagagctacctgagctgcttctag

SEQ ID NO: 166737 - DNA, 1005 bp, synthetic construct
  misc_feature 1..1005: note = Description of Artificial Sequence: Synthetic coding sequence
  source 1..1005: mol_type = other DNA
atgtctgccctgctgcggctgctgaggactggagccccagctgctgcctgcctgcggctgggcaccagcgctggcaccggcagcagaagagccatggccctgtaccacacagaggagcggggccagccctgcagccagaactaccgcctcttcttcaagaatgtgacaggccactacatcagccccttccatgacatccccctgaaggtgaacagcaaggaggagaatggcatccccatgaagaaggccagaaatgatgaatatgaaaatctcttcaacatgattgtggagatcccccgctggaccaatgccaagatggagatcgccaccaaggagcccatgaaccccatcaagcagtatgtgaaggatggcaagctgcgctacgtggccaacatcttcccctacaagggctacatctggaactacggcaccctgccccagacctgggaggacccccatgagaaggacaagagcaccaactgcttcggggacaatgaccccattgatgtgtgtgaaattggcagcaagatcctgagctgtggggaggtgattcatgtgaagatcctgggcatcctggccctgattgatgaaggagaaacagactggaagctgattgccatcaatgccaatgaccctgaggccagcaagttccatgacattgatgatgtgaagaagttcaagccaggctacctggaggccaccctgaactggttccggctgtacaaggtgcctgatggcaagccagagaaccagtttgccttcaatggagagttcaagaacaaggcctttgccctggaggtgatcaagagcacccaccagtgctggaaggccctgctgatgaagaagtgcaatggaggagccatcaactgcaccaacgtgcagatcagtgacagccccttccgctgcacccaggaggaggcccggagcctggtggagagcgtgagcagcagccccaacaaggagagcaatgaggaggagcaggtgtggcacttcctgggcaagtag

SEQ ID NO: 166738 - DNA, 918 bp, synthetic construct
  misc_feature 1..918: note = Description of Artificial Sequence: Synthetic coding sequence
  source 1..918: mol_type = other DNA
atgtctgccctgctgcggctgctgaggactggagccccagctgctgcctgcctgcggctgggcaccagcgctggcaccggcagcagaagagccatggccctgtaccacacagaggagcggggccagccctgcagccagaactaccgcctcttcttcaagaatgtgacaggccactacatcagccccttccatgacatccccctgaaggtgaacagcaaggaggagaatggcatccccatgaagaaggccagaaatgatgaatatgaaaatctcttcaacatgattgtggagatcccccgctggaccaatgccaagatggagatcgccaccaaggagcccatgaaccccatcaagcagtatgtgaaggatggcaagctgcgctacgtggccaacatcttcccctacaagggctacatctggaactacggcaccctgccccagatcctgagctgtggggaggtgatccacgtgaagatcctgggcatcctggccctgattgatgaaggagaaacagactggaagctgattgccatcaatgccaatgaccctgaggccagcaagttccatgacattgatgatgtgaagaagttcaagccaggctacctggaggccaccctgaactggttccggctgtacaaggtgcctgatggcaagccagagaaccagtttgccttcaacggggagttcaagaacaaggcctttgccctggaggtgatcaagagcacccaccagtgctggaaggccctgctgatgaagaagtgcaatggaggagccatcaactgcaccaacgtgcagatcagtgacagccccttccgctgcacccaggaggaggcccggagcctggtggagagcgtgagcagcagccccaacaaggagagcaatgaggaggagcaggtgtggcacttcctgggcaagtag

SEQ ID NO: 166739 - DNA, 507 bp, synthetic construct
  misc_feature 1..507: note = Description of Artificial Sequence: Synthetic coding sequence
  source 1..507: mol_type = other DNA
atgtctgccctgctgcggctgctgaggactggagccccagctgctgcctgcctgcggctgggcaccagcgctggcaccggcagcagaagagccatggccctgtaccacacagaggagcggggccagccctgcagccagaactaccgcctcttcttcaacattgatgatgtgaagaagttcaagccaggctacctggaggccaccctgaactggttccggctgtacaaggtgcctgatggcaagccagagaaccagtttgccttcaatggagagttcaagaacaaggcctttgccctggaggtgatcaagagcacccaccagtgctggaaggccctgctgatgaagaagtgcaatggaggagccatcaactgcaccaacgtgcagatcagtgacagccccttccgctgcacccaggaggaggcccggagcctggtggagagcgtgagcagcagccccaacaaggagagcaatgaggaggagcaggtgtggcacttcctgggcaagtag

SEQ ID NO: 166740 - DNA, 1050 bp, synthetic construct
  misc_feature 1..1050: note = Description of Artificial Sequence: Synthetic coding sequence
  source 1..1050: mol_type = other DNA
atgtctgccctgctgcggctgctgaggactggagccccagctgctgcctgcctgcggctgggcaccagcgctggcaccggcagcagaagagccatggccctgtaccacacagaggagcggggccagccctgcagccagaactaccgcctcttcttcaagaatgtgacaggccactacatcagccccttccatgacatccccctgaaggtgaacagcaaggaggacacagaggcccagggcatcttcatcgacctgagcaagatctgggagaatggcatccccatgaagaaggccagaaatgatgaatatgagaacctcttcaacatgattgtggagatcccccgctggaccaatgccaagatggagatcgccaccaaggagcccatgaaccccatcaagcagtatgtgaaggatggcaagctgcgctacgtggccaacatcttcccctacaagggctacatctggaactacggcaccctgccccagacctgggaggacccccatgagaaggacaagagcaccaactgctttggagacaatgaccccattgatgtgtgtgagatcggcagcaagatcctgagctgtggggaggtgatccacgtgaagatcctgggcatcctggccctgattgatgaaggagaaacagactggaagctgattgccatcaatgccaatgaccctgaggccagcaagttccatgacattgatgatgtgaagaagttcaagccaggctacctggaggccaccctgaactggttccggctgtacaaggtgcctgatggcaagccagagaaccagtttgccttcaacggggagttcaagaacaaggcctttgccctggaggtgatcaagagcacccaccagtgctggaaggccctgctgatgaagaagtgcaatggaggagccatcaactgcaccaacgtgcagatcagtgacagccccttccgctgcacccaggaggaggcccggagcctggtggagagcgtgagcagcagccccaacaaggagagcaatgaggaggagcaggtgtggcacttcctgggcaagtag

SEQ ID NO: 166741 - DNA, 951 bp, synthetic construct
  misc_feature 1..951: note = Description of Artificial Sequence: Synthetic coding sequence
  source 1..951: mol_type = other DNA
atgtctgccctgctgcggctgctgaggactggagccccagctgctgcctgcctgcggctgggcaccagcgctggcaccggcagcagaagagccatggccctgtaccacacagaggagcggggccagccctgcagccagaactaccgcctcttcttcaagaatgtgacaggccactacatcagccccttccatgacatccccctgaaggtgaacagcaaggaggagaatggcatccccatgaagaaggccagaaatgatgaatatgagatcgccaccaaggagcccatgaaccccatcaagcagtatgtgaaggatggcaagctgcgctacgtggccaacatcttcccctacaagggctacatctggaactacggcaccctgccccagacctgggaggacccccatgagaaggacaagagcaccaactgcttcggggacaatgaccccattgatgtgtgtgaaattggcagcaagatcctgagctgtggggaggtgattcatgtgaagatcctgggcatcctggccctgattgatgaaggagaaacagactggaagctgattgccatcaatgccaatgaccctgaggccagcaagttccatgacattgatgatgtgaagaagttcaagccaggctacctggaggccaccctgaactggttccggctgtacaaggtgcctgatggcaagccagagaaccagtttgccttcaatggagagttcaagaacaaggcctttgccctggaggtgatcaagagcacccaccagtgctggaaggccctgctgatgaagaagtgcaatggaggagccatcaactgcaccaacgtgcagatcagtgacagccccttccgctgcacccaggaggaggcccggagcctggtggagagcgtgagcagcagccccaacaaggagagcaatgaggaggagcaggtgtggcacttcctgggcaagtag

SEQ ID NO: 166742 - DNA, 699 bp, synthetic construct
  misc_feature 1..699: note = Description of Artificial Sequence: Synthetic coding sequence
  source 1..699: mol_type = other DNA
atgtctgccctgctgcggctgctgaggactggagccccagctgctgcctgcctgcggctgggcaccagcgctggcaccggcagcagaagagccatggccctgtaccacacagaggagcggggccagccctgcagccagaactaccgcctcttcttcaagaatgtgacaggccactacatcagccccttccatgacatccccctgaaggtgaacagcaaggagatcctgagctgtggggaggtgattcatgtgaagatcctgggcatcctggccctgattgatgaaggagaaacagactggaagctgattgccatcaatgccaatgaccctgaggccagcaagttccatgacattgatgatgtgaagaagttcaagccaggctacctggaggccaccctgaactggttccggctgtacaaggtgcctgatggcaagccagagaaccagtttgccttcaatggagagttcaagaacaaggcctttgccctggaggtgatcaagagcacccaccagtgctggaaggccctgctgatgaagaagtgcaatggaggagccatcaactgcaccaacgtgcagatcagtgacagccccttccgctgcacccaggaggaggcccggagcctggtggagagcgtgagcagcagccccaacaaggagagcaatgaggaggagcaggtgtggcacttcctgggcaagtag

SEQ ID NO: 166743 - DNA, 960 bp, synthetic construct
  misc_feature 1..960: note = Description of Artificial Sequence: Synthetic coding sequence
  source 1..960: mol_type = other DNA
atgtctgtgggcttcatcggggccggccagctggcctttgccctggccaagggcttcaccgctgctggggtgctggccgcccacaagatcatggccagcagcccagacatggacctggccaccgtgtctgccctgaggaagatgggcgtgaagctgaccccccacaacaaggagaccgtgcagcacagtgatgtgctcttcctggccgtgaagccccacatcatccccttcatcctggatgagatcggggctgacattgaagatagacacatcgtggtgtcctgtgccgccggcgtgaccatcagcagcattgagaagaagctgagcgccttccggcctgcccccagggtcatccgctgcatgaccaacacccctgtggtggtgcgggagggcgccaccgtgtatgccaccggcacccacgcccaggtggaggatggccgcctgatggagcagctgctgagctctgtgggcttctgcacagaggtggaggaggacctgattgatgctgtgacaggcctgagcggcagcggccctgcctatgccttcaccgccctggatgccctggctgatggcggcgtgaagatgggcctgccccggcggctggccgtgcggctgggcgcccaggccctgctgggcgccgccaagatgctgctgcacagcgagcagcaccctggccagctgaaggacaacgtgagcagccctgggggcgccaccatccacgccctgcacgtgctggagagcggcggcttccgcagcctgctgatcaatgctgtggaggccagctgcatccgcacccgggagctgcagagcatggctgaccaggagcaggtgtccccagctgccatcaagaagaccatcctggacaaggtgaagctggacagccctgctggaacagccctgagccccagcggccacaccaagctgctgcccaggagcctggccccagctgggaaggactag

SEQ ID NO: 166744 - DNA, 951 bp, synthetic construct
  misc_feature 1..951: note = Description of Artificial Sequence: Synthetic coding sequence
  source 1..951: mol_type = other DNA
atgtctgtgggcttcatcggggccggccagctggcctttgccctggccaagggcttcaccgctgctggggtgctggccgcccacaagatcatggccagcagcccagacatggacctggccaccgtgtctgccctgaggaagatgggcgtgaagctgaccccccacaacaaggagaccgtgcagcacagtgatgtgctcttcctggccgtgaagccccacatcatccccttcatcctggatgagatcggggctgacattgaagatagacacatcgtggtgtcctgtgccgccggcgtgaccatcagcagcattgagaagaagctgagcgccttccggcctgcccccagggtcatccgctgcatgaccaacacccctgtggtggtgcgggagggcgccaccgtgtatgccaccggcacccacgcccaggtggaggatggccgcctgatggagcagctgctgagctctgtgggcttctgcacagaggtggaggaggacctgattgatgctgtgacaggcctgagcggcagcggccctgcctatgccttcaccgccctggatgccctggctgatggcggcgtgaagatgggcctgccccggcggctggccgtgcggctgggcgcccaggccctgctgggcgccgccaagatgctgctgcacagcgagcagcaccctggccagctgaaggacaacgtgagcagccctgggggcgccaccatccacgccctgcacgtgctggagagcggcggcttccgcagcctgctgatcaatgctgtggaggccagctgcatccgcacccgggagctgcagagcatggctgaccaggagcaggtgtccccagctgccatcaagaagaccatcctggacaaggaccacctgcccctggagctgggcagccctgagggcctgcaccccctgctgctgcagtaccagctggcccgggcccccagctag

SEQ ID NO: 166745 - DNA, 1041 bp, synthetic construct
  misc_feature 1..1041: note = Description of Artificial Sequence: Synthetic coding sequence
  source 1..1041: mol_type = other DNA
atggtgggcggcggccggcgggtgggcagagatgagcctgtgcccagcgtgggcgccctgggccagggcagcccagacagcatgtctgtgggcttcatcggggccggccagctggcctttgccctggccaagggcttcaccgctgctggggtgctggccgcccacaagatcatggccagcagcccagacatggacctggccaccgtgtctgccctgaggaagatgggcgtgaagctgaccccccacaacaaggagaccgtgcagcacagtgatgtgctcttcctggccgtgaagccccacatcatccccttcatcctggatgaaattggagctgacatcgaggacagacacatcgtggtgtcctgtgccgccggcgtgaccatcagcagcattgagaagaagctgagcgccttccggcctgcccccagggtcatccgctgcatgaccaacacccctgtggtggtgcgggagggcgccaccgtgtatgccaccggcacccacgcccaggtggaggatggccgcctgatggagcagctgctgagctctgtgggcttctgcacagaggtggaggaggacctgattgatgctgtgacaggcctgagcggcagcggccctgcctatgccttcaccgccctggatgccctggctgatggaggagtgaagatgggcctgccccggcggctggccgtgcggctgggcgcccaggccctgctgggcgccgccaagatgctgctgcacagcgagcagcaccctggccagctgaaggacaacgtgagcagccctggaggagccaccatccacgccctgcacgtgctggagagcggcggcttccgcagcctgctgatcaatgctgtggaggccagctgcatccgcacccgggagctgcagagcatggctgaccaggagcaggtgtccccagctgccatcaagaagaccatcctggacaaggtgaagctggacagccctgctggaacagccctgagccccagcggccacaccaagctgctgcccaggagcctggccccagctgggaaggactag

SEQ ID NO: 166746 - DNA, 819 bp, synthetic construct
  misc_feature 1..819: note = Description of Artificial Sequence: Synthetic coding sequence
  source 1..819: mol_type = other DNA
atgtctgtgggcttcatcggggccggccagctggcctttgccctggccaagggcttcaccgctgctggggtgctggccgcccacaagatcatggccagcagcccagacatggacctggccaccgtgtctgccctgaggaagatgggcgtgaagctgaccccccacaacaaggagaccgtgcagcacagtgatgtgctcttcctggccgtgaagccccacatcatccccttcatcctggatgagatcggggctgacattgaagatagacacatcgtggtgtcctgtgccgccggcgtgaccatcagcagcattgagaagaagctgagcgccttccggcctgcccccagggtcatccgctgcatgaccaacacccctgtggtggtgcgggagggcgccaccgtgtatgccaccggcacccacgcccaggtggaggatggccgcctgatggagcagctgctgagctctgtgggcttctgcacagaggtggaggaggacctgattgatgctgtgacaggcctgagcggcagcggccctgcctatgccttcaccgccctggatgccctggctgatggcggcgtgaagatgggcctgccccggcggctggccgtgcggctgggcgcccaggccctgctgggcggctgccaggatgctgctgccctgaggacagcccccaggcctgcccagggccagaggcagctgtcctggtggggccaccacccctgcctggcctgtgccggggagtggggcctgcccctgcctgcccaccagagatgtggcggcctgctgcacccccacactggagctgctgtgcatggatag

SEQ ID NO: 166747 - DNA, 723 bp, synthetic construct
  misc_feature 1..723: note = Description of Artificial Sequence: Synthetic coding sequence
  source 1..723: mol_type = other DNA
atgtctgtgggcttcatcggggccggccagctggcctttgccctggccaagggcttcaccgctgctggggtgctggccgcccacaagatcatggccagcagcccagacatggacctggccaccgtgtctgccctgaggaagatgggcgtgaagctgaccccccacaacaaggagaccgtgcagcacagtgatgtgctcttcctggccgtgaagccccacatcatcagcattgagaagctgagcgccttccggcctgcccccagggtcatccgctgcatgaccaacacccctgtggtggtgcgggagggcgccaccgtgtatgccaccggcacccacgcccaggtggaggatggccgcctgatggagcagctgctgagctctgtgggcttctgcacagaggtggaggaggacctgattgatgctgtgacaggcctgagcggcagcggccctgcctacggggccgccaagatgctgctgcacagcgagcagcaccctggccagctgaaggacaacgtgagcagccctggaggagccaccatccacgccctgcacgtgctggagagcggcggcttccgcagcctgctgatcaatgctgtggaggccagctgcatccgcacccgctgggccccagccctgcctgccagcctggtgagcagcccctgcatggccgaggccagcctgacccacatctgcagcttcacccacagcgctgacacctactag

SEQ ID NO: 166748 - DNA, 1590 bp, synthetic construct
  misc_feature 1..1590: note = Description of Artificial Sequence: Synthetic coding sequence
  source 1..1590: mol_type = other DNA
atgctgaagttcagaacagtgcacggcggcctgcggctgctgggcatccggaggaccagcacagccccagctgccagccccaacgtgcggcggctggagtacaagcccatcaagaaggtgatggtggccaacagaggagagatcgccatccgggtcttccgggcctgcacagagctgggcatcagaacagtggccatctacagcgagcaggacaccggccagatgcaccggcagaaggcagatgaggcctacctgattggccggggcctggcccctgtgcaggcctacctgcacatcccagacatcatcaaggtggccaaggagaacaacgtggatgctgtgcaccctggctacggcttcctgtctgaaagagctgactttgcccaggcctgccaggatgctggggtgcgcttcatcggccccagccctgaggtggtgaggaagatgggagacaaggtggaggcccgggccatcgccatcgccgccggcgtgcctgtggtgcccggcacagatgcccccatcaccagcctgcacgaggcccacgagttcagcaacacctacggcttccccatcatcttcaaggccgcctatggaggcggcggccggggcatgagggtggtgcacagctatgaggagctggaggagaactacacccgggcctacagcgaggccctggccgcctttggaaatggagccctgtttgtggagaagttcatcgagaagcccaggcacatcgaggtgcagatcctgggggaccagtatggcaacatcctgcacctgtatgagcgggactgcagcatccagaggaggcaccagaaggtggtggagatcgccccagctgcccacctggacccccagctgcggacccggctgaccagtgacagcgtgaagctggccaagcaggtgggctatgaaaatgccggcaccgtggagttcctggtggacagacatggcaagcactacttcatcgaggtgaacagccggctgcaggtggagcacacagtgacagaggagatcacagatgtggacctggtgcacgcccagatccacgtggccgagggccgcagcctgcctgacctgggcctgcggcaggagaacatccgcatcaatggctgtgccatccagtgccgggtgaccacagaagatcctgcccggagcttccagcctgacaccggccgcatcgaggtgttccgctctggagagggcatgggcatccggctggacaatgccagcgccttccagggcgccgtcatcagcccccactatgacagcctgctggtgaaggtgattgcccacggcaaggaccaccccacagctgccaccaagatgagccgggccctggccgagttccgggtgcggggcgtgaaggtgcggcggcaccaggcccagcccctggccgccgccctgggccggccctgtggccaggaggcccggcggccccaggccgctgtgacagcccccaccggccctggcagccccaccctggtgcgggtgcccccagctgcccgggtgctgagcagccggctgggcggccccagccagaccaccccagagaccagcacagaggtgagccccaccatcctgctgtag

SEQ ID NO: 166749 - DNA, 3537 bp, synthetic construct
  misc_feature 1..3537: note = Description of Artificial Sequence: Synthetic coding sequence
  source 1..3537: mol_type = other DNA
atgctgaagttcagaacagtgcacggcggcctgcggctgctgggcatccggaggaccagcacagccccagctgccagccccaacgtgcggcggctggagtacaagcccatcaagaaggtgatggtggccaacagaggagagatcgccatccgggtcttccgggcctgcacagagctgggcatcagaacagtggccatctacagcgagcaggacaccggccagatgcaccggcagaaggcagatgaggcctacctgattggccggggcctggcccctgtgcaggcctacctgcacatcccagacatcatcaaggtggccaaggagaacaacgtggatgctgtgcaccctggctacggcttcctgtctgaaagagctgactttgcccaggcctgccaggatgctggggtgcgcttcatcggccccagccctgaggtggtgaggaagatgggagacaaggtggaggcccgggccatcgccatcgccgccggcgtgcctgtggtgcccggcacagatgcccccatcaccagcctgcacgaggcccacgagttcagcaacacctacggcttccccatcatcttcaaggccgcctatggaggcggcggccggggcatgagggtggtgcacagctatgaggagctggaggagaactacacccgggcctacagcgaggccctggccgcctttggaaatggagccctgtttgtggagaagttcatcgagaagcccaggcacatcgaggtgcagatcctgggggaccagtatggcaacatcctgcacctgtatgagcgggactgcagcatccagaggaggcaccagaaggtggtggagatcgccccagctgcccacctggacccccagctgcggacccggctgaccagtgacagcgtgaagctggccaagcaggtgggctatgaaaatgccggcaccgtggagttcctggtggacagacatggcaagcactacttcatcgaggtgaacagccggctgcaggtggagcacacagtgacagaggagatcacagatgtggacctggtgcacgcccagatccacgtggccgagggccgcagcctgcctgacctgggcctgcggcaggagaacatccgcatcaatggctgtgccatccagtgccgggtgaccacagaagatcctgcccggagcttccagcctgacaccggccgcatcgaggtgttccgctctggagagggcatgggcatccggctggacaatgccagcgccttccagggcgccgtcatcagcccccactatgacagcctgctggtgaaggtgattgcccacggcaaggaccaccccacagctgccaccaagatgagccgggccctggccgagttccgggtgcggggcgtgaagaccaacatcgccttcctgcagaatgtgctgaacaaccagcagttcctggccggcaccgtggacacccagttcattgatgaaaatcctgagctgttccagctgcggcctgcccagaacagagcccagaagctgctgcactacctgggccacgtgatggtgaatggccccaccacccccatccctgtgaaggccagccccagccccacagatcctgtggtgcctgctgtgcccatcggccccccacctgctggcttccgggacatcctgctgcgggagggccctgagggctttgcccgggctgtgaggaaccaccctggcctgctgctgatggacaccaccttcagagatgcccaccagagcctgctggccaccagggtgaggacccatgacctgaagaagatcgccccctacgtggcccacaacttcagcaagctgttctccatggagaactggggcggggccacctttgatgtggccatgaggttcctgtatgaatgtccctggaggcggctgcaggagctgcgggagctgatccccaacatccccttccagatgctgctgcggggggccaatgctgtgggctacaccaactacccagacaacgtggtgttcaagttctgtgaggtggccaaggaaaatggcatggatgtgttccgggtgtttgacagcctgaactacctgcccaacatgctgctgggcatggaggccgccggcagcgctgggggcgtggtggaggccgccatctcctacacaggagatgtggccgaccccagcaggaccaagtacagcctgcagtactacatgggcctggccgaggagctggtgcgggccggcacccacatcctgtgcatcaaggacatggccggcctgctgaagcccacagcctgcaccatgctggtgagcagcctgcgggaccgcttcccagacctgcccctgcacatccacacccatgacaccagcggggccggcgtggccgccatgctggcctgtgcccaggccggggctgatgtggtggatgtggccgctgacagcatgagcggcatgaccagccagcccagcatgggcgccctggtggcctgcacccggggcacccccctggacacagaggtgcccatggagcgggtgtttgactacagcgagtactgggagggcgcccggggcctgtatgctgcctttgactgcacagccaccatgaagagcggcaacagtgatgtgtatgaaaatgagatccctgggggccagtacaccaacctgcacttccaggcccacagcatgggcctgggcagcaagttcaaggaggtgaagaaggcctacgtggaggccaaccagatgctgggggacctgatcaaggtgacccccagcagcaagatcgtgggggacctggcccagttcatggtgcagaatggcctgagcagagctgaggccgaggcccaggccgaggagctgtccttccccaggtctgtggtggagttcctgcagggctacatcggcgtgccccacggcggcttccctgagcccttccgcagcaaggtgctgaaggacctgccccgggtggagggccggcctggggccagcctgccccccctggacctgcaggccctggagaaggagctggtggacagacatggagaggaggtgaccccagaagatgtgctgtctgctgccatgtacccagatgtgtttgcccacttcaaggacttcaccgccaccttcggccccctggacagcctgaacaccaggctcttcctgcagggccccaagattgctgaggagtttgaggtggagctggagcggggcaagaccctgcacatcaaggccctggccgtgtctgacctgaacagagctggccagaggcaggtgttctttgagctgaatggccagctgcggagcatcctggtgaaggacacccaggccatgaaggagatgcacttccaccccaaggccctgaaggatgtgaagggccagatcggggcccccatgcctgggaaggtgattgacatcaaggtggtggccggggccaaggtggccaagggccagcccctgtgtgtgctgagcgccatgaagatggagaccgtggtgaccagccccatggagggcaccgtgaggaaggtgcacgtgaccaaggacatgaccctggagggagatgacctgatcctggagattgaatag

SEQ ID NO: 166750 - DNA, 3537 bp, synthetic construct; identical to SEQ ID NO: 166749
  misc_feature 1..3537: note = Description of Artificial Sequence: Synthetic coding sequence
  source 1..3537: mol_type = other DNA

SEQ ID NO: 166751 - DNA, 3537 bp, synthetic construct; identical to SEQ ID NO: 166749
  misc_feature 1..3537: note = Description of Artificial Sequence: Synthetic coding sequence
  source 1..3537: mol_type = other DNA

SEQ ID NO: 166752 - DNA, 615 bp, synthetic construct
  misc_feature 1..615: note = Description of Artificial Sequence: Synthetic coding sequence
  source 1..615: mol_type = other DNA
atgaggaagatgctggccgctgtgtcccgggtgctgagcggggccagccagaagccagccagccgggtgctggtggccagcaggaactttgccaatgatgccacctttgagatcaagaagtgtgacctgcaccggctggaggagggcccccctgtgaccaccgtgctgaccagagaagatggcctgaagtactacaggatgatgcagacagtgcggaggatggagctgaaggctgaccagctgtacaagcagaagatcatccggggcttctgccacctgtgtgatggccagttcctgctgcccctgacccaggaggcctgctgcgtgggcctggaggccggcatcaaccccacagaccacctgatcacagcctaccgggcccacggcttcaccttcacccggggcctgtctgtgcgggagatcctggccgagctgaccggcaggaaaggaggctgtgccaagggcaagggcggctccatgcacatgtatgccaagaacttctacggcggcaatggaattgtgggcgcccaggtgcccctgggcgccggcatcgccctggcctgcaagtacaacgggaaggatgaggtgtgcctgaccctgtatggagatggatag

SEQ ID NO: 166753 - DNA, 330 bp, synthetic construct
  misc_feature 1..330: note = Description of Artificial Sequence: Synthetic coding sequence
  source 1..330: mol_type = other DNA
atggagctgcagacctaccgctaccacggccacagcatgtctgaccccggggtgtcctaccgcacccgggaggagatccaggaggtgcgcagcaagagtgaccccatcatgctgctgaaggacaggatggtgaacagcaacctggcctctgtggaggagctgaaggagattgatgtggaggtgaggaaggagattgaagatgctgcccagtttgccacagctgaccctgagccccccctggaggagctgggctaccacatctacagcagtgaccccccatttgaggtgcggggggccaaccagtggatcaagttcaagtctgtgtcctag

SEQ ID NO: 166754 - DNA, 543 bp, synthetic construct
  misc_feature 1..543: note = Description of Artificial Sequence: Synthetic coding sequence
  source 1..543: mol_type = other DNA
atgaggaagatgctggccgctgtgtcccgggtgctgagcggggccagccagaagccagccagccgggtgctggtggccagcaggaactttgccaatgatgccacctttgagatcaagaagtgtgacctgcaccggctggaggagggcccccctgtgaccaccgtgctgaccagagaagatggcctgaagtactacaggatgatgcagacagtgcggaggatggagctgaaggctgaccagctgtacaagcagaagatcatccggggcttctgccacctgtgtgatggccaggaggcctgctgcgtgggcctggaggccggcatcaaccccacagaccacctgatcacagcctaccgggcccacggcttcaccttcacccggggcctgtctgtgcgggagatcctggccgagctgactggaaggaagggcggctgtgccaagggcaaaggaggctccatgcacatgtatgccaagaacttctatggaggaaatggcatcgtgggcgcccaggtggtgaaggatgaggactgtgtgctgctgtag

SEQ ID NO: 166755 - DNA, 1287 bp, synthetic construct
  misc_feature 1..1287: note = Description of Artificial Sequence: Synthetic coding sequence
  source 1..1287: mol_type = other DNA
atgaggaagatgctggccgctgtgtcccgggtgctgagcggggccagccagaagcccaggcatggcctggccaccctgcccagcctggtgtccatcagccggctgaagcagagcagccacctgggcctgcccaagtgctgggactacagccacagcctgaagacccggcaggccagccgggtgctggtggccagcaggaactttgccaatgatgccacctttgagatcaagaagtgtgacctgcaccggctggaggagggcccccctgtgaccaccgtgctgaccagagaagatggcctgaagtactacaggatgatgcagacagtgcggaggatggagctgaaggctgaccagctgtacaagcagaagatcatccggggcttctgccacctgtgtgatggccaggaggcctgctgcgtgggcctggaggccggcatcaaccccacagaccacctgatcacagcctaccgggcccacggcttcaccttcacccggggcctgtctgtgcgggagatcctggccgagctgactggaaggaagggcggctgtgccaagggcaaaggaggctccatgcacatgtatgccaagaacttctatggaggaaatggcatcgtgggcgcccaggtgcccctgggcgccggcatcgccctggcctgcaagtacaacgggaaggatgaggtgtgcctgaccctgtatggagatggagctgccaaccagggccagatctttgaggcctacaacatggccgccctgtggaagctgccctgcatcttcatctgtgagaacaacagatatggcatgggcacctctgtggagagagctgctgccagcacagactactacaagagaggagacttcatccctggcctgcgggtggatggcatggacatcctgtgtgtgcgggaggccaccaggtttgctgctgcctactgccgcagcggcaagggccccatcctgatggagctgcagacctaccgctaccacggccacagcatgtctgaccccggggtgtcctaccgcacccgggaggagatccaggaggtgcgcagcaagagtgaccccatcatgctgctgaaggacaggatggtgaacagcaacctggcctctgtggaggagctgaaggagattgatgtggaggtgaggaaggagattgaagatgctgcccagtttgccacagctgaccctgagccccccctggaggagctgggctaccacatctacagcagtgaccccccatttgaggtgcggggggccaaccagtggatcaagttcaagtctgtgtcctag

SEQ ID NO: 166756 - DNA, 366 bp, synthetic construct
  misc_feature 1..366: note = Description of Artificial Sequence: Synthetic coding sequence
  source 1..366: mol_type = other DNA
atgaggaagatgctggccgctgtgtcccgggtgctgagcggggccagccagaagccctttgctggcagccccccacccaggcacctgactgtgggcaggaagctgagcagccgctatgaggtgacctttgaaagtgcccaggccagccgggtgctggtggccagcaggaactttgccaatgatgccacctttgagatcaagaagtgtgacctgcaccggctggaggagggcccccctgtgaccaccgtgctgaccagagaagatggcctgaagtactacaggatgatgcagacagtgcggaggatggagctgaaggctgaccagctgtacaagcagaagatcatccggggcttctgccacctgtag

SEQ ID NO: 166757 - DNA, 366 bp, synthetic construct; identical to SEQ ID NO: 166756
  misc_feature 1..366: note = Description of Artificial Sequence: Synthetic coding sequence
  source 1..366: mol_type = other DNA

SEQ ID NO: 166758 - DNA, 1173 bp, synthetic construct
  misc_feature 1..1173: note = Description of Artificial Sequence: Synthetic coding sequence
  source 1..1173: mol_type = other DNA
atgaggaagatgctggccgctgtgtcccgggtgctgagcggggccagccagaagccagccagccgggtgctggtggccagcaggaactttgccaatgatgccacctttgagatcaagaagtgtgacctgcaccggctggaggagggcccccctgtgaccaccgtgctgaccagagaagatggcctgaagtactacaggatgatgcagacagtgcggaggatggagctgaaggctgaccagctgtacaagcagaagatcatccggggcttctgccacctgtgtgatggccaggaggcctgctgcgtgggcctggaggccggcatcaaccccacagaccacctgatcacagcctaccgggcccacggcttcaccttcacccggggcctgtctgtgcgggagatcctggccgagctgactggaaggaagggcggctgtgccaagggcaaaggaggctccatgcacatgtatgccaagaacttctatggaggaaatggcatcgtgggcgcccaggtgcccctgggcgccggcatcgccctggcctgcaagtacaacgggaaggatgaggtgtgcctgaccctgtatggagatggagctgccaaccagggccagatctttgaggcctacaacatggccgccctgtggaagctgccctgcatcttcatctgtgagaacaacagatatggcatgggcacctctgtggagagagctgctgccagcacagactactacaagagaggagacttcatccctggcctgcgggtggatggcatggacatcctgtgtgtgcgggaggccaccaggtttgctgctgcctactgccgcagcggcaagggccccatcctgatggagctgcagacctaccgctaccacggccacagcatgtctgaccccggggtgtcctaccgcacccgggaggagatccaggaggtgcgcagcaagagtgaccccatcatgctgctgaaggacaggatggtgaacagcaacctggcctctgtggaggagctgaaggagattgatgtggaggtgaggaaggagattgaagatgctgcccagtttgccacagctgaccctgagccccccctggaggagctgggctaccacatctacagcagtgaccccccatttgaggtgcggggggccaaccagtggatcaagttcaagtctgtgtcctag

SEQ ID NO: 166759 - DNA, 618 bp, synthetic construct
  misc_feature 1..618: note = Description of Artificial Sequence: Synthetic coding sequence
  source 1..618: mol_type = other DNA
atgaggaagatgctggccgctgtgtcccgggtgctgagcggggccagccagaagcccaggcatggcctggccaccctgcccagcctggtgtccatcagccggctgaagcagagcagccacctgggcctgcccaagtgctgggactacagccacagcctgaagacccggcaggccagccgggtgctggtggccagcaggaactttgccaatgatgccacctttgagatcaagaagtgtgacctgcaccggctggaggagggcccccctgtgaccaccgtgctgaccagagaagatggcctgaagtactacaggatgatgcagacagtgcggaggatggagctgaaggctgaccagctgtacaagcagaagatcatccggggcttctgccacctgtgtgatggccaggaggcctgctgcgtgggcctggaggccggcatcaaccccacagaccacctgatcacagcctaccgggcccacggcttcaccttcacccggggcctgtctgtgcgggagatcctggccgagctgactggaaggaagggcggctgtgccaagggcaaaggaggctccatgcacatgtatgccaagaacttctatggaggaaatggcatcgtgtag

SEQ ID NO: 166760 - DNA, 1080 bp, synthetic construct
  misc_feature 1..1080: note = Description of Artificial Sequence: Synthetic coding sequence
  source 1..1080: mol_type = other DNA
atgaggaagatgctggccgctgtgtcccgggtgctgagcggggccagccagaagccagccagccgggtgctggtggccagcaggaactttgccaatgatgccacctttgagatcaagaagtgtgacctgcaccggctggaggagggcccccctgtgaccaccgtgctgaccagagaagatggcctgaagtactacaggatgatgcagacagtgcggaggatggagctgaaggctgaccagctgtacaagcagaagatcatccggggcttctgccacctgtgtgatggccaggaggcctgctgcgtgggcctggaggccggcatcaaccccacagaccacctgatcacagcctaccgggcccacggcttcaccttcacccggggcctgtctgtgcgggagatcctggccgagctgactggaaggaagggcggctgtgccaagggcaaaggaggctccatgcacatgtatgccaagaacttctatggaggaaatggcatcgtgggcgcccagggccagatctttgaggcctacaacatggccgccctgtggaagctgccctgcatcttcatctgtgagaacaacagatatggcatgggcacctctgtggagagagctgctgccagcacagactactacaagagaggagacttcatccctggcctgcgggtggatggcatggacatcctgtgtgtgcgggaggccaccaggtttgctgctgcctactgccgcagcggcaagggccccatcctgatggagctgcagacctaccgctaccacggccacagcatgtctgaccccggggtgtcctaccgcacccgggaggagatccaggaggtgcgcagcaagagtgaccccatcatgctgctgaaggacaggatggtgaacagcaacctggcctctgtggaggagctgaaggagattgatgtggaggtgaggaaggagattgaagatgctgcccagtttgccacagctgaccctgagccccccctggaggagctgggctaccacatctacagcagtgaccccccatttgaggtgcggggggccaaccagtggatcaagttcaagtctgtgtcctag

SEQ ID NO: 166761 - DNA, 129 bp, synthetic construct
  misc_feature 1..129: note = Description of Artificial Sequence: Synthetic coding sequence
  source 1..129: mol_type = other DNA
gccaaccagtggatcaagttcaagtctgtgaagggcagaagaagaagaggctacaccttccggggcctgcctgacagcgtgctgaacctggtgaaggaggaggagaaccctgtgaatgagatccagtag

SEQ ID NO: 166762 - DNA, 1194 bp, synthetic construct
  misc_feature 1..1194: note = Description of Artificial Sequence: Synthetic coding sequence
  source 1..1194: mol_type = other DNA
atgaggaagatgctggccgctgtgtcccgggtgctgagcggggccagccagaagccagccagccgggtgctggtggccagcaggaactttgccaatgatgccacctttgagatcaagaagtgtgacctgcaccggctggaggagggcccccctgtgaccaccgtgctgaccagagaagatggcctgaagtactacaggatgatgcagacagtgcggaggatggagctgaaggctgaccagctgtacaagcagaagatcatccggggcttctgccacctgtgtgatggccagttcctgctgcccctgacccaggaggcctgctgcgtgggcctggaggccggcatcaaccccacagaccacctgatcacagcctaccgggcccacggcttcaccttcacccggggcctgtctgtgcgggagatcctggccgagctgaccggcaggaaaggaggctgtgccaagggcaagggcggctccatgcacatgtatgccaagaacttctacggcggcaatggaattgtgggcgcccaggtgcccctgggcgccggcatcgccctggcctgcaagtacaacgggaaggatgaggtgtgcctgaccctgtatggagatggagctgccaaccagggccagatctttgaggcctacaacatggccgccctgtggaagctgccctgcatcttcatctgtgagaacaacagatatggcatgggcacctctgtggagagagctgctgccagcacagactactacaagagaggagacttcatccctggcctgcgggtggatggcatggacatcctgtgtgtgcgggaggccaccaggtttgctgctgcctactgccgcagcggcaagggccccatcctgatggagctgcagacctaccgctaccacggccacagcatgtctgaccccggggtgtcctaccgcacccgggaggagatccaggaggtgcgcagcaagagtgaccccatcatgctgctgaaggacaggatggtgaacagcaacctggcctctgtggaggagctgaaggagattgatgtggaggtgaggaaggagattgaagatgctgcccagtttgccacagctgaccctgagccccccctggaggagctgggctaccacatctacagcagtgaccccccatttgaggtgcggggggccaaccagtggatcaagttcaagtctgtgtcctag

SEQ ID NO: 166763 - DNA, 1167 bp, synthetic construct
  misc_feature 1..1167: note = Description of Artificial Sequence: Synthetic coding sequence
  source 1..1167: mol_type = other DNA
atgctggccgccttcatcagccgggtgctgcggcgggtggcccagaagagcgccaggagagtgctggtggccagcaggaacagcagcaatgatgccacctttgagatcaagaagtgtgacctgtacctgctggaggagggcccccctgtgaccaccgtgctgaccagggctgagggcctgaagtactacaggatgatgctgactgtgcggaggatggagctgaaggctgaccagctgtacaagcagaagttcatccggggcttctgccacctgtgtgatggccaggaggcctgctgcgtgggcctggaggccggcatcaaccccagcgaccacgtgatcaccagctaccgggcccatggagtgtgctacacccggggcctgtctgtgcgcagcatcctggccgagctgactggaagaagaggaggctgtgccaagggcaaaggaggctccatgcacatgtacaccaagaacttctatggaggaaatggcatcgtgggcgcccagggccccctgggcgccggcatcgccctggcctgcaagtacaagggaaatgatgagatctgcctgaccctgtatggagatggagctgccaaccagggccagattgctgaggccttcaacatggccgccctgtggaagctgccctgtgtgttcatctgtgagaacaacctgtatggcatgggcaccagcacagaaagagctgctgccagcccagactactacaagaggggcaacttcatccctggcctgaaggtggatggcatggatgtgctgtgtgtgcgggaggccaccaagtttgctgccaactactgccgcagcggcaagggccccatcctgatggagctgcagacctaccgctaccacggccacagcatgtctgaccccggggtgtcctaccgcacccgggaggagatccaggaggtgcgcagcaagagggaccccatcatcatcctgcaggacaggatggtgaacagcaagctggccaccgtggaggagctgaaggagatcggggctgaggtgaggaaggagattgatgatgctgcccagtttgccaccacagatcctgagccccacctggaggagctgggccaccacatctacagcagtgacagcagctttgaggtgcggggggccaacccctggatcaagttcaagtctgtgtcctag

SEQ ID NO: 166764 - DNA, 1080 bp, synthetic construct
  misc_feature 1..1080: note = Description of Artificial Sequence: Synthetic coding sequence
  source 1..1080: mol_type = other DNA
atggctgctgtgtctggcctggtgagaagacccctgcgggaggtgtctggcctgctgaagaggcgcttccactggacagccccagctgccctgcaggtgacagtgagagatgccatcaaccagggcatggatgaggagctggagagagatgagaaggtgttcctgctgggggaggaggtggcccagtatgatggagcctacaaggtgtcccggggcctgtggaagaagtatggagacaagaggatcatcgacacccccatcagcgagatgggctttgctggcattgctgtgggcgccgccatggccggcctgcggcccatctgtgagttcatgaccttcaacttctccatgcaggccatcgaccaggtgatcaacagcgctgccaagacctactacatgtctgggggcctgcagcctgtgcccatcgtgttccggggccccaacggggccagcgctggggtggccgcccagcacagccagtgctttgctgcctggtacggccactgccccggcctgaaggtggtgagcccctggaacagtgaagatgccaagggcctcatcaagagcgccatccgggacaacaaccctgtggtggtgctggagaatgagctgatgtatggagtgccctttgagttccccccagaggcccagagcaaggacttcctgatccccatcggcaaggccaagattgaaaggcagggcacccacatcaccgtggtgagccacagcaggcctgtgggccactgcctggaggccgctgctgtgctgagcaaggagggcgtggagtgtgaggtgatcaacatgaggaccatccggcccatggacatggagaccatcgaggcctctgtgatgaagaccaaccacctggtgacagtggagggcggctggccccagtttggagtgggcgctgagatctgtgcccgcatcatggagggccctgccttcaacttcctggatgccccagctgtgcgggtgactggagcagatgtgcccatgccctatgccaagatcctggaggacaacagcatcccccaggtgaaggacatcatctttgccatcaagaagaccctgaacatctag

SEQ ID NO: 166765 - DNA, 1026 bp, synthetic construct
  misc_feature 1..1026: note = Description of Artificial Sequence: Synthetic coding sequence
  source 1..1026: mol_type = other DNA
atggctgctgtgtctggcctggtgagaagacccctgcgggaggtgacagtgagagatgccatcaaccagggcatggatgaggagctggagagagatgagaaggtgttcctgctgggggaggaggtggcccagtatgatggagcctacaaggtgtcccggggcctgtggaagaagtatggagacaagaggatcatcgacacccccatcagcgagatgggctttgctggcattgctgtgggcgccgccatggccggcctgcggcccatctgtgagttcatgaccttcaacttctccatgcaggccatcgaccaggtgatcaacagcgctgccaagacctactacatgtctgggggcctgcagcctgtgcccatcgtgttccggggccccaacggggccagcgctggggtggccgcccagcacagccagtgctttgctgcctggtacggccactgccccggcctgaaggtggtgagcccctggaacagtgaagatgccaagggcctcatcaagagcgccatccgggacaacaaccctgtggtggtgctggagaatgagctgatgtatggagtgccctttgagttccccccagaggcccagagcaaggacttcctgatccccatcggcaaggccaagattgaaaggcagggcacccacatcaccgtggtgagccacagcaggcctgtgggccactgcctggaggccgctgctgtgctgagcaaggagggcgtggagtgtgaggtgatcaacatgaggaccatccggcccatggacatggagaccatcgaggcctctgtgatgaagaccaaccacctggtgacagtggagggcggctggccccagtttggagtgggcgctgagatctgtgcccgcatcatggagggccctgccttcaacttcctggatgccccagctgtgcgggtgactggagcagatgtgcccatgccctatgccaagatcctggaggacaacagcatcccccaggtgaaggacatcatctttgccatcaagaagaccctgaacatctag

SEQ ID NO: 166766 - DNA, 1026 bp, synthetic construct
  misc_feature 1..1026: note = Description of Artificial Sequence: Synthetic coding sequence
  source 1..1026: mol_type = other DNA
atggctgctgtgtctggcctggtgagaagacccctgcgggaggtgtctggcctgctgaagaggcgcttccactggacagccccagctgccctgcaggtgacagtgagagatgccatcaaccagggcatggatgaggagctggagagagatgagaaggtgttcctgctgggggaggaggtggcccagtatgatggagcctacaaggtgtcccggggcctgtggaagaagtatggagacaagaggatcatcgacacccccatcagcgagatgggctttgctggcattgctgtgggcgccgccatggccggcctgcggcccatctgtgagttcatgaccttcaacttctccatgcaggccatcgaccaggtgatcaacagcgctgccaagacctactacatgtctggagtggccgcccagcacagccagtgctttgctgcctggtacggccactgccccggcctgaaggtggtgagcccctggaacagtgaagatgccaagggcctcatcaagagcgccatccgggacaacaaccctgtggtggtgctggagaatgagctgatgtatggagtgccctttgagttccccccagaggcccagagcaaggacttcctgatccccatcggcaaggccaagattgaaaggcagggcacccacatcaccgtggtgagccacagcaggcctgtgggccactgcctggaggccgctgctgtgctgagcaaggagggcgtggagtgtgaggtgatcaacatgaggaccatccggcccatggacatggagaccatcgaggcctctgtgatgaagaccaaccacctggtgacagtggagggcggctggccccagtttggagtgggcgctgagatctgtgcccgcatcatggagggccctgccttcaacttcctggatgccccagctgtgcgggtgactggagcagatgtgcccatgccctatgccaagatcctggaggacaacagcatcccccaggtgaaggacatcatctttgccatcaagaagaccctgaacatctag

SEQ ID NO: 166767 - DNA, 1236 bp, synthetic construct
  misc_feature 1..1236: note = Description of Artificial Sequence: Synthetic coding sequence
  source 1..1236: mol_type = other DNA
atgaaggccgccaggtttgtgctgcggtctgctggcagcctgaatggagctggcctggtgccccgggaggtggagcacttcagccgctacagccccagccccctgtccatgaagcagctgctggactttggaagtgaaaatgcctgtgagaggaccagctttgccttcctgcggcaggagctgcctgtgcggctggccaacatcctgaaggagattgacatcctgcccacccagctggtgaacaccagctctgtgcagctggtgaagtcctggtacatccagagcctgatggacctggtggagttccacgagaagagcccagatgaccagaaggccctgagtgactttgtggacaccctcatcaaggtgaggaacagacaccacaacgtggtgcccaccatggcccagggcatcatcgagtacaaggatgcctgcaccgtggaccctgtgaccaaccagaacctgcagtacttcctggaccgcttctacatgaaccgcatcagcaccaggatgctgatgaaccagcacatcctgatcttcagtgacagccagacaggcaaccccagccacatcggcagcattgaccccaactgtgatgtggtggccgtggtgcaggatgcctttgaatgttccaggatgctgtgtgaccagtactacctgagcagccctgagctgaagctgacccaggtgaatggcaagttcccagaccagcccatccacatcgtgtatgtgcccagccacctgcaccacatgctgtttgagctgttcaagaatgccatgagggccaccgtggagcaccaggagaaccagcccagcctgacccccatcgaggtgattgtggtgctgggcaaggaggacctgaccatcaagatcagtgacagaggaggaggagtgcccctgcgcatcatcgacaggctcttctcctacacctacagcacagcccccacccctgtgatggacaacagcagaaatgcccccctggccggcttcggctacggcctgcccatcagccggctgtatgccaagtacttccagggcgacctgaacctgtacagcctgagcggctacggcacagatgccatcatctacctgaaggccctgagcagcgagagcattgagaagctgcccgtcttcaacaagagcgccttcaagcactaccagatgagcagcgaggctgatgactggtgcatccccagccgggagcccaagaacctggccaaggaggtggccatgtag

SEQ ID NO: 166768 - DNA, 1128 bp, synthetic construct
  misc_feature 1..1128: note = Description of Artificial Sequence: Synthetic coding sequence
  source 1..1128: mol_type = other DNA
atgaagcagctgctggactttggaagtgaaaatgcctgtgagaggaccagctttgccttcctgcggcaggagctgcctgtgcggctggccaacatcctgaaggagattgacatcctgcccacccagctggtgaacaccagctctgtgcagctggtgaagtcctggtacatccagagcctgatggacctggtggagttccacgagaagagcccagatgaccagaaggccctgagtgactttgtggacaccctcatcaaggtgaggaacagacaccacaacgtggtgcccaccatggcccagggcatcatcgagtacaaggatgcctgcaccgtggaccctgtgaccaaccagaacctgcagtacttcctggaccgcttctacatgaaccgcatcagcaccaggatgctgatgaaccagcacatcctgatcttcagtgacagccagacaggcaaccccagccacatcggcagcattgaccccaactgtgatgtggtggccgtggtgcaggatgcctttgaatgttccaggatgctgtgtgaccagtactacctgagcagccctgagctgaagctgacccaggtgaatggcaagttcccagaccagcccatccacatcgtgtatgtgcccagccacctgcaccacatgctgtttgagctgttcaagaatgccatgagggccaccgtggagcaccaggagaaccagcccagcctgacccccatcgaggtgattgtggtgctgggcaaggaggacctgaccatcaagatcagtgacagaggaggaggagtgcccctgcgcatcatcgacaggctcttctcctacacctacagcacagcccccacccctgtgatggacaacagcagaaatgcccccctggccggcttcggctacggcctgcccatcagccggctgtatgccaagtacttccagggcgacctgaacctgtacagcctgagcggctacggcacagatgccatcatctacctgaaggccctgagcagcgagagcattgagaagctgcccgtcttcaacaagagcgccttcaagcactaccagatgagcagcgaggctgatgactggtgcatccccagccgggagcccaagaacctggccaaggaggtggccatgtag

SEQ ID NO: 166769 - DNA, 1614 bp, synthetic construct
  misc_feature 1..1614: note = Description of Artificial Sequence: Synthetic coding sequence
  source 1..1614: mol_type = other DNA
atgcctgcccccacccagctgttcttccccctcatccggaactgtgagctgagccgcatctatggaacagcctgctactgccaccacaagcacctgtgctgcagcagcagctacatcccccagagccggctgcgctacaccccccacccagcctatgccaccttctgccggcccaaggagaactggtggcagtacacccagggcagaagatatgccagcaccccccagaagttctacctgaccccaccccaggtgaacagcatcctgaaggccaatgagtacagcttcaaggtgcctgagtttgatggcaagaatgtgagcagcatcctgggctttgacagcaaccagctgcctgccaatgcccccatcgaggaccggcgctctgctgccacctgcctgcagacccggggcatgctgctgggcgtgtttgatggccatgctggctgtgcctgcagccaggccgtgtctgagcggctcttctactacatcgctgtgtccctgctgccccatgagaccctgctggagattgaaaatgctgtggagagcggccgggccctgctgcccatcctgcagtggcacaagcaccccaatgactacttcagcaaggaggccagcaagctgtacttcaacagcctgcggacctactggcaggagctgattgacctgaacacaggagagagcacagacattgatgtgaaggaggccctgatcaatgccttcaagaggctggacaatgacatcagcctggaggcccaggtgggggaccccaacagcttcctgaactacctggtgctgcgggtggccttcagcggggccacagcctgtgtggcccacgtggatggagtggacctgcacgtggccaacacaggagacagccgggccatgctgggcgtgcaggaggaggatggctcctggagcgctgtgaccctgagcaatgaccacaatgcccagaatgaaagagagctggagcggctgaagctggagcaccccaagtctgaggccaagtctgtggtgaagcaggaccggctgctgggcctgctgatgcccttccgggcctttggagatgtgaagttcaagtggagcattgacctgcagaagagggtgattgaaagtggccctgaccagctgaatgacaatgagtacaccaagttcatcccccccaactaccacaccccaccctacctgacagctgagcctgaggtgacctaccaccggctgcggccccaggacaagttcctggtgctggccacagatggcctgtgggagaccatgcaccggcaggatgtggtgcgcatcgtgggggagtacctgaccggcatgcaccaccagcagcccatcgctgtgggcggctacaaggtgaccctgggccagatgcacggcctgctgacagaaagaaggaccaagatgagctctgtgtttgaggaccagaatgctgccacccacctgatcagacatgctgtgggcaacaatgaatttggcaccgtggaccacgagcggctgagcaagatgctgagcctgcctgaggagctggccaggatgtacagagatgacatcaccatcatcgtggtgcagttcaacagccacgtggtgggcgcctaccagaaccaggagtag

SEQ ID NO: 166770 - DNA, 1689 bp, synthetic construct
  misc_feature 1..1689: note = Description of Artificial Sequence: Synthetic coding sequence
  source 1..1689: mol_type = other DNA
atgtgtgtgtgccccggcccccggcgcatcggcatccctgtgcgcagcagcagcctgcccctcttcagtgatgccatgcctgcccccacccagctgttcttccccctcatccggaactgtgagctgagccgcatctacggcacagcctgctactgccaccacaagcacctgtgctgcagcagcagctacatcccccagagccggctgcgctacaccccccacccagcctatgccaccttctgccggcccaaggagaactggtggcagtacacccagggccgccgctatgccagcaccccccagaagttctacctgaccccaccccaggtgaacagcatcctgaaggccaatgagtacagcttcaaggtgcctgagtttgatggcaagaatgtgagcagcatcctgggctttgacagcaaccagctgcctgccaatgcccccattgaagatagaagatctgctgccacctgcctgcagacccggggcatgctgctgggcgtgtttgatggccacgccggctgtgcctgcagccaggccgtgtctgagcggctcttctactacatcgctgtgtccctgctgccccatgagaccctgctggagattgaaaatgctgtggagagcggccgggccctgctgcccatcctgcagtggcacaagcaccccaatgactacttcagcaaggaggccagcaagctgtacttcaacagcctgcggacctactggcaggagctgattgacctgaacacaggagagagcacagacattgatgtgaaggaggccctgatcaatgccttcaagaggctggacaatgacatcagcctggaggcccaggtgggggaccccaacagcttcctgaactacctggtgctgcgggtggccttcagcggggccacagcctgtgtggcccacgtggatggagtggacctgcacgtggccaacacaggagacagccgggccatgctgggcgtgcaggaggaggatggctcctggagcgctgtgaccctgagcaatgaccacaatgcccagaatgaaagagagctggagcggctgaagctggagcaccccaagtctgaggccaagtctgtggtgaagcaggaccggctgctgggcctgctgatgcccttccgggcctttggagatgtgaagttcaagtggagcattgacctgcagaagagggtcatcgagagcggccctgaccagctgaatgacaatgagtacaccaagttcatcccccccaactaccacaccccaccctacctgacagctgagcctgaggtgacctaccaccggctgcggccccaggacaagttcctggtgctggccacagatggcctgtgggagaccatgcaccggcaggatgtggtgagaattgtgggggagtacctgaccggcatgcaccaccagcagcccatcgctgtgggcggctacaaggtgaccctgggccagatgcacggcctgctgacagagaggaggaccaagatgagctctgtgtttgaggaccagaatgctgccacccacctgatcagacatgctgtgggcaacaatgaatttggaacagtggaccacgagcggctgagcaagatgctgagcctgcctgaggagctggccaggatgtacagagatgacatcaccatcatcgtggtgcagttcaacagccacgtggtgggcgcctaccagaaccaggagtag

SEQ ID NO: 166771 - DNA, 1614 bp, synthetic construct; identical to SEQ ID NO: 166769
  misc_feature 1..1614: note = Description of Artificial Sequence: Synthetic coding sequence
  source 1..1614: mol_type = other DNA

SEQ ID NO: 166772 - DNA, 231 bp, synthetic construct
  misc_feature 1..231: note = Description of Artificial Sequence: Synthetic coding sequence
  source 1..231: mol_type = other DNA
atgcctgcccccacccagctgttcttccccctcatccggaactgtgagctgagccgcatctatggaacagcctgctactgccaccacaagcacctgtgctgcagcagcagctacatcccccagagccggctgcgctacaccccccacccagcctatgccaccttctgccggcccaaggagaactggtggcagtacacccagggcagaagatatgccagcaccccccagtag

SEQ ID NO: 166773 - DNA, 387 bp, synthetic construct
  misc_feature 1..387: note = Description of Artificial Sequence: Synthetic coding sequence
  source 1..387: mol_type = other DNA
atgcctgcccccacccagctgttcttccccctcatccggaactgtgagctgagccgcatctatggaacagcctgctactgccaccacaagcacctgtgctgcagcagcagctacatcccccagagccggctgcgctacaccccccacccagcctatgccaccttctgccggcccaaggagaactggtggcagtacacccagggcagaagatatgccagcaccccccagaagttctacctgaccccaccccaggtgaacagcatcctgaaggccaatgagtacagcttcaaggtgcctgagtttgatggcaagaatgtgagcagcatcctgggctttgacagcaaccagctgcctgccaatgcccccatcgaggaccggcgctcctag

SEQ ID NO: 166774 - DNA, 699 bp, synthetic construct
  misc_feature 1..699: note = Description of Artificial Sequence: Synthetic coding sequence
  source 1..699: mol_type = other DNA
atgcctgcccccacccagctgttcttccccctcatccggaactgtgagctgagccgcatctatggaacagcctgctactgccaccacaagcacctgtgctgcagcagcagctacatcccccagagccggctgcgctacaccccccacccagcctatgccaccttctgccggcccaaggagaactggtggcagtacacccagggcagaagatatgccagcaccccccagaagttctacctgaccccaccccaggtgaacagcatcctgaaggccaatgagtacagcttcaaggtgcctgagtttgatggcaagaatgtgagcagcatcctgggctttgacagcaaccagctgcctgccaatgcccccatcgaggaccggcgctctgctgccacctgcctgcagacccggggcatgctgctgggcgtgtttgatggccatgctggctgtgcctgcagccaggccgtgtctgagcggctcttctactacatcgctgtgtccctgctgccccatgagaccctgctggagattgaaaatgctgtggagagcggccgggccctgctgcccatcctgcagtggcacaagcaccccaatgactacttcagcaaggaggccagcaagctgtacttcaacagcctgcggacctactggcaggagctgattgacctgaacacaggagagagcacagacattgatgtgtag

SEQ ID NO: 166775 - DNA, 219 bp, synthetic construct
  misc_feature 1..219: note = Description of Artificial Sequence: Synthetic coding sequence
  source 1..219: mol_type = other DNA
atgcctgcccccacccagctgttcttccccctcatccggaactgtgagctgagccgcatctatggaacagcctgctactgccaccacaagcacctgtgctgcagcagcagctacatcccccagagccggctgcgctacaccccccacccagcctatgccaccttctgccggcccaaggagaactggtggcagtacacccagggcagaagatatgcctag

SEQ ID NO: 166776 - DNA, 1614 bp, synthetic construct; identical to SEQ ID NO: 166769
  misc_feature 1..1614: note = Description of Artificial Sequence: Synthetic coding sequence
  source 1..1614: mol_type = other DNA

SEQ ID NO: 166777 - DNA, 444 bp, synthetic construct
  misc_feature 1..444: note = Description of Artificial Sequence: Synthetic coding sequence
  source 1..444: mol_type = other DNA
atgcctgcccccacccagctgttcttccccctcatccggaactgtgagctgagccgcatctatggaacagcctgctactgccaccacaagcacctgtgctgcagcagcagctacatcccccagagccggctgcgctacaccccccacccagcctatgccaccttctgccggcccaaggagaactggtggcagtacacccagggcagaagatatgccagcaccccccagaagttctacctgaccccaccccaggtgaacagcatcctgaaggccaatgagtacagcttcaaggtgcctgagtttgatggcaagaatgtgagcagcatcctgggctttgacagcaaccagctgcctgccaatgcccccatcgaggaccggcgctctgctgccacctgcctgcagacccggggcatgctgctgggcgtgtttgatggccacgcctag

SEQ ID NO: 166778 - DNA, 1467 bp, synthetic construct
  misc_feature 1..1467: note = Description of Artificial Sequence: Synthetic coding sequence
  source 1..1467: mol_type = other DNA
atggctgacaccttcctggagcacctgtgcctgctggacatcgacagcgagcctgtggccgcccggagcaccagcatcatcgccaccatcggccctgccagccgctctgtggagcggctgaaggagatgatcaaggccggcatgaacatcgcccggctgaacttcagccacggcagccatgagtaccacgccgagagcatcgccctggacaccaagggccctgagatcagaacaggcatcctgcagggcggccctgagagcgaggtggagctggtgaagggcagccaggtgctggtgacagtggaccctgccttccgcaccagaggaaatgccaacacagtgtgggtggactaccccaacatcgtgcgggtggtgcctgtgggcggccgcatctacattgatgatggcctcatcagcctggtggtgcagaagattggccctgagggcctggtgacccaggtggagaatggaggagtgctgggcagcaggaagggcgtgaacctgcccggggcccaggtggacctgcccggcctgtctgagcaggatgtgcgggacctgcgcttcggcgtggagcacggcgtggacatcgtgtttgccagctttgtgaggaaggccagtgatgtggccgctgtgcgggccgccctgggccctgagggccacggcatcaagatcatcagcaagattgaaaatcatgaaggagtgaagagatttgatgagatcctggaggtgtctgatggcatcatggtggcccggggggacctgggcatcgagatcccagctgagaaggtgttcctggcccagaagatgatgattggccgctgcaacctggccggcaagcctgtggtgtgtgccacccagatgctggagagcatgatcaccaagccccggcccaccagggctgagaccagtgatgtggccaatgctgtgctggatggagctgactgcatcatgctgtctggagaaacagccaagggcaacttccctgtggaggccgtgaagatgcagcacgccatcgcccgggaggccgaggccgctgtgtaccaccggcagctgtttgaggagctgcggcgggccgcccccctgagccgggaccccacagaggtgacagccatcggggctgtggaggccgccttcaagtgctgtgccgccgccatcatcgtgctgaccaccaccggccgcagcgcccagctgctgagccgctaccggcccagggctgctgtgattgctgtgaccaggtctgcccaggccgcccggcaggtgcacctgtgccggggcgtcttccccctgctgtaccgggagcccccagaggccatctgggcagatgatgtggacagaagagtgcagtttggaattgaaagtggcaagctgcggggcttcctgcgggtgggggacctggtgattgtggtgacaggctggaggcctggcagcggctacaccaacatcatgagggtgctgagcatctcctag

SEQ ID NO: 166779 - DNA, 1725 bp, synthetic construct
  misc_feature 1..1725: note = Description of Artificial Sequence: Synthetic coding sequence
  source 1..1725: mol_type = other DNA
atgagcatccaggagaacatcagcagcctgcagctgcgctcctgggtgtccaagagccagagggacctggccaagagcatcctgattggagcccctgggggccctgctggctacctgcggcgggcctctgtggcccagctgacccaggagctgggcacagccttcttccagcagcagcagctgcctgctgccatggctgacaccttcctggagcacctgtgcctgctggacatcgacagcgagcctgtggccgcccggagcaccagcatcatcgccaccatcggccctgccagccgctctgtggagcggctgaaggagatgatcaaggccggcatgaacatcgcccggctgaacttcagccacggcagccatgagtaccacgccgagagcatcgccaacgtgcgggaggccgtggagagctttgctggcagccccctgagctacagacctgtggccatcgccctggacaccaagggccctgagatcagaacaggcatcctgcagggcggccctgagagcgaggtggagctggtgaagggcagccaggtgctggtgacagtggaccctgccttccgcaccagaggaaatgccaacacagtgtgggtggactaccccaacatcgtgcgggtggtgcctgtgggcggccgcatctacattgatgatggcctcatcagcctggtggtgcagaagattggccctgagggcctggtgacccaggtggagaatggaggagtgctgggcagcaggaagggcgtgaacctgcccggggcccaggtggacctgcccggcctgtctgagcaggatgtgcgggacctgcgcttcggcgtggagcacggcgtggacatcgtgtttgccagctttgtgaggaaggccagtgatgtggccgctgtgcgggccgccctgggccctgagggccacggcatcaagatcatcagcaagattgaaaatcatgaaggagtgaagagatttgatgagatcctggaggtgtctgatggcatcatggtggcccggggggacctgggcatcgagatcccagctgagaaggtgttcctggcccagaagatgatgattggccgctgcaacctggccggcaagcctgtggtgtgtgccacccagatgctggagagcatgatcaccaagccccggcccaccagggctgagaccagtgatgtggccaatgctgtgctggatggagctgactgcatcatgctgtctggagaaacagccaagggcaacttccctgtggaggccgtgaagatgcagcacgccatcgcccgggaggccgaggccgctgtgtaccaccggcagctgtttgaggagctgcggcgggccgcccccctgagccgggaccccacagaggtgacagccatcggggctgtggaggccgccttcaagtgctgtgccgccgccatcatcgtgctgaccaccaccggccgcagcgcccagctgctgagccgctaccggcccagggctgctgtgattgctgtgaccaggtctgcccaggccgcccggcaggtgcacctgtgccggggcgtcttccccctgctgtaccgggagcccccagaggccatctgggcagatgatgtggacagaagagtgcagtttggaattgaaagtggcaagctgcggggcttcctgcgggtgggggacctggtgattgtggtgacaggctggaggcctggcagcggctacaccaacatcatgagggtgctgagcatctcctag

SEQ ID NO: 166780 - DNA, 1632 bp, synthetic construct
  misc_feature 1..1632: note = Description of Artificial Sequence: Synthetic coding sequence
  source 1..1632: mol_type = other DNA
atggagggccctgctggctacctgcggcgggcctctgtggcccagctgacccaggagctgggcacagccttcttccagcagcagcagctgcctgctgccatggctgacaccttcctggagcacctgtgcctgctggacattgattctgagcctgtggccgcccggagcaccagcatcatcgccaccatcggccctgccagccgctctgtggagcggctgaaggagatgatcaaggccggcatgaacatcgcccggctgaacttcagccacggcagccatgagtaccacgccgagagcatcgccaacgtgcgggaggccgtggagagctttgctggcagccccctgagctacagacctgtggccatcgccctggacaccaagggccctgagatcagaacaggcatcctgcagggcggccctgagagcgaggtggagctggtgaagggcagccaggtgctggtgacagtggaccctgccttccgcaccagaggaaatgccaacacagtgtgggtggactaccccaacatcgtgcgggtggtgcctgtgggcggccgcatctacattgatgatggcctcatcagcctggtggtgcagaagattggccctgagggcctggtgacccaggtggagaatggaggagtgctgggcagcaggaaaggagtgaacctgcccggggcccaggtggacctgcccggcctgtctgagcaggatgtgcgggacctgcgctttggagtggagcacggcgtggacatcgtgtttgccagctttgtgaggaaggccagtgatgtggccgctgtgcgggccgccctgggccctgagggccacggcatcaagatcatcagcaagattgagaaccacgagggcgtgaagagatttgatgagatcctggaggtgtctgatggcatcatggtggcccggggggacctgggcatcgagatcccagctgagaaggtgttcctggcccagaagatgatgattggccgctgcaacctggccggcaagcctgtggtgtgtgccacccagatgctggagagcatgatcaccaagccccggcccaccagggctgagaccagtgatgtggccaatgctgtgctggatggagctgactgcatcatgctgagcggggagacagccaagggcaacttccctgtggaggccgtgaagatgcagcacgccatcgcccgggaggccgaggccgctgtgtaccaccggcagctgtttgaggagctgcggcgggccgcccccctgagccgggaccccacagaggtgacagccatcggggctgtggaggccgccttcaagtgctgtgccgccgccatcatcgtgctgaccaccaccggccgcagcgcccagctgctgagccgctaccggcccagggctgctgtgattgctgtgaccaggtctgcccaggccgcccggcaggtgcacctgtgccggggcgtcttccccctgctgtaccgggagcccccagaggccatctgggcagatgatgtggaccggcgggtgcagtttggcatcgagagcggcaagctgcggggcttcctgcgggtgggggacctggtgattgtggtgacaggctggaggcctggcagcggctacaccaacatcatgagggtgctgagcatctcctag

SEQ ID NO: 166781 - DNA, 1800 bp, synthetic construct
  misc_feature 1..1800: note = Description of Artificial Sequence: Synthetic coding sequence
  source 1..1800: mol_type = other DNA
atgagcatccaggagaacatcagcagcctgcagctgcgctcctgggtgtccaagagccagagggacctggccaagagcatcctgattggagcccctggggtgcccctgaccacccagcagtgtggggctgacccccagaggggccggccccgggaggtgtgcagcggcatggagggccctgctggctacctgcggcgggcctctgtggcccagctgacccaggagctgggcacagccttcttccagcagcagcagctgcctgctgccatggctgacaccttcctggagcacctgtgcctgctggacattgattctgagcctgtggccgcccggagcaccagcatcatcgccaccatcggccctgccagccgctctgtggagcggctgaaggagatgatcaaggccggcatgaacatcgcccggctgaacttcagccacggcagccatgagtaccacgccgagagcatcgccaacgtgcgggaggccgtggagagctttgctggcagccccctgagctacagacctgtggccatcgccctggacaccaagggccctgagatcagaacaggcatcctgcagggcggccctgagagcgaggtggagctggtgaagggcagccaggtgctggtgacagtggaccctgccttccgcaccagaggaaatgccaacacagtgtgggtggactaccccaacatcgtgcgggtggtgcctgtgggcggccgcatctacattgatgatggcctcatcagcctggtggtgcagaagattggccctgagggcctggtgacccaggtggagaatggaggagtgctgggcagcaggaaaggagtgaacctgcccggggcccaggtggacctgcccggcctgtctgagcaggatgtgcgggacctgcgctttggagtggagcacggcgtggacatcgtgtttgccagctttgtgaggaaggccagtgatgtggccgctgtgcgggccgccctgggccctgagggccacggcatcaagatcatcagcaagattgagaaccacgagggcgtgaagagatttgatgagatcctggaggtgtctgatggcatcatggtggcccggggggacctgggcatcgagatcccagctgagaaggtgttcctggcccagaagatgatgattggccgctgcaacctggccggcaagcctgtggtgtgtgccacccagatgctggagagcatgatcaccaagccccggcccaccagggctgagaccagtgatgtggccaatgctgtgctggatggagctgactgcatcatgctgagcggggagacagccaagggcaacttccctgtggaggccgtgaagatgcagcacgccatcgcccgggaggccgaggccgctgtgtaccaccggcagctgtttgaggagctgcggcgggccgcccccctgagccgggaccccacagaggtgacagccatcggggctgtggaggccgccttcaagtgctgtgccgccgccatcatcgtgctgaccaccaccggccgcagcgcccagctgctgagccgctaccggcccagggctgctgtgattgctgtgaccaggtctgcccaggccgcccggcaggtgcacctgtgccggggcgtcttccccctgctgtaccgggagcccccagaggccatctgggcagatgatgtggaccggcgggtgcagtttggcatcgagagcggcaagctgcggggcttcctgcgggtgggggacctggtgattgtggtgacaggctggaggcctggcagcggctacaccaacatcatgagggtgctgagcatctcctag

SEQ ID NO: 166782 - DNA, 1596 bp, synthetic construct
  misc_feature 1..1596: note = Description of Artificial Sequence: Synthetic coding sequence
  source 1..1596: mol_type = other DNA
atgagcaagccccacagcgaggccggcacagccttcatccagacccagcagctgcacgccgccatggctgacaccttcctggagcacatgtgccgcctggacatcgacagcccccccatcacagccaggaacacaggcatcatctgcaccatcggccctgccagccgctctgtggagaccctgaaggagatgatcaagagcggcatgaatgtggcccggctgaacttcagccacggcacccatgagtaccacgccgagaccatcaagaatgtgaggacagccacagagagctttgccagtgaccccatcctgtacagacctgtggccgtggccctggacaccaagggccctgagatcagaacaggcctcatcaagggcagcggcacagctgaggtggagctgaagaagggggccaccctgaagatcaccctggacaatgcctacatggagaagtgtgatgagaacatcctgtggctggactacaagaacatctgcaaggtggtggaggtgggcagcaagatctacgtggatgatggcctcatcagcctgcaggtgaagcagaagggagctgacttcctggtgacagaggtggagaatggaggcagcctgggcagcaagaagggcgtgaacctgcccggggctgctgtggacctgcctgctgtgtctgagaaggacatccaggacctgaagtttggagtggagcaggatgtggacatggtgtttgccagcttcatcaggaaggccagtgatgtgcatgaggtgaggaaggtgctgggggagaagggcaagaacatcaagatcatcagcaagattgagaaccacgagggcgtgagaagatttgatgagatcctggaggccagtgatggcatcatggtggcccggggggacctgggcatcgagatcccagctgagaaggtgttcctggcccagaagatgatgattggccgctgcaacagagctgggaagcctgtgatctgtgccacccagatgctggagagcatgatcaagaagccccggcccaccagggctgagggcagtgatgtggccaatgctgtgctggatggagctgactgcatcatgctgagcggggagacagccaagggggactaccccctggaggccgtgaggatgcagcacctgattgcccgggaggccgaggccgccatgttccacaggaagctgtttgaggagctggtgcgggccagcagccacagcacagacctgatggaggccatggccatgggctctgtggaggccagctacaagtgcctggccgccgccctgattgtgctgacagagagcggccgcagcgcccaccaggtggcccgctaccggccccgggcccccatcatcgctgtgaccaggaacccccagacagcccggcaggcccacctgtaccggggcatcttccctgtgctgtgcaaggaccctgtgcaggaggcctgggccgaggatgtggacctgcgggtgaactttgccatgaatgtgggcaaggcccggggcttcttcaagaagggagatgtggtgattgtgctgaccggctggaggcctggcagcggcttcaccaacaccatgagggtggtgcctgtgccctag

SEQ ID NO: 166783 - DNA, 1101 bp, synthetic construct
  misc_feature 1..1101: note = Description of Artificial Sequence: Synthetic coding sequence
  source 1..1101: mol_type = other DNA
atgagcaagccccacagcgaggccggcacagccttcatccagacccagcagctgcacgccgccatggctgacaccttcctggagcacatgtgccgcctggacatcgacagcccccccatcaagaagggcgtgaacctgcctggagctgctgtggacctgcctgctgtgtctgagaaggacatccaggacctgaagtttggagtggagcaggatgtggacatggtgtttgccagcttcatcaggaaggccagtgatgtgcatgaggtgaggaaggtgctgggggagaagggcaagaacatcaagatcatcagcaagattgaaaatcatgaaggagtgagaagatttgatgagatcctggaggccagtgatggcatcatggtggcccggggggacctgggcatcgagatcccagctgagaaggtgttcctggcccagaagatgatgattggccgctgcaacagagctgggaagcctgtgatctgtgccacccagatgctggagagcatgatcaagaagccccggcccaccagggctgagggcagtgatgtggccaatgctgtgctggatggagctgactgcatcatgctgtctggagaaacagccaagggggactaccccctggaggccgtgaggatgcagcacctgattgcccgggaggccgaggccgccatgttccacaggaagctgtttgaggagctggtgcgggccagcagccacagcacagacctgatggaggccatggccatgggctctgtggaggccagctacaagtgcctggccgccgccctgattgtgctgacagaaagtggccgcagcgcccaccaggtggcccgctaccggccccgggcccccatcatcgctgtgaccaggaacccccagacagcccggcaggcccacctgtaccggggcatcttccctgtgctgtgcaaggaccctgtgcaggaggcctgggccgaggatgtggacctgcgggtgaactttgccatgaatgtgggcaaggcccggggcttcttcaagaagggagatgtggtgattgtgctgaccggctggaggcctggcagcggcttcaccaacaccatgagggtggtgcctgtgccctag

SEQ ID NO: 166784 - DNA, 1596 bp, synthetic construct
  misc_feature 1..1596: note = Description of Artificial Sequence: Synthetic coding sequence
  source 1..1596: mol_type = other DNA
atgagcaagccccacagcgaggccggcacagccttcatccagacccagcagctgcacgccgccatggctgacaccttcctggagcacatgtgccgcctggacatcgacagcccccccatcacagccaggaacacaggcatcatctgcaccatcggccctgccagccgctctgtggagaccctgaaggagatgatcaagagcggcatgaatgtggcccggctgaacttcagccacggcacccatgagtaccacgccgagaccatcaagaatgtgaggacagccacagagagctttgccagtgaccccatcctgtacagacctgtggccgtggccctggacaccaagggccctgagatcagaacaggcctcatcaagggcagcggcacagctgaggtggagctgaagaagggggccaccctgaagatcaccctggacaatgcctacatggagaagtgtgatgagaacatcctgtggctggactacaagaacatctgcaaggtggtggaggtgggcagcaagatctacgtggatgatggcctcatcagcctgcaggtgaagcagaagggagctgacttcctggtgacagaggtggagaatggaggcagcctgggcagcaagaagggcgtgaacctgcccggggctgctgtggacctgcctgctgtgtctgagaaggacatccaggacctgaagtttggagtggagcaggatgtggacatggtgtttgccagcttcatcaggaaggccagtgatgtgcatgaggtgaggaaggtgctgggggagaagggcaagaacatcaagatcatcagcaagattgagaaccacgagggcgtgagaagatttgatgagatcctggaggccagtgatggcatcatggtggcccggggggacctgggcatcgagatcccagctgagaaggtgttcctggcccagaagatgatgattggccgctgcaacagagctgggaagcctgtgatctgtgccacccagatgctggagagcatgatcaagaagccccggcccaccagggctgagggcagtgatgtggccaatgctgtgctggatggagctgactgcatcatgctgagcggggagacagccaagggggactaccccctggaggccgtgaggatgcagcacctgattgcccgggaggccgaggccgccatctaccacctgcagctgtttgaggagctgcggcggctggcccccatcaccagtgaccccacagaggccacagctgtgggcgctgtggaggccagcttcaagtgctgcagcggggccatcatcgtgctgaccaagagcggccgcagcgcccaccaggtggcccgctaccggccccgggcccccatcatcgctgtgaccaggaacccccagacagcccggcaggcccacctgtaccggggcatcttccctgtgctgtgcaaggaccctgtgcaggaggcctgggccgaggatgtggacctgcgggtgaactttgccatgaatgtgggcaaggcccggggcttcttcaagaagggagatgtggtgattgtgctgaccggctggaggcctggcagcggcttcaccaacaccatgagggtggtgcctgtgccctag

SEQ ID NO: 166785 - DNA, 1596 bp, synthetic construct; identical to SEQ ID NO: 166782
  misc_feature 1..1596: note = Description of Artificial Sequence: Synthetic coding sequence
  source 1..1596: mol_type = other DNA

SEQ ID NO: 166786 - DNA, 1377 bp, synthetic construct
  misc_feature 1..1377: note = Description of Artificial Sequence: Synthetic coding sequence
  source 1..1377: mol_type = other DNA
atgagcaagccccacagcgaggccggcacagccttcatccagacccagcagctgcacgccgccatggctgacaccttcctggagcacatgtgccgcctggacatcgacagcccccccatcacagccaggaacacaggcatcatctgcaccatcggccctgccagccgctctgaggtggagctgaagaagggggccaccctgaagatcaccctggacaatgcctacatggagaagtgtgatgagaacatcctgtggctggactacaagaacatctgcaaggtggtggaggtgggcagcaagatctacgtggatgatggcctcatcagcctgcaggtgaagcagaagggagctgacttcctggtgacagaggtggagaatggaggcagcctgggcagcaagaagggcgtgaacctgcctggagctgctgtggacctgcctgctgtgtctgagaaggacatccaggacctgaagtttggagtggagcaggatgtggacatggtgtttgccagcttcatcaggaaggccagtgatgtgcatgaggtgaggaaggtgctgggggagaagggcaagaacatcaagatcatcagcaagattgaaaatcatgaaggagtgagaagatttgatgagatcctggaggccagtgatggcatcatggtggcccggggggacctgggcatcgagatcccagctgagaaggtgttcctggcccagaagatgatgattggccgctgcaacagagctgggaagcctgtgatctgtgccacccagatgctggagagcatgatcaagaagccccggcccaccagggctgagggcagtgatgtggccaatgctgtgctggatggagctgactgcatcatgctgtctggagaaacagccaagggggactaccccctggaggccgtgaggatgcagcacctgattgcccgggaggccgaggccgccatctaccacctgcagctgtttgaggagctgcggcggctggcccccatcaccagtgaccccacagaggccacagctgtgggcgctgtggaggccagcttcaagtgctgcagcggggccatcatcgtgctgaccaagagcggccgcagcgcccaccaggtggcccgctaccggccccgggcccccatcatcgctgtgaccaggaacccccagacagcccggcaggcccacctgtaccggggcatcttccctgtgctgtgcaaggaccctgtgcaggaggcctgggccgaggatgtggacctgcgggtgaactttgccatgaatgtgggcaaggcccggggcttcttcaagaagggagatgtggtgattgtgctgaccggctggaggcctggcagcggcttcaccaacaccatgagggtggtgcctgtgccctag

SEQ ID NO: 166787 - DNA, 1551 bp, synthetic construct
  misc_feature 1..1551: note = Description of Artificial Sequence: Synthetic coding sequence
  source 1..1551: mol_type = other DNA
atgagccctgaggcccagccccagaggaccaagggcccccagcagccctgccgcagccccatcgtgaagccaggcctgcccagcttccggcccagcagctgcacccagccctggctgacccacagctggagcacctgtgccgcctggaccctcatccaccaccccagccagcccggcaccctggccagctctgtgcccctgtaccacgccgagaccatcaagaatgtgaggacagccacagagagctttgccagtgaccccatcctgtacagacctgtggccgtggccctggacaccaagggccctgagatcagaacaggcctcatcaagggcagcggcacagctgaggtggagctgaagaagggggccaccctgaagatcaccctggacaatgcctacatggagaagtgtgatgagaacatcctgtggctggactacaagaacatctgcaaggtggtggaggtgggcagcaagatctacgtggatgatggcctcatcagcctgcaggtgaagcagaagggagctgacttcctggtgacagaggtggagaatggaggcagcctgggcagcaagaagggcgtgaacctgcctggagctgctgtggacctgcctgctgtgtctgagaaggacatccaggacctgaagtttggagtggagcaggatgtggacatggtgtttgccagcttcatcaggaaggccagtgatgtgcatgaggtgaggaaggtgctgggggagaagggcaagaacatcaagatcatcagcaagattgaaaatcatgaaggagtgagaagatttgatgagatcctggaggccagtgatggcatcatggtggcccggggggacctgggcatcgagatcccagctgagaaggtgttcctggcccagaagatgatgattggccgctgcaacagagctgggaagcctgtgatctgtgccacccagatgctggagagcatgatcaagaagccccggcccaccagggctgagggcagtgatgtggccaatgctgtgctggatggagctgactgcatcatgctgtctggagaaacagccaagggggactaccccctggaggccgtgaggatgcagcacctgattgcccgggaggccgaggccgccatctaccacctgcagctgtttgaggagctgcggcggctggcccccatcaccagtgaccccacagaggccacagctgtgggcgctgtggaggccagcttcaagtgctgcagcggggccatcatcgtgctgaccaagagcggccgcagcgcccaccaggtggcccgctaccggccccgggcccccatcatcgctgtgaccaggaacccccagacagcccggcaggcccacctgtaccggggcatcttccctgtgctgtgcaaggaccctgtgcaggaggcctgggccgaggatgtggacctgcgggtgaactttgccatgaatgtgggcaaggcccggggcttcttcaagaagggagatgtggtgattgtgctgaccggctggaggcctggcagcggcttcaccaacaccatgagggtggtgcctgtgccctag

SEQ ID NO: 166788 - DNA, 1212 bp, synthetic construct
  misc_feature 1..1212: note = Description of Artificial Sequence: Synthetic coding sequence
  source 1..1212: mol_type = other DNA
atggccggggccgccacccaggccagcctggagagcgccccccgcatcatgaggctggtggccgagtgcagccgcagccgggcccgggccggggagctgtggctgccccatggaacagtggccacccctgtgttcatgcctgtgggcacccaggccaccatgaagggcatcaccacagagcagctggatgccctgggctgccgcatctgcctgggcaacacctaccacctgggcctgcggcccggccctgagctgatccagaaggccaacggcctgcacggcttcatgaactggccccacaacctgctgacagacagcggcggcttccagatggtgtccctggtgtccctgtctgaggtgacagaggagggcgtgcgcttccgcagcccctatgatggaaatgagaccctgctgagccctgagaagtctgtgcagatccagaatgccctgggcagtgacatcatcatgcagctggatgatgtggtgagcagcacagtgacaggcccccgggtggaggaggccatgtaccgcagcatccgctggctggaccgctgcatcgccgcccaccagaggccagacaagcagaacctgtttgccatcatccagggcggcctggatgctgacctgcgggccacctgcctggaggagatgaccaagagagatgtgcccggctttgccatcggcggcctgtctggaggagagagcaagagccagttctggaggatggtggccctgagcaccagccggctgcccaaggacaagccccgctacctgatgggcgtgggctacgccacagacctggtggtgtgtgtggccctgggctgtgacatgtttgactgtgtgttccccaccaggacagccaggtttggaagtgccctggtgcccaccggcaacctgcagctgaggaagaaggtgtttgagaaggactttggccccattgatcctgagtgcacctgccccacctgccagaagcacagccgggccttcctgcacgccctgctgcacagcgacaacacagctgccctgcaccacctgactgtgcacaacatcgcctaccagctgcagctgatgtctgctgtgaggaccagcatcgtggagaagcgcttcccagactttgtgcgggacttcatgggcgccatgtatggagaccccaccctgtgccccacctgggccacagatgccctggcctctgtgggcatcaccctgggctag

SEQ ID NO: 166789 - DNA, 678 bp, synthetic construct
  misc_feature 1..678: note = Description of Artificial Sequence: Synthetic coding sequence
  source 1..678: mol_type = other DNA
atggccggggccgccacccaggccagcctggagagcgccccccgcatcatgaggctggtggccgagtgcagccgcagccgggcccgggccggggagctgtggctgccccatggaacagtggccacccctgtgttcatgcctgtgggcacccaggccaccatgaagggcatcaccacagagcagctggatgccctgggctgccgcatctgcctgggcaacacctaccacctgggcctgcggcccggccctgagctgatccagaaggccaacggcctgcacggcttcatgaactggccccacaacctgctgacagacagcggcggcttccagatggtgtccctggtgtccctgtctgaggtgacagaggagggcgtgcgcttccgcagcccctatgatggaaatgagaccctgctgagccctgagaagtctgtgcagatccagaatgccctgggcagtgacatcatcatgcagctggatgatgtggtgagcagcacagtgacaggcccccgggtggaggaggccatgtaccggcccctgggcctggtgactggagccctgctgcaggtgaaccccctggccggccctgtgcactgcagccccagcgctgctggccaggccgagcccctgcggcactacccaggctgggccggccgccgcagccctggccacctgccctag

SEQ ID NO: 166790 - DNA, 2097 bp, synthetic construct
  misc_feature 1..2097: note = Description of Artificial Sequence: Synthetic coding sequence
  source 1..2097: mol_type = other DNA
atggctgctgctggagctgctgtggcccggagccctggcatcggggccggccctgccctgcgggcccggcgcagccccccaccccgggccgcccggctgccccggctgctggtgctgctggccgctgctgctgtgggccctggagctggaggagctgcccggctgtaccgggccggggaggatgctgtgtgggtgctggacagcggctctgtgcggggggccacagccaacagcagcgctgcctggctggtgcagttctacagctcctggtgtggccactgcatcggctacgcccccacctggagggccctggccggagatgtgcgggactgggccagcgccatccgggtggccgccctggactgcatggaggagaagaaccaggccgtgtgccacgactatgacatccacttctaccccaccttccgctacttcaaggccttcaccaaggagttcaccaccggggagaacttcaagggccctgaccgggagctgaggacagtgcggcagaccatgattgacttcctgcagaaccacacagagggcagccggcccccagcctgcccccggctggaccccatccagcccagtgatgtgctgagcctgctggacaacagaggcagccactacgtggccatcgtgtttgagagcaacagcagctacctgggccgggaggtgatcctggacctgatcccctatgagagcatcgtggtgacccgggccctggatggagacaaggccttcctggagaagctgggcgtgtcctctgtgcccagctgctacctgatctaccccaacggcagccacggcctcatcaacgtggtgaagcccctgcgggccttcttcagcagctacctgaagagcctgcctgatgtgaggaagaagagcctgcccctgcctgagaagccccacaaggaggagaacagcgagatcgtggtgtggagggagtttgacaagagcaagctgtacacagtggacctggagagcggcctgcactacctgctgcgggtggagctggccgcccacaagagcctggccggggctgagctgaagaccctgaaggactttgtgacagtgctggccaagctgtttcctggccggccccctgtgaagaagctgctggagatgctgcaggagtggctggccagcctgcccctggaccgcatcccctacaatgctgtgctggacctggtgaacaacaagatgaggatcagcggcatcttcctgaccaaccacatcaagtgggtgggctgccagggcagccgctctgagctgcggggctacccctgcagcctgtggaagctgttccacaccctgactgtggaggccagcacccacccagatgccctggtgggcactggatttgaagatgacccccaggccgtgctgcagaccatgagaagatatgtgcacaccttcttcggctgcaaggaatgtggggagcactttgaggagatggccaaggagagcatggattctgtgaagaccccagaccaggccatcctgtggctgtggaagaagcacaacatggtgaatggccgcctggccggccacctgtctgaggacccccgcttccccaagctgcagtggcccaccccagacctgtgcccagcctgccacgaggagatcaagggcctggcctcctgggatgagggccacgtgctgaccttcctgaagcagcactacggccgggacaacctgctggacacctacagcgctgaccagggcgacagcagcgagggcggcaccctggcccggggggaggaggaggagaagaggctgaccccacctgaggtgtcccatggagaccgggacacccagagcgtgcggcccccaggggccctgggccccaggcctgccctgcctgagagcctgcaccacagcctggatggcaagctgcagagcctggatggccctggggcccacaaggaggtgggcggggccgcccccttcctgggcgtggacttcagcagcctggacatgagcctgtgtgtggtgctgtatgtggccagcagcctcttcctgatggtgatgtacttcttcttccgggtgcgcagccgccgctggaaggtgaagcaccaccaccctgctgtgtag

SEQ ID NO: 166791 - DNA, 948 bp, synthetic construct
  misc_feature 1..948: note = Description of Artificial Sequence: Synthetic coding sequence
  source 1..948: mol_type = other DNA
atggaggagaagaaccaggccgtgtgccacgactatgacatccacttctaccccaccttccgctacttcaaggccttcaccaaggagttcaccaccggggagaacttcaagggccctgaccgggagctgaggacagtgcggcagaccatgattgacttcctgcagaaccacacagagggcagccggcccccagcctgcccccggctggaccccatccacgtgaagcccctgcgggccttcttcagcagctacctgaagagcctgcctgatgtgaggaagaagagcctgcccctgcctgagaagccccacaaggaggagaacagcgagatcgtggtgtggagggagtttgacaagagcaagctgtacacagtggacctggagagcggcctgcactacctgctgcgggtggagctggccgcccacaagagcctggccggggctgagctgaagaccctgaaggactttgtgacagtgctggccaagctgtttcctggccggccccctgtgaagaagctgctggagatgctgcaggagtggctggccagcctgcccctggaccgcatcccctacaatgctgtgctggacctggtgaacaacaagatgaggatcagcggcatcttcctgaccaaccacatcaagtgggtgggctgccagggcagccgctctgagctgcggggctacccctgcagcctgtggaagctgttccacaccctgactgtggaggccagcacccacccagatgccctggtgggcaccggctttgaagatgacccccaggccgtgctgcagaccatgaggcgctacgtgcacaccttcttcggctgcaaggaatgtggggagcactttgaggagatggccaaggagagcatggacagcgtgaagaccccagaccaggccatcctgtggctgtggaagaagcacaacatggtgaatggccgcctggcctag

SEQ ID NO: 166792 - DNA, 735 bp, synthetic construct
  misc_feature 1..735: note = Description of Artificial Sequence: Synthetic coding sequence
  source 1..735: mol_type = other DNA
atggctgctgctgctgctgctggggaggccaggagagtgctggtgtatggaggccgcggggccctgggcagccgctgtgtgcaggccttccgggccaggaactggtgggtggcctctgtggatgtggtggagaatgaggaggccagcgccagcatcatcgtgaagatgacagacagcttcacagagcaggccgaccaggtgacagctgaggtgggcaagctgctgggggaggagaaggtggatgccatcctgtgtgtggccggcggctgggccggcggcaatgccaagagcaagagcctcttcaagaactgtgacctgatgtggaagcagagcatctggaccagcaccatcagcagccacctggccaccaagcacctgaaggagggcggcctgctgaccctggccggggccaaggccgccctggatggcaccccaggcatgattggctacggcatggccaagggagctgtgcaccagctgtgccagagcctggccggcaagaacagcggcatgcctcctggagctgctgccatcgctgtgctgcctgtgaccctggacacccccatgaacaggaagtccatgcctgaggccgacttcagctcctggacccccctggagttcctggtggagaccttccatgactggatcaccgggaagaaccggcccagcagcggcagcctcatccaggtggtgaccacagagggccgcacagagctgaccccagcctacttctag

SEQ ID NO: 166793 - DNA, 681 bp, synthetic construct
  misc_feature 1..681: note = Description of Artificial Sequence: Synthetic coding sequence
  source 1..681: mol_type = other DNA
atggccgcccccctgctgcacacccggctgcctggagatgctgctgccagccccagcgctgtgaagatgctgggcgccagcaggacaggcatcagcaacatgagggccctggagaatgacttcttcaacagcccccccaggaagacagtgcagtttggaggcaccgtgacagaggtgctgctgaagtacaagacaggagagaccaatgactttgagctgctgaagaaccagctgctggaccctgacatcaaggatgaccagatcatcaactggctgctggagttccgcagcagcatcatgtacctgaccaaggactttgagcagctgatcagcatcatcctgcggctgccctggctgaacagaagccagacagtggtggaggagtacctggccttcctgggcaacctggtgtctgcccagacagtgttcctgcggccctgcctgtccatgattgccagccactttgtgccccccagggtcatcatcaaggagggagatgtggatgtgtctgacagtgatgatgaagatgacaacctgcctgccaactttgacaccagccagagcctggccaacaacagcaagatctgcaccatcgacacagtggtgagccacgccaacacaggaggcaagatcagcatctgcagcaagatcagagaaaatacaggcatgctgcggagctag

SEQ ID NO: 166794 - DNA, 894 bp, synthetic construct
  misc_feature 1..894: note = Description of Artificial Sequence: Synthetic coding sequence
  source 1..894: mol_type = other DNA
atggatgctgagggcctggccctgctgctgccccctgtgaccctggccgccctggtggacagctggctgcgggaggactgccccggcctgaactatgctgccctggtgtctggagctggccccagccaggccgccctgtgggccaagagccctggggtgctggccggccagcccttctttgatgccatcttcacccagctgaactgccaggtgtcctggttcctgcctgagggcagcaagctggtgcctgtggcccgggtggccgaggtgcggggccctgcccactgcctgctgctgggggagcgggtggccctgaacaccctggcccgctgcagcggcatcgccagcgctgctgctgctgctgtggaggccgcccggggggccggctggacaggccacgtggccggcaccaggaagaccaccccaggcttccggctggtggagaagtatggcctgctggtgggcggggccgccagccacagatatgacctgggcggcctggtgatggtgaaggacaaccacgtggtggccgccggcggcgtggagaaggctgtgcgggccgcccggcaggccgctgacttcaccctgaaggtggaggtggagtgcagcagcctgcaggaggccgtgcaggccgctgaggccggggctgacctggtgctgctggacaacttcaagccagaggagctgcaccccacagccaccgtgctgaaggcccagttccccagcgtggccgtggaggccagcggcggcatcaccctggacaacctgccccagttctgtggcccccacattgatgtgatctccatgggcatgctgacccaggccgccccagccctggacttcagcctgaagctgtttgccaaggaggtggcccctgtgcccaagatccactag

SEQ ID NO: 166795 - DNA, 498 bp, synthetic construct
  misc_feature 1..498: note = Description of Artificial Sequence: Synthetic coding sequence
  source 1..498: mol_type = other DNA
atggatgctgagggcctggccctgctgctgccccctgtgaccctggccgccctggtggacagctggctgcgggaggactgccccggcctgaactatgctgccctggtgtctggagctggccccagccaggccgccctgtgggccaagagccctggggtgctggccggccagcccttctttgatgccatcttcacccagctgaactgccaggtgtcctggttcctgcctgagggcagcaagctggtgcctgtggcccgggtggccgaggtgcggggccctgcccactgcctgctgctgggggagcgggtggccctgaacaccctggcccgctgcagcggcatcgccagcgctgctgctgctgctgtggaggccgcccggggggccggctggacaggccacgtggccggcaccaggaagaccaccccaggcttccggctggtggagaagtatggcctgctggtgggcggggccgccagccacagatatgacctgggctag

SEQ ID NO: 166796 - DNA, 2154 bp, synthetic construct
  misc_feature 1..2154: note = Description of Artificial Sequence: Synthetic coding sequence
  source 1..2154: mol_type = other DNA
atggctgtggccgtgaggaccctgcaggagcagctggagaaggccaaggagagcctgaagaatgtggatgagaacatcaggaagctgaccggccgggaccccaatgatgtgcggcccatccaggcccggctgctggccctgagcggccctgggggcggccggggccggggcagcctgctgctgcggcggggcttcagtgacagcggcggcggccccccagccaagcagagggacctggagggcgctgtgtcccggctgggcggggagaggaggacccggcgggagagccggcaggagagtgaccctgaagatgatgatgtgaagaagccagccctgcagagctctgtggtggccaccagcaaggagaggacccggcgggacctgatccaggaccagaacatggatgagaagggcaagcagaggaacagacgcatcttcggcctgctgatgggcaccctgcagaagttcaagcaggagagcacagtggccacagagcggcagaagaggcggcaggagattgagcagaagctggaggtgcaggccgaggaggagaggaagcaggtggagaatgaaagaagagagctgtttgaggagcggcgggccaagcagacagagctgcggctgctggagcagaaggtggagctggcccagctgcaggaggagtggaatgagcacaatgccaagatcatcaagtacatccgcaccaagaccaagccccacctgttctacatccctggccgcatgtgcccagccacccagaagctgattgaggagagccagaggaagatgaatgccctgtttgagggccgccgcatcgagtttgctgagcagatcaacaagatggaggcccggccccggcggcagagcatgaaggagaaggagcaccaggtggtgagaaatgaggagcagaaggccgagcaggaggagggcaaggtggcccagcgggaggaggagctggaggagaccggcaaccagcacaatgatgtggagattgaggaggccggggaggaggaggagaaggagatcgccatcgtgcacagtgatgctgagaaggagcaggaggaggaggagcagaagcaggagatggaggtgaagatggaggaggagacagaggtgcgggagagcgagaagcagcaggacagccagcctgaggaggtgatggatgtgctggagatggtggagaatgtgaagcacgtgattgctgaccaggaggtgatggagaccaacagagtggagagcgtggagcccagtgaaaatgaggccagcaaggagctggagcctgagatggagtttgaaattgaaccagacaaggagtgcaagaccctgagccctgggaaggaaaatgtgtctgccctggacatggagaaggagagcgaggagaaggaggagaaggagagcgagccccagcctgagcctgtggcccagccccagccccagagccagccccagctgcagctgcagagccagagccagcctgtgctgcagagccagccccccagccagcctgaggacctgagcctggccgtgctgcagcccaccccccaggtgacccaggagcagggccacctgctgcctgagaggaaggacttccctgtggagagcgtgaagctgacagaggtgcctgtggagcctgtgctgactgtgcaccctgagagcaagagcaagaccaagaccaggagccgcagccggggccgggccaggaacaagaccagcaagagccgcagccgcagcagcagcagcagcagcagcagcagcagcagcaccagcagcagcagcggcagcagcagcagcagcggcagcagcagcagccgcagcagcagcagcagcagcagcagcaccagcggcagcagcagccgggacagcagcagcagcaccagcagcagcagcgagagccgcagccgcagccggggccggggccacaacagagacaggaagcacagaagatctgtggacaggaagaggcgggacaccagcggcctggagaggagccacaagagcagcaagggcggcagcagccgggacaccaagggcagcaaggacaagaacagcagaagtgacaggaagaggagcatcagcgagagcagccgcagcggcaagaggagcagccgctctgagcgggacaggaagagtgacaggaaggacaagagaagatag

SEQ ID NO: 166797 - DNA, 1704 bp, synthetic construct; identical to SEQ ID NO: 149095
  misc_feature 1..1704: note = Description of Artificial Sequence: Synthetic coding sequence
  source 1..1704: mol_type = other DNA

SEQ ID NO: 166798 - DNA, 996 bp, synthetic construct
  misc_feature 1..996: note = Description of Artificial Sequence: Synthetic coding sequence
  source 1..996: mol_type = other DNA
atgggcaccccccagaaggatgtgatcatcaagagtgatgccccagacaccctgctgctggagaagcacgccgactacatcgccagctatggcagcaagaaggatgattatgagtactgcatgtctgagtacctgaggatgagcggcatctactggggcctgactgtgatggacctgatgggccagctgcacaggatgaaccgggaggagatcctggccttcatcaagagctgccagcatgaatgtggcggcatcagcgccagcattggacatgacccccacctgctgtacaccctgtctgctgtgcagatcctgaccctgtatgacagcatcaacgtgattgatgtgaacaaggtggtggagtatgtgaagggcctgcagaaggaggatggcagctttgctggggacatctggggcgagattgacacccgcttctccttctgtgctgtggccaccctggccctgctgggcaagctggatgccatcaacgtggagaaggccatcgagtttgtgctgagctgcatgaactttgatggcggcttcggctgcaggcctggcagcgagagccatgctggccagatctactgctgcaccggcttcctggccatcaccagccagctgcaccaggtgaacagcgacctgctgggctggtggctgtgtgagcggcagctgcccagcggcggcctgaatggccggcctgagaagctgcctgatgtgtgctacagctggtgggtgctggccagcctgaagatcatcggccgcctgcactggattgaccgggagaagctgaggaacttcatcctggcctgccaggatgaggagactggaggctttgctgacaggcctggggacatggtggaccccttccacaccctgtttggaattgctggcctgagcctgctgggggaggagcagatcaagcctgtgaaccctgtgttctgcatgcctgaggaggtgctgcagagggtgaatgtgcagcctgagctggtgtcctag

SEQ ID NO: 166799 - DNA, 963 bp, synthetic construct
  misc_feature 1..963: note = Description of Artificial Sequence: Synthetic coding sequence
  source 1..963: mol_type = other DNA
atgggcaccccccagaaggatgtgatcatcaagagtgatgccccagacaccctgctgctggagaagcacgccgactacatcgccagctatggcagcaagaaggatgattatgagtactgcatgtctgagtacctgaggatgagcggcatctactggggcctgactgtgatggacctgatgggccagctgcacaggatgaaccgggaggagatcctggccttcatcaagagctgccagcatgaatgtggcggcatcagcgccagcattggacatgacccccacctgctgtacaccctgtctgctgtgcagatcctgaccctgtatgacagcatcaacgtgattgatgtgaacaaggtggtggagtatgtgaagggcctgcagaaggaggatggcagctttgctggggacatctggggcgagattgacacccgcttctccttctgtgctgtggccaccctggccctgctgggcaagctggatgccatcaacgtggagaaggccatcgagtttgtgctgagctgcatgaactttgatggcggcttcggctgcaggcctggcagcgagagccatgctggccagatctactgctgcaccggcttcctggccatcaccagccagctgcaccaggtgaacagcgacctgctgggctggtggctgtgtgagcggcagctgcccagcggcggcctgaatggccggcctgagaagctgcctgatgtgtgctacagctggtgggtgctggccagcctgaagatcatcggccgcctgcactggattgaccgggagaagctgaggaacttcatcctggcctgccaggatgaggagactggaggctttgctgacaggcctggggacatgcacttcatctaccagaactaccccaagaaggagctgagcagcaacaaggagaccctgacagagagcctgctgccccggctggagaggagcagcaccatcagcgcctag

SEQ ID NO: 166800 - DNA, 459 bp, synthetic construct
  misc_feature 1..459: note = Description of Artificial Sequence: Synthetic coding sequence
  source 1..459: mol_type = other DNA
atgggcaccccccagaaggatgtgatcatcaagagtgatgccccagacaccctgctgctggagaagcacgccgactacatcgccagctatggcagcaagaaggatgattatgagtactgcatgtctgagtacctgaggatgagcggcatctactggggcctgactgtgatggacctgatgggccagctgcacaggatgaaccgggaggagatcctggccttcatcaagagctgccagcatgaatgtggcggcatcagcgccagcattggacatgacccccacctgctgtacaccctgtctgctgtgcagatcctgaccctgtatgacagcatcaacgtgattgatgtgaacaaggtggtggagtatgtgaagggcctgcagaaggaggatggcagctttgctggggacatctggggcaatgtgcgcttcagccccttctaccccaagtaccagtactag

SEQ ID NO: 166801 - DNA, 474 bp, synthetic construct
  misc_feature 1..474: note = Description of Artificial Sequence: Synthetic coding sequence
  source 1..474: mol_type = other DNA
atgaactttgatggcggcttcggctgcaggcctggcagcgagagccatgctggccagatctactgctgcaccggcttcctggccatcaccagccagctgcaccaggtgaacagcgacctgctgggctggtggctgtgtgagcggcagctgcccagcggcggcctgaatggccggcctgagaagctgcctgatgtgtgctacagctggtgggtgctggccagcctgaagatcatcggccgcctgcactggattgaccgggagaagctgaggaacttcatcctggcctgccaggatgaggagactggaggctttgctgacaggcctggggacatggtggaccccttccacaccctgtttggaattgctggcctgagcctgctgggggaggagcagatcaagcctgtgaaccctgtgttctgcatgcctgaggaggtgctgcagagggtgaatgtgcagcctgagctggtgtcctag

SEQ ID NO: 166802 - DNA, 1476 bp, synthetic construct; identical to SEQ ID NO: 164759
  misc_feature 1..1476: note = Description of Artificial Sequence: Synthetic coding sequence
  source 1..1476: mol_type = other DNA

SEQ ID NO: 166803 - DNA, 1518 bp, synthetic construct
  misc_feature 1..1518: note = Description of Artificial Sequence: Synthetic coding sequence
  source 1..1518: mol_type = other DNA
atgatggccagcagctaccacgaggtggtgtccaggaagaagatgagcctgaagtcagaaagaagaggcatccacgtggaccagagcgacctgctgtgcaagaagggctgcggctactacggcaacccagcctggcagggcttctgcagcaagtgctggagggaggagtaccacaaggcccggcagaagcagatccaggaggactgggagctggccgagcggctgcagcgggaggaggaggaggcctttgccagcagccagagcagccagggcgcccagagcctgaccttcagcaagtttgaggagaagaagaccaatgagaagaccaggaaggtgaccaccgtgaagaagttcttcagcgccagcagccgggtgggcagcaagaaggagatccaggaggccaaggcccccagccccagcatcaaccggcagaccagcattgaaacagacagagtgtccaaggagttcatcgagttcctgaagaccttccacaagacaggccaggagatctacaagcagaccaagctgttcctggagggcatgcactacaagagggacctgagcattgaggagcagagtgaatgtgcccaggacttctaccacaacgtggccgagaggatgcagacccggggcaaggtgcccccagagcgggtggagaagatcatggaccagatcgagaagtacatcatgacccggctgtacaagtatgtgttctgcccagagaccacagatgatgagaagaaggacctggccatccagaagaggatccgggccctgcgctgggtgaccccccagatgctgtgtgtgcctgtgaatgaagacatccctgaggtgtctgacatggtggtgaaggccatcacagacatcatcgagatggacagcaagagggtgccccgggacaagctggcctgcatcaccaagtgcagcaagcacatcttcaatgccatcaagatcaccaagaatgaaccagccagcgcagatgacttcctgcccaccctcatctacatcgtgctgaagggcaaccccccccggctgcagagcaacatccagtacatcacccgcttctgcaaccccagccggctgatgactggagaagatggctactacttcaccaacctgtgctgtgctgtggccttcatcgagaagctggatgcccagagcctgaacctgagccaggaggactttgaccgctacatgagcggccagaccagccccaggaagcaggaggccgagagctggagcccagatgcctgcctgggcgtgaagcagatgtacaagaacctggacctgctgagccagctgaatgaaaggcaggagcgcatcatgaatgaggccaagaagctggagaaggacctgattgactggacagatggcatcgcccgggaggtgcaggacatcgtggagaagtaccccctggagatcaagccacccaaccagcccctggccgccatcgacagtgaaaatgtggagaatgacaagctgcccccacccctgcagccccaggtgtatgccggctag

SEQ ID NO: 166804 - DNA, 138 bp, synthetic construct
  misc_feature 1..138: note = Description of Artificial Sequence: Synthetic coding sequence
  source 1..138: mol_type = other DNA
atgagcctgaagtcagaaagaagaggcatccacgtggaccagagcgacctgctgtgcaagaagggctgcggctactacggcaacccagcctggcagggcttctgcagcaagtgctggagggaggagtaccacaagtag

SEQ ID NO: 166805 - DNA, 1476 bp, synthetic construct; identical to SEQ ID NO: 164759
  misc_feature 1..1476: note = Description of Artificial Sequence: Synthetic coding sequence
  source 1..1476: mol_type = other DNA

SEQ ID NO: 166806 - DNA, 372 bp, synthetic construct
  misc_feature 1..372: note = Description of Artificial Sequence: Synthetic coding sequence
  source 1..372: mol_type = other DNA
atggagcctgctgagcagcccagcgagctggtgtctgctgagggcaggaacaggaaggctgtgctgtgccagagatgtggcagccgggtgctgcagcctggaacagccctcttcagccggcggcagctgttcctgcccagcatgaggaagaagccagccctgagtgatggcagcaacccagatggagacctgctgcaggagcactggctggtggaggacatgttcatctttgaaaatgtgggcttcaccaaggatgtgggcaacatcaagttcctggtgtgtgccgactgtgaaattggccccatcggctggcactgcctggatgacaagaacagcttctacgtggccctggagcgggtgtcccatgaatag

SEQ ID NO: 166807 - DNA, 1206 bp, synthetic construct
  misc_feature 1..1206: note = Description of Artificial Sequence: Synthetic coding sequence
  source 1..1206: mol_type = other DNA
atggagccccggcgggccgcccctggggtgcccggctggggcagccgggaggccgccggcagcgccagcgctgctgagctggtgtaccacctggccggggccctgggcacagagctgcaggacctggcccggcgcttcggccctgaggccgccgccggcctggtgcccctggtggtgcgggccctggagctgctggagcaggccgctgtgggccctgccccagacagcctgcaggtgtctgcccagcctgctgagcaggagctgcggcggctgcgggaggagaatgaaaggctgcggcgggagctgcgggccggcccccaggaggagcgggccctgctgcggcagctgaaggaggtgacagaccggcagagagatgagctgcgggcccacaacagagacctgcggcagaggggccaggagacagaggccctgcaggagcagctgcagaggctgctgctggtgaatgctgagctgcggcacaagctggccgccatgcagacccagctgcgggccgcccaggaccgggagcgggagcggcagcagcccggggaggccgccaccccccaggccaaggagcgggcccggggccaggccggccggcccggccaccagcacggccaggagcctgagtgggccacagctggggccggggcccctggcaacccagaagatcctgctgaggccgcccagcagctgggccggcccagcgaggccggccagtgccgcttcagccgggaggagtttgagcagatcctgcaggagagaaatgagctgaaggccaaggtgttcctgctgaaggaggagctggcctacttccagcgggagctgctgacagaccaccgggtgcccggcctgctgctggaggccatgaaggtggccgtgaggaagcagaggaagaagatcaaggccaagatgctgggcaccccagaggaggccgagagcagtgaagatgaagctggcccctggatcctgctgagtgatgacaagggggaccaccccccacctcctgagagcaagatccagagcttcttcggcctgtggtaccggggcaaggccgagagcagtgaagatgagaccagcagccctgcccccagcaagctgggcggggaggaggaggcccagccccagagccctgccccagaccccccctgcagcgccctgcacgagcacctgtgcctgggcgccagcgctgcccctgaggcctag

SEQ ID NO: 166808 - DNA, 1212 bp, synthetic construct
  misc_feature 1..1212: note = Description of Artificial Sequence: Synthetic coding sequence
  source 1..1212: mol_type = other DNA
atggaggaggagcggggcagcgccctggccgctgagagcgccctggagaagaatgtggccgagctgactgtgatggatgtgtatgacatcgccagcctggtgggccacgagtttgagagggtcatcgaccagcacggctgtgaggccatcgcccggctgatgcccaaggtggtgcgggtgctggagatcctggaggtgctggtgagccgccaccacgtggcccctgagctggatgagctgcggctggagctggaccggctgcggctggagaggatggacagaattgagaaggagaggaagcaccagaaggagctggagctggtggaggatgtgtggagaggagaggcccaggacctgctgagccagatcgcccagctgcaggaggagaacaagcagctgatgaccaacctgagccacaaggatgtgaacttcagcgaggaggagttccagaagcatgagggcatgtctgagcgggagcggcaggtgatgaagaagctgaaggaggtggtggacaagcagagagatgagatccgggccaaggaccgggagctgggcctgaagaatgaagatgtggaggccctgcagcagcagcagacccggctgatgaagatcaaccacgacctgcggcaccgggtgacagtggtggaggcccagggcaaggccctgattgagcagaaggtggagctggaggccgacctgcagaccaaggagcaggagatgggcagcctgcgggcagagctgggcaagctgcgggagcggctgcagggcgagcacagccagaatggagaggaggagcctgagacagagcctgtgggggaggagagcatcagtgatgctgagaaggtggccatggacctgaaggaccccaaccggccccgcttcaccctgcaggagctgagagatgtgctgcacgagagaaatgagctgaagagcaaggtgttcctgctgcaggaggagctggcctactacaagtctgaggagatggaggaggagaaccgcatcccccagcccccacccatcgcccaccccaggaccagcccccagcctgagagcggcatcaagaggctcttctccttcttcagccgggacaagaagaggctggccaacacccagagaaatgtgcacatccaggagagctttggccagtgggccaacacccacagagatgatggctacacagagcagggccaggaggccctgcagcacctgtag

SEQ ID NO: 166809 - DNA, 636 bp, synthetic construct
  misc_feature 1..636: note = Description of Artificial Sequence: Synthetic coding sequence
  source 1..636: mol_type = other DNA
atggaggagccccctgtgcgggaggaggaggaggaggagggggaggaggatgaggagagagatgaggtgggccctgagggcgccctgggcaagagccccttccagctgacagcagaagatgtgtatgacatctcctacctgctgggccgggagctgatggccctgggcagtgacccccgggtgacccagctgcagttcaaggtggtgcgggtgctggagatgctggaggccctggtgaatgaaggcagcctggccctggaggagctgaagatggagcgggaccacctgaggaaggaggtggagggcctgcggcggcagagccccccagccagcggggaggtgaacctgggccccaacaagatggtggtggacctgacagaccccaaccggccccgcttcaccctgcaggagctgagagatgtgctgcaggagaggaacaagctgaagagccagctgctggtggtgcaggaggagctgcagtgctacaagagcggcctcatccccccccgggagggccctgggggccggcgggagaaggatgctgtggtgaccagcgccaagaatgccggcaggaacaaggaggagaagaccatcatcaagaagctgttcttcttccgcagcggcaagcagacctag

SEQ ID NO: 166810 - DNA, 717 bp, synthetic construct
  misc_feature 1..717: note = Description of Artificial Sequence: Synthetic coding sequence
  source 1..717: mol_type = other DNA
atggccgaggacaagaccaagcccagcgagctggaccagggcaagtatgatgctgatgacaacgtgaagatcatctgcctgggggacagcgctgtgggcaagagcaagctgatggagcgcttcctgatggatggcttccagccccagcagctgagcacctacgccctgaccctgtacaagcacacagccaccgtggatggccgcaccatcctggtggacttctgggacacagctggccaggagcgcttccagagcatgcacgccagctactaccacaaggcccacgcctgcatcatggtgtttgatgtgcagaggaaggtgacctacagaaacctgagcacctggtacacagagctgcgggagttccggcctgagatcccctgcatcgtggtggccaacaagattgatgacatcaacgtgacccagaagagcttcaactttgccaagaagttcagcctgcccctgtactttgtgtctgctgctgatggcaccaacgtggtgaaggtgtggctgacagctgaggtggccagcaagctgttcaatgatgccatccggctggccgtgtcctacaagcagaacagccaggacttcatggatgagatcttccaggagctggagaacttcagcctggagcaggaggaggaggatgtgcctgaccaggagcagagcagcagcattgagacccccagcgaggaggccgccagcccccacagctag

SEQ ID NO: 166811 - DNA, 498 bp, synthetic construct
  misc_feature 1..498: note = Description of Artificial Sequence: Synthetic coding sequence
  source 1..498: mol_type = other DNA
atggccgaggacaagaccaagcccagcgagctggaccagggcaagtatgatgctgatgacaacgtgaagatcatctgcctgggggacagcgctgtgggcaagagcaagctgatggagcgcttcctgatggatggcttccagccccagcagctgagcacctacgccctgaccctgtacaagcacacagccaccgtggatggcaagaccatcctggtggccgacatcaacgtgacccagaagagcttcaactttgccaagaagttcagcctgcccctgtactttgtgtctgctgctgatggcaccaacgtggtgaagctgttcaatgatgccatccggctggccgtgtcctacaagcagaacagccaggacttcatggatgagatcttccaggagctggagaacttcagcctggagcaggaggaggaggatgtgcctgaccaggagcagagcagcagcattgagaccccatctgaggaggtggccagcccccacagctag

SEQ ID NO: 166812 - DNA, 690 bp, synthetic construct
  misc_feature 1..690: note = Description of Artificial Sequence: Synthetic coding sequence
  source 1..690: mol_type = other DNA
atggccgaggacaagaccaagcccagcgagctggaccagggcaagtatgatgctgatgacaacgtgaagatcatctgcctgggggacagcgctgtgggcaagagcaagctgatggagcgcttcctgatggatggcttccagccccagcagctgagcacctacgccctgaccctgtacaagcacacagccaccgtggatggcaagaccatcctggtggacttctgggacacagctggccaggagcgcttccagagcatgcacgccagctactaccacaaggcccacgcctgcatcatggtgtttgacatccagaggaaggtgacctacagaaacctgagcacctggtacacagagctgcgggagttccggcctgagatcccctgcatcgtggtggccaacaagattgatgctgacatcaacgtgacccagaagagcttcaactttgccaagaagttcagcctgcccctgtactttgtgtctgctgctgatggcaccaacgtggtgaagctgttcaatgatgccatccggctggccgtgtcctacaagcagaacagccaggacttcatggatgagatcttccaggagctggagaacttcagcctggagcaggaggaggaggatgtgcctgaccaggagcagagcagcagcattgagaccccatctgaggaggtggccagcccccacagctag

SEQ ID NO: 166813 - DNA, 687 bp, synthetic construct
  misc_feature 1..687: note = Description of Artificial Sequence: Synthetic coding sequence
  source 1..687: mol_type = other DNA
atggccgaggacaagaccaagcccagcgagctggaccagggcaagtatgatgctgatgacaacgtgaagatcatctgcctgggggacagcgctgtgggcaagagcaagctgatggagcgcttcctgatggatggcttccagccccagcagctgagcacctacgccctgaccctgtacaagcacacagccaccgtggatggcaagaccatcctggtggacttctgggacacagctggccaggagcgcttccagagcatgcacgccagctactaccacaaggcccacgcctgcatcatggtgtttgacatccagaggaaggtgacctacagaaacctgagcacctggtacacagagctgcgggagttccggcctgagatcccctgcatcgtggtggccaacaagattgatgacatcaacgtgacccagaagagcttcaactttgccaagaagttcagcctgcccctgtactttgtgtctgctgctgatggcaccaacgtggtgaagctgttcaatgatgccatccggctggccgtgtcctacaagcagaacagccaggacttcatggatgagatcttccaggagctggagaacttcagcctggagcaggaggaggaggatgtgcctgaccaggagcagagcagcagcattgagacccccagcgaggaggtggccagcccccacagctag

SEQ ID NO: 166814 - DNA, 687 bp, synthetic construct; identical to SEQ ID NO: 166813
  misc_feature 1..687: note = Description of Artificial Sequence: Synthetic coding sequence
  source 1..687: mol_type = other DNA

SEQ ID NO: 166815 - DNA, 717 bp, synthetic construct
  misc_feature 1..717: note = Description of Artificial Sequence: Synthetic coding sequence
  source 1..717: mol_type = other DNA
atggccgaggacaagaccaagcccagcgagctggaccagggcaagtatgatgctgatgacaacgtgaagatcatctgcctgggggacagcgctgtgggcaagagcaagctgatggagcgcttcctgatggatggcttccagccccagcagctgagcacctacgccctgaccctgtacaagcacacagccaccgtggatggcaagaccatcctggtggacttctgggacacagctggccaggagcgcttccagagcatgcacgccagctactaccacaaggcccacgcctgcatcatggtgtttgacatccagaggaaggtgacctacagaaacctgagcacctggtacacagagctgcgggagttccggcctgagatcccctgcatcgtggtggccaacaagattgatgacatcaacgtgacccagaagagcttcaactttgccaagaagttcagcctgcccctgtactttgtgtctgctgctgatggcaccaacgtggtgaaggtgtggctgacagctgaggtggccagcaagctgttcaatgatgccatccggctggccgtgtcctacaagcagaacagccaggacttcatggatgagatcttccaggagctggagaacttcagcctggagcaggaggaggaggatgtgcctgaccaggagcagagcagcagcattgagacccccagcgaggaggtggccagcccccacagctag

SEQ ID NO: 166816 - DNA, 345 bp, synthetic construct
  misc_feature 1..345: note = Description of Artificial Sequence: Synthetic coding sequence
  source 1..345: mol_type = other DNA
atggccgaggacaagaccaagcccagcgagctggaccagggcaagtatgatgctgatgacaacgtgaagatcatctgcctgggggacagcgctgtgggcaagagcaagctgatggagcgcttcctgatggatggcttccagccccagcagctgagcacctacgccctgaccctgtacaagcacacagccaccgtggatggcaagaccatcctggtggacttctgggacacagctggccaggagcgcttccagagcatgcacgccagctactaccacaaggcccacgcctgcatcatggtgtttgacatccagaggaaggtgacctacagaaacctgagcacctag

SEQ ID NO: 166817 - DNA, 306 bp, synthetic construct
  misc_feature 1..306: note = Description of Artificial Sequence: Synthetic coding sequence
  source 1..306: mol_type = other DNA
atggccgaggacaagaccaagcccagcgagctggaccagggcaagtatgatgctgatgacaacgtgaagatcatctgcctgggggacagcgctgtgggcaagagcaagctgatggagcgcttcctgatggatggcttccagccccagcagctgagcacctacgccctgaccctgtacaagcacacagccaccgtggatggcaagaccatcctggtggacttctgggacacagctggccaggagcgcttccagagcatgcacgccagctactaccacaaggcccacgcctgcatcatgcagacctag

SEQ ID NO: 166818 - DNA, 690 bp, synthetic construct
  misc_feature 1..690: note = Description of Artificial Sequence: Synthetic coding sequence
  source 1..690: mol_type = other DNA
atggccgaggacaagaccaagcccagcgagctggaccagggcaagtatgatgctgatgacaacgtgaagatcatctgcctgggggacagcgctgtgggcaagagcaagctgatggagcgcttcctgatggatggcttccagccccagcagctgagcacctacgccctgaccctgtacaagcacacagccaccgtggatggccgcaccatcctggtggacttctgggacacagctggccaggagcgcttccagagcatgcacgccagctactaccacaaggcccacgcctgcatcatggtgtttgatgtgcagaggaaggtgacctacagaaacctgagcacctggtacacagagctgcgggagttccggcctgagatcccctgcatcgtggtggccaacaagattgatgctgacatcaacgtgacccagaagagcttcaactttgccaagaagttcagcctgcccctgtactttgtgtctgctgctgatggcaccaacgtggtgaagctgttcaatgatgccatccggctggccgtgtcctacaagcagaacagccaggacttcatggatgagatcttccaggagctggagaacttcagcctggagcaggaggaggaggatgtgcctgaccaggagcagagcagcagcattgagaccccatctgaggaggccgccagcccccacagctag

SEQ ID NO: 166819 - DNA, 690 bp, synthetic construct; identical to SEQ ID NO: 166818
  misc_feature 1..690: note = Description of Artificial Sequence: Synthetic coding sequence
  source 1..690: mol_type = other DNA

SEQ ID NO: 166820 - DNA, 687 bp, synthetic construct
  misc_feature 1..687: note = Description of Artificial Sequence: Synthetic coding sequence
  source 1..687: mol_type = other DNA
atggccgaggacaagaccaagcccagcgagctggaccagggcaagtatgatgctgatgacaacgtgaagatcatctgcctgggggacagcgctgtgggcaagagcaagctgatggagcgcttcctgatggatggcttccagccccagcagctgagcacctacgccctgaccctgtacaagcacacagccaccgtggatggccgcaccatcctggtggacttctgggacacagctggccaggagcgcttccagagcatgcacgccagctactaccacaaggcccacgcctgcatcatggtgtttgatgtgcagaggaaggtgacctacagaaacctgagcacctggtacacagagctgcgggagttccggcctgagatcccctgcatcgtggtggccaacaagattgatgacatcaacgtgacccagaagagcttcaactttgccaagaagttcagcctgcccctgtactttgtgtctgctgctgatggcaccaacgtggtgaagctgttcaatgatgccatccggctggccgtgtcctacaagcagaacagccaggacttcatggatgagatcttccaggagctggagaacttcagcctggagcaggaggaggaggatgtgcctgaccaggagcagagcagcagcattgagacccccagcgaggaggccgccagcccccacagctag

SEQ ID NO: 166821 - DNA, 63 bp, synthetic construct
  misc_feature 1..63: note = Description of Artificial Sequence: Synthetic coding sequence
  source 1..63: mol_type = other DNA
atggccgaggacaagaccaagcccagcgagctggaccagggcaagtatgatgctgatgactag

SEQ ID NO: 166822 - DNA, 687 bp, synthetic construct; identical to SEQ ID NO: 166820
  misc_feature 1..687: note = Description of Artificial Sequence: Synthetic coding sequence
  source 1..687: mol_type = other DNA

SEQ ID NO: 166823 - DNA, 603 bp, synthetic construct
  misc_feature 1..603: note = Description of Artificial Sequence: Synthetic coding sequence
  source 1..603: mol_type = other DNA
atggccaagaagacctatgacctgctcttcaagctgctgctgattggagacagcggcgtgggcaagacctgtgtgctcttccgcttcagtgatgatgccttcaacaccaccttcatcagcaccatcggcatcgacttcaagatcaagacagtggagctgcagggcaagaagatcaagctgcagatctgggacacagctggccaggagcgcttccacaccatcaccaccagctactacagaggagccatgggcatcatgctggtgtatgacatcaccaacgggaagagctttgagaacatcagcaagtggctgagaaatattgatgagcacgccaatgaagatgtggagaggatgctgctgggcaacaagtgtgacatggatgacaagagggtggtgcccaagggcaagggggagcagatcgcccgggagcacggcatccgcttctttgagaccagcgccaaggccaacatcaacatcgagaaggccttcctgaccctggccgaggacatcctgaggaagacccctgtgaaggagcccaacagtgaaaatgtggacatcagcagcggcggcggcgtgacaggctggaagagcaagtgctgctag

SEQ ID NO: 166824 - DNA, 1950 bp, synthetic construct
  misc_feature 1..1950: note = Description of Artificial Sequence: Synthetic coding sequence
  source 1..1950: mol_type = other DNA
atgagcctgatggtgtctgctggccggggcctgggcgctgtgtggagccccacccacgtgcaggtgacagtgctgcaggcccggggcctgcgggccaagggccctgggggcaccagtgatgcctatgctgtgatccaggtgggcaaggagaagtatgccacctctgtgtctgagaggagcctgggcgcccctgtgtggagggaggaggccacctttgagctgcccagcctgctgagcagcggccctgctgctgctgccaccctgcagctgactgtgctgcaccgggccctgctgggcctggacaagttcctgggccgggcagaggtggacctgcgggacctgcaccgggaccagggccgcaggaagacccagtggtacaagctgaagagcaagccaggcaagaaggacaaggagcggggggagattgaggtggacatccagttcatgaggaacaacatgacagcctccatgtttgacctgtccatgaaggacaagagcaggaacccctttgggaagctgaaggacaagatcaagggcaagaacaaggacagcggcagtgacacagccagcgccatcatccccagcaccaccccatctgtggacagtgatgatgagagcgtggtgaaggacaagaagaagaagagcaagatcaagaccctgctgagcaagagcaacctgcagaagacccccctgagccagagcatgtctgtgctgcccaccagcaagccagagaaggtgctgctgcggcctggggacttccagagccagtgggatgaagatgacaatgaagatgagagcagcagcgccagtgatgtgatgagccacaagaggacagccagcacagacctgaagcagctgaaccaggtgaacttcaccctgcccaagaaggagggcctgtccttcctgggcggcctgcggagcaagaatgatgtgctgagccgcagcaatgtgtgcatcaatggaaatcatgtgtacctggagcagcctgaggccaagggggagatcaaggacagcagccccagcagcagccccagccccaagggcttcaggaagaagcacctgttcagcagcacagagaacctggccgccggctcctggaaggagcctgctgagggcggcggcctgagcagtgaccggcagctgtctgagagcagcaccaaggacagcctgaagtccatgaccctgcccagctacagacctgcccccctggtgtctggggacctgcgggagaacatggccccagccaacagcgaggccaccaaggaggccaaggagagcaagaagccagagagccgccgcagcagcctgctgagcctgatgaccgggaagaaggatgtggccaagggctctgaaggagagaaccccctgactgtgcccggccgggagaaggagggcatgctgatgggcgtgaagccaggagaagatgccagcggccctgctgaggacctggtgagaagaagtgagaaggacacagctgctgtggtgtcccggcagggcagcagcctgaacctgtttgaagatgtgcagatcacagagcctgaggccgagcctgagagcaagtctgagcccaggcctcccatcagcagcccccgggccccccagaccagggctgtgaagccccggctgcaccctgtgaagcccatgaatgccatggccaccaaggtggccaactgcagcctgggcacagccaccatcatcagcgagaacctgaacaatgaggtgatgatgaagaagtacagccccagcgaccctgcctttgcctatgcccagctgacccatgatgagctgatccagctggtgctgaagcagaaggagaccatcagcaagaaggagttccaggtgcgggagctggaggactacatcgacaacctgctggtgcgggtgatggaggagacccccaacatcctgcgcatccccacccaggtgggcaagaaggccggcaagatgtag

SEQ ID NO: 166825 - DNA, 3852 bp, synthetic construct
  misc_feature 1..3852: note = Description of Artificial Sequence: Synthetic coding sequence
  source 1..3852: mol_type = other DNA
atgagcctgatggtgtctgctggccggggcctgggcgctgtgtggagccccacccacgtgcaggtgacagtgctgcaggcccggggcctgcgggccaagggccctgggggcaccagtgatgcctatgctgtgatccaggtgggcaaggagaagtatgccacctctgtgtctgagaggagcctgggcgcccctgtgtggagggaggaggccacctttgagctgcccagcctgctgagcagcggccctgctgctgctgccaccctgcagctgactgtgctgcaccgggccctgctgggcctggacaagttcctgggccgggcagaggtggacctgcgggacctgcaccgggaccagggccgcaggaagacccagtggtacaagctgaagagcaagccaggcaagaaggacaaggagcggggggagattgaggtggacatccagttcatgaggaacaacatgacagcctccatgtttgacctgtccatgaaggacaagagcaggaacccctttgggaagctgaaggacaagatcaagggcaagaacaaggacagcggcagtgacacagccagcgccatcatccccagcaccaccccatctgtggacagtgatgatgagagcgtggtgaaggacaagaagaagaagagcaagatcaagaccctgctgagcaagagcaacctgcagaagacccccctgagccagagcatgtctgtgctgcccaccagcaagccagagaaggtgctgctgcggcctggggacttccagagccagtgggatgaagatgacaatgaagatgagagcagcagcgccagtgatgtgatgagccacaagaggacagccagcacagacctgaagcagctgaaccaggtgaacttcaccctgcccaagaaggagggcctgtccttcctgggcggcctgcggagcaagaatgatgtgctgagccgcagcaatgtgtgcatcaatggaaatcatgtgtacctggagcagcctgaggccaagggggagatcaaggacagcagccccagcagcagccccagccccaagggcttcaggaagaagcacctgttcagcagcacagagaacctggccgccggctcctggaaggagcctgctgagggcggcggcctgagcagtgaccggcagctgtctgagagcagcaccaaggacagcctgaagtccatgaccctgcccagctacagacctgcccccctggtgtctggggacctgcgggagaacatggccccagccaacagcgaggccaccaaggaggccaaggagagcaagaagccagagagccgccgcagcagcctgctgagcctgatgaccgggaagaaggatgtggccaagggctctgaaggagagaaccccctgactgtgcccggccgggagaaggagggcatgctgatgggcgtgaagccaggagaagatgccagcggccctgctgaggacctggtgagaagaagtgagaaggacacagctgctgtggtgtcccggcagggcagcagcctgaacctgtttgaagatgtgcagatcacagagcctgaggccgagcctgagagcaagtctgagcccaggcctcccatcagcagcccccgggccccccagaccagggctgtgaagccccggctggaggtgtccccagaggcccagcccacagcccggctgcccagccccacagacagccccagcagcctgccccccctgcccagcagcagcggccaggcctctgtgcccagcgagctgggccacggggctgacacccagagcagcgagagccccagcgtcttcagcagcctgagcagccccatcgccgcccccatcagcaccagcacccccatcgagagctggcccctggtggaccggggccaggccaagtctgagggcccccccctgctgcccaaggccgagctgcagacagagagcctgacccctgtgcccaacagcggcagcagcgccctgggcagcctcttcaagcagcccagcttccctgccaacaagggcacagaggacagcctgatgggccgcacccgggagaccggcacagagaagaacaccagcagcctggagctggaggagagcctgcctgagcagcctgagaccggccggcaggaggaggagctgccccgcttcccctgcaagaagcaggactacagccccagcagcggggaggcccaggaggtgccctttgccctgagcctgagcagtgatggagctgtgtcccctgtgggggagctggccgccggcggggaccgggacctggagagccaggccggcagcctggtggagagcaaggccagagatgctgctgaggaggtggccccacccctgcccatgggcgcctctgtgcccagcattgacagcatgatgaggaagctggaggagatgggcctgaacctgaggaaggaccagaagaagaccaagaagagggtgtccttcagcgagcagctgttcacagaggaggccgtggccggggccgccctgctggtggagggccacagcagctgcccccaggagctgaacccagcctggagcgtggccggaaatgccagtgatggagagcccccagagagcccccatgctgaggacagcgagcgggagagcgtgaccaccccaggccctgccacctgtggggccccagccagccctgctgaccacctgctgctgcccagccaggaggagagcttcagcgaggtgcccatgtctgaggccagcagcgccaaggacacccccctcttcaggatggagggggaggatgccctggtgacccagtaccagagcaaggccagtgaccacgagggcctgctgagtgaccccctgagtgacctgcagctggtgtctgacttcaagagccccatcatggctgacctgaacctgagcctgcccagcatccctgaggtggccagtgatgatgaaagaattgaccaggtggaggatgatggagaccaggtggaggatgatggagaaacagccaagagcagcaccctggacatcggggccctgagcctgggcctggtggtgccctgcccagagcggggcaagggccccagcggggaggccgaccggctggtgctgggggagggcctgtgtgacttccggctgcaggccccccaggcctctgtgacagcccccagcgagcagaccacagaatttggcatccacaagccccacctgggcaagagcagcagcctggacaagcagctgcccggccccagcggcggggaggaggagaagcccatgggaaatggcagccccagccccccacctggcaccagcctggacaaccctgtgcccagccccagccccagcgagatcttccctgtgacccacagcttccccagcagcgcccacagcgacacccaccacaccagcacagctgagagccagaagaaggccacagctgagggcagcgctggccgggtggagaactttgggaagaggaagcccctgctgcaggcctgggtgagccccagcgagacccaccctgtgtctgcccagcctggagctggcactggaagtgccaagcaccggctgcaccctgtgaagcccatgaatgccatggccaccaaggtggccaactgcagcctgggcacagccaccatcatcagcgagaacctgaacaatgaggtgatgatgaagaagtacagccccagcgaccctgcctttgcctatgcccagctgacccatgatgagctgatccagctggtgctgaagcagaaggagaccatcagcaagaaggagttccaggtgcgggagctggaggactacatcgacaacctgctggtgcgggtgatggaggagacccccaacatcctgcgcatccccacccaggtgggcaagaaggccggcaagatgtag

SEQ ID NO: 166826 - DNA, 429 bp, synthetic construct
  misc_feature 1..429: note = Description of Artificial Sequence: Synthetic coding sequence
  source 1..429: mol_type = other DNA
atgagcctgatggtgtctgctggccggggcctgggcgctgtgtggagccccacccacgtgcaggtgacagtgctgcaggcccggggcctgcgggccaagggccctgggggcaccagtgatgcctatgctgtgatccaggtgggcaaggagaagtatgccacctctgtgtctgagaggagcctgggcgcccctgtgtggagggaggaggccacctttgagctgcccagcctgctgagcagcggccctgctgctgctgccaccctgcagctgactgtgctgcaccgggccctgctgggcctggacaagttcctgggccgggcagaggtggacctgcgggacctgcaccgggacctgggcaagagcttcttcaagaccctgaagaagagggcctgggccatcttcctgcggctgtgcctgaagaagaactag

SEQ ID NO: 166827 - DNA, 1320 bp, synthetic construct
  misc_feature 1..1320: note = Description of Artificial Sequence: Synthetic coding sequence
  source 1..1320: mol_type = other DNA
atgaggaacaacatgacagcctccatgtttgacctgtccatgaaggacaagagcaggaacccctttgggaagctgaaggacaagatcaagggcaagaacaaggacagcggcagtgacacagccagcgccatcatccccagcaccaccccatctgtggacagtgatgatgagagcgtggtgaaggacaagaagaagaagagcaagatcaagaccctgctgagcaagagcaacctgcagaagacccccctgagccagagcatgtctgtgctgcccaccagcaagccagagaaggtgctgctgcggcctggggacttccagagccagtgggatgaagatgacaatgaagatgagagcagcagcgccagtgatgtgatgagccacaagaggacagccagcacagacctgaagcagctgaaccaggtgaacttcaccctgcccaagaaggagggcctgtccttcctgggcggcctgcggagcaagaatgatgtgctgagccgcagcaatgtgtgcatcaatggaaatcatgtgtacctggagcagcctgaggccaagggggagatcaaggacagcagccccagcagcagccccagccccaagggcttcaggaagaagcacctgttcagcagcacagagaacctggccgccggctcctggaaggagcctgctgagggcggcggcctgagcagtgaccggcagctgtctgagagcagcaccaaggacagcctgaagtccatgaccctgcccagctacagacctgcccccctggtgtctggggacctgcgggagaacatggccccagccaacagcgaggccaccaaggaggccaaggagagcaagaagccagagagccgccgcagcagcctgctgagcctgatgaccgggaagaaggatgtggccaagggctctgaaggagagaaccccctgactgtgcccggccgggagaaggagggcatgctgatgggcgtgaagccaggagaagatgccagcggccctgctgaggacctggtgagaagaagtgagaaggacacagctgctgtggtgtcccggcagggcagcagcctgaacctgtttgaagatgtgcagatcacagagcctgaggccgagcctgagagcaagtctgagcccaggcctcccatcagcagcccccgggccccccagaccagggctgtgaagccccggctgcaccctgtgaagcccatgaatgccatggccaccaaggtggccaactgcagcctgggcacagccaccatcatcagcgagaacctgaacaatgaggtgatgatgaaggtgtgccccctgcgctcctggtgtgtgaggtag

SEQ ID NO: 166828 - DNA, 1539 bp, synthetic construct
  misc_feature 1..1539: note = Description of Artificial Sequence: Synthetic coding sequence
  source 1..1539: mol_type = other DNA
atgatgctgtctgagcaggcccagaagtggttccccacccacgtgcaggtgacagtgctgcaggccaaggacctgaagcccaagggcaagagcggcaccaatgacacctacaccatcatccagctgggcaaggagaagtacagcacctctgtggccgagaagaccctggagcctgtgtggaaggaggaggccagctttgagctgcccggcctgctgatccagggcagccctgagaagtacatcctcttcctgattgtgatgcacaggagcctggtgggcctggacaagttcctgggccaggtggccatcaacctgaatgacatctttgaggacaagcagaggaggaagacagagtggttccggctggagagcaagcagggcaagaggatcaagaacagaggagagatcaaggtgaacatccagttcatgaggaacaacatgacagcctccatgtttgacctgtccatgaaggacaagaccaggagcccctttgccaagctgaaggacaagatgaagggcaggaagaatgatggcaccttcagtgacaccagcagcgccatcatccccagcacccacatgccagatgccaacagcgagttcagcagcggggagatccagatgaagagcaagcccaagaagcccttcctgctgggcccccagaggctgagcagcgcccacagcatgtctgacctgagcggcagccacatgagcagcgagaagctgaaggccggcaccatcggccagacccacctgctgggccaccagctggacagctttggaacagtgcctgagagcggcagcctgaagagcccccacaggaggaccctgagctttgacaccagcaagatgaaccagcctgacagcatcgtggatgaaggagagctgtgcttcggccggcagaatgaccccttcaccaacgtgacagccagcctgccccagaagtttgccaccctgcccaggaagaagaacccctttgaggagagcagcgagacctgggacagctccatgaacctcttcagcaagcccatcgagatcaggaaggagaacaagcgggagaagcgggagaaggtgtccctgtttgagcgggtgacaggcaagaaggacagccgccgcagtgacaagctgaacaatggaggcagtgacagcccctgtgacctgaagagccccaatgccttcagcgagaaccggcaggactactttgattatgagagcaccaaccccttcaccgccaagttccgggccagcaacatcatgcccagcagcagcttccacatgagccccaccagcaatgaagacctgaggaagatcccagacagcaacccctttgatgccacagctggctaccgcagcctgacctatgaggaggtgctgcaggagctggtgaagcacaaggagctgctgcggaggaaggacacccacatccgggagctggaggactacatcgacaacctgctggtgcgggtgatggaggagacccccagcatcctgcgggtgccctatgagcccagcaggaaggccggcaagttcagcaacagctag

SEQ ID NO: 166829 - DNA, 1599 bp, synthetic construct
  misc_feature 1..1599: note = Description of Artificial Sequence: Synthetic coding sequence
  source 1..1599: mol_type = other DNA
atgatgctgtctgagcaggcccagaagtggttccccacccacgtgcaggtgacagtgctgcaggccaaggacctgaagcccaagggcaagagcggcaccaatgacacctacaccatcatccagctgggcaaggagaagtacagcacctctgtggccgagaagaccctggagcctgtgtggaaggaggaggccagctttgagctgcccggcctgctgatccagggcagccctgagaagtacatcctcttcctgattgtgatgcacaggagcctggtgggcctggacaagttcctgggccaggtggccatcaacctgaatgacatctttgaggacaagcagaggaggaagacagagtggttccggctggagagcaagcagggcaagaggatcaagaacagaggagagatcaaggtgaacatccagttcatgaggaacaacatgacagcctccatgtttgacctgtccatgaaggacaagaccaggagcccctttgccaagctgaaggacaagatgaagggcaggaagaatgatggcaccttcagtgacaccagcagcgccatcatccccagcacccacatgccagatgccaacagcgagttcagcagcggggagatccagatgaagagcaagcccaagaagcccttcctgctgggcccccagaggctgagcagcgcccacagcatgtctgacctgagcggcagccacatgagcagcgagaagctgaaggccggcaccatcggccagacccacctgctgggccaccagctggacagctttggaacagtgcctgagagcggcagcctgaagagcccccacaggaggaccctgagctttgacaccagcaagatgaaccagcctgacagcatcgtggatgaaggagagctgtgcttcggccggcagaatgaccccttcaccaacgtgacagccagcctgccccagaagtttgccaccctgcccaggaagaagaacccctttgaggagagcagcgagacctgggacagctccatgaacctcttcagcaagcccatcgagatcaggaaggagaacaagcgggagaagcgggagaaggtgtccctgtttgagcgggtgacaggcaagaaggacagccgccgcagtgacaagctgaacaatggaggcagtgacagcccctgtgacctgaagagccccaatgccttcagcgagaaccggcaggactactttgattatgagagcaccaaccccttcaccgccaagttccgggccagcaacatcatgcccagcagcaggaacaccctgctgaccccagctgtggccgagtggaggggcagcctgcgctgggccgagctgttccacatgagccccaccagcaatgaagacctgaggaagatcccagacagcaacccctttgatgccacagctggctaccgcagcctgacctatgaggaggtgctgcaggagctggtgaagcacaaggagctgctgcggaggaaggacacccacatccgggagctggaggactacatcgacaacctgctggtgcgggtgatggaggagacccccagcatcctgcgggtgccctatgagcccagcaggaaggccggcaagttcagcaacagctag

SEQ ID NO: 166830 - DNA, 2271 bp, synthetic construct
  misc_feature 1..2271: note = Description of Artificial Sequence: Synthetic coding sequence
  source 1..2271: mol_type = other DNA
atggccagcgcccccccagccagccccccaggcagcgagcccccaggccctgaccctgagcccggcggcccagatggccctggagctgcccagctggcccctggccctgctgagctgcggctgggcgcccctgtgggcggccctgacccccagagccctggcctggatgagcccgcccctggagctgctgctgatggaggagcccgctggagcgctggccctgcccctggcctggagggcggcccccgggaccccggccccagcgcccccccacccaggagcggcccccggggccagctggccagcccagatgcccctggccctggccccaggtctgaggcccccctgcctgagctggaccccctcttctcctggacagaggagccagaagaatgtggccctgccagctgcccagagagcgcccccttccggctgcagggcagcagcagcagccaccgggcccggggggaggtggatgtgttcagccccttccctgcccccacagctggggagctggccctggagcagggccctggcagccccccccagcccagcgacctgagccagacccaccccctgcccagcgagcctgtgggcagccaggaggatggcccccggctgcgggctgtgtttgatgccctggatggagatggagatggctttgtgagaattgaggacttcatccagtttgccaccgtgtatggagctgagcaggtgaaggacctgaccaagtacctggaccccagcggcctgggcgtcatcagctttgaggacttctaccagggcatcacagccatcagaaatggagaccctgatggccagtgctacggcggcgtggccagcgcccaggatgaggagcccctggcctgcccagatgaatttgatgactttgtgacctatgaggccaatgaggtgacagacagcgcctacatgggcagcgagagcacctacagtgaatgtgagaccttcacagatgaggacaccagcaccctggtgcaccctgagctgcagccagaaggagatgctgacagcgctgggggcagcgctgtgcccagtgaatgtctggatgccatggaggagccagaccatggagccctgctgctgctgcccggccggccccacccccacggccagagcgtcatcaccgtcatcggcggggaggagcactttgaagattatggagagggcagcgaggccgagctgagccctgagaccctgtgcaatggccagctgggctgcagcgaccctgccttcctgacccccagccccaccaagaggctgagcagcaagaaggtggcccgctacctgcaccagagcggggccctgaccatggaggccctggaggaccccagccctgagctgatggagggccctgaggaggacattgctgacaaggtggtgttcctggagaggagagtgctggagctggagaaggacacagctgccactggagagcagcacagccggctgcggcaggagaacctgcagctggtgcaccgggccaatgccctggaggagcagctgaaggagcaggagctgcgggcctgtgagatggtgctggaggagacccggcggcagaaggagctgctgtgcaagatggagcgggagaagagcattgaaattgagaacctgcagacccggctgcagcagctggatgaggagaacagcgagctgcggagctgcaccccctgcctgaaggccaacatcgagcggctggaggaggagaagcagaagctgctggatgaaattgagagcctgaccctgcggctgtctgaggagcaggagaacaagaggaggatgggagaccggctgagccatgagcggcaccagttccagagggacaaggaggccacccaggagctgattgaggacctgaggaagcagctggagcacctgcagctgctgaagctggaggccgagcagaggcggggccgcagcagctccatgggcctgcaggagtaccacagccgggcccgggagagcgagctggagcaggaggtgcggcggctgaagcaggacaacagaaacctgaaggagcagaatgaggagctgaatggccagatcatcaccctgagcatccagggcgccaagagcctcttcagcacagccttcagcgagagcctggccgctgagatcagctctgtgtccagagatgagctgatggaggccatccagaagcaggaggagatcaacttccggctgcaggactacatcgaccgcatcatcgtggccatcatggagaccaaccccagcatcctggaggtgaagtag

SEQ ID NO: 166831 - DNA, 1383 bp, synthetic construct
  misc_feature 1..1383: note = Description of Artificial Sequence: Synthetic coding sequence
  source 1..1383: mol_type = other DNA
atgagcctgctgcgggccaatgaggtgacagacagcgcctacatgggcagcgagagcacctacagtgaatgtgagaccttcacagatgaggacaccagcaccctggtgcaccctgagctgcagccagaaggagatgctgacagcgctgggggcagcgctgtgcccagtgaatgtctggatgccatggaggagccagaccatggagccctgctgctgctgcccggccggccccacccccacggccagagcgtcatcaccgtcatcggcggggaggagcactttgaagattatggagagggcagcgaggccgagctgagccctgagaccctgtgcaatggccagctgggctgcagcgaccctgccttcctgacccccagccccaccaagaggctgagcagcaagaaggtggcccgctacctgcaccagagcggggccctgaccatggaggccctggaggaccccagccctgagctgatggagggccctgaggaggacattgctgacaaggtggtgttcctggagaggagagtgctggagctggagaaggacacagctgccactggagagcagcacagccggctgcggcaggagaacctgcagctggtgcaccgggccaatgccctggaggagcagctgaaggagcaggagctgcgggcctgtgagatggtgctggaggagacccggcggcagaaggagctgctgtgcaagatggagcgggagaagagcattgaaattgagaacctgcagacccggctgcagcagctggatgaggagaacagcgagctgcggagctgcaccccctgcctgaaggccaacatcgagcggctggaggaggagaagcagaagctgctggatgaaattgagagcctgaccctgcggctgtctgaggagcaggagaacaagaggaggatgggagaccggctgagccatgagcggcaccagttccagagggacaaggaggccacccaggagctgattgaggacctgaggaagcagctggagcacctgcagctgctgaagctggaggccgagcagaggcggggccgcagcagctccatgggcctgcaggagtaccacagccgggcccgggagagcgagctggagcaggaggtgcggcggctgaagcaggacaacagaaacctgaaggagcagaatgaggagctgaatggccagatcatcaccctgagcatccagggcgccaagagcctcttcagcacagccttcagcgagagcctggccgctgagatcagctctgtgtccagagatgagctgatggaggccatccagaagcaggaggagatcaacttccggctgcaggactacatcgaccgcatcatcgtggccatcatggagaccaaccccagcatcctggaggtgaagtag

SEQ ID NO: 166832 - DNA, 1383 bp, synthetic construct
  misc_feature 1..1383: note = Description of Artificial Sequence: Synthetic coding sequence
  source 1..1383: mol_type = other DNA
atgcccttcctgaaggccaatgaggtgacagacagcgcctacatgggcagcgagagcacctacagtgaatgtgagaccttcacagatgaggacaccagcaccctggtgcaccctgagctgcagccagaaggagatgctgacagcgctgggggcagcgctgtgcccagtgaatgtctggatgccatggaggagccagaccatggagccctgctgctgctgcccggccggccccacccccacggccagagcgtcatcaccgtcatcggcggggaggagcactttgaagattatggagagggcagcgaggccgagctgagccctgagaccctgtgcaatggccagctgggctgcagcgaccctgccttcctgacccccagccccaccaagaggctgagcagcaagaaggtggcccgctacctgcaccagagcggggccctgaccatggaggccctggaggaccccagccctgagctgatggagggccctgaggaggacattgctgacaaggtggtgttcctggagaggagagtgctggagctggagaaggacacagctgccactggagagcagcacagccggctgcggcaggagaacctgcagctggtgcaccgggccaatgccctggaggagcagctgaaggagcaggagctgcgggcctgtgagatggtgctggaggagacccggcggcagaaggagctgctgtgcaagatggagcgggagaagagcattgaaattgagaacctgcagacccggctgcagcagctggatgaggagaacagcgagctgcggagctgcaccccctgcctgaaggccaacatcgagcggctggaggaggagaagcagaagctgctggatgaaattgagagcctgaccctgcggctgtctgaggagcaggagaacaagaggaggatgggagaccggctgagccatgagcggcaccagttccagagggacaaggaggccacccaggagctgattgaggacctgaggaagcagctggagcacctgcagctgctgaagctggaggccgagcagaggcggggccgcagcagctccatgggcctgcaggagtaccacagccgggcccgggagagcgagctggagcaggaggtgcggcggctgaagcaggacaacagaaacctgaaggagcagaatgaggagctgaatggccagatcatcaccctgagcatccagggcgccaagagcctcttcagcacagccttcagcgagagcctggccgctgagatcagctctgtgtccagagatgagctgatggaggccatccagaagcaggaggagatcaacttccggctgcaggactacatcgaccgcatcatcgtggccatcatggagaccaaccccagcatcctggaggtgaagtag

SEQ ID NO: 166833 - DNA, 549 bp, synthetic construct
  misc_feature 1..549: note = Description of Artificial Sequence: Synthetic coding sequence
  source 1..549: mol_type = other DNA
atgggcagcgagagcacctacagtgaatgtgagaccttcacagatgaggacaccagcaccctggtgcaccctgagctgcagccagaaggagatgctgacagcgctgggggcagcgctgtgcccagtgaatgtctggatgccatggaggagccagaccatggagccctgctgctgctgcccggccggccccacccccacggccagagcgtcatcaccgtcatcggcggggaggagcactttgaagattatggagagggcagcgaggccgagctgagccctgagaccctgtgcaatggccagctgggctgcagcgaccctgccttcctgacccccagccccaccaagaggctgagcagcaagaaggtggcccgctacctgcaccagagcggggccctgaccatggaggccctggaggaccccagccctgagctgatggagggccctgaggaggacattgctgacaaggtggtgttcctggagaggagagtgctggagctggagaaggacacagctgccactggagagcagcacagccggctgcggcagtag

SEQ ID NO: 166834 - DNA, 2406 bp, synthetic construct
  misc_feature 1..2406: note = Description of Artificial Sequence: Synthetic coding sequence
  source 1..2406: mol_type = other DNA
atggccagcgcccccccagccagccccccaggcagcgagcccccaggccctgaccctgagcccggcggcccagatggccctggagctgcccagctggcccctggccctgctgagctgcggctgggcgcccctgtgggcggccctgacccccagagccctggcctggatgagcccgcccctggagctgctgctgatggaggagcccgctggagcgctggccctgcccctggcctggagggcggcccccgggaccccggccccagcgcccccccacccaggagcggcccccggggccagctggccagcccagatgcccctggccctggccccaggtctgaggcccccctgcctgagctggaccccctcttctcctggacagaggagccagaagaatgtggccctgccagctgcccagagagcgcccccttccggctgcagggcagcagcagcagccaccgggcccggggggaggtggatgtgttcagccccttccctgcccccacagctggggagctggccctggagcagggccctggcagccccccccagcccagcgacctgagccagacccaccccctgcccagcgagcctgtgggcagccaggaggatggcccccggctgcgggctgtgtttgatgccctggatggagatggagatggctttgtgagaattgaggacttcatccagtttgccaccgtgtatggagctgagcaggtgaaggacctgaccaagtacctggaccccagcggcctgggcgtcatcagctttgaggacttctaccagggcatcacagccatcagaaatggagaccctgatggccagtgctacggcggcgtggccagcgcccaggatgaggagcccctggcctgcccagatgaatttgatgactttgtgacctatgaggccaatgaggtgacagacagcgcctacatgggcagcgagagcacctacagtgaatgtgagaccttcacagatgaggacaccagcaccctggtgcaccctgagctgcagccagaaggagatgctgacagcgctgggggcagcgctgtgcccagtgaatgtctggatgccatggaggagccagaccatggagccctgctgctgctgcccggccggccccacccccacggccagagcgtcatcaccgtcatcggcggggaggagcactttgaagattatggagagggcagcgaggccgagctgagccctgagaccctgtgcaatggccagctgggctgcagcgaccctgccttcctgacccccagcacagaccccctggccgccaagctgcacagcatcctgacagatgaggcctttgagttctactgcagccagtgccacaagcagatcaaccggctggaggacctgagcgcccggctgagtgacctggagatgaacagccccaccaagaggctgagcagcaagaaggtggcccgctacctgcaccagagcggggccctgaccatggaggccctggaggaccccagccctgagctgatggagggcccagaagaagatattgctgacaaggtggtgttcctggagcggcgggtgctggagctggagaaggacacagctgccaccggggagcagcacagccggctgcggcaggagaacctgcagctggtgcaccgggccaatgccctggaggagcagctgaaggagcaggagctgcgggcctgtgagatggtgctggaggagacccggcggcagaaggagctgctgtgcaagatggagcgggagaagagcattgaaattgagaacctgcagacccggctgcagcagctggatgaagaaaattctgagctgcggagctgcaccccctgcctgaaggccaacatcgagcggctggaggaggagaagcagaagctgctggatgaaattgagagcctgaccctgcggctgtctgaggagcaggagaacaagaggaggatgggagaccggctgagccatgagcggcaccagttccagagggacaaggaggccacccaggagctgattgaggacctgaggaagcagctggagcacctgcagctgctgaagctggaggccgagcagaggcggggccgcagcagctccatgggcctgcaggagtaccacagccgggcccgggagagcgagctggagcaggaggtgcggcggctgaagcaggacaacagaaacctgaaggagcagaatgaggagctgaatggccagatcatcaccctgagcatccagggcgccaagagcctcttcagcacagccttcagcgagagcctggccgctgagatcagctctgtgtccagagatgagctgatggaggccatccagaagcaggaggagatcaacttccggctgcaggactacatcgaccgcatcatcgtggccatcatggagaccaaccccagcatcctggaggtgaagtag

SEQ ID NO: 166835 - DNA, 1914 bp, synthetic construct
  misc_feature 1..1914: note = Description of Artificial Sequence: Synthetic coding sequence
  source 1..1914: mol_type = other DNA
atggccggcggggccggctggagcggggccccagctgccctgctgcggtctgtgcggcggctgcgggaggtgtttgaggtgtgtggccgggaccctgatggcttcctgcgggtggagcgggtggccgccctgggcctgcgcttcggccagggcgaggaggtggagaagctggtgaagtacctggaccccaatgacctgggccgcatcaacttcaaggacttctgccggggcgtgtttgccatgaagggctgtgaggagctgctgaaggatgtgctgtctgtggagagcgctggcaccctgccctgtgcccctgagatcccagactgtgtggagcagggcagcgaggtgacaggccccacctttgctgatggagagctgatcccccgggagcccggcttcttcccagaagatgaggaggaggccatgaccctggcccctcctgagggcccccaggagctgtacacagacagccccatggagagcacccagagcctggagggctctgtgggcagccctgctgagaaggatggcggcctgggcggcctcttcctgcctgaggacaagagcctggtgcacacccccagcatgaccaccagtgacctgagcacccacagcaccaccagcctcatcagcaatgaggagcagtttgaagattatggagaaggagatgatgtggactgtgcccccagcagcccctgcccagatgatgagaccaggaccaacgtgtacagcgacctgggcagctctgtgagcagcagcgctggccagacccccaggaagatgagacatgtgtacaacagcgagctgctggatgtgtactgcagccagtgctgcaagaagatcaacctgctgaatgacctggaggcccggctgaagaacctgaaggccaacagccccaacaggaagatcagcagcacagccttcggccggcagctgatgcacagcagcaacttcagcagcagcaatggcagcacagaggacctcttccgggacagcattgacagctgtgacaatgacatcacagagaaggtgtccttcctggagaagaaggtgacagagctggagaatgacagcctgaccaatggagacctgaagagcaagctgaagcaggagaacacccagctggtgcaccgggtgcatgagctggaggagatggtgaaggaccaggagaccacagctgagcaggccctggaggaggaggcccggcggcaccgggaggcctacggcaagctggagcgggagaaggccacagaggtggagctgctgaatgcccgggtgcagcagctggaggaggagaacacagagctgcggaccaccgtgacccggctgaagagccagacagagaagctggatgaggagcggcagaggatgtctgaccggctggaggacaccagcctgcggctgaaggatgagatggacctgtacaagaggatgatggacaagctgcggcagaaccggctggagttccagaaggagcgggaggccacccaggagctgattgaggacctgaggaaggagctggagcacctgcagatgtacaagctggactgtgagcggcccggccggggccgcagcgccagcagcggcctgggggagttcaatgcccgggcccgggaggtggagctggagcacgaggtgaagaggctgaagcaggagaactacaagctgcgggaccagaatgatgacctgaatggccagatcctgagcctgagcctgtatgaggccaagaacctgtttgctgcccagaccaaggcccagagcctggccgctgagattgacacagccagcagagatgagctgatggaggccctgaaggagcaggaggagatcaacttccggctgcggcagtacatggacaagatcatcctggccatcctggaccacaaccccagcatcctggagatcaagcactag

SEQ ID NO: 166836 - DNA, 1914 bp, synthetic construct; identical to SEQ ID NO: 166835
  misc_feature 1..1914: note = Description of Artificial Sequence: Synthetic coding sequence
  source 1..1914: mol_type = other DNA

SEQ ID NO: 166837 - DNA, 651 bp, synthetic construct
  misc_feature 1..651: note = Description of Artificial Sequence: Synthetic coding sequence
  source 1..651: mol_type = other DNA
atgggcaccagagatgatgaatatgactacctgttcaaggtggtgctgattggagacagcggcgtgggcaagagcaacctgctgagccgcttcaccagaaatgagttcaacctggagagcaagagcaccatcggcgtggagtttgccaccaggagcatccaggtggatggcaagaccatcaaggcccagatctgggacacagctggccaggagcgctaccgggccatcaccagcgcctactacagaggagctgtgggcgccctgctggtgtatgacatcgccaagcacctgacctatgaaaatgtggagcgctggctgaaggagctgcgggaccatgctgacagcaacatcgtcatcatgctggtgggcaacaagagtgacctgcggcacctgcgggctgtgcccacagatgaggcccgggcctttgctgagaagaatggcctgtccttcatcgagaccagcgccctggacagcaccaacgtggaggccgccttccagaccatcctgacagagatctacagaattgtgtcccagaagcagatgtctgaccggcgggagaatgacatgagccccagcaacaacgtggtgcccatccacgtgccccccaccacagagaacaagcccaaggtgcagtgctgccagaacatctag

SEQ ID NO: 166838 - DNA, 468 bp, synthetic construct
  misc_feature 1..468: note = Description of Artificial Sequence: Synthetic coding sequence
  source 1..468: mol_type = other DNA
atgggcaccagagatgatgaatatgactacctgttcaaggtggtgctgattggagacagcggcgtgggcaagagcaacctgctgagccgcttcaccagaaatgagttcaacctggagagcaagagcaccatcggcgtggagtttgccaccaggagcatccaggtggatggcaagaccatcaaggcccagatctgggacacagctggccaggagcgctaccgggccatcaccagcgcctactacagaggagctgtgggcgccctgctggtgtatgacatcgccaagcacctgacctatgaaaatgtggagcgctggctgaaggagctgcgggaccatgctgacagcaacatcgtcatcatgctggtgggcaacaagagtgacctgcggcacctgcgggctgtgcccacagatgaggcccgggcctttgctggctacaacaaggccaacgtgcggcagaccaggaagtag

SEQ ID NO: 166839 - DNA, 612 bp, synthetic construct
  misc_feature 1..612: note = Description of Artificial Sequence: Synthetic coding sequence
  source 1..612: mol_type = other DNA
atggccaaggcctatgaccacctgttcaagctgctgctgattggagacagcggcgtgggcaagacctgcctgatcatccgctttgctgaggacaacttcaacaacacctacatcagcaccatcggcatcgacttcaagatcagaacagtggacatcgagggcaagaagatcaagctgcaggtgtgggacacagctggccaggagcgcttcaagaccatcaccacagcctactacagaggagccatgggcatcatcctggtgtatgacatcacagatgagaagagctttgagaacatccagaactggatgaagagcatcaaggaaaatgccagcgctggggtggagcggctgctgctgggcaacaagtgtgacatggaggccaagaggaaggtgcagaaggagcaggccgacaagctggcccgggagcacggcatccgcttctttgagaccagcgccaagagctccatgaatgtggatgaggccttcagcagcctggcccgggacatcctgctgaagagcggcggccgccgctctggaaatggaaacaagccacccagcacagacctgaagacctgtgacaagaagaacaccaacaagtgcagcctgggctag

SEQ ID NO: 166840 - DNA, 648 bp, synthetic construct
  misc_feature 1..648: note = Description of Artificial Sequence: Synthetic coding sequence
  source 1..648: mol_type = other DNA
atggccacagccccctacaactacagctacatcttcaagtacatcatcattggagacatgggcgtgggcaagagctgcctgctgcaccagttcacagagaagaagttcatggctgactgcccccacaccatcggcgtggagtttggcacccgcatcatcgaggtgtctggccagaagatcaagctgcagatctgggacacagctggccaggagcgcttccgggctgtgaccaggagctactacagaggagctgctggggccctgatggtgtatgacatcaccaggaggagcacctacaaccacctgagctcctggctgacagatgccaggaacctgaccaaccccaacacagtcatcatcctgattggcaacaaggctgacctggaggcccagagagatgtgacctatgaggaggccaagcagtttgctgaagaaaatggcctgctcttcctggaggccagcgccaagacaggagaaaatgtggaggatgccttcctggaggccgccaagaagatctaccagaacatccaggacggcagcctggacctgaatgctgctgagagcggcgtgcagcacaagcccagcgccccccagggcggccgcctgaccagcgagccccagccccagcgggagggctgcggctgctag

SEQ ID NO: 166841 - DNA, 546 bp, synthetic construct
  misc_feature 1..546: note = Description of Artificial Sequence: Synthetic coding sequence
  source 1..546: mol_type = other DNA
atggccacagccccctacaactacagctacatcttcaagtacatcatcattggagacatgggcgtgggcaagagctgcctgctgcaccagttcacagagaagaagttcatggctgactgcccccacaccatcggcgtggagtttggcacccgcatcatcgaggtgtctggccagaagatcaagctgcagatctgggacacagctggccaggagcgcttccgggctgtgaccaggagctactacagaggagctgctggggccctgatggtgtatgacatcaccaggaggagcacctacaaccacctgagctcctggctgacagatgccaggaacctgaccaaccccaacacagtcatcatcctgattggcaacaaggctgacctggaggcccagagagatgtgacctatgaggaggccaagcagtttgctgaagaaaatggcctgctcttcctggaggccagcgccaagacaggagaaaatgtggaggatgccttcctggaggccgccaagaagatctaccagaacatccaggacggcagcctgtag

SEQ ID NO: 166842 - DNA, 711 bp, synthetic construct
  misc_feature 1..711: note = Description of Artificial Sequence: Synthetic coding sequence
  source 1..711: mol_type = other DNA
atgggccagaaggccagccagcagctggccctgaaggacagcaaggaggtgcctgtggtgtgtgaggtggtgtctgaggccatcgtgcatgctgcccagaagctgaaggagtacctgggctttgagtacccacccagcaagctgtgcccagctgccaacaccctgaatgagatcttcctgatccacttcatcaccttctgccaggagaagggcgtggatgagtggctgaccaccaccaagatgaccaagcaccaggccttcctgtttggagctgactggatctggaccttctggggcagcaacaagcagatcaagctgcagctggccgtgcagaccctgcagatgagcagccccccacctgtggagagcaagccctgtgacctgagcaaccctgagagccgggtggaggagagctcctggaagaagagcagatttgacaagctggaggagttctgcaacctgattggagaggactgcctgggcctcttcatcatcttcggcatgcctgggaagcccaaggacatccggggcgtggtgctggacagcgtgaagagccagatggtgcgcagccacctgcccggcggcaaggctgtggcccagtttgtgctggagacagaggactgtgtgttcatcaaggagctgctgaggaactgcctgagcaagaaggatggcctgcgggaggtgggcaaggtgtacatcagcatcctgtag

SEQ ID NO: 166843 - DNA, 639 bp, synthetic construct
  misc_feature 1..639: note = Description of Artificial Sequence: Synthetic coding sequence
  source 1..639: mol_type = other DNA
atggcccaggcccacaggaccccccagccccgggccgcccccagccagcccagggtcttcaagctggtgctgctgggcagcggctctgtgggcaagagcagcctggccctgcgctacgtgaagaatgacttcaagagcatcctgcccaccgtgggctgtgccttcttcaccaaggtggtggatgtgggcgccaccagcctgaagctggagatctgggacacagctggccaggagaagtaccacagcgtgtgccacctgtacttccggggggccaatgctgccctgctggtgtatgacatcaccaggaaggacagcttcctgaaggcccagcagtggctgaaggacctggaggaggagctgcaccctggagaggtgctggtgatgctggtgggcaacaagacagacctgagccaggagcgggaggtgaccttccaggagggcaaggagtttgctgacagccagaagctgctcttcatggagaccagcgccaagctgaaccaccaggtgtctgaggtgttcaacacagtggcccaggagctgctgcagaggagtgatgaggagggccaggccctgcggggagatgctgctgtggccctgaacaagggccctgcccggcaggccaagtgctgtgcccactag

SEQ ID NO: 166844 - DNA, 258 bp, synthetic construct
  misc_feature 1..258: note = Description of Artificial Sequence: Synthetic coding sequence
  source 1..258: mol_type = other DNA
atgctggtgggcaacaagacagacctgagccaggagcgggaggtgaccttccaggagggcaaggagtttgctgacagccagaagctgctcttcatggagaccagcgccaagctgaaccaccaggtgtctgaggtgttcaacacagtggcccaggagctgctgcagaggagtgatgaggagggccaggccctgcggggagatgctgctgtggccctgaacaagggccctgcccggcaggccaagtgctgtgcccactag

SEQ ID NO: 166845 - DNA, 621 bp, synthetic construct
  misc_feature 1..621: note = Description of Artificial Sequence: Synthetic coding sequence
  source 1..621: mol_type = other DNA
atggatgaagatgtgctgaccaccctgaagatcctgatcatcggggagagcggcgtgggcaagagcagcctgctgctgcgcttcacagatgacacctttgatcctgagctggccgccaccatcggcgtggacttcaaggtgaagaccatctctgtggatggcaacaaggccaagctggccatctgggacacagctggccaggagcgcttccgcaccctgacccccagctactacagaggagcccagggcgtcatcctggtgtatgatgtgacccggcgggacacctttgtgaagctggacaactggctgaatgagctggagacctactgcaccagaaatgacatcgtgaacatgctggtgggcaacaagattgacaaggaaaatcgggaggtggacagaaatgaaggcctgaagtttgccaggaagcacagcatgctgttcatcgaggccagcgccaagacctgtgatggagtgcagtgtgcctttgaggagctggtggagaagatcatccagaccccaggcctgtgggagagcgagaaccagaacaagggcgtgaagctgagccaccgggaggagggccagggcggcggggcctgtggcggctactgcagcgtgctgtag

SEQ ID NO: 166846 - DNA, 486 bp, synthetic construct
  misc_feature 1..486: note = Description of Artificial Sequence: Synthetic coding sequence
  source 1..486: mol_type = other DNA
atggatgaagatgtgctgaccaccctgaagatcctgatcatcggggagagcggcgtgggcaagagcagcctgctgctgcgcttcacagatgacacctttgatcctgagctggccgccaccatcgtgtatgatgtgacccggcgggacacctttgtgaagctggacaactggctgaatgagctggagacctactgcaccagaaatgacatcgtgaacatgctggtgggcaacaagattgacaaggagaaccgggaggtggacagaaatgaaggcctgaagtttgccaggaagcacagcatgctgttcatcgaggccagcgccaagacctgtgatggagtgcagtgtgcctttgaggagctggtggagaagatcatccagaccccaggcctgtgggagagcgagaaccagaacaagggcgtgaagctgagccaccgggaggagggccagggcggcggggcctgtggcggctactgcagcgtgctgtag

SEQ ID NO: 166847 - DNA, 876 bp, synthetic construct
  misc_feature 1..876: note = Description of Artificial Sequence: Synthetic coding sequence
  source 1..876: mol_type = other DNA
tgaagactgcccggcagccggcccctgcccggccccagcagcctgggccgcagccccagctgcagcgctgagaagacccccttccggggcccccccctgggccggcagagcgctgtgaaggagctggacctggtgacagctgggaagttccgcttctctgtgcgctctgagtgcttcagccggggcccccccctgaagatcaagtgcaactgctacttctccttctgccacatcctgtggaggcagaagatctctgtggtgctgtccttcttcaccttcagcctgggcaagatcatcctgactgtggagctgagcatcagcctgctgctgcgcttcacagatgacacctttgatcctgagctggccgccaccatcggcgtggacttcaaggtgaagaccatctctgtggatggcaacaaggccaagctggccatctgggtgaccctgcaccagcagacagccaacttcttcctgaagagccagatcggcaacagccccatcctgaagtgggccatgtggcagtatgacacagctggccaggagcgcttccgcaccctgacccccagctactacagaggagcccagggcgtcatcctggtgtatgatgtgacccggcgggacacctttgtgaagctggacaactggctgaatgagctggagacctactgcaccagaaatgacatcgtgaacatgctggtgggcaacaagattgacaaggagaaccgggaggtggacagaaatgaaggcctgaagtttgccaggaagcacagcatgctgttcatcgaggccagcgccaagacctgtgatggagtgcagtgtgcctttgaggagctggtggagaagatcatccagaccccaggcctgtgggagagctag

SEQ ID NO: 166848 - DNA, 429 bp, synthetic construct
  misc_feature 1..429: note = Description of Artificial Sequence: Synthetic coding sequence
  source 1..429: mol_type = other DNA
atggatgaagatgtgctgaccaccctgaagatcctgatcatcggggagagcggcgtgggcaagagcagcctgctgctgcgcttcacagatgacacctttgatcctgagctggccgccaccatcggcgtggacttcaaggtgaagaccatctctgtggatggcaacaaggccaagctggccatctgggagaaccgggaggtggacagaaatgaaggcctgaagtttgccaggaagcacagcatgctgttcatcgaggccagcgccaagacctgtgatggagtgcagtgtgcctttgaggagctggtggagaagatcatccagaccccaggcctgtgggagagcgagaaccagaacaagggcgtgaagctgagccaccgggaggagggccagggcggcggggcctgtggcggctactgcagcgtgctgtag

SEQ ID NO: 166849 - DNA, 555 bp, synthetic construct
  misc_feature 1..555: note = Description of Artificial Sequence: Synthetic coding sequence
  source 1..555: mol_type = other DNA
atggatgaagatgtgctgaccaccctgaagatcctgatcatcggggagagcggcgtgggcaagagcagcctgctgctgcgcttcacagatgacacctttgatcctgagctggccgccacagacacagctggccaggagcgcttccgcaccctgacccccagctactacagaggagcccagggcgtcatcctggtgtatgatgtgacccggcgggacacctttgtgaagctggacaactggctgaatgagctggagacctactgcaccagaaatgacatcgtgaacatgctggtgggcaacaagattgacaaggaaaatcgggaggtggacagaaatgaaggcctgaagtttgccaggaagcacagcatgctgttcatcgaggccagcgccaagacctgtgatggagtgcagtgtgcctttgaggagctggtggagaagatcatccagaccccaggcctgtgggagagcgagaaccagaacaagggcgtgaagctgagccaccgggaggagggccagggcggcggggcctgtggcggctactgcagcgtgctgtag

SEQ ID NO: 166850 - DNA, 390 bp, synthetic construct
  misc_feature 1..390: note = Description of Artificial Sequence: Synthetic coding sequence
  source 1..390: mol_type = other DNA
atgagctccatgaacccagaatatgactacctgttcaagctgctgctgattggagacagcggcgtgggcaagagctgcctgctgctgcgctttgctgatgacacctacacagagagctacatcagcaccatcggcgtggacttcaagatccgcaccatcgagctggatggcaagaccatcaagctgcagatcgagtttgctgacagcctgggcatccccttcctggagaccagcgccaagaatgccaccaacgtggagcagagcttcatgaccatggctgctgagatcaagaagaggatgggccctggggccacagctgggggcgctgagaagagcaatgtgaagatccagagcacccctgtgaagcagagcggcggcggctgctgctag

SEQ ID NO: 166851 - DNA, 390 bp, synthetic construct
  misc_feature 1..390: note = Description of Artificial Sequence: Synthetic coding sequence
  source 1..390: mol_type = other DNA
atgagctgcctgcaccccaccagtgactacctgttcaagctgctgctgattggagacagcggcgtgggcaagagctgcctgctgctgcgctttgctgatgacacctacacagagagctacatcagcaccatcggcgtggacttcaagatccgcaccatcgagctggatggcaagaccatcaagctgcagatcgagtttgctgacagcctgggcatccccttcctggagaccagcgccaagaatgccaccaacgtggagcagagcttcatgaccatggctgctgagatcaagaagaggatgggccctggggccacagctgggggcgctgagaagagcaatgtgaagatccagagcacccctgtgaagcagagcggcggcggctgctgctag

SEQ ID NO: 166852 - DNA, 522 bp, synthetic construct
  misc_feature 1..522: note = Description of Artificial Sequence: Synthetic coding sequence
  source 1..522: mol_type = other DNA
atgagctccatgaacccagaatatgactacctgttcaagctgctgctgattggagacagcggcgtgggcaagagctgcctgctgctgcgctttgctgatgacacctacacagagagctacatcagcaccatcggcgtggacttcaagatccgcaccatcgagctggatggcaagaccatcaagctgcagatcgagagcttcaacaacgtgaagcagtggctgcaggagattgacagatatgcctctgaaaatgtgaacaagctgctggtgggcaacaagtgtgacctgaccaccaagaaggtggtggactacaccacagccaaggagtttgctgacagcctgggcatccccttcctggagaccagcgccaagaatgccaccaacgtggagcagagcttcatgaccatggctgctgagatcaagaagaggatgggccctggggccacagctgggggcgctgagaagagcaatgtgaagatccagagcacccctgtgaagcagagcggcggcggctgctgctag

SEQ ID NO: 166853 - DNA, 522 bp, synthetic construct
  misc_feature 1..522: note = Description of Artificial Sequence: Synthetic coding sequence
  source 1..522: mol_type = other DNA
atgagctccatgaacccagaatatgactacctgttcaagctgctgctgattggagacagcggcgtgggcaagagctgcctgctgctgcgctttgcctgggacacagctggccaggagcgcttccgcaccatcaccagcagctactacagaggagcccacggcatcatcgtggtgtatgatgtgacagaccaggagagcttcaacaacgtgaagcagtggctgcaggagattgacagatatgcctctgaaaatgtgaacaagctgctggtgggcaacaagtgtgacctgaccaccaagaaggtggtggactacaccacagccaaggagtttgctgacagcctgggcatccccttcctggagaccagcgccaagaatgccaccaacgtggagcagagcttcatgaccatggctgctgagatcaagaagaggatgggccctggggccacagctgggggcgctgagaagagcaatgtgaagatccagagcacccctgtgaagcagagcggcggcggctgctgctag

SEQ ID NO: 166854 - DNA, 618 bp, synthetic construct
  misc_feature 1..618: note = Description of Artificial Sequence: Synthetic coding sequence
  source 1..618: mol_type = other DNA
atgagctccatgaacccagaatatgactacctgttcaagctgctgctgattggagacagcggcgtgggcaagagctgcctgctgctgcgctttgctgatgacacctacacagagagctacatcagcaccatcggcgtggacttcaagatccgcaccatcgagctggatggcaagaccatcaagctgcagatctgggacacagctggccaggagcgcttccgcaccatcaccagcagctactacagaggagcccacggcatcatcgtggtgtatgatgtgacagaccaggagagcttcaacaacgtgaagcagtggctgcaggagattgacagatatgcctctgaaaatgtgaacaagctgctggtgggcaacaagtgtgacctgaccaccaagaaggtggtggactacaccacagccaaggagtttgctgacagcctgggcatccccttcctggagaccagcgccaagaatgccaccaacgtggagcagagcttcatgaccatggctgctgagatcaagaagaggatgggccctggggccacagctgggggcgctgagaagagcaatgtgaagatccagagcacccctgtgaagcagagcggcggcggctgctgctag

SEQ ID NO: 166855 - DNA, 426 bp, synthetic construct
  misc_feature 1..426: note = Description of Artificial Sequence: Synthetic coding sequence
  source 1..426: mol_type = other DNA
atgagctccatgaacccagaatatgactacctgttcaagctgctgctgattggagacagcggcgtgggcaagagctgcctgctgctgcgctttgctgagagcttcaacaacgtgaagcagtggctgcaggagattgacagatatgcctctgaaaatgtgaacaagctgctggtgggcaacaagtgtgacctgaccaccaagaaggtggtggactacaccacagccaaggagtttgctgacagcctgggcatccccttcctggagaccagcgccaagaatgccaccaacgtggagcagagcttcatgaccatggctgctgagatcaagaagaggatgggccctggggccacagctgggggcgctgagaagagcaatgtgaagatccagagcacccctgtgaagcagagcggcggcggctgctgctag

SEQ ID NO: 166856 - DNA, 606 bp, synthetic construct
  misc_feature 1..606: note = Description of Artificial Sequence: Synthetic coding sequence
  source 1..606: mol_type = other DNA
atgaacccagaatatgactacctgttcaagctgctgctgattggagacagcggcgtgggcaagagctgcctgctgctgcgctttgctgatgacacctacacagagagctacatcagcaccatcggcgtggacttcaagatccgcaccatcgagctggatggcaagaccatcaagctgcagatctgggacacagctggccaggagcgcttccgcaccatcaccagcagctactacagaggagcccacggcatcatcgtggtgtatgatgtgacagaccaggagagctatgccaacgtgaagcagtggctgcaggagattgacagatatgcctctgaaaatgtgaacaagctgctggtgggcaacaagagtgacctgaccaccaagaaggtggtggacaacaccacagccaaggagtttgctgacagcctgggcatccccttcctggagaccagcgccaagaatgccaccaacgtggagcaggccttcatgaccatggctgctgagatcaagaagaggatgggccctggagctgccagcggcggggagcggcccaacctgaagattgacagcacccctgtgaagccagctgggggcggctgctgctag

SEQ ID NO: 166857 - DNA, 489 bp, synthetic construct
  misc_feature 1..489: note = Description of Artificial Sequence: Synthetic coding sequence
  source 1..489: mol_type = other DNA
atgaacccagaatatgactacctgttcaagctgctgctgattggagacagcggcgtgggcaagagctgcctgctgctgcgctttgctgatgacacctacacagagagctacatcagcaccatcggcgtggacttcaagatccgcaccatcgagctggatggcaagaccatcaagctgcagatctgggacacagctggccaggagcgcttccgcaccatcaccagcagctactacagaggagcccacggcatcatcgtggtgtatgatgtgacagaccaggagagctatgccaacgtgaagcagggctgccggcggctgacagccatgcctgcccggaccagcatcagctcctggtgggccacccgggccaccagccccccccggcgctggtggaccaccccccagcccaggagcctgcagaccctgtgggccagccccagctggaggcgggcccccaggatgccacccatgagcagccgccgctcctag

SEQ ID NO: 166858 - DNA, 360 bp, synthetic construct
  misc_feature 1..360: note = Description of Artificial Sequence: Synthetic coding sequence
  source 1..360: mol_type = other DNA
atgaacccagaatatgactacctgttcaagctgctgctgattggagacagcggcgtgggcaagagctgcctgctgctgcgctttgctgatgacacctacacagagagctacatcagcaccatcggcgtggacttcaagatccgcaccatcgagctggatggcaagaccatcaagctgcagatctgggacacagctggccaggagcgcttccgcaccatcaccagcagctactacagaggagcccacggcatcatcgtggtgtatgatgtgacagaccaggagagctatgccaacgtgaagcagtggctgcaggagattgacagatatgcctctgaaaatgtgaacaagctgctggtgtag

SEQ ID NO: 166859 - DNA, 678 bp, synthetic construct
  misc_feature 1..678: note = Description of Artificial Sequence: Synthetic coding sequence
  source 1..678: mol_type = other DNA
atggctgctgctgggggcggcggcggcggcgctgctgctgctggccgggcctacagcttcaaggtggtgctgctgggggagggctgtgtgggcaagaccagcctggtgctgcgctactgtgagaacaagttcaatgacaagcacatcaccaccctgcaggccagcttcctgaccaagaagctgaacattggaggcaagagggtgaacctggccatctgggacacagctggccaggagcgcttccacgccctgggccccatctactacagagacagcaatggagccatcctggtgtatgacatcacagatgaggacagcttccagaaggtgaagaactgggtgaaggagctgaggaagatgctgggcaatgagatctgcctgtgcatcgtgggcaacaagattgacctggagaaggagagacatgtgtccatccaggaggccgagagctatgcagagagcgtgggcgccaagcactaccacaccagcgccaagcagaacaagggcatcgaggagctgttcctggacctgtgcaagaggatgattgaaacagcccaggtggatgagcgggccaagggaaatggcagcagccagcccggcacagcccggcggggcgtgcagatcattgatgatgagccccaggcccagaccagcggcggcggctgctgcagcagcggctag

SEQ ID NO: 166860 - DNA, 585 bp, synthetic construct
  misc_feature 1..585: note = Description of Artificial Sequence: Synthetic coding sequence
  source 1..585: mol_type = other DNA
atggccctgcgggagctgaaggtgtgcctgctgggggacaccggggtgggcaagagcagcatcgtgtggaggtttgtggaggacagctttgaccccaacatcaaccccaccatcggggccagcttcatgaccaagacagtgcagtaccagaatgagctgcacaagttcctgatctgggacacagctggccaggagcgcttccgggccctggcccccatgtactaccggggcagcgctgctgccatcatcgtgtatgacatcaccaaggaggagaccttcagcaccctgaagaactgggtgaaggagctgcggcagcacggcccccccaacatcgtggtggccatcgccggcaacaagtgtgacctgattgatgtgcgggaggtgatggagagagatgccaaggactatgctgacagcatccacgccatctttgtggagaccagcgccaagaatgccatcaacatcaatgagctgttcatcgagatcagccgccgcatccccagcacagatgccaacctgcccagcggcggcaagggcttcaagctgcggcggcagcccagcgagcccaagaggagctgctgctag

SEQ ID NO: 166861 - DNA, 714 bp, synthetic construct
  misc_feature 1..714: note = Description of Artificial Sequence: Synthetic coding sequence
  source 1..714: mol_type = other DNA
atgctggaggaggacatggaggtggccatcaagatggtggtggtgggcaatggagctgtgggcaagagctccatgatccagcgctactgcaagggcatcttcaccaaggactacaagaagaccatcggcgtggacttcctggagcggcagatccaggtgaatgatgaagatgtgcggctgatgctgtgggacacagctggccaggaggagtttgatgccatcaccaaggcctactacagaggagcccaggcctgtgtgctggtgttcagcaccacagaccgggagagctttgaagctgtgtcctcctggagggagaaggtggtggccgaggtgggggacatccccaccgtgctggtgcagaacaagattgacctgctggatgacagctgcatcaagaatgaggaggccgaggccctggccaagaggctgaagctgcgcttctaccgcacctctgtgaaggaggacctgaatgtgaatgaggtgttcaagtacctggccgagaagtacctgcagaagctgaagcagcagattgctgaagatcctgagctgacccacagcagcagcaacaagattggagtcttcaacaccagcggcggcagccacagcggccagaacagcggcaccctgaatggaggagatgtgatcaacctgcggcccaacaagcagaggaccaagaagaacagaaaccccttcagcagctgcagcatcccctag

SEQ ID NO: 166862 - DNA, 714 bp, synthetic construct; identical to SEQ ID NO: 166861
  misc_feature 1..714: note = Description of Artificial Sequence: Synthetic coding sequence
  source 1..714: mol_type = other DNA

SEQ ID NO: 166863 - DNA, 612 bp, synthetic construct
  misc_feature 1..612: note = Description of Artificial Sequence: Synthetic coding sequence
  source 1..612: mol_type = other DNA
atgagcggccagagggtggatgtgaaggtggtgatgctgggcaaggagtatgtgggcaagaccagcctggtggagagatatgtgcatgaccgcttcctggtgggcccctaccagaacaccatcggggccgcctttgtggccaaggtgatgtctgtgggggacagaacagtgaccctgggcatctgggacacagctggcagcgagagatatgaggccatgagccgcatctactacagaggagccaaggccgccatcgtgtgctatgacctgacagacagcagcagctttgagcgggccaagttctgggtgaaggagctgcggagcctggaggagggctgccagatctacctgtgtggcaccaagagtgacctgctggaggaggacagaagaagaagaagagtggacttccatgatgtgcaggactatgctgacaacatcaaggcccagctgtttgagaccagcagcaagacaggccagagcgtggatgagctgttccagaaggtggccgaggactatgtgtctgtggccgccttccaggtgatgacagaagataaaggagtggacctgggccagaagcccaacccctacttctacagctgctgccaccactag

SEQ ID NO: 166864 - DNA, 612 bp, synthetic construct; identical to SEQ ID NO: 166863
  misc_feature 1..612: note = Description of Artificial Sequence: Synthetic coding sequence
  source 1..612: mol_type = other DNA

SEQ ID NO: 166865 - DNA, 201 bp, synthetic construct
  misc_feature 1..201: note = Description of Artificial Sequence: Synthetic coding sequence
  source 1..201: mol_type = other DNA
atgagcggccagagggtggatgtgaaggtggtgatgctgggcaaggagtatgtgggcaagaccagcctggtggagagatatgtgcatgaccgcttcctggtgggcccctaccagaacaccatcggggccgcctttgtggccaaggtgatgtctgtgggggacagaacagtgaccctgggcatctgggacacagctggatag

SEQ ID NO: 166866 - DNA, 642 bp, synthetic construct
  misc_feature 1..642: note = Description of Artificial Sequence: Synthetic coding sequence
  source 1..642: mol_type = other DNA
atgggaaatggaacagaggaggactacaactttgtgttcaaggtggtgctgattggagagagcggcgtgggcaagaccaacctgctgagccgcttcaccagaaatgagttcagccatgacagcaggaccaccatcggcgtggagttcagcaccaggacagtgatgctgggcacagctgctgtgaaggcccagatctgggacacagctggcctggagcgctaccgggccatcaccagcgcctactacagaggagctgtgggcgccctgctggtgtttgacctgaccaagcaccagacctatgctgtggtggagcgctggctgaaggagctgtatgaccacgccgaggccaccatcgtggtgatgctggtgggcaacaagagtgacctgagccaggcccgggaggtgcccacagaggaggccaggatgtttgctgaaaataatggcctgctcttcctggagaccagcgccctggacagcaccaacgtggagctggcctttgagaccgtgctgaaggagatctttgccaaggtgtccaagcagaggcagaacagcatccgcaccaatgccatcaccctgggcagcgcccaggccggccaggagcccggccctggagagaagagggcctgctgcatcagcctgtag

SEQ ID NO: 166867 - DNA, 1110 bp, synthetic construct
  misc_feature 1..1110: note = Description of Artificial Sequence: Synthetic coding sequence
  source 1..1110: mol_type = other DNA
atggagggcagcctggagcgggaggccccagctggggccctggccgctgtgctgaagcacagcagcaccctgcccccagagagcacccaggtgcggggctatgacttcaacagaggagtgaactaccgggccctgctggaggccttcggcaccaccggcttccaggccaccaactttggccgggctgtgcagcaggtgaatgccatgattgagaagaagctggagcccctgagccaggatgaggaccagcacgccgacctgacccagagcagaagacccctgaccagctgcaccatcttcctgggctacaccagcaacctgatcagcagcggcatccgggagaccatccgctacctggtgcagcacaacatggtggatgtgctggtgaccacagctgggggcgtggaggaggacctgatcaagtgcctggcccccacctacctgggggagttcagcctgcggggcaaggagctgcgggagaatggcatcaaccgcatcggcaacctgctggtgcccaatgaaaactactgcaagtttgaggactggctgatgcccatcctggaccagatggtgatggagcagaacacagagggcgtgaagtggacccccagcaagatgattgcccggctgggcaaggagatcaacaaccctgagagcgtgtactactgggcccagaagaaccacatccctgtgttcagccctgccctgacagatggcagcctgggggacatgatcttcttccacagctacaagaaccctggcctggtgctggacatcgtggaggacctgcggctcatcaacacccaggccatctttgccaagtgcaccggcatgatcatcctgggcggcggcgtggtgaagcaccacatcgccaatgccaacctgatgagaaatggagctgactatgctgtgtacatcaacacagcccaggagtttgatggcagtgacagcggggcccggccagatgaggccgtgtcctggggcaagatccgggtggatgcccagcctgtgaaggtgtatgcagatgccagcctggtgttccccctgctggtggccgagacctttgcccagaagatggatgccttcatgcatgagaagaatgaagattag

SEQ ID NO: 166868 - DNA, 573 bp, synthetic construct
  misc_feature 1..573: note = Description of Artificial Sequence: Synthetic coding sequence
  source 1..573: mol_type = other DNA
atgctggtgggggacagcggcgtgggcaagacctgcctgctggtgcgcttcaaggatggagccttcctggccggcaccttcatcagcacagtgggcatcgacttcaggaacaaggtgctggatgtggatggagtgaaggtgaagctgcagatgtgggacacagctggccaggagcgcttccgctctgtgacccacgcctactacagagatgcccacgccctgctgctgctgtatgatgtgaccaacaaggccagctttgacaacatccaggcctggctgacagagatccatgaatatgcccagcatgatgtggccctgatgctgctgggcaacaaggtggacagcgcccacgagcgggtggtgaagcgggaggatggagagaagctggccaaggagtatggcctgcccttcatggagaccagcgccaagacaggcctgaatgtggacctggccttcaccgccatcgccaaggagctgaagcagaggtccatgaaggcccccagcgagccccgcttccggctgcatgactatgtgaagcgggagggccgcggggccagctgctgccggccctag

SEQ ID NO: 166869 - DNA, 666 bp, synthetic construct
  misc_feature 1..666: note = Description of Artificial Sequence: Synthetic coding sequence
  source 1..666: mol_type = other DNA
atgtctgatggagactatgactacctgatcaagttcctggccctgggggacagcggcgtgggcaagacctctgtgctgtaccagtacacagatggcaagttcaacagcaagttcatcaccaccgtgggcatcgacttccgggagaagagggtggtgtaccgggccagcggcccagatggagccaccggccggggccagaggatccacctgcagctgtgggacacagctggccaggagcgcttccgcagcctgaccacagccttcttcagagatgccatgggcttcctgctgctgtttgacctgaccaatgagcagagcttcctgaatgtgaggaactggatcagccagctgcagatgcacgcctactgtgagaacccagacatcgtgctgtgtggcaacaagagtgacctggaggaccagagggtggtgaaggaggaggaggccatcgccctggccgagaagtatggcatcccctactttgagaccagcgctgccaacggcaccaacatcagccaggccatcgagatgctgctggacctgatcatgaagaggatggagcgctgtgtggacaagtcctggatccctgagggcgtggtgcgcagcaatggccacgccagcacagaccagctgtctgaggagaaggagaagggggcctgtggctgctag

SEQ ID NO: 166870 - DNA, 642 bp, synthetic construct
  misc_feature 1..642: note = Description of Artificial Sequence: Synthetic coding sequence
  source 1..642: mol_type = other DNA
atgtctgatggagactatgactacctgatcaagttcctggccctgggggacagcggcgtgggcaagacctctgtgctgtaccagtacacagatggcaagttcaacagcaagttcatcaccaccgtgggcatcgacttccgggagaagagggtggtgtaccgggccagcggcccagatggagccaccggccggggccagaggatccacctgcagctgtgggacacagctggccaggagcgcttccgcagcctgaccacagccttcttcagagatgccatgggcttcctgctgctgtttgacctgaccaatgagcagagcttcctgaatgtgaggaactggatcagccagctgcagatgcacgcctactgtgagaacccagacatcgtgctgtgtggcaacaagagtgacctggaggaccagagggtggtgaaggagaagtatggcatcccctactttgagaccagcgctgccaacggcaccaacatcagccaggccatcgagatgctgctggacctgatcatgaagaggatggagcgctgtgtggacaagtcctggatccctgagggcgtggtgcgcagcaatggccacgccagcacagaccagctgtctgaggagaaggagaagggggcctgtggctgctag

SEQ ID NO: 166871 - DNA, 666 bp, synthetic construct; identical to SEQ ID NO: 166869
  misc_feature 1..666: note = Description of Artificial Sequence: Synthetic coding sequence
  source 1..666: mol_type = other DNA

SEQ ID NO: 166872 - DNA, 663 bp, synthetic construct
  misc_feature 1..663: note = Description of Artificial Sequence: Synthetic coding sequence
  source 1..663: mol_type = other DNA
atgtctgacagcgaggaggagagccaggaccggcagctgaagatcgtggtgctgggagatggagccagcggcaagaccagcctgaccacctgctttgcccaggagaccttcggcaagcagtacaagcagaccatcggcctggacttcttcctgcggcgcatcaccctgcccggcaacctgaatgtgaccctgcagatctgggacattggaggccagaccatcggcggcaagatgctggacaagtacatctacggggcccagggcgtgctgctggtgtatgacatcaccaactaccagagctttgagaacctggaggactggtacacagtggtgaagaaggtgtctgaggagagcgagacccagcccctggtggccctggtgggcaacaagattgacctggagcacatgaggaccatcaagccagagaagcacctgcgcttctgccaggagaatggcttcagcagccactttgtgtctgccaagacaggagacagcgtcttcctgtgcttccagaaggtggccgctgagatcctgggcatcaagctgaacaaggccgagattgagcagagccagagaattgtgcgggcagagatcgtgaagtacccagaggaggagaaccagcacaccaccagcacccagagccgcatctgcagcgtgcagtag

SEQ ID NO: 166873 - DNA, 666 bp, synthetic construct
  misc_feature 1..666: note = Description of Artificial Sequence: Synthetic coding sequence
  source 1..666: mol_type = other DNA
atgtctgacagcgaggaggagagccaggaccggcagctgaagatcgtggtgctgggagatggagccagcggcaagaccagcctgaccacctgctttgcccaggagaccttcggcaagcagtacaagcagaccatcggcctggacttcttcctgcggcgcatcaccctgcccggcaacctgaatgtgaccctgcagatctgggacattggaggccagaccatcggcggcaagatgctggacaagtacatctacggggcccagggcgtgctgctggtgtatgacatcaccaactaccagagctttgagaacctggaggactggtacacagtggtgaagaaggtgtctgaggagagcgagacccagcccctggtggccctggtgggcaacaagattgacctggagcacatgaggaccatcaagccagagaagcacctgcgcttctgccaggagaatggcttcagcagccactttgtgtctgccaagacaggagacagcgtcttcctgtgcttccagaaggtggccgctgagatcctgggcatcaagctgaacaaggccgagattgagcagagccagagggtggtgaaggctgacatcgtgaactacaaccaggagcccatgagcaggacagtgaacccccccaggagctccatgtgtgctgtgcagtag

SEQ ID NO: 166874 - DNA, 615 bp, synthetic construct
  misc_feature 1..615: note = Description of Artificial Sequence: Synthetic coding sequence
  source 1..615: mol_type = other DNA
atgtctgacagcgaggaggagagccaggaccggcagctgaagatcgtggtgctgggagatggagccagcggcaagaccagcctgaccacctgctttgcccaggagaccttcggcaagcagtacaagcagaccatcggcctggacttcttcctgcggcgcatcaccctgcccggcaacctgaatgtgaccctgcagatctgggacattggaggccagaccatcggcggcaagatgctggacaagtacatctacggggcccagggcgtgctgctggtgtatgacatcaccaactaccagagctttgagaacctggaggactggtacacagtggtgaagaaggtgtctgaggagagcgagacccagcccctggtggccctggtgggcaacaagattgacctggagcacatgaggaccatcaagccagagaagcacctgcgcttctgccaggagaatggcttcagcagccactttgtgtctgccaagacaggagacagcgtcttcctgtgcttccagaaggtggccgctgagatcctgggcatcaagctgaacaaggccgagattgagcagagccagggccacttcatcatcttcatcagcagcaccaaccgggagtag

SEQ ID NO: 166875 - DNA, 288 bp, synthetic construct
  misc_feature 1..288: note = Description of Artificial Sequence: Synthetic coding sequence
  source 1..288: mol_type = other DNA
atgtctgacagcgaggaggagagccaggaccggcagctgaagatcgtggtgctgggagatggagccagcggcaagaccagcctgaccacctgctttgcccaggagaccttcggcaagcagtacaagcagaccatcggcctggacttcttcctgcggcgcatcaccctgcccggcaacctgaatgtgaccctgcagatctgggacattggaggccagaccatcggcggcaagatgctggacaagtacatctacggggcccagctgatctggagcatctgtgagcagtag

SEQ ID NO: 166876 - DNA, 639 bp, synthetic construct
  misc_feature 1..639: note = Description of Artificial Sequence: Synthetic coding sequence
  source 1..639: mol_type = other DNA
atggcctatgcctacctgttcaagtacatcatcatcggggacacaggagtgggcaagagctgcctgctgctgcagttcacagacaagcgcttccagcctgtgcatgacctgaccatcggcgtggagtttggagccaggatgatcaccattgatggcaagcagatcaagctgcagatctgggacacagctggccaggagagcttccgcagcatcaccaggagctactacagaggagctgctggggccctgctggtgtatgacatcacccggcgggacaccttcaaccacctgaccacctggctggaggatgcccggcagcacagcaacagcaacatggtgatcatgctgattggcaacaagagtgacctggagagccggcgggaggtgaagaaggaggagggggaggcctttgcccgggagcacggcctcatcttcatggagaccagcgccaagacagccagcaatgtggaggaggccttcatcaacacagccaaggagatctatgagaagatccaggagggcgtgtttgacatcaacaatgaggccaacggcatcaagattggcccccagcacgccgccaccaatgccacccatgctggcaaccagggcggccagcaggccggcggcggctgctgctag

SEQ ID NO: 166877 - DNA, 567 bp, synthetic construct
  misc_feature 1..567: note = Description of Artificial Sequence: Synthetic coding sequence
  source 1..567: mol_type = other DNA
atggcctatgcctacctgttcaagtacatcatcatcggggacacaggagtggagtttggagccaggatgatcaccattgatggcaagcagatcaagctgcagatctgggacacagctggccaggagagcttccgcagcatcaccaggagctactacagaggagctgctggggccctgctggtgtatgacatcacccggcgggacaccttcaaccacctgaccacctggctggaggatgcccggcagcacagcaacagcaacatggtgatcatgctgattggcaacaagagtgacctggagagccggcgggaggtgaagaaggaggagggggaggcctttgcccgggagcacggcctcatcttcatggagaccagcgccaagacagccagcaatgtggaggaggccttcatcaacacagccaaggagatctatgagaagatccaggagggcgtgtttgacatcaacaatgaggccaacggcatcaagattggcccccagcacgccgccaccaatgccacccatgctggcaaccagggcggccagcaggccggcggcggctgctgctag

SEQ ID NO: 166878 - DNA, 501 bp, synthetic construct
  misc_feature 1..501: note = Description of Artificial Sequence: Synthetic coding sequence
  source 1..501: mol_type = other DNA
atgatcaccattgatggcaagcagatcaagctgcagatctgggacacagctggccaggagagcttccgcagcatcaccaggagctactacagaggagctgctggggccctgctggtgtatgacatcacccggcgggacaccttcaaccacctgaccacctggctggaggatgcccggcagcacagcaacagcaacatggtgatcatgctgattggcaacaagagtgacctggagagccggcgggaggtgaagaaggaggagggggaggcctttgcccgggagcacggcctcatcttcatggagaccagcgccaagacagccagcaatgtggaggaggccttcatcaacacagccaaggagatctatgagaagatccaggagggcgtgtttgacatcaacaatgaggccaacggcatcaagattggcccccagcacgccgccaccaatgccacccatgctggcaaccagggcggccagcaggccggcggcggctgctgctag

SEQ ID NO: 166879 - DNA, 630 bp, synthetic construct
  misc_feature 1..630: note = Description of Artificial Sequence: Synthetic coding sequence
  source 1..630: mol_type = other DNA
atgacctacgcctacctgttcaagtacatcatcatcggggacacaggagtgggcaagagctgcctgctgctgcagttcacagacaagcgcttccagcctgtgcatgacctgaccatcggcgtggagtttggagccaggatggtgaacattgatggcaagcagatcaagctgcagatctgggacacagctggccaggagagcttccgcagcatcaccaggagctactacagaggagctgctggggccctgctggtgtatgacatcacccggcgggagaccttcaaccacctgacctcctggctggaggatgcccggcagcacagcagcagcaacatggtgatcatgctgattggcaacaagagtgacctggagagcagaagagatgtgaagcgggaggagggggaggcctttgcccgggagcacggcctcatcttcatggagaccagcgccaagacagcctgcaatgtggaggaggccttcatcaacacagccaaggagatctacaggaagatccagcagggcctgtttgatgtgcacaatgaggccaacggcatcaagattggcccccagcagagcatcagcacctctgtgggccccagcgccagccagagcgctggcctgcaggtgtag

SEQ ID NO: 166880 - DNA, 651 bp, synthetic construct
  misc_feature 1..651: note = Description of Artificial Sequence: Synthetic coding sequence
  source 1..651: mol_type = other DNA
atgacctacgcctacctgttcaagtacatcatcatcggggacacaggagtgggcaagagctgcctgctgctgcagttcacagacaagcgcttccagcctgtgcatgacctgaccatcggcgtggagtttggagccaggatggtgaacattgatggcaagcagatcaagctgcagatctgggacacagctggccaggagagcttccgcagcatcaccaggagctactacagaggagctgctggggccctgctggtgtatgacatcacccggcgggagaccttcaaccacctgacctcctggctggaggatgcccggcagcacagcagcagcaacatggtgatcatgctgattggcaacaagagtgacctggagagcagaagagatgtgaagcgggaggagggggaggcctttgcccgggagcacggcctcatcttcatggagaccagcgccaagacagcctgcaatgtggaggaggccttcatcaacacagccaaggagatctacaggaagatccagcagggcctgtttgatgtgcacaatgaggccaacggcatcaagattggcccccagcagagcatcagcacctctgtgggccccagcgccagccagaggaacagccgggacatcggcagcaacagcggctgctgctag

SEQ ID NO: 166881 - DNA, 189 bp, synthetic construct
  misc_feature 1..189: note = Description of Artificial Sequence: Synthetic coding sequence
  source 1..189: mol_type = other DNA
atgacctacgcctacctgttcaagtacatcatcatcggggacacaggagtgggcaagagctgcctgctgctgcagttcacagacaagcgcttccagcctgtgcatgacctgaccatcggcgtggagtttggagccaggatggtgaacattgatggcaagcagatcaagctgcagatctgggacacctag

SEQ ID NO: 166882 - DNA, 2946 bp, synthetic construct
  misc_feature 1..2946: note = Description of Artificial Sequence: Synthetic coding sequence
  source 1..2946: mol_type = other DNA
atggctgctgacagcgagcctgagagcgaggtgtttgagatcacagacttcaccacagccagcgagtgggagcgcttcatcagcaaggtggaggaggtgctgaatgactggaagctgattggcaacagcctgggcaagcccctggagaagggcatcttcaccagcggcacctgggaggagaagagtgatgagatcagctttgctgacttcaagttctctgtgacccaccactacctggtgcaggagagcacagacaaggagggcaaggatgagctgctggaggatgtggtgccccagagcatgcaggacctgctgggcatgaacaatgacttccccccccgggcccactgcctggtgcgctggtacggcctgcgggagtttgtggtgattgccccagctgcccacagtgatgctgtgctgtctgagagcaagtgcaacctgctgctgagctctgtgtccatcgccctgggcaacacaggctgccaggtgcccctgtttgtgcagatccaccacaagtggaggaggatgtatgtgggggagtgccagggccctggggtgaggacagactttgagatggtgcacctgaggaaggtgcccaaccagtacacccacctgagcggcctgctggacatcttcaagagcaagattggctgccccctgacccccctgccccctgtgtccatcgccatccgcttcacctacgtgctgcaggactggcagcagtacttctggccccagcagcccccagacattgatgccctggtgggcggggaggtgggcggcctggagtttgggaagctgccctttggagcctgtgaggaccccatcagcgagctgcacctggccaccacctggccccacctgacagagggcatcatcgtggacaatgatgtgtacagcgacctggaccccatccaggccccccactggagcgtgcgggtgaggaaggccgagaacccccagtgcctgctgggggactttgtgacagagttcttcaagatctgcaggaggaaggagagcacagatgagatcctgggccgcagcgcctttgaggaggagggcaaggagacagctgacatcacccacgccctgagcaagctgacagagcccgcctctgtgcccatccacaagctgtctgtgagcaacatggtgcacacagccaagaagaagatcaggaagcaccggggcgtggaggagagccccctgaacaatgatgtgctgaacaccatcctgctcttcctgttcccagatgctgtgtctgagaagcccctggatggcaccaccagcacagacaacaacaaccccccatctgagagcgaggactacaacctgtacaaccagttcaagagcgcccccagcgacagcctgacctacaagctggccctgtgcctgtgcatgatcaacttctaccatggaggcctgaagggcgtggcccacctgtggcaggagtttgtgctggagatgaggttccgctgggagaacaacttcctgatccctggcctggccagcggccccccagacctgcgctgctgcctgctgcaccagaagctgcagatgctgaactgctgcatcgagaggaagaaggccagagatgagggcaagaagaccagcgccagtgatgtgaccaacatctacccaggagatgctgggaaggccggggaccagctggtgcctgacaacctgaaggagacagacaaggagaagggggaggtgggcaagtcctgggacagctggagcgacagcgaggaggagttctttgaatgtctgagtgacacagaggagctgaagggaaatggccaggagagcggcaagaagggcggccccaaggagatggccaacctgcggcctgagggccgcctgtaccagcacggcaagctgaccctgctgcacaatggagagcccctgtacatccctgtgacccaggagcccgcccccatgacagaggacctgctggaggagcagagcgaggtgctggccaagctgggcaccagcgctgagggcgcccacctgcgggccaggatgcagagcgcctgcctgctgagtgacatggagagcttcaaggccgccaaccctggctgcagcctggaggactttgtgcgctggtacagcccccgggactacatcgaggaggaggtgattgatgagaagggaaatgtggtgctgaagggggagctgagcgccaggatgaagatccccagcaacatgtgggtggaggcctgggagacagccaagcccatcccagcccggcggcagaggcggctgtttgatgacacccgggaggccgagaaggtgctgcactacctggccatccagaagccagctgacctggcccggcacctgctgccctgtgtgattcatgctgctgtgctgaaggtgaaggaggaggagagcctggagaacatcagctctgtgaagaagatcatcaagcagatcatcagccacagcagcaaggtgctgcacttccccaaccctgaggacaagaagctggaggagatcatccaccagatcaccaacgtggaggccctgattgcccgggcccggagcctgaaggccaagtttggaacagagaagtgtgagcaggaggaggagaaggaggacctggagagatttgtgtcctgcctgctggagcagcctgaggtgctggtgactggagctggccggggccacgccggccgcatcatccacaagctgtttgtgaatgcccagagagctgctgccatgaccccacctgaggaggagctgaagaggatgggcagccctgaggagcggcggcagaacagcgtgtctgacttccccccacctgctggccgggagttcatcctgcggaccaccgtgcccaggcctgccccctacagcaaggccctgccccagaggatgtacagcgtgctgaccaaggaggacttccggctggccggggccttcagcagtgacaccagcttcttctag

SEQ ID NO: 166883 - DNA, 2808 bp, synthetic construct
  misc_feature 1..2808: note = Description of Artificial Sequence: Synthetic coding sequence
  source 1..2808: mol_type = other DNA
atgttcagcctcatcagcggcatcttcaccagcggcacctgggaggagaagagtgatgagatcagctttgctgacttcaagttctctgtgacccaccactacctggtgcaggagagcacagacaaggagggcaaggatgagctgctggaggatgtggtgccccagagcatgcaggacctgctgggcatgaacaatgacttccccccccgggcccactgcctggtgcgctggtacggcctgcgggagtttgtggtgattgccccagctgcccacagtgatgctgtgctgtctgagagcaagtgcaacctgctgctgagctctgtgtccatcgccctgggcaacacaggctgccaggtgcccctgtttgtgcagatccaccacaagtggaggaggatgtatgtgggggagtgccagggccctggggtgaggacagactttgagatggtgcacctgaggaaggtgcccaaccagtacacccacctgagcggcctgctggacatcttcaagagcaagattggctgccccctgacccccctgccccctgtgtccatcgccatccgcttcacctacgtgctgcaggactggcagcagtacttctggccccagcagcccccagacattgatgccctggtgggcggggaggtgggcggcctggagtttgggaagctgccctttggagcctgtgaggaccccatcagcgagctgcacctggccaccacctggccccacctgacagagggcatcatcgtggacaatgatgtgtacagcgacctggaccccatccaggccccccactggagcgtgcgggtgaggaaggccgagaacccccagtgcctgctgggggactttgtgacagagttcttcaagatctgcaggaggaaggagagcacagatgagatcctgggccgcagcgcctttgaggaggagggcaaggagacagctgacatcacccacgccctgagcaagctgacagagcccgcctctgtgcccatccacaagctgtctgtgagcaacatggtgcacacagccaagaagaagatcaggaagcaccggggcgtggaggagagccccctgaacaatgatgtgctgaacaccatcctgctcttcctgttcccagatgctgtgtctgagaagcccctggatggcaccaccagcacagacaacaacaaccccccatctgagagcgaggactacaacctgtacaaccagttcaagagcgcccccagcgacagcctgacctacaagctggccctgtgcctgtgcatgatcaacttctaccatggaggcctgaagggcgtggcccacctgtggcaggagtttgtgctggagatgaggttccgctgggagaacaacttcctgatccctggcctggccagcggccccccagacctgcgctgctgcctgctgcaccagaagctgcagatgctgaactgctgcatcgagaggaagaaggccagagatgagggcaagaagaccagcgccagtgatgtgaccaacatctacccaggagatgctgggaaggccggggaccagctggtgcctgacaacctgaaggagacagacaaggagaagggggaggtgggcaagtcctgggacagctggagcgacagcgaggaggagttctttgaatgtctgagtgacacagaggagctgaagggaaatggccaggagagcggcaagaagggcggccccaaggagatggccaacctgcggcctgagggccgcctgtaccagcacggcaagctgaccctgctgcacaatggagagcccctgtacatccctgtgacccaggagcccgcccccatgacagaggacctgctggaggagcagagcgaggtgctggccaagctgggcaccagcgctgagggcgcccacctgcgggccaggatgcagagcgcctgcctgctgagtgacatggagagcttcaaggccgccaaccctggctgcagcctggaggactttgtgcgctggtacagcccccgggactacatcgaggaggaggtgattgatgagaagggaaatgtggtgctgaagggggagctgagcgccaggatgaagatccccagcaacatgtgggtggaggcctgggagacagccaagcccatcccagcccggcggcagaggcggctgtttgatgacacccgggaggccgagaaggtgctgcactacctggccatccagaagccagctgacctggcccggcacctgctgccctgtgtgattcatgctgctgtgctgaaggtgaaggaggaggagagcctggagaacatcagctctgtgaagaagatcatcaagcagatcatcagccacagcagcaaggtgctgcacttccccaaccctgaggacaagaagctggaggagatcatccaccagatcaccaacgtggaggccctgattgcccgggcccggagcctgaaggccaagtttggaacagagaagtgtgagcaggaggaggagaaggaggacctggagagatttgtgtcctgcctgctggagcagcctgaggtgctggtgactggagctggccggggccacgccggccgcatcatccacaagctgtttgtgaatgcccagagagctgctgccatgaccccacctgaggaggagctgaagaggatgggcagccctgaggagcggcggcagaacagcgtgtctgacttccccccacctgctggccgggagttcatcctgcggaccaccgtgcccaggcctgccccctacagcaaggccctgccccagaggatgtacagcgtgctgaccaaggaggacttccggctggccgtgaagatcattgatggagatgtgtag

SEQ ID NO: 166884 - DNA, 2967 bp, synthetic construct
  misc_feature 1..2967: note = Description of Artificial Sequence: Synthetic coding sequence
  source 1..2967: mol_type = other DNA
atggctgctgacagcgagcctgagagcgaggtgtttgagatcacagacttcaccacagccagcgagtgggagcgcttcatcagcaaggtggaggaggtgctgaatgactggaagctgattggcaacagcctgggcaagcccctggagaagggcatcttcaccagcggcacctgggaggagaagagtgatgagatcagctttgctgacttcaagttctctgtgacccaccactacctggtgcaggagagcacagacaaggagggcaaggatgagctgctggaggatgtggtgccccagagcatgcaggacctgctgggcatgaacaatgacttccccccccgggcccactgcctggtgcgctggtacggcctgcgggagtttgtggtgattgccccagctgcccacagtgatgctgtgctgtctgagagcaagtgcaacctgctgctgagctctgtgtccatcgccctgggcaacacaggctgccaggtgcccctgtttgtgcagatccaccacaagtggaggaggatgtatgtgggggagtgccagggccctggggtgaggacagactttgagatggtgcacctgaggaaggtgcccaaccagtacacccacctgagcggcctgctggacatcttcaagagcaagattggctgccccctgacccccctgccccctgtgtccatcgccatccgcttcacctacgtgctgcaggactggcagcagtacttctggccccagcagcccccagacattgatgccctggtgggcggggaggtgggcggcctggagtttgggaagctgccctttggagcctgtgaggaccccatcagcgagctgcacctggccaccacctggccccacctgacagagggcatcatcgtggacaatgatgtgtacagcgacctggaccccatccaggccccccactggagcgtgcgggtgaggaaggccgagaacccccagtgcctgctgggggactttgtgacagagttcttcaagatctgcaggaggaaggagagcacagatgagatcctgggccgcagcgcctttgaggaggagggcaaggagacagctgacatcacccacgccctgagcaagctgacagagcccgcctctgtgcccatccacaagctgtctgtgagcaacatggtgcacacagccaagaagaagatcaggaagcaccggggcgtggaggagagccccctgaacaatgatgtgctgaacaccatcctgctcttcctgttcccagatgctgtgtctgagaagcccctggatggcaccaccagcacagacaacaacaaccccccatctgagagcgaggactacaacctgtacaaccagttcaagagcgcccccagcgacagcctgacctacaagctggccctgtgcctgtgcatgatcaacttctaccatggaggcctgaagggcgtggcccacctgtggcaggagtttgtgctggagatgaggttccgctgggagaacaacttcctgatccctggcctggccagcggccccccagacctgcgctgctgcctgctgcaccagaagctgcagatgctgaactgctgcatcgagaggaagaaggccagagatgagggcaagaagaccagcgccagtgatgtgaccaacatctacccaggagatgctgggaaggccggggaccagctggtgcctgacaacctgaaggagacagacaaggagaagggggaggtgggcaagtcctgggacagctggagcgacagcgaggaggagttctttgaatgtctgagtgacacagaggagctgaagggaaatggccaggagagcggcaagaagggcggccccaaggagatggccaacctgcggcctgagggccgcctgtaccagcacggcaagctgaccctgctgcacaatggagagcccctgtacatccctgtgacccaggagcccgcccccatgacagaggacctgctggaggagcagagcgaggtgctggccaagctgggcaccagcgctgagggcgcccacctgcgggccaggatgcagagcgcctgcctgctgagtgacatggagagcttcaaggccgccaaccctggctgcagcctggaggactttgtgcgctggtacagcccccgggactacatcgaggaggaggtgattgatgagaagggaaatgtggtgctgaagggggagctgagcgccaggatgaagatccccagcaacatgtgggtggaggcctgggagacagccaagcccatcccagcccggcggcagaggcggctgtttgatgacacccgggaggccgagaaggtgctgcactacctggccatccagaagccagctgacctggcccggcacctgctgccctgtgtgattcatgctgctgtgctgaaggtgaaggaggaggagagcctggagaacatcagctctgtgaagaagatcatcaagcagatcatcagccacagcagcaaggtgctgcacttccccaaccctgaggacaagaagctggaggagatcatccaccagatcaccaacgtggaggccctgattgcccgggcccggagcctgaaggccaagtttggaacagagaagtgtgagcaggaggaggagaaggaggacctggagagatttgtgtcctgcctgctggagcagcctgaggtgctggtgactggagctggccggggccacgccggccgcatcatccacaagctgtttgtgaatgcccagaggctgacagagagcagtgatgaagctgctgccatgaccccacctgaggaggagctgaagaggatgggcagccctgaggagcggcggcagaacagcgtgtctgacttccccccacctgctggccgggagttcatcctgcggaccaccgtgcccaggcctgccccctacagcaaggccctgccccagaggatgtacagcgtgctgaccaaggaggacttccggctggccggggccttcagcagtgacaccagcttcttctag

SEQ ID NO: 166885 - DNA, 4182 bp, synthetic construct
  misc_feature 1..4182: note = Description of Artificial Sequence: Synthetic coding sequence
  source 1..4182: mol_type = other DNA
atggcctgcagcatcgtgcagttctgctacttccaggacctgcaggccgcccgggacttcctgttcccccacctgcgggaggagatcctgagcggggccctgcggcgggaccccagcaagagcacagactgggaggatgatggctggggcgcctgggaggagaatgagccccaggagcctgaggaggagggcaacacctgcaagacccagaagacctcctggctgcaggactgtgtgctgagcctgagccccaccaatgacctgatggtgattgcccgggagcagaaggctgtgttcctggtgcccaagtggaagtacagcgacaagggcaaggaggagatgcagtttgctgtgggctggagcggcagcctgaatgtggaggagggggagtgtgtgaccagcgccctgtgcatccccctggccagccagaagaggagcagcacaggccgcccagactggacctgcatcgtggtgggcttcaccagcggctacgtgcgcttctacacagaaaatggagtgctgctgctggcccagctgctgaatgaagatcctgtgctgcagctgaagtgcaggacctatgagatccccaggcaccctggggtgacagagcagaatgaggagctgagcatcctgtacccagctgccatcgtgaccattgatggcttcagcctcttccagagcctgcgggcctgcaggaaccaggtggccaaggctgctgccagcggaaatgaaaacatccagcccccacccctggcctacaagaagtggggcctgcaggacatcgacaccatcatcgaccacgcctctgtgggcatcatgaccctgagcccctttgaccagatgaagacagccagcaacattggaggcttcaatgctgccatcaagaacagccccccagccatgagccagtacatcaccgtgggcagcaaccccttcaccggcttcttctacgccctggagggcagcacccagcccctgctgagccacgtggccctggccgtggccagcaagctgaccagcgccctcttcaatgctgccagcggctggctgggctggaagagcaagcatgaggaggaggccgtgcagaagcagaagcccaaggtggagcccgccacccccctggccgtgcgcttcggcctgcctgacagccgccgccacggggagagcatctgcctgagcccctgcaacaccctggccgctgtgacagatgactttggccgggtcatcctgctggatgtggcccggggcatcgccatccgcatgtggaagggctacagagatgcccagatcggctggatccagacagtggaggacctgcacgagcgggtgcctgagaaggctgacttcagccccttcggcaacagccagggccccagccgggtggcccagttcctggtgatctatgccccccggcggggcatcctggaggtgtggagcacccagcagggcccccgggtgggcgccttcaacgtgggcaagcactgccgcctgctgtacccaggctacaagatcatgggcctgaacaacgtgaccagccagagctggcagccccagacctaccagatctgcctggtggaccctgtgtctggctctgtgaagacagtgaatgtgcccttccacctggccctgagtgacaagaagtctgagcgggccaaggacatgcacctggtgaagaagctggccgccctgctgaagaccaagagccccaacctggacctggtggagacagagatcaaggagctgatcctggacatcaagtacccagccaccaagaagcaggccctggagagcatcctggccagcgagcggctgcccttcagctgcctgaggaacatcacccagaccctgatggacaccctgaagagccaggagctggagagcgtggatgagggcctgctgcagttctgtgccaacaagctgaagctgctgcagctgtatgagagcgtgtcccagctgaacagcctggacttccacctggacacccccttcagtgacaatgacctggccctgctgctgcggctggatgagaaggagctgctgaagctgcaggccctgctggagaagtacaagcaggagaacaccaggaccaacgtgcgcttcagtgatgacaaggatggagtgctgcctgtgaagaccttcctggagtacctggagtatgagaaggatgtgctgaacatcaagaagatcagcgaggaggagtatgtggccctgggcagcttcttcttctggaagtgcctgcatggagagagcagcacagaggacatgtgccacaccctggagagcgctggcctgagcccccagctgctgctgagcctgctgctgtctgtgtggctgagcaaggagaaggacatcctggacaagccccagagcatctgctgcctgcacaccatgctgagcctgctgagcaagatgaaggtggccattgatgagacctgggacagccagagcgtgagcccctggtggcagcagatgaggacagcctgcatccagagcgagaacaacggggccgccctgctgagcgcccacgtgggccacagcgtggccgcccagatcagcaacaacatgacagagaagaagttcagccagacagtgctgggcgctgacagcgaggccctgacagacagctgggaggccctgagcctggacacagagtactggaagctgctgctgaagcagctggaggactgcctgatcctgcagaccctgctgcacagcaagggcaacacccagaccagcaaggtgagcagcctgcaggccgagcccctgccccggctgtctgtgaagaagctgctggagggcggcaaaggaggcattgctgacagcgtggccaagtggatcttcaagcaggacttcagccctgaggtgctgaagctggccaatgaggagagagatgctgagaacccagatgagcccaaggagggcgtgaacagaagcttcctggaggtgtctgagatggagatggacctgggcgccatcccagacctgctgcacctggcctatgagcagttcccctgcagcctggagctggatgtgctgcacgcccactgctgctgggagtatgtggtgcagtggaacaaggaccctgaggaggcccgcttctttgtgcgcagcattgagcacctgaagcagatcttcaatgcccacgtgcagaatggaattgccctgatgatgtggaacaccttcctggtgaagcgcttctctgctgccacctacctgatggacaaggtgggcaagagccccaaggaccggctgtgcagaagagatgtgggcatgtctgacacagccatgaccagcttcctgggcagctgcctggacctgctgcagatcctgatggaggctgatgtgtccagagatgagatccaggtgcctgtgctggacacagaagatgcctggctgtctgtggagggccccatcagcatcgtggagctggccctggagcagaagcacatccactaccccctggtggagcaccacagcatcctgtgcagcatcctgtatgctgtgatgaggttcagcctgaagacagtgaagcccctgagcctgtttgacagcaagggcaagaatgccttcttcaaggacctgaccagcatccagctgctgcccagcggggagatggaccccaacttcatctctgtgcggcagcagttcctgctgaaggtggtgtctgctgctgtgcaggcccagcacagcgccaccaaggtgaaggaccccacagaggaggccacccccaccccatttgggaaggaccaggactggccagccctggccgtggacctggcccaccacctgcaggtgtctgaagatgtggtgagaagacactacgtgggggagctgtacaactatggagtggaccacctgggggaggaggccatcctgcaggtgcatgacaaggaggtgctggccagccagctgctggtgctgaccggccagaggctggcccacgccctgctgcacacccagaccaaggagggcatggagctgctggcccggctgccccccaccctgtgcacctggctgaaggccatggacccccaggacctgcagaacacagaggtgcccatcgccaccacagccaagctggtgaacaaggtgattgagctgctgcctgagaagcacggccagtatggcctggccctgcacctgattgaggccgtggaggccatcagcctgcccagcctgtag

SEQ ID NO: 166886 - DNA, 612 bp, synthetic construct
  misc_feature 1..612: note = Description of Artificial Sequence: Synthetic coding sequence
  source 1..612: mol_type = other DNA
atgtccatggaggactatgacttcctgttcaagatcgtgctgattggaaatgctggggtgggcaagacctgcctggtgcggcgcttcacccagggcctcttccccccaggccagggcgccaccatcggcgtggacttcatgatcaagacagtggagatcaacggggagaaggtgaagctgcagatctgggacacagctggccaggagcgcttccgcagcatcacccagagctactacagaagtgccaatgccctgatcctgacctatgacatcacctgtgaggagagcttccgctgcctgcctgagtggctgcgggagattgagcagtatgccagcaacaaggtgatcaccgtgctggtgggcaacaagattgacctggccgagcggcgggaggtgtcccagcagagagctgaggagttcagcgaggcccaggacatgtactacctggagaccagcgccaaggagagtgacaacgtggagaagctgttcctggacctggcctgccgcctcatcagcgaggcccggcagaacaccctggtgaacaacgtgagcagccccctgcccggggagggcaagagcatctcctacctgacctgctgcaacttcaactag

SEQ ID NO: 166887 - DNA, 345 bp, synthetic construct
  misc_feature 1..345: note = Description of Artificial Sequence: Synthetic coding sequence
  source 1..345: mol_type = other DNA
atgtccatggaggactatgacttcctgttcaagatcgtgctgattggaaatgctggggtgggcaagacctgcctggtgcggcgcttcacccagggcctcttccccccaggccagggcgccaccatcggcgtggacttcatgatcaagacagtggagatcaacggggagaaggtgaagctgcagatctgggacacagctggccaggagcgcttccgcagcatcacccagagctactacagaagtgccaatgccctgatcctgacctatgacatcacctgtgaggagagcttccgctgcctgcctgagtggctgcgggagattgagcagtatgccagcaacaagtag

SEQ ID NO: 166888 - DNA, 612 bp, synthetic construct; identical to SEQ ID NO: 166886
  misc_feature 1..612: note = Description of Artificial Sequence: Synthetic coding sequence
  source 1..612: mol_type = other DNA

SEQ ID NO: 166889 - DNA, 168 bp, synthetic construct
  misc_feature 1..168: note = Description of Artificial Sequence: Synthetic coding sequence
  source 1..168: mol_type = other DNA
atgtccatggaggactatgacttcctgttcaagatcgtgctgattggaaatgctggggtgggcaagacctgcctggtgcggcgcttcacccagggcctcttccccccaggccagggcgccaccatcggcgtggacttcatgatcaagacagtggagatcaatggatag

SEQ ID NO: 166890 - DNA, 507 bp, synthetic construct
  misc_feature 1..507: note = Description of Artificial Sequence: Synthetic coding sequence
  source 1..507: mol_type = other DNA
atgtccatggaggactatgacttcctgttcaagatcgtgctgattggaaatgctggggtgggcaagacctgcctggtgcggcgcttcacccagggcctcttccccccaggccagggcgccaccatcggcgtggacttcatgatcaagacagtggagatcaacggggagaaggtgaagctgcagatctgggacacagctggccaggagcgcttccgcagcatcacccagagctactacagaagtgccaatgccctgatcctgacctatgacatcacctgtgaggagagcttccgctgcctgcctgagtggctgcgggagattgagcagtatgccagcaacaaggtgatcaccgtgctggtgggcaacaagattgacctggccgagcggcgggaggtgtcccagcagagagctgaggagttcagcgaggcccaggacatgtactacctggagaccagcgccaaggagagtgacaacgtggagaagctgttcctggacctggcctgctag

SEQ ID NO: 166891 - DNA, 183 bp, synthetic construct
  misc_feature 1..183: note = Description of Artificial Sequence: Synthetic coding sequence
  source 1..183: mol_type = other DNA
atgtccatggaggactatgacttcctgttcaagatcgtgctgattggaaatgctggggtgggcaagacctgcctggtgcggcgcttcacccagggcctcttccccccaggccagggcgccaccatcggcgtggacttcatgatcaagacagtggagatcaacggggagaaggtgaagctgtag

SEQ ID NO: 166892 - DNA, 612 bp, synthetic construct; identical to SEQ ID NO: 166886
  misc_feature 1..612: note = Description of Artificial Sequence: Synthetic coding sequence
  source 1..612: mol_type = other DNA

SEQ ID NO: 166893 - DNA, 303 bp, synthetic construct
  misc_feature 1..303: note = Description of Artificial Sequence: Synthetic coding sequence
  source 1..303: mol_type = other DNA
atgtccatggaggactatgacttcctgttcaagatcgtgctgattggaaatgctggggtgggcaagacctgcctggtgcggcgcttcacccagggcctcttccccccaggccagggcgccaccatcggcgtggacttcatgatcaagacagtggagatcaacggggagaaggtgaagctgcagatctgggacacagctggccaggagcgcttccgcagcatcacccagagctactacagaagtgccaatgccctgatcctgacctatgacatcacctgtgaggagagcttccgctgcctgtag

SEQ ID NO: 166894 - DNA, 495 bp, synthetic construct
  misc_feature 1..495: note = Description of Artificial Sequence: Synthetic coding sequence
  source 1..495: mol_type = other DNA
atgtccatggaggactatgacttcctgttcaagatcgtgctgattggaaatgctggggtgggcaagacctgcctggtgcggcgcttcacccagggcctcttccccccaggccagggcgccaccatcggcgtggacttcatgatcaagacagtggagatcaacggggagaaggtgaagctgcagatctgggacacagctggccaggagcgcttccgcagcatcacccagagctactacagaagtgccaatgccctgatcctgacctatgacatcacctgtgaggagagcttccgctgcctgcctgagtggctgcgggagattgagcagtatgccagcaacaaggtgatcaccgtgctggccacccggctgacctggctgaagggggagcgcttccccagcagcgagctgaagaacagccagaagctgcggacctgcatcatctggaggccccagcccaggaacctgatcatgtggaggaacagcagcctgacctag

SEQ ID NO: 166895 - DNA, 420 bp, synthetic construct
  misc_feature 1..420: note = Description of Artificial Sequence: Synthetic coding sequence
  source 1..420: mol_type = other DNA
atgtccatggaggactatgacttcctgttcaagatcgtgctgattggaaatgctggggtgggcaagacctgcctggtgcggcgcttcacccagggcctcttccccccaggccagggcgccaccatcggcgtggacttcatgatcaagacagtggagatcaacggggagaaggtgaagctgcagatctgggacacagctggccaggagcgcttccgcagcatcacccagagctactacagaagtgccaatgccctgatcctgacctatgacatcacctgtgaggagagcttccgctgcctgcctgagtggctgcgggagattgagcagtatgccagcaacaaggtgatcaccgtgctggtgggcaacaagattgacctggccgagcggcgggaggtgtcccagcagagagctgaggagtag

SEQ ID NO: 166896 - DNA, 588 bp, synthetic construct
  misc_feature 1..588: note = Description of Artificial Sequence: Synthetic coding sequence
  source 1..588: mol_type = other DNA
atgatggccatccgggagctgaaggtgtgcctgctgggggacacaggagtgggcaagagcagcatcgtgtgccgctttgtgcaggaccactttgaccacaacatcagccccaccatcggggccagcttcatgaccaagacagtgccctgtggaaatgagctgcacaagttcctgatctgggacacagctggccaggagcgcttccacagcctggcccccatgtactaccggggcagcgctgctgctgtgattgtgtatgacatcaccaagcaggacagcttctacaccctgaagaagtgggtgaaggagctgaaggagcacggccctgagaacatcgtgatggccatcgccggcaacaagtgtgacctgagtgacatccgggaggtgcccctgaaggatgccaaggagtatgcagagagcattggagccatcgtggtggagaccagcgccaagaatgccatcaacatcgaggagctgttccagggcatcagccggcagatcccccccctggacccccatgaaaatggaaacaacggcaccatcaaggtggagaagcccaccatgcaggccagccgccgctgctgctag

SEQ ID NO: 166897 - DNA, 561 bp, synthetic construct
  misc_feature 1..561: note = Description of Artificial Sequence: Synthetic coding sequence
  source 1..561: mol_type = other DNA
tgcctgctgaatgacaccggggtgggcaagagcagcatcgtgtgccgctttgtgcaggaccactttgaccacaacatcagccccaccatcggggccagcttcatgaccaagacagtgccctgtggaaatgagctgcacaagttcctgatctgggacacagctggccaggagcgcttccacagcctggcccccatgtactaccggggcagcgctgctgctgtgattgtgtatgacatcaccaagcaggacagcttctacaccctgaagaagtgggtgaaggagctgaaggagcacggcccagaaaatattgtgatggccatcgccggcaacaagtgtgacctgagtgacatccgggaggtgcccctgaaggatgccaaggagtatgcagagagcatcggggccatcgtggtggagaccagcgccaagaatgccatcaacatcgaggagctgttccagggcatcagccggcagatcccccccctggacccccatgaaaatggaaataatggcaccatcaaggtggagaagcccaccatgcaggccagccgccgctgctgctag

SEQ ID NO: 166898 - DNA, 678 bp, synthetic construct
  misc_feature 1..678: note = Description of Artificial Sequence: Synthetic coding sequence
  source 1..678: mol_type = other DNA
atggccggcggcggggccggggaccccggcctgggcgctgctgctgccccagcccctgagacccgggagcacctgttcaaggtgctggtgattggagagctgggcgtgggcaagaccagcatcatcaagagatatgtgcaccagctgttcagccagcactaccgggccaccatcggcgtggactttgccctgaaggtgctgaactgggacagcaggaccctggtgcggctgcagctgtgggacattgctggccaggagcgcttcggcaacatgaccagggtgtactacaaggaggccgtgggcgcctttgtggtgtttgacatcagccgcagcagcacctttgaggccgtgctgaagtggaagagtgacctggacagcaaggtgcacctgcccaacggcagccccatcccagctgtgctgctggccaacaagtgtgaccagaacaaggacagcagccagagccccagccaggtggaccagttctgcaaggagcacggctttgctggctggtttgagaccagcgccaaggacaacatcaacatcgaggaggccgcccgcttcctggtggagaagatcctggtgaaccaccagagcttccccaatgaagaaaatgatgtggacaagatcaagctggaccaggagaccctgcgggcagagaacaagagccagtgctgctag

SEQ ID NO: 166899 - DNA, 714 bp, synthetic construct
  misc_feature 1..714: note = Description of Artificial Sequence: Synthetic coding sequence
  source 1..714: mol_type = other DNA
atggcccagcccatcctgggccacggcagcctgcagcctgccagcgctgctggcctggccagcctggagctggacagcagcctggaccagtatgtgcagatccgcatcttcaagatcatcgtcatcggggacagcaatgtgggcaagacctgcctgaccttccgcttctgtggcggcaccttcccagacaagacagaggccaccatcggcgtggacttccgggagaagacagtggagattgaaggagagaagatcaaggtgcaggtgtgggacacagctggccaggagcgcttcaggaagtccatggtggagcactactacagaaatgtgcatgctgtggtgtttgtgtatgatgtgaccaagatgaccagcttcaccaacctgaagatgtggatccaggagtgcaatggacatgctgtgccccccctggtgcccaaggtgctggtgggcaacaagtgtgacctgcgggagcagatccaggtgcccagcaacctggccctgaagtttgctgatgcccacaacatgctgctgtttgagaccagcgccaaggaccccaaggagagccagaatgtggagagcatcttcatgtgcctggcctgccgcctgaaggcccagaagagcctgctgtacagagatgctgagcggcagcagggcaaggtgcagaagctggagttcccccaggaggccaacagcaagaccagctgcccctgctag

SEQ ID NO: 166900 - DNA, 714 bp, synthetic construct
  misc_feature 1..714: note = Description of Artificial Sequence: Synthetic coding sequence
  source 1..714: mol_type = other DNA
atgaacatcctggcccctgtgcggcgggacagagtgctggccgagctgccccagtgcctgaggaaggaggccgccctgcacggccacaaggacttccacccccgggtgacctgtgcctgccaggagcacaggactggaacagtgggcttctgcaaggacacctttgacaagaactacaaggccaccatcggcgtggactttgagatggagagatttgaggtgctgggcatccccttcagcctgcagctgtgggacacagctggccaggagcgcttcaagtgcatcgccagcacctactacagaggagcccaggccatcatcatcgtgttcaacctgaatgatgtggccagcctggagcacaccaagcagtggctggctgatgccctgaaggaaaatgaccccagctctgtgctgctcttcctggtgggcagcaagaaggacctgagcaccccagcccagtatgccctgatggagaaggatgccctgcaggtggcccaggagatgaaggccgagtactgggccgtgagcagcctgactggagaaaatgtgcgggagttcttcttccgggtggccgccctgacctttgaggccaacgtgctggccgagctggagaagagcggggccaggagaattggagatgtggtgcgcatcaacagtgatgacagcaacctgtacctgacagccagcaagaagaagcccacctgctgcccctag

SEQ ID NO: 166901 - DNA, 780 bp, synthetic construct
  misc_feature 1..780: note = Description of Artificial Sequence: Synthetic coding sequence
  source 1..780: mol_type = other DNA
atgaacatcctggcccctgtgcggcgggacagagtgctggccgagctgccccagtgcctgaggaaggaggccgccctgcacggccacaaggacttccacccccgggtgacctgtgcctgccaggagcacaggactggaacagtgggcttcaagatcagcaaggtgattgtggtgggggacctgtctgtgggcaagacctgcctgatcaaccgcttctgcaaggacacctttgacaagaactacaaggccaccatcggcgtggactttgagatggagagatttgaggtgctgggcatccccttcagcctgcagctgtgggacacagctggccaggagcgcttcaagtgcatcgccagcacctactacagaggagcccaggccatcatcatcgtgttcaacctgaatgatgtggccagcctggagcacaccaagcagtggctggctgatgccctgaaggaaaatgaccccagctctgtgctgctcttcctggtgggcagcaagaaggacctgagcaccccagcccagtatgccctgatggagaaggatgccctgcaggtggcccaggagatgaaggccgagtactgggccgtgagcagcctgactggagaaaatgtgcgggagttcttcttccgggtggccgccctgacctttgaggccaacgtgctggccgagctggagaagagcggggccaggagaattggagatgtggtgcgcatcaacagtgatgacagcaacctgtacctgacagccagcaagaagaagcccacctgctgcccctag

SEQ ID NO: 166902 - DNA, 636 bp, synthetic construct
  misc_feature 1..636: note = Description of Artificial Sequence: Synthetic coding sequence
  source 1..636: mol_type = other DNA
atgaacatcctggcccctgtgcggcgggacagagtgctggccgagctgccccagtgcctgaggaaggaggccgccctgcacggccacaaggacttccacccccgggtgacctgtgcctgccaggagcacaggactggaacagtgggcttcaagatcagcaaggtgattgtggtgggggacctgtctgtgggcaagacctgcctgatcaaccgcttctgcaaggacacctttgacaagaactacaaggccaccatcggcgtggactttgagatggagagatttgaggtgctgggcatccccttcagcctgcagctgtgggacacagctggccaggagcgcttcaagtgcatcgccagcacctactacagaggagcccaggccatcatcatcgtgttcaacctgaatgatgtggccagcctggagcacaccaagcagtggctggctgatgccctgaaggaaaatgaccccagctctgtgctgctcttcctggtgggcagcaagaaggacctgagcaccccagcccagtatgccctgatggagaaggatgccctgcaggtggcccaggagatgaaggccgagtactgggccgtgagcagcctgactggagaaaatgtgcgggagttcttcttcagatag

SEQ ID NO: 166903 - DNA, 756 bp, synthetic construct
  misc_feature 1..756: note = Description of Artificial Sequence: Synthetic coding sequence
  source 1..756: mol_type = other DNA
atgaacatcctggcccctgtgcggcgggacagagtgctggccgagctgccccagtgcctgaggaaggaggccgccctgcacggccacaaggacttccacccccgggtgacctgtgcctgccaggagcacaggactggaacagtgggcttcaagatcagcaaggtgattgtggtgggggacctgtctgtgggcaagacctgcctgatcaaccgcttctgcaaggacacctttgacaagaactacaaggccaccatcggcgtggactttgagatggagagatttgaggtgctgggcatccccttcagcctgcagctgtgggacacagctggccaggagcgcttcaagtgcatcgccagcacctactacagaggagcccaggccatcatcatcgtgttcaacctgaatgatgtggccagcctggagcacaccaagcagtggctggctgatgccctgaaggaaaatgaccccagctctgtgctgctcttcctgaccccagcccagtatgccctgatggagaaggatgccctgcaggtggcccaggagatgaaggccgagtactgggccgtgagcagcctgactggagaaaatgtgcgggagttcttcttccgggtggccgccctgacctttgaggccaacgtgctggccgagctggagaagagcggggccaggagaattggagatgtggtgcgcatcaacagtgatgacagcaacctgtacctgacagccagcaagaagaagcccacctgctgcccctag

SEQ ID NO: 166904 - DNA, 780 bp, synthetic construct; identical to SEQ ID NO: 166901
  misc_feature 1..780: note = Description of Artificial Sequence: Synthetic coding sequence
  source 1..780: mol_type = other DNA

SEQ ID NO: 166905 - DNA, 636 bp, synthetic construct; identical to SEQ ID NO: 166902
  misc_feature 1..636: note = Description of Artificial Sequence: Synthetic coding sequence
  source 1..636: mol_type = other DNA

SEQ ID NO: 166906 - DNA, 696 bp, synthetic construct
  misc_feature 1..696: note = Description of Artificial Sequence: Synthetic coding sequence
  source 1..696: mol_type = other DNA
tgaagcctgcgcttccccatcaccaacagcgctggggccccctgcaaggccgccggccgcatgaacatcctggcccctgtgcggcgggacagagtgctggccgagctgccccagtgcctgaggaaggaggccgccctgcacggccacaaggacttccacccccgggtgacctgtgcctgccaggagcacaggactggaacagtgggccgcttcaagatcagcaaggtgattgtggtgggggacctgtctgtgggcaagacctgcctgatcaaccgcttctgcaaggacacctttgacaagaactacaaggccaccatcggcgtggactttgagatggagagatttgaggtgctgggcatccccttcagcctgcagctgtgggacacagctggccaggagcgcttcaagtgcatcgccagcacctactacagaggagcccaggccatcatcatcgtgttcaacctgaatgatgtggccagcctggagcacaccaagcagtggctggctgatgccctgaaggaaaatgaccccagctctgtgctgctcttcctggtgggcagcaagaaggacctgagcaccccagcccagtatgccctgatggagaaggatgccctgcaggtggcccaggagatgaagacagtgcagaggctgcccagcccccgggccctgtgccacccccacagcagccgggcctag

SEQ ID NO: 166907 - DNA, 951 bp, synthetic construct
  misc_feature 1..951: note = Description of Artificial Sequence: Synthetic coding sequence
  source 1..951: mol_type = other DNA
atgagccacctgcccggcctggagctgcggcgggaggccccacccctgctgggccccctgctgagccccttccccctgcctgctggctcctggcaccggcagatgctgcggagcagcctgcgcttccccatcaccaacagcgctggggccccctgcaaggctgctggccgcatgaacatcctggcccctgtgagaagagacagagtgctggccgagctgccccagtgcctgaggaaggaggccgccctgcacggccacaaggacttccacccccgggtgacctgtgcctgccaggagcacaggacaggcaccgtgggcttcaagatcagcaaggtgattgtggtgggggacctgtctgtgggcaagacctgcctgatcaaccgcttctgcaaggacacctttgacaagaactacaaggccaccatcggcgtggactttgagatggagagatttgaggtgctgggcatccccttcagcctgcagctgtgggacacagctggccaggagcgcttcaagtgcatcgccagcacctactacagaggagcccaggccatcatcatcgtgttcaacctgaatgatgtggccagcctggagcacaccaagcagtggctggctgatgccctgaaggaaaatgaccccagctctgtgctgctcttcctggtgggcagcaagaaggacctgagcaccccagcccagtatgccctgatggagaaggatgccctgcaggtggcccaggagatgaaggccgagtactgggccgtgagcagcctgaccggggagaatgtgcgggagttcttcttccgggtggccgccctgacctttgaggccaacgtgctggccgagctggagaagagcggggccaggagaattggagatgtggtgcgcatcaacagtgatgacagcaacctgtacctgacagccagcaagaagaagcccacctgctgcccctag

SEQ ID NO: 166908 - DNA, 825 bp, synthetic construct
  misc_feature 1..825: note = Description of Artificial Sequence: Synthetic coding sequence
  source 1..825: mol_type = other DNA
atgctgcggagcagcctgcgcttccccatcaccaacagcgctggggccccctgcaaggctgctggccgcatgaacatcctggcccctgtgagaagagacagagtgctggccgagctgccccagtgcctgaggaaggaggccgccctgcacggccacaaggacttccacccccgggtgacctgtgcctgccaggagcacaggacaggcaccgtgggcttcaagatcagcaaggtgattgtggtgggggacctgtctgtgggcaagacctgcctgatcaaccgcttctgcaaggacacctttgacaagaactacaaggccaccatcggcgtggactttgagatggagagatttgaggtgctgggcatccccttcagcctgcagctgtgggacacagctggccaggagcgcttcaagtgcatcgccagcacctactacagaggagcccaggccatcatcatcgtgttcaacctgaatgatgtggccagcctggagcacaccaagcagtggctggctgatgccctgaaggaaaatgaccccagctctgtgctgctcttcctgaccccagcccagtatgccctgatggagaaggatgccctgcaggtggcccaggagatgaaggccgagtactgggccgtgagcagcctgaccggggagaatgtgcgggagttcttcttccgggtggccgccctgacctttgaggccaacgtgctggccgagctggagaagagcggggccaggagaattggagatgtggtgcgcatcaacagtgatgacagcaacctgtacctgacagccagcaagaagaagcccacctgctgcccctag

SEQ ID NO: 166909 - DNA, 807 bp, synthetic construct
  misc_feature 1..807: note = Description of Artificial Sequence: Synthetic coding sequence
  source 1..807: mol_type = other DNA
atgagccacctgcccggcctggagctgcggcgggaggccccacccctgctgggccccctgctgagccccttccccctgcctgctggctcctggcaccggcagatgctgcggagcagcctgcgcttccccatcaccaacagcgctggggccccctgcaaggctgctggccgcatgaacatcctggcccctgtgagaagagacagagtgctggccgagctgccccagtgcctgaggaaggaggccgccctgcacggccacaaggacttccacccccgggtgacctgtgcctgccaggagcacaggacaggcaccgtgggccgcttcaagatcagcaaggtgattgtggtgggggacctgtctgtgggcaagacctgcctgatcaaccgcttctgcaaggacacctttgacaagaactacaaggccaccatcggcgtggactttgagatggagagatttgaggtgctgggcatccccttcagcctgcagctgtgggacacagctggccaggagcgcttcaagtgcatcgccagcacctactacagaggagcccaggccatcatcatcgtgttcaacctgaatgatgtggccagcctggagcacaccaagcagtggctggctgatgccctgaaggaaaatgaccccagctctgtgctgctcttcctggtgggcagcaagaaggacctgagcaccccagcccagtatgccctgatggagaaggatgccctgcaggtggcccaggagatgaagacagtgcagaggctgcccagcccccgggccctgtgccacccccacagcagccgggcctag

SEQ ID NO: 166910 - DNA, 1002 bp, synthetic construct
  misc_feature 1..1002: note = Description of Artificial Sequence: Synthetic coding sequence
  source 1..1002: mol_type = other DNA
atggtgattgctggggcctcctggatgctgggccgggccgccgccagccccacccagaccccacccaccaccagcaccatccgggtggcccggcgcagccgggtggccctggtggccatggtgattgctgctgctggcagcggcggccctggccgggcagagccccagctgagccagcccagcctggactgtggccgcatgaggagcagcctgacccccctgggcccccctgtgtcccgggacagagtcatcgccagcttccccaagtggtacaccccagaggcctgcctgcagctgcgggagcacttccacggccaggtgtctgctgcctgccagaggaggaacacaggcaccgtgggcctgaagctgagcaaggtggtggtggtgggggacctgtatgtgggcaagaccagcctcatccaccgcttctgcaagaatgtgtttgaccgggactacaaggccaccatcggcgtggactttgaaattgaaagatttgaaattgctggcatcccctacagcctgcagatctgggacacagctggccaggagaagttcaagtgcatcgccagcgcctactacagaggagcccaggtgatcatcacagcctttgacctgacagatgtgcagaccctggagcacacccggcagtggctggaggatgccctgcgggagaatgaagctggcagctgcttcatcttcctggtgggcaccaagaaggacctgctgtctggagctgcctgtgagcaggccgaggctgatgctgtgcacctggcccgggagatgcaggccgagtactggagcgtgtctgccaagacaggagaaaatgtgaaggccttcttcagccgggtggccgccctggcctttgagcagagcgtgctgcaggacctggagcggcagagcagcgcccggctgcaggtgggcaatggagacctgatccagatggagggcagccccccagagacccaggagagcaagaggcccagcagcctgggctgctgctag

SEQ ID NO: 166911 - DNA, 936 bp, synthetic construct
  misc_feature 1..936: note = Description of Artificial Sequence: Synthetic coding sequence
  source 1..936: mol_type = other DNA
atggtgattgctggggcctcctggatgctgggccgggccgccgccagccccacccagaccccacccaccaccagcaccatccgggtggcccggcgcagccgggtggccctggtggccatggtgattgctgctgctggcagcggcggccctggccgggcagagccccagctgagccagcccagcctggactgtggccgcatgaggagcagcctgacccccctgggcccccctgtgtcccgggacagagtcatcgccagcttccccaagtggtacaccccagaggcctgcctgcagctgcgggagcacttccacggccaggtgtctgctgcctgccagaggaggaacacaggcaccgtgggcttctgcaagaatgtgtttgaccgggactacaaggccaccatcggcgtggactttgaaattgaaagatttgaaattgctggcatcccctacagcctgcagatctgggacacagctggccaggagaagttcaagtgcatcgccagcgcctactacagaggagcccaggtgatcatcacagcctttgacctgacagatgtgcagaccctggagcacacccggcagtggctggaggatgccctgcgggagaatgaagctggcagctgcttcatcttcctggtgggcaccaagaaggacctgctgtctggagctgcctgtgagcaggccgaggctgatgctgtgcacctggcccgggagatgcaggccgagtactggagcgtgtctgccaagacaggagaaaatgtgaaggccttcttcagccgggtggccgccctggcctttgagcagagcgtgctgcaggacctggagcggcagagcagcgcccggctgcaggtgggcaatggagacctgatccagatggagggcagccccccagagacccaggagagcaagaggcccagcagcctgggctgctgctag

SEQ ID NO: 166912 - DNA, 498 bp, synthetic construct
  misc_feature 1..498: note = Description of Artificial Sequence: Synthetic coding sequence
  source 1..498: mol_type = other DNA
atggtgattgctgctgctggcagcggcggccctggccgggcagagccccagctgagccagcccagcctggactgtggccgcatgaggagcagcctgacccccctgggcccccctgtgtcccgggacagagtgattgccagcttccccaagtggtacaccccagaggcctgcctgcagctgcgggagcacttccacggccaggtgtctgctgcctgccagaggagaaatactggaacagtgggcctgaagctgagcaaggtggtggtggtgggggacctgtatgtgggcaagaccagcctgagcgcccagtatgcccacccccagggcttcctgacagccatgaaccagccccacagcccccggcccctgagccctggctacgcccacagcagccaccccagcagagctgtggccagccgccgctggagggccccctgccggcagcccagcgaccagtactgcagcccccgggcctggcacacagctgctgccctgtag

SEQ ID NO: 166913 - DNA, 549 bp, synthetic construct
  misc_feature 1..549: note = Description of Artificial Sequence: Synthetic coding sequence
  source 1..549: mol_type = other DNA
atggacctgcagaggccagacagctaccagggcggggccggccctgacttcaatgaccacgtgctgcacaagaccatcctggtgggggacagcggcgtgggcaagaccagcctgctggtgcagtttgaccagggcaagttcatccctggcagcttcagcgccaccgtgggcatcggcttcaccaacaaggtggtgacagtggatggagtgcgggtgaagctgcagatctgggacacagctggccaggagcgcttccgctctgtgacccacgcctactacagagatgcccaggccctgctgctgctgtatgacatcaccaacaagagcagctttgacaacatccgggcctggctgacagagatccacgagtatgcccagagagatgtggtgatcatgctgctgggcaacaaggctgacatgagcagcgagagggtcatccgctcagaagatggagagaccctggcccgggagtatggagtgcccttcctggagaccagcgccaagacaggcatgaatgtggagctggccttcctggccatcgccaagtag

SEQ ID NO: 166914 - DNA, 570 bp, synthetic construct
  misc_feature 1..570: note = Description of Artificial Sequence: Synthetic coding sequence
  source 1..570: mol_type = other DNA
atgacaggcaccccaggagctgtggccaccagagatggagaggcccctgagaggagccccccctgcagccccagctatgacctgaccgggaaggtgatgctgctgggggacaccggggtgggcaagacctgcttcctgatccagttcaaggatggagccttcctgagcggcaccttcatcgccaccgtgggcatcgacttcaggaacaaggtggtgacagtggatggagtgcgggtgaagctgcagatctgggacacagctggccaggagcgcttccgctctgtgacccacgcctactacagagatgcccaggccctgctgctgctgtatgacatcaccaacaagagcagctttgacaacatccgggcctggctgacagagatccatgaatatgcccagagagatgtggtgatcatgctgctgggcaacaaggctgacatgagcagcgagagggtcatccgctcagaagatggagagaccctggcccgggagtatggagtgcccttcctggagaccagcgccaagacaggcatgaatgtggagctggccttcctggccatcgccaagtag

SEQ ID NO: 166915 - DNA, 561 bp, synthetic construct
  misc_feature 1..561: note = Description of Artificial Sequence: Synthetic coding sequence
  source 1..561: mol_type = other DNA
atgacaggcaccccaggagctgtggccaccagagatggagaggcccctgagaggagccccccctgcagccccagctatgacctgaccgggaagaacaaggtggtgacagtggatggagtgcgggtgaagctgcagatctgggacacagctggccaggagcgcttccgctctgtgacccacgcctactacagagatgcccaggccctgctgctgctgtatgacatcaccaacaagagcagctttgacaacatccgggcctggctgacagagatccacgagtatgcccagagagatgtggtgatcatgctgctgggcaacaaggctgacatgagcagcgagagggtcatccgctcagaagatggagagaccctggcccgggagtatggagtgcccttcctggagaccagcgccaagacaggcatgaatgtggagctggccttcctggccatcgccaaggagctgaagtaccgggccggccaccaggctgatgagcccagcttccagatccgggactatgtggagagccagaagaagaggagcagctgctgcagcttcatgtag

SEQ ID NO: 166916 - DNA, 672 bp, synthetic construct
  misc_feature 1..672: note = Description of Artificial Sequence: Synthetic coding sequence
  source 1..672: mol_type = other DNA
atgacaggcaccccaggagctgtggccaccagagatggagaggcccctgagaggagccccccctgcagccccagctatgacctgaccgggaaggtgatgctgctgggggacaccggggtgggcaagacctgcttcctgatccagttcaaggatggagccttcctgagcggcaccttcatcgccaccgtgggcatcgacttcaggaacaaggtggtgacagtggatggagtgcgggtgaagctgcagatctgggacacagctggccaggagcgcttccgctctgtgacccacgcctactacagagatgcccaggccctgctgctgctgtatgacatcaccaacaagagcagctttgacaacatccgggcctggctgacagagatccatgaatatgcccagagagatgtggtgatcatgctgctgggcaacaaggctgacatgagcagcgagagggtcatccgctcagaagatggagagaccctggcccgggagtatggagtgcccttcctggagaccagcgccaagacaggcatgaatgtggagctggccttcctggccatcgccaaggagctgaagtacagagctggccaccaggctgatgagcccagcttccagatccgggactatgtggagagccagaagaagaggagcagctgctgcagcttcatgtag

SEQ ID NO: 166917 - DNA, 687 bp, synthetic construct
  misc_feature 1..687: note = Description of Artificial Sequence: Synthetic coding sequence
  source 1..687: mol_type = other DNA
atgtggctgatgtctgaggcccacggggctgagcctgtgctgctgcgggaggccgcccggcccttcacccagaccctgcggctgtgtgtgcccagcggcaacagcaaggtgatgctgctgggggacacaggagtgggcaagacctgcttcctgatccagttcaaggatggagccttcctgagcggcaccttcatcgccaccgtgggcatcgacttcaggaacaaggtggtgacagtggatggagtgcgggtgaagctgcagatctgggacacagctggccaggagcgcttccgctctgtgacccacgcctactacagagatgcccaggccctgctgctgctgtatgacatcaccaacaagagcagctttgacaacatccgggcctggctgacagagatccacgagtatgcccagagagatgtggtgatcatgctgctgggcaacaaggctgacatgagcagcgagagggtcatccgctcagaagatggagagaccctggcccgggagtatggagtgcccttcctggagaccagcgccaagacaggcatgaatgtggagctggccttcctggccatcgccaaggagctgaagtaccgggccggccaccaggctgatgagcccagcttccagatccgggactatgtggagagccagaagaagaggagcagctgctgcagcttcatgtag

SEQ ID NO: 166918 - DNA, 576 bp, synthetic construct
  misc_feature 1..576: note = Description of Artificial Sequence: Synthetic coding sequence
  source 1..576: mol_type = other DNA
atgtggctgatgtctgaggcccacggggctgagcctgtgctgctgcgggaggccgcccggcccttcacccagaccctgcggctgtgtgtgcccagcggcaacagcaagaacaaggtggtgacagtggatggagtgcgggtgaagctgcagatctgggacacagctggccaggagcgcttccgctctgtgacccacgcctactacagagatgcccaggccctgctgctgctgtatgacatcaccaacaagagcagctttgacaacatccgggcctggctgacagagatccatgaatatgcccagagagatgtggtgatcatgctgctgggcaacaaggctgacatgagcagcgagagggtcatccgctcagaagatggagagaccctggcccgggagtatggagtgcccttcctggagaccagcgccaagacaggcatgaatgtggagctggccttcctggccatcgccaaggagctgaagtacagagctggccaccaggctgatgagcccagcttccagatccgggactatgtggagagccagaagaagaggagcagctgctgcagcttcatgtag

SEQ ID NO: 166919 - DNA, 510 bp, synthetic construct
  misc_feature 1..510: note = Description of Artificial Sequence: Synthetic coding sequence
  source 1..510: mol_type = other DNA
atggacctgcagaggccagacagctaccagggcggggccggccctgacttcaatgaccacgtgctgcacaagaccatcctggtgggggacagcggcgtgggcaagaccagcctgctggtgcagtttgaccagggcaagttcatccctggcagcttcagcgccaccgtgggcatcggcttcaccaacaaggtggtgacagtggatggagtgcgggtgaagctgcagatctgggacacagctggccaggagcgcttccgctctgtgacccacgcctactacagagatgcccaggccctgctgctgctgtatgacatcaccaacaagagcagctttgacaacatccgggcctggctgacagagatccacgagtatgcccagagagatgtggtgatcatgctgctgggcaacaaggtgtctggcagcggggccggcagcgcccagccctgcaccagcagcgccctggccggccccatcaccacccaggagcagctgagccgccaccccagctag

SEQ ID NO: 166920 - DNA, 651 bp, synthetic construct
  misc_feature 1..651: note = Description of Artificial Sequence: Synthetic coding sequence
  source 1..651: mol_type = other DNA
atggacctgcagaggccagacagctaccagggcggggccggccctgacttcaatgaccacgtgctgcacaagaccatcctggtgggggacagcggcgtgggcaagaccagcctgctggtgcagtttgaccagggcaagttcatccctggcagcttcagcgccaccgtgggcatcggcttcaccaacaaggtggtgacagtggatggagtgcgggtgaagctgcagatctgggacacagctggccaggagcgcttccgctctgtgacccacgcctactacagagatgcccaggccctgctgctgctgtatgacatcaccaacaagagcagctttgacaacatccgggcctggctgacagagatccacgagtatgcccagagagatgtggtgatcatgctgctgggcaacaaggctgacatgagcagcgagagggtcatccgctcagaagatggagagaccctggcccgggagtatggagtgcccttcctggagaccagcgccaagacaggcatgaatgtggagctggccttcctggccatcgccaaggagctgaagtaccgggccggccaccaggctgatgagcccagcttccagatccgggactatgtggagagccagaagaagaggagcagctgctgcagcttcatgtag

SEQ ID NO: 166921 - DNA, 651 bp, synthetic construct; identical to SEQ ID NO: 166920
  misc_feature 1..651: note = Description of Artificial Sequence: Synthetic coding sequence
  source 1..651: mol_type = other DNA

SEQ ID NO: 166922 - DNA, 672 bp, synthetic construct; identical to SEQ ID NO: 166916
  misc_feature 1..672: note = Description of Artificial Sequence: Synthetic coding sequence
  source 1..672: mol_type = other DNA

SEQ ID NO: 166923 - DNA, 591 bp, synthetic construct
  misc_feature 1..591: note = Description of Artificial Sequence: Synthetic coding sequence
  source 1..591: mol_type = other DNA
atgtgctgcaaggtgatgctgctgggggacacaggagtgggcaagacctgcttcctgatccagttcaaggatggagccttcctgagcggcaccttcatcgccaccgtgggcatcgacttcaggaacaaggtggtgacagtggatggagtgcgggtgaagctgcagatctgggacacagctggccaggagcgcttccgctctgtgacccacgcctactacagagatgcccaggccctgctgctgctgtatgacatcaccaacaagagcagctttgacaacatccgggcctggctgacagagatccacgagtatgcccagagagatgtggtgatcatgctgctgggcaacaaggctgacatgagcagcgagagggtcatccgctcagaagatggagagaccctggcccgggagtatggagtgcccttcctggagaccagcgccaagacaggcatgaatgtggagctggccttcctggccatcgccaaggagctgaagtaccgggccggccaccaggctgatgagcccagcttccagatccgggactatgtggagagccagaagaagaggagcagctgctgcagcttcatgtag

SEQ ID NO: 166924 - DNA, 636 bp, synthetic construct
  misc_feature 1..636: note = Description of Artificial Sequence: Synthetic coding sequence
  source 1..636: mol_type = other DNA
atgcaggccccccacaaggagcacctgtacaagctgctggtgattggagacctgggcgtgggcaagaccagcatcatcaagagatatgtgcaccagaacttcagcagccactaccgggccaccatcggcgtggactttgccctgaaggtgctgcactgggaccctgagaccgtggtgcggctgcagctgtgggacattgctggccaggagcgcttcggcaacatgaccagggtgtactaccgggaggccatgggcgccttcatcgtgtttgatgtgaccaggcctgccacctttgaggccgtggccaagtggaagaatgacctggacagcaagctgagcctgcccaacgggaagcctgtgtctgtggtgctgctggccaacaagtgtgaccagggcaaggatgtgctgatgaacaacggcctgaagatggaccagttctgcaaggagcacggctttgtgggctggtttgagaccagcgccaaggagaacatcaacattgatgaggccagccgctgcctggtgaagcacatcctggccaatgaatgtgacctgatggagagcattgaaccagatgtggtgaagccccacctgaccagcaccaaggtggccagctgcagcggctgtgccaagagctag

SEQ ID NO: 166925 - DNA, 642 bp, synthetic construct
  misc_feature 1..642: note = Description of Artificial Sequence: Synthetic coding sequence
  source 1..642: mol_type = other DNA
atggaggccatctggctgtaccagttccgcctcatcgtcatcggggacagcacagtgggcaagagctgcctgatccgccgcttcacagagggccgctttgcccaggtgtctgaccccaccgtgggcgtggacttcttcagccggctggtggagattgagcccgggaagaggatcaagctgcagatctgggacacagctggccaggagcgcttccgcagcatcacccgggcctactacagaaacagcgtgggcggcctgctgctgtttgacatcaccaacagaagaagcttccagaatgtgcatgagtggctggaggagaccaaggtgcacgtgcagccctaccagatcgtgtttgtgctggtgggccacaagtgtgacctggacacccagaggcaggtgaccaggcatgaggccgagaagctggccgccgcctacggcatgaagtacatcgagaccagcgccagagatgccatcaacgtggagaaggccttcacagacctgacccgggacatctatgagctggtgaagagaggagagatcaccatccaggagggctgggagggcgtgaagagcggctttgtgcccaacgtggtgcacagcagcgaggaggtggtgaagtcagaaagacgctgcctgtgctag

SEQ ID NO: 166926 - DNA, 2187 bp, synthetic construct
  misc_feature 1..2187: note = Description of Artificial Sequence: Synthetic coding sequence
  source 1..2187: mol_type = other DNA
atggccggccctgagggcttccagtaccgggccctgtaccccttccggcgggagaggcctgaggacctggagctgctgcctggagatgtgctggtggtgtcccgggccgccctgcaggccctgggcgtggccgagggcggggagcgctgcccccagagcgtgggctggatgcctggcctgaatgaaagaacccggcagagaggagacttccctggcacctacgtggagttcctgggccctgtggccctggcccggcccggcccccggccccggggcccccggcccctgcctgcccggcccagagatggagcccctgagcccggcctgaccctgcctgacctgcctgagcagttcagccccccagatgtggccccacccctgctggtgaagctggtggaggccattgaaagaacaggcctggacagcgagagccactacagacctgagctgcctgcccccaggacagactggagcctgagtgatgtggaccagtgggacacagctgccctggctgatggcatcaagagcttcctgctggccctgcctgcccccctggtgaccccagaggccagcgctgaggcccggcgggccctgcgggaggccgccggccctgtgggccctgccctggagccccccaccctgcccctgcaccgggccctgaccctgcgcttcctgctgcagcacctgggccgggtggccagccgggccccagccctgggccctgctgtgcgggccctgggcgccaccttcggccccctgctgctgcgggcccctcctccacccagcagccccccacctgggggcgccccagatggcagcgagcccagcccagacttccctgccctgctggtggagaagctgctgcaggagcacctggaggagcaggaggtggcccccccagccctgccccccaagccacccaaggccaagccagccagcacagtgctggccaacggcggcagcccccccagcctgcaggatgctgagtggtactggggagacatcagccgggaggaggtgaatgagaagctgcgggacaccccagatggcaccttcctggtgagagatgccagcagcaagatccagggcgagtacaccctgaccctgaggaaaggaggcaacaacaagctgatcaaggtgttccacagagatggccactacggcttcagcgagcccctgaccttctgcagcgtggtggacctgatcaaccactacagacatgagagcctggcccagtacaatgccaagctggacacccggctgctgtaccctgtgtccaagtaccagcaggaccagatcgtgaaggaggacagcgtggaggccgtgggcgcccagctgaaggtgtaccaccagcagtaccaggacaagagccgggagtatgaccagctgtatgaggagtacaccaggaccagccaggagctgcagatgaagaggacagccatcgaggccttcaatgagaccatcaagatctttgaggagcagggccagacccaggagaagtgcagcaaggagtacctggagcgcttccggcgggagggcaatgagaaggagatgcagaggatcctgctgaacagcgagcggctgaagagcagaattgctgagatccacgagagcaggaccaagctggagcagcagctgcgggcccaggccagtgacaaccgggagattgacaagaggatgaacagcctgaagccagacctgatgcagctgaggaagatccgggaccagtacctggtgtggctgacccagaagggggcccggcagaagaagatcaatgagtggctgggcatcaagaatgaaacagaggaccagtatgccctgatggaggatgaagatgacctgccccaccacgaggagaggacctggtacgtgggcaagatcaacagaacccaggccgaggagatgctgagcggcaagagagatggcaccttcctgatccgggagagcagccagaggggctgctacgcctgcagcgtggtggtggatggagacaccaagcactgcgtcatctacagaacagccactggatttggatttgctgagccctacaacctgtatggcagcctgaaggagctggtgctgcactaccagcacgccagcctggtgcagcacaatgatgccctgactgtgaccctggcccaccctgtgcgggcccctggccctggccccccacctgctgccaggtag

SEQ ID NO: 166927 - DNA, 660 bp, synthetic construct
  misc_feature 1..660: note = Description of Artificial Sequence: Synthetic coding sequence
  source 1..660: mol_type = other DNA
atggcctctgtgacagatggcaagacaggagtgaaggatgccagtgaccagaactttgactacatgttcaagctgctgatcatcggcaacagctctgtgggcaagaccagcttcctgttccgctatgcagatgacaccttcaccccagcctttgtgtccacagtgggcatcgacttcaaggtgaagacagtgtacagacatgagaagagggtgaagctgcagatctgggacacagctggccaggagcgctaccgcaccatcaccacagcctactacagaggagccatgggcttcatcctgatgtatgacatcaccaatgaggagagcttcaatgctgtgcaggactgggccacccagatcaagacctacagctgggacaatgcccaggtgatcctggtgggcaacaagtgtgacatggaggaggagcgggtggtgcccacagagaagggccagctgctggccgagcagctgggctttgacttctttgaggccagcgccaaggagaacatctctgtgcggcaggcctttgagcggctggtggatgccatctgtgacaagatgtctgacagcctggacacagaccccagcatgctgggcagcagcaagaacacccggctgagtgacaccccacccctgctgcagcagaactgcagctgctag

SEQ ID NO: 166928 - DNA, 660 bp, synthetic construct; identical to SEQ ID NO: 166927
  misc_feature 1..660: note = Description of Artificial Sequence: Synthetic coding sequence
  source 1..660: mol_type = other DNA

SEQ ID NO: 166929 - DNA, 684 bp, synthetic construct
  misc_feature 1..684: note = Description of Artificial Sequence: Synthetic coding sequence
  source 1..684: mol_type = other DNA
atgagacatgaggcccccatgcagatggccagcgcccaggatgcccgctatggccagaaggacagcagtgaccagaactttgactacatgttcaagctgctgatcatcggcaacagctctgtgggcaagaccagcttcctgttccgctatgcagatgacagcttcaccagcgcctttgtgtccacagtgggcatcgacttcaaggtgaagacagtgttcaagaatgagaagaggatcaagctgcagatctgggacacagctggccaggagcgctaccgcaccatcaccacagcctactacagaggagccatgggcttcatcctgatgtatgacatcaccaatgaggagagcttcaatgctgtgcaggactggagcacccagatcaagacctacagctgggacaatgcccaggtgatcctggtgggcaacaagtgtgacatggaggatgagagggtcatcagcacagagcggggccagcacctgggggagcagctgggctttgagttctttgagaccagcgccaaggacaacatcaacgtgaagcagacctttgagcggctggtggacatcatctgtgacaagatgtctgagagcctggagacagatcctgccatcacagctgccaagcagaacacccggctgaaggagaccccacctccaccccagcccaactgtgcctgctag

SEQ ID NO: 166930 - DNA, 783 bp, synthetic construct
  misc_feature 1..783: note = Description of Artificial Sequence: Synthetic coding sequence
  source 1..783: mol_type = other DNA
atggccggcagccccctgctgtggggcccccgggccggcggcgtgggcctgctggtgctgctgctgctgggcctcttccggcccccaccagccctgtgtgcccggcctgtgaaggagccccggggcctgtctgctgccagcccccccctggccgagactggagccccccggcgcttccgccgctctgtgcccagaggagaggccgccggggctgtgcaggagctggcccgggccctggcccacctgctggaggccgagcggcaggagcgggcccgggcagaggcccaggaggccgaggaccagcaggcccgggtgctggcccagctgctgcgggtgtggggcgcccccaggaacagcgaccctgccctgggcctggatgatgatcctgatgccccagctgcccagctggcccgggccctgctgcgggcccggctggaccctgctgccctggccgcccagctggtgcctgcccctgtgcctgctgctgccctgcggccccggccccctgtgtatgatgatggccctgctggcccagatgctgaggaggccggagatgagaccccagatgtggaccctgagctgctgcgctacctgctgggccgcatcctggccggcagcgctgacagcgagggcgtggccgccccccggcggctgcggcgggctgctgaccatgatgtgggcagcgagctgcccccagagggcgtgctgggcgccctgctgcgggtgaagaggctggagaccccagccccccaggtgcctgcccggcggctgctgcccccatag

SEQ ID NO: 166931 - DNA, 657 bp, synthetic construct
  misc_feature 1..657: note = Description of Artificial Sequence: Synthetic coding sequence
  source 1..657: mol_type = other DNA
atgagccagacagccatgtctgagacctatgacttcctgttcaagttcctggtgattggaaatgccggcaccgggaagagctgcctgctgcaccagttcatcgagaagaagttcaaggatgacagcaaccacaccatcggcgtggagtttggcagcaagatcatcaacgtgggcggcaagtatgtgaagctgcagatctgggacacagctggccaggagcgcttccgctctgtgaccaggagctactacagaggagctgctggggccctgctggtgtatgacatcaccagccgggagacctacaatgccctgaccaactggctgacagatgccaggatgctggccagccagaacatcgtcatcatcctgtgtggcaacaagaaggacctggatgctgaccgggaggtgaccttcctggaggccagcagatttgcccaggagaatgagctgatgttcctggagaccagcgccctgactggagaaaatgtggaggaggcctttgtgcagtgtgccaggaagatcctgaacaagattgagagcggggagctggaccctgagaggatgggcagcggcatccagtatggagatgctgccctgcggcagctgcggagcccccggcgggcccaggccccaaatgcccaggagtgtggctgctag

SEQ ID NO: 166932 - DNA, 648 bp, synthetic construct
  misc_feature 1..648: note = Description of Artificial Sequence: Synthetic coding sequence
  source 1..648: mol_type = other DNA
atggccagcagaggagccacccggcccaacggccccaacacaggcaacaagatctgccagttcaagctggtgctgctgggggagagcgctgtgggcaagagcagcctggtgctgcgctttgtgaagggccagttccacgagttccaggagagcaccatcggggccgccttcctgacccagacagtgtgcctggatgacaccaccgtgaagtttgagatctgggacacagctggccaggagcgctaccacagcctggcccccatgtactacagaggagcccaggccgccatcgtggtgtatgacatcaccaatgaggagagctttgcccgggccaagaactgggtgaaggagctgcagaggcaggccagccccaacatcgtcatcgccctgagcggcaacaaggctgacctggccaacaagagagctgtggacttccaggaggcccagagctatgcagatgacaacagcctgctcttcatggagaccagcgccaagacctccatgaatgtgaatgagatcttcatggccatcgccaagaagctgcccaagaatgagccccagaaccctggggccaacagcgcccggggccggggcgtggacctgacagagcccacccagcccaccaggaaccagtgctgcagcaactag

SEQ ID NO: 166933 - DNA, 606 bp, synthetic construct
  misc_feature 1..606: note = Description of Artificial Sequence: Synthetic coding sequence
  source 1..606: mol_type = other DNA
atggccagcagaggagccacccggcccaacggccccaacacaggcaacaagatctgccagttcaagctggtgctgctgggggagagcgctgtgggcaagagcagcctggtgctgcgctttgtgaagggccagttccacgagttccaggagagcaccatcggcgtgaagtttgagatctgggacacagctggccaggagcgctaccacagcctggcccccatgtactacagaggagcccaggccgccatcgtggtgtatgacatcaccaatgaggagagctttgcccgggccaagaactgggtgaaggagctgcagaggcaggccagccccaacatcgtcatcgccctgagcggcaacaaggctgacctggccaacaagagagctgtggacttccaggaggcccagagctatgcagatgacaacagcctgctcttcatggagaccagcgccaagacctccatgaatgtgaatgagatcttcatggccatcgccaagaagctgcccaagaatgagccccagaaccctggggccaacagcgcccggggccggggcgtggacctgacagagcccacccagcccaccaggaaccagtgctgcagcaactag

SEQ ID NO: 166934 - DNA, 48 bp, synthetic construct
  misc_feature 1..48: note = Description of Artificial Sequence: Synthetic coding sequence
  source 1..48: mol_type = other DNA
atggccagcagaggagccacccggcccaacggccccaacacaggatag

SEQ ID NO: 166935 - DNA, 648 bp, synthetic construct
  misc_feature 1..648: note = Description of Artificial Sequence: Synthetic coding sequence
  source 1..648: mol_type = other DNA
atgaccagccgcagcacagcccggcccaacggccagccccaggccagcaagatctgccagttcaagctggtgctgctgggggagagcgctgtgggcaagagcagcctggtgctgcgctttgtgaagggccagttccacgagtaccaggagagcaccatcggggccgccttcctgacccagagcgtgtgcctggatgacaccaccgtgaagtttgagatctgggacacagctggccaggagcgctaccacagcctggcccccatgtactacagaggagcccaggccgccatcgtggtgtatgacatcaccaaccaggagacctttgcccgggccaagacctgggtgaaggagctgcagaggcaggccagccccagcatcgtcatcgccctggccggcaacaaggctgacctggccaacaagaggatggtggagtatgaggaggcccaggcctatgcagatgacaacagcctgctcttcatggagaccagcgccaagacagccatgaatgtgaatgacctcttcctggccatcgccaagaagctgcccaagtctgagccccagaacctgggcggcgctgctggccgcagccggggcgtggacctgcacgagcagagccagcagaacaagagccagtgctgcagcaactag

SEQ ID NO: 166936 - DNA, 525 bp, synthetic construct
  misc_feature 1..525: note = Description of Artificial Sequence: Synthetic coding sequence
  source 1..525: mol_type = other DNA
atgaccagccgcagcacagcccggcccaacggccagccccaggccagcaagatctgccagttcaagctggtgctgctgggggagagcgctgtgggcaagagcagcctggtgctgcgctttgtgaagggccagttccacgagtaccaggagagcaccatcggggccgccttcctgacccagagcgtgtgcctggatgacaccaccgtgaagtttgagatctgggacacagctggccaggagcgctaccacagcctggcccccatgtactacagaggagcccaggccgccatcgtggtgtatgacatcaccaaccaggaggcccaggcctatgcagatgacaacagcctgctcttcatggagaccagcgccaagacagccatgaatgtgaatgacctcttcctggccatcgccaagaagctgcccaagtctgagccccagaacctgggcggggccgccggccgcagcagaggagtggacctgcacgagcagagccagcagaacaagagccagtgctgcagcaactag

SEQ ID NO: 166937 - DNA, 348 bp, synthetic construct
  misc_feature 1..348: note = Description of Artificial Sequence: Synthetic coding sequence
  source 1..348: mol_type = other DNA
atgaccagccgcagcacagcccggcccaacggccagccccaggccagcaagatctgccagttcaagctggtgctgctgggggagagcgctgtgggcaagagcagcctggtgctgcgctttgtgaagggccagttccacgagtaccaggagagcaccatcggggccgccttcctgacccagagcgtgtgcctggatgacaccaccgtgaagtttgagatctgggacacagctggccaggagcgctaccacagcctggcccccatgtactacagaggagcccaggccgccatcgtggtgtatgacatcaccaaccaggagacctttgcccgggccaagacctgggtgtag

SEQ ID NO: 166938 - DNA, 303 bp, synthetic construct
  misc_feature 1..303: note = Description of Artificial Sequence: Synthetic coding sequence
  source 1..303: mol_type = other DNA
atgaccagccgcagcacagcccggcccaacggccagccccaggccagcaagatctgccagttcaagctggtgctgctgggggagagcgctgtgggcaagagcagcctggtgctgcgctttgtgaagggccagttccacgagtaccaggagagcaccatcggggccgccttcctgacccagagcgtgtgcctggatgacaccaccgtgaagtttgagatctgggacacagctggccaggagcgctaccacagcctggcccccatgtactacagaggagcccaggccgccatcgtggtgtactag

SEQ ID NO: 166939 - DNA, 648 bp, synthetic construct; identical to SEQ ID NO: 166935
  misc_feature 1..648: note = Description of Artificial Sequence: Synthetic coding sequence
  source 1..648: mol_type = other DNA

SEQ ID NO: 166940 - DNA, 651 bp, synthetic construct
  misc_feature 1..651: note = Description of Artificial Sequence: Synthetic coding sequence
  source 1..651: mol_type = other DNA
atggccggccggggcggggccgcccggcccaatggacctgctgctggcaacaagatctgccagttcaagctggtgctgctgggggagagcgctgtgggcaagagcagcctggtgctgcgctttgtgaagggccagttccacgagtaccaggagagcaccatcggggccgccttcctgacccagacagtgtgcctggatgacaccaccgtgaagtttgagatctgggacacagctggccaggagcgctaccacagcctggcccccatgtactacagaggagcccaggccgccatcgtggtgtatgacatcaccaacacagacacctttgcccgggccaagaactgggtgaaggagctgcagaggcaggccagccccaacatcgtgattgccctggccggcaacaaggctgacctggccagcaagagagctgtggagttccaggaggcccaggcctatgcagatgacaacagcctgctcttcatggagaccagcgccaagacagccatgaatgtgaatgagatcttcatggccatcgccaagaagctgcccaagaatgagccccagaatgccactggagcccctggcaggaacagaggagtggacctgcaggagaacaacccagccagccgcagccagtgctgcagcaactag

SEQ ID NO: 166941 - DNA, 651 bp, synthetic construct; identical to SEQ ID NO: 166940
  misc_feature 1..651: note = Description of Artificial Sequence: Synthetic coding sequence
  source 1..651: mol_type = other DNA

SEQ ID NO: 166942 - DNA, 750 bp, synthetic construct
  misc_feature 1..750: note = Description of Artificial Sequence: Synthetic coding sequence
  source 1..750: mol_type = other DNA
atggagctgtcctggaggagccccagccccctgagcgccagcctgcacagcaccagcccccacccccacgccctgtggaccaccacagctggccgggccatggccggccggggcggggccgcccggcccaacggccctgctgctggcaacaagatctgccagttcaagctggtgctgctgggggagagcgctgtgggcaagagcagcctggtgctgcgctttgtgaagggccagttccacgagtaccaggagagcaccatcggggccgccttcctgacccagacagtgtgcctggatgacaccaccgtgaagtttgagatctgggacacagctggccaggagcgctaccacagcctggcccccatgtactacagaggagcccaggccgccatcgtggtgtatgacatcaccaacacagacacctttgcccgggccaagaactgggtgaaggagctgcagaggcaggccagccccaacatcgtcatcgccctggccggcaacaaggctgacctggccagcaagagagctgtggagttccaggaggcccaggcctatgcagatgacaacagcctgctcttcatggagaccagcgccaagacagccatgaatgtgaatgagatcttcatggccatcgccaagaagctgcccaagaatgagccccagaatgccaccggggcccctggaagaaacagaggagtggacctgcaggagaacaacccagccagccgcagccagtgctgcagcaactag

SEQ ID NO: 166943 - DNA, 225 bp, synthetic construct
  misc_feature 1..225: note = Description of Artificial Sequence: Synthetic coding sequence
  source 1..225: mol_type = other DNA
atggccggccggggcggggccgcccggcccaatggacctgctgctggcaacaagatctgccagttcaagctggtgctgctgggggagagcgctgtgggcaagagcagcctggtgctgcgctttgtgaagggccagttccacgagtaccaggagagcaccatcggggccgccttcctgacccagacagtgtgcctggatgacaccaccgtgaagtttgagatctag

SEQ ID NO: 166944 - DNA, 279 bp, synthetic construct
  misc_feature 1..279: note = Description of Artificial Sequence: Synthetic coding sequence
  source 1..279: mol_type = other DNA
atggccggccggggcggggccgcccggcccaatggacctgctgctggcaacaagatctgccagttcaagctggtgctgctgggggagagcgctgtgggcaagagcagcctggtgctgcgctttgtgaagggccagttccacgagtaccaggagagcaccatcggggccgccttcctgacccagacagtgtgcctggatgacaccaccgtgaagtttgagatctgggacacagctggccaggagcgctaccacagcctggcccccatgtactacagatag

SEQ ID NO: 166945 - DNA, 375 bp, synthetic construct
  misc_feature 1..375: note = Description of Artificial Sequence: Synthetic coding sequence
  source 1..375: mol_type = other DNA
atggccggccggggcggggccgcccggcccaatggacctgctgctggcaacaagatctgccagttcaagctggtgctgctgggggagagcgctgtgggcaagagcagcctggtgctgcgctttgtgaagggccagttccacgagtaccaggagagcaccatcggggccgccttcctgacccagacagtgtgcctggatgacaccaccgtgaagtttgagatctgggacacagctggccaggagcgctaccacagcctggcccccatgtactacagaggagcccaggccgccatcgtggtgtatgacatcaccaacacagacacctttgcccgggccaagaactgggtgaaggagctgcagaggcaggccagctag

SEQ ID NO: 166946 - DNA, 627 bp, synthetic construct
  misc_feature 1..627: note = Description of Artificial Sequence: Synthetic coding sequence
  source 1..627: mol_type = other DNA
atgagcactggaggagactttggaaaccccctgaggaagttcaagctggtgttcctgggggagcagagcgtgggcaagaccagcctcatcacccgcttcatgtatgacagctttgacaacacctaccaggccaccatcggcatcgacttcctgagcaagaccatgtacctggaggacaggaccatccggctgcagctgtgggacacagctggccaggagcgcttccgcagcctcatccccagctacatccgggacagcgctgctgctgtggtggtgtatgacatcaccaacgtgaacagcttccagcagaccaccaagtggattgatgatgtgaggacagagcggggcagtgatgtgatcatcatgctggtgggcaacaagacagacctggccgacaagaggcaggtgtccattgaggagggggagaggaaggccaaggagctgaatgtgatgtttattgagaccagcgccaaggccggctacaacgtgaagcagctgttccggcgggtggccgccgccctgcccggcatggagagcacccaggacaggagccgggaggacatgattgacatcaagctggagaagccccaggagcagcctgtgtctgagggcggctgcagctgctag

SEQ ID NO: 166947 - DNA, 627 bp, synthetic construct
  misc_feature 1..627: note = Description of Artificial Sequence: Synthetic coding sequence
  source 1..627: mol_type = other DNA
atgagcactggaggagactttggaaaccccctgaggaagttcaagctggtgttcctgggggagcagagcgtgggcaagaccagcctcatcacccgcttcatgtatgacagctttgacaacacctaccaggccaccatcggcatcgacttcctgagcaagaccatgtacctggaggacagaacagtgcggctgcagctgtgggacacagctggccaggagcgcttccgcagcctcatccccagctacatccgggacagcacagtggccgtggtggtgtatgacatcaccaacgtgaacagcttccagcagaccaccaagtggattgatgatgtgaggacagagcggggcagtgatgtgatcatcatgctggtgggcaacaagacagacctggccgacaagaggcaggtgtccattgaggagggggagaggaaggccaaggagctgaatgtgatgtttattgagaccagcgccaaggccggctacaacgtgaagcagctgttccggcgggtggccgccgccctgcccggcatggagagcacccaggacaggagccgggaggacatgattgacatcaagctggagaagccccaggagcagcctgtgtctgagggcggctgcagctgctag

SEQ ID NO: 166948 - DNA, 627 bp, synthetic construct; identical to SEQ ID NO: 166946
  misc_feature 1..627: note = Description of Artificial Sequence: Synthetic coding sequence
  source 1..627: mol_type = other DNA

SEQ ID NO: 166949 - DNA, 525 bp, synthetic construct
  misc_feature 1..525: note = Description of Artificial Sequence: Synthetic coding sequence
  source 1..525: mol_type = other DNA
tgacccctgaggaagttcaagctggtgttcctgggggagcagagcgtgggcaagaccagcctcatcacccgcttcatgtatgacagctttgacaacacctaccaggccaccatcggcatcgacttcctgagcaagaccatgtacctggaggacagaacagtgcggctgcagctgtgggacacagctggccaggagcgcttccgcagcctcatccccagctacatccgggacagcacagtggccgtggtggtgtatgacatcaccaacgtgaacagcttccagcagaccaccaagtggattgatgatgtgaggacagagcggggcagtgatgtgatcatcatgctggtgggcaacaagacagacctggccgacaagaggcaggtgtccattgaggagggggagaggaaggccaaggagctgaatgtgatgtttattgagaccagcgccaaggccggctacaacgtgaagcagagaattggcagctgccacgtggcccaggccagcctggagctgctggacagctag

SEQ ID NO: 166950 - DNA, 225 bp, synthetic construct
  misc_feature 1..225: note = Description of Artificial Sequence: Synthetic coding sequence
  source 1..225: mol_type = other DNA
atgagcactggaggagactttggaaaccccctgaggaagttcaagctggtgttcctgggggagcagagcgtgggcaagaccagcctcatcacccgcttcatgtatgacagctttgacaacacctaccaggccaccatcggcatcgacttcctgagcaagaccatgtacctggaggacagaacagtgcggctgcagctgtgggacacagctggccaggagaggtag

SEQ ID NO: 166951 - DNA, 528 bp, synthetic construct
  misc_feature 1..528: note = Description of Artificial Sequence: Synthetic coding sequence
  source 1..528: mol_type = other DNA
atgtatgacagctttgacaacacctaccaggccaccatcggcatcgacttcctgagcaagaccatgtacctggaggacaggaccatccggctgcagctgtgggacacagctggccaggagcgcttccgcagcctcatccccagctacatccgggacagcgctgctgctgtggtggtgtatgacatcaccaacgtgaacagcttccagcagaccaccaagtggattgatgatgtgaggacagagcggggcagtgatgtgatcatcatgctggtgggcaacaagacagacctggccgacaagaggcaggtgtccattgaggagggggagaggaaggccaaggagctgaatgtgatgttcatcgagaccagcgccaaggccggctacaacgtgaagcagctgttcagaagagtggccgccgccctgcccggcatggagagcacccaggacaggagccgggaggacatgattgacatcaagctggagaagccccaggagcagcctgtgtctgagggcggctgcagctgctag

SEQ ID NO: 166952 - DNA, 429 bp, synthetic construct
  misc_feature 1..429: note = Description of Artificial Sequence: Synthetic coding sequence
  source 1..429: mol_type = other DNA
atgagcactggaggagactttggaaaccccctgaggaagttcaagctggtgttcctgggggagcagagcgtgggcaagaccagcctcatcacccgcttcatgtatgacagctttgacaacacctaccaggccaccatcggcatcgacttcctgagcaagaccatgtacctggaggacaggaccatccggctgcagctgtgggacacagctggccaggagcgcttccgcagcctcatccccagctacatccgggacagcgctgctgctgtggtggtgtatgacatcaccaacgtgaacagcttccagcagaccaccaagtggattgatgatgtgaggacagagcggggcagtgatgtgatcatcatgctggtgggcaacaagacagacctggccgacaagaggcaggtgtccattgaggagggggagtag

SEQ ID NO: 166953 - DNA, 315 bp, synthetic construct
  misc_feature 1..315: note = Description of Artificial Sequence: Synthetic coding sequence
  source 1..315: mol_type = other DNA
atgagcactggaggagactttggaaaccccctgaggaagttcaagctggtgttcctgggggagcagagcgtgggcaagaccagcctcatcacccgcttcatgtatgacagctttgacaacacctaccaggccaccatcggcatcgacttcctgagcaagaccatgtacctggaggacaggaccctcttccggcgggtggccgccgccctgcccggcatggagagcacccaggacaggagccgggaggacatgattgacatcaagctggagaagccccaggagcagcctgtgtctgagggcggctgcagctgctag

SEQ ID NO: 166954 - DNA, 606 bp, synthetic construct
  misc_feature 1..606: note = Description of Artificial Sequence: Synthetic coding sequence
  source 1..606: mol_type = other DNA
tgagtgttcccccggggcctggccctgcggtctgcagatgtggtggaggtgggcaagaccagcctcatcacccgcttcatgtatgacagctttgacaacacctaccaggccaccatcggcatcgacttcctgagcaagaccatgtacctggaggacaggaccatccggctgcagctgtgggacacagctggccaggagcgcttccgcagcctcatccccagctacatccgggacagcgctgctgctgtggtggtgtatgacatcaccaacgtgaacagcttccagcagaccaccaagtggattgatgatgtgaggacagagcggggcagtgatgtgatcatcatgctggtgggcaacaagacagacctggccgacaagaggcaggtgtccattgaggagggggagaggaaggccaaggagctgaatgtgatgttcatcgagaccagcgccaaggccggctacaacgtgaagcagctgttcagaagagtggccgccgccctgcccggcatggagagcacccaggacaggagccgggaggacatgattgacatcaagctggagaagccccaggagcagcctgtgtctgagggcggctgcagctgctag

SEQ ID NO: 166955 - DNA, 144 bp, synthetic construct
  misc_feature 1..144: note = Description of Artificial Sequence: Synthetic coding sequence
  source 1..144: mol_type = other DNA
atgagcactggaggagactttggaaaccccctgaggaagttcaagctggtgttcctgggggagcagagcgtgggcaagaccagcctcatcacccgcttcatgtatgacagctttgacaacacctaccaggccaccatcggctag

SEQ ID NO: 166956 - DNA, 765 bp, synthetic construct
  misc_feature 1..765: note = Description of Artificial Sequence: Synthetic coding sequence
  source 1..765: mol_type = other DNA
atgtctgctggaggagactttggaaaccccctgaggaagttcaagctggtgttcctgggggagcagagcgtggccaagaccagcctcatcacccgcttccgctatgacagctttgacaacacctaccaggccatcatcggcatcgacttcctgagcaagaccatgtacctggaggatggcaccatcggcctgcggctgtgggacacagctggccaggagcggctgcggagcctcatcccccgctacatccgggacagcgctgctgctgtggtggtgtatgacatcaccaacgtgaacagcttccagcagaccaccaagtggattgatgatgtgaggacagagcggggcagtgatgtgatcatcaccctggtgggcaacagaacagacctggccgacaagaggcaggtgtctgtggaggagggggagaggaaggccaagggcctgaatgtgaccttcatcgagacccgggccaaggccggctacaacgtgaagcagctgttccggcgggtggccgccgccctgcccggcatggagagcacccaggacggcagccgggaggacatgtctgacatcaagctggagaagccccaggagcagacagtgtctgagggcggctgcagctgctacagccccatgagcagcagcaccctgccccagaagccaccctacagcttcatcgactgcagcgtgaacatcggcctgaacctcttccccagcctcatcaccttctgcaacagcagcctgctgcctgtgtcctggaggtag

SEQ ID NO: 166957 - DNA, 612 bp, synthetic construct
  misc_feature 1..612: note = Description of Artificial Sequence: Synthetic coding sequence
  source 1..612: mol_type = other DNA
atgggcagccgggaccacctgttcaaggtgctggtggtgggagatgctgctgtgggcaagaccagcctggtgcagcgctacagccaggacagcttcagcaagcactacaagagcacagtgggcgtggactttgccctgaaggtgctgcagtggagcgactatgagatcgtgcggctgcagctgtgggacattgctggccaggagcgcttcacctccatgacccggctgtactacagagatgccagcgcctgcgtcatcatgtttgatgtgaccaatgccaccaccttcagcaacagccagcgctggaagcaggacctggacagcaagctgaccctgcccaacggggagcctgtgccctgcctgctgctggccaacaagtgtgacctgagcccctgggccgtgtcccgggaccagattgaccgcttcagcaaagaaaatggcttcaccggctggacagagacctctgtgaaggagaacaagaacatcaatgaggccatgagggtgctgattgagaagatgatgaggaacagcacagaggacatcatgagcctgagcacccagggcgactacatcaacctgcagaccaagagcagctcctggagctgctgctag

SEQ ID NO: 166958 - DNA, 612 bp, synthetic construct; identical to SEQ ID NO: 166957
  misc_feature 1..612: note = Description of Artificial Sequence: Synthetic coding sequence
  source 1..612: mol_type = other DNA

SEQ ID NO: 166959 - DNA, 612 bp, synthetic construct; identical to SEQ ID NO: 166957
  misc_feature 1..612: note = Description of Artificial Sequence: Synthetic coding sequence
  source 1..612: mol_type = other DNA

SEQ ID NO: 166960 - DNA, 396 bp, synthetic construct
  misc_feature 1..396: note = Description of Artificial Sequence: Synthetic coding sequence
  source 1..396: mol_type = other DNA
atgacccggctgtactacagagatgccagcgcctgcgtcatcatgtttgatgtgaccaatgccaccaccttcagcaacagccagcgctggaagcaggacctggacagcaagctgaccctgcccaacggggagcctgtgccctgcctgctgctggccaacaagtgtgacctgagcccctgggccgtgtcccgggaccagattgaccgcttcagcaaagaaaatggcttcaccggctggacagagacctctgtgaaggagaacaagaacatcaatgaggccatgagggtgctgattgagaagatgatgaggaacagcacagaggacatcatgagcctgagcacccagggcgactacatcaacctgcagaccaagagcagctcctggagctgctgctag

SEQ ID NO: 166961 - DNA, 540 bp, synthetic construct
  misc_feature 1..540: note = Description of Artificial Sequence: Synthetic coding sequence
  source 1..540: mol_type = other DNA
atgggcagccgggaccacctgttcaaggtgctggtggtgggagatgctgctgtgggcaagaccagcctggtgcagcgctacagccaggacagcttcagcaagcactacaagagcacagtgggcggccaggagcgcttcacctccatgacccggctgtactacagagatgccagcgcctgcgtcatcatgtttgatgtgaccaatgccaccaccttcagcaacagccagcgctggaagcaggacctggacagcaagctgaccctgcccaacggggagcctgtgccctgcctgctgctggccaacaagtgtgacctgagcccctgggccgtgtcccgggaccagattgaccgcttcagcaaagaaaatggcttcaccggctggacagagacctctgtgaaggagaacaagaacatcaatgaggccatgagggtgctgattgagaagatgatgaggaacagcacagaggacatcatgagcctgagcacccagggcgactacatcaacctgcagaccaagagcagctcctggagctgctgctag

SEQ ID NO: 166962 - DNA, 624 bp, synthetic construct
  misc_feature 1..624: note = Description of Artificial Sequence: Synthetic coding sequence
  source 1..624: mol_type = other DNA
atggccaagacctatgactacctgttcaagctgctgctgattggagacagcggcgtgggcaagacctgtgtgctcttccgcttctctgaagatgccttcaacagcaccttcatcagcaccatcggcatcgacttcaagatccgcaccatcgagctggatggcaagaggatcaagctgcagatctgggacacagctggccaggagcgcttccgcaccatcaccacagcctactacagaggagccatgggcatcatgctggtgtatgacatcaccaatgagaagagctttgacaacatccggaactggatccggaacatcgaggagcacgccagcgcagatgtggagaagatgatcctgggcaacaagtgtgatgtgaatgacaagaggcaggtgtccaaggagcggggggagaagctggccctggactatggcatcaagttcatggagaccagcgccaaggccaacatcaacgtggagaatgccttcttcaccctggcccgggacatcaaggccaagatggacaagaagctggagggcaacagcccccagggcagcaaccagggcgtgaagatcaccccagaccagcagaagaggagcagcttcttccgctgtgtgctgctgtag

SEQ ID NO: 166963 - DNA, 606 bp, synthetic construct
  misc_feature 1..606: note = Description of Artificial Sequence: Synthetic coding sequence
  source 1..606: mol_type = other DNA
atgtctgggaagagcctgctgctgaaggtgatcctgctgggagatggaggagtgggcaagagcagcctgatgaacagatatgtgaccaacaagtttgacagccaggccttccacaccatcggcgtggagttcctgaacagagacctggaggtggatggccgctttgtgaccctgcagatctgggacacagctggccaggagcgcttcaagagcctgcggacccccttctacagaggagctgactgctgcctgctgaccttctctgtggatgaccggcagagctttgagaacctgggcaactggcagaaggagttcatctactatgcagatgtgaaggaccctgagcacttcccctttgtggtgctgggcaacaaggtggacaaggaggaccggcaggtgaccacagaggaggcccagacctggtgcatggagaatggagactacccctacctggagaccagcgccaaggatgacaccaacgtgacagtggcctttgaggaggccgtgcggcaggtgctggccgtggaggagcagctggagcactgcatgctgggccacaccatcgacctgaacagcggcagcaaggccggcagcagctgctgctag

SEQ ID NO: 166964 - DNA, 2589 bp, synthetic construct
  misc_feature 1..2589: note = Description of Artificial Sequence: Synthetic coding sequence
  source 1..2589: mol_type = other DNA
atggcccagcccggccctgccagccagccagatgtgtccctgcagcagagggtggccgagctggagaagatcaatgctgagttcctgcgggcccagcagcagctggagcaggagttcaaccagaagagggccaagttcaaggagctgtacctggccaaggaggaggacctgaagaggcagaatgctgtgctgcaggccgcccaggatgacctgggccacctgcggacccagctgtgggaggcccaggccgagatggagaacatcaaggccatcgccaccgtgtctgagaacaccaagcaggaggccattgatgaggtgaagaggcagtggagggaggaggtggccagcctgcaggccgtgatgaaggagaccgtgcgggactatgagcaccagttccacctgcggctggagcaggagaggacccagtgggcccagtaccgggagagcgctgagcgggagattgctgacctgcggcggcggctgtctgagggccaggaggaggagaacctggagaatgagatgaagaaggcccaggaggatgctgagaagctgcggtctgtggtgatgcccatggagaaggagattgctgccctgaaggacaagctgacagaagctgaggacaagatcaaggagctggaggccagcaaggtgaaggagctgaaccactacctggaggccgagaagagctgcaggacagacctggagatgtatgtggccgtgctgaacacccagaagtctgtgctgcaggaggatgctgagaagctgaggaaggagctgcacgaggtgtgccacctgctggagcaggagcggcagcagcacaaccagctgaagcacacctggcagaaggccaatgaccagttcctggagagccagaggctgctgatgagggacatgcagaggatggagatcgtgctgaccagcgagcagctgcggcaggtggaggagctgaagaagaaggaccaggaggatgatgagcagcagaggctgaacaagaggaaggaccacaagaaggcagatgtggaggaggagatcaagatccctgtggtgtgtgccctgacccaggaggagagcagcgcccagctgagcaatgaggaggagcacctggacagcacccggggctctgtgcacagcctggatgctggcctgctgctgcccagcggggaccccttcagcaagagtgacaatgacatgttcaaggatggcctgcggcgggcccagagcacagacagcctgggcaccagcggcagcctgcagagcaaggccctgggctacaactacaaggccaagtctgctggcaacctggatgaaagtgactttggccccctggtgggcgctgacagcgtgtctgagaactttgacacagccagcctgggcagcctgcagatgcccagcggcttcatgctgaccaaggaccaggagcgggccatcaaggccatgaccccagagcaggaggagacagccagcctgctgagctctgtgacccagggcatggagagcgcctacgtgagccccagcggctaccgcctggtgtctgaaacagagtggaacctgctgcagaaggaggtgcacaatgccggcaacaagctgggcagaagatgtgacatgtgcagcaactatgagaagcagctgcagggcatccagatccaggaggccgagacccgggaccaggtgaagaagctgcagctgatgctgcggcaggccaatgaccagctggagaagaccatgaaggacaagcaggagctggaggacttcatcaagcagagcagcgaggacagcagccaccagatcagcgccctggtgctgcgggcccaggccagcgagatcctgctggaggagctgcagcagggcctgagccaggccaagagagatgtgcaggagcagatggctgtgctgatgcagagccgggagcaggtgtctgaggagctggtgcggctgcagaaggacaatgacagcctgcagggcaagcacagcctgcacgtgtccctgcagcaggccgaggacttcatcctgcctgacaccacagaggccctgcgggagctggtgctgaagtaccgggaggacatcatcaacgtgaggacagctgctgaccacgtggaggagaagctgaaggccgagatcctcttcctgaaggagcagatccaggccgagcagtgcctgaaggagaacctggaggagaccctgcagctggagattgagaactgcaaggaggagatcgccagcatcagcagcctgaaggccgagctggagcgcatcaaggtggagaagggccagctggagagcaccctgcgggagaagagccagcagctggagagcctgcaggagatcaagatcagcctggaggagcagctgaagaaggagacagctgccaaggccaccgtggagcagctgatgtttgaggagaagaacaaggcccagaggctgcagacagagctggatgtgtctgagcaggtgcagagggactttgtgaagctgagccagaccctgcaggtgcagctggagcgcatccggcaggccgacagcctggagcgcatccgggccatcctgaatgacaccaagctgacagacatcaaccagctgcctgagacctag

SEQ ID NO: 166965 - DNA, 2490 bp, synthetic construct
  misc_feature 1..2490: note = Description of Artificial Sequence: Synthetic coding sequence
  source 1..2490: mol_type = other DNA
atggcccagcccggccctgccagccagccagatgtgtccctgcagcagagggtggccgagctggagaagatcaatgctgagttcctgcgggcccagcagcagctggagcaggagttcaaccagaagagggccaagttcaaggagctgtacctggccaaggaggaggacctgaagaggcagaatgctgtgctgcaggccgcccaggatgacctgggccacctgcggacccagctgtgggaggcccaggccgagatggagaacatcaaggccatcgccaccgtgtctgagaacaccaagcaggaggccattgatgaggtgaagaggcagtggagggaggaggtggccagcctgcaggccgtgatgaaggagaccgtgcgggactatgagcaccagttccacctgcggctggagcaggagaggacccagtgggcccagtaccgggagagcgctgagcgggagattgctgacctgcggcggcggctgtctgagggccaggaggaggagaacctggagaatgagatgaagaaggcccaggaggatgctgagaagctgcggtctgtggtgatgcccatggagaaggagattgctgccctgaaggacaagctgacagaagctgaggacaagatcaaggagctggaggccagcaaggtgaaggagctgaaccactacctggaggccgagaagagctgcaggacagacctggagatgtatgtggccgtgctgaacacccagaagtctgtgctgcaggaggatgctgagaagctgaggaaggagctgcacgaggtgtgccacctgctggagcaggagcggcagcagcacaaccagctgaagcacacctggcagaaggccaatgaccagttcctggagagccagaggctgctgatgagggacatgcagaggatggagatcgtgctgaccagcgagcagctgcggcaggtggaggagctgaagaagaaggaccaggaggatgatgagcagcagaggctgaacaagaggaaggaccacaagaaggcagatgtggaggaggagatcaagatccctgtggtgtgtgccctgacccaggaggagagcagcgcccagctgagcaatgaggaggagcacctggacagcacccggggctctgtgcacagcctggatgctggcctgctgctgcccagcggggaccccttcagcaagagtgacaatgacatgttcaaggatggcctgcggcgggcccagagcacagacagcctgggcaccagcggcagcctgcagagcaaggccctgggctacaactacaaggccaagtctgctggcaacctggatgaaagtgactttggccccctggtgggcgctgacagcgtgtctgagaactttgacacagccagcctgggcagcctgcagatgcccagcggcttcatgctgaccaaggaccaggagcgggccatcaaggccatgaccccagagcaggaggagacagccagcctgctgagctctgtgacccagggcatggagagcgcctacgtgagccccagcggctaccgcctggtgtctgaaacagagtggaacctgctgcagaaggaggtgcacaatgccggcaacaagctgggcagaagatgtgacatgtgcagcaactatgagaagcagctgcagggcatccagatccaggaggccgagacccgggaccaggtgaagaagctgcagctgatgctgcggcaggccaatgaccagctggagaagaccatgaaggacaagcaggagctggaggacttcatcaagcagagcagcgaggacagcagccaccagatcagcgccctggtgctgcgggcccaggccagcgagatcctgctggaggagctgcagcagggcctgagccaggccaagagagatgtgcaggagcagatggctgtgctgatgcagagccgggagcaggtgtctgaggagctggtgcggctgcagaaggacaatgacagcctgcagggcaagcacagcctgcacgtgtccctgcagcaggccgaggacttcatcctgcctgacaccacagaggccctgcgggagctggtgctgaagtaccgggaggacatcatcaacgtgaggacagctgctgaccacgtggaggagaagctgaaggccgagatcctcttcctgaaggagcagatccaggccgagcagtgcctgaaggagaacctggaggagaccctgcagctggagattgagaactgcaaggaggagatcgccagcatcagcagcctgaaggccgagctggagcgcatcaaggtggagaagggccaggccaccgtggagcagctgatgtttgaggagaagaacaaggcccagaggctgcagacagagctggatgtgtctgagcaggtgcagagggactttgtgaagctgagccagaccctgcaggtgcagctggagcgcatccggcaggccgacagcctggagcgcatccgggccatcctgaatgacaccaagctgacagacatcaaccagctgcctgagacctag

SEQ ID NO: 166966 - DNA, 2490 bp, synthetic construct; identical to SEQ ID NO: 166965
  misc_feature 1..2490: note = Description of Artificial Sequence: Synthetic coding sequence
  source 1..2490: mol_type = other DNA

SEQ ID NO: 166967 - DNA, 2460 bp, synthetic construct
  misc_feature 1..2460: note = Description of Artificial Sequence: Synthetic coding sequence
  source 1..2460: mol_type = other DNA
atggcccagcccggccctgccagccagccagatgaggacctgaagaggcagaatgctgtgctgcaggccgcccaggatgacctgggccacctgcggacccagctgtgggaggcccaggccgagatggagaacatcaaggccatcgccaccgtgtctgagaacaccaagcaggaggccattgatgaggtgaagaggcagtggagggaggaggtggccagcctgcaggccgtgatgaaggagaccgtgcgggactatgagcaccagttccacctgcggctggagcaggagaggacccagtgggcccagtaccgggagagcgctgagcgggagattgctgacctgcggcggcggctgtctgagggccaggaggaggagaacctggagaatgagatgaagaaggcccaggaggatgctgagaagctgcggtctgtggtgatgcccatggagaaggagattgctgccctgaaggacaagctgacagaagctgaggacaagatcaaggagctggaggccagcaaggtgaaggagctgaaccactacctggaggccgagaagagctgcaggacagacctggagatgtatgtggccgtgctgaacacccagaagtctgtgctgcaggaggatgctgagaagctgaggaaggagctgcacgaggtgtgccacctgctggagcaggagcggcagcagcacaaccagctgaagcacacctggcagaaggccaatgaccagttcctggagagccagaggctgctgatgagggacatgcagaggatggagatcgtgctgaccagcgagcagctgcggcaggtggaggagctgaagaagaaggaccaggaggatgatgagcagcagaggctgaacaagaggaaggaccacaagaaggcagatgtggaggaggagatcaagatccctgtggtgtgtgccctgacccaggaggagagcagcgcccagctgagcaatgaggaggagcacctggacagcacccggggctctgtgcacagcctggatgctggcctgctgctgcccagcggggaccccttcagcaagagtgacaatgacatgttcaaggatggcctgcggcgggcccagagcacagacagcctgggcaccagcggcagcctgcagagcaaggccctgggctacaactacaaggccaagtctgctggcaacctggatgaaagtgactttggccccctggtgggcgctgacagcgtgtctgaaaattttgacacagccagcctgggcagcctgcagatgcccagcggcttcatgctgaccaaggaccaggagcgggccatcaaggccatgaccccagagcaggaggagacagccagcctgctgagctctgtgacccagggcatggagagcgcctacgtgagccccagcggctaccgcctggtgtctgaaacagagtggaacctgctgcagaaggaggtgcacaatgccggcaacaagctgggccgccgctgtgacatgtgcagcaactatgagaagcagctgcagggcatccagatccaggaggccgagacccgggaccaggtgaagaagctgcagctgatgctgcggcaggccaatgaccagctggagaagaccatgaaggacaagcaggagctggaggacttcatcaagcagagcagcgaggacagcagccaccagatcagcgccctggtgctgcgggcccaggccagcgagatcctgctggaggagctgcagcagggcctgagccaggccaagagagatgtgcaggagcagatggctgtgctgatgcagagccgggagcaggtgtctgaggagctggtgcggctgcagaaggacaatgacagcctgcagggcaagcacagcctgcacgtgtccctgcagcaggccgaggacttcatcctgcctgacaccacagaggccctgcgggagctggtgctgaagtaccgggaggacatcatcaacgtgaggacagctgctgaccacgtggaggagaagctgaaggccgagatcctcttcctgaaggagcagatccaggccgagcagtgcctgaaggagaacctggaggagaccctgcagctggagattgagaactgcaaggaggagatcgccagcatcagcagcctgaaggccgagctggagcgcatcaaggtggagaagggccagctggagagcaccctgcgggagaagagccagcagctggagagcctgcaggagatcaagatcagcctggaggagcagctgaagaaggagacagctgccaaggccaccgtggagcagctgatgtttgaggagaagaacaaggcccagaggctgcagacagagctggatgtgtctgagcaggtgcagagggactttgtgaagctgagccagaccctgcaggtgcagctggagcgcatccggcaggccgacagcctggagcgcatccgggccatcctgaatgacaccaagctgacagacatcaaccagctgcctgagacctag

SEQ ID NO: 166968 - DNA, 2151 bp, synthetic construct
  misc_feature 1..2151: note = Description of Artificial Sequence: Synthetic coding sequence
  source 1..2151: mol_type = other DNA
atggcccagcccggccctgccagccagccagatgtgtccctgcagcagagggtggccgagctggagaagatcaatgctgagttcctgcgggcccagcagcagctggagcaggagttcaaccagaagagggccaagttcaaggagctgtacctggccaaggaggaggacctgaagaggcagaatgctgtgctgcaggccgcccaggatgacctgggccacctgcggacccagctgtgggaggcccaggccgagatggagaacatcaaggccatcgccaccgtgtctgagaacaccaagcaggaggccattgatgaggtgaagaggcagtggagggaggaggtggccagcctgcaggccgtgatgaaggagaccgtgcgggactatgagcaccagttccacctgcggctggagcaggagaggacccagtgggcccagtaccgggagagcgctgagcgggagattgctgacctgcggcggcggctgtctgagggccaggaggaggagaacctggagaatgagatgaagaaggcccaggaggatgctgagaagctgcggtctgtggtgatgcccatggagaaggagattgctgccctgaaggacaagctgacagaagctgaggacaagatcaaggagctggaggccagcaaggtgaaggagctgaaccactacctggaggccgagaagagctgcaggacagacctggagatgtatgtggccgtgctgaacacccagaagtctgtgctgcaggaggatgctgagaagctgaggaaggagctgcaccaggagcggcagcagcacaaccagctgaagcacacctggcagaaggccaatgaccagttcctggagagccagaggctgctgatgagggacatgcagaggatggagatcgtgctgaccagcgagcagctgcggcaggtggaggagctgaagaagaaggaccaggaggatgatgagcagcagaggctgaacaagaggaaggaccacaagaaggcagatgtggaggaggagatcaagatccctgtggtgtgtgccctgacccaggaggagagcagcgcccagctgagcaatgaggaggagcacctggacagcacccggggctctgtgcacagcctggatgctggcctgctgctgcccagcggggaccccttcagcaagagtgacaatgacatgttcaaggatggcctgcggcgggcccagagcacagacagcctgggcaccagcggcagcctgcagagcaaggccctgggctacaactacaaggccaagtctgctggcaacctggatgaaagtgactttggccccctggtgggcgctgacagcgtgtctgaaaattttgacacagccagcctgggcagcctgcagatgcccagcggcttcatgctgaccaaggaccaggagcgggccatcaaggccatgaccccagagcaggaggagacagccagcctgctgagctctgtgacccagggcatggagagcgcctacgtgagccccagcggctaccgcctggtgtctgaaacagagtggaacctgctgcagaaggaggtgcacaatgccggcaacaagctgggccgccgctgtgacatgtgcagcaactatgagaagcagctgcagggcatccagatccaggaggccgagacccgggaccaggtgaagaagctgcagctgatgctgcggcaggccaatgaccagctggagaagaccatgaaggacaagcaggagctggaggacttcatcaagcagagcagcgaggacagcagccaccagatcagcgccctggtgctgcgggcccaggccagcgagatcctgctggaggagctgcagcagggcctgagccaggccaagagagatgtgcaggagcagatggctgtgctgatgcagagccgggagcaggtgtctgaggagctggtgcggctgcagaaggacaatgacagcctgcagggcaagcacagcctgcacgtgtccctgcagcaggccgaggacttcatcctgcctgacaccacagaggccctgcgggagctggtgctgaagtaccgggaggacatcatcaacgtgaggacagctgctgaccacgtggaggagaagctgaaggccgagatcctcttcctgaaggagcagatccaggccgagcagtgcctgaagaagaagaagtag

SEQ ID NO: 166969 - DNA, 2589 bp, synthetic construct; identical to SEQ ID NO: 166964
  misc_feature 1..2589: note = Description of Artificial Sequence: Synthetic coding sequence
  source 1..2589: mol_type = other DNA

SEQ ID NO: 166970 - DNA, 1602 bp, synthetic construct
  misc_feature 1..1602: note = Description of Artificial Sequence: Synthetic coding sequence
  source 1..1602: mol_type = other DNA
atggctgctgctgcccctgtggccgcagatgatgatgagaggagaagaagacctggggccgccctggaggacagccgcagccaggagggcgccaacggggaggccgagagcggggagctgagccggctgcgggcagagctggccggggccctggccgagatggagaccatgaaggctgtggccgaggtgtctgagagcaccaaggccgaggccgtggccgctgtgcagaggcagtgccaggaggaggtggccagcctgcaggccatcctgaaggacagcatcagcagctatgaggcccagatcacagccctgaagcaggagcggcagcagcagcagcaggactgtgaggagaaggagcgggagctgggccgcctgaagcagctgctgagccgggcctaccccctggacagcctggagaagcagatggagaaggcccatgaagattctgagaagctgcgggagatcgtgctgcccatggagaaggagattgaggagctgaaggccaagctgctgcgggcagaggagctgatccaggagatccagaggcggcccaggcatgcccccagcctgcacggcagcacagagctgctgcccctgagccgggaccccagcccccccctggagcccctggaggagctgtctggagatggcggccctgctgctgaggcctttgcccacaactgtgatgattctgccagcatcagcagcttcagcctgggcggcggcgtgggcagcagcagcagcctgccccagagccggcagggcctgagccctgagcaggaggagacagccagcctggtgtccacaggcaccctggtgcctgagggcatctacctgcccccacctggctaccagctggtgcctgacacccagtgggagcagctgcagacagagatgcaggtgctgctggcccaggtgcagaacagcgagcagctgctgcggaccctgcagggcaccgtgtcccaggcccaggagcgggtgcagctgcagatggccgagctggtgaccacccacaagtgcctgcaccacgaggtgaagaggctgaatgaggagaaccagggcctgcgggcagagcagctgcccagcagcgccccccagggcagccagcaggagcagggcgaggaggagagcctgcccagctctgtgcctgagctgcagcagctgctgtgctgcacccggcaggaggcccgggcccggctgcaggcccaggagcacggggctgagcggctgcgcatcgagatcgtgaccctgcgggaggccctggaggaggagaccgtggcccgggccagcctggagggccagctgcgggtgcagcgggaggagacagccagcctgtgcagcctgaggacagagatggagcgggtgcagcaggagcagagcaaggcccagctgcctgacctgctgtctgagcagagggccaaggtgctgcggctgcaggccgagctggagaccagcgagcaggtgcagagggactttgtgcggctgagccaggccctgcaggtgcggctggagcgcatccggcaggccgagaccctggagcaggtgcgcagcatcatggatgaggcccccctgacagatgtgcgggacatcaaggacacctag

SEQ ID NO: 166971 - DNA, 1710 bp, synthetic construct
  misc_feature 1..1710: note = Description of Artificial Sequence: Synthetic coding sequence
  source 1..1710: mol_type = other DNA
atggctgctgctgcccctgtggccgcagatgatgatgagaggagaagaagacctggggccgccctggaggacagccgcagccaggagggcgccaacggggaggccgagagcggggagctgagccggctgcgggcagagctggccggggccctggccgagatggagaccatgaaggctgtggccgaggtgtctgagagcaccaaggccgaggccgtggccgctgtgcagaggcagtgccaggaggaggtggccagcctgcaggccatcctgaaggacagcatcagcagctatgaggcccagatcacagccctgaagcaggagcggcagcagcagcagcaggactgtgaggagaaggagcgggagctgggccgcctgaagcagctgctgagccgggcctaccccctggacagcctggagaagcagatggagaaggcccatgaagattctgagaagctgcgggagatcgtgctgcccatggagaaggagattgaggagctgaaggccaagctgctgcgggcagaggagctgatccaggagatccagaggcggcccaggcatgcccccagcctgcacggcagcacagagctgctgcccctgagccgggaccccagcccccccctggagcccctggaggagctgtctggagatggcggccctgctgctgaggcctttgcccacaactgtgatgattctgccagcatcagcagcttcagcctgggcggcggcgtgggcagcagcagcagcctgccccagagccggcagggcctgagccctgagcaggaggagacagccagcctggtgtccacaggcaccctggtgcctgagggcatctacctgcccccacctggctaccagctggtgcctgacacccagtgggagcagctgcagacagagggccggcagctgcagaaggacctggagagcgtgtcccgggagagagatgagctgcaggagggcctgcggcgcagcaatgaagactgtgccaagcagatgcaggtgctgctggcccaggtgcagaacagcgagcagctgctgcggaccctgcagggcaccgtgtcccaggcccaggagcgggtgcagctgcagatggccgagctggtgaccacccacaagtgcctgcaccacgaggtgaagaggctgaatgaggagaaccagggcctgcgggcagagcagctgcccagcagcgccccccagggcagccagcaggagcagggcgaggaggagagcctgcccagctctgtgcctgagctgcagcagctgctgtgctgcacccggcaggaggcccgggcccggctgcaggcccaggagcacggggctgagcggctgcgcatcgagatcgtgaccctgcgggaggccctggaggaggagaccgtggcccgggccagcctggagggccagctgcgggtgcagcgggaggagacagaggtgctggaggccagcctgtgcagcctgaggacagagatggagcgggtgcagcaggagcagagcaaggcccagctgcctgacctgctgtctgagcagagggccaaggtgctgcggctgcaggccgagctggagaccagcgagcaggtgcagagggactttgtgcggctgagccaggccctgcaggtgcggctggagcgcatccggcaggccgagaccctggagcaggtgcgcagcatcatggatgaggcccccctgacagatgtgcgggacatcaaggacacctag

SEQ ID NO: 166972 - DNA, 1497 bp, synthetic construct
  misc_feature 1..1497: note = Description of Artificial Sequence: Synthetic coding sequence
  source 1..1497: mol_type = other DNA
atggctgctgctgcccctgtggccgcagatgatgatgagaggagaagaagacctggagctgacagcatcagcagctatgaggcccagatcacagccctgaagcaggagcggcagcagcagcagcaggactgtgaggagaaggagcgggagctgggccgcctgaagcagctgctgagccgggcctaccccctggacagcctggagaagcagatggagaaggcccacgaggacagcgagaagctgcgggagatcgtgctgcccatggagaaggagattgaggagctgaaggccaagctgctgcgggcagaggagctgatccaggagatccagaggcggcccaggcatgcccccagcctgcacggcagcacagagctgctgcccctgagccgggaccccagcccccccctggagcccctggaggagctgtctggagatggcggccctgctgctgaggcctttgcccacaactgtgatgacagcgccagcatcagcagcttcagcctgggcggcggcgtgggcagcagcagcagcctgccccagagccggcagggcctgagccctgagcaggaggagacagccagcctggtgtccacaggcaccctggtgcctgagggcatctacctgcccccacctggctaccagctggtgcctgacacccagtgggagcagctgcagacagagggccggcagctgcagaaggacctggagagcgtgtcccgggagagagatgagctgcaggagggcctgcggcgcagcaatgaagactgtgccaagcagatgcaggtgctgctggcccaggtgcagaacagcgagcagctgctgcggaccctgcagggcaccgtgtcccaggcccaggagcgggtgcagctgcagatggccgagctggtgaccacccacaagtgcctgcaccacgaggtgaagaggctgaatgaggagaaccagggcctgcgggcagagcagctgcccagcagcgccccccagggcagccagcaggagcagggcgaggaggagagcctgcccagctctgtgcctgagctgcagcagctgctgtgctgcacccggcaggaggcccgggcccggctgcaggcccaggagcacggggctgagcggctgagaattgaaattgtgaccctgcgggaggccctggaggaggagaccgtggcccgggccagcctggagggccagctgcgggtgcagcgggaggagacagaggtgctggaggccagcctgtgcagcctgaggacagagatggagcgggtgcagcaggagcagagcaaggcccagctgcctgacctgctgtctgagcagagggccaaggtgctgcggctgcaggccgagctggagaccagcgagcaggtgcagagggactttgtgcggctgagccaggccctgcaggtgcggctggagcgcatccggcaggccgagaccctggagcaggtgcgcagcatcatggatgaggcccccctgacagatgtgcgggacatcaaggacacctag

SEQ ID NO: 166973 - DNA, 2085 bp, synthetic construct
  misc_feature 1..2085: note = Description of Artificial Sequence: Synthetic coding sequence
  source 1..2085: mol_type = other DNA
atgacagacaccgtcttcagcaacagcagcaaccgctggatgtaccccagcgaccggcccctgcagagcaatgacaaggagcagctgcaggccggctggagcgtgcaccctgggggccagcctgaccggcagaggaagcaggaggagctgacagatgaggagaaggagatcatcaacagagtcatcgcccgggcagagaagatggaggagatggagcaggagcgcatcggccgcctggtggaccggctggagaacatgaggaagaatgtggccggagatggagtgaaccgctgcatcctgtgtggggagcagctgggcatgctgggcagcgcctgtgtggtgtgtgaggactgcaagaagaatgtgtgcaccaagtgtggggtggagaccaacaaccggctgcacagcgtgtggctgtgcaagatctgcatcgagcagcgggaggtgtggaagaggtctggggcctggttcttcaagggcttccccaagcaggtgctgccccagcccatgcccatcaagaagaccaagccccagcagcctgtgtctgagcctgctgcccctgagcagcctgcccctgagcccaagcacccagcccgggccccagcccggggggacagtgaagatagaagaggccctggccagaagacaggccctgaccctgccagcgcccctggccggggcaactacggcccccctgtgcggcgggccagcgaggccaggatgagcagcagcagccgggacagcgagagctgggaccacagcggcggggccggggacagcagccgcagccctgctggcctgcggcgggccaacagcgtgcaggccagcaggcctgcccctggctctgtgcagagccctgccccaccccagcccggccagcccggcaccccaggcggcagccggcccggccctggccctgctggccgcttcccagaccagaagccagaggtggcccccagcgaccccggcaccacagccccaccccgggaggagaggactggaggagtgggcggctacccagctgtgggcgcccgggaggacaggatgagccaccccagcggcccctacagccaggccagcgctgctgccccccagcctgctgctgcccggcagcccccacctcctgaggaggaggaggaggaggccaacagctatgacagtgatgaggccaccaccctgggcgccctggagttcagcctgctgtatgaccaggacaacagcagcctgcagtgcaccatcatcaaggccaagggcctgaagcccatggacagcaatggcctggccgacccctacgtgaagctgcacctgctgcccggggccagcaagagcaacaagctgcggaccaagaccctgaggaacaccaggaaccccatctggaatgagaccctggtgtaccacggcatcacagatgaggacatgcagaggaagaccctgcgcatctctgtgtgtgatgaggacaagtttggccacaatgagttcatcggggagacccgcttcagcctgaagaagctgaagcccaaccagaggaagaacttcaacatctgcctggagagggtcatccccatgaagagagctggcaccaccggcagcgcccggggcatggccctgtatgaggaggagcaggtggagcgggtgggggacatcgaggagcggggcaagatcctggtgtccctgatgtacagcacccagcagggcggcctcatcgtgggcatcatccgctgtgtgcacctggccgccatggatgccaacggctacagcgacccctttgtgaagctgtggctgaagccagacatgggcaagaaggccaagcacaagacccagatcaagaagaagaccctgaaccctgagttcaatgaggagttcttctatgacatcaagcacagcgacctggccaagaagagcctggacatctctgtgtgggactatgacatcggcaagagcaatgactacatcggcggctgccagctgggcatcagcgccaagggggagcggctgaagcactggtatgagtgcctgaagaacaaggacaagaagattgagcgctggcaccagctgcagaatgaaaaccacgtgtccagtgactag

SEQ ID NO: 166974 - DNA, 2085 bp, synthetic construct; identical to SEQ ID NO: 166973
  misc_feature 1..2085: note = Description of Artificial Sequence: Synthetic coding sequence
  source 1..2085: mol_type = other DNA

SEQ ID NO: 166975 - DNA, 2085 bp, synthetic construct; identical to SEQ ID NO: 166973
  misc_feature 1..2085: note = Description of Artificial Sequence: Synthetic coding sequence
  source 1..2085: mol_type = other DNA

SEQ ID NO: 166976 - DNA, 1938 bp, synthetic construct
  misc_feature 1..1938: note = Description of Artificial Sequence: Synthetic coding sequence
  source 1..1938: mol_type = other DNA
atgacagacaccgtcttcagcaacagcagcaaccgctggatgtaccccagcgaccggcccctgcagagcaagctgaaggaccggcggctggtggaccggctggagaacatgaggaagaatgtggccggagatggagtgaaccgctgcatcctgtgtggggagcagctgggcatgctgggcagcgcctgtgtggtgtgtgaggactgcaagaagaatgtgtgcaccaagtgtggggtggagaccaacaaccggctgcacagcgtgtggctgtgcaagatctgcatcgagcagcgggaggtgtggaagaggtctggggcctggttcttcaagggcttccccaagcaggtgctgccccagcccatgcccatcaagaagaccaagccccagcagcctgtgtctgagcctgctgcccctgagcagcctgcccctgagcccaagcacccagcccgggccccagcccggggggacagcgaggaccggcggggccctggccagaagacaggccctgaccctgccagcgcccctggccggggcaactacggcccccctgtgagaagagccagcgaggccaggatgagcagcagcagccgggacagcgagagctgggaccacagcggcggggccggggacagcagccgcagccctgctggcctgcggcgggccaacagcgtgcaggccagcaggcctgcccctggctctgtgcagagccctgccccaccccagcccggccagcccggcacccctgggggcagcaggcctggccctggccctgctggccgcttcccagaccagaagccagaggtggcccccagcgaccccggcaccacagccccaccccgggaggagaggactggaggagtgggcggctacccagctgtgggcgcccgggaggacaggatgagccaccccagcggcccctacagccaggccagcgctgctgccccccagcctgctgctgcccggcagcccccacctcctgaggaggaggaggaggaggccaacagctatgacagtgatgaggccaccaccctgggcgccctggagttcagcctgctgtatgaccaggacaacagcagcctgcagtgcaccatcatcaaggccaagggcctgaagcccatggacagcaatggcctggccgacccctacgtgaagctgcacctgctgcccggggccagcaagagcaacaagctgcggaccaagaccctgaggaacaccaggaaccccatctggaatgagaccctggtgtaccacggcatcacagatgaggacatgcagaggaagaccctgcgcatctctgtgtgtgatgaggacaagtttggccacaatgagttcatcggggagacccgcttcagcctgaagaagctgaagcccaaccagaggaagaacttcaacatctgcctggagagggtcatccccatgaagagagctggcaccactggaagtgcccggggcatggccctgtatgaggaggagcaggtggagcgggtgggggacatcgaggagcggggcaagatcctggtgtccctgatgtacagcacccagcagggcggcctgattgtgggcatcatccgctgtgtgcacctggccgccatggatgccaacggctacagcgacccctttgtgaagctgtggctgaagccagacatgggcaagaaggccaagcacaagacccagatcaagaagaagaccctgaaccctgagttcaatgaggagttcttctatgacatcaagcacagcgacctggccaagaagagcctggacatctctgtgtgggactatgacatcggcaagagcaatgactacatcggcggctgccagctgggcatcagcgccaagggggagcggctgaagcactggtatgaatgtctgaagaacaaggacaagaagattgagcgctggcaccagctgcagaatgaaaatcatgtgtccagtgactag

SEQ ID NO: 166977 - DNA, 2085 bp, synthetic construct; identical to SEQ ID NO: 166973
  misc_feature 1..2085: note = Description of Artificial Sequence: Synthetic coding sequence
  source 1..2085: mol_type = other DNA

SEQ ID NO: 166978 - DNA, 39 bp, synthetic construct
  misc_feature 1..39: note = Description of Artificial Sequence: Synthetic coding sequence
  source 1..39: mol_type = other DNA
atgacagacaccgtcttcagcaacagcagcaacagatag

SEQ ID NO: 166979 - DNA, 252 bp, synthetic construct
  misc_feature 1..252: note = Description of Artificial Sequence: Synthetic coding sequence
  source 1..252: mol_type = other DNA
atgacagacaccgtcttcagcaacagcagcaaccgctggatgtaccccagcgaccggcccctgcagagcaatgacaaggagcagctgcaggccggctggagcgtgcaccctgggggccagcctgaccggcagaggaagcaggaggagctgacagatgaggagaaggagatcatcaacagagtcatcgcccgggcagagaagatggaggagatggagcaggagcgcatcggccgcctggtggaccggctgtag

SEQ ID NO: 166980 - DNA, 285 bp, synthetic construct
  misc_feature 1..285: note = Description of Artificial Sequence: Synthetic coding sequence
  source 1..285: mol_type = other DNA
atgacagacaccgtcttcagcaacagcagcaaccgctggatgtaccccagcgaccggcccctgcagagcaatgacaaggagcagctgcaggccggctggagcgtgcaccctgggggccagcctgaccggcagaggaagcaggaggagctgacagatgaggagaaggagatcatcaacagagtcatcgcccgggcagagaagatggaggagatggagcaggagcgcatcggccgcctggtggaccggctggagaacatgaggaagaatgtggccggagatggatag

SEQ ID NO: 166981 - DNA, 492 bp, synthetic construct
  misc_feature 1..492: note = Description of Artificial Sequence: Synthetic coding sequence
  source 1..492: mol_type = other DNA
atgacagacaccgtcttcagcaacagcagcaaccgctggatgtaccccagcgaccggcccctgcagagcaatgacaaggagcagctgcaggccggctggagcgtgcaccctgggggccagcctgaccggcagaggaagcaggaggagctgacagatgaggagaaggagatcatcaacagagtcatcgcccgggcagagaagatggaggagatggagcaggagcgcatcggccgcctggtggaccggctggagaacatgaggaagaatgtggccggagatggagtgaaccgctgcatcctgtgtggggagcagctgggcatgctgggcagcgcctgtgtggtgtgtgaggactgcaagaagaatgtgtgcaccaagtgtggggtggagaccaacaaccggctgcacagcgtgtggctgtgcaagatctgcatcgagcagcgggaggtgtggaagaggtctggggcctggttcttcaagggcttccccaagtag

SEQ ID NO: 166982 - DNA, 384 bp, synthetic construct
  misc_feature 1..384: note = Description of Artificial Sequence: Synthetic coding sequence
  source 1..384: mol_type = other DNA
atgacagacaccgtcttcagcaacagcagcaaccgctggatgtaccccagcgaccggcccctgcagagcaatgacaaggagcagctgcaggccggctggagcgtgcaccctgggggccagcctgaccggcagaggaagcaggaggagctgacagatgaggagaaggagatcatcaacagagtcatcgcccgggcagagaagatggaggagatggagcaggagcgcatcggccgcctggtggaccggctggagaacatgaggaagaatgtggccggagatggagtgaaccgctgcatcctgtgtggggagcagctgggcatgctgggcagcgcctgtgtggtgtgtgaggactgcaagaagaatgtgtgcaccaagtgtggctag

SEQ ID NO: 166983 - DNA, 315 bp, synthetic construct
  misc_feature 1..315: note = Description of Artificial Sequence: Synthetic coding sequence
  source 1..315: mol_type = other DNA
atgacagacaccgtcttcagcaacagcagcaaccgctggatgtaccccagcgaccggcccctgcagagcaatgacaaggagcagctgcaggccggctggagcgtgcaccctgggggccagcctgaccggcagaggaagcaggaggagctgacagatgaggagaaggagatcatcaacagagtcatcgcccgggcagagaagatggaggagatggagcaggagcgcatcggccgcctggtggaccggctggagaacatgaggaagaatgtggccggagatggagtgaaccgctgcatcctgtgtggggagcagtag

SEQ ID NO: 166984 - DNA, 120 bp, synthetic construct
  misc_feature 1..120: note = Description of Artificial Sequence: Synthetic coding sequence
  source 1..120: mol_type = other DNA
atgacagacaccgtcttcagcaacagcagcaaccgctggatgtaccccagcgaccggcccctgcagagcaatgacaaggagcagctgcaggccggctggagcgtgcaccctgggggctag

SEQ ID NO: 166985 - DNA, 348 bp, synthetic construct
  misc_feature 1..348: note = Description of Artificial Sequence: Synthetic coding sequence
  source 1..348: mol_type = other DNA
atgacagacaccgtcttcagcaacagcagcaaccgctggatgtaccccagcgaccggcccctgcagagcaatgacaaggagcagctgcaggccggctggagcgtgcaccctgggggccagcctgaccggcagaggaagcaggaggagctgacagatgaggagaaggagatcatcaacagagtcatcgcccgggcagagaagatggaggagatggagcaggagcgcatcggccgcctggtggaccggctggagaacatgaggaagaatgtggccggagatggagtgaaccgctgcatcctgtgtggggagcagctgggcatgctgggcagcgcctgtgtggtgtgctag

SEQ ID NO: 166986 - DNA, 2073 bp, synthetic construct
  misc_feature 1..2073: note = Description of Artificial Sequence: Synthetic coding sequence
  source 1..2073: mol_type = other DNA
atgacagacaccgtcttcagcaacagcagcaaccgctggatgtaccccagcgaccggcccctgcagagcaagctgcaggccggctggagcgtgcaccctgggggccagcctgaccggcagaggaagcaggaggagctgacagatgaggagaaggagatcatcaacagagtcatcgcccgggcagagaagatggaggagatggagcaggagcgcatcggccgcctggtggaccggctggagaacatgaggaagaatgtggccggagatggagtgaaccgctgcatcctgtgtggggagcagctgggcatgctgggcagcgcctgtgtggtgtgtgaggactgcaagaagaatgtgtgcaccaagtgtggggtggagaccaacaaccggctgcacagcgtgtggctgtgcaagatctgcatcgagcagcgggaggtgtggaagaggtctggggcctggttcttcaagggcttccccaagcaggtgctgccccagcccatgcccatcaagaagaccaagccccagcagcctgtgtctgagcctgctgcccctgagcagcctgcccctgagcccaagcacccagcccgggccccagcccggggggacagtgaagatagaagaggccctggccagaagacaggccctgaccctgccagcgcccctggccggggcaactacggcccccctgtgcggcgggccagcgaggccaggatgagcagcagcagccgggacagcgagagctgggaccacagcggcggggccggggacagcagccgcagccctgctggcctgcggcgggccaacagcgtgcaggccagcaggcctgcccctggctctgtgcagagccctgccccaccccagcccggccagcccggcaccccaggcggcagccggcccggccctggccctgctggccgcttcccagaccagaagccagaggtggcccccagcgaccccggcaccacagccccaccccgggaggagaggactggaggagtgggcggctacccagctgtgggcgcccgggaggacaggatgagccaccccagcggcccctacagccaggccagcgctgctgccccccagcctgctgctgcccggcagcccccacctcctgaggaggaggaggaggaggccaacagctatgacagtgatgaggccaccaccctgggcgccctggagttcagcctgctgtatgaccaggacaacagcagcctgcagtgcaccatcatcaaggccaagggcctgaagcccatggacagcaatggcctggccgacccctacgtgaagctgcacctgctgcccggggccagcaagagcaacaagctgcggaccaagaccctgaggaacaccaggaaccccatctggaatgagaccctggtgtaccacggcatcacagatgaggacatgcagaggaagaccctgcgcatctctgtgtgtgatgaggacaagtttggccacaatgagttcatcggggagacccgcttcagcctgaagaagctgaagcccaaccagaggaagaacttcaacatctgcctggagagggtcatccccatgaagagagctggcaccaccggcagcgcccggggcatggccctgtatgaggaggagcaggtggagcgggtgggggacatcgaggagcggggcaagatcctggtgtccctgatgtacagcacccagcagggcggcctcatcgtgggcatcatccgctgtgtgcacctggccgccatggatgccaacggctacagcgacccctttgtgaagctgtggctgaagccagacatgggcaagaaggccaagcacaagacccagatcaagaagaagaccctgaaccctgagttcaatgaggagttcttctatgacatcaagcacagcgacctggccaagaagagcctggacatctctgtgtgggactatgacatcggcaagagcaatgactacatcggcggctgccagctgggcatcagcgccaagggggagcggctgaagcactggtatgagtgcctgaagaacaaggacaagaagattgagcgctggcaccagctgcagaatgaaaaccacgtgtccagtgactag

SEQ ID NO: 166987 - DNA, 378 bp, synthetic construct
  misc_feature 1..378: note = Description of Artificial Sequence: Synthetic coding sequence
  source 1..378: mol_type = other DNA
atgacagacaccgtcttcagcaacagcagcaaccgctggatgtaccccagcgaccggcccctgcagagcaatgacaaggagcagctgcaggccggctggagcgtgcaccctgggggccagcctgaccggcagaggaagcaggaggagctgacagatgaggagaaggagatcatcaacagagtcatcgcccgggcagagaagatggaggagatggagcaggagcgcatcggccgcctggtggaccggctggagaacatgaggaagaatgtggccggagatggagtgaaccgctgcatcctgtgtggggagcagctgggcatgctgggcagcgcctgtgtggtgtgtgaggactgcaagaagaatgtgtgcaccaagtag

SEQ ID NO: 166988 - DNA, 546 bp, synthetic construct
  misc_feature 1..546: note = Description of Artificial Sequence: Synthetic coding sequence
  source 1..546: mol_type = other DNA
atgacagacaccgtcttcagcaacagcagcaaccgctggatgtaccccagcgaccggcccctgcagagcaatgacaaggagcagctgcaggccggctggagcgtgcaccctgggggccagcctgaccggcagaggaagcaggaggagctgacagatgaggagaaggagatcatcaacagagtcatcgcccgggcagagaagatggaggagatggagcaggagcgcatcggccgcctggtggaccggctggagaacatgaggaagaatgtggccggagatggagtgaaccgctgcatcctgtgtggggagcagctgggcatgctgggcagcgcctgtgtggtgtgtgaggactgcaagaagaatgtgtgcaccaagtgtggggtggagaccaacaaccggctgcacagcgtgtggctgtgcaagatctgcatcgagcagcgggaggtgtggaagaggtctggggcctggttcttcaagggcttccccaagcaggtgctgccccagcccatgcccatcaagaagaccaagccccagcagcctgtgtag

SEQ ID NO: 166989 - DNA, 285 bp, synthetic construct; identical to SEQ ID NO: 166980
  misc_feature 1..285: note = Description of Artificial Sequence: Synthetic coding sequence
  source 1..285: mol_type = other DNA

SEQ ID NO: 166990 - DNA, 363 bp, synthetic construct
  misc_feature 1..363: note = Description of Artificial Sequence: Synthetic coding sequence
  source 1..363: mol_type = other DNA
atgacagacaccgtcttcagcaacagcagcaaccgctggatgtaccccagcgaccggcccctgcagagcaatgacaaggagcagctgcaggccggctggagcgtgcaccctgggggccagcctgaccggcagaggaagcaggaggagctgacagatgaggagaaggagatcatcaacagagtcatcgcccgggcagagaagatggaggagatggagcaggagcgcatcggccgcctggtggaccggctggagaacatgaggaagaatgtggccggagatggagtgaaccgctgcatcctgtgtggggagcagctgggcatgctgggcagcgcctgtgtggtgtgtgaggactgcaagaagtag

SEQ ID NO: 166991 - DNA, 405 bp, synthetic construct
  misc_feature 1..405: note = Description of Artificial Sequence: Synthetic coding sequence
  source 1..405: mol_type = other DNA
atgacagacaccgtcttcagcaacagcagcaaccgctggatgtaccccagcgaccggcccctgcagagcaatgacaaggagcagctgcaggccggctggagcgtgcaccctgggggccagcctgaccggcagaggaagcaggaggagctgacagatgaggagaaggagatcatcaacagagtcatcgcccgggcagagaagatggaggagatggagcaggagcgcatcggccgcctggtggaccggctggagaacatgaggaagaatgtggccggagatggagtgaaccgctgcatcctgtgtggggagcagctgggcatgctgggcagcgcctgtgtggtgtgtgaggactgcaagaagaatgtgtgcaccaagtgtggggtggagaccaacaaccggctgtag

SEQ ID NO: 166992 - DNA, 948 bp, synthetic construct
  misc_feature 1..948: note = Description of Artificial Sequence: Synthetic coding sequence
  source 1..948: mol_type = other DNA
atggctgacaccatcttcggcagcggaaatgaccagtgggtgtgccccaatgaccggcagctggccctgcgggccaagctgcagacaggctggagcgtgcacacctaccagacagagaagcagaggaggaagcagcacctgagccctgctgaggtggaggccatcctgcaggtgatccagagagctgagcggctggatgtgctggagcagcagagaattggccgcctggtggagcggctggagaccatgagaagaaatgtgatgggaaatggcctgagccagtgcctgctgtgtggggaggtgctgggcttcctgggcagcagctctgtgttctgcaaggactgcaggaagaaggtgtgcaccaagtgtggcatcgaggccagccctggccagaagaggcccctgtggctgtgcaagatctgcagcgagcagcgggaggtgtggaagaggtctggggcctggttctacaagggcctgcccaagtacatcctgcccctgaagaccccaggccgggcagatgacccccacttccggcccctgcccacagagcctgctgagcgggagcccaggagcagcgagaccagccgcatctacacctgggcccggggccgggtggtgtccagtgacagcgacagcgacagcgacctgagcagcagcagcctggaggaccggctgcccagcactggagtgcgggacaggaagggggacaagccctggaaggagagcggcggctctgtggaggcccccaggatgggcttcacccaccccccaggccacctgagcggctgccagagcagcctggccagcggggagaccggcaccggcagcgctgaccccccaggcggccccaggcctggcctgacccggcgggcccctgtgaaggacaccccaggccgggccccagctgctgatgctgccccagctggccccagcagctgcctgggctag

SEQ ID NO: 166993 - DNA, 861 bp, synthetic construct
  misc_feature 1..861: note = Description of Artificial Sequence: Synthetic coding sequence
  source 1..861: mol_type = other DNA
atggctgacaccatcttcggcagcggaaatgaccagtgggtgtgccccaatgaccggcagctggccctgcgggccaagctgcagacaggctggagcgtgcacacctaccagacagagaagcagaggaggaagcagcacctgagccctgctgaggtggaggccatcctgcaggtgatccagagagctgagcggctggatgtgctggagcagcagagaattggccgcctggtggagcggctggagaccatgagaagaaatgtgatgggaaatggcctgagccagtgcctgctgtgtggggaggtgctgggcttcctgggcagcagctctgtgttctgcaaggactgcaggaaggtgtggaagaggtctggggcctggttctacaagggcctgcccaagtacatcctgcccctgaagaccccaggccgggcagatgacccccacttccggcccctgcccacagagcctgctgagcgggagcccaggagcagcgagaccagccgcatctacacctgggcccggggccgggtggtgtccagtgacagcgacagcgacagcgacctgagcagcagcagcctggaggaccggctgcccagcactggagtgcgggacagaaaaggagacaagccctggaaggagagcggcggctctgtggaggcccccaggatgggcttcacccaccccccaggccacctgagcggctgccagagcagcctggccagcggggagactggaactggatctgctgaccccccaggcggcccccggcccggcctgacccggcgggcccctgtgaaggacaccccaggccgggccccagctgctgatgctgccccagctggccccagcagctgcctgggctag

SEQ ID NO: 166994 - DNA, 861 bp, synthetic construct; identical to SEQ ID NO: 166993
  misc_feature 1..861: note = Description of Artificial Sequence: Synthetic coding sequence
  source 1..861: mol_type = other DNA

SEQ ID NO: 166995 - DNA, 2331 bp, synthetic construct
  misc_feature 1..2331: note = Description of Artificial Sequence: Synthetic coding sequence
  source 1..2331: mol_type = other DNA
atgaaccctgaggagcagatcgtgacctggctgatcagcctgggcgtgctggagagccccaagaagaccatctgtgaccctgaggagttcctgaagagcagcctgaagaatggagtggtgctgtgcaagctgatcaaccggctgatgcctggctctgtggagaagttctgcctggacccccagacagaggccgactgcatcaacaacatcaatgacttcctgaagggctgtgccaccctgcaggtggagatctttgatcctgatgacctgtacagcggcgtgaacttcagcaaggtgctgagcaccctgctggccgtgaacaaggccacagaggaccagctgtctgagcggccctgtggccgcagcagcagcctgtctgctgccaacaccagccagaccaacccccagggcgctgtgagcagcacagtgtctggcctgcagaggcagagcaagacagtggagatgacagaaaatggcagccaccagctgattgtgaaggcccgcttcaacttcaagcagaccaatgaagatgagctgtctgtgtgcaagggggacatcatctacgtgaccagggtggaggagggcggctggtgggagggcaccctgaatggaagaacaggctggttccccagcaactacgtgcgggagatcaagagcagcgagcggcccctgagccccaaggctgtgaagggctttgaaacagcccccctgaccaagaactactacacagtggtgctgcagaacatcctggacacagagaaggagtatgccaaggagctgcagagcctgctggtgacctacctgcggcccctgcagagcaacaacaacctgagcacagtggaggtgaccagcctgctgggcaactttgaggaggtgtgcaccttccagcagaccctgtgccaggccctggaggagtgcagcaagtttcctgagaaccagcacaaggtgggcggctgcctgctgagcctgatgccccacttcaagtccatgtacctggcctactgtgccaaccaccccagcgctgtgaatgtgctgacccagcacagtgatgagctggagcagttcatggagaaccagggcgccagcagccctggcatcctgatcctgaccaccaacctgagcaagcccttcatgaggctggagaagtatgtgaccctgctgcaggagctggagcggcacatggaggacacccacccagaccaccaggacatcctgaaggccatcgtggccttcaagaccctgatgggccagtgccaggacctgaggaagaggaagcagctggagctgcagatcctgtctgagcccatccaggcctgggagggggaggacatcaagaacctgggcaatgtcatcttcatgagccaggtgatggtgcagtacggggcctgtgaggagaaggaggagcgctacctgatgctgttcagcaatgtgctgatcatgctgagcgccagccccaggatgagcggcttcatctaccagggcaagatccccatcgccggcaccgtggtgacccggctggatgaaattgagggcaatgactgcacctttgagatcactggaaacacagtggagcgcatcgtggtgcactgcaacaacaaccaggacttccaggagtggctggagcagctgaacagactcatccggggccctgccagctgcagcagcctgagcaagaccagcagcagcagctgcagcgcccacagcagcttcagcagcacaggccagccccggggccccctggagcccccccagatcatcaagccctggagcctgagctgcctgcggcctgccccacccctgcggcccagcgctgccctgggctacaaggagaggatgagctacatcctgaaggagagcagcaagagccccaagaccatgaagaagttcctgcacaagaggaagacagagaggaagcccagcgaggaggagtatgtgatcaggaagagcacagctgccctggaggaggatgcccagatcctgaaggtgattgaggcctactgcaccagcgccaacttccagcagggccacggcagcagcaccaggaaggacagcatcccccaggtgctgctgcctgaggaggagaagctgatcatcgaggagaccaggagcaatggccagaccatcatggaggagaagagcctggtggacacagtgtatgccctgaaggatgaggtgcgggagctgaagcaggagaacaagaggatgaagcagtgcctggaggaggagctgaagagccggcgggacctggagaagctggtgcggcggctgctgaagcagacagatgagtgcatccggggggagagcagcagcaagaccagcatcctgccctag

SEQ ID NO: 166996 - DNA, 1869 bp, synthetic construct
  misc_feature 1..1869: note = Description of Artificial Sequence: Synthetic coding sequence
  source 1..1869: mol_type = other DNA
atgacagaaaatggcagccaccagctgattgtgaaggcccgcttcaacttcaagcagaccaatgaagatgagctgtctgtgtgcaagggggacatcatctacgtgaccagggtggaggagggcggctggtgggagggcaccctgaatggaagaacaggctggttccccagcaactacgtgcgggagatcaagagcagcgagcggcccctgagccccaaggctgtgaagggctttgaaacagcccccctgaccaagaactactacacagtggtgctgcagaacatcctggacacagagaaggagtatgccaaggagctgcagagcctgctggtgacctacctgcggcccctgcagagcaacaacaacctgagcacagtggaggtgaccagcctgctgggcaactttgaggaggtgtgcaccttccagcagaccctgtgccaggccctggaggagtgcagcaagtttcctgagaaccagcacaaggtgggcggctgcctgctgagcctgatgccccacttcaagtccatgtacctggcctactgtgccaaccaccccagcgctgtgaatgtgctgacccagcacagtgatgagctggagcagttcatggagaaccagggcgccagcagccctggcatcctgatcctgaccaccaacctgagcaagcccttcatgaggctggagaagtatgtgaccctgctgcaggagctggagcggcacatggaggacacccacccagaccaccaggacatcctgaaggccatcgtggccttcaagaccctgatgggccagtgccaggacctgaggaagaggaagcagctggagctgcagatcctgtctgagcccatccaggcctgggagggggaggacatcaagaacctgggcaatgtcatcttcatgagccaggtgatggtgcagtacggggcctgtgaggagaaggaggagcgctacctgatgctgttcagcaatgtgctgatcatgctgagcgccagccccaggatgagcggcttcatctaccagggcaagatccccatcgccggcaccgtggtgacccggctggatgaaattgagggcaatgactgcacctttgagatcactggaaacacagtggagcgcatcgtggtgcactgcaacaacaaccaggacttccaggagtggctggagcagctgaacagactcatccggggccctgccagctgcagcagcctgagcaagaccagcagcagcagctgcagcgcccacagcagcttcagcagcacaggccagccccggggccccctggagcccccccagatcatcaagccctggagcctgagctgcctgcggcctgccccacccctgcggcccagcgctgccctgggctacaaggagaggatgagctacatcctgaaggagagcagcaagagccccaagaccatgaagaagttcctgcacaagaggaagacagagaggaagcccagcgaggaggagtatgtgatcaggaagagcacagctgccctggaggaggatgcccagatcctgaaggtgattgaggcctactgcaccagcgccaacttccagcagggccacggcagcagcaccaggaaggacagcatcccccaggtgctgctgcctgaggaggagaagctgatcatcgaggagaccaggagcaatggccagaccatcatggaggagaagagcctggtggacacagtgtatgccctgaaggatgaggtgcgggagctgaagcaggagaacaagaggatgaagcagtgcctggaggaggagctgaagagccggcgggacctggagaagctggtgcggcggctgctgaagcagacagatgagtgcatccggggggagagcagcagcaagaccagcatcctgccctag

SEQ ID NO: 166997 - DNA, 1869 bp, synthetic construct; identical to SEQ ID NO: 166996
  misc_feature 1..1869: note = Description of Artificial Sequence: Synthetic coding sequence
  source 1..1869: mol_type = other DNA

SEQ ID NO: 166998 - DNA, 1950 bp, synthetic construct
  misc_feature 1..1950: note = Description of Artificial Sequence: Synthetic coding sequence
  source 1..1950: mol_type = other DNA
atgacagaaaatggcagccaccagctgattgtgaaggcccgcttcaacttcaagcagaccaatgaagatgagctgtctgtgtgcaagggggacatcatctacgtgaccagggtggaggagggcggctggtgggagggcaccctgaatggaagaacaggctggttccccagcaactacgtgcgggagatcaagagcagtgatggagtgtccctgctgctgcccggcctggagtgcaatggagccatcagcgcccaccacaacctgtgcctgcccggcagcaagaggcccctgagccccaaggctgtgaagggctttgaaacagcccccctgaccaagaactactacacagtggtgctgcagaacatcctggacacagagaaggagtatgccaaggagctgcagagcctgctggtgacctacctgcggcccctgcagagcaacaacaacctgagcacagtggaggtgaccagcctgctgggcaactttgaggaggtgtgcaccttccagcagaccctgtgccaggccctggaggagtgcagcaagtttcctgagaaccagcacaaggtgggcggctgcctgctgagcctgatgccccacttcaagtccatgtacctggcctactgtgccaaccaccccagcgctgtgaatgtgctgacccagcacagtgatgagctggagcagttcatggagaaccagggcgccagcagccctggcatcctgatcctgaccaccaacctgagcaagcccttcatgaggctggagaagtatgtgaccctgctgcaggagctggagcggcacatggaggacacccacccagaccaccaggacatcctgaaggccatcgtggccttcaagaccctgatgggccagtgccaggacctgaggaagaggaagcagctggagctgcagatcctgtctgagcccatccaggcctgggagggggaggacatcaagaacctgggcaatgtcatcttcatgagccaggtgatggtgcagtatggagcctgtgaggagaaggaggagcgctacctgatgctgttcagcaatgtgctgatcatgctgagcgccagccccaggatgagcggcttcatctaccagggcaagatccccatcgccggcaccgtggtgacccggctggatgaaattgagggcaatgactgcacctttgagatcaccggcaacacagtggagagaattgtggtgcactgcaacaacaaccaggacttccaggagtggctggagcagctgaacagactcatccggggccctgccagctgcagcagcctgagcaagaccagcagcagcagctgcagcgcccacagcagcttcagcagcacaggccagccccggggccccctggagcccccccagatcatcaagccctggagcctgagctgcctgcggcctgccccacccctgcggcccagcgctgccctgggctacaaggagaggatgagctacatcctgaaggagagcagcaagagccccaagaccatgaagaagttcctgcacaagaggaagacagagaggaagcccagcgaggaggagtatgtgatcaggaagagcacagctgccctggaggaggatgcccagatcctgaaggtgattgaggcctactgcaccagcgccaacttccagcagggccacggcagcagcaccaggaaggacagcatcccccaggtgctgctgcctgaggaggagaagctgatcatcgaggagaccaggagcaatggccagaccatcatggaggagaagagcctggtggacacagtgtatgccctgaaggatgaggtgcgggagctgaagcaggagaacaagaggatgaagcagtgcctggaggaggagctgaagagcagaagagacctggagaagctggtgcggcggctgctgaagcagacagatgagtgcatccggggggagagcagcagcaagaccagcatcctgccctag

SEQ ID NO: 166999 - DNA, 1869 bp, synthetic construct
  misc_feature 1..1869: note = Description of Artificial Sequence: Synthetic coding sequence
  source 1..1869: mol_type = other DNA
atgacagaaaatggcagccaccagctgattgtgaaggcccgcttcaacttcaagcagaccaatgaagatgagctgtctgtgtgcaagggggacatcatctacgtgaccagggtggaggagggcggctggtgggagggcaccctgaatggaagaacaggctggttccccagcaactacgtgcgggagatcaagagcagcgagcggcccctgagccccaaggctgtgaagggctttgaaacagcccccctgaccaagaactactacacagtggtgctgcagaacatcctggacacagagaaggagtatgccaaggagctgcagagcctgctggtgacctacctgcggcccctgcagagcaacaacaacctgagcacagtggaggtgaccagcctgctgggcaactttgaggaggtgtgcaccttccagcagaccctgtgccaggccctggaggagtgcagcaagtttcctgagaaccagcacaaggtgggcggctgcctgctgagcctgatgccccacttcaagtccatgtacctggcctactgtgccaaccaccccagcgctgtgaatgtgctgacccagcacagtgatgagctggagcagttcatggagaaccagggcgccagcagccctggcatcctgatcctgaccaccaacctgagcaagcccttcatgaggctggagaagtatgtgaccctgctgcaggagctggagcggcacatggaggacacccacccagaccaccaggacatcctgaaggccatcgtggccttcaagaccctgatgggccagtgccaggacctgaggaagaggaagcagctggagctgcagatcctgtctgagcccatccaggcctgggagggggaggacatcaagaacctgggcaatgtcatcttcatgagccaggtgatggtgcagtacggggcctgtgaggagaaggaggagcgctacctgatgctgttcagcaatgtgctgatcatgctgagcgccagccccaggatgagcggcttcatctaccagggcaagatccccatcgccggcaccgtggtgacccggctggatgaaattgagggcaatgactgcacctttgagatcactggaaacacagtggagcgcatcgtggtgcactgcaacaacaaccaggacttccaggagtggctggagcagctgaacagactcatccggggccctgccagctgcagcagcctgagcaagaccagcagcagcagctgcagcgcccacagcagcttcagcagcacaggccagccccggggccccctggagcccccccagatcatcaagccctggagcctgagctgcctgcggcctgccccacccctgcggcccagcgctgccctgggctacaaggaggccttcacctttgtgtttgaggagagcagcaagagccccaagaccatgaagaagttcctgcacaagaggaagacagagaggaagcccagcgaggaggagtatgtgatcaggaagagcacagctgccctggaggaggatgcccagatcctgaaggtgattgaggcctactgcaccagcgccaacttccagcagggccacggcagcagcaccaggaaggacagcatcccccaggtgctgctgcctgaggaggagaagctgatcatcgaggagaccaggagcaatggccagaccatcatggaggagaagagcctggtggacacagtgtatgccctgaaggatgaggtgcgggagctgaagcaggagaacaagaggatgaagcagtgcctggaggaggagctgaagagccggcgggacctggagaagctggtgcggcggctgctgaagcagacagatgagtgcatccggggggagagcagcagcaagaccagcatcctgccctag

SEQ ID NO: 167000 - DNA, 1896 bp, synthetic construct
  misc_feature 1..1896: note = Description of Artificial Sequence: Synthetic coding sequence
  source 1..1896: mol_type = other DNA
atgttttatgcccactttgtgctgagcaagaggggccccctggccaagatctggctggccgcccactgggacaagaagctgaccaaggcccacgtgtttgagtgcaacctggagagctctgtggagagcatcatcagccccaaggtgaagatggccctgcggaccagcggccacctgctgctgggcgtggtgcgcatctaccacaggaaggccaagtacctgctggccgactgcaatgaggccttcatcaagatcaagatggccttccggcctggggtggtggacctgcctgaagaaaatcgggaggccgcctacaatgccatcaccctgcctgaggagttccatgactttgaccagcccctgcctgacctggatgacattgatgtggcccagcagttcagcctgaaccagagccgggtggaggagatcaccatgagggaggaggtgggcaacatcagcatcctgcaggagaatgactttggagactttggcatggatgaccgggagatcatgagggagggcagcgcctttgaagatgatgacatgctggtgtccaccaccaccagcaacctgctgctggagagcgagcagagcaccagcaacctgaatgagaagatcaaccacctggagtatgaggaccagtacaaggatgacaactttggagagggcaatgatggcggcatcctggatgacaagctgatcagcaacaatgatggcggcatctttgatgatcctccagccctgtctgaggccggcgtgatgctgcctgagcagcctgcccatgatgacatggatgaagatgacaacgtgtccatgggcggccctgacagcccagacagcgtggaccctgtggagcccatgcccaccatgacagaccagaccaccctggtgcccaatgaggaggaggcctttgccctggagcccatcgacatcaccgtgaaggagaccaaggccaagaggaagaggaagctgattgtggacagcgtgaaggagctggacagcaagaccatccgggcccagctgagtgactacagcgacatcgtgaccaccctggacctggccccacccaccaagaagctgatgatgtggaaggagaccggcggcgtggagaagctgttcagcctgcctgcccagcccctgtggaacaaccggctgctgaagctgttcacccgctgcctgacccccctggtgcctgaggacctgaggaagaggaggaagggcggggaggccgacaacctggatgagttcctgaaggagtttgaaaatcctgaggtgccccgggaggaccagcagcagcagcaccagcagagagatgtgattgatgagcccatcatcgaggagcccagccggctgcaggagagcgtgatggaggccagcaggaccaacattgatgagagcgccatgcctcctcctccaccccagggcgtgaagaggaaggccggccagattgatcctgagcctgtgatgccaccccagcaggtggagcagatggagatcccccctgtggagctgcccccagaggagccccccaacatctgccagctgatccctgagctggagctgctgcctgagaaggagaaggagaaggagaaggagaaggaggatgatgaggaggaggaggatgaagatgccagcggcggggaccaggaccaggaggagcggcgctggaacaagaggacccagcagatgctgcacggcctgcagagggccctggccaagacaggagctgagagcatcagcctgctggagctgtgcaggaacaccaacaggaagcaggccgccgccaagttctacagcttcctggtgctgaagaagcagcaggccatcgagctgacccaggaggagccctacagcgacatcatcgccaccccaggcccccgcttccacatcatctag

SEQ ID NO: 167001 - DNA, 501 bp, synthetic construct
  misc_feature 1..501: note = Description of Artificial Sequence: Synthetic coding sequence
  source 1..501: mol_type = other DNA
atggcccccaagaaggccaagaagagagctgggggcgccaacagcaatgtgttctccatgtttgagcagacccagatccaggagttcaaggaggccttcaccatcatggaccagaacagagatggcttcatcgacaagaatgacctgcgggacacctttgctgccctgggccgggtgaatgtgaagaatgaggagattgatgagatgatcaaggaggcccctggccccatcaacttcaccgtcttcctgaccatgtttggagagaagctgaagggagctgaccctgaggagaccatcctgaatgccttcaaggtgtttgatcctgagggcaaaggagtgctgaaggctgactatgtgcgggagatgctgaccacccaggccgagcgcttcagcaaggaggaggtggaccagatgtttgctgccttccccccagatgtgactggaaacctggactacaagaacctggtgcacatcatcacccatggagaggagaaggactag

SEQ ID NO: 167002 - DNA, 909 bp, synthetic construct
  misc_feature 1..909: note = Description of Artificial Sequence: Synthetic coding sequence
  source 1..909: mol_type = other DNA
atggtgcggcctgtgcgccacaagaagcctgtgaactacagccagtttgaccacagcgacagtgatgatgactttgtgtctgccaccgtgcccctgaacaagaagagcaggacagcccccaaggagctgaagcaggacaagcccaagcccaacctgaacaacctgaggaaggaggagatccctgtgcaggagaagacccccaagaagaggctgcctgagggcaccttcagcatcccagccagcgctgtgccctgcaccaagatggccctggatgacaagctgtaccagagggacctggaggtggccctggccctgtctgtgaaggagctgcccaccgtgaccaccaacgtgcagaacagccaggacaagagcattgagaagcacggcagcagcaagattgagaccatgaacaagagcccccacatcagcaactgcagcgtggccagtgactacctggacctggacaagatcaccgtggaggatgatgtgggcggcgtgcagggcaagaggaaggccgccagcaaggctgctgcccagcagaggaagatcctgctggagggcagtgatggagacagcgccaatgacacagagccagactttgcccctggagaggacagtgaagatgacagcgacttctgtgagagcgaggacaatgatgaggacttctccatgaggaagagcaaggtgaaggagatcaagaagaaggaggtgaaggtgaagagccctgtggagaagaaggagaagaagagcaagagcaaatgtaatgccctggccgccagcggcggcagccgcagcagcagcagccccctggtggtggtgtctgtgaagagccccaaccagagcctgcggctgggcctgagccggctggcccgggtgaagcccctgcaccccaatgccaccagcacctag

SEQ ID NO: 167003 - DNA, 1008 bp, synthetic construct
  misc_feature 1..1008: note = Description of Artificial Sequence: Synthetic coding sequence
  source 1..1008: mol_type = other DNA
atggtgcggcctgtgcgccacaagaagcctgtgaactacagccagtttgaccacagcgacagtgatgatgactttgtgtctgccaccgtgcccctgaacaagaagagcaggacagcccccaaggagctgaagcaggacaagcccaagcccaacctgaacaacctgaggaaggaggagatccctgtgcaggagaagacccccaagaagaggatggccctggatgacaagctgtaccagagggacctggaggtggccctggccctgtctgtgaaggagctgcccaccgtgaccaccaacgtgcagaacagccaggacaagagcattgagaagcacggcagcagcaagattgagaccatgaacaagagcccccacatcagcaactgcagcgtggccagtgactacctggacctggacaagatcaccgtggaggatgatgtgggcggcgtgcagggcaagaggaaggccgccagcaaggccgccgcccagcagaggaagatcctgctggagggcagtgatggagacagcgccaatgacacagagccagactttgcccctggagaagattctgaagatgacagcgacttctgtgagagtgaagataatgatgaggacttctccatgaggaagagcaaggtgaaggagatcaagaagaaggaggtgaaggtgaagagccctgtggagaagaaggagaagaagagcaagagcaagtgcaatgccctggtgacctctgtggacagcgccccagctgctgtgaagtctgagagccagagcctgcccaagaaggtgtccctgagcagtgacaccaccaggaagcccctggagatccgcagccccagcgctgagagcaagaagcccaagtgggtgcccccagctgccagcggcggcagccgcagcagcagcagccccctggtggtggtgtctgtgaagagccccaaccagagcctgcggctgggcctgagccggctggcccgggtgaagcccctgcaccccaatgccaccagcacctag

SEQ ID NO: 167004 - DNA, 702 bp, synthetic construct
  misc_feature 1..702: note = Description of Artificial Sequence: Synthetic coding sequence
  source 1..702: mol_type = other DNA
atgaacaagagcccccacatcagcaactgcagcgtggccagtgactacctggacctggacaagatcaccgtggaggatgatgtgggcggcgtgcagggcaagaggaaggccgccagcaaggccgccgcccagcagaggaagatcctgctggagggcagtgatggagacagcgccaatgacacagagccagactttgcccctggagaagattctgaagatgacagcgacttctgtgagagtgaagataatgatgaggacttctccatgaggaagagcaaggtgaaggagatcaagaagaaggaggtgaaggtgaagagccctgtggagaagaaggagaagaagagcaagagcaagtgcaatgccctggtgacctctgtggacagcgccccagctgctgtgaagtctgagagccagagcctgcccaagaaggtgtccctgagcagtgacaccaccaggaagcccctggagatccgcagccccagcgctgagagcaagaagcccaagtgggtgcccccaggcatggcctacctgagcagcaggactggagcctggaagatcatcacagctgccagcggcggcagccgcagcagcagcagccccctggtggtggtgtctgtgaagagccccaaccagagcctgcggctgggcctgagccggctggcccgggtgaagcccctgcaccccaatgccaccagcacctag

SEQ ID NO: 167005 - DNA, 408 bp, synthetic construct
  misc_feature 1..408: note = Description of Artificial Sequence: Synthetic coding sequence
  source 1..408: mol_type = other DNA
atgaggggcaagaccttccgctttgagatgcagagggacctggtgtccttccccctgagccctgctgtgcgggtgaagctggtgtctgctggcttccagacagctgaggagctgctggaggtgaagcccagcgagctgagcaaggaggtgggcatcagcaaggccgaggccctggagaccctgcagatcatcagaagagaatgtctgaccaacaagcccaggtatgccggcaccagcgagagccacaagaagtgcacagccctggagctgctggagcaggagcacacccagggcttcatcatcaccttctgcagcgccctggatgacatcctgggcggcggcgtgcccctgatgaagaccacagagatctgtggggcccctggggtgggcaagacccagctgtggtag

SEQ ID NO: 167006 - DNA, 855 bp, synthetic construct
  misc_feature 1..855: note = Description of Artificial Sequence: Synthetic coding sequence
  source 1..855: mol_type = other DNA
atggccgagctggtgccctttgctgtgcccattgaaagtgacaagaccctgctggtgtgggagctgagcagcggccccacagctgaggccctgcaccacagcctcttcaccgccttcagccagtttggcctgctgtacagcgtgcgggtcttccccaatgctgctgtggcccaccctggcttctatgctgtgatcaagttctacagcgcccgggccgcccaccgggcccagaaggcctgtgacaggaagcagctgttccagaagagccctgtgaaggtgcggctgggcaccaggcacaaggctgtgcagcaccaggccctggccctgaacagcagcaagtgccaggagctggccaactactacttcggcttcaacggctgcagcaagaggatcatcaagctgcaggagctgagtgacctggaggagcgggagaatgaagacagcatggtgcccctgcccaagcagagcctgaagttcttctgtgccctggaggtggtgctgcccagctgtgactgccgcagccctggcatcggcctggtggaggagcccatggacaaggtggaggagggccccctgtccttcctgatgaagaggaagacagcccagaagctggccatccagaaggccctgagtgatgccttccagaagctgctgattgtggtgctggagagcggcaagattgctgtggagtaccggcccagtgaagatattgtgggcgtgcgctgtgaggaggagctgcacggcctcatccaggtgccctgcagcccctggaagcagtatggccaggaggaggagggctacctgagtgacttcagcctggaggaggaggagttccggctgcctgagctggactag

SEQ ID NO: 167007 - DNA, 351 bp, synthetic construct
  misc_feature 1..351: note = Description of Artificial Sequence: Synthetic coding sequence
  source 1..351: mol_type = other DNA
atgcacctgctggtgcccccaccccagcacagcctcttcaccgccttcagccagtttggcctgctgtacagcgtgcgggtcttccccaatgctgctgtggcccaccctggcttctacgccgtcatcaagttctacagcgcccgggccgcccaccgggcccagaaggcctgtgacaggaagcagctgttccagaagagccctgtgaaggtgcggctgggcaccaggcacaaggctgtgcagcaccaggccctggccctgaacagcagcaagtgccaggagctggccaactactacttcggcttcaacggctgcagcaagaggatcatcaaggaccactaccacagcctgtag

SEQ ID NO: 167008 - DNA, 711 bp, synthetic construct
  misc_feature 1..711: note = Description of Artificial Sequence: Synthetic coding sequence
  source 1..711: mol_type = other DNA
atggccgagctggtgccctttgctgtgcccattgaaagtgacaagaccctgctggtgtgggagctgagcagcggccccacagctgaggccctgcaccacagcctcttcaccgccttcagccagtttggcctgctgtacagcgtgcgggtcttccccaatgctgctgtggcccaccctggcttctatgctgtgatcaagttctacagcgcccgggccgcccaccgggcccagaaggcctgtgacaggaagcagctgttccagaagagccctgtgaaggtgcggctgggcaccaggcacaaggctgtgcagcaccaggccctggccctgaacagcagcaagtgccaggagctggccaactactacttcggcttcaacggctgcagcaagaggatcatcaagctgcaggagctgagtgacctggaggagcgggagaatgaagacagcatggtgcccctgcccaagcagagcctgaagttcttctgtgccctggaggtggtgctgcccagctgtgactgccgcagccctggcatcggcctggtggaggagcccatggacaaggtggaggagggccccctgtccttcctgatgaagaggaagacagcccagaagctggccatccagaaggccctgagtgatgccttccagaagctgctgattgtggtgctgggcaagacagtgctgatcatcctggaggtgctgcagttccagtag

SEQ ID NO: 167009 - DNA, 786 bp, synthetic construct
  misc_feature 1..786: note = Description of Artificial Sequence: Synthetic coding sequence
  source 1..786: mol_type = other DNA
atgcacctgctggtgcccccaccccagcacagcctcttcaccgccttcagccagtttggcctgctgtacagcgtgcgggtcttccccaatgctgctgtggcccaccctggcttctacgccgtcatcaagttctacagcgcccgggccgcccaccgggcccagaaggcctgtgacaggaagcagctgttccagaagagccctgtgaaggtgcggctgggcaccaggcacaaggctgtgcagcaccaggccctggccctgaacagcagcaagtgccaggagctggccaactactacttcggcttcaacggctgcagcaagaggatcatcaagctgcaggagctgagtgacctggaggagagagaaaatgaagattccatggtgcccctgcccaagcagagcctgaagttcttctgtgccctggaggtggtgctgcccagctgtgactgccgcagccctggcatcggcctggtggaggagcccatggacaaggtggaggagggccccctgtccttcctgatgaagaggaagacagcccagaagctggccatccagaaggccctgagtgatgccttccagaagctgctgattgtggtgctggagagcggcaagattgctgtggagtaccggcccagcgaggacatcgtgggcgtgcgctgtgaggaggagctgcacggcctcatccaggtgccctgcagcccctggaagcagtatggccaggaggaggagggctacctgagtgacttcagcctggaggaggaggagttccggctgcctgagctggactag

SEQ ID NO: 167010 - DNA, 393 bp, synthetic construct
  misc_feature 1..393: note = Description of Artificial Sequence: Synthetic coding sequence
  source 1..393: mol_type = other DNA
tttggcttcaacggctgcagcaagaggatcatcaagctgcaggagctgagtgacctggaggagagagaaaatgaagattccatggtgcccctgcccaagcagagcctgaagttcttctgtgccctggaggtggtgctgcccagctgtgactgccgcagccctggcatcggcctggtggaggagcccatggacaaggtggaggaggagagcggcaagattgctgtggagtaccggcccagtgaagatattgtgggcgtgcgctgtgaggaggagctgcacggcctcatccaggtgccctgcagcccctggaagcagtatggccaggaggaggagggctacctgagtgacttcagcctggaggaggaggagttccggctgcctgagctggactag

SEQ ID NO: 167011 - DNA, 501 bp, synthetic construct
  misc_feature 1..501: note = Description of Artificial Sequence: Synthetic coding sequence
  source 1..501: mol_type = other DNA
atggccgagctggtgccctttgctgtgcccattgaaagtgacaagaccctgctggtgtgggagctgagcagcggccccacagctgaggccctgcaccacagcctcttcaccgccttcagccagtttggcctgctgtacagcgtgcgggtcttccccaatgctgctgtggcccaccctggcttctatgctgtgatcaagttctacagcgcccgggccgcccaccgggcccagaaggcctgtgacaggaagcagctgttccagaagagccctgtgaaggtgcggctgggcaccaggcacaaggctgtgcagcaccaggccctggccctgaacagcagcaagtgccaggagctggccaactactacttcggcttcaacggctgcagcaagaggatcatcaaggtgccctgcagcccctggaagcagtatggccaggaggaggagggctacctgagtgacttcagcctggaggaggaggagttccggctgcctgagctggactag

SEQ ID NO: 167012 - DNA, 642 bp, synthetic construct
  misc_feature 1..642: note = Description of Artificial Sequence: Synthetic coding sequence
  source 1..642: mol_type = other DNA
atgcacctgctggtgcccccaccccagcacagcctcttcaccgccttcagccagtttggcctgctgtacagcgtgcgggtcttccccaatgctgctgtggcccaccctggcttctacgccgtcatcaagttctacagcgcccgggccgcccaccgggcccagaaggcctgtgacaggaagcagctgttccagaagagccctgtgaaggtgcggctgggcaccaggcacaaggctgtgcagcaccaggccctggccctgaacagcagcaagtgccaggagctggccaactactacttcggcttcaacggctgcagcaagaggatcatcaagctgcaggagctgagtgacctggaggagagagaaaatgaagattccatggtgcccctgcccaagcagagcctgaagttcttctgtgccctggaggtggtgctgcccagctgtgactgccgcagccctggcatcggcctggtggaggagcccatggacaaggtggaggagggccccctgtccttcctgatgaagaggaagacagcccagaagctggccatccagaaggccctgagtgatgccttccagaagctgctgattgtggtgctgggcaagacagtgctgatcatcctggaggtgctgcagttccagtag

SEQ ID NO: 167013 - DNA, 756 bp, synthetic construct
  misc_feature 1..756: note = Description of Artificial Sequence: Synthetic coding sequence
  source 1..756: mol_type = other DNA
atggccgagctggtgccctttgctgtgcccattgaaagtgacaagaccctgctggtgtgggagctgagcagcggccccacagctgaggccctgcaccacagcctcttcaccgccttcagccagtttggcctgctgtacagcgtgcgggtcttccccaatgctgctgtggcccaccctggcttctatgctgtgatcaagttctacagcgcccgggccgcccaccgggcccagaaggcctgtgacaggaagcagctgttccagaagagccctgtgaaggtgcggctgggcaccaggcacaaggctgtgcagcaccaggccctggccctgaacagcagcaagtgccaggagctggccaactactacttcggcttcaacggctgcagcaagaggatcatcaagctgcaggagctgagtgacctggaggagcgggagaatgaagacagcatggtgcccctgcccaagcagagcctgaagttcttctgtgccctggaggtggtgctgcccagctgtgactgccgcagccctggcatcggcctggtggaggagcccatggacaaggtggaggaggagagcggcaagattgctgtggagtaccggcccagcgaggacatcgtgggcgtgcgctgtgaggaggagctgcacggcctcatccaggtgccctgcagcccctggaagcagtatggccaggaggaggagggctacctgagtgacttcagcctggaggaggaggagttccggctgcctgagctggactag

SEQ ID NO: 167014 - DNA, 420 bp, synthetic construct
  misc_feature 1..420: note = Description of Artificial Sequence: Synthetic coding sequence
  source 1..420: mol_type = other DNA
atggccgagctggtgccctttgctgtgcccattgaaagtgacaagaccctgctggtgtgggagctgagcagcggccccacagctgaggccctgcaccacagcctcttcaccgccttcagccagtttggcctgctgtacagcgtgcgggtcttccccaatgctgctgtggcccaccctggcttctatgctgtgatcaagttctacagcgcccgggccgcccaccgggcccagaaggcctgtgacaggaagcagctgttccagaagagccctgtgaaggtgcggctgggcaccaggcacaaggctgtgcagcaccaggccctggccctgaacagcagcaagtgccaggagctggccaactactacttcggcttcaacggctgcagcaagaggatcatcaaggaccactaccacagcctgtag

SEQ ID NO: 167015 - DNA, 432 bp, synthetic construct
  misc_feature 1..432: note = Description of Artificial Sequence: Synthetic coding sequence
  source 1..432: mol_type = other DNA
atgcacctgctggtgcccccaccccagcacagcctcttcaccgccttcagccagtttggcctgctgtacagcgtgcgggtcttccccaatgctgctgtggcccaccctggcttctacgccgtcatcaagttctacagcgcccgggccgcccaccgggcccagaaggcctgtgacaggaagcagctgttccagaagagccctgtgaaggtgcggctgggcaccaggcacaaggctgtgcagcaccaggccctggccctgaacagcagcaagtgccaggagctggccaactactacttcggcttcaacggctgcagcaagaggatcatcaaggtgccctgcagcccctggaagcagtatggccaggaggaggagggctacctgagtgacttcagcctggaggaggaggagttccggctgcctgagctggactag

SEQ ID NO: 167016 - DNA, 2733 bp, synthetic construct
  misc_feature 1..2733: note = Description of Artificial Sequence: Synthetic coding sequence
  source 1..2733: mol_type = other DNA
atgagaagatctgctgcccccagccagctgcagggcaacagcttcaagaagcccaagttcatccccccaggccgcagcaaccctggcctgaatgaggagatcaccaagctgaacccagacatcaagctgtttgagggcgtggccatcaacaacaccttcctgcccagccagaatgacctgcgcatctgcagcctgaacctgcccagcgaggagagcacccgggagatcaacaacagagacaactgcagcggcaagtactgctttgaggcccccaccctggccaccctggaccccccccacacagtgcacagcgcccccaaggaggtggccgtgtccaaggagcaggaggagaagagtgacagcctggtgaagtacttctctgtggtgtggtgcaagcccagcaagaagaagcacaagaagtgggagggagatgctgtgctgattgtgaagggcaagagcttcatcctgaagaacctggagggcaaggacatcggccggggcatcggctacaagttcaaggagctggagaagattgaggagggccagaccctgatgatctgtgggaaggagattgaggtgatgggcgtcatcagcccagatgacttcagcagcggccgctgcttccagctgggcggcggcagcacagccatcagccacagcagccaggtggccaggaagtgcttcagcaaccccttcaagtctgtgtgcaagcccagcagcaaggagaaccggcagaatgacttccagaactgcaagcccaggcatgacccctacacccccaacagcctggtgatgcccaggccagacaagaaccaccagtgggtgttcaacaagaactgcttccccctggtggatgtggtgattgacccctacctggtgtaccacctgcggccccaccagaaggagggcatcatcttcctgtatgaatgtgtgatgggcatgaggatgaatggccgctgtggggccatcctggctgatgagatgggcctgggcaagaccctgcagtgcatcagcctcatctggaccctgcagtgccagggcccctatggaggcaagcctgtgatcaagaagaccctcatcgtgaccccaggcagcctggtgaacaactggaagaaggagttccagaagtggctgggcagcgagcgcatcaagatcttcaccgtggaccaggaccacaaggtggaggagttcatcaagagcatcttctacagcgtgctgatcatctcctatgagatgctgctgcggagcctggaccagatcaagaacatcaagtttgacctgctgatctgtgatgagggccaccggctgaagaacagcgccatcaagaccaccacagccctgatcagcctgagctgtgagaagaggatcatcctgaccggcacccccatccagaatgacctgcaggagttctttgccctgattgactttgtgaaccctggcatcctgggcagcctgagcagctacaggaagatctatgaggagcccatcatcctgagccgggagcccagcgccagcgaggaggagaaggagctgggggagcggcgggctgctgagctgacctgcctgaccggcctcttcatcctgcggaggacccaggagatcatcaacaagtacctgccccccaagattgaaaatgtggtgttctgcaggcctggggccctgcagatcgagctgtacaggaagctgctgaacagccaggtggtgcgcttctgcctgcagggcctgctggagaacagcccccacctgatctgcattggagccctgaagaagctgtgcaaccacccctgcctgctcttcaacagcatcaaggagaaggagtgcagcagcacctgtgacaagaatgaggagaagagcctgtacaagggcctgctgtctgtgtttcctgctgactacaaccccctgctcttcacagagaaggagagcggcaagctgcaggtgctgagcaagctgctggccgtcatccacgagctgcggcccacagagaaggtggtgctggtgagcaactacacccagaccctgaacatcctgcaggaggtgtgcaagagacatggctacgcctacacccggctggatggccagacccccatcagccagaggcagcagatcgtggatggcttcaacagccagcacagcagcttcttcatcttcctgctgagcagcaaggccggcggcgtgggcctgaacctgattggaggcagccacctgatcctgtatgacatcgactggaacccagccacagacatccaggccatgagccgggtgtggagagatggccagaagtaccctgtgcacatctaccgcctgctgaccaccggcaccatcgaggagaagatctaccagaggcagatcagcaagcagggcctgtgtggggctgtggtggacctgaccaagaccagcgagcacatccagttctctgtggaggagctgaagaacctcttcaccctgcacgagagcagtgactgtgtgacccatgacctgctggactgtgagtgcaccggggaggaggtgcacactggagacagcctggagaagttcatcgtgtcccgggactgccagctgggcccccaccaccagaagagcaacagcctgaagcccctgtccatgagccagctgaagcagtggaagcacttcagcggggaccacctgaacctgacagaccccttcctggagcgcatcacagaaaatgtgtccttcatcttccagaacatcaccacccaggccaccggcacctag

SEQ ID NO: 167017 - DNA, 900 bp, synthetic construct
  misc_feature 1..900: note = Description of Artificial Sequence: Synthetic coding sequence
  source 1..900: mol_type = other DNA
atggtgggcaaggcccggagcagcaacttcaccctgtctgagaagctggacctgctgaagctggtgaagccctacgtgaagatcctggaggagcacaccaacaagcacagcgtgattgtggagaagaaccgctgctgggacatcatcgctgtgaactacaatgccatcggcgtggacaggcctcccaggacagcccagggcctgcggaccctgtacaagaggctgaaggagtatgccaagcaggagctgctgcagcagaaggagacccagagcgacttcaagagcaacatcagcgagcccaccaagaaggtgatggagatgatcccccagatcagcagcttctgcctggtgcgggacaggaaccacatccagagcgccaacctggatgaggaggcccaggccggcaccagcagcctgcaggtgatgctggaccaccaccctgtggccatcaccgtggaggtgaagcaggaggaggacatcaagcccccaccacccctggtgctgaacagccagcagagcgacaccctggagcagcgggaggagcacgagctggtgcacgtgatggagaggagcctgagccccagcctgagctctgtggacatgaggatgaccagcagccccagcagcatccccaggagagatgacttcttcagacatgaaagtggagagcacttccgcagcctgctgggctatgacccccagatcctgcagatgctgaaggaggagcaccagatcatcctggagaaccagaagaactttggcctgtatgtgcaggagaagagagatggcctgaagaggcggcagcagctggaggaggagctgctgcgggccaagattgaggtggagaagctgaaggccatccggctgcggcatgacctgcctgagtacaacagcctgtag

SEQ ID NO: 167018 - DNA, 378 bp, synthetic construct
  misc_feature 1..378: note = Description of Artificial Sequence: Synthetic coding sequence
  source 1..378: mol_type = other DNA
atgagaagatctgctgcccccagccagctgcagggcaacagcttcaagaagcccaagttcatccccccaggccgcagcaaccctggcctgaatgaggagatcaccaagctgaacccagacatcaagctgtttgagggcgtggccatcaacaacaccttcctgcccagccagaatgacctgcgcatctgcagcctgaacctgcccagcgaggagagcacccgggagatcaacaacagagacaactgcagcggcaagtactgctttgaggcccccaccctggccaccctggaccccccccacacagtgcacagcgcccccaaggaggtggccgtgtccaaggagcaggaggagaagagtgacagcctggtgaagtactag

SEQ ID NO: 167019 - DNA, 354 bp, synthetic construct
  misc_feature 1..354: note = Description of Artificial Sequence: Synthetic coding sequence
  source 1..354: mol_type = other DNA
atgagaagatctgctgcccccagccagctgcagggcaacagcttcaagaagcccaagttcatccccccaggccgcagcaaccctggcctgaatgaggagatcaccaagctgaacccagacatcaagctgtttgagggcgtggccatcaacaacaccttcctgcccagccagaatgacctgcgcatctgcagcctgaacctgcccagcgaggagagcacccgggagatcaacaacagagacaactgcagcggcaagtactgctttgaggcccccaccctggccaccctggaccccccccacacagtgcagacctggatgagaagacaccggctggtgcctgtgcactacagatag

SEQ ID NO: 167020 - DNA, 477 bp, synthetic construct
  misc_feature 1..477: note = Description of Artificial Sequence: Synthetic coding sequence
  source 1..477: mol_type = other DNA
atgctggaccaccaccctgtggccatcaccgtggaggtgaagcaggaggaggacatcaagcccccaccacccctggtgctgaacagccagcagagcgacaccctggagcagcgggaggagcacgagctggtgcacgtgatggagaggagcctgagccccagcctgagctctgtggacatgaggatgaccagcagccccagcagcatccccaggagagatgacttcttcagacatgagagcggggagcacttccgcagcctgctgggctatgacccccagatcctgcagatgctgaaggaggagcaccagatcatcctggagaaccagaagaactttggcctgtatgtgcaggagaagagagatggcctgaagaggcggcagcagctggaggaggagctgctgcgggccaagattgaggtggagaagctgaaggccatccggctgcggcatgacctgcctgagtacaacagcctgtag

SEQ ID NO: 167021 - DNA, 1749 bp, synthetic construct
  misc_feature 1..1749: note = Description of Artificial Sequence: Synthetic coding sequence
  source 1..1749: mol_type = other DNA
atgggcctgggcaagaccctgcagtgcatcagcctcatctggaccctgcagtgccagggcccctacggcggcaagcctgtgatcaagaagaccctgattgtgaccccaggcagcctggtgaacaactggaagaaggagttccagaagtggctgggcagcgagcgcatcaagatcttcaccgtggaccaggaccacaaggtggaggagttcatcaagagcatcttctacagcgtgctgatcatctcctatgagatgctgctgcggagcctggaccagatcaagaacatcaagtttgacctgctgatctgtgatgagggccaccggctgaagaacagcgccatcaagaccaccacagccctgatcagcctgagctgtgagaagaggatcatcctgaccggcacccccatccagaatgacctgcaggagttctttgccctgattgactttgtgaaccctggcatcctgggcagcctgagcagctacaggaagatctatgaggagcccatcatcctgagccgggagcccagcgccagcgaggaggagaaggagctgggggagcgggagcagctgaacctgctggccagcctggacagcctgctgcggaggacccaggagatcatcaacaagtacctgccccccaagattgaaaatgtggtgttctgcaggcctggggccctgcagatcgagctgtacaggaagctgctgaacagccaggtggtgcgcttctgcctgcagggcctgctggagaacagcccccacctgatctgcattggagccctgaagaagctgtgcaaccacccctgcctgctcttcaacagcatcaaggagaaggagtgcagcagcacctgtgacaagaatgaggagaagagcctgtacaagggcctgctgtctgtgtttcctgctgactacaaccccctgctcttcacagagaaggagagcggcaagctgcaggtgctgagcaagctgctggccgtcatccacgagctgcggcccacagagaaggtggtgctggtgagcaactacacccagaccctgaacatcctgcaggaggtgtgcaagagacatggctacgcctacacccggctggatggccagacccccatcagccagaggcagcagatcgtggatggcttcaacagccagcacagcagcttcttcatcttcctgctgagcagcaaggccggcggcgtgggcctgaacctgattggaggcagccacctgatcctgtatgacatcgactggaacccagccacagacatccaggccatgagccgggtgtggagagatggccagaagtaccctgtgcacatctaccgcctgctgaccaccggcaccatcgaggagaagatctaccagaggcagatcagcaagcagggcctgtgtggggctgtggtggacctgaccaagaccagcgagcacatccagttctctgtggaggagctgaagaacctcttcaccctgcacgagagcagtgactgtgtgacccatgacctgctggactgtgagtgcaccggggaggaggtgcacactggagacagcctggagaagttcatcgtgtcccgggactgccagctgggcccccaccaccagaagagcaacagcctgaagcccctgtccatgagccagctgaagcagtggaagcacttcagcggggaccacctgaacctgacagaccccttcctggagcgcatcacagaaaatgtgtccttcatcttccagaacatcaccacccaggccaccggcacctag

SEQ ID NO: 167022 - DNA, 1290 bp, synthetic construct
  misc_feature 1..1290: note = Description of Artificial Sequence: Synthetic coding sequence
  source 1..1290: mol_type = other DNA
atggccgccatgctgaagtgtgtgatgagcggcagccaggtgaaggtgtttgggaaggctgtgcaggccctgagccgcatcagtgatgagttctggctggaccccagcaagaagggcctggccctgcgctgtgtgaacagcagccgcagcgcctacggctgtgtgctcttcagccctgtgttcttccagcactaccagtggagcgccctggtgaagatgtctgaaaatgagctggacaccaccctgcacctgaagtgcaagctgggcatgaagagcatcctgcccatcttccgctgcctgaacagcctggagagaaatattgaaaaatgtcgcatcttcaccaggagtgacaagtgcaaggtggtgatccagttcttctacagacatggcatcaagaggacccacaacatctgcttccaggagagccagcccctgcaggtgatctttgacaagaatgtgtgcaccaacaccctgatgatccagccccggctgctggctgatgccatcgtgctcttcaccagcagccaggaggaggtgaccctggccgtgacccccctgaacttctgcctgaagagcagcaatgaggagagcatggacctgagcaatgctgtgcacagcgagatgtttgtgggcagtgatgaatttgacttcttccagatcggcatggacacagagatcaccttctgcttcaaggagctgaagggcatcctgaccttcagcgaggccacccacgcccccatcagcatctactttgacttccctgggaagcccctggccctgagcattgatgacatgctggtggaggccaacttcatcctggccaccctggctgatgagcagagccgggccagcagcccccagagcctgtgcctgagccagaagaggaagagaagtgacctgattgagaagaaggccggcaagaatgtgacaggccaggccctggagtgcatcagcaagaaggccgccccccggcggctgtaccccaaggagaccctgaccaacatcagcgccctggagaactgtggcagccctgccatgaagagggtggatggagatgtgtctgaggtgtctgagagctctgtgagcaacacagaggaggtgcccggcagcctgtgcctgaggaagttcagctgcatgttctttggagctgtgtccagtgaccagcaggagcacttcaaccacccctttgacagcctggcccgggccagtgacagcgaggaggacatgaacaacgtgtgctgcaggaaggagttcaatggaagtgatgccaagtacttctgcatcatctag

SEQ ID NO: 167023 - DNA, 1038 bp, synthetic construct
  misc_feature 1..1038: note = Description of Artificial Sequence: Synthetic coding sequence
  source 1..1038: mol_type = other DNA
atgtctgaaaatgagctggacaccaccctgcacctgaagtgcaagctgggcatgaagagcatcctgcccatcttccgctgcctgaacagcctggagagaaatattgaaaaatgtcgcatcttcaccaggagtgacaagtgcaaggtggtgatccagttcttctacagacatggcatcaagaggacccacaacatctgcttccaggagagccagcccctgcaggtgatctttgacaagaatgtgtgcaccaacaccctgatgatccagccccggctgctggctgatgccatcgtgctcttcaccagcagccaggaggaggtgaccctggccgtgacccccctgaacttctgcctgaagagcagcaatgaggagagcatggacctgagcaatgctgtgcacagcgagatgtttgtgggcagtgatgaatttgacttcttccagatcggcatggacacagagatcaccttctgcttcaaggagctgaagggcatcctgaccttcagcgaggccacccacgcccccatcagcatctactttgacttccctgggaagcccctggccctgagcattgatgacatgctggtggaggccaacttcatcctggccaccctggctgatgagcagagccgggccagcagcccccagagcctgtgcctgagccagaagaggaagagaagtgacctgattgagaagaaggccggcaagaatgtgacaggccaggccctggagtgcatcagcaagaaggccgccccccggcggctgtaccccaaggagaccctgaccaacatcagcgccctggagaactgtggcagccctgccatgaagagggtggatggagatgtgtctgaggtgtctgagagctctgtgagcaacacagaggaggtgcccggcagcctgtgcctgaggaagttcagctgcatgttctttggagctgtgtccagtgaccagcaggagcacttcaaccacccctttgacagcctggcccgggccagtgacagcgaggaggacatgaacaacggcagcttcagcatcttctag

SEQ ID NO: 167024 - DNA, 1038 bp, synthetic construct; identical to SEQ ID NO: 167023
  misc_feature 1..1038: note = Description of Artificial Sequence: Synthetic coding sequence
  source 1..1038: mol_type = other DNA

SEQ ID NO: 167025 - DNA, 1449 bp, synthetic construct; identical to SEQ ID NO: 153007
  misc_feature 1..1449: note = Description of Artificial Sequence: Synthetic coding sequence
  source 1..1449: mol_type = other DNA

SEQ ID NO: 167026 - DNA, 1410 bp, synthetic construct
  misc_feature 1..1410: note = Description of Artificial Sequence: Synthetic coding sequence
  source 1..1410: mol_type = other DNA
atggaggacagcaccagccccaagcaggagaaggagaaccaggaggagctgggggagacccggcggccctgggagggcaagacagctgccagcccccagtacagcgagcctgagagcagcgagcccctggaggccaagcagggccctgagaccggccggcagagccgcagcagccggccctggagcccccagagccgggccaagacccccctgggcggccctgctggccctgagaccagcagccctgcccctgtgagcccccgggagcccagcagcagccccagccccctggccccagcccggcaggacctggccgccccaccccagagcgacaggaccaccagcgtcatccctgaggccggcaccccctacccagaccccctggagcagagcagtgacaagcgggagagcaccccccaccacaccagccagagcgagggcaacaccttccagcagagccagcagcccaagccccacctgtgtggcagaagagatgtgtcctacaacaatgccaagcagaaggagctgcgctttgatgtgttccaggaggaggacagcaacagcgactatgacctgcagcagcctgcccctgggggcagcgaggtggcccccagcatgctggagatcaccatccagaatgccaaggcctacctgctgaagaccagcagcaacagcggcttcaacctgtatgaccacctgagcaacatgctgaccaagatcctgaatgaaagaccagaaaatgctgtggacatctttgagaacatcagccaggatgtgaagatggcccacttcagcaagaagtttgatgccctgcagaatgaaaatgagctgctgcccacctatgaaattgctgagaagcagaaggccctcttcctgcagggccacctggagggcgtggaccaggagctggaggatgaaattggccgctgcaactggttcaacagcatccagaagaatgaggaggaggaggaggaggaggatgaggagaaggatgacagcgactacatcgagcaggaggtgggcctgcccctgctgacccccatcagcgaggacctggagatccagaacatccccccctggaccacccggctgagcagcaacctgatcccccagtatgccatcgctgtgctgcagagcaacctgtggccaggggcctatgccttcagcaatggcaagaagtttgagaacttctacatcggctggggccacaagtacagcccagacaactacaccccacctgtgcccccacctgtgtaccaggagtaccccagcggccctgagatcacagagatggatgaccccagcgtggaggaggagcaggccttccgggccgcccaggaggccgtgctgctggccgcagaaaatgaggagagcgaggaggatgaagatgaagaagatgattatgactag

SEQ ID NO: 167027 - DNA, 1803 bp, synthetic construct
  misc_feature 1..1803: note = Description of Artificial Sequence: Synthetic coding sequence
  source 1..1803: mol_type = other DNA
atggaggacagcaccagccccaagcaggagaaggagaaccaggaggagctgggggagacccggcggccctgggagggcaagacagctgccagcccccagtacagcgagcctgagagcagcgagcccctggaggccaagcagggccctgagaccggccggcagagccgcagcagccggccctggagcccccagagccgggccaagacccccctgggcggccctgctggccctgagaccagcagccctgcccctgtgagcccccgggagcccagcagcagccccagccccctggccccagcccggcaggacctggccgccccaccccagagcgacaggaccaccagcgtcatccctgaggccggcaccccctacccagaccccctggagcagagcagtgacaagcgggagagcaccccccaccacaccagccagagcgagggcaacaccttccagcagagccagcagcccaagccccacctgtgtggcagaagagatgtgtcctacaacaatgccaagcagaaggagctgcgctttgatgtgttccaggaggaggacagcaacagcgactatgacctgcagcagcctgcccctgggggcagcgaggtggcccccagcatgctggagatcaccatccagaatgccaaggcctacctgctgaagaccagcagcaacagcggcttcaacctgtatgaccacctgagcaacatgctgaccaagatcctgaatgaaagaccagaaaatgctgtggacatctttgagaacatcagccaggatgtgaagatggcccacttcagcaagaagtttgatgccctgcagaatgaaaatgagctgctgcccacctatgaaattgctgagaagcagaaggccctcttcctgcagggccacctggagggcgtggaccaggagctggaggatgaaattgctgaaaatgccctgcccaacgtgatggagagcgccttctactttgagcaggccggcgtgggcctgggcacagatgagacctaccgcatcttcctggccctgaagcagctgacagacacccaccccatccagcgctgccgcttctggggcaagatcctgggcctggagatgaactacatcgtggccgaggtggagttccgggagggagaagatgaggaggaggtggaggaggaggatgtggccgaggagcgggacaatggagagagcgaggcccatgaagatgaagaagatgagctgcccaagagcttctacaaggccccccaggccatccccaaggaggagagcaggactggagccaacaagtatgtgtactttgtgtgcaatgaacctggccggccctgggtgaagctgccccctgtgatcccagcccagatcgtcatcgccaggaagatcaagaagttcttcaccggccgcctggatgcccccatcatctcctacccacccttccctggaaatgaaagcaactacctgcgggcccagatcgcccgcatctctgctggcacccacgtgagccccctgggcttctaccagtttggagaggaggagggggaggaggaggaggaggccgagggcggcaggaacagctttgaagaaaatccagactttgagggcatccaggtgattgacctggtggagagcctgagcaactgggtgcaccacgtgcagcacatcctgagccagcgcttccgcatctacccacctggccagcacggctacccccagatctccttccacaacatgctgctgcagagcttcaaccccaccttcggcctggagcacatgcccagccccatggccaagagcctgaagatcagcacctag

SEQ ID NO: 167028 - DNA, 1536 bp, synthetic construct
  misc_feature 1..1536: note = Description of Artificial Sequence: Synthetic coding sequence
  source 1..1536: mol_type = other DNA
atgctggagatcaccatccagaatgccaaggcctacctgctgaagaccagcagcaacagcggcttcaacctgtatgaccacctgagcaacatgctgaccaagatcctgaatgaaagaccagaaaatgctgtggacatctttgagaacatcagccaggatgtgaagatggcccacttcagcaagaagtttgatgccctgcagaatgaaaatgagctgctgcccacctatgaaattgctgagaagcagaaggccctcttcctgcagggccacctggagggcgtggaccaggagctggaggatgaaattgctgaaaatgccctgcccaacgtgatggagagcgccttctactttgagcaggccggcgtgggcctgggcacagatgagacctaccgcatcttcctggccctgaagcagctgacagacacccaccccatccagcgctgccgcttctggggcaagatcctgggcctggagatgaactacatcgtggccgaggtggagttccgggagggggaggatgaggaggaggtggaggaggaggatgtggccgaggagcgggacaacggggagagcgaggcccatgaagatgaggaggatgagctgcccaagagcttctacaaggccccccaggccatccccaaggaggagagcaggactggagccaacaagtatgtgtactttgtgtgcaatgagcccggccggccctgggtgaagctgccccctgtgatcccagcccagatcgtgattgccaggaagatcaagaagttcttcaccggccgcctggatgcccccatcatctcctacccacccttccctggaaatgaaagcaactacctgcgggcccagatcgcccgcatctctgctggcacccacgtgagccccctgggcttctaccagtttggagaggaggagggggaggaggaggaggaggccgagggcggcagaaattcctttgaggagaacccagactttgagggcatccaggtgattgacctggtggagagcctgagcaactgggtgcaccacgtgcagcacatcctgagccagggccgctgcaactggttcaacagcatccagaagaatgaggaggaggaggaggaggaggatgaggagaaggatgacagcgactacatcgagcaggaggtgggcctgcccctgctgacccccatcagcgaggacctggagatccagaacatccccccctggaccacccggctgagcagcaacctgatcccccagtatgccatcgctgtgctgcagagcaacctgtggccaggggcctatgccttcagcaatggcaagaagtttgagaacttctacatcggctggggccacaagtacagcccagacaactacaccccacctgtgcccccacctgtgtaccaggagtaccccagcggccctgagatcacagagatggatgaccccagcgtggaggaggagcaggccttccgggccgcccaggaggccgtgctgctggccgcagaaaatgaggagagcgaggaggatgaagatgaagaagatgattatgactag

SEQ ID NO: 167029 - DNA, 531 bp, synthetic construct
  misc_feature 1..531: note = Description of Artificial Sequence: Synthetic coding sequence
  source 1..531: mol_type = other DNA
atgctggtgaagagggactaccgctatgacagagtgctcttctggggccgcatcctgggcctggtggccgactactacatcgcccagggcctgtctgaggaccagctggcccccaggaagaccctgtacagcctgaactgcacagagtggagcctgctgcccccagccacagaggagatggtggcccagagctctgtggtgaagggccgcttcatgggagaccccagctatgaatatgagcacacagagctgcagaaggtgaatgaaggagagaaggtgtttgaggaggagatcgtggtgcagatcaaggaggagacccggctggtgtctgtcatcgaccagattgacaaggctgtggccatcatccccaggggggccctcttcaagacccccttcggccccacccacgtgaacagaacatttgagggctactacaactggtacaagaccccagccccccaccccacctgtgatggcaaccagggcgtgcgggcccggggccgcagccccagcctgggccgcttcctgtag

SEQ ID NO: 167030 - DNA, 831 bp, synthetic construct
  misc_feature 1..831: note = Description of Artificial Sequence: Synthetic coding sequence
  source 1..831: mol_type = other DNA
atggatgctgacagcctgctgctgagcctggagctggccagcggcagcggccagggcctgagcccagaccggcgggccagcctgctgaccagcctgatgctggtgaagagggactaccgctatgacagagtgctcttctggggccgcatcctgggcctggtggccgactactacatcgcccagggcctgtctgaggaccagctggcccccaggaagaccctgtacagcctgaactgcacagagtggagcctgctgcccccagccacagaggagatggtggcccagagctctgtggtgaagggccgcttcatgggagaccccagctatgaatatgagcacacagagctgcagaaggtgaatgaaggagagaaggtgtttgaggaggagatcgtggtgcagatcaaggaggagacccggctggtgtctgtcatcgaccagattgacaaggctgtggccatcatccccaggggggccctcttcaagacccccttcggccccacccacgtgaacagaacatttgagggcctgagcctgtctgaggccaagaagctgagcagctacttccacttccgggagcctgtggagctgaagaacaagaccctgctggagaaggctgacctggaccccagcctggacttcatggacagcctggagcatgacatccccaagggctcctggagcatccagatggagagaggaaatgccctggtggtgctgcggagcctgctgtggccaggcctgaccttctaccacgcccccaggaccaagaactacggctacgtgtatgtgggcactggagagaagaacatggacctgcccttcatgctgtag

SEQ ID NO: 167031 - DNA, 921 bp, synthetic construct
  misc_feature 1..921: note = Description of Artificial Sequence: Synthetic coding sequence
  source 1..921: mol_type = other DNA
atggatgctgacagcctgctgctgagcctggagctggccagcggcagcggccagggcctgagcccagaccggcgggccagcctgctgaccagcctgatgctggtgaagagggactaccgctatgacagagtgctcttctggggccgcatcctgggcctggtggccgactactacatcgcccagggcctgtctgaggaccagctggcccccaggaagaccctgtacagcctgaactgcacagagtggagcctgctgcccccagccacagaggagatggtggcccagagctctgtggtgaagggccgcttcatgggagaccccagctatgaatatgagcacacagagctgcagaaggtgaatgaaggagagaaggtgtttgaggaggagatcgtcatcgacaaggctgtggccatcatccccaggggggccctcttcaagaccccatttggccccacccacgtgaacagaacatttgagggcctgagcctgtctgaggccaagaagctgagcagctacttccacttccgggagcctgtggagctgaagaacaagaccctgctggagaaggctgacctggaccccagcctggacttcatggacagcctggagcatgacatccccaagggcagcgaggccgtggtgcagggcgacttcacctggctgctgagccgctgtggcttcggctggccctgctcctgggacagctgcagcgtgtccatgagggtgctggagcacccagatggagagggccagtgccctggaggagctgcccagcctgccctggccggcccccacctgctgccctgcagcccccaccaggagctgtggctgcggctgcggggccactggagggaggagcacggcctggccctgcacgccatcgagtgggagcccgcctggatgttcctgaacagagtgtag

SEQ ID NO: 167032 - DNA, 402 bp, synthetic construct
  misc_feature 1..402: note = Description of Artificial Sequence: Synthetic coding sequence
  source 1..402: mol_type = other DNA
tgactgaactgcacagagtggagcctgctgcccccagccacagaggagatggtggcccagagctctgtggtgaagggccgcttcatgggagaccccagctatgaatatgagcacacagagctgcagaaggtgaatgaaggagagaaggtgtttgaggaggagatcgtggtgcagatcaaggaggagacccggctggtgtctgtgattgaccagattgacaaggctgtggccatcatccccaggggggccctcttcaagaccccatttggccccacccacgtgaacagaacatttgagggctactacaactggtacaagaccccagccccccaccccacctgtgatggcaaccagggcgtgcgggcccggggccgcagccccagcctgggccgcttcctgtag

SEQ ID NO: 167033 - DNA, 1086 bp, synthetic construct
  misc_feature 1..1086: note = Description of Artificial Sequence: Synthetic coding sequence
  source 1..1086: mol_type = other DNA
atgtgggtgctgaccccagctgcctttgctgggaagctgctgtctgtgttccggcagcccctgagcagcctgtggaggagcctggtgcccctcttctgctggctgcgggccaccttctggctgctggccaccaagaggaggaagcagcagctggtgctgcggggcccagatgagaccaaggaggaggaggaggacccccccctgcccaccacccccacctctgtgaactaccacttcacccggcagtgcaactacaagtgtggcttctgcttccacacagccaagaccagctttgtgctgcccctggaggaggccaagaggggcctgctgctgctgaaggaggccggcatggagaagatcaacttctctggaggagagcccttcctgcaggacagaggagagtacctgggcaagctggtgcgcttctgcaaggtggagctgcggctgcccagcgtgtccatcgtgtccaatggcagcctcatccgggagcgctggttccagaactatggagagtacctggacatcctggccatcagctgtgacagctttgatgaggaggtgaatgtgctgattggccggggccagggcaagaagaaccacgtggagaacctgcagaagctgcggcgctggtgccgggactacagagtggccttcaagatcaacagcgtcatcaaccgcttcaacgtggaggaggacatgacagagcagatcaaggccctgaaccctgtgcgctggaaggtgttccagtgcctgctgattgaaggagagaactgtggggaggatgccctgcgggaggccgagagatttgtgattggagatgaggagtttgagcgcttcctggagcggcacaaggaggtgtcctgcctggtgcctgagagcaaccagaagatgaaggacagctacctgatcctggatgagtacatgaggttcctgaactgcaggaaaggaaggaaggaccccagcaagagcatcctggatgtgggcgtggaggaggccatcaagttcagcggctttgatgagaagatgttcctgaagagaggaggcaagtacatctggagcaaggctgacctgaagctggactggtag

SEQ ID NO: 167034 - DNA, 765 bp, synthetic construct
  misc_feature 1..765: note = Description of Artificial Sequence: Synthetic coding sequence
  source 1..765: mol_type = other DNA
atgctgcacagcagccactacccaggcatggagaagatcaacttcagcggcggggagcccttcctgcaggacagaggagagtacctgggcaagctggtgcgcttctgcaaggtggagctgcggctgcccagcgtgtccatcgtgtccaatggcagcctcatccgggagcgctggttccagaactacggggagtacctggacatcctggccatcagctgtgacagctttgatgaggaggtgaatgtgctgattggccggggccagggcaagaagaaccacgtggagaacctgcagaagctgcggcgctggtgccgggactacagagtggccttcaagatcaacagcgtcatcaaccgcttcaacgtggaggaggacatgacagagcagatcaaggccctgaaccctgtgcgctggaaggtgttccagtgcctgctgattgaaggagagaactgtggagaagatgccctgcgggaggccgagagatttgtgattggagatgaggagtttgagcgcttcctggagcggcacaaggaggtgtcctgcctggtgcctgagagcaaccagaagatgaaggacagctacctgatcctggatgagtacatgaggttcctgaactgcaggaagggcaggaaggaccccagcaagagcatcctggatgtgggcgtggaggaggccatcaagttcagcggctttgatgagaagatgttcctgaagaggggcggcaagtacatctggagcaaggctgacctgaagctggactggtag

SEQ ID NO: 167035 - DNA, 1674 bp, synthetic construct
  misc_feature 1..1674: note = Description of Artificial Sequence: Synthetic coding sequence
  source 1..1674: mol_type = other DNA
atgtacaagagaaatggcctgatggcctctgtgctggtgaccagcgccaccccccagggcagcagcagcagtgacagcctggagggccagagctgtgactatgccagcaagagctatgatgctgtggtgtttgatgtgctgaaggtgaccccagaggagtttgccagccagatcaccctgatggacatccctgtgttcaaggccatccagcctgaggagctggccagctgtggctggagcaagaaggagaagcacagcctggcccccaacgtggtggccttcacccggcgcttcaaccaggtgtccttctgggtggtgcgggagatcctgacagcccagaccctgaagatccgggcagagatcctgagccactttgtgaagatcgccaagaagctgctggagctgaacaacctgcacagcctgatgtctgtggtgtctgccctgcagagcgcccccatcttccggctgaccaagacctgggccctgctgaacaggaaggacaagaccacctttgagaagctggactacctgatgagcaaagaagacaactacaagaggacccgggagtacatccgcagcctgaagatggtgcccagcatcccctacctgggcatctacctgctggacctgatctacattgattctgcctacccagccagcggcagcatcatggagaatgagcagaggagcaaccagatgaacaacatcctgcgcatcatcgctgacctgcaggtgtcctgcagctatgaccacctgaccaccctgccccacgtgcagaagtacctgaagtctgtgcgctacatcgaggagctgcagaagtttgtggaggatgacaactacaagctgagcctgcgcatcgagcccggcagcagcagcccccggctggtgagcagcaaggaggacctggccggccccagcgctggcagcggcagcgcccgcttcagccggcggcccacctgcccagacacctctgtggccggcagcctgcccaccccacctgtgcccaggcacaggaagagccacagcctgggcaacaacatgatgtgccagctgtctgtggtggagagcaagagcgccaccttccccagcgagaaggcccggcacctgctggatgattctgtgctggagagccgcagcccccggcggggcctggccctgaccagcagcagcgctgtgaccaacggcctgagcctgggcagcagcgagagcagcgagttcagcgaggagatgagcagcggcctggagagccccaccggcccctgcatctgcagcctgggcaacagcgctgctgtgcccaccatggagggccccctgcggaggaagaccctgctgaaggagggcaggaagccagccctgagctcctggacccgctactgggtgatcctgagcggcagcaccctgctgtactacggggccaagagcctgcggggcacagacaggaagcactacaagagcaccccaggcaagaaggtgtccatcgtgggctggatggtgcagctgcctgatgatcctgagcacccagacatcttccagctgaacaacccagacaagggaaatgtgtacaagttccagacaggcagccgcttccacgccatcctgtggcacaagcacctggatgatgcctgcaagagcaaccggccccaggtgcctgccaacctgatgagctttgaatag

SEQ ID NO: 167036 - DNA, 522 bp, synthetic construct
  misc_feature 1..522: note = Description of Artificial Sequence: Synthetic coding sequence
  source 1..522: mol_type = other DNA
atgtacaagagaaatggcctgatggcctctgtgctggtgaccagcgccaccccccagggcagcagcagcagtgacagcctggagggccagagctgtgactatgccagcaagagctatgatgctgtggtgtttgatgtgctgaaggtgaccccagaggagtttgccagccagatcaccctgatggacatccctgtgttcaaggccatccagcctgaggagctggccagctgtggctggagcaagaaggagaagcacagcctggcccccaacgtggtggccttcacccggcgcttcaaccagaagctgctggagctgaacaacctgcacagcctgatgtctgtggtgtctgccctgcagagcgcccccatcttccggctgaccaagacctgggccctgctgaacaggaaggacaagaccacctttgagaagctggactacctgatgagcaaagaagacaactacaagaggacccgggagtacatccgcagcctgaagatggtgcccagcatcccctacctgtag

SEQ ID NO: 167037 - DNA, 1590 bp, synthetic construct
  misc_feature 1..1590: note = Description of Artificial Sequence: Synthetic coding sequence
  source 1..1590: mol_type = other DNA
atgtacaagagaaatggcctgatggcctctgtgctggtgaccagcgccaccccccagggcagcagcagcagtgacagcctggagggccagagctgtgactatgccagcaagagctatgatgctgtggtgtttgatgtgctgaaggtgaccccagaggagtttgccagccagatcaccctgatggacatccctgtgttcaaggccatccagcctgaggagctggccagctgtggctggagcaagaaggagaagcacagcctggcccccaacgtggtggccttcacccggcgcttcaaccaggtgtccttctgggtggtgcgggagatcctgacagcccagaccctgaagatccgggcagagatcctgagccactttgtgaagatcgccaagaagctgctggagctgaacaacctgcacagcctgatgtctgtggtgtctgccctgcagagcgcccccatcttccggctgaccaagacctgggccctgctgaacaggaaggacaagaccacctttgagaagctggactacctgatgagcaaagaagacaactacaagaggacccgggagtacatccgcagcctgaagatggtgcccagcatcccctacctgggcatctacctgctggacctgatctacattgattctgcctacccagccagcggcagcatcatggagaatgagcagaggagcaaccagatgaacaacatcctgcgcatcatcgctgacctgcaggtgtcctgcagctatgaccacctgaccaccctgccccacgtgcagaagtacctgaagtctgtgcgctacatcgaggagctgcagaagtttgtggaggatgacaactacaagctgagcctgcgcatcgagcccggcagcagcagcccccggctggtgagcagcaaggaggacctggccggccccagcgctggcagcggcagcgcccgcttcagccggcggcccacctgcccagacacctctgtggccggcagcctgcccaccccacctgtgcccaggcacaggaagagccacagcctgggcaacaacagaggccgcctgtatgccaccctgggccccaactggagggtgcctgtgaggaacagccccaggaccaggagctgtgtgtacagccccaccggcccctgcatctgcagcctgggcaacagcgctgctgtgcccaccatggagggccccctgcggaggaagaccctgctgaaggagggcaggaagccagccctgagctcctggacccgctactgggtgatcctgagcggcagcaccctgctgtactacggggccaagagcctgcggggcacagacaggaagcacgtgtccatcgtgggctggatggtgcagctgcctgatgatcctgagcacccagacatcttccagctgaacaacccagacaagggaaatgtgtacaagttccagacaggcagccgcttccacgccatcctgtggcacaagcacctggatgatgcctgcaagagcaaccggccccaggaggccggggccgcccctggccccactggaacagacagccatgaggtggaccacctggagggcggggccggcaaggaggccggcccctgtgcctag

SEQ ID NO: 167038 - DNA, 918 bp, synthetic construct
  misc_feature 1..918: note = Description of Artificial Sequence: Synthetic coding sequence
  source 1..918: mol_type = other DNA
atgtacaagagaaatggcctgatggcctctgtgctggtgaccagcgccaccccccagggcagcagcagcagtgacagcctggagggccagagctgtgactatgccagcaagagctatgatgctgtggtgtttgatgtgctgaaggtgaccccagaggagtttgccagccagatcaccctgatggacatccctgtgttcaaggccatccagcctgaggagctggccagctgtggctggagcaagaaggagaagcacagcctggcccccaacgtggtggccttcacccggcgcttcaaccaggtgtccttctgggtggtgcgggagatcctgacagcccagaccctgaagatccgggcagagatcctgagccactttgtgaagatcgccaagaagctgctggagctgaacaacctgcacagcctgatgtctgtggtgtctgccctgcagagcgcccccatcttccggctgaccaagacctgggccctgctgaacaggaaggacaagaccacctttgagaagctggactacctgatgagcaaagaagacaactacaagaggacccgggagtacatccgcagcctgaagatggtgcccagcatcccctacctgggcatctacctgctggacctgatctacattgattctgcctacccagccagcggcagcatcatggagaatgagcagaggagcaaccagatgaacaacatcctgcgcatcatcgctgacctgcaggtgtcctgcagctatgaccacctgaccaccctgccccacgtgcagaagtacctgaagtctgtgcgctacatcgaggagctgcagaagtttgtggaggatgacaactacaagctgagcctgcgcatcgagcccggcagcagcagcccccggctggtgagcagcaaggaggacctggccgccatgtag

SEQ ID NO: 167039 - DNA, 642 bp, synthetic construct
  misc_feature 1..642: note = Description of Artificial Sequence: Synthetic coding sequence
  source 1..642: mol_type = other DNA
atgtacaagagaaatggcctgatggcctctgtgctggtgaccagcgccaccccccagggcagcagcagcagtgacagcctggagggccagagctgtgactatgccagcaagagctatgatgctgtggtgtttgatgtgctgaaggtgaccccagaggagtttgccagccagatcaccctgatggacatccctgtgttcaaggccatccagcctgaggagctggccagctgtggctggagcaagaaggagaagcacagcctggcccccaacgtggtggccttcacccggcgcttcaaccaggtgtccttctgggtggtgcgggagatcctgacagcccagaccctgaagatccgggcagagatcctgagccactttgtgaagatcgccaagaagctgctggagctgaacaacctgcacagcctgatgtctgtggtgtctgccctgcagagcgcccccatcttccggctgaccaagacctgggccctgctgaacaggaaggacaagaccacctttgagaagctggactacctgatgagcaaagaagacaactacaagaggacccgggagtacatccgcagcctgaagatggtgcccagcatcccctacctgggccgcagcctgaactggctgatcttcttctag

SEQ ID NO: 167040 - DNA, 327 bp, synthetic construct
  misc_feature 1..327: note = Description of Artificial Sequence: Synthetic coding sequence
  source 1..327: mol_type = other DNA
atgtacaagagaaatggcctgatggcctctgtgctggtgaccagcgccaccccccagggcagcagcagcagtgacagcctggagggccagagctgtgactatgccagcaagagctatgatgctgtggtgtttgatgtgctgaaggtgaccccagaggagtttgccagccagatcaccctgatggacatccctgtgttcaaggccatccagcctgagaagggctggccagccaggatggaggacagcctgcagaagagcacagtgagcagccggccccatgacaccctgcagttcaggaagaccctgcctgtgggccctggcacctag

SEQ ID NO: 167041 - DNA, 1155 bp, synthetic construct
  misc_feature 1..1155: note = Description of Artificial Sequence: Synthetic coding sequence
  source 1..1155: mol_type = other DNA
atgtacaagagaaatggcctgatggcctctgtgctggtgaccagcgccaccccccagggcagcagcagcagtgacagcctggagggccagagctgtgactatgccagcaagagctatgatgctgtggtgtttgatgtgctgaaggtgaccccagaggagtttgccagccagatcaccctgatggacatccctgtgttcaaggccatccagcctgaggagctggccagctgtggctggagcaagaaggagaagcacagcctggcccccaacgtggtggccttcacccggcgcttcaaccaggtgtccttctgggtggtgcgggagatcctgacagcccagaccctgaagatccgggcagagatcctgagccactttgtgaagatcgccaagaagctgctggagctgaacaacctgcacagcctgatgtctgtggtgtctgccctgcagagcgcccccatcttccggctgaccaagacctgggccctgctgaacaggaaggacaagaccacctttgagaagctggactacctgatgagcaaagaagacaactacaagaggacccgggagtacatccgcagcctgaagatggtgcccagcatcccctacctgggcatctacctgctggacctgatctacattgattctgcctacccagccagcggcagcatcatggagaatgagcagaggagcaaccagatgaacaacatcctgcgcatcatcgctgacctgcaggtgtcctgcagctatgaccacctgaccaccctgccccacgtgcagaagtacctgaagtctgtgcgctacatcgaggagctgcagaagtttgtggaggatgacaactacaagctgagcctgcgcatcgagcccggcagcagcagcccccggctggtgagcagcaaggaggacctggccgtgagccacctgagcagcctgagccaccagggccaggccgaggaggcccggctgaagcccaccagcggccagcacccagcctggatgtggcccagcagcagccgggtgcctgctgcccccccagccagcgctgcccccaggagcccctggcccaggaacctgagaaatgaccagggccagcccggggctgtggccctgacctgcaaccccagcaccctgggcagccgcagccgccgcatcacctag

SEQ ID NO: 167042 - DNA, 1614 bp, synthetic construct
  misc_feature 1..1614: note = Description of Artificial Sequence: Synthetic coding sequence
  source 1..1614: mol_type = other DNA
atgtacaagagaaatggcctgatggcctctgtgctggtgaccagcgccaccccccagggcagcagcagcagtgacagcctggagggccagagctgtgactatgccagcaagagctatgatgctgtggtgtttgatgtgctgaaggtgaccccagaggagtttgccagccagatcaccctgatggacatccctgtgttcaaggccatccagcctgaggagctggccagctgtggctggagcaagaaggagaagcacagcctggcccccaacgtggtggccttcacccggcgcttcaaccaggtgtccttctgggtggtgcgggagatcctgacagcccagaccctgaagatccgggcagagatcctgagccactttgtgaagatcgccaagaagctgctggagctgaacaacctgcacagcctgatgtctgtggtgtctgccctgcagagcgcccccatcttccggctgaccaagacctgggccctgctgaacaggaaggacaagaccacctttgagaagctggactacctgatgagcaaagaagacaactacaagaggacccgggagtacatccgcagcctgaagatggtgcccagcatcccctacctgggcatctacctgctggacctgatctacattgattctgcctacccagccagcggcagcatcatggagaatgagcagaggagcaaccagatgaacaacatcctgcgcatcatcgctgacctgcaggtgtcctgcagctatgaccacctgaccaccctgccccacgtgcagaagtacctgaagtctgtgcgctacatcgaggagctgcagaagtttgtggaggatgacaactacaagctgagcctgcgcatcgagcccggcagcagcagcccccggctggtgagcagcaaggaggacctggccggccccagcgctggcagcggcagcgcccgcttcagccggcggcccacctgcccagacacctctgtggccggcagcctgcccaccccacctgtgcccaggcacaggaagagccacagcctgggcaacaacagaggccgcctgtatgccaccctgggccccaactggagggtgcctgtgaggaacagccccaggaccaggagctgtgtgtacagccccaccggcccctgcatctgcagcctgggcaacagcgctgctgtgcccaccatggagggccccctgcggaggaagaccctgctgaaggagggcaggaagccagccctgagctcctggacccgctactgggtgatcctgagcggcagcaccctgctgtactacggggccaagagcctgcggggcacagacaggaagcactacaagagcaccccaggcaagaaggtgtccatcgtgggctggatggtgcagctgcctgatgatcctgagcacccagacatcttccagctgaacaacccagacaagggaaatgtgtacaagttccagacaggcagccgcttccacgccatcctgtggcacaagcacctggatgatgcctgcaagagcaaccggccccaggaggccggggccgcccctggccccactggaacagacagccatgaggtggaccacctggagggcggggccggcaaggaggccggcccctgtgcctag

SEQ ID NO: 167043 - DNA, 462 bp, synthetic construct
  misc_feature 1..462: note = Description of Artificial Sequence: Synthetic coding sequence
  source 1..462: mol_type = other DNA
tgaaacagccccaggaccaggagctgtgtgtacagccccaccggcccctgcatctgcagcctgggcaacagcgctgctgtgcccaccatggagggccccctgcggaggaagaccctgctgaaggagggcaggaagccagccctgagctcctggacccgctactgggtgatcctgagcggcagcaccctgctgtactacggggccaagagcctgcggggcacagacaggaagcactacaagagcaccccaggcaagaaggtgtccatcgtgggctggatggtgcagctgcctgatgatcctgagcacccagacatcttccagctgaacaacccagacaagggaaatgtgtacaagttccagacaggcagccgcttccacgccatcctgtggcacaagcacctggatgatgcctgcaagagcaaccggccccaggtgcctgccaacctgatgagctttgaatag

SEQ ID NO: 167044 - DNA, 6252 bp, synthetic construct
  misc_feature 1..6252: note = Description of Artificial Sequence: Synthetic coding sequence
  source 1..6252: mol_type = other DNA
atgttcagcaagaagccccatggagatgtgaagaagagcacccagaaggtgctggacaccaagaaggatgccctgacccggctgaagcacctgagaattgtgattgaaaatgctgagagcattgacctgaagcagttctttgaccagcacttcagccacatctactacgtgttctttgagaactttgtgaccatcgaggccagcctgaagcagaagggccacaagagccagcgggaggagctggatgccatcctcttcatctttgagaagatcctgcagctgctgcctgagcgcatccaccagcgctggcagttccacagcatcggcctcatcctgaagaagctgctgcacacaggcaacagcctgaagatcagaagagagggcgtgcggctcttcctgctgtggctgcaggccctgcagaacaactgcagcaaggagcagctgtggatgttcagctgcctgatccctggcttcagcgccccccagagcgagcacggccccaggaccctggacaacctgatcaacccccccctgaacctgcaggagacccaggtgaccatcgaggagatcacccccctggtgcccccccagagcggggacaagggccaggaggacctgaccagctacttcctggaggccctgctgaagtacatcgtcatccaggtgaagagcctggagtggaagaacaaggagaaccaggagcggggcttctccttcctgttcagccacttcaagaagtactacctgccctacatcttccccaacatctgcaaggagaacagcctgtaccaccccatcctggacatcccccagatgaggcccaagccccactacgtggtgatcaagaaggatgctgagaccaatgaggccatctactgcaccaaggagcccttcatcaaggcccgggtcatcgtcatccgctggctggtgtccttctggctggagcccaagccccacacaggcccccacatccctggcatggagggggaggtgctgcccaagaacatccagagagctgctgccagcctggtgtcccgggaggagagcaagaatgacaatgctgacaagacagacaggaccacagagcctgagcagagccacagcaacaccagcaccctgacagagcgggagcccagcagcagcagcctgtgcagcattgatgaggagcacctgacagacatcgagatcgtgcggcgggtcttcagcagcaagaggagcaatgtgaactttgtgacagagatcttccggcaggccttcctgctgcccatctgtgaggccgccgccatgaggaaggtggtgaaggtgtaccaggagtggatccagcaggaggagaagcccctcttcatgcaggagcctgaggagatcgtcatcaccagcagtgacctgccctgcattgaaaatgtgacagaccatgacatctccatggaggagggggagaagcgggaggaggagaatggcaccaacacagctgaccacgtgaggaacagctcctgggccaagaatggcagctaccagggcgccctgcacaatgccagcgaggaggccacagagcagaacatccgggccggcacccaggccgtgctgcaggtgttcatcatcaacagcagcaacatcttcctgctggagcccgccaatgagatcaagaacctgctggatgagcacacagacatgtgcaagaggatcctgaacatctaccgctacatggtggtgcaggtgtccatggacaagaagacctgggagcagatgctgctggtgctgctgcgggtgacagagagcgtgctgaagatgcccagccaggccttcctgcagttccagggcaagaagaacatgaccctggccggccgcctggccggccccctcttccagaccctgattgtggcctggatcaaggccaacctgaatgtgtacatcagccgggagctgtgggatgacctgctgtctgtgctgagcagcctgacctactgggaggagctggccacagagtggagcctgaccatggagaccctgaccaaggtgctggccaggaacctgtacagcctggacctgagtgacctgcccctggacaagctgtctgagcagaagcagaagaagcacaagggcaaaggagtgggccacgagttccagaaggtgtctgtggacaagagcttcagccggggctggagccgggaccagcccggccaggcccccatgaggcagaggtctgccaccaccaccggcagccctggaacagagaaggcccggagcatcgtgcggcagaagacagtggccatgaggagccgcagcatcggggagtgtgccctgcccagcgcctacatccgcagcgccaagagcgcccctgtgctgatccacaccagcaagcccttcctgcctgacatcgtgctgacccccctgagtgatgagctgagtgacattgatgatgcccagatcctgcccaggagcaccagggtgcgccacttcagccagagcgaggagactggaaatgaggtgtttggagccctgaatgaggagcagcccctgcccaggagcagcagcaccagtgacatcctggagcccttcaccgtggagcgggccaaggtgaacaaggaggacatgagccagaagctgccccccctgaacagcgacattggaggcagcagcgccaacgtgcctgacctgatggatgagttcatcgccgagcggctgcggtctggaaatgccagcaccatgacccggcggggcagcagccctggcagcctggagatccccaaggacctgcctgacatcctgaacaagcagaaccagatgaggcccattgatgaccccggggtgcccagcgagtggaccagccctgccagcgctggcagcagtgacctgatcagcagtgacagccacagcgacagcttcagcgccttccagtatgatggcaggaagtttgacaactttggcttcggcacagacaccggggtgaccagcagcgcagatgtggacagcggcagcggccaccaccagagcgctgaggagcaggaggtggccagcctgaccaccctgcacattgattctgagaccagcagcctgaaccagcaggccttctctgctgaggtggccaccatcactggaagtgaaagtgccagccctgtgcacagccccctgggcagccgcagccagacccccagccccagcaccctgaacatcgaccacatggagcagaaggacctgcagctggatgagaagctgcaccacagcgtgctgcagaccccagatgacctggagatcagcgagttccccagcgagtgctgcagcgtgatggccggcggcaccctgaccggctggcatgctgatgtggccaccgtgatgtggaggaggatgctgggcatcctgggagatgtgaacagcatcatggaccctgagatccacgcccaggtgtttgactacctgtgtgagctgtggcagaacctggccaagatccgggacaacctgggcatcagcacagacaacctgaccagccccagcccccctgtgctgatcccccccctgcgcatcctgaccccctggctgttcaaggccaccatgctgacagacaagtacaagcagggcaagctgcacgcctacaagctgatctgcaacaccatgaagaggcggcaggatgtgagccccaacagagacttcctgacccacttctacaacatcatgcactgcggcctgctgcacatcgaccaggacatcgtgaacaccatcatcaagcactgcagcccccagttcttcagcctgggcctgcccggggccaccatgctgatcatggacttcatcgtggccgccggccgggtggccagcagcgccttcctgaatgccccccgggtggaggcccaggtgctgctgggcagcctggtgtgcttccccaacctgtactgtgagctgcccagcctgcaccccaacatcccagatgtggccgtgtcccagttcacagatgtgaaggagctgatcatcaagacagtgctgagcagcgccagagatgagcccagcggccctgcccgctgtgtggccctgtgcagcctgggcatctggatctgtgaggagctggtgcatgagagccaccacccccagatcaaggaggccctgaatgtcatctgtgtgtccctgaagttcaccaacaagacagtggcccacgtggcctgcaacatgctgcacatgctggtgcactacgtgccccggctgcagatctaccagcctgacagccccctgaagatcatccagatcctgattgccaccatcacccacctgctgcccagcacagaggccagcagctatgagatggacaagaggctggtggtgtccctgctgctgtgcctgctggactggatcatggccctgcccctgaagaccctgctgcagcccttccacgccactggagctgagagtgacaagacagagaagtctgtgctgaactgcatctacaaggtgctgcacggctgtgtgtatggagcccagtgcttcagcaacccccgctacttccccatgagcctgagtgacctggcctctgtggactatgaccccttcatgcacctggagagcctgaaggagcctgagcccctgcacagcccagacagcgagaggagcagcaagctgcagcctgtgacagaggtgaagacccagatgcagcacggcctcatcagcattgctgccaggacagtcatcacccacctggtgaaccacctgggccactaccccatgtctgggggccctgccatgctgaccagccaggtgtgtgagaaccacgacaaccactacagcgagagcacagagctgagccctgagctgtttgagagccccaacatccagttctttgtgctgaacaacaccaccctggtgtcctgcatccagatccgctctgaggagaacatgcctgggggcggcctgtctgctggcctggccagcgccaacagcaatgtgcgcatcatcgtgcgggacctgagcggcaagtacagctgggacagcgccatcctgtatggccccccacctgtgtctggcctgtctgagcccaccagcttcatgctgagcctgagccaccaggagaagccagaggagccccccaccagcaatgaatgtctggaggacatcaccgtgaaggatggcctgagcctgcagttcaagcgcttccgggagaccgtgcccacctgggacaccatcagagatgaagaagatgtgctggatgagctgctgcagtacctgggcgtgaccagcccagaatgtctgcagaggacaggcatcagcctgaacatcccagccccccagcctgtgtgcatcagcgagaagcaggagaatgatgtgatcaatgccatcctgaagcagcacacagaggagaaggagtttgtggagaagcacttcaatgacctgaacatgaaggctgtggagcaggatgagcccatcccccagaagccccagagcgccttctactactgccgcctgctgctgagcatcctgggcatgaacagctgggacaagagaagaagcttccacctgctgaagaagaatgagaagctgctgcgggagctgaggaacctggacagccggcagtgccgggagacccacaagattgctgtgttctacgtggccgagggccaggaggacaagcacagcatcctgaccaacacaggaggcagccaggcctatgaagattttgtggccggcctgggctgggaggtgaacctgaccaaccactgcggcttcatgggcggcctgcagaagaacaagagcacaggcctgaccaccccctactttgccaccagcacagtggaggtgatcttccacgtgtccaccaggatgcccagcgacagtgatgacagcctgaccaagaagctgcggcacctgggcaatgatgaggtgcacatcgtgtggagcgagcacacccgggactacagaagaggcatcatccccacagaatttggagatgtgctgattgtcatctaccccatgaagaaccacatgttcagcatccagatcatgaagaagccagaggtgcccttcttcggccccctgtttgatggagccatcgtgaatggcaaggtgctgcccatcatggtgcgggccacagccatcaatgccagccgggccctgaagagcctcatccccctgtaccagaacttctatgaggagcgggcccgctacctgcagaccatcgtgcagcaccacctggagcccaccacctttgaggactttgctgcccaggtgttctccccagccccctaccaccacctgcccagtgatgctgaccactag

SEQ ID NO: 167045 - DNA, 6252 bp, synthetic construct
  misc_feature 1..6252: note = Description of Artificial Sequence: Synthetic coding sequence
  source 1..6252: mol_type = other DNA
atgttcagcaagaagccccatggagatgtgaagaagagcacccagaaggtgctggacaccaagaaggatgccctgacccggctgaagcacctgagaattgtgattgaaaatgctgagagcattgacctgaagcagttctttgaccagcacttcagccacatctactacgtgttctttgagaactttgtgaccatcgaggccagcctgaagcagaagggccacaagagccagcgggaggagctggatgccatcctcttcatctttgagaagatcctgcagctgctgcctgagcgcatccaccagcgctggcagttccacagcatcggcctcatcctgaagaagctgctgcacacaggcaacagcctgaagatcagaagagagggcgtgcggctcttcctgctgtggctgcaggccctgcagaacaactgcagcaaggagcagctgtggatgttcagctgcctgatccctggcttcagcgccccccagagcgagcacggccccaggaccctggacaacctgatcaacccccccctgaacctgcaggagacccaggtgaccatcgaggagatcacccccctggtgcccccccagagcggggacaagggccaggaggacctgaccagctacttcctggaggccctgctgaagtacatcgtcatccaggtgaagagcctggagtggaagaacaaggagaaccaggagcggggcttctccttcctgttcagccacttcaagaagtactacctgccctacatcttccccaacatctgcaaggagaacagcctgtaccaccccatcctggacatcccccagatgaggcccaagccccactacgtggtgatcaagaaggatgctgagaccaatgaggccatctactgcaccaaggagcccttcatcaaggcccgggtcatcgtcatccgctggctggtgtccttctggctggagcccaagccccacacaggcccccacatccctggcatggagggggaggtgctgcccaagaacatccagagagctgctgccagcctggtgtcccgggaggagagcaagaatgacaatgctgacaagacagacaggaccacagagcctgagcagagccacagcaacaccagcaccctgacagagcgggagcccagcagcagcagcctgtgcagcattgatgaggagcacctgacagacatcgagatcgtgcggcgggtcttcagcagcaagaggagcaatgtgaactttgtgacagagatcttccggcaggccttcctgctgcccatctgtgaggccgccgccatgaggaaggtggtgaaggtgtaccaggagtggatccagcaggaggagaagcccctcttcatgcaggagcctgaggagatcgtcatcaccagcagtgacctgccctgcattgaaaatgtgacagaccatgacatctccatggaggagggggagaagcgggaggaggagaatggcaccaacacagctgaccacgtgaggaacagctcctgggccaagaatggcagctaccagggcgccctgcacaatgccagcgaggaggccacagagcagaacatccgggccggcacccaggccgtgctgcaggtgttcatcatcaacagcagcaacatcttcctgctggagcccgccaatgagatcaagaacctgctggatgagcacacagacatgtgcaagaggatcctgaacatctaccgctacatggtggtgcaggtgtccatggacaagaagacctgggagcagatgctgctggtgctgctgcgggtgacagagagcgtgctgaagatgcccagccaggccttcctgcagttccagggcaagaagaacatgaccctggccggccgcctggccggccccctcttccagaccctgattgtggcctggatcaaggccaacctgaatgtgtacatcagccgggagctgtgggatgacctgctgtctgtgctgagcagcctgacctactgggaggagctggccacagagtggagcctgaccatggagaccctgaccaaggtgctggccaggaacctgtacagcctggacctgagtgacctgcccctggacaagctgtctgagcagaagcagaagaagcacaagggcaaaggagtgggccacgagttccagaaggtgtctgtggacaagagcttcagccggggctggagccgggaccagcccggccaggcccccatgaggcagaggtctgccaccaccaccggcagccctggaacagagaaggcccggagcatcgtgcggcagaagacagtggacattgatgatgcccagatcctgcccaggagcaccagggtgcgccacttcagccagagcgaggagactggaaatgaggtgtttggagccctgaatgaggagcagcccctgcccaggagcagcagcaccagtgacatcctggagcccttcaccgtggagcgggccaaggtgaacaaggaggacatgagccagaagctgccccccctgaacagcgacatcggcggcagcagcgccaacgtgcctgacctgatggatgagttcatcgccgagcggctgcggtctggaaatgccagcaccatgacccggcggggcagcagccctggcagcctggagatccccaaggacctgcctgacatcctgaacaagcagaaccagatgaggcccattgatgatcctggggtgcccagcgagtggaccagccctgccagcgctggcagcagtgacctgatcagcagtgacagccacagcgacagcttcagcgccttccagtatgatggcaggaagtttgacaactttggatttggaacagacacaggagtgaccagcagcgcagatgtggacagcggcagcggccaccaccagagcgctgaggagcaggaggtggccagcctgaccaccctgcacatcgacagcgagaccagcagcctgaaccagcaggccttctctgctgaggtggccaccatcaccggcagcgagagcgccagccctgtgcacagccccctgggcagccgcagccagacccccagccccagcaccctgaacatcgaccacatggagcagaaggacctgcagctggatgagaagctgcaccacagcgtgctgcagaccccagatgacctggagatcagcgagttccccagcgagtgctgcagcgtgatggccggcggcaccctgaccggctggcacgcagatgtggccaccgtgatgtggaggaggatgctgggcatcctgggagatgtgaacagcatcatggaccctgagatccacgcccaggtgtttgactacctgtgtgagctgtggcagaacctggccaagatccgggacaacctgggcatcagcacagacaacctgaccagccccagcccccctgtgctgatcccccccctgcgcatcctgaccccctggctgttcaaggccaccatgctgacagacaagtacaagcagggcaagctgcacgcctacaagctgatctgcaacaccatgaagaggcggcaggatgtgagccccaacagagacttcctgacccacttctacaacatcatgcactgcggcctgctgcacatcgaccaggacatcgtgaacaccatcatcaagcactgcagcccccagttcttcagcctgggcctgcccggggccaccatgctgatcatggacttcatcgtggccgccggccgggtggccagcagcgccttcctgaatgccccccgggtggaggcccaggtgctgctgggcagcctggtgtgcttccccaacctgtactgtgagctgcccagcctgcaccccaacatcccagatgtggccgtgtcccagttcacagatgtgaaggagctgatcatcaagacagtgctgagcagcgccagagatgagcccagcggccctgcccgctgtgtggccctgtgcagcctgggcatctggatctgtgaggagctggtgcatgagagccaccacccccagatcaaggaggccctgaatgtcatctgtgtgtccctgaagttcaccaacaagacagtggcccacgtggcctgcaacatgctgcacatgctggtgcactacgtgccccggctgcagatctaccagcctgacagccccctgaagatcatccagatcctgattgccaccatcacccacctgctgcccagcacagaggccagcagctatgagatggacaagaggctggtggtgtccctgctgctgtgcctgctggactggatcatggccctgcccctgaagaccctgctgcagcccttccacgccaccggggctgagagtgacaagacagagaagtctgtgctgaactgcatctacaaggtgctgcacggctgtgtgtatggagcccagtgcttcagcaacccccgctacttccccatgagcctgagtgacctggcctctgtggactatgaccccttcatgcacctggagagcctgaaggagcctgagcccctgcacagcccagattctgagaggagcagcaagctgcagcctgtgacagaggtgaagacccagatgcagcacggcctcatcagcattgctgccaggacagtcatcacccacctggtgaaccacctgggccactaccccatgtctgggggccctgccatgctgaccagccaggtgtgtgaaaatcatgacaaccactacagcgagagcacagagctgagccctgagctgtttgagagccccaacatccagttctttgtgctgaacaacaccaccctggtgtcctgcatccagatccgctctgaggagaacatgcctgggggcggcctgtctgctggcctggccagcgccaacagcaatgtgcgcatcatcgtgcgggacctgagcggcaagtacagctgggacagcgccatcctgtatggccccccacctgtgtctggcctgtctgagcccaccagcttcatgctgagcctgagccaccaggagaagccagaggagccccccaccagcaatgaatgtctggaggacatcaccgtgaaggatggcctgagcctgcagttcaagcgcttccgggagaccgtgcccacctgggacaccatcagagatgaggaggatgtgctggatgagctgctgcagtacctgggcgtgaccagccctgagtgcctgcagaggacaggcatcagcctgaacatcccagccccccagcctgtgtgcatcagcgagaagcaggagaatgatgtgatcaatgccatcctgaagcagcacacagaggagaaggagtttgtggagaagcacttcaatgacctgaacatgaaggctgtggagcaggatgagcccatcccccagaagccccagagcgccttctactactgccgcctgctgctgagcatcctgggcatgaacagctgggacaagaggaggagcttccacctgctgaagaagaatgagaagctgctgcgggagctgaggaacctggacagccggcagtgccgggagacccacaagattgctgtgttctacgtggccgagggccaggaggacaagcacagcatcctgaccaacacaggaggcagccaggcctatgaggactttgtggccggcctgggctgggaggtgaacctgaccaaccactgcggcttcatgggcggcctgcagaagaacaagagcacaggcctgaccaccccctactttgccaccagcacagtggaggtgatcttccacgtgtccaccaggatgcccagcgacagtgatgacagcctgaccaagaagctgcggcacctgggcaatgatgaggtgcacatcgtgtggagcgagcacacccgggactaccgccggggcatcatccccacagaatttggagatgtgctgattgtcatctaccccatgaagaaccacatgttcagcatccagatcatgaagaagccagaggtgcccttcttcggccccctgtttgatggagccatcgtgaatggcaaggtgctgcccatcatggtgcgggccacagccatcaatgccagccgggccctgaagagcctcatccccctgtaccagaacttctatgaggagcgggcccgctacctgcagaccatcgtgcagcaccacctggagcccaccacctttgaagattttgctgcccaggtgttcagccctgccccctaccaccacctgcccagtgatgctggcagctacccagagatcctgcccagcgagacccccacagccacccaggtggatggagctgacctggccagccccatgagccccaggaccagcaagagcaggatgtccatgaagctgcggcgcagcagcggcagcgccaacaagagctag

SEQ ID NO: 167046 - DNA, 6222 bp, synthetic construct
  misc_feature 1..6222: note = Description of Artificial Sequence: Synthetic coding sequence
  source 1..6222: mol_type = other DNA
atgttcagcaagaagccccatggagatgtgaagaagagcacccagaaggtgctggacaccaagaaggatgccctgacccggctgaagcacctgagaattgtgattgaaaatgctgagagcattgacctgaagcagttctttgaccagcacttcagccacatctactacgtgttctttgagaactttgtgaccatcgaggccagcctgaagcagaagggccacaagagccagcgggaggagctggatgccatcctcttcatctttgagaagatcctgcagctgctgcctgagcgcatccaccagcgctggcagttccacagcatcggcctcatcctgaagaagctgctgcacacaggcaacagcctgaagatcagaagagagggcgtgcggctcttcctgctgtggctgcaggccctgcagaacaactgcagcaaggagcagctgtggatgttcagctgcctgatccctggcttcagcgccccccagagcgagcacggccccaggaccctggacaacctgatcaacccccccctgaacctgcaggagacccaggtgaccatcgaggagatcacccccctggtgcccccccagagcggggacaagggccaggaggacctgaccagctacttcctggaggccctgctgaagtacatcgtcatccaggtgaagagcctggagtggaagaacaaggagaaccaggagcggggcttctccttcctgttcagccacttcaagaagtactacctgccctacatcttccccaacatctgcaaggagaacagcctgtaccaccccatcctggacatcccccagatgaggcccaagccccactacgtggtgatcaagaaggatgctgagaccaatgaggccatctactgcaccaaggagcccttcatcaaggcccgggtcatcgtcatccgctggctggtgtccttctggctggagcccaagccccacacaggcccccacatccctggcatggagggggaggtgctgcccaagaacatccagagagctgctgccagcctggtgtcccgggaggagagcaagaatgacaatgctgacaagacagacaggaccacagagcctgagcagagccacagcaacaccagcaccctgacagagcgggagcccagcagcagcagcctgtgcagcattgatgaggagcacctgacagacatcgagatcgtgcggcgggtcttcagcagcaagaggagcaatgtgaactttgtgacagagatcttccggcaggccttcctgctgcccatctgtgaggccgccgccatgaggaaggtggtgaaggtgtaccaggagtggatccagcaggaggagaagcccctcttcatgcaggagcctgaggagatcgtcatcaccagcagtgacctgccctgcattgaaaatgtgacagaccatgacatctccatggaggagggggagaagcgggaggaggagaatggcaccaacacagctgaccacgtgaggaacagctcctgggccaagaatggcagctaccagggcgccctgcacaatgccagcgaggaggccacagagcagaacatccgggccggcacccaggccgtgctgcaggtgttcatcatcaacagcagcaacatcttcctgctggagcccgccaatgagatcaagaacctgctggatgagcacacagacatgtgcaagaggatcctgaacatctaccgctacatggtggtgcaggtgtccatggacaagaagacctgggagcagatgctgctggtgctgctgcgggtgacagagagcgtgctgaagatgcccagccaggccttcctgcagttccagggcaagaagaacatgaccctggccggccgcctggccggccccctcttccagaccctgattgtggcctggatcaaggccaacctgaatgtgtacatcagccgggagctgtgggatgacctgctgtctgtgctgagcagcctgacctactgggaggagctggccacagagtggagcctgaccatggagaccctgaccaaggtgctggccaggaacctgtacagcctggacctgagtgacctgcccctggacaagctgtctgagcagaagcagaagaagcacaagggcaaaggagtgggccacgagttccagaaggtgtctgtggacaagagcttcagccggggctggagccgggaccagcccggccaggcccccatgaggcagaggtctgccaccaccaccggcagccctggaacagagaaggcccggagcatcgtgcggcagaagacagtggacattgatgatgcccagatcctgcccaggagcaccagggtgcgccacttcagccagagcgaggagactggaaatgaggtgtttggagccctgaatgaggagcagcccctgcccaggagcagcagcaccagtgacatcctggagcccttcaccgtggagcgggccaaggtgaacaaggaggacatgagccagaagctgccccccctgaacagcgacatcggcggcagcagcgccaacgtgcctgacctgatggatgagttcatcgccgagcggctgcggtctggaaatgccagcaccatgacccggcggggcagcagccctggcagcctggagatccccaaggacctgcctgacatcctgaacaagcagaaccagatgaggcccattgatgatcctggggtgcccagcgagtggaccagccctgccagcgctggcagcagtgacctgatcagcagtgacagccacagcgacagcttcagcgccttccagtatgatggcaggaagtttgacaactttggatttggaacagacacaggagtgaccagcagcgcagatgtggacagcggcagcggccaccaccagagcgctgaggagcaggaggtggccagcctgaccaccctgcacatcgacagcgagaccagcagcctgaaccagcaggccttctctgctgaggtggccaccatcaccggcagcgagagcgccagccctgtgcacagccccctgggcagccgcagccagacccccagccccagcaccctgaacatcgaccacatggagcagaaggacctgcagctggatgagaagctgcaccacagcgtgctgcagaccccagatgacctggagatcagcgagttccccagcgagtgctgcagcgtgatggccggcggcaccctgaccggctggcacgcagatgtggccaccgtgatgtggaggaggatgctgggcatcctgggagatgtgaacagcatcatggaccctgagatccacgcccaggtgtttgactacctgtgtgagctgtggcagaacctggccaagatccgggacaacctgggcatcagcacagacaacctgaccagccccagcccccctgtgctgatcccccccctgcgcatcctgaccccctggctgttcaaggccaccatgctgacagacaagtacaagcagggcaagctgcacgcctacaagctgatctgcaacaccatgaagaggcggcaggatgtgagccccaacagagacttcctgacccacttctacaacatcatgcactgcggcctgctgcacatcgaccaggacatcgtgaacaccatcatcaagcactgcagcccccagttcttcagcctgggcctgcccggggccaccatgctgatcatggacttcatcgtggccgccggccgggtggccagcagcgccttcctgaatgccccccgggtggaggcccaggtgctgctgggcagcctggtgtgcttccccaacctgtactgtgagctgcccagcctgcaccccaacatcccagatgtggccgtgtcccagttcacagatgtgaaggagctgatcatcaagacagtgctgagcagcgccagagatgagcccagcggccctgcccgctgtgtggccctgtgcagcctgggcatctggatctgtgaggagctggtgcatgagagccaccacccccagatcaaggaggccctgaatgtcatctgtgtgtccctgaagttcaccaacaagacagtggcccacgtggcctgcaacatgctgcacatgctggtgcactacgtgccccggctgcagatctaccagcctgacagccccctgaagatcatccagatcctgattgccaccatcacccacctgctgcccagcacagaggccagcagctatgagatggacaagaggctggtggtgtccctgctgctgtgcctgctggactggatcatggccctgcccctgaagaccctgctgcagcccttccacgccaccggggctgagagtgacaagacagagaagtctgtgctgaactgcatctacaaggtgctgcacggctgtgtgtatggagcccagtgcttcagcaacccccgctacttccccatgagcctgagtgacctggcctctgtggactatgaccccttcatgcacctggagagcctgaaggagcctgagcccctgcacagcccagattctgagaggagcagcaagctgcagcctgtgacagaggtgaagacccagatgcagcacggcctcatcagcattgctgccaggacagtcatcacccacctggtgaaccacctgggccactaccccatgtctgggggccctgccatgctgaccagccaggtgtgtgaaaatcatgacaaccactacagcgagagcacagagctgagccctgagctgtttgagagccccaacatccagttctttgtgctgaacaacaccaccctggtgtcctgcatccagatccgctctgaggagaacatgcctgggggcggcctgtctgctggcctggccagcgccaacagcaatgtgcgcatcatcgtgcgggacctgagcggcaagtacagctgggacagcgccatcctgtatggccccccacctgtgtctggcctgtctgagcccaccagcttcatgctgagcctgagccaccaggagaagccagaggagccccccaccagcaatgaatgtctggaggacatcaccgtgaaggatggcctgagcctgcagttcaagcgcttccgggagaccgtgcccacctgggacaccatcagagatgaggaggatgtgctggatgagctgctgcagtacctgggcgtgaccagccctgagtgcctgcagaggacaggcatcagcctgaacatcccagccccccagcctgtgtgcatcagcgagaagcaggagaatgatgtgatcaatgccatcctgaagcagcacacagaggagaaggagtttgtggagaagcacttcaatgacctgaacatgaaggctgtggagcaggatgagcccatcccccagaagccccagagcgccttctactactgccgcctgctgctgagcatcctgggcatgaacagctgggacaagaggaggagcttccacctgctgaagaagaatgagaagctgctgcgggagctgaggaacctggacagccggcagtgccgggagacccacaagattgctgtgttctacgtggccgagggccaggaggacaagcacagcatcctgaccaacacaggaggcagccaggcctatgaggactttgtggccggcctgggctgggaggtgaacctgaccaaccactgcggcttcatgggcggcctgcagaagaacaagagcacaggcctgaccaccccctactttgccaccagcacagtggaggtgatcttccacgtgtccaccaggatgcccagcgacagtgatgacagcctgaccaagaagctgcggcacctgggcaatgatgaggtgcacatcgtgtggagcgagcacacccgggactaccgccggggcatcatccccacagaatttggagatgtgctgattgtcatctaccccatgaagaaccacatgttcagcatccagatcatgaagaagccagaggtgcccttcttcggccccctgtttgatggagccatcgtgaatggcaaggtgctgcccatcatggtgcgggccacagccatcaatgccagccgggccctgaagagcctcatccccctgtaccagaacttctatgaggagcgggcccgctacctgcagaccatcgtgcagcaccacctggagcccaccacctttgaagattttgctgcccaggtgttcagccctgccccctaccaccacctgcccagtgatgctgaggagagaaatgctgtgattgtgctcttcctgcccaagccacccctggagaacatcggccacctgaaggcccccacccagcgcttctaccctgtgaagctgccccagcagaggaggtag

SEQ ID NO: 167047 - DNA, 6150 bp, synthetic construct
  misc_feature 1..6150: note = Description of Artificial Sequence: Synthetic coding sequence
  source 1..6150: mol_type = other DNA
atgttcagcaagaagccccatggagatgtgaagaagagcacccagaaggtgctggacaccaagaaggatgccctgacccggctgaagcacctgagaattgtgattgaaaatgctgagagcattgacctgaagcagttctttgaccagcacttcagccacatctactacgtgttctttgagaactttgtgaccatcgaggccagcctgaagcagaagggccacaagagccagcgggaggagctggatgccatcctcttcatctttgagaagatcctgcagctgctgcctgagcgcatccaccagcgctggcagttccacagcatcggcctcatcctgaagaagctgctgcacacaggcaacagcctgaagatcagaagagagggcgtgcggctcttcctgctgtggctgcaggccctgcagaacaactgcagcaaggagcagctgtggatgttcagctgcctgatccctggcttcagcgccccccagagcgagcacggccccaggaccctggacaacctgatcaacccccccctgaacctgcaggagacccaggtgaccatcgaggagatcacccccctggtgcccccccagagcggggacaagggccaggaggacctgaccagctacttcctggaggccctgctgaagtacatcgtcatccaggtgaagagcctggagtggaagaacaaggagaaccaggagcggggcttctccttcctgttcagccacttcaagaagtactacctgccctacatcttccccaacatctgcaaggagaacagcctgtaccaccccatcctggacatcccccagatgaggcccaagccccactacgtggtgatcaagaaggatgctgagaccaatgaggccatctactgcaccaaggagcccttcatcaaggcccgggtcatcgtcatccgctggctggtgtccttctggctggagcccaagccccacacaggcccccacatccctggcatggagggggaggtgctgcccaagaacatccagagagctgctgccagcctggtgtcccgggaggagagcaagaatgacaatgctgacaagacagacaggaccacagagcctgagcagagccacagcaacaccagcaccctgacagagcgggagcccagcagcagcagcctgtgcagcattgatgaggagcacctgacagacatcgagatcgtgcggcgggtcttcagcagcaagaggagcaatgtgaactttgtgacagagatcttccggcaggccttcctgctgcccatctgtgaggccgccgccatgaggaaggtggtgaaggtgtaccaggagtggatccagcaggaggagaagcccctcttcatgcaggagcctgaggagatcgtcatcaccagcagtgacctgccctgcattgaaaatgtgacagaccatgacatctccatggaggagggggagaagcgggaggaggagaatggcaccaacacagctgaccacgtgaggaacagctcctgggccaagaatggcagctaccagggcgccctgcacaatgccagcgaggaggccacagagcagaacatccgggccggcacccaggccgtgctgcaggtgttcatcatcaacagcagcaacatcttcctgctggagcccgccaatgagatcaagaacctgctggatgagcacacagacatgtgcaagaggatcctgaacatctaccgctacatggtggtgcaggtgtccatggacaagaagacctgggagcagatgctgctggtgctgctgcgggtgacagagagcgtgctgaagatgcccagccaggccttcctgcagttccagggcaagaagaacatgaccctggccggccgcctggccggccccctcttccagaccctgattgtggcctggatcaaggccaacctgaatgtgtacatcagccgggagctgtgggatgacctgctgtctgtgctgagcagcctgacctactgggaggagctggccacagagtggagcctgaccatggagaccctgaccaaggtgctggccaggaacctgtacagcctggacctgagtgacctgcccctggacaagctgtctgagcagaagcagaagaagcacaagggcaaaggagtgggccacgagttccagaaggtgtctgtggacaagagcttcagccggggctggagccgggaccagcccggccaggcccccatgaggcagaggtctgccaccaccaccggcagccctggaacagagaaggcccggagcatcgtgcggcagaagacagtggacattgatgatgcccagatcctgcccaggagcaccagggtgcgccacttcagccagagcgaggagactggaaatgaggtgtttggagccctgaatgaggagcagcccctgcccaggagcagcagcaccagtgacatcctggagcccttcaccgtggagcgggccaaggaggccgagcagaatgccacccggggcagcacagagggctctgtgcagagctgcaatggcctcttctggaaggagagctgcagcgacattggaggcagcagcgccaacgtgcctgacctgatggatgagttcatcgccgagcggctgcggtctggaaatgccagcaccatgacccggcggggcagcagccctggcagcctggagatccccaaggacctgcctgacatcctgaacaagcagaaccagatgaggcccattgatgaccccggggtgcccagcgagtggaccagccctgccagcgctggcagcagtgacctgatcagcagtgacagccacagcgacagcttcagcgccttccagtatgatggcaggaagtttgacaactttggcttcggcacagacaccggggtgaccagcagcgcagatgtggacagcggcagcggccaccaccagagcgctgaggagcaggaggtggccagcctgaccaccctgcacattgattctgagaccagcagcctgaaccagcaggccttctctgctgaggtggccaccatcactggaagtgaaagtgccagccctgtgcacagccccctgggcagccgcagccagacccccagccccagcaccctgaacatcgaccacatggagcagaaggacctgcagctggatgagaagctgcaccacagcgtgctgcagaccccagatgacctggagatcagcgagttccccagcgagtgctgcagcgtgatggccggcggcaccctgaccggctggcatgctgatgtggccaccgtgatgtggaggaggatgctgggcatcctgggagatgtgaacagcatcatggaccctgagatccacgcccaggtgtttgactacctgtgtgagctgtggcagaacctggccaagatccgggacaacctgggcatcagcacagacaacctgaccagccccagcccccctgtgctgatcccccccctgcgcatcctgaccccctggctgttcaaggccaccatgctgacagacaagtacaagcagggcaagctgcacgcctacaagctgatctgcaacaccatgaagaggcggcaggatgtgagccccaacagagacttcctgacccacttctacaacatcatgcactgcggcctgctgcacatcgaccaggacatcgtgaacaccatcatcaagcactgcagcccccagttcttcagcctgggcctgcccggggccaccatgctgatcatggacttcatcgtggccgccggccgggtggccagcagcgccttcctgaatgccccccgggtggaggcccaggtgctgctgggcagcctggtgtgcttccccaacctgtactgtgagctgcccagcctgcaccccaacatcccagatgtggccgtgtcccagttcacagatgtgaaggagctgatcatcaagacagtgctgagcagcgccagagatgagcccagcggccctgcccgctgtgtggccctgtgcagcctgggcatctggatctgtgaggagctggtgcatgagagccaccacccccagatcaaggaggccctgaatgtcatctgtgtgtccctgaagttcaccaacaagacagtggcccacgtggcctgcaacatgctgcacatgctggtgcactacgtgccccggctgcagatctaccagcctgacagccccctgaagatcatccagatcctgattgccaccatcacccacctgctgcccagcacagaggccagcagctatgagatggacaagaggctggtggtgtccctgctgctgtgcctgctggactggatcatggccctgcccctgaagaccctgctgcagcccttccacgccactggagctgagagtgacaagacagagaagtctgtgctgaactgcatctacaaggtgctgcacggctgtgtgtatggagcccagtgcttcagcaacccccgctacttccccatgagcctgagtgacctggcctctgtggactatgaccccttcatgcacctggagagcctgaaggagcctgagcccctgcacagcccagacagcgagaggagcagcaagctgcagcctgtgacagaggtgaagacccagatgcagcacggcctcatcagcattgctgccaggacagtcatcacccacctggtgaaccacctgggccactaccccatgtctgggggccctgccatgctgaccagccaggtgtgtgagaaccacgacaaccactacagcgagagcacagagctgagccctgagctgtttgagagccccaacatccagttctttgtgctgaacaacaccaccctggtgtcctgcatccagatccgctctgaggagaacatgcctgggggcggcctgtctgctggcctggccagcgccaacagcaatgtgcgcatcatcgtgcgggacctgagcggcaagtacagctgggacagcgccatcctgtatggccccccacctgtgtctggcctgtctgagcccaccagcttcatgctgagcctgagccaccaggagaagccagaggagccccccaccagcaatgaatgtctggaggacatcaccgtgaaggatggcctgagcctgcagttcaagcgcttccgggagaccgtgcccacctgggacaccatcagagatgaagaagatgtgctggatgagctgctgcagtacctgggcgtgaccagcccagaatgtctgcagaggacaggcatcagcctgaacatcccagccccccagcctgtgtgcatcagcgagaagcaggagaatgatgtgatcaatgccatcctgaagcagcacacagaggagaaggagtttgtggagaagcacttcaatgacctgaacatgaaggctgtggagcaggatgagcccatcccccagaagccccagagcgccttctactactgccgcctgctgctgagcatcctgggcatgaacagctgggacaagagaagaagcttccacctgctgaagaagaatgagaagctgctgcgggagctgaggaacctggacagccggcagtgccgggagacccacaagattgctgtgttctacgtggccgagggccaggaggacaagcacagcatcctgaccaacacaggaggcagccaggcctatgaagattttgtggccggcctgggctgggaggtgaacctgaccaaccactgcggcttcatgggcggcctgcagaagaacaagagcacaggcctgaccaccccctactttgccaccagcacagtggaggtgatcttccacgtgtccaccaggatgcccagcgacagtgatgacagcctgaccaagaagctgcggcacctgggcaatgatgaggtgcacatcgtgtggagcgagcacacccgggactacagaagaggcatcatccccacagaatttggagatgtgctgattgtcatctaccccatgaagaaccacatgttcagcatccagatcatgaagaagccagaggtgcccttcttcggccccctgtttgatggagccatcgtgaatggcaaggtgctgcccatcatggtgcgggccacagccatcaatgccagccgggccctgaagagcctcatccccctgtaccagaacttctatgaggagcgggcccgctacctgcagaccatcgtgcagcaccacctggagcccaccacctttgaggactttgctgcccaggtgttctccccagccccctaccaccacctgcccagtgatgctgaccactag

SEQ ID NO: 167048 - DNA, 6111 bp, synthetic construct
  misc_feature 1..6111: note = Description of Artificial Sequence: Synthetic coding sequence
  source 1..6111: mol_type = other DNA
atgttcagcaagaagccccatggagatgtgaagaagagcacccagaaggtgctggacaccaagaaggatgccctgacccggctgaagcacctgagaattgtgattgaaaatgctgagagcattgacctgaagcagttctttgaccagcacttcagccacatctactacgtgttctttgagaactttgtgaccatcgaggccagcctgaagcagaagggccacaagagccagcgggaggagctggatgccatcctcttcatctttgagaagatcctgcagctgctgcctgagcgcatccaccagcgctggcagttccacagcatcggcctcatcctgaagaagctgctgcacacaggcaacagcctgaagatcagaagagagggcgtgcggctcttcctgctgtggctgcaggccctgcagaacaactgcagcaaggagcagctgtggatgttcagctgcctgatccctggcttcagcgccccccagagcgagcacggccccaggaccctggacaacctgatcaacccccccctgaacctgcaggagacccaggtgaccatcgaggagatcacccccctggtgcccccccagagcggggacaagggccaggaggacctgaccagctacttcctggaggccctgctgaagtacatcgtcatccaggtgaagagcctggagtggaagaacaaggagaaccaggagcggggcttctccttcctgttcagccacttcaagaagtactacctgccctacatcttccccaacatctgcaaggagaacagcctgtaccaccccatcctggacatcccccagatgaggcccaagccccactacgtggtgatcaagaaggatgctgagaccaatgaggccatctactgcaccaaggagcccttcatcaaggcccgggtcatcgtcatccgctggctggtgtccttctggctggagcccaagccccacacaggcccccacatccctggcatggagggggaggtgctgcccaagaacatccagagagctgctgccagcctggtgtcccgggaggagagcaagaatgacaatgctgacaagacagacaggaccacagagcctgagcagagccacagcaacaccagcaccctgacagagcgggagcccagcagcagcagcctgtgcagcattgatgaggagcacctgacagacatcgagatcgtgcggcgggtcttcagcagcaagaggagcaatgtgaactttgtgacagagatcttccggcaggccttcctgctgcccatctgtgaggccgccgccatgaggaaggtggtgaaggtgtaccaggagtggatccagcaggaggagaagcccctcttcatgcaggagcctgaggagatcgtcatcaccagcagtgacctgccctgcattgaaaatgtgacagaccatgacatctccatggaggagggggagaagcgggaggaggagaatggcaccaacacagctgaccacgtgaggaacagctcctgggccaagaatggcagctaccagggcgccctgcacaatgccagcgaggaggccacagagcagaacatccgggccggcacccaggccgtgctgcaggtgttcatcatcaacagcagcaacatcttcctgctggagcccgccaatgagatcaagaacctgctggatgagcacacagacatgtgcaagaggatcctgaacatctaccgctacatggtggtgcaggtgtccatggacaagaagacctgggagcagatgctgctggtgctgctgcgggtgacagagagcgtgctgaagatgcccagccaggccttcctgcagttccagggcaagaagaacatgaccctggccggccgcctggccggccccctcttccagaccctgattgtggcctggatcaaggccaacctgaatgtgtacatcagccgggagctgtgggatgacctgctgtctgtgctgagcagcctgacctactgggaggagctggccacagagtggagcctgaccatggagaccctgaccaaggtgctggccaggaacctgtacagcctggacctgagtgacctgcccctggacaagctgtctgagcagaagcagaagaagcacaagggcaaaggagtgggccacgagttccagaaggtgtctgtggacaagagcttcagccggggctggagccgggaccagcccggccaggcccccatgaggcagaggtctgccaccaccaccggcagccctggaacagagaaggcccggagcatcgtgcggcagaagacagtggacattgatgatgcccagatcctgcccaggagcaccagggtgcgccacttcagccagagcgaggagactggaaatgaggtgtttggagccctgaatgaggagcagcccctgcccaggagcagcagcaccagtgacatcctggagcccttcaccgtggagcgggccaaggtgaacaaggaggacatgagccagaagctgccccccctgaacagcgacatcggcggcagcagcgccaacgtgcctgacctgatggatgagttcatcgccgagcggctgcggtctggaaatgccagcaccatgacccggcggggcagcagccctggcagcctggagatccccaaggacctgcctgacatcctgaacaagcagaaccagatgaggcccattgatgatcctggggtgcccagcgagtggaccagccctgccagcgctggcagcagtgacctgatcagcagtgacagccacagcgacagcttcagcgccttccagtatgatggcaggaagtttgacaactttggatttggaacagacacaggagtgaccagcagcgcagatgtggacagcggcagcggccaccaccagagcgctgaggagcaggaggtggccagcctgaccaccctgcacatcgacagcgagaccagcagcctgaaccagcaggccttctctgctgaggtggccaccatcaccggcagcgagagcgccagccctgtgcacagccccctgggcagccgcagccagacccccagccccagcaccctgaacatcgaccacatggagcagaaggacctgcagctggatgagaagctgcaccacagcgtgctgcagaccccagatgacctggagatcagcgagttccccagcgagtgctgcagcgtgatggccggcggcaccctgaccggctggcacgcagatgtggccaccgtgatgtggaggaggatgctgggcatcctgggagatgtgaacagcatcatggaccctgagatccacgcccaggtgtttgactacctgtgtgagctgtggcagaacctggccaagatccgggacaacctgggcatcagcacagacaacctgaccagccccagcccccctgtgctgatcccccccctgcgcatcctgaccccctggctgttcaaggccaccatgctgacagacaagtacaagcagggcaagctgcacgcctacaagctgatctgcaacaccatgaagaggcggcaggatgtgagccccaacagagacttcctgacccacttctacaacatcatgcactgcggcctgctgcacatcgaccaggacatcgtgaacaccatcatcaagcactgcagcccccagttcttcagcctgggcctgcccggggccaccatgctgatcatggacttcatcgtggccgccggccgggtggccagcagcgccttcctgaatgccccccgggtggaggcccaggtgctgctgggcagcctggtgtgcttccccaacctgtactgtgagctgcccagcctgcaccccaacatcccagatgtggccgtgtcccagttcacagatgtgaaggagctgatcatcaagacagtgctgagcagcgccagagatgagcccagcggccctgcccgctgtgtggccctgtgcagcctgggcatctggatctgtgaggagctggtgcatgagagccaccacccccagatcaaggaggccctgaatgtcatctgtgtgtccctgaagttcaccaacaagacagtggcccacgtggcctgcaacatgctgcacatgctggtgcactacgtgccccggctgcagatctaccagcctgacagccccctgaagatcatccagatcctgattgccaccatcacccacctgctgcccagcacagaggccagcagctatgagatggacaagaggctggtggtgtccctgctgctgtgcctgctggactggatcatggccctgcccctgaagaccctgctgcagcccttccacgccaccggggctgagagtgacaagacagagaagtctgtgctgaactgcatctacaaggtgctgcacggctgtgtgtatggagcccagtgcttcagcaacccccgctacttccccatgagcctgagtgacctggcctctgtggactatgaccccttcatgcacctggagagcctgaaggagcctgagcccctgcacagcccagattctgagaggagcagcaagctgcagcctgtgacagaggtgaagacccagatgcagcacggcctcatcagcattgctgccaggacagtcatcacccacctggtgaaccacctgggccactaccccatgtctgggggccctgccatgctgaccagccaggtgtgtgaaaatcatgacaaccactacagcgagagcacagagctgagccctgagctgtttgagagccccaacatccagttctttgtgctgaacaacaccaccctggtgtcctgcatccagatccgctctgaggagaacatgcctgggggcggcctgtctgctggcctggccagcgccaacagcaatgtgcgcatcatcgtgcgggacctgagcggcaagtacagctgggacagcgccatcctgtatggccccccacctgtgtctggcctgtctgagcccaccagcttcatgctgagcctgagccaccaggagaagccagaggagccccccaccagcaatgaatgtctggaggacatcaccgtgaaggatggcctgagcctgcagttcaagcgcttccgggagaccgtgcccacctgggacaccatcagagatgaggaggatgtgctggatgagctgctgcagtacctgggcgtgaccagccctgagtgcctgcagaggacaggcatcagcctgaacatcccagccccccagcctgtgtgcatcagcgagaagcaggagaatgatgtgatcaatgccatcctgaagcagcacacagaggagaaggagtttgtggagaagcacttcaatgacctgaacatgaaggctgtggagcaggatgagcccatcccccagaagccccagagcgccttctactactgccgcctgctgctgagcatcctgggcatgaacagctgggacaagaggaggagcttccacctgctgaagaagaatgagaagctgctgcgggagctgaggaacctggacagccggcagtgccgggagacccacaagattgctgtgttctacgtggccgagggccaggaggacaagcacagcatcctgaccaacacaggaggcagccaggcctatgaggactttgtggccggcctgggctgggaggtgaacctgaccaaccactgcggcttcatgggcggcctgcagaagaacaagagcacaggcctgaccaccccctactttgccaccagcacagtggaggtgatcttccacgtgtccaccaggatgcccagcgacagtgatgacagcctgaccaagaagctgcggcacctgggcaatgatgaggtgcacatcgtgtggagcgagcacacccgggactaccgccggggcatcatccccacagaatttggagatgtgctgattgtcatctaccccatgaagaaccacatgttcagcatccagatcatgaagaagccagaggtgcccttcttcggccccctgtttgatggagccatcgtgaatggcaaggtgctgcccatcatggtgcgggccacagccatcaatgccagccgggccctgaagagcctcatccccctgtaccagaacttctatgaggagcgggcccgctacctgcagaccatcgtgcagcaccacctggagcccaccacctttgaagattttgctgcccaggtgttcagccctgccccctaccaccacctgcccagtgatgctgaccactag

SEQ ID NO: 167049 - DNA, 6252 bp, synthetic construct; identical to SEQ ID NO: 167044
  misc_feature 1..6252: note = Description of Artificial Sequence: Synthetic coding sequence
  source 1..6252: mol_type = other DNA

SEQ ID NO: 167050 - DNA, 2169 bp, synthetic construct
  misc_feature 1..2169: note = Description of Artificial Sequence: Synthetic coding sequence
  source 1..2169: mol_type = other DNA
cagatcctgattgccaccatcacccacctgctgcccagcacagaggccagcagctatgagatggacaagaggctggtggtgtccctgctgctgtgcctgctggactggatcatggccctgcccctgaagaccctgctgcagcccttccacgccaccggggctgagagtgacaagacagagaagtctgtgctgaactgcatctacaaggtgctgcacggctgtgtgtatggagcccagtgcttcagcaacccccgctacttccccatgagcctgagtgacctggcctctgtggactatgaccccttcatgcacctggagagcctgaaggagcctgagcccctgcacagcccagattctgagaggagcagcaagctgcagcctgtgacagaggtgaagacccagatgcagcacggcctcatcagcattgctgccaggacagtcatcacccacctggtgaaccacctgggccactaccccatgtctgggggccctgccatgctgaccagccaggtgtgtgaaaatcatgacaaccactacagcgagagcacagagctgagccctgagctgtttgagagccccaacatccagttctttgtgctgaacaacaccaccctggtgtcctgcatccagatccgctctgaggagaacatgcctgggggcggcctgtctgctggcctggccagcgccaacagcaatgtgcgcatcatcgtgcgggacctgagcggcaagtacagctgggacagcgccatcctgtatggccccccacctgtgtctggcctgtctgagcccaccagcttcatgctgagcctgagccaccaggagaagccagaggagccccccaccagcaatgaatgtctggaggacatcaccgtgaaggatggcctgagcctgcagttcaagcgcttccgggagaccgtgcccacctgggacaccatcagagatgaggaggatgtgctggatgagctgctgcagtacctgggcgtgaccagccctgagtgcctgcagaggacaggcatcagcctgaacatcccagccccccagcctgtgtgcatcagcgagaagcaggagaatgatgtgatcaatgccatcctgaagcagcacacagaggagaaggagtttgtggagaagcacttcaatgacctgaacatgaaggctgtggagcaggatgagcccatcccccagaagccccagagcgccttctactactgccgcctgctgctgagcatcctgggcatgaacagctgggacaagaggaggagcttccacctgctgaagaagaatgagaagctgctgcgggagctgaggaacctggacagccggcagtgccgggagacccacaagattgctgtgttctacgtggccgagggccaggaggacaagcacagcatcctgaccaacacaggaggcagccaggcctatgaggactttgtggccggcctgggctgggaggtgaacctgaccaaccactgcggcttcatgggcggcctgcagaagaacaagagcacaggcctgaccaccccctactttgccaccagcacagtggaggtgatcttccacgtgtccaccaggatgcccagcgacagtgatgacagcctgaccaagaagctgcggcacctgggcaatgatgaggtgcacatcgtgtggagcgagcacacccgggactaccgccggggcatcatccccacagaatttggagatgtgctgattgtcatctaccccatgaagaaccacatgttcagcatccagatcatgaagaagccagaggtgcccttcttcggccccctgtttgatggagccatcgtgaatggcaaggtgctgcccatcatggtgcgggccacagccatcaatgccagccgggccctgaagagcctcatccccctgtaccagaacttctatgaggagcgggcccgctacctgcagaccatcgtgcagcaccacctggagcccaccacctttgaagattttgctgcccaggtgttcagccctgccccctaccaccacctgcccagtgatgctgtgggcagctacccagagatcctgcccagcgagacccccacagccacccaggtggatggagctgacctggccagccccatgagccccaggaccagcaagagcaggatgtccatgaagctgcggcgcagcagcggcagcgccaacaagagctag

SEQ ID NO: 167051 - DNA, 2709 bp, synthetic construct
  misc_feature 1..2709: note = Description of Artificial Sequence: Synthetic coding sequence
  source 1..2709: mol_type = other DNA
atggtgcagaggatgtgggccgaggccgccggccctgctggaggagctgagcccctcttccctggcagccgccgcagccgctctgtgtgggatgctgtgcggctggaggtgggcgtgcctgacagctgccctgtggtgctgcacagcttcacccagctggaccctgacctgcccaggcctgagagcagcacccaggagattggagaggagctgatcaatggagtcatctacagcatcagcctgaggaaggtgcagctgcaccacggcggcaacaagggccagcgctggctgggctatgaaaatgaaagtgccctgaacctgtatgagacctgcaaggtgaggacagtgaaggccggcaccctggagaagctggtggagcacctggtgcctgccttccagggcagtgacctgtcctatgtgaccatcttcctgtgcacctaccgggccttcaccaccacccagcaggtgctggacctgctcttcaagagatatggctgcatcctgccctacagtgatgaagatggcggcccccaggaccagctgaagaatgccatcagcagcatcctgggcacctggctggaccagtacagcgaggacttctgccagcccccagacttcccctgcctgaagcagctggtggcctacgtgcagctgaacatgcctggcagtgacctggagcggcgggcccacctgctgctggcccagctggagcacagcgagcccatcgaggccgagcctgaggccctgagccctgtgcctgccctgaagcccaccccagagctggagctggccctgaccccagcccgggcccccagccctgtgcctgccccagcccctgagcctgagcccgcccccaccccagcccctggcagcgagctggaggtggccccagccccagcccctgagctgcagcaggcccctgagcctgctgtgggcctggagagcgccccagccccagccctggagctggagcccgcccctgagcaggaccctgcccccagccagaccctggagctggagcccgccccagcccctgtgcccagcctgcagcccagctggcccagccctgtggtggccgagaatggcctgtctgaggagaagccccacctgctggtgttccccccagacctggtggccgagcagttcaccctgatggatgctgagctgttcaagaaggtggtgccctaccactgcctgggcagcatctggagccagagggacaagaagggcaaggagcacctggcccccaccatccgggccaccgtgacccagttcaacagcgtggccaactgtgtgatcaccacctgcctgggcaacagaagcaccaaggccccagaccgggcccgggtggtggagcactggattgaggtggcccgggagtgccgcatcctgaagaacttcagcagcctgtatgccatcctgagcgccctgcagagcaacagcatccaccggctgaagaagacctgggaggatgtgtcccgggacagcttccgcatcttccagaagctgtctgagatcttcagtgatgagaacaactacagcctgagccgggagctgctgatcaaggagggcaccagcaagtttgccaccctggagatgaaccccaagagggcccagaagaggcccaaggagaccggcatcatccagggcaccgtgccctacctgggcaccttcctgacagacctggtgatgctggacacagccatgaaggactacctgtatggccgcctcatcaactttgagaagaggaggaaggagtttgaagtcatcgcccagatcaagctgctgcagagcgcctgcaacaactacagcatcgccccagatgagcagtttggagcctggttccgggctgtggagcggctgtctgaaacagagagctacaacctgagctgtgagctggagcccccatctgagagcgccagcaacaccctgcggaccaagaagaacacagccatcgtgaagcgctggagcgaccggcaggcccccagcacagagctgagcaccagcggcagcagccacagcaagagctgtgaccagctgcgctgtggcccctacctgagcagcggggacattgctgatgccctgtctgtgcacagcgctggcagcagcagcagtgatgtggaggagatcaacatcagctttgtgcctgagagcccagatggccaggagaagaagttctgggagagcgccagccagagcagccctgagaccagcggcatcagcagcgccagcagcagcaccagcagcagcagcgccagcaccacccctgtggccgccaccaggacccacaagaggtctgtgtctggcctgtgcaacagcagcagcgccctgcccctgtacaaccagcaggtgggggactgctgcatcatccgggtgtccctggatgtggacaatggaaacatgtacaagagcatcctggtgaccagccaggacaaggccccagctgtgatcaggaaggccatggacaagcacaacctggaggaggaggagcctgaggactatgagctgctgcagatcctgagtgatgacaggaagctgaagatcccagaaaatgccaacgtgttctacgccatgaacagcacagccaactatgactttgtgctgaagaagaggaccttcaccaagggcgtgaaggtgaagcatggagccagcagcaccctgcccaggatgaagcagaagggcctgaagatcgccaagggcatcttctag

SEQ ID NO: 167052 - DNA, 2745 bp, synthetic construct
  misc_feature 1..2745: note = Description of Artificial Sequence: Synthetic coding sequence
  source 1..2745: mol_type = other DNA
atggtgcagaggatgtgggccgaggccgccggccctgctggaggagctgagcccctcttccctggcagccgccgcagccgctctgtgtgggatgctgtgcggctggaggtgggcgtgcctgacagctgccctgtggtgctgcacagcttcacccagctggaccctgacctgcccaggcctgagagcagcacccaggagattggagaggagctgatcaatggagtcatctacagcatcagcctgaggaaggtgcagctgcaccacggcggcaacaagggccagcgctggctgggctatgaaaatgaaagtgccctgaacctgtatgagacctgcaaggtgaggacagtgaaggccggcaccctggagaagctggtggagcacctggtgcctgccttccagggcagtgacctgtcctatgtgaccatcttcctgtgcacctaccgggccttcaccaccacccagcaggtgctggacctgctcttcaagagatatggccgctgtgatgccctgacagccagcagccgctatggctgcatcctgccctacagtgatgaagatggcggcccccaggaccagctgaagaatgccatcagcagcatcctgggcacctggctggaccagtacagcgaggacttctgccagcccccagacttcccctgcctgaagcagctggtggcctacgtgcagctgaacatgcctggcagtgacctggagcggcgggcccacctgctgctggcccagctggagcacagcgagcccatcgaggccgagcctgaggccctgagccctgtgcctgccctgaagcccaccccagagctggagctggccctgaccccagcccgggcccccagccctgtgcctgccccagcccctgagcctgagcccgcccccaccccagcccctggcagcgagctggaggtggccccagccccagcccctgagctgcagcaggcccctgagcctgctgtgggcctggagagcgccccagccccagccctggagctggagcccgcccctgagcaggaccctgcccccagccagaccctggagctggagcccgccccagcccctgtgcccagcctgcagcccagctggcccagccctgtggtggccgagaatggcctgtctgaggagaagccccacctgctggtgttccccccagacctggtggccgagcagttcaccctgatggatgctgagctgttcaagaaggtggtgccctaccactgcctgggcagcatctggagccagagggacaagaagggcaaggagcacctggcccccaccatccgggccaccgtgacccagttcaacagcgtggccaactgtgtgatcaccacctgcctgggcaacagaagcaccaaggccccagaccgggcccgggtggtggagcactggattgaggtggcccgggagtgccgcatcctgaagaacttcagcagcctgtatgccatcctgagcgccctgcagagcaacagcatccaccggctgaagaagacctgggaggatgtgtcccgggacagcttccgcatcttccagaagctgtctgagatcttcagtgatgagaacaactacagcctgagccgggagctgctgatcaaggagggcaccagcaagtttgccaccctggagatgaaccccaagagggcccagaagaggcccaaggagaccggcatcatccagggcaccgtgccctacctgggcaccttcctgacagacctggtgatgctggacacagccatgaaggactacctgtatggccgcctcatcaactttgagaagaggaggaaggagtttgaagtcatcgcccagatcaagctgctgcagagcgcctgcaacaactacagcatcgccccagatgagcagtttggagcctggttccgggctgtggagcggctgtctgaaacagagagctacaacctgagctgtgagctggagcccccatctgagagcgccagcaacaccctgcggaccaagaagaacacagccatcgtgaagcgctggagcgaccggcaggcccccagcacagagctgagcaccagcggcagcagccacagcaagagctgtgaccagctgcgctgtggcccctacctgagcagcggggacattgctgatgccctgtctgtgcacagcgctggcagcagcagcagtgatgtggaggagatcaacatcagctttgtgcctgagagcccagatggccaggagaagaagttctgggagagcgccagccagagcagccctgagaccagcggcatcagcagcgccagcagcagcaccagcagcagcagcgccagcaccacccctgtggccgccaccaggacccacaagaggtctgtgtctggcctgtgcaacagcagcagcgccctgcccctgtacaaccagcaggtgggggactgctgcatcatccgggtgtccctggatgtggacaatggaaacatgtacaagagcatcctggtgaccagccaggacaaggccccagctgtgatcaggaaggccatggacaagcacaacctggaggaggaggagcctgaggactatgagctgctgcagatcctgagtgatgacaggaagctgaagatcccagaaaatgccaacgtgttctacgccatgaacagcacagccaactatgactttgtgctgaagaagaggaccttcaccaagggcgtgaaggtgaagcatggagccagcagcaccctgcccaggatgaagcagaagggcctgaagatcgccaagggcatcttctag

SEQ ID NO: 167053 - DNA, 1341 bp, synthetic construct
  misc_feature 1..1341: note = Description of Artificial Sequence: Synthetic coding sequence
  source 1..1341: mol_type = other DNA
atgcctggcagtgacctggagcggcgggcccacctgctgctggcccagctggagcacagcgagcccattgaagctgagcctgaggccctgagccctgtgcctgccctgaagcccaccccagagctggagctggccctgaccccagcccgggcccccagccctgtgcctgccccagcccctgagcctgagcccgcccccaccccagcccctggcagcgagctggaggtggccccagccccagcccctgagctgcagcaggcccctgagcctgctgtgggcctggagagcgccccagccccagccctggagctggagcccgcccctgagcaggaccctgcccccagccagaccctggagctggagcccgccccagcccctgtgcccagcctgcagcccagctggcccagccctgtggtggctgaaaatggcctgtctgaggagaagccccacctgctggtgtttcctccagacctggtggccgagcagttcaccctgatggatgctgaatgtcgcatcctgaagaacttcagcagcctgtatgccatcctgagcgccctgcagagcaacagcatccaccggctgaagaagacctgggaggatgtgtcccgggacagcttccgcatcttccagaagctgtctgagatcttcagtgatgagaacaactacagcctgagccgggagctgctgatcaaggagggcaccagcaagtttgccaccctggagatgaaccccaagagggcccagaagaggcccaaggagaccggcatcatccagggcaccgtgccctacctgggcaccttcctgacagacctggtgatgctggacacagccatgaaggactacctgtatggccgcctcatcaactttgagaagaggaggaaggagtttgaggtgattgcccagatcaagctgctgcagagcgcctgcaacaactacagcatcgccccagatgagcagtttggagcctggttccgggctgtggagcggctgtctgaaacagagagctacaacctgagctgtgagctggagccccccagcgagagcgccagcaacaccctgcggaccaagaagaacacagccatcgtgaagcgctggagcgaccggcaggcccccagcacagagctgagcaccagcggcagcagccacagcaagagctgtgaccagctgcgctgtggcccctacctgagcagcggggacattgctgatgccctgtctgtgcacagcgctggcagcagcagcagtgatgtggaggagatcaacatcagctttgtgcctgagagcccagatggccaggagaagaagttctgggagagcgccagccagagcagccctgagacctag

SEQ ID NO: 167054 - DNA, 2658 bp, synthetic construct
  misc_feature 1..2658: note = Description of Artificial Sequence: Synthetic coding sequence
  source 1..2658: mol_type = other DNA
atgtgcctgtggggccacagcacagccccagcccacaccctgagcagcccccccctgctcttctgcagcctgccctgtgccctgcacctgcagcccggcaccggccaccccccaggccaggtgcccaggaagagcagcacccaggagatcggggaggagctgatcaacggggtcatctacagcatcagcctgaggaaggtgcagctgcaccacggcggcaacaagggccagcgctggctgggctatgaaaatgaaagtgccctgaacctgtatgagacctgcaaggtgaggacagtgaaggccggcaccctggagaagctggtggagcacctggtgcctgccttccagggcagtgacctgtcctatgtgaccatcttcctgtgcacctaccgggccttcaccaccacccagcaggtgctggacctgctcttcaagagatatggctgcatcctgccctacagtgatgaagatggcggcccccaggaccagctgaagaatgccatcagcagcatcctgggcacctggctggaccagtacagcgaggacttctgccagcccccagacttcccctgcctgaagcagctggtggcctacgtgcagctgaacatgcctggcagtgacctggagcggcgggcccacctgctgctggcccagctggagcacagcgagcccattgaagctgagcctgaggccctgagccctgtgcctgccctgaagcccaccccagagctggagctggccctgaccccagcccgggcccccagccctgtgcctgccccagcccctgagcctgagcccgcccccaccccagcccctggcagcgagctggaggtggccccagccccagcccctgagctgcagcaggcccctgagcctgctgtgggcctggagagcgccccagccccagccctggagctggagcccgcccctgagcaggaccctgcccccagccagaccctggagctggagcccgccccagcccctgtgcccagcctgcagcccagctggcccagccctgtggtggctgaaaatggcctgtctgaggagaagccccacctgctggtgtttcctccagacctggtggccgagcagttcaccctgatggatgctgagctgttcaagaaggtggtgccctaccactgcctgggcagcatctggagccagagggacaagaagggcaaggagcacctggcccccaccatccgggccaccgtgacccagttcaacagcgtggccaactgtgtgatcaccacctgcctgggcaacagaagcaccaaggccccagaccgggcccgggtggtggagcactggattgaggtggccagagaatgtcgcatcctgaagaacttcagcagcctgtatgccatcctgagcgccctgcagagcaacagcatccaccggctgaagaagacctgggaggatgtgtcccgggacagcttccgcatcttccagaagctgtctgagatcttcagtgatgagaacaactacagcctgagccgggagctgctgatcaaggagggcaccagcaagtttgccaccctggagatgaaccccaagagggcccagaagaggcccaaggagaccggcatcatccagggcaccgtgccctacctgggcaccttcctgacagacctggtgatgctggacacagccatgaaggactacctgtatggccgcctcatcaactttgagaagaggaggaaggagtttgaggtgattgcccagatcaagctgctgcagagcgcctgcaacaactacagcatcgccccagatgagcagtttggagcctggttccgggctgtggagcggctgtctgaaacagagagctacaacctgagctgtgagctggagccccccagcgagagcgccagcaacaccctgcggaccaagaagaacacagccatcgtgaagcgctggagcgaccggcaggcccccagcacagagctgagcaccagcggcagcagccacagcaagagctgtgaccagctgcgctgtggcccctacctgagcagcggggacattgctgatgccctgtctgtgcacagcgctggcagcagcagcagtgatgtggaggagatcaacatcagctttgtgcctgagagcccagatggccaggagaagaagttctgggagagcgccagccagagcagccctgagaccagcggcatcagcagcgccagcagcagcaccagcagcagcagcgccagcaccacccctgtggccgccaccaggacccacaagaggtctgtgtctggcctgtgcaacagcagcagcgccctgcccctgtacaaccagcaggtgggggactgctgcatcatccgggtgtccctggatgtggacaatggaaacatgtacaagagcatcctggtgaccagccaggacaaggccccagctgtgatcaggaaggccatggacaagcacaacctggaggaggaggagccagaagattatgagctgctgcagatcctgagtgatgacaggaagctgaagatcccagaaaatgccaacgtgttctacgccatgaacagcacagccaactatgactttgtgctgaagaagaggaccttcaccaagggcgtgaaggtgaagcacggggccagcagcaccctgcccaggatgaagcagaagggcctgaagatcgccaagggcatcttctag

SEQ ID NO: 167055 - DNA, 2742 bp, synthetic construct
  misc_feature 1..2742: note = Description of Artificial Sequence: Synthetic coding sequence
  source 1..2742: mol_type = other DNA
atggcccgggaggccggccaggtgtgtgcccggcctgctgtgccccggggcaggaaaggatctgtgttctttgcctgtgtgtctgtggtgacagcccggcggcgggctgtggccaggagagctgccctgcagagccccaccccctggctggcccccctgcctgccccagccaccacagagagcagcacccaggagatcggggaggagctgatcaacggggtcatctacagcatcagcctgaggaaggtgcagctgcaccacggcggcaacaagggccagcgctggctgggctatgaaaatgaaagtgccctgaacctgtatgagacctgcaaggtgaggacagtgaaggccggcaccctggagaagctggtggagcacctggtgcctgccttccagggcagtgacctgtcctatgtgaccatcttcctgtgcacctaccgggccttcaccaccacccagcaggtgctggacctgctcttcaagagatatggccgctgtgatgccctgacagccagcagccgctatggctgcatcctgccctacagtgatgaagatggcggcccccaggaccagctgaagaatgccatcagcagcatcctgggcacctggctggaccagtacagcgaggacttctgccagcccccagacttcccctgcctgaagcagctggtggcctacgtgcagctgaacatgcctggcagtgacctggagcggcgggcccacctgctgctggcccagctggagcacagcgagcccattgaagctgagcctgaggccctgagccctgtgcctgccctgaagcccaccccagagctggagctggccctgaccccagcccgggcccccagccctgtgcctgccccagcccctgagcctgagcccgcccccaccccagcccctggcagcgagctggaggtggccccagccccagcccctgagctgcagcaggcccctgagcctgctgtgggcctggagagcgccccagccccagccctggagctggagcccgcccctgagcaggaccctgcccccagccagaccctggagctggagcccgccccagcccctgtgcccagcctgcagcccagctggcccagccctgtggtggctgaaaatggcctgtctgaggagaagccccacctgctggtgtttcctccagacctggtggccgagcagttcaccctgatggatgctgagctgttcaagaaggtggtgccctaccactgcctgggcagcatctggagccagagggacaagaagggcaaggagcacctggcccccaccatccgggccaccgtgacccagttcaacagcgtggccaactgtgtgatcaccacctgcctgggcaacagaagcaccaaggccccagaccgggcccgggtggtggagcactggattgaggtggccagagaatgtcgcatcctgaagaacttcagcagcctgtatgccatcctgagcgccctgcagagcaacagcatccaccggctgaagaagacctgggaggatgtgtcccgggacagcttccgcatcttccagaagctgtctgagatcttcagtgatgagaacaactacagcctgagccgggagctgctgatcaaggagggcaccagcaagtttgccaccctggagatgaaccccaagagggcccagaagaggcccaaggagaccggcatcatccagggcaccgtgccctacctgggcaccttcctgacagacctggtgatgctggacacagccatgaaggactacctgtatggccgcctcatcaactttgagaagaggaggaaggagtttgaggtgattgcccagatcaagctgctgcagagcgcctgcaacaactacagcatcgccccagatgagcagtttggagcctggttccgggctgtggagcggctgtctgaaacagagagctacaacctgagctgtgagctggagccccccagcgagagcgccagcaacaccctgcggaccaagaagaacacagccatcgtgaagcgctggagcgaccggcaggcccccagcacagagctgagcaccagcggcagcagccacagcaagagctgtgaccagctgcgctgtggcccctacctgagcagcggggacattgctgatgccctgtctgtgcacagcgctggcagcagcagcagtgatgtggaggagatcaacatcagctttgtgcctgagagcccagatggccaggagaagaagttctgggagagcgccagccagagcagccctgagaccagcggcatcagcagcgccagcagcagcaccagcagcagcagcgccagcaccacccctgtggccgccaccaggacccacaagaggtctgtgtctggcctgtgcaacagcagcagcgccctgcccctgtacaaccagcaggtgggggactgctgcatcatccgggtgtccctggatgtggacaatggaaacatgtacaagagcatcctggtgaccagccaggacaaggccccagctgtgatcaggaaggccatggacaagcacaacctggaggaggaggagccagaagattatgagctgctgcagatcctgagtgatgacaggaagctgaagatcccagaaaatgccaacgtgttctacgccatgaacagcacagccaactatgactttgtgctgaagaagaggaccttcaccaagggcgtgaaggtgaagcacggggccagcagcaccctgcccaggatgaagcagaagggcctgaagatcgccaagggcatcttctag

SEQ ID NO: 167056 - DNA, 2580 bp, synthetic construct
  misc_feature 1..2580: note = Description of Artificial Sequence: Synthetic coding sequence
  source 1..2580: mol_type = other DNA
atgatggtggactgccagagcagcacccaggagatcggggaggagctgatcaacggggtcatctacagcatcagcctgaggaaggtgcagctgcaccacggcggcaacaagggccagcgctggctgggctatgaaaatgaaagtgccctgaacctgtatgagacctgcaaggtgaggacagtgaaggccggcaccctggagaagctggtggagcacctggtgcctgccttccagggcagtgacctgtcctatgtgaccatcttcctgtgcacctaccgggccttcaccaccacccagcaggtgctggacctgctcttcaagagatatggccgctgtgatgccctgacagccagcagccgctatggctgcatcctgccctacagtgatgaagatggcggcccccaggaccagctgaagaatgccatcagcagcatcctgggcacctggctggaccagtacagcgaggacttctgccagcccccagacttcccctgcctgaagcagctggtggcctacgtgcagctgaacatgcctggcagtgacctggagcggcgggcccacctgctgctggcccagctggagcacagcgagcccattgaagctgagcctgaggccctgagccctgtgcctgccctgaagcccaccccagagctggagctggccctgaccccagcccgggcccccagccctgtgcctgccccagcccctgagcctgagcccgcccccaccccagcccctggcagcgagctggaggtggccccagccccagcccctgagctgcagcaggcccctgagcctgctgtgggcctggagagcgccccagccccagccctggagctggagcccgcccctgagcaggaccctgcccccagccagaccctggagctggagcccgccccagcccctgtgcccagcctgcagcccagctggcccagccctgtggtggctgaaaatggcctgtctgaggagaagccccacctgctggtgtttcctccagacctggtggccgagcagttcaccctgatggatgctgagctgttcaagaaggtggtgccctaccactgcctgggcagcatctggagccagagggacaagaagggcaaggagcacctggcccccaccatccgggccaccgtgacccagttcaacagcgtggccaactgtgtgatcaccacctgcctgggcaacagaagcaccaaggccccagaccgggcccgggtggtggagcactggattgaggtggccagagaatgtcgcatcctgaagaacttcagcagcctgtatgccatcctgagcgccctgcagagcaacagcatccaccggctgaagaagacctgggaggatgtgtcccgggacagcttccgcatcttccagaagctgtctgagatcttcagtgatgagaacaactacagcctgagccgggagctgctgatcaaggagggcaccagcaagtttgccaccctggagatgaaccccaagagggcccagaagaggcccaaggagaccggcatcatccagggcaccgtgccctacctgggcaccttcctgacagacctggtgatgctggacacagccatgaaggactacctgtatggccgcctcatcaactttgagaagaggaggaaggagtttgaggtgattgcccagatcaagctgctgcagagcgcctgcaacaactacagcatcgccccagatgagcagtttggagcctggttccgggctgtggagcggctgtctgaaacagagagctacaacctgagctgtgagctggagccccccagcgagagcgccagcaacaccctgcggaccaagaagaacacagccatcgtgaagcgctggagcgaccggcaggcccccagcacagagctgagcaccagcggcagcagccacagcaagagctgtgaccagctgcgctgtggcccctacctgagcagcggggacattgctgatgccctgtctgtgcacagcgctggcagcagcagcagtgatgtggaggagatcaacatcagctttgtgcctgagagcccagatggccaggagaagaagttctgggagagcgccagccagagcagccctgagaccagcggcatcagcagcgccagcagcagcaccagcagcagcagcgccagcaccacccctgtggccgccaccaggacccacaagaggtctgtgtctggcctgtgcaacagcagcagcgccctgcccctgtacaaccagcaggtgggggactgctgcatcatccgggtgtccctggatgtggacaatggaaacatgtacaagagcatcctggtgaccagccaggacaaggccccagctgtgatcaggaaggccatggacaagcacaacctggaggaggaggagccagaagattatgagctgctgcagatcctgagtgatgacaggaagctgaagatcccagaaaatgccaacgtgttctacgccatgaacagcacagccaactatgactttgtgctgaagaagaggaccttcaccaagggcgtgaaggtgaagcacggggccagcagcaccctgcccaggatgaagcagaagggcctgaagatcgccaagggcatcttctag

SEQ ID NO: 167057 - DNA, 930 bp, synthetic construct
  misc_feature 1..930: note = Description of Artificial Sequence: Synthetic coding sequence
  source 1..930: mol_type = other DNA
gtggtggccgagaatggcctgtctgaggagaagccccacctgctggtgttccccccagacctggtggccgagcagttcaccctgatggatgctgagtgccgcatcctgaagaacttcagcagcctgtatgccatcctgagcgccctgcagagcaacagcatccaccggctgaagaagacctgggaggatgtgtcccgggacagcttccgcatcttccagaagctgtctgagatcttcagtgatgagaacaactacagcctgagccgggagctgctgatcaaggagggcaccagcaagtttgccaccctggagatgaaccccaagagggcccagaagaggcccaaggagaccggcatcatccagggcaccgtgccctacctgggcaccttcctgacagacctggtgatgctggacacagccatgaaggactacctgtatggccgcctcatcaactttgagaagaggaggaaggagtttgaagtcatcgcccagatcaagctgctgcagagcgcctgcaacaactacagcatcgccccagatgagcagtttggagcctggttccgggctgtggagcggctgtctgaaacagagagctacaacctgagctgtgagctggagcccccatctgagagcgccagcaacaccctgcggaccaagaagaacacagccatcgtgaagcgctggagcgaccggcaggcccccagcacagagctgagcaccagcggcagcagccacagcaagagctgtgaccagctgcgctgtggcccctacctgagcagcggggacattgctgatgccctgtctgtgcacagcgctggcagcagcagcagtgatgtggaggagatcaacatcagctttgtgcctgagagcccagatggccaggagaagaagttctgggagagcgccagccagagcagccctgagacctag

SEQ ID NO: 167058 - DNA, 2958 bp, synthetic construct
  misc_feature 1..2958: note = Description of Artificial Sequence: Synthetic coding sequence
  source 1..2958: mol_type = other DNA
atgcacagaagaaggctggccctgggcctgggcttctgcctgctggccggcaccagcctgtctgtgctgtgggtgtacctggagaactggctgcctgtgtcctatgtgccctactacctgccctgcccagagatcctgcccatgatgatggccctgagctgcctgtgccaccagcagcacgaggccgccctgcaggagggggaggccaccccagcccggggcatggtgacagtgcccagcgcccaggccgccggggcccaggcccacacagctgctgacacccacaccctggtgggcgcccaccggctgcggggcaacctgcagccccgggccagcgctgcccacctgcctgccacagagccagaccactggggccacggcgtgtgccgcggggagagcagcacccaggagatcggggaggagctgatcaacggggtcatctacagcatcagcctgaggaaggtgcagctgcaccacggcggcaacaagggccagcgctggctgggctatgaaaatgaaagtgccctgaacctgtatgagacctgcaaggtgaggacagtgaaggccggcaccctggagaagctggtggagcacctggtgcctgccttccagggcagtgacctgtcctatgtgaccatcttcctgtgcacctaccgggccttcaccaccacccagcaggtgctggacctgctcttcaagagatatggccgctgtgatgccctgacagccagcagccgctatggctgcatcctgccctacagtgatgaagatggcggcccccaggaccagctgaagaatgccatcagcagcatcctgggcacctggctggaccagtacagcgaggacttctgccagcccccagacttcccctgcctgaagcagctggtggcctacgtgcagctgaacatgcctggcagtgacctggagcggcgggcccacctgctgctggcccagctggagcacagcgagcccattgaagctgagcctgaggccctgagccctgtgcctgccctgaagcccaccccagagctggagctggccctgaccccagcccgggcccccagccctgtgcctgccccagcccctgagcctgagcccgcccccaccccagcccctggcagcgagctggaggtggccccagccccagcccctgagctgcagcaggcccctgagcctgctgtgggcctggagagcgccccagccccagccctggagctggagcccgcccctgagcaggaccctgcccccagccagaccctggagctggagcccgccccagcccctgtgcccagcctgcagcccagctggcccagccctgtggtggctgaaaatggcctgtctgaggagaagccccacctgctggtgtttcctccagacctggtggccgagcagttcaccctgatggatgctgagctgttcaagaaggtggtgccctaccactgcctgggcagcatctggagccagagggacaagaagggcaaggagcacctggcccccaccatccgggccaccgtgacccagttcaacagcgtggccaactgtgtgatcaccacctgcctgggcaacagaagcaccaaggccccagaccgggcccgggtggtggagcactggattgaggtggccagagaatgtcgcatcctgaagaacttcagcagcctgtatgccatcctgagcgccctgcagagcaacagcatccaccggctgaagaagacctgggaggatgtgtcccgggacagcttccgcatcttccagaagctgtctgagatcttcagtgatgagaacaactacagcctgagccgggagctgctgatcaaggagggcaccagcaagtttgccaccctggagatgaaccccaagagggcccagaagaggcccaaggagaccggcatcatccagggcaccgtgccctacctgggcaccttcctgacagacctggtgatgctggacacagccatgaaggactacctgtatggccgcctcatcaactttgagaagaggaggaaggagtttgaggtgattgcccagatcaagctgctgcagagcgcctgcaacaactacagcatcgccccagatgagcagtttggagcctggttccgggctgtggagcggctgtctgaaacagagagctacaacctgagctgtgagctggagccccccagcgagagcgccagcaacaccctgcggaccaagaagaacacagccatcgtgaagcgctggagcgaccggcaggcccccagcacagagctgagcaccagcggcagcagccacagcaagagctgtgaccagctgcgctgtggcccctacctgagcagcggggacattgctgatgccctgtctgtgcacagcgctggcagcagcagcagtgatgtggaggagatcaacatcagctttgtgcctgagagcccagatggccaggagaagaagttctgggagagcgccagccagagcagccctgagaccagcggcatcagcagcgccagcagcagcaccagcagcagcagcgccagcaccacccctgtggccgccaccaggacccacaagaggtctgtgtctggcctgtgcaacagcagcagcgccctgcccctgtacaaccagcaggtgggggactgctgcatcatccgggtgtccctggatgtggacaatggaaacatgtacaagagcatcctggtgaccagccaggacaaggccccagctgtgatcaggaaggccatggacaagcacaacctggaggaggaggagccagaagattatgagctgctgcagatcctgagtgatgacaggaagctgaagatcccagaaaatgccaacgtgttctacgccatgaacagcacagccaactatgactttgtgctgaagaagaggaccttcaccaagggcgtgaaggtgaagcacggggccagcagcaccctgcccaggatgaagcagaagggcctgaagatcgccaagggcatcttctag

SEQ ID NO: 167059 - DNA, 2412 bp, synthetic construct
  misc_feature 1..2412: note = Description of Artificial Sequence: Synthetic coding sequence
  source 1..2412: mol_type = other DNA
atggaggtgaagcctgtgggggagcccacccaggaggtgtccaagttcaagctgagcaccaaggtggagagcacaggccactggctggtggaggaccacgtgcgcatctgggaggtgctgaagacagaggagagcagcatccaggactggggcgaggaggtggaggagggcgctgtgtaccacgtgaccctgaagagggtgcagatccagcaggccgccaacaagggggcccgctggctgggcgtggagggggaccagctgcccccaggccacacagtgtcccagtatgagacctgcaagatccgcaccatcaaggccggcaccctggagaagctggtggagaacctgctgacagccttcggggacaatgacttcacctacatcagcatcttcctgagcacctaccggggctttgccagcaccaaggaggtgctggagctgctgctggacagatatggcaacctgaccagccccaactgtgaggaggatggcagccagagcagcagcgagagcaagatggtgatcagaaatgccatcgccagcatcctgcgggcctggctggaccagtgtgccgaggacttccgggagcccccccacttcccctgcctgcagaagctgctggactacctgaccaggatgatgcctggcagtgaccctgagcggcgggcccagaacctgctggagcagttccagaagcaggaggtggagacagacaatggcctgcccaacaccatctccttcagcctggaggaggaggaggagctggagggcggggagagcgctgagttcacctgcttcagcgaggacctggtggccgagcagctgacctacatggatgcccagctgttcaagaaggtggtgccccaccactgcctgggctgcatctggagccggcgggacaagaaggagaacaagcacctggcccccaccatccgggccaccatcagccagttcaacaccctgaccaagtgtgtggtgtccaccatcctgggcggcaaggagctgaagacccagcagagggccaagatcatcgagaagtggatcaacatcgcccatgaatgtcggctgctgaagaacttcagcagcctgcgggccatcgtgtctgccctgcagagcaacagcatctaccgcctgaagaagacctgggccgctgtgccccgggacaggatgctgatgtttgaggagctgagtgacatcttcagtgaccacaacaaccacctgaccagccgggagctgctgatgaaggagggcaccagcaagtttgccaacctggacagctctgtgaaggagaaccagaagaggacccagaggcggctgcagctgcagaaggacatgggcgtgatgcagggcaccgtgccctacctgggcaccttcctgacagacctgaccatgctggacacagccctgcaggactacattgaaggaggcctcatcaactttgagaagagaagaagagaatttgaagtcatcgcccagatcaagctgctgcagagcgcctgcaacagctactgcatgaccccagaccagaagttcatccagtggttccagaggcagcagctgctgacagaggaggagagctatgccctgagctgtgaaattgaagctgctgctgatgccagcaccaccagccccaagcccaggaagtccatggtgaagaggctgagcctgctcttcctgggcagtgacatgatcaccagccccacccccaccaaggagcagcccaagagcacagccagcggcagcagcggggagagcatggacagcgtgtctgtgagcagctgtgagagcaaccacagcgaggccgaggagggcagcatcacccccatggacaccccagatgagccccagaagaagctgtctgagagcagcagcagctgcagcagcatccacagcatggacaccaacagcagcggcatgagcagcctcatcaaccccctgagcagcccccccagctgcaacaacaaccccaagatccacaagaggtctgtgtctgtgaccagcatcaccagcacagtgctgccccctgtgtacaaccagcagaatgaagacacctgcatcatccgcatctctgtggaggacaacaatggaaacatgtacaagagcatcatgctgaccagccaggacaagaccccagctgtgatccagagggccatgctgaagcacaacctggacagcgaccctgctgaggagtatgagctggtgcaggtgatcagcgaggacaaggagctggtgatcccagacagcgccaacgtgttctacgccatgaacagccaggtgaactttgacttcatcctgaggaagaagaacagcatggaggagcaggtgaagctgcggagcaggaccagcctgaccctgcccaggacagccaagaggggctgctggagcaacagacacagcaagatcaccctgtag

SEQ ID NO: 167060 - DNA, 2307 bp, synthetic construct
  misc_feature 1..2307: note = Description of Artificial Sequence: Synthetic coding sequence
  source 1..2307: mol_type = other DNA
atgaagctgctgtggcaggccaagatgagcagcatccaggactggggcgaggaggtggaggagggcgctgtgtaccacgtgaccctgaagagggtgcagatccagcaggccgccaacaagggggcccgctggctgggcgtggagggggaccagctgcccccaggccacacagtgtcccagtatgagacctgcaagatccgcaccatcaaggccggcaccctggagaagctggtggagaacctgctgacagcctttggagacaatgacttcacctacatcagcatcttcctgagcacctaccggggctttgccagcaccaaggaggtgctggagctgctgctggacagatatggcaacctgaccagccccaactgtgaagaagatggcagccagagcagcagcgagagcaagatggtgatcagaaatgccatcgccagcatcctgcgggcctggctggaccagtgtgccgaggacttccgggagcccccccacttcccctgcctgcagaagctgctggactacctgaccaggatgatgcctggcagtgaccctgagcggcgggcccagaacctgctggagcagttccagaagcaggaggtggagacagacaatggcctgcccaacaccatctccttcagcctggaggaggaggaggagctggagggcggggagagcgctgagttcacctgcttcagcgaggacctggtggccgagcagctgacctacatggatgcccagctgttcaagaaggtggtgccccaccactgcctgggctgcatctggagcagaagagacaagaaggagaacaagcacctggcccccaccatccgggccaccatcagccagttcaacaccctgaccaagtgtgtggtgtccaccatcctgggcggcaaggagctgaagacccagcagagggccaagatcatcgagaagtggatcaacatcgcccacgagtgccgcctgctgaagaacttcagcagcctgcgggccatcgtgtctgccctgcagagcaacagcatctaccgcctgaagaagacctgggccgctgtgccccgggacaggatgctgatgtttgaggagctgagtgacatcttcagtgaccacaacaaccacctgaccagccgggagctgctgatgaaggagggcaccagcaagtttgccaacctggacagctctgtgaaggagaaccagaagaggacccagaggcggctgcagctgcagaaggacatgggcgtgatgcagggcaccgtgccctacctgggcaccttcctgacagacctgaccatgctggacacagccctgcaggactacatcgagggcggcctcatcaactttgagaagagaagaagagaatttgaggtgattgcccagatcaagctgctgcagagcgcctgcaacagctactgcatgaccccagaccagaagttcatccagtggttccagaggcagcagctgctgacagaggaggagagctatgccctgagctgtgaaattgaggccgctgctgatgccagcaccaccagccccaagcccaggaagtccatggtgaagaggctgagcctgctcttcctgggcagtgacatgatcaccagccccacccccaccaaggagcagcccaagagcacagccagcggcagcagtggagagagcatggattctgtgtctgtgagcagctgtgagagcaaccacagcgaggccgaggagggcagcatcacccccatggacaccccagatgagccccagaagaagctgtctgagagcagcagcagctgcagcagcatccacagcatggacaccaacagcagcggcatgagcagcctcatcaaccccctgagcagcccccccagctgcaacaacaaccccaagatccacaagaggtctgtgtctgtgaccagcatcaccagcacagtgctgccccctgtgtacaaccagcagaatgaagacacctgcatcatccgcatctctgtggaggacaacaacggcaacatgtacaagagcatcatgctgaccagccaggacaagaccccagctgtgatccagagggccatgctgaagcacaacctggacagcgaccctgctgaggagtatgagctggtgcaggtgatcagcgaggacaaggagctggtgatcccagattctgccaacgtgttctacgccatgaacagccaggtgaactttgacttcatcctgaggaagaagaacagcatggaggagcaggtgaagctgcggagcaggaccagcctgaccctgcccaggacagccaagaggggctgctggagcaacagacacagcaagatcaccctgtag

SEQ ID NO: 167061 - DNA, 2412 bp, synthetic construct; identical to SEQ ID NO: 167059
  misc_feature 1..2412: note = Description of Artificial Sequence: Synthetic coding sequence
  source 1..2412: mol_type = other DNA

SEQ ID NO: 167062 - DNA, 2301 bp, synthetic construct
  misc_feature 1..2301: note = Description of Artificial Sequence: Synthetic coding sequence
  source 1..2301: mol_type = other DNA
atggaggtgaagcctgtgggggagcccacccaggaggtgtccaagttcaagctgagcaccaaggtggagagcacaggccactggctggtggaggaccacgtgcgcatctgggaggtgctgaagacagaggaggtggagggggaccagctgcccccaggccacacagtgtcccagtatgagacctgcaagatccgcaccatcaaggccggcaccctggagaagctggtggagaacctgctgacagcctttggagacaatgacttcacctacatcagcatcttcctgagcacctaccggggctttgccagcaccaaggaggtgctggagctgctgctggacagatatggcaacctgaccagccccaactgtgaagaagatggcagccagagcagcagcgagagcaagatggtgatcagaaatgccatcgccagcatcctgcgggcctggctggaccagtgtgccgaggacttccgggagcccccccacttcccctgcctgcagaagctgctggactacctgaccaggatgatgcctggcagtgaccctgagcggcgggcccagaacctgctggagcagttccagaagcaggaggtggagacagacaatggcctgcccaacaccatctccttcagcctggaggaggaggaggagctggagggcggggagagcgctgagttcacctgcttcagcgaggacctggtggccgagcagctgacctacatggatgcccagctgttcaagaaggtggtgccccaccactgcctgggctgcatctggagcagaagagacaagaaggagaacaagcacctggcccccaccatccgggccaccatcagccagttcaacaccctgaccaagtgtgtggtgtccaccatcctgggcggcaaggagctgaagacccagcagagggccaagatcatcgagaagtggatcaacatcgcccacgagtgccgcctgctgaagaacttcagcagcctgcgggccatcgtgtctgccctgcagagcaacagcatctaccgcctgaagaagacctgggccgctgtgccccgggacaggatgctgatgtttgaggagctgagtgacatcttcagtgaccacaacaaccacctgaccagccgggagctgctgatgaaggagggcaccagcaagtttgccaacctggacagctctgtgaaggagaaccagaagaggacccagaggcggctgcagctgcagaaggacatgggcgtgatgcagggcaccgtgccctacctgggcaccttcctgacagacctgaccatgctggacacagccctgcaggactacatcgagggcggcctcatcaactttgagaagagaagaagagaatttgaggtgattgcccagatcaagctgctgcagagcgcctgcaacagctactgcatgaccccagaccagaagttcatccagtggttccagaggcagcagctgctgacagaggaggagagctatgccctgagctgtgaaattgaggccgctgctgatgccagcaccaccagccccaagcccaggaagtccatggtgaagaggctgagcctgctcttcctgggcagtgacatgatcaccagccccacccccaccaaggagcagcccaagagcacagccagcggcagcagtggagagagcatggattctgtgtctgtgagcagctgtgagagcaaccacagcgaggccgaggagggcagcatcacccccatggacaccccagatgagccccagaagaagctgtctgagagcagcagcagctgcagcagcatccacagcatggacaccaacagcagcggcatgagcagcctcatcaaccccctgagcagcccccccagctgcaacaacaaccccaagatccacaagaggtctgtgtctgtgaccagcatcaccagcacagtgctgccccctgtgtacaaccagcagaatgaagacacctgcatcatccgcatctctgtggaggacaacaacggcaacatgtacaagagcatcatgctgaccagccaggacaagaccccagctgtgatccagagggccatgctgaagcacaacctggacagcgaccctgctgaggagtatgagctggtgcaggtgatcagcgaggacaaggagctggtgatcccagattctgccaacgtgttctacgccatgaacagccaggtgaactttgacttcatcctgaggaagaagaacagcatggaggagcaggtgaagctgcggagcaggaccagcctgaccctgcccaggacagccaagaggggctgctggagcaacagacacagcaagatcaccctgtag

SEQ ID NO: 167063 - DNA, 2220 bp, synthetic construct
  misc_feature 1..2220: note = Description of Artificial Sequence: Synthetic coding sequence
  source 1..2220: mol_type = other DNA
atgaagctgctgtggcaggccaagatgagcagcatccaggactggggcgaggaggtggaggagggcgctgtgtaccacgtgaccctgaagagggtgcagatccagcaggccgccaacaagggggcccgctggctgggcgtggagggggaccagctgcccccaggccacacagtgtcccagtatgagacctgcaagatccgcaccatcaaggccggcaccctggagaagctggtggagaacctgctgacagcctttggagacaatgacttcacctacatcagcatcttcctgagcacctaccggggctttgccagcaccaaggaggtgctggagctgctgctggacagatatggcaacctgaccagccccaactgtgaagaagatggcagccagagcagcagcgagagcaagatggtgatcagaaatgccatcgccagcatcctgcgggcctggctggaccagtgtgccgaggacttccgggagcccccccacttcccctgcctgcagaagctgctggactacctgaccaggatgatgcctggcagtgaccctgagcggcgggcccagaacctgctggagcagttccagaagcaggaggtggagacagacaatggcctgcccaacaccatctccttcagcctggaggaggaggaggagctggagggcggggagagcgctgagttcacctgcttcagcgaggacctggtggccgagcagctgacctacatggatgcccagctgttcaagaaggtggtgccccaccactgcctgggctgcatctggagcagaagagacaagaaggagaacaagcacctggcccccaccatccgggccaccatcagccagttcaacaccctgaccaagtgtgtggtgtccaccatcctgggcggcaaggagctgaagacccagcagagggccaagatcatcgagaagtggatcaacatcgcccacgagtgccgcctgctgaagaacttcagcagcctgcgggccatcgtgtctgccctgcagagcaacagcatctaccgcctgaagaagacctgggccgctgtgccccgggacaggatgctgatgtttgaggagctgagtgacatcttcagtgaccacaacaaccacctgaccagccgggagctgctgatgaaggagggcaccagcaagtttgccaacctggacagctctgtgaaggagaaccagaagaggacccagaggcggctgcagctgcagaaggacatgggcggcctcatcaactttgagaagagaagaagagaatttgaagtcatcgcccagatcaagctgctgcagagcgcctgcaacagctactgcatgaccccagaccagaagttcatccagtggttccagaggcagcagctgctgacagaggaggagagctatgccctgagctgtgaaattgaagctgctgctgatgccagcaccaccagccccaagcccaggaagtccatggtgaagaggctgagcctgctcttcctgggcagtgacatgatcaccagccccacccccaccaaggagcagcccaagagcacagccagcggcagcagcggggagagcatggacagcgtgtctgtgagcagctgtgagagcaaccacagcgaggccgaggagggcagcatcacccccatggacaccccagatgagccccagaagaagctgtctgagagcagcagcagctgcagcagcatccacagcatggacaccaacagcagcggcatgagcagcctcatcaaccccctgagcagcccccccagctgcaacaacaaccccaagatccacaagaggtctgtgtctgtgaccagcatcaccagcacagtgctgccccctgtgtacaaccagcagaatgaagacacctgcatcatccgcatctctgtggaggacaacaatggaaacatgtacaagagcatcatgctgaccagccaggacaagaccccagctgtgatccagagggccatgctgaagcacaacctggacagcgaccctgctgaggagtatgagctggtgcaggtgatcagcgaggacaaggagctggtgatcccagacagcgccaacgtgttctacgccatgaacagccaggtgaactttgacttcatcctgaggaagaagaacagcatggaggagcaggtgaagctgcggagcaggaccagcctgaccctgcccaggacagccaagaggggctgctggagcaacagacacagcaagatcaccctgtag

SEQ ID NO: 167064 - DNA, 1173 bp, synthetic construct
  misc_feature 1..1173: note = Description of Artificial Sequence: Synthetic coding sequence
  source 1..1173: mol_type = other DNA
atgggcagcttcaaggacagaggagatggcctgcccaacaccatctccttcagcctggaggaggaggaggagctggagggcggggagagcgctgagttcacctgcttcagcgaggacctggtggccgagcagctgacctacatggatgcccagctgttcaagaaggtggtgccccaccactgcctgggctgcatctggagccggcgggacaagaaggagaacaagcacctggcccccaccatccgggccaccatcagccagttcaacaccctgaccaagtgtgtggtgtccaccatcctgggcggcaaggagctgaagacccagcagagggccaagatcatcgagaagtggatcaacatcgcccatgaatgtcggctgctgaagaacttcagcagcctgcgggccatcgtgtctgccctgcagagcaacagcatctaccgcctgaagaagacctgggccgctgtgccccgggacaggatgctgatgtttgaggagctgagtgacatcttcagtgaccacaacaaccacctgaccagccgggagctgctgatgaaggagggcaccagcaagtttgccaacctggacagctctgtgaaggagaaccagaagaggacccagaggcggctgcagctgcagaaggacatgggcgtgatgcagggcaccgtgccctacctgggcaccttcctgacagacctgaccatgctggacacagccctgcaggactacattgaaggaggcctcatcaactttgagaagagaagaagagaatttgaagtcatcgcccagatcaagctgctgcagagcgcctgcaacagctactgcatgaccccagaccagaagttcatccagtggttccagaggcagcagctgctgacagaggaggagagctatgccctgagctgtgaaattgaagctgctgctgatgccagcaccaccagccccaagcccaggaagtccatggtgaagaggctgagcctgctcttcctgggcagtgacatgatcaccagccccacccccaccaaggagcagcccaagagcacagccagcggcagcagcggggagagcatggacagcgtgtctgtgagcagctgtgagagcaaccacagcgaggccgaggagggcagcatcacccccatggacaccccagatgagccccagaagaaggccctgtag

SEQ ID NO: 167065 - DNA, 1422 bp, synthetic construct
  misc_feature 1..1422: note = Description of Artificial Sequence: Synthetic coding sequence
  source 1..1422: mol_type = other DNA
atgaggaagctgctgaccaacctgcctgctgctgctgtgctgagcgcccaggtgtacagcgctgtgctgcagggcctgtgggaggagaatgtgtgtggcaccccaggccgcaccagggtgtgcacagccctgctgtatggccaggtgtgccccttccaggacagcacagatggcctgcggaccatcaccagcatcctcttcaactggcccccagagaacacctctgtgtactaccagcccccccagaggagcagcttccgcatcaagctggccttcaggaacctgtcctggccaggcctgggcctggaggaccaccaggagatcgtgctgggccagctggtgctgcctgagcccaatgaggccaagccagatgatcctgccccccggcccggccagcacgccctgaccatgcctgccctggagcccgccccacccctgctggccgacctgggccctgccctggagcctgagagccctgctgccctgggccccccaggctacctgcacagcgcccctggccctgccccagcccctggagagggccccccacctggcaccgtgctggagccccagagcgcccctgagagcagctgcccctgccggggctctgtgaagaaccagcccagcgaggagctgcctgacatgaccaccttccccccccggctgctggccgagcagctgaccctgatggatgctgagctgttcaagaaggtggtgctgcacgagtgcctgggctgcatctggggccagggccacctgaagggaaatgagcacatggcccccaccgtgcgggccaccatcgcccacttcaaccggctgaccaactgcatcaccaccagctgcctgggggaccacagcatgagggcccgggaccgggcccgggtggtggagcactggatcaaggtggccagagaatgtctgagcctgaacaacttcagctctgtgcacgtgattgtgtctgccctgtgcagcaaccccatcggccagctgcacaagacctgggccggcgtgagcagcaagtccatgaaggagctgaaggagctgtgcaagaaggacacagctgtgaagagggacctgctgatcaaggccggcagcttcaaggtggccacccaggagaggaacccccagagggtgcagatgaggctgcggcggcagaagaagggcgtggtgcccttcctgggggacttcctgacagagctgcagaggctggacagcgccatcccagatgacctggatggcaacaccaacaagaggagcaaggaggtgcgggtgctgcaggagatgcagctgctgcaggtggccgccatgaactaccgcctgcggcccctggagaagtttgtgacctacttcaccaggatggagcagctgagtgacaaggagagctacaagctgagctgccagctggagcctgagaacccctag

SEQ ID NO: 167066 - DNA, 1743 bp, synthetic construct
  misc_feature 1..1743: note = Description of Artificial Sequence: Synthetic coding sequence
  source 1..1743: mol_type = other DNA
atgaggaagctgctgaccaacctgcctgctgctgctgtgctgagcgcccaggtgtacagcgctgtgctgcagggcctgtgggaggagaatgtgtgtggcaccccaggccgcaccagggtgtgcacagccctgctgtatggccaggtgtgccccttccaggacagcacagatggcctgcggaccatcaccagcatcctcttcaactggcccccagagaacacctctgtgtactaccagcccccccagaggagcagcttccgcatcaagctggccttcaggaacctgtcctggccaggcctgggcctggaggaccaccaggagatcgtgctgggccagctggtgctgcctgagcccaatgaggccaagccagatgatcctgccccccggcccggccagcacgccctgaccatgcctgccctggagcccgccccacccctgctggccgacctgggccctgccctggagcctgagagccctgctgccctgggccccccaggctacctgcacagcgcccctggccctgccccagcccctggagagggccccccacctggcaccgtgctggagccccagagcgcccctgagagcagctgcccctgccggggctctgtgaagaaccagcccagcgaggagctgcctgacatgaccaccttccccccccggctgctggccgagcagctgaccctgatggatgctgagctgttcaagaaggtggtgctgcacgagtgcctgggctgcatctggggccagggccacctgaagggaaatgagcacatggcccccaccgtgcgggccaccatcgcccacttcaaccggctgaccaactgcatcaccaccagctgcctgggggaccacagcatgagggcccgggaccgggcccgggtggtggagcactggatcaaggtggccagagaatgtctgagcctgaacaacttcagctctgtgcacgtgattgtgtctgccctgtgcagcaaccccatcggccagctgcacaagacctgggccggcgtgagcagcaagtccatgaaggagctgaaggagctgtgcaagaaggacacagctgtgaagagggacctgctgatcaaggccggcagcttcaaggtggccacccaggagaggaacccccagagggtgcagatgaggctgcggcggcagaagaagggcgtggtgcccttcctgggggacttcctgacagagctgcagaggctggacagcgccatcccagatgacctggatggcaacaccaacaagaggagcaaggaggtgcgggtgctgcaggagatgcagctgctgcaggtggccgccatgaactaccgcctgcggcccctggagaagtttgtgacctacttcaccaggatggagcagctgagtgacaaggagcgctggggcttcaccatgatgagccgcatcgtgagcaacagctggccccaggccatccaccccccccagccccccaaggtgctgaccctgcagctgcaggccgtgctgcctgctggggccaggaagcctgtgggctggcagcaccctgctgtggccggcaaccccccaggctgctggccagagcaccggctgtgcaccatcccccacccagaccggcggcaccagggcaccaccagccggcggctggccgcccagctgcacctggccctggacccccaccaccagctgctgctgctggcccgcatccggccctgggacttctgtgagagcggcggccggcccttctacgtgtacttcctgtag

SEQ ID NO: 167067 - DNA, 1968 bp, synthetic construct
  misc_feature 1..1968: note = Description of Artificial Sequence: Synthetic coding sequence
  source 1..1968: mol_type = other DNA
atgacagagtgcttcctgccccccaccagcagccccagcgagcaccggcgggtggagcacggcagcggcctgaccaggacccccagcagcgaggagatcagccccaccaagtttcctggcctgtacagaactggagagcccagcccccctcatgacatcctgcacgagcccccagatgtggtgtctgatgatgagaaggaccacggcaagaagaagggcaagttcaagaagaaggagaagaggacagagggctacgccgccttccaggaggacagcagtggagatgaagctgagagccccagcaagatgaagaggagcaagggcatccacgtgttcaagaagcccagcttcagcaagaagaaggagaaggacttcaagatcaaggagaagcccaaggaggagaagcacaaggaggagaagcacaaggaggagaagcacaaggagaagaagagcaaggacctgacagctgctgatgtggtgaagcagtggaaggagaagaagaagaagaagaagcccatccaggagcctgaggtgccccagattgatgtgcccaacctgaagcccatcttcggcatccccctggctgatgctgtggagaggaccatgatgtatgatggcatccggctgcctgctgtgttcagagaatgtattgattatgtggagaagtatggcatgaagtgtgagggcatctacagagtgtctggcatcaagagcaaggtggatgagctgaaggccgcctatgaccgggaggagagcaccaacctggaggactatgagcccaacacagtggccagcctgctgaagcagtacctgcgggacctgcctgagaacctgctgaccaaggagctgatgcccaggtttgaggaggcctgtggccgcaccacagaaacagagaaggtgcaggagttccagaggctgctgaaggagctgcctgagtgcaactacctgctgatctcctggctgattgtgcacatggaccacgtgattgccaaggagctggagaccaagatgaacatccagaacatcagcatcgtgctgagccccaccgtgcagatcagcaacagagtgctgtatgtgttcttcacccacgtgcaggagctgtttggaaatgtggtgctgaagcaggtgatgaagcccctgcgctggagcaacatggccaccatgcccaccctgcctgagacccaggccggcatcaaggaggagatccggcggcaggagttcctgctgaactgcctgcaccgggacctgcagggcggcatcaaggacctgagcaaggaggagcggctgtgggaggtgcagaggatcctgacagccctgaagaggaagctgcgggaggccaagaggcaggagtgtgagaccaagatcgcccaggagatcgccagcctgagcaaagaagatgtgtccaaggaggagatgaatgaaaatgaggaggtgatcaacatcctgctggcccaggagaatgagatcctgacagagcaggaggagctgctggccatggagcagttcctgcggcggcagatcgccagcgagaaggaggagattgaaaggctgcgggcagaaattgctgagatccagagccggcagcagcacggccgctcagaaacagaggagtacagcagcgagagcgagagcgagagtgaagatgaggaggagctgcagatcatcctggaggacctgcagaggcagaatgaggagctggagatcaagaacaaccacctgaaccaggccatccacgaggagcgggaggccatcatcgagctgcgggtgcagctgcggctgctgcagatgcagagggccaaggccgagcagcaggcccaggaggatgaggagcctgagtggaggggcggcgctgtgcagcccccaagagatggagtgctggagcccaaggccgccaaggagcagcccaaggccggcaaggagcccgccaagcccagccccagccgggacaggaaggagaccagcatctag

SEQ ID NO: 167068 - DNA, 1968 bp, synthetic construct; identical to SEQ ID NO: 167067
  misc_feature 1..1968: note = Description of Artificial Sequence: Synthetic coding sequence
  source 1..1968: mol_type = other DNA

SEQ ID NO: 167069 - DNA, 1044 bp, synthetic construct
  misc_feature 1..1044: note = Description of Artificial Sequence: Synthetic coding sequence
  source 1..1044: mol_type = other DNA
atgacagagtgcttcctgccccccaccagcagccccagcgagcaccggcgggtggagcacggcagcggcctgaccaggacccccagcagcgaggagatcagccccaccaagtttcctggcctgtacagaactggagagcccagcccccctcatgacatcctgcacgagcccccagatgtggtgtctgatgatgagaaggaccacggcaagaagaagggcaagttcaagaagaaggagaagaggacagagggctacgccgccttccaggaggacagcagtggagatgaagctgagagccccagcaagatgaagaggagcaagggcatccacgtgttcaagaagcccagcttcagcaagaagaaggagaaggacttcaagatcaaggagaagcccaaggaggagaagcacaaggaggagaagcacaaggaggagaagcacaaggagaagaagagcaaggacctgacagctgctgatgtggtgaagcagtggaaggagaagaagaagaagaagaagcccatccaggagcctgaggtgccccagattgatgtgcccaacctgaagcccatcttcggcatccccctggctgatgctgtggagaggaccatgatgtatgatggcatccggctgcctgctgtgttcagagaatgtattgattatgtggagaagtatggcatgaagtgtgagggcatctacagagtgtctggcatcaagagcaaggtggatgagctgaaggccgcctatgaccgggaggagagcaccaacctggaggactatgagcccaacacagtggccagcctgctgaagcagtacctgcgggacctgcctgagaacctgctgaccaaggagctgatgcccaggtttgaggaggcctgtggccgcaccacagaaacagagaaggtgcagagcagtggagaggaggccgcccggagctgccagttcctgacagctggcaccagcaagggcctgctgaccggcctggtgaagggcagccacctgggcctggtgcacccccagaggatgctgttcaagccagagatcttctag

SEQ ID NO: 167070 - DNA, 1980 bp, synthetic construct
  misc_feature 1..1980: note = Description of Artificial Sequence: Synthetic coding sequence
  source 1..1980: mol_type = other DNA
atggaggccgctgctgctgctgctgctgctgctgctgctgctgctgctgctgggggcggctgcggcagcggccccccacccctgctgctgtctgagggggagcagcagtgctacagcgagctgtttgcccgctgtgccggggctgctgggggcggccctggcagcggccccccagaggccgcccgggtggcccctggaacagccacagctgctgctggccctgtggccgacctcttccgggccagccagctgcctgctgagaccctgcaccagatcacagagctgtgtggggccaagagggtgggctacttcggccccacccagttctacatcgccctgaagctgattgctgctgcccagagcggcctgcctgtgagaattgagagcatcaagtgtgagctgcccctgccccgcttcatgatgagcaagaatgatggagagatccgcttcggcaacccagctgagctgcacggcaccaaggtgcagatcccctacctgaccacagagaagaacagcttcaagaggatggatgatgaggacaagcaggagacccagagccccaccatgagccccctggccagcccccccagcagccccccccactaccagagggtgcccctgagccacggctacagcaagctgcggagcagcgctgagcagatgcacccagccccctatgaggcccggcagcccctggtgcagcctgagggcagcagcagcggcggccctggcaccaagcccctgcggcaccaggccagcctcatccgctccttctctgtggagcgggagctgcaggacaacagcagctacccagatgagccctggaggatcacagaggagcagcgggagtactacgtgaaccagttccgcagcctgcagcctgaccccagcagcttcatcagcggctctgtggccaagaacttcttcaccaagagcaagctgagcatccctgagctgagctacatctgggagctgagtgatgctgactgtgatggagccctgaccctgcctgagttctgtgccgccttccacctgattgtggccaggaagaatggctaccccctgcctgagggcctgccccccaccctgcagcctgagtacctgcaggccgccttccccaagcccaagtgggactgccagctgtttgacagctacagcgagagcctgcctgccaaccagcagccccgggacctgaacaggatggagaagacctctgtgaaggacatggctgacctgcctgtgcccaaccaggatgtgaccagtgatgacaagcaggccctgaagagcaccatcaatgaggccctgcccaaggatgtgtctgaagatcctgccacccccaaggacagcaacagcctgaaggcccggcccaggagccgcagctacagcagcaccagcattgaggaggccatgaagagaggagaggacccccccaccccaccaccccggccccagaagacccacagccgggccagcagcctggacctgaacaaggtgttccagcccagcgtgcctgccaccaagagcggcctgctgcccccacctccagccctgcccccccggccctgccccagccagagcgagcaggtgtctgaggccgagctgctgccccagctgagccgggcccccagccaggccgctgagagcagccctgccaagaaggatgtgctgtacagccagccccccagcaagcccatccggaggaagttccggcctgagaaccaggccacagagaaccaggagcccagcacagctgccagcggccctgccagcgctgccaccatgaagccccaccccaccgtgcagaagcagagcagcaagcagaagaaggccatccagacagccatcaggaagaacaaggaggccaatgctgtgctggcccggctgaacagcgagctgcagcagcagctgaaggaggtgcaccaggagcgcatcgccctggagaaccagctggagcagctgcggcctgtgacagtgctgtag

SEQ ID NO: 167071 - DNA, 1983 bp, synthetic construct
  misc_feature 1..1983: note = Description of Artificial Sequence: Synthetic coding sequence
  source 1..1983: mol_type = other DNA
atggaggccgctgctgctgctgctgctgctgctgctgctgctgctgctgctgggggcggctgcggcagcggccccccacccctgctgctgtctgagggggagcagcagtgctacagcgagctgtttgcccgctgtgccggggctgctgggggcggccctggcagcggccccccagaggccgcccgggtggcccctggaacagccacagctgctgctggccctgtggccgacctcttccgggccagccagctgcctgctgagaccctgcaccagatcacagagctgtgtggggccaagagggtgggctacttcggccccacccagttctacatcgccctgaagctgattgctgctgcccagagcggcctgcctgtgagaattgagagcatcaagtgtgagctgcccctgccccgcttcatgatgagcaagaatgatggagagatccgcttcggcaacccagctgagctgcacggcaccaaggtgcagatcccctacctgaccacagagaagaacagcttcaagaggatggatgatgaggacaagcagcaggagacccagagccccaccatgagccccctggccagcccccccagcagccccccccactaccagagggtgcccctgagccacggctacagcaagctgcggagcagcgctgagcagatgcacccagccccctatgaggcccggcagcccctggtgcagcctgagggcagcagcagcggcggccctggcaccaagcccctgcggcaccaggccagcctcatccgctccttctctgtggagcgggagctgcaggacaacagcagctacccagatgagccctggaggatcacagaggagcagcgggagtactacgtgaaccagttccgcagcctgcagcctgaccccagcagcttcatcagcggctctgtggccaagaacttcttcaccaagagcaagctgagcatccctgagctgagctacatctgggagctgagtgatgctgactgtgatggagccctgaccctgcctgagttctgtgccgccttccacctgattgtggccaggaagaatggctaccccctgcctgagggcctgccccccaccctgcagcctgagtacctgcaggccgccttccccaagcccaagtgggactgccagctgtttgacagctacagcgagagcctgcctgccaaccagcagccccgggacctgaacaggatggagaagacctctgtgaaggacatggctgacctgcctgtgcccaaccaggatgtgaccagtgatgacaagcaggccctgaagagcaccatcaatgaggccctgcccaaggatgtgtctgaggaccctgccacccccaaggacagcaacagcctgaaggcccggcccaggagccgcagctacagcagcaccagcattgaggaggccatgaagagaggagaagatcctcccaccccaccaccccggccccagaagacccacagccgggccagcagcctggacctgaacaaggtgttccagcccagcgtgcctgccaccaagagcggcctgctgcccccacctccagccctgcccccccggccctgccccagccagagcgagcaggtgtctgaggccgagctgctgccccagctgagccgggcccccagccaggccgctgagagcagccctgccaagaaggatgtgctgtacagccagccccccagcaagcccatccggaggaagttccggcctgagaaccaggccacagagaaccaggagcccagcacagctgccagcggccctgccagcgctgccaccatgaagccccaccccaccgtgcagaagcagagcagcaagcagaagaaggccatccagacagccatcaggaagaacaaggaggccaatgctgtgctggcccggctgaacagcgagctgcagcagcagctgaaggaggtgcaccaggagagaattgccctggagaaccagctggagcagctgcggcctgtgacagtgctgtag

SEQ ID NO: 167072 - DNA, 1824 bp, synthetic construct
  misc_feature 1..1824: note = Description of Artificial Sequence: Synthetic coding sequence
  source 1..1824: mol_type = other DNA
atggaggccgctgctgctgctgctgctgctgctgctgctgctgctgctgctgggggcggctgcggcagcggccccccacccctgctgctgtctgagggggagcagcagtgctacagcgagctgtttgcccgctgtgccggggctgctgggggcggccctggcagcggccccccagaggccgcccgggtggcccctggaacagccacagctgctgctggccctgtggccgacctcttccgggccagccagctgcctgctgagaccctgcaccagatcacagagctgtgtggggccaagagggtgggctacttcggccccacccagttctacatcgccctgaagctgattgctgctgcccagagcggcctgcctgtgagaattgagagcatcaagtgtgagctgcccctgccccgcttcatgatgagcaagaatgatggagagatccgcttcggcaacccagctgagctgcacggcaccaaggtgcagatcccctacctgaccacagagaagaacagcttcaagaggatggatgatgaggacaagcagcaggagacccagagccccaccatgagccccctggccagcccccccagcagccccccccactaccagagggtgcccctgagccacggctacagcaagctgcggagcagcgctgagcagatgcacccagccccctatgaggcccggcagcccctggtgcagcctgagggcagcagcagcggcggccctggcaccaagcccctgcggcaccaggccagcctcatccgctccttctctgtggagcgggagctgcaggacaacagcagctacccagatgagccctggaggatcacagaggagcagcgggagtactacgtgaaccagttccgcagcctgcagcctgaccccagcagcttcatcagcggctctgtggccaagaacttcttcaccaagagcaagctgagcatccctgagctgagctacatctgggagctgagtgatgctgactgtgatggagccctgaccctgcctgagttctgtgccgccttccacctgattgtggccaggaagaatggctaccccctgcctgagggcctgccccccaccctgcagcctgagtacctgcaggccgccttccccaagcccaagtgggactgccagctgtttgacagctacagcgagagcctgcctgccaaccagcagccccgggacctgaacaggatggagaagacctctgtgaaggacatggctgacctgcctgtgcccaaccaggatgtgaccagtgatgacaagcaggccctgaagagcaccatcaatgaggccctgcccaaggatgtgtctgaggaccctgccacccccaaggacagcaacagcctgaaggcccggcccaggagccgcagctacagcagcaccagcattgaggaggccatgaagagaggagaagatcctcccaccccaccaccccggccccagaagacccacagccgggccagcagcctggacctgaacaaggtgttccagcccagcgtgcctgccaccaagagcggcctgctgcccccacctccagccctgcccccccggccctgccccagccagagcgagcaggtgtctgaggccgagctgctgccccagctgagccgggcccccagccaggccgctgagagcagccctgccaagaaggatgtgctgtacagccagccccccagcaagcccatccggaggaagttccggcctgtgtgtggcatccagcccctcatcagcattgagctgcgggccttccgcaccagccgccacctgttcaacgtgtccctggtgcactggcaggccctgagcatcgcctag

SEQ ID NO: 167073 - DNA, 1380 bp, synthetic construct
  misc_feature 1..1380: note = Description of Artificial Sequence: Synthetic coding sequence
  source 1..1380: mol_type = other DNA
atgatgagcaagaatgatggagagatccgctttggaaatcctgctgagctgcacggcaccaaggtgcagatcccctacctgaccacagagaagaacagcttcaagaggatggatgatgaggacaagcaggagacccagagccccaccatgagccccctggccagcccccccagcagccccccccactaccagagggtgcccctgagccacggctacagcaagctgcggagcagcgctgagcagatgcacccagccccctatgaggcccggcagcccctggtgcagcctgagggcagcagcagcggcggccctggcaccaagcccctgcggcaccaggccagcctcatccgctccttctctgtggagcgggagctgcaggacaacagcagctacccagatgagccctggaggatcacagaggagcagcgggagtactacgtgaaccagttccgcagcctgcagcctgaccccagcagcttcatcagcggctctgtggccaagaacttcttcaccaagagcaagctgagcatccctgagctgagctacatctgggagctgagtgatgctgactgtgatggagccctgaccctgcctgagttctgtgccgccttccacctgattgtggccaggaagaatggctaccccctgcctgagggcctgccccccaccctgcagcctgagtacctgcaggccgccttccccaagcccaagtgggactgccagctgtttgacagctacagcgagagcctgcctgccaaccagcagccccgggacctgaacaggatggagaagacctctgtgaaggacatggctgacctgcctgtgcccaaccaggatgtgaccagtgatgacaagcaggccctgaagagcaccatcaatgaggccctgcccaaggatgtgtctgaggaccctgccaccaagagcggcctgctgcccccacctccagccctgcccccccggccctgccccagccagagcgagcaggtgtctgaggccgagctgctgccccagctgagccgggcccccagccaggccgctgagagcagccctgccaagaaggatgtgctgtacagccagccccccagcaagcccatccggaggaagttccggcctgagaaccaggccacagagaaccaggagcccagcacagctgccagcggccctgccagcgctgccaccatgaagccccaccccaccgtgcagaagcagagcagcaagcagaagaaggccatccagacagccatcaggaagaacaaggaggccaatgctgtgctggcccggctgaacagcgagctgcagcagcagctgaaggaggtgcaccaggagcgcatcgccctggagaaccagctggagcagctgcggcctgtgacagtgctgtag

SEQ ID NO: 167074 - DNA, 1863 bp, synthetic construct
  misc_feature 1..1863: note = Description of Artificial Sequence: Synthetic coding sequence
  source 1..1863: mol_type = other DNA
atggctgctgccacagctgaccccggggccggcaacccccagcccggggacagcagcggcggcggggccggcggcggcctgcccagccctggagagcaggagctgagccggcggctgcagaggctgtacccagctgtgaaccagcaggagacccccctgcccaggtcctggagccccaaggacaagtacaactacatcggcctgagccagggcaacctgcgggtgcactacaagggccacggcaagaaccacaaggatgctgcctctgtgcgggccacccaccccatcccagctgcctgtggcatctactactttgaggtgaagatcgtgtccaagggcagagatggctacatgggcatcggcctgagcgcccagggcgtgaacatgaaccggctgcccggctgggacaagcacagctatggctaccatggagatgatggccacagcttctgcagcagcggcaccggccagccctacggccccaccttcaccactggagatgtgattggctgctgcgtgaacctgatcaatggcacctgcttctacaccaagaatggccacagcctgggcatcgccttcacagacctgcctgccaacctgtaccccaccgtgggcctgcagaccccaggagagatcgtggatgccaactttggccagcagcccttcctgtttgatattgaggactacatgagggagtggagggccaaggtgcagggcaccgtgcactgcttccccatcagcgcccggctgggggagtggcaggccgtgctgcagaacatggtgtcctcctacctggtgcaccacggctactgtgccacagccacagcctttgccaggatgacagagacccccatccaggaggagcaggccagcatcaagaaccggcagaagatccagaagctggtgctggagggccgggtgggggaggccatcgagaccacccagcgcttctacccaggcctgctggagcacaaccccaacctgctcttcatgctgaagtgccggcagtttgtggagatggtgaatggaacagacagcgaggtgcgcagcctgagcagccgcagccccaagagccaggacagctacccaggcagccccagcctgagccccaggcatggccccagcagcagccacatgcacaacacaggagctgacagccccagctgcagcaatggagtggccagcaccaagagcaagcagaaccacagcaagtacccagcccccagcagcagcagcagcagcagcagcagcagcagcagcagcagccccagctctgtgaactacagcgagagcaacagcacagacagcaccaagagccagcaccacagcagcaccagcaaccaggagaccagtgacagcgagatggagatggaggccgagcactaccccaacggggtgctgggctccatgagcacccgcatcgtgaatggagcctacaagcatgaggacctgcagacagatgagagctccatggatgacagacacccccggcggcagctgtgtggcggcaaccaggccgccacagagcgcatcatcctgtttggccgggagctgcaggccctgtctgagcagctgggccgggagtatggcaagaacctggcccacacagagatgctgcaggatgccttcagcctgctggcctacagcgacccctggagctgccctgtgggccagcagctggaccccatccagcgggagcctgtgtgtgccgccctgaacagcgccatcctggagagccagaacctgcccaagcagccccccctgatgctggccctgggccaggcctctgaatgtctgcggctgatggcccgggccggcctgggcagctgcagctttgcccgggtggatgactacctgcactag

SEQ ID NO: 167075 - DNA, 1602 bp, synthetic construct
  misc_feature 1..1602: note = Description of Artificial Sequence: Synthetic coding sequence
  source 1..1602: mol_type = other DNA
atgggcatcggcctgagcgcccagggcgtgaacatgaaccggctgcccggctgggacaagcacagctatggctaccatggagatgatggccacagcttctgcagcagcggcaccggccagccctacggccccaccttcaccactggagatgtgattggctgctgcgtgaacctgatcaatggcacctgcttctacaccaagaatggccacagcctgggcatcgccttcacagacctgcctgccaacctgtaccccaccgtgggcctgcagaccccaggagaaattgtggatgccaactttggccagcagcccttcctgtttgatattgaggactacatgagggagtggagggccaaggtgcagggcaccgtgcactgcttccccatcagcgcccggctgggggagtggcaggccgtgctgcagaacatggtgagcagctacctggtgcaccacggctactgtgccacagccacagcctttgccaggatgacagagacccccatccaggaggagcaggccagcatcaagaaccggcagaagatccagaagctggtgctggagggccgggtgggggaggccatcgagaccacccagcgcttctacccaggcctgctggagcacaaccccaacctgctcttcatgctgaagtgccggcagtttgtggagatggtgaatggaacagattctgaggtgcgcagcctgagcagccgcagccccaagagccaggacagctacccaggcagccccagcctgagccccaggcatggccccagcagcagccacatgcacaacacaggagctgacagccccagctgcagcaatggagtggccagcaccaagagcaagcagaaccacagcaagtacccagcccccagcagcagcagcagcagcagcagcagcagcagcagcagcagccccagctctgtgaactacagcgagagcaacagcacagacagcaccaagagccagcaccacagcagcaccagcaaccaggagaccagcaacccctggctgcagctggagcggcggcccaaccaggccgcccccaccaccccacctggccccacccccaccagcaccccaccccacagcgacagcgagatggagatggaggccgagcactacccaaatggagtgctgggctccatgagcaccagaattgtgaatggagcctacaagcatgaggacctgcagacagatgagagctccatggatgacagacacccccggcggcagctgtgtggcggcaaccaggccgccacagagcgcatcatcctgtttggccgggagctgcaggccctgtctgagcagctgggccgggagtatggcaagaacctggcccacacagagatgctgcaggatgccttcagcctgctggcctacagcgacccctggagctgccctgtgggccagcagctggaccccatccagcgggagcctgtgtgtgccgccctgaacagcgccatcctggagagccagaacctgcccaagcagccccccctgatgctggccctgggccaggccagcgagtgcctgcggctgatggcccgggccggcctgggcagctgcagctttgcccgggtggatgactacctgcactag

SEQ ID NO: 167076 - DNA, 540 bp, synthetic construct
  misc_feature 1..540: note = Description of Artificial Sequence: Synthetic coding sequence
  source 1..540: mol_type = other DNA
atgggctgggacaagcacagctatggctaccatggagatgatggccacagcttctgcagcagcggcaccggccagccctacggccccaccttcaccactggagatgtgattggctgctgcgtgaacctgatcaatggcacctgcttctacaccaagaatggccacagcctgggcatcgccttcacagacctgcctgccaacctgtaccccaccgtgggcctgcagaccccaggagagatcgtggatgccaactttggccagcagcccttcctgtttgatattgaggactacatgagggagtggagggccaaggtgcagggcaccgtgcactgcttccccatcagcgcccggctgggggagtggcaggccgtgctgcagaacatggtgtcctcctacctggtgcaccacggctactgtgccacagccacagcctttgccaggatgacagagacccccatccaggaggagcaggccagcatcaagaaccggcagagcaaggtgtacagcaccttccccttccccttcctgacctgcccctag

SEQ ID NO: 167077 - DNA, 1785 bp, synthetic construct
  misc_feature 1..1785: note = Description of Artificial Sequence: Synthetic coding sequence
  source 1..1785: mol_type = other DNA
atggctgctgccacagctgaccccggggccggcaacccccagcccggggacagcagcggcggcggggccggcggcggcctgcccagccctggagagcaggagctgagccggcggctgcagaggctgtacccagctgtgaaccagcaggagacccccctgcccaggtcctggagccccaaggacaagtacaactacatcggcctgagccagggcaacctgcgggtgcactacaagggccacggcaagaaccacaaggatgctgcctctgtgcgggccacccaccccatcccagctgcctgtggcatctactactttgaggtgaagatcgtgtccaagggcagagatggctacatgggcatcggcctgagcgcccagggcgtgaacatgaaccggctgcccggcatcgccttcacagacctgcctgccaacctgtaccccaccgtgggcctgcagaccccaggagagatcgtggatgccaactttggccagcagcccttcctgtttgatattgaggactacatgagggagtggagggccaaggtgcagggcaccgtgcactgcttccccatcagcgcccggctgggggagtggcaggccgtgctgcagaacatggtgtcctcctacctggtgcaccacggctactgtgccacagccacagcctttgccaggatgacagagacccccatccaggaggagcaggccagcatcaagaaccggcagaagatccagaagctggtgctggagggccgggtgggggaggccatcgagaccacccagcgcttctacccaggcctgctggagcacaaccccaacctgctcttcatgctgaagtgccggcagtttgtggagatggtgaatggaacagacagcgaggtgcgcagcctgagcagccgcagccccaagagccaggacagctacccaggcagccccagcctgagccccaggcatggccccagcagcagccacatgcacaacacaggagctgacagccccagctgcagcaatggagtggccagcaccaagagcaagcagaaccacagcaagtacccagcccccagcagcagcagcagcagcagcagcagcagcagcagcagcagccccagctctgtgaactacagcgagagcaacagcacagacagcaccaagagccagcaccacagcagcaccagcaaccaggagaccagcaacccctggctgcagctggagcggcggcccaaccaggccgcccccaccaccccacctggccccacccccaccagcaccccaccccacagcgacagcgagatggagatggaggccgagcactaccccaacggggtgctgggctccatgagcacccgcatcgtgaatggagcctacaagcatgaggacctgcagacagatgagagctccatggatgacagacacccccggcggcagctgtgtggcggcaaccaggccgccacagagcgcatcatcctgtttggccgggagctgcaggccctgtctgagcagctgggccgggagtatggcaagaacctggcccacacagagatgctgcaggatgccttcagcctgctggcctacagcgacccctggagctgccctgtgggccagcagctggaccccatccagcgggagcctgtgtgtgccgccctgaacagcgccatcctggagagccagaacctgcccaagcagccccccctgatgctggccctgggccaggcctctgaatgtctgcggctgatggcccgggccggcctgggcagctgcagctttgcccgggtggatgactacctgcactag

SEQ ID NO: 167078 - DNA, 1176 bp, synthetic construct
  misc_feature 1..1176: note = Description of Artificial Sequence: Synthetic coding sequence
  source 1..1176: mol_type = other DNA
atgagggagtggagggccaaggtgcagggcaccgtgcactgcttccccatcagcgcccggctgggggagtggcaggccgtgctgcagaacatggtgagcagctacctggtgcaccacggctactgtgccacagccacagcctttgccaggatgacagagacccccatccaggaggagcaggccagcatcaagaaccggcagaagatccagaagctggtgctggagggccgggtgggggaggccatcgagaccacccagcgcttctacccaggcctgctggagcacaaccccaacctgctcttcatgctgaagtgccggcagtttgtggagatggtgaatggaacagattctgaggtgcgcagcctgagcagccgcagccccaagagccaggacagctacccaggcagccccagcctgagccccaggcatggccccagcagcagccacatgcacaacacaggagctgacagccccagctgcagcaatggagtggccagcaccaagagcaagcagaaccacagcaagtacccagcccccagcagcagcagcagcagcagcagcagcagcagcagcagcagccccagctctgtgaactacagcgagagcaacagcacagacagcaccaagagccagcaccacagcagcaccagcaaccaggagaccagtgacagcgagatggagatggaggccgagcactacccaaatggagtgctgggctccatgagcaccagaattgtgaatggagcctacaagcatgaggacctgcagacagatgagagctccatggatgacagacacccccggcggcagctgtgtggcggcaaccaggccgccacagagcgcatcatcctgtttggccgggagctgcaggccctgtctgagcagctgggccgggagtatggcaagaacctggcccacacagagatgctgcaggatgccttcagcctgctggcctacagcgacccctggagctgccctgtgggccagcagctggaccccatccagcgggagcctgtgtgtgccgccctgaacagcgccatcctggagagccagaacctgcccaagcagccccccctgatgctggccctgggccaggccagcgagtgcctgcggctgatggcccgggccggcctgggcagctgcagctttgcccgggtggatgactacctgcactag

SEQ ID NO: 167079 - DNA, 3267 bp, synthetic construct
  misc_feature 1..3267: note = Description of Artificial Sequence: Synthetic coding sequence
  source 1..3267: mol_type = other DNA
atggccctgcacttccagagcctggccgagctggaggtgctgtgcacccacctgtacatcggcacagacctgacccagagaattgaggccgagaaggccctgctggagctgattgacagccctgagtgcctgagcaagtgccagctgctgctggagcagggcaccaccagctatgcccagctgctggccgccacctgcctgagcaagctggtgtcccgggtgagccccctgcctgtggagcagaggatggacatccggaactacatcctgaactacgtggccagccagcccaagctggcccccttcgtcatccaggccctgatccaggtgattgccaagatcaccaagctgggctggtttgaggtgcagaaggaccagtttgtgttccgggagatcatcgcagatgtgaagaagttcctgcagggcaccgtggagcactgcatcattggagtcatcatcctgtctgagctgacccaggagatgaacctggtggactacagccggcccagcgccaagcacaggaagatcgccaccagcttccgggacaccagcctgaaggatgtgctggtgctggcctgcagcctgctgaaggaggtgtttgccaagcccctgaacctgcaggaccagtgccagcagaacctggtgatgcaggtgctgaagctggtgctgaactgcctgaactttgacttcatcggcagcagcgcagatgagagcgcagatgacctgtgcaccgtgcagatccccaccacctggaggaccatcttcctggagcctgagaccctggacctcttcttcaacctgtaccacagcctgccccccctgctgagccagctggccctgagctgcctggtgcagtttgccagcacccggcgcagcctcttcaacagccctgagcgggccaagtacctgggcaacctgatcaagggcgtgaagaggatcctggagaacccccagggcctgagtgaccccggcaactaccacgagttctgccgcttcctggcccggctgaagaccaactaccagctgggggagctggtgatggtgaaggagtacccagaggtgatccgcctcatcgccaacttcaccatcaccagcctgcagcactgggagtttgcccccaacagcgtgcactacctgctgaccctgtggcagaggatggtggcctctgtgccctttgtgaagagcacagagccccacctgctggacacctacgcccctgagatcaccaaggccttcatcaccagccggctggacagcgtggccatcgtggtgcgggaccacctggatgaccccctggatgacacagccaccgtcttccagcagctggagcagctgtgcaccgtgagccgctgtgaatatgagaagacctgtgccctgctggtgcagctgtttgaccagaatgcccagaactaccagaagctgctgcacccctacagcggcgtgacagtggacatcaccatccaggagggccgcctggcctggctggtgtacctggtgggcaccgtggtgggcggccgcctgacctacaccagcacagatgaacatgatgccatggatggagagctgagctgcagggtcttccagctgatcagcctgatggacaccggcctgccccgctgctgcaatgagaagattgagctggccatcctgtggttcctggaccagttcaggaagacctacgtgggggaccagctgcagaggaccagcaaggtgtatgccaggatgtctgaggtgctgggcatcacagatgacaaccacgtgctggagaccttcatgaccaagatcgtgaccaacctgaagtactggggccgctatgagcctgtgatcagcaggaccctgcagttcctgaatgacctgtctgtgggctacatcctgctgaagaagctggtgaagattgatgctgtgaagttcatgctgaagaaccacaccagcgagcacttccccttcctgggcatcagtgacaaccacagcctgagtgacttccgctgcaggaccaccttctacacagccctgacccggctgctgatggtggacctgggagaagatgaagatgaatttgagaacttcatgctgcccctgactgtggcctttgaaacagtgctgcagatcttcaacaacaacttcaagcaggaggatgtgaagaggatgctgattggcctggcccgggacctgcggggcatcgcctttgccctgaacaccaagaccagctacaccatgctgtttgactggatgtaccccacctacctgcccctgctgcagaatgctgtggagcgctggtacggggagcccacctgcaccacccccatcctgaagctgatggccgagctgatgcagaacagaagccagaggctgaactttgatgtgagcagccccaacggcatcctgctcttccgggaggccagcaagatggtgtgcacctacggcaaccagatcctgagcctgggcagcctgagcaaggaccagatctaccccatgaagctgaagggcatcagcatctgctacagcgccctgaagagcgccctgtgtggcaactacgtgtcctttggagtcttcaagctgtatggagacaaccactttgacaacgtgctgcaggcctttgtgaagatgctgctgtctgtgagccacagcgacctgctgcagtacaggaagctgagccagagctactaccccctgctggagtgcctgacccaggaccacatgtccttcatcatcaacctggagccccctgtgctgatgtatgtgctgaccagcatcagcgagggcctgaccaccctggacacagtggtgagcagcagctgctgcaccagcctggactacatcgtgacctacctgttcaagcacatcgccaaggagggcaagaagcccctgcgctgccgggaggccacccaggccggccagaggctgctgcacttcatgcagcagaacccagatgtgctgcagcagatgatgtctgtgctgatgaacaccatcgtgtttgaggactgcaggaaccagtggagcgtgtcccggcccctgctgggcctcatcctgctgaatgagaagtacttcagcgagctgcgggccagcctcatcaacagccagcccctgcccaagcaggaggtgctggcccagtgcttcaggaacctgatggagggcgtggagcagaacctgtctgtgaagaacagagaccgcttcacccagaacctgtctgtgttcagaagagatgtggccgaggccctgcggagtgatggcaacacagagccctgcagcctggacatgatgtcctag

SEQ ID NO: 167080 - DNA, 1557 bp, synthetic construct
  misc_feature 1..1557: note = Description of Artificial Sequence: Synthetic coding sequence
  source 1..1557: mol_type = other DNA
gtgtatgccaggatgtctgaggtgctgggcatcacagatgacaaccacgtgctggagaccttcatgaccaagatcgtgaccaacctgaagtactggggccgctatgagcctgtgatcagcaggaccctgcagttcctgaatgacctgtctgtgggctacatcctgctgaagaagctggtgaagattgatgctgtgaagttcatgctgaagaaccacaccagcgagcacttccccttcctgggcatcagtgacaaccacagcctgagtgacttccgctgcaggaccaccttctacacagccctgacccggctgctgatggtggacctgggagaagatgaagatgaatttgagaacttcatgctgcccctgactgtggcctttgaaacagtgctgcagatcttcaacaacaacttcaagcaggaggatgtgaagaggatgctgattggcctggcccgggacctgcggggcatcgcctttgccctgaacaccaagaccagctacaccatgctgtttgactggatgtaccccacctacctgcccctgctgcagaatgctgtggagcgctggtacggggagcccacctgcaccacccccatcctgaagctgatggccgagctgatgcagaacagaagccagaggctgaactttgatgtgagcagccccaacggcatcctgctcttccgggaggccagcaagatggtgtgcacctacggcaaccagatcctgagcctgggcagcctgagcaaggaccagatctaccccatgaagctgaagggcatcagcatctgctacagcgccctgaagagcgccctgtgtggcaactacgtgtcctttggagtcttcaagctgtatggagacaaccactttgacaacgtgctgcaggcctttgtgaagatgctgctgtctgtgagccacagcgacctgctgcagtacaggaagctgagccagagctactaccccctgctggagtgcctgacccaggaccacatgtccttcatcatcaacctggagccccctgtgctgatgtatgtgctgaccagcatcagcgagggcctgaccaccctggacacagtggtgagcagcagctgctgcaccagcctggactacatcgtgacctacctgttcaagcacatcgccaaggagggcaagaagcccctgcgctgccgggaggccacccaggccggccagaggctgctgcacttcatgcagcagaacccagatgtgctgcagcagatgatgtctgtgctgatgaacaccatcgtgtttgaggactgcaggaaccagtggagcgtgtcccggcccctgctgggcctcatcctgctgaatgagaagtacttcagcgagctgcgggccagcctcatcaacagccagcccctgcccaagcaggaggtgctggcccagtgcttcaggaacctgatggagggcgtggagcagaacctgtctgtgaagaacagagaccgcttcacccagaacctgtctgtgttcagaagagatgtggccgaggccctgcggagtgatggcaacacagagccctgcagcctggacatgatgtcctag

SEQ ID NO: 167081 - DNA, 1419 bp, synthetic construct
  misc_feature 1..1419: note = Description of Artificial Sequence: Synthetic coding sequence
  source 1..1419: mol_type = other DNA
atggacatccggaactacatcctgaactacgtggccagccagcccaagctggcccccttcgtcatccaggccctgatccaggtgattgccaagatcaccaagctgggctggtttgaggtgcagaaggaccagtttgtgttccgggagatcatcgcagatgtgaagaagttcctgcaggtggactacagccggcccagcgccaagcacaggaagatcgccaccagcttccgggacaccagcctgaaggatgtgctggtgctggcctgcagcctgctgaaggaggtgtttgccaagcccctgaacctgcaggaccagtgccagcagaacctggtgatgcaggtgctgaagctggtgctgaactgcctgaactttgacttcatcggcagcagcgcagatgagagcgcagatgacctgtgcaccgtgcagatccccaccacctggaggaccatcttcctggagcctgagaccctggacctcttcttcaacctgtaccacagcctgccccccctgctgagccagctggccctgagctgcctggtgcagtttgccagcacccggcgcagcctcttcaacagccctgagcgggccaagtacctgggcaacctgatcaagggcgtgaagaggatcctggagaacccccagggcctgagtgaccccggcaactaccacgagttctgccgcttcctggcccggctgaagaccaactaccagctgggggagctggtgatggtgaaggagtacccagaggtgatccgcctcatcgccaacttcaccatcaccagcctgcagcactgggagtttgcccccaacagcgtgcactacctgctgaccctgtggcagaggatggtggcctctgtgccctttgtgaagagcacagagccccacctgctggacacctacgcccctgagatcaccaaggccttcatcaccagccggctggacagcgtggccatcgtggtgcgggaccacctggatgaccccctggatgacacagccaccgtcttccagcagctggagcagctgtgcaccgtgagccgctgtgaatatgagaagacctgtgccctgctggtgcagctgtttgaccagaatgcccagaactaccagaagctgctgcacccctacagcggcgtgacagtggacatcaccatccaggagggccgcctggcctggctggtgtacctggtgggcaccgtggtgggcggccgcctgacctacaccagcacagatgaacatgatgccatggatggagagctgagctgcagggtcttccagctgatcagcctgatggacaccggcctgccccgctgctgcaatgagaagattgagctggccatcctgtggttcctggaccagttcaggaagacctacgtgggggaccagctgcagaggaccagcaagaagaccttcatctacctgtag

SEQ ID NO: 167082 - DNA, 9675 bp, synthetic construct
  misc_feature 1..9675: note = Description of Artificial Sequence: Synthetic coding sequence
  source 1..9675: mol_type = other DNA
atgaggaggagcaaggcagatgtggagcgctacatcgcctctgtgcagggcagcacccccagcccccggcagaagtccatgaagggcttctactttgccaagctgtactatgaggccaaggagtatgacctggccaagaagtacatctgcacctacatcaacgtgcaggagcgggaccccaaggcccaccgcttcctgggcctgctgtatgagctggaggagaacacagacaaggctgtggagtgctaccgccgctctgtggagctgaaccccacccagaaggacctggtgctgaagattgctgagctgctgtgcaagaatgatgtgacagatggccgggccaagtactggctggagagagctgccaagctgtttcctggcagccctgccatctacaagctgaaggagcagctgctggactgtgagggggaggatggctggaacaagctgtttgacctgatccagagcgagctgtatgtgcggccagatgatgtgcacgtgaacatccggctggtggaggtgtaccgcagcaccaagaggctgaaggatgctgtggcccactgccatgaagctgagagaaatattgccctgcggagcagcctggagtggaacagctgtgtggtgcagaccctgaaggagtacctggagagcctgcagtgcctggagagtgacaagagtgactggagggccaccaacacagacctgctgctggcctatgccaacctgatgctgctgaccctgagcaccagagatgtgcaggagagccgggagctgctgcagagctttgacagcgccctgcagagcgtgaagagcctgggcggcaatgatgagctgagcgccaccttcctggagatgaagggccacttctacatgcatgctggcagcctgctgctgaagatgggccagcacagcagcaatgtgcagtggagggccctgtctgagctggccgccctgtgctacctgattgccttccaggtgccccggcccaagatcaagctgatcaagggggaggccggccagaacctgctggagatgatggcctgtgaccggctgagccagagcggccacatgctgctgaacctgagccggggcaagcaggacttcctgaaggagatcgtggagacctttgccaacaagagcggccagagcgccctgtatgatgccctcttcagcagccagagccccaaggacaccagcttcctgggcagtgatgacatcggcaacattgatgtgcgggagcctgagctggaggacctgaccaggtatgatgtgggcgccatccgggcccacaacggcagcctgcagcacctgacctggctgggcctgcagtggaacagcctgcctgccctgcccggcatcaggaagtggctgaagcagctgttccaccacctgccccatgagaccagccggctggagaccaatgcccctgagagcatctgcatcctggacctggaggtgttcctgctgggcgtggtgtacaccagccacctgcagctgaaggagaagtgcaacagccaccacagcagctaccagcccctgtgcctgcccctgcctgtgtgcaagcagctgtgcacagagcggcagaagtcctggtgggatgctgtgtgcaccctcatccacaggaaggctgtgcctggaaatgtggccaagctgcggctgctggtgcagcacgagatcaacaccctgcgggcccaggagaagcacggcctgcagcctgccctgctggtgcactgggccgagtgcctgcagaagacaggcagcggcctgaacagcttctatgaccagcgggagtacatcggccgctctgtgcactactggaagaaggtgctgcccctgctgaagatcatcaagaagaagaacagcatccctgagcccatcgaccccctcttcaagcacttccacagcgtggacatccaggccagcgagatcgtggagtatgaggaggatgcccacatcacctttgccatcctggatgctgtgaatggaaatattgaagatgctgtgacagcctttgagagcatcaagtctgtggtgtcctactggaacctggccctgatcttccacaggaaggccgaggacattgaaaatgatgccctgagccctgaggagcaggaggagtgcaagaactacctgaggaagacccgggactacctgatcaagatcattgatgacagcgacagcaacctgtctgtggtgaagaagctgcctgtgcccctggagagcgtgaaggagatgctgaacagcgtgatgcaggagctggaggactacagcgagggcggccccctgtacaagaatggcagcctgagaaatgctgacagcgagatcaagcacagcacccccagccccacccgctacagcctgagccccagcaagagctacaagtacagccccaagaccccaccccgctgggccgaggaccagaacagcctgctgaagatgatctgccagcaggtggaggccatcaagaaggagatgcaggagctgaagctgaacagcagcaacagcgccagcccccaccgctggcccacagagaactacggccctgacagcgtgcctgatggctaccagggcagccagaccttccacggggcccccctgactgtggccaccaccggccccagcgtgtactacagccagagccctgcctacaacagccagtacctgctgcggcctgctgccaacgtgacccccaccaagggccctgtgtatggcatgaaccggctgcccccccagcagcacatctatgcctacccccagcagatgcacaccccacctgtgcagagcagcagcgcctgcatgttcagccaggagatgtatggccccccagccctgcgctttgagagccctgccaccggcatcctgagccccagaggagatgactacttcaactacaacgtgcagcagaccagcaccaacccccccctgcctgagcccggctacttcaccaagccacccatcgccgcccacgccagccgctctgctgagagcaagaccattgaatttgggaagaccaactttgtgcagcccatgcctggagagggcctgcggcccagcctgcccacccaggcccacaccacccagcccacccccttcaagttcaacagcaacttcaagagcaatgatggagacttcaccttcagcagcccccaggtggtgacccagcccccacctgctgcctacagcaacagcgagagcctgctgggcctgctgaccagtgacaagcccctgcagggagatggctacagcggggccaagcccatccctgggggccagaccatcggccccaggaacaccttcaactttggcagcaagaatgtgtctggcatctccttcacagagaacatgggcagcagccagcagaagaacagcggcttccgccgcagtgatgacatgttcaccttccacggccctgggaagtctgtgtttggcacccccaccctggagacagccaacaagaaccacgagacagatggcggcagcgcccatggagatgatgatgatgatggcccccactttgagcctgtggtgcccctgcctgacaagattgaggtgaagacaggagaagaagatgaggaggagttcttctgcaacagagccaagctgttccgctttgatgtggagagcaaggagtggaaggagcggggcattggaaatgtgaagatcctgcggcacaagaccagcggcaagatccggctgctgatgagaagagagcaggtgctgaagatctgtgccaaccactacatcagcccagacatgaagctgaccccaaatgccggcagtgacaggagctttgtgtggcacgccctggactatgcagatgagctgcccaagccagagcagctggccatccgcttcaagaccccagaggaggccgccctcttcaagtgcaagtttgaggaggcccagagcatcctgaaggcccctggcaccaacgtggccatggccagcaaccaggccgtgcgcatcgtgaaggagcccaccagccatgacaacaaggacatctgcaagagtgatgctggcaacctgaactttgagttccaggtggccaagaaggagggctcctggtggcactgcaacagctgcagcctgaagaatgccagcacagccaagaagtgtgtgtcctgccagaacctgaaccccagcaacaaggagctggtgggcccccccctggccgagaccgtcttcacccccaagaccagcccagaaaatgtgcaggacagatttgccctggtgacccccaagaaggagggccactgggactgcagcatctgcctggtgagaaatgagcccaccgtgagccgctgcatcgcctgccagaacaccaagagcgccaacaagagcggcagcagctttgtgcaccaggccagcttcaagtttggccagggcgacctgcccaagcccatcaacagcgacttccgcagcgtcttcagcaccaaggagggccagtgggactgcagcgcctgcctggtgcagaatgaaggcagcagcaccaagtgtgccgcctgccagaaccccaggaagcagagcctgcctgccaccagcatccccaccccagccagcttcaagtttggcaccagcgagaccagcaagaccctgaagagcggctttgaggacatgtttgccaagaaggagggccagtgggactgcagcagctgcctggtgagaaatgaggccaatgccacccgctgtgtggcctgccagaacccagacaagcccagccccagcacctctgtgcctgccccagccagcttcaagtttggcaccagcgagaccagcaaggcccccaagagcggctttgagggcatgttcaccaagaaggagggccagtgggactgcagcgtgtgcctggtgagaaatgaggccagcgccaccaagtgcatcgcctgccagaaccctgggaagcagaaccagaccaccagcgctgtgtccaccccagccagcagcgagaccagcaaggcccccaagagcggctttgagggcatgttcaccaagaaggagggccagtgggactgcagcgtgtgcctggtgagaaatgaggccagcgccaccaagtgcatcgcctgccagaaccctgggaagcagaaccagaccaccagcgctgtgtccaccccagccagcagcgagaccagcaaggcccccaagagcggctttgagggcatgttcaccaagaaggagggccagtgggactgcagcgtgtgcctggtgagaaatgaggccagcgccaccaagtgcatcgcctgccagtgccccagcaagcagaaccagaccacagccatcagcaccccagccagcagcgagatcagcaaggcccccaagagcggctttgagggcatgttcatcaggaagggccagtgggactgcagcgtgtgctgcgtgcagaatgaaagcagcagcctgaagtgtgtggcctgtgatgccagcaagcccacccacaagcccatcgccgaggcccccagcgccttcaccctgggcagcgagatgaagctgcatgacagcagcggcagccaggtgggcaccggcttcaagagcaacttcagcgagaaggccagcaagtttggaaacacagagcagggcttcaagtttggacatgtggaccaggagaacagccccagcttcatgttccagggcagcagcaacacagagttcaagagcaccaaggagggcttcagcatccctgtgtctgcagatggcttcaagtttggcatcagcgagcccggcaaccaggagaagaagtctgagaagcccctggagaatggcaccggcttccaggcccaggacatcagcggccagaagaatggccggggcgtcatcttcggccagaccagcagcaccttcacctttgctgacctggccaagagcaccagcggggagggcttccagtttgggaagaaggaccccaacttcaagggcttcagcggggccggggagaagctgttcagcagccagtatggcaagatggccaacaaggccaacaccagcggggactttgagaaggatgatgatgcctacaagacagaggacagtgatgacatccactttgagcctgtggtgcagatgcctgagaaggtggagctggtgactggagaggaggatgagaaggtgctgtacagccagagggtgaagctgttccgctttgatgctgaggtgtcccagtggaaggagcggggcctgggcaacctgaagatcctgaagaatgaggtgaatggcaagctgaggatgctgatgaggcgggagcaggtgctgaaggtgtgtgccaaccactggatcaccaccaccatgaacctgaagcccctgagcggcagtgaccgggcctggatgtggctggccagtgacttcagtgatggagatgccaagctggagcagctggccgccaagttcaagaccccagagctggccgaggagttcaagcagaagtttgaggagtgccagaggctgctgctggacatccccctgcagaccccccacaagctggtggacaccggccgggccgccaagctgatccagagagctgaggagatgaagagcggcctgaaggacttcaagaccttcctgaccaatgaccagaccaaggtgacagaggaggagaacaagggcagcggcactggagctgctggggccagtgacaccaccatcaagcccaaccctgagaacacaggccccaccctggagtgggacaactatgacctgagagaagatgccctggatgattctgtgagcagcagctctgtgcacgccagccccctggccagcagccctgtgaggaagaacctcttccgctttggagagagcaccaccggcttcaacttctccttcaagagcgccctgagccccagcaagagccctgccaagctgaaccagagcggcacctctgtgggcacagatgaggagagtgatgtgacccaggaggaggagagagatggccagtactttgagcctgtggtgcccctgcctgacctggtggaggtgagcagcggggaggagaatgagcaggtggtgttcagccaccgggccaagctgtaccgctatgacaaggatgtgggccagtggaaggagcggggcatcggggacatcaagatcctgcagaactatgacaacaagcaggtgcgcatcgtgatgagaagagaccaggtgctgaagctgtgtgccaaccaccgcatcaccccagacatgaccctgcagaacatgaagggcacagagcgggtgtggctgtggacagcctgtgactttgctgatggagagaggaaggtggagcacctggccgtgcgcttcaagctgcaggatgtggccgacagcttcaagaagatctttgatgaggccaagacagcccaggagaaggacagcctcatcaccccccacgtgagccgcagcagcaccccccgggagagcccctgtgggaagattgctgtggccgtgctggaggagaccacccgggagaggacagatgtgatccagggagatgatgtggctgatgccaccagcgaggtggaggtgagcagcaccagcgagaccacccccaaggctgtggtgtccccacccaagtttgtgtttggcagcgagagcgtgaagagcatcttcagcagcgagaagagcaagccctttgcctttggaaacagcagcgccaccggcagcctgtttggcttctccttcaatgcccccctgaagagcaacaacagcgagaccagctctgtggcccagagcggcagcgagagcaaggtggagcccaagaagtgtgagctgagcaagaacagcgacatcgagcagagcagtgacagcaaggtgaagaacctgtttgccagcttccccacagaggagagcagcatcaactacaccttcaagaccccagagaaggccaaggagaagaagaagccagaggacagccccagtgatgatgatgtgctgattgtgtatgagctgacccccacagctgagcagaaggccctggccaccaagctgaagctgccccccaccttcttctgctacaagaacagaccagactatgtgtctgaggaggaggaggatgatgaagattttgaaacagctgtgaagaagctgaatggcaagctgtacctggatggcagcgagaagtgccggcccctggaggagaacacagctgacaatgagaaggagtgcatcatcgtgtgggagaagaagcccaccgtggaggagaaggccaaggctgacaccctgaagctgccccccaccttcttctgtggggtgtgcagcgacacagatgaagataatggaaatggagaggacttccagagcgagctgcagaaggtgcaggaggcccagaagagccagacagaggagatcaccagcaccacagattctgtgtacacaggaggaacagaggtgatggtgcccagcttctgcaagtctgaggagccagacagcatcaccaagagcatcagcagccccagcgtgagcagcgagaccatggacaagcctgtggacctgagcaccaggaaggagattgacacagacagcaccagccagggcgagagcaagatcgtgtcctttggcttcggcagcagcacaggcctgagctttgctgacctggccagcagcaacagcggggactttgccttcggcagcaaggacaagaacttccagtgggccaacacaggagctgctgtgtttggcacccagagcgtgggcacccagagcgctgggaaggtgggagaagatgaagatggcagtgatgaggaggtggtgcacaatgaagacatccactttgagcccatcgtgtccctgcctgaggtggaggtgaagtctggagaggaggatgaggagatcctcttcaaggagcgggccaagctgtaccgctgggacagagatgtgtcccagtggaaggagcggggcgtgggggacatcaagatcctgtggcacaccatgaagaactactaccgcatcctgatgaggcgggaccaggtgttcaaggtgtgtgccaaccacgtgatcaccaagaccatggagctgaagcccctgaatgtgagcaacaatgccctggtgtggacagccagtgactatgcagatggagaggccaaggtggagcagctggccgtgcgcttcaagaccaaggaggtggccgactgcttcaagaagacctttgaggagtgccagcagaacctgatgaagctgcagaagggccacgtgtccctggccgctgagctgagcaaggagaccaaccctgtggtgttctttgatgtgtgtgctgatggagagcccctgggccgcatcaccatggagctgttcagcaacatcgtgcccaggacagctgagaacttccgggccctgtgcacaggagagaagggcttcggcttcaagaacagcatcttccacagggtcatcccagactttgtgtgccagggcggggacatcaccaagcatgatggcactggaggccagagcatctatggagacaagtttgaagatgagaactttgatgtgaagcacactggacctggcctgctgtccatggccaaccagggccagaacaccaacaacagccagtttgtgatcaccctgaagaaggccgagcacctggacttcaagcacgtggtgtttggatttgtgaaggatggcatggacacagtgaagaagattgagagctttggcagccccaagggctctgtgtgccgccgcatcaccatcacagaatgtggccagatctag

SEQ ID NO: 167083 - DNA, 1500 bp, synthetic construct
  misc_feature 1..1500: note = Description of Artificial Sequence: Synthetic coding sequence
  source 1..1500: mol_type = other DNA
atggctgacctggccaatgaggagaagccagccatcgcccctcctgtgtttgtgttccagaaggacaagggccagaagaggtctgctgggggcagcagccctgagggcggggaggacagcgacagagaagatggcaactactgcccccctgtgaagcgggagaggaccagcagcctgacccagtttcctcccagccagagcgaggagaggagcagcggcttccggctgaagccacccaccctcatccacggccaggcccccagcgctggcctgcccagccagaagcccaaggagcagcagaggtctgtgctgcggcctgctgtgctgcaggccccccagcccaaggccctgagccagacagtgcccagcagcggcaccaatggagtgtccctgcctgctgactgcaccggggctgtgcctgctgccagcccagacacagctgcctggaggagccccagcgaggccgcagatgaggtgtgtgccctggaggagaaggagccccagaagaatgaaagcagcaatgccagcgaggaggaggcctgtgagaagaaggaccctgccacccagcaggcctttgtgtttggccagaacctgcgggacagagtgaagctgatcaatgaatctgtggatgaggccgacatggagaatgccggccaccccagcgctgacacccccacagccaccaactacttcctgcagtacatcagcagcagcctggagaacagcaccaacagcgcagatgccagcagcaacaagtttgtgtttggccagaacatgtctgagcgggtgctgagcccccccaagctgaatgaggtgtccagtgatgccaacagagaaaatgctgctgctgagagcggcagcgagagcagcagccaggaggccaccccagagaaggagagcctggccgagagcgctgctgcctacaccaaggccacagccaggaagtgcctgctggagaaggtggaggtgatcactggagaggaggccgagagcaatgtgctgcagatgcagtgcaagctgtttgtgtttgacaagaccagccagagctgggtggagcggggccggggcctgctgcggctgaatgacatggccagcacagatgatggcaccctgcagagccggctggtgatgaggacccagggcagcctgcggctcatcctgaacaccaagctgtgggcccagatgcagattgacaaggccagcgagaagagcatccgcatcacagccatggacacagaggaccagggcgtgaaggtgttcctgatcagcgccagcagcaaggacaccggccagctgtatgctgccctgcaccaccgcatcctggccctgcggagccgggtggagcaggagcaggaggccaagatgcctgcccctgagcccggggccgcccccagcaatgaggaggatgacagtgatgatgatgatgtgctggcccccagcggggccacagctgctggagctggagatgaaggagatggccagaccaccggcagcacctag

SEQ ID NO: 167084 - DNA, 1194 bp, synthetic construct
  misc_feature 1..1194: note = Description of Artificial Sequence: Synthetic coding sequence
  source 1..1194: mol_type = other DNA
gctgatgtgaccaaggccgagaagccagccatcgcccctcctgtgtttgtgttccagaaggacaagggccagaagaggtctgctgggggcagcagccctgagggcggagaagattctgaccgggaggatggcaactactgcccccctgtgaagcgggagaggaccagcagcctgacccagttcccccccagccagagcgaggagaggagcagcggcttccggctgaagccacccaccctcatccacggccaggcccccagcgctggcctgcccagccagaagcccaaggagcagcagaggtctgtgctgcggcctgctgtgctgcaggccccccagcccaaggccctgagccagacagtgcccagcagcggcaccaacggggtgtccctgcctgctgactgcacaggagctgtgcctgctgccagcccagacacagctgcctggaggagccccagcgaggccgcagatgaggtgtgtgccctggaggagaaggagccccagaagaatgaaagcagcaatgccagcgaggaggaggcctgtgagaagaaggaccctgccacccagcaggcctttgtgtttggccagaacctgcgggacagagtgaagctgatcaatgaatctgtggatgaagctgacatggagaatgccggccaccccagcgctgacacccccacagccaccaactacttcctgcagtacatcagcagcagcctggagaacagcaccaacagcgcagatgccagcagcaacaagtttgtgtttggccagaacatgtctgagcgggtgctgagcccccccaagctgaatgaggtgtccagtgatgccaaccgggagaatgctgctgctgagagcggcagcgagagcagcagccaggaggccaccccagagaaggagagcctggccgagagcgctgctgcctacaccaaggccacagccaggaagtgcctgctggagaaggtggaggtgatcaccggggaggaggccgagagcaatgtgctgcagatgcagtgcaagctgtttgtgtttgacaagaccagccagagctggtggctgctgcggcacccccaccccagccaccctgctgtgggcccctgcctgtgtggggagcagcctgccctgtgcccctgccccggcctgcccaactaccggcccggcaccccagcccagctgggcggcctgctggtgcgggtgtag

SEQ ID NO: 167085 - DNA, 1704 bp, synthetic construct
  misc_feature 1..1704: note = Description of Artificial Sequence: Synthetic coding sequence
  source 1..1704: mol_type = other DNA
atggctgacctggccaatgaggagaagccagccatcgcccctcctgtgtttgtgttccagaaggacaagggccagaagagccctgctgagcagaagaacctgagtgacagcggggaggagcccagaggagaggccgaggccccccaccacggcaccggccaccctgagagcgctggggagcacgccctggagcccccagccccagctggggccagcgccagcaccccacctcctccagcccctgaggcccagctgccccccttcccccgggagctggccggccgctctgctgggggcagcagccctgagggcggggaggacagcgacagagaagatggcaactactgcccccctgtgaagcgggagaggaccagcagcctgacccagtttcctcccagccagagcgaggagaggagcagcggcttccggctgaagccacccaccctcatccacggccaggcccccagcgctggcctgcccagccagaagcccaaggagcagcagaggtctgtgctgcggcctgctgtgctgcaggccccccagcccaaggccctgagccagacagtgcccagcagcggcaccaatggagtgtccctgcctgctgactgcaccggggctgtgcctgctgccagcccagacacagctgcctggaggagccccagcgaggccgcagatgaggtgtgtgccctggaggagaaggagccccagaagaatgaaagcagcaatgccagcgaggaggaggcctgtgagaagaaggaccctgccacccagcaggcctttgtgtttggccagaacctgcgggacagagtgaagctgatcaatgaatctgtggatgaggccgacatggagaatgccggccaccccagcgctgacacccccacagccaccaactacttcctgcagtacatcagcagcagcctggagaacagcaccaacagcgcagatgccagcagcaacaagtttgtgtttggccagaacatgtctgagcgggtgctgagcccccccaagctgaatgaggtgtccagtgatgccaacagagaaaatgctgctgctgagagcggcagcgagagcagcagccaggaggccaccccagagaaggagagcctggccgagagcgctgctgcctacaccaaggccacagccaggaagtgcctgctggagaaggtggaggtgatcactggagaggaggccgagagcaatgtgctgcagatgcagtgcaagctgtttgtgtttgacaagaccagccagagctgggtggagcggggccggggcctgctgcggctgaatgacatggccagcacagatgatggcaccctgcagagccggctggtgatgaggacccagggcagcctgcggctcatcctgaacaccaagctgtgggcccagatgcagattgacaaggccagcgagaagagcatccgcatcacagccatggacacagaggaccagggcgtgaaggtgttcctgatcagcgccagcagcaaggacaccggccagctgtatgctgccctgcaccaccgcatcctggccctgcggagccgggtggagcaggagcaggaggccaagatgcctgcccctgagcccggggccgcccccagcaatgaggaggatgacagtgatgatgatgatgtgctggcccccagcggggccacagctgctggagctggagatgaaggagatggccagaccaccggcagcacctag

SEQ ID NO: 167086 - DNA, 1689 bp, synthetic construct
  misc_feature 1..1689: note = Description of Artificial Sequence: Synthetic coding sequence
  source 1..1689: mol_type = other DNA
atggctgacctggccaatgaggagaagccagccatcgcccctcctgtgtttgtgttccagaaggacaagggccagaagagccctgctgagcagaagaacctgagtgacagcggggaggagcccagaggagaggccgaggccccccaccacggcaccggccaccctgagagcgctggggagcacgccctggagcccccagccccagctggggccagcgccagcaccccacctcctccagcccctgaggcccagctgccccccttcccccgggagctggccggccgctctgctgggggcagcagccctgagggcggggaggacagcgacagagaagatggcaactactgcccccctgtgaagcgggagaggaccagcagcctgacccagtttcctcccagccagagcgaggagaggagcagcggcttccggctgaagccacccaccctcatccacggccaggcccccagcgctggcctgcccagccagaagcccaaggagcagcagaggtctgtgctgcggcctgctgtgctgcaggccccccagcccaaggccctgagccagacagtgcccagcagcggcaccaatggagtgtccctgcctgctgactgcaccggggctgtgcctgctgccagcccagacacagctgcctggaggagccccagcgaggccgcagatgaggagaaggagccccagaagaatgaaagcagcaatgccagcgaggaggaggcctgtgagaagaaggaccctgccacccagcaggcctttgtgtttggccagaacctgcgggacagagtgaagctgatcaatgaatctgtggatgaagctgacatggagaatgccggccaccccagcgctgacacccccacagccaccaactacttcctgcagtacatcagcagcagcctggagaacagcaccaacagcgcagatgccagcagcaacaagtttgtgtttggccagaacatgtctgagcgggtgctgagcccccccaagctgaatgaggtgtccagtgatgccaaccgggagaatgctgctgctgagagcggcagcgagagcagcagccaggaggccaccccagagaaggagagcctggccgagagcgctgctgcctacaccaaggccacagccaggaagtgcctgctggagaaggtggaggtgatcaccggggaggaggccgagagcaatgtgctgcagatgcagtgcaagctgtttgtgtttgacaagaccagccagagctgggtggagcggggccggggcctgctgcggctgaatgacatggccagcacagatgatggcaccctgcagagccggctggtgatgaggacccagggcagcctgcggctcatcctgaacaccaagctgtgggcccagatgcagattgacaaggccagcgagaagagcatccgcatcacagccatggacacagaggaccagggcgtgaaggtgttcctgatcagcgccagcagcaaggacaccggccagctgtatgctgccctgcaccaccgcatcctggccctgcggagccgggtggagcaggagcaggaggccaagatgcctgcccctgagcctggagctgcccccagcaatgaagaagatgacagtgatgatgatgatgtgctggcccccagcggggccacagctgctggagctggagatgaaggagatggccagaccaccggcagcacctag

SEQ ID NO: 167087 - DNA, 1320 bp, synthetic construct
  misc_feature 1..1320: note = Description of Artificial Sequence: Synthetic coding sequence
  source 1..1320: mol_type = other DNA
atggctgacctggccaatgaggaggagaggagcagcggcttccggctgaagccacccaccctcatccacggccaggcccccagcgctggcctgcccagccagaagcccaaggagcagcagaggtctgtgctgcggcctgctgtgctgcaggccccccagcccaaggccctgagccagacagtgcccagcagcggcaccaatggagtgtccctgcctgctgactgcaccggggctgtgcctgctgccagcccagacacagctgcctggaggagccccagcgaggccgcagatgaggtgtgtgccctggaggagaaggagccccagaagaatgaaagcagcaatgccagcgaggaggaggcctgtgagaagaaggaccctgccacccagcaggcctttgtgtttggccagaacctgcgggacagagtgaagctgatcaatgaatctgtggatgaggccgacatggagaatgccggccaccccagcgctgacacccccacagccaccaactacttcctgcagtacatcagcagcagcctggagaacagcaccaacagcgcagatgccagcagcaacaagtttgtgtttggccagaacatgtctgagcgggtgctgagcccccccaagctgaatgaggtgtccagtgatgccaacagagaaaatgctgctgctgagagcggcagcgagagcagcagccaggaggccaccccagagaaggagagcctggccgagagcgctgctgcctacaccaaggccacagccaggaagtgcctgctggagaaggtggaggtgatcactggagaggaggccgagagcaatgtgctgcagatgcagtgcaagctgtttgtgtttgacaagaccagccagagctgggtggagcggggccggggcctgctgcggctgaatgacatggccagcacagatgatggcaccctgcagagccggctggtgatgaggacccagggcagcctgcggctcatcctgaacaccaagctgtgggcccagatgcagattgacaaggccagcgagaagagcatccgcatcacagccatggacacagaggaccagggcgtgaaggtgttcctgatcagcgccagcagcaaggacaccggccagctgtatgctgccctgcaccaccgcatcctggccctgcggagccgggtggagcaggagcaggaggccaagatgcctgcccctgagcccggggccgcccccagcaatgaggaggatgacagtgatgatgatgatgtgctggcccccagcggggccacagctgctggagctggagatgaaggagatggccagaccaccggcagcacctag

SEQ ID NO: 167088 - DNA, 2190 bp, synthetic construct
  misc_feature 1..2190: note = Description of Artificial Sequence: Synthetic coding sequence
  source 1..2190: mol_type = other DNA
atgagcggccagcccccacctcctccaccccagcagcagcagcagcagcagcagctgagccccccacctcctgctgccctggcccctgtgtctggagtggtgctgcctgcccccccagctgtgtctgctggcagcagccctgctggcagccctgggggcggggccggcggggagggcctgggcgctgctgctgctgccctgctgctgcaccccccacctcctcctcctccagccacagctgcccctcctcctcctcctcctcctcctcctcctccagccagcgctgctgccccagccagcggccccccagcccctcctggcctggccgccggccctggccctgctggaggagcccccaccccagccctggtggccggcagcagcgctgctgcccccttcccccatggagacagcgccctgaatgagcaggagaaggagctgcagaggcggctgaagaggctgtacccagctgtggatgagcaggagacccccctgcccaggtcctggagccccaaggacaagttctcctacatcggcctgagccagaacaacctgcgggtgcactacaagggccacggcaagacccccaaggatgctgcctctgtgcgggccacccaccccatcccagctgcctgtggcatctactactttgaggtgaagatcgtgtccaagggcagagatggctacatgggcatcggcctgagcgcccagggcgtgaacatgaaccggctgcccggctgggacaagcacagctatggctaccatggagatgatggccacagcttctgcagcagcggcaccggccagccctacggccccaccttcaccactggagatgtgattggctgctgcgtgaacctgatcaacaacacctgcttctacaccaagaatggccacagcctgggcatcgccttcacagacctgccccccaacctgtaccccaccgtgggcctgcagaccccaggagaggtggtggatgccaactttggccagcacccctttgtgtttgatattgaggactacatgagggagtggaggaccaagatccaggcccagattgaccgcttccccatcggggaccgggagggggagtggcagaccatgatccagaagatggtgtcctcctacctggtgcaccacggctactgtgccacagctgaggcctttgcccggagcacagaccagacagtgctggaggagctggccagcatcaagaaccggcagaggatccagaagctggtgctggccggccgcatgggagaggccatcgagaccacccagcagctgtaccccagcctgctggagaggaaccccaacctgctcttcaccctgaaggtgcggcagttcatcgagatggtgaatggaacagacagcgaggtgcgctgcctgggcggccgcagccccaagagccaggacagctaccctgtgagcccccggcccttcagcagccccagcatgagccccagccacggcatgaacatccacaacctggccagcggcaagggcagcacagcccacttcagcggctttgagagctgcagcaatggagtcatcagcaacaaggcccaccagagctactgccacagcaacaagcaccagagcagcaacctgaatgtgcctgagctgaacagcatcaacatgagccgcagccagcaggtgaacaacttcaccagcaatgatgtggacatggagacagaccactacagcaatggagtgggggagaccagcagcaatggcttcctgaatggcagcagcaagcatgaccacgagatggaggactgtgacacagagatggaggtggacagcagccagctgcggcggcagctgtgtggcggcagccaggccgccattgaaagaatgatccacttcggccgggagctgcaggccatgtctgagcagctgcggcgggactgtgggaagaacacagccaacaagaagatgctgaaggatgccttcagcctgctggcctacagcgacccctggaacagccctgtgggcaaccagctggaccccatccagcgggagcctgtgtgcagcgccctgaacagcgccatcctggagacccacaacctgcccaagcagccccccctggccctggccatgggccaggccacccagtgcctgggcctgatggcccggagcggcatcggcagctgtgcctttgccaccgtggaggactacctgcactag

SEQ ID NO: 167089 - DNA, 1176 bp, synthetic construct
  misc_feature 1..1176: note = Description of Artificial Sequence: Synthetic coding sequence
  source 1..1176: mol_type = other DNA
atgagcggccagcccccacctcctccaccccagcagcagcagcagcagcagcagctgagccccccacctcctgctgccctggcccctgtgtctggagtggtgctgcctgcccccccagctgtgtctgctggcagcagccctgctggcagccctgggggcggggccggcggggagggcctgggcgctgctgctgctgccctgctgctgcaccccccacctcctcctcctccagccacagctgcccctcctcctcctcctcctcctcctcctcctccagccagcgctgctgccccagccagcggccccccagcccctcctggcctggccgccggccctggccctgctggaggagcccccaccccagccctggtggccggcagcagcgctgctgcccccttcccccatggagacagcgccctgaatgagcaggagaaggagctgcagaggcggctgaagaggctgtacccagctgtggatgagcaggagacccccctgcccaggtcctggagccccaaggacaagttctcctacatcggcctgagccagaacaacctgcgggtgcactacaagggccacggcaagacccccaaggatgctgcctctgtgcgggccacccaccccatcccagctgcctgtggcatctactactttgaggtgaagatcgtgtccaagggcagagatggctacatgggcatcggcctgagcgcccagggcgtgaacatgaaccggctgcccggctgggacaagcacagctatggctaccatggagatgatggccacagcttctgcagcagcggcaccggccagccctacggccccaccttcaccactggagatgtgattggctgctgcgtgaacctgatcaacaacacctgcttctacaccaagaatggccacagcctgggcatcgccttcacagacctgccccccctggactaccctgtgagcccccggcccttcagcagccccagcatgagccccagccacggcatgaacatccacaacctggccagcggcaagggcagcacagcccacttcagcggctttgagagctgcagcaatggagtcatcagcaacaaggcccaccagagctactgccacagcaacaagcaccagagcagcaatgaatgtaccaggaccaagcagtacaagtatgtgaagatcacagccagctag

SEQ ID NO: 167090 - DNA, 1503 bp, synthetic construct
  misc_feature 1..1503: note = Description of Artificial Sequence: Synthetic coding sequence
  source 1..1503: mol_type = other DNA
atgggcatcggcctgagcgcccagggcgtgaacatgaaccggctgcccggctgggacaagcacagctatggctaccatggagatgatggccacagcttctgcagcagcggcaccggccagccctacggccccaccttcaccactggagatgtgattggctgctgcgtgaacctgatcaacaacacctgcttctacaccaagaatggccacagcctgggcatcgccttcacagacctgccccccaacctgtaccccaccgtgggcctgcagaccccaggagaggtggtggatgccaactttggccagcacccctttgtgtttgatattgaggactacatgagggagtggaggaccaagatccaggcccagattgaccgcttccccatcggggaccgggagggggagtggcagaccatgatccagaagatggtgagcagctacctggtgcaccacggctactgtgccacagctgaggcctttgcccggagcacagaccagacagtgctggaggagctggccagcatcaagaaccggcagaggatccagaagctggtgctggccggccgcatgggagaggccatcgagaccacccagcagctgtaccccagcctgctggagaggaaccccaacctgctcttcaccctgaaggtgcggcagttcatcgagatggtgaatggaacagattctgaggtgcgctgcctgggcggccgcagccccaagagccaggacagctaccctgtgagcccccggcccttcagcagccccagcatgagccccagccacggcatgaacatccacaacctggccagcggcaagggcagcacagcccacttcagcggctttgagagctgcagcaatggagtcatcagcaacaaggcccaccagagctactgccacagcaacaagcaccagagcagcaacctgaatgtgcctgagctgaacagcatcaacatgagccgcagccagcaggtgaacaacttcaccagcaatgatgtggacatggagacagaccactacagcaatggagtgggggagaccagcagcaatggcttcctgaatggcagcagcaagcatgaccacgagatggaggactgtgacacagagatggaggtggacagcagccagctgcggcggcagctgtgtggcggcagccaggccgccatcgagaggatgatccacttcggccgggagctgcaggccatgtctgagcagctgcggcgggactgtgggaagaacacagccaacaagaagatgctgaaggatgccttcagcctgctggcctacagcgacccctggaacagccctgtgggcaaccagctggaccccatccagcgggagcctgtgtgcagcgccctgaacagcgccatcctggagacccacaacctgcccaagcagccccccctggccctggccatgggccaggccacccagtgcctgggcctgatggcccggtctggaattggcagctgtgcctttgccaccgtggaggactacctgcactag

SEQ ID NO: 167091 - DNA, 387 bp, synthetic construct
  misc_feature 1..387: note = Description of Artificial Sequence: Synthetic coding sequence
  source 1..387: mol_type = other DNA
atgtttgatgtgaccagccgggtgacctacaagaatgtgcccaactggcaccgggacctggtgcgggtgtgtgagaacatccccatcgtgctgtgtggcaacaaggtggacatcaaggacaggaaggtgaaggccaagagcatcgtgttccacaggaagaagaacctgcagtactatgacatcagcgccaagagcaactacaactttgagaagcccttcctgtggctggccaggaagctgattggagaccccaacctggagtttgtggccatgcctgccctggcccctcctgaggtggtgatggaccctgccctggccgcccagtatgaacatgacctggaggtggcccagaccacagccctgcctgatgaagatgatgacctgtag

SEQ ID NO: 167092 - DNA, 702 bp, synthetic construct
  misc_feature 1..702: note = Description of Artificial Sequence: Synthetic coding sequence
  source 1..702: mol_type = other DNA
atggccgcccagggcgagccccaggtgcagttcaagctggtgctggtgggagatggcggcaccgggaagaccacctttgtgaagaggcacctgaccggggagtttgagaagaagtatgtggccaccctgggcgtggaggtgcaccccctggtgttccacaccaacagaggccccatcaagttcaacgtgtgggacacagctggccaggagaagtttggaggcctgagagatggctactacatccaggagatgggcatccaccacgtggcccacgccggcctggagctgatgagcagcgcccagtgtgccatcatcatgtttgatgtgaccagccgggtgacctacaagaatgtgcccaactggcaccgggacctggtgcgggtgtgtgagaacatccccatcgtgctgtgtggcaacaaggtggacatcaaggacaggaaggtgaaggccaagagcatcgtgttccacaggaagaagaacctgcagtactatgacatcagcgccaagagcaactacaactttgagaagcccttcctgtggctggccaggaagctgattggagaccccaacctggagtttgtggccatgcctgccctggcccctcctgaggtggtgatggaccctgccctggccgcccagtatgaacatgacctggaggtggcccagaccacagccctgcctgatgaagatgatgacctgtag

SEQ ID NO: 167093 - DNA, 651 bp, synthetic construct
  misc_feature 1..651: note = Description of Artificial Sequence: Synthetic coding sequence
  source 1..651: mol_type = other DNA
atggccgcccagggcgagccccaggtgcagttcaagctggtgctggtgggagatggcggcaccgggaagaccacctttgtgaagaggcacctgaccggggagtttgagaagaagtatgtggccaccctgggcgtggaggtgcaccccctggtgttccacaccaacagaggccccatcaagttcaacgtgtgggacacagctggccaggagaagtttggaggcctgagagatggctactacatccaggcccagtgtgccatcatcatgtttgatgtgaccagccgggtgacctacaagaatgtgcccaactggcaccgggacctggtgcgggtgtgtgagaacatccccatcgtgctgtgtggcaacaaggtggacatcaaggacaggaaggtgaaggccaagagcatcgtgttccacaggaagaagaacctgcagtactatgacatcagcgccaagagcaactacaactttgagaagcccttcctgtggctggccaggaagctgattggagaccccaacctggagtttgtggccatgcctgccctggcccctcctgaggtggtgatggaccctgccctggccgcccagtatgaacatgacctggaggtggcccagaccacagccctgcctgatgaagatgatgacctgtag

SEQ ID NO: 167094 - DNA, 705 bp, synthetic construct
  misc_feature 1..705: note = Description of Artificial Sequence: Synthetic coding sequence
  source 1..705: mol_type = other DNA
agaagaagaaggctgcggctgcggcggctgaactgtgccagcgccatcttccctgcctctgtgggccgggcccggcggcgcttctggaagctggtgctggtgggagatggcggcaccgggaagaccacctttgtgaagaggcacctgaccggggagtttgagaagaagtatgtggccaccctgggcgtggaggtgcaccccctggtgttccacaccaacagaggccccatcaagttcaacgtgtgggacacagctggccaggagaagtttggaggcctgagagatggctactacatccaggcccagtgtgccatcatcatgtttgatgtgaccagccgggtgacctacaagaatgtgcccaactggcaccgggacctggtgcgggtgtgtgagaacatccccatcgtgctgtgtggcaacaaggtggacatcaaggacaggaaggtgaaggccaagagcatcgtgttccacaggaagaagaacctgcagtactatgacatcagcgccaagagcaactacaactttgagaagcccttcctgtggctggccaggaagctgattggagaccccaacctggagtttgtggccatgcctgccctggcccctcctgaggtggtgatggaccctgccctggccgcccagtatgaacatgacctggaggtggcccagaccacagccctgcctgatgaagatgatgacctgtag

SEQ ID NO: 167095 - DNA, 387 bp, synthetic construct; identical to SEQ ID NO: 167091
  misc_feature 1..387: note = Description of Artificial Sequence: Synthetic coding sequence
  source 1..387: mol_type = other DNA

SEQ ID NO: 167096 - DNA, 651 bp, synthetic construct; identical to SEQ ID NO: 167093
  misc_feature 1..651: note = Description of Artificial Sequence: Synthetic coding sequence
  source 1..651: mol_type = other DNA

SEQ ID NO: 167097 - DNA, 5271 bp, synthetic construct
  misc_feature 1..5271: note = Description of Artificial Sequence: Synthetic coding sequence
  source 1..5271: mol_type = other DNA
atgaggaggagcaaggcctatggagagcgctacctggcctctgtgcagggcagcgcccccagccctgggaagaagctgcggggcttctactttgccaagctgtactatgaggccaaggagtatgacctggccaagaagtatgtgtgcacctacctgtctgtgcaggagcgggacccccgggcccaccgcttcctgggcctgctgtatgagctggaggagaacacagagaaggctgtggagtgctacagaagaagcctggagctgaaccccccccagaaggacctggtgctgaagattgctgagctgctgtgcaagaatgatgtgacagatggccgggccaagtactgggtggagcgggccgccaagctgtttcctggcagccctgccatctacaagctgaaggagcacctgctggactgtgaaggagaagatggctggaacaagctgtttgactggatccagagcgagctgtatgtgcggccagatgatgtgcacatgaacatccggctggtggagctgtaccgcagcaacaagaggctgaaggatgctgtggcccgctgccacgaggccgagaggaacatcgccctgcggagcagcctggagtggaacagctgtgtggtgcagaccctgaaggagtacctggagagcctgcagtgcctggagagtgacaagagtgactggagggccaccaacacagacctgctgctggcctatgccaacctgatgctgctgaccctgagcaccagagatgtgcaggagagccgggagctgctggagagctttgattctgccctgcagagcgccaagagcagcctgggcggcaatgatgagctgagcgccaccttcctggagatgaagggccacttctacatgcatgctggcagcctgctgctgaagatgggccagcacggcaacaacgtgcagtggcaggccctgtctgagctggccgccctgtgctacgtgattgccttccaggtgccccggcccaagatcaagctgatcaagggggaggccggccagaacctgctggagatgatggcctgtgaccggctgagccagagcggccacatgctgctgaacctgagccggggcaagcaggacttcctgaaggaggtggtggagacctttgccaacaagagcggccagagcgtgctgtacaatgccctcttcagcagccagagcagcaaggacaccagcttcctgggcagtgatgacatcggcaacattgatgtgcaggagcctgagctggaggacctggcccgctatgatgtgggcgccatccaggcccacaacggcagcctgcagcacctgacctggctgggcctgcagtggaacagcctgcctgccctgcccggcatcaggaagtggctgaagcagctgttccaccacctgccccaggagaccagccggctggagaccaatgcccctgagagcatctgcatcctggacctggaggtgttcctgctgggcgtggtgtacaccagccacctgcagctgaaggagaagtgcaacagccaccacagcagctaccagcccctgtgcctgcccctgcctgtgtgcaagaggctgtgcacagagcggcagaagtcctggtgggatgctgtgtgcaccctcatccacaggaaggctgtgcccggcaacagcgctgagctgcggctggtggtgcagcacgagatcaacaccctgcgggcccaggagaagcacggcctgcagcctgccctgctggtgcactgggccaagtgcctgcagaagatgggccggggcctgaacagcagctatgaccagcaggagtacatcggccgctctgtgcactactggaagaaggtgctgcccctgctgaagatcatcaagaagaacagcatccctgagcccatcgaccccctcttcaagcacttccacagcgtggacatccaggccagcgagatcgtggagtatgaagaagatgcccacatcacctttgccatcctggatgctgtgcacggcaacattgaagatgctgtgacagcctttgagagcatcaagtctgtggtgtcctactggaacctggccctgatcttccacaggaaggcagaagatattgaaaatgatgctgtgtttcctgaggagcaggaggagtgcaagaactacctgaggaagacccgggactacctgatcaagatcattgatgacagcgacagcaacctgtctgtggtgaagaagctgcctgtgcccctggagagcgtgaaggagatgctgaagtctgtgatgcaggagctggaggactacagcgagggcggccccctgtacaagaatggcagcctgagaaatgctgacagcgagatcaagcacagcacccccagccccaccaagtacagcctgagccccagcaagagctacaagtacagccccaagaccccaccccgctgggccgaggaccagaacagcctgaggaagatgatctgccaggaggtgaaggccatcaccaagctgaacagcagcaagagcgccagccgccaccgctggcccacagaaaattatggcccagattctgtgcctgatggctaccagggcagccagaccttccatggagcccccctgactgtggccaccaccggccccagcgtgtactacagccagagccctgcctacaacagccagtacctgctgcggcctgctgccaacgtgacccccaccaagggcagcagcaacacagagttcaagagcaccaaggagggcttcagcattgctgtgtctgcagatggcttcaagtttggcatcagcgagcccggcaaccaggagaagaagtctgagaagcccctggagaatgacaccggcttccaggcccaggacatcagcggccagaagaatggccggggcgtcatcttcggccagaccagcagcaccttcacctttgctgatgtggccaagagcaccagcggggagggcttccagtttgggaagaaggaccccaacttcaagggcttctctggagctggggagaagctgttcagcagccagtgtgggaagatggccaacaaggccaacaccagcggggactttgagaaggatgatgatgcctgcaagacagaagattctgatgacatccactttgagcctgtggtgcagatgcctgagaaggtggagctggtgactggagaggagggggagaaggtgctgtacagccagggcgtgaagctgttccgctttgatgctgagatcagccagtggaaggagcggggcctgggcaacctgaagatcctgaagaatgaggtgaatggcaagcccaggatgctgatgagaagagaccaggtgctgaaggtgtgtgccaaccactggatcaccaccaccatgaacctgaagcccctgagcggcagtgaccgggcctggatgtggctggccagtgacttcagtgatggagatgccaagctggagcggctggccgcccagttcaagaccccagagctggccgaggagttcaagcagaagtttgaggagtgccagaggctgctgctggacatccccctgcagaccccccacaagctggtggacaccggccgggccgccaagctgatccagagagctgaggagatgaagagcggcctgaaggacttcaagaccttcctgaccaatgaccagaccaaggtgacagaggaggagaacaagggcagcggcaccggggctgctggggccagtgacaccaccatcaagcccaacccagaaaatacaggccccaccctggagtgggacaactatgacctgcgggaggatgccctggatgacaacgtgagcagcagctctgtgcatgacagccccctggccagcagccctgtgaggaagaacatcttccgctttgatgagagcaccaccggcttcaacttctccttcaagagcgccctgagcctgagcaagagccctgccaagctgaaccagagcggcacctctgtgggcacagatgaggagagtgatgtgacccaggaggaggagagagatggccagtactttgagcctgtggtgcccctgcctgacctggtggaggtgtcctctggagaggagaatgagcaggtggtgttcagccacagagctgagctgtaccgctatgacaaggatgtgggccagtggaaggagcggggcattggagacatcaagatcctgcagaactatgacaacaagcaggtgagaattgtgatgaggcgggaccaggtgctgaagctgtgtgccaaccaccgcatcaccccagacatgagcctgcagaacatgaagggcacagagcgggtgtgggtgtggacagcctgtgactttgctgatggagagaggaaggtggagcacctggccgtgcgcttcaagctgcaggatgtggccgacagcttcaagaagatctttgatgaggccaagacagcccaggagaaggacagcctcatcacccctcatgtgagccgcagcagcaccccccgggagagcccctgtgggaagattgctgtggccgtgctggaggagaccacccgggagaggacagatgtgatccagggagatgatgtggctgatgctgccagcgaggtggaggtgagcagcaccagcgagaccaccaccaaggctgtggtgagcccccccaagtttgtgtttggaagtgaatctgtgaagaggatcttcagcagcgagaagagcaacccctttgccttcggcaacagcagcgccaccggcagcctgtttggcttctccttcaatgcccccctgaagagcaatgattctgagaccagctctgtggcccagagcggcagcgagagcaaggtggagcccaagaagtgtgagctgagcaagaacagcgacatcgagcagagcagtgacagcaaggtgaagaacctgagcgccagcttccccatggaggagagcagcatcaactacaccttcaagaccccagagaaggagccccccctgtggcacgccgagttcaccaaggaggagctggtgcagaagctgagcagcaccaccaagtctgctgaccagctgaatggcctgctgcgggagacagaggccaccagcgctgtgctgatggagcagatcaagctgctgaagtctgagatccggcggctggagaggaaccaggaggagagcgctgccaacgtggagcacctgaagaatgtgctgctgcagttcatcttcctgaagccaggcagcgagcgggagagcctgctgcccgtcatcaacaccatgctgcagctgagccctgaggagaagggcaagctggccgctgtggcccagggcctgcaggagaccagcatccccaagaagaagtag

SEQ ID NO: 167098 - DNA, 5247 bp, synthetic construct
  misc_feature 1..5247: note = Description of Artificial Sequence: Synthetic coding sequence
  source 1..5247: mol_type = other DNA
atgaatgtgatgggcttcaacacagaccggctggcctggaccaggaacaagctgcggggcttctactttgccaagctgtactatgaggccaaggagtatgacctggccaagaagtatgtgtgcacctacctgtctgtgcaggagcgggacccccgggcccaccgcttcctgggcctgctgtatgagctggaggagaacacagagaaggctgtggagtgctacagaagaagcctggagctgaaccccccccagaaggacctggtgctgaagattgctgagctgctgtgcaagaatgatgtgacagatggccgggccaagtactgggtggagcgggccgccaagctgtttcctggcagccctgccatctacaagctgaaggagcacctgctggactgtgaaggagaagatggctggaacaagctgtttgactggatccagagcgagctgtatgtgcggccagatgatgtgcacatgaacatccggctggtggagctgtaccgcagcaacaagaggctgaaggatgctgtggcccgctgccacgaggccgagaggaacatcgccctgcggagcagcctggagtggaacagctgtgtggtgcagaccctgaaggagtacctggagagcctgcagtgcctggagagtgacaagagtgactggagggccaccaacacagacctgctgctggcctatgccaacctgatgctgctgaccctgagcaccagagatgtgcaggagagccgggagctgctggagagctttgattctgccctgcagagcgccaagagcagcctgggcggcaatgatgagctgagcgccaccttcctggagatgaagggccacttctacatgcatgctggcagcctgctgctgaagatgggccagcacggcaacaacgtgcagtggcaggccctgtctgagctggccgccctgtgctacgtgattgccttccaggtgccccggcccaagatcaagctgatcaagggggaggccggccagaacctgctggagatgatggcctgtgaccggctgagccagagcggccacatgctgctgaacctgagccggggcaagcaggacttcctgaaggaggtggtggagacctttgccaacaagagcggccagagcgtgctgtacaatgccctcttcagcagccagagcagcaaggacaccagcttcctgggcagtgatgacatcggcaacattgatgtgcaggagcctgagctggaggacctggcccgctatgatgtgggcgccatccaggcccacaacggcagcctgcagcacctgacctggctgggcctgcagtggaacagcctgcctgccctgcccggcatcaggaagtggctgaagcagctgttccaccacctgccccaggagaccagccggctggagaccaatgcccctgagagcatctgcatcctggacctggaggtgttcctgctgggcgtggtgtacaccagccacctgcagctgaaggagaagtgcaacagccaccacagcagctaccagcccctgtgcctgcccctgcctgtgtgcaagaggctgtgcacagagcggcagaagtcctggtgggatgctgtgtgcaccctcatccacaggaaggctgtgcccggcaacagcgctgagctgcggctggtggtgcagcacgagatcaacaccctgcgggcccaggagaagcacggcctgcagcctgccctgctggtgcactgggccaagtgcctgcagaagatgggccggggcctgaacagcagctatgaccagcaggagtacatcggccgctctgtgcactactggaagaaggtgctgcccctgctgaagatcatcaagaagaacagcatccctgagcccatcgaccccctcttcaagcacttccacagcgtggacatccaggccagcgagatcgtggagtatgaagaagatgcccacatcacctttgccatcctggatgctgtgcacggcaacattgaagatgctgtgacagcctttgagagcatcaagtctgtggtgtcctactggaacctggccctgatcttccacaggaaggcagaagatattgaaaatgatgctgtgtttcctgaggagcaggaggagtgcaagaactacctgaggaagacccgggactacctgatcaagatcattgatgacagcgacagcaacctgtctgtggtgaagaagctgcctgtgcccctggagagcgtgaaggagatgctgaagtctgtgatgcaggagctggaggactacagcgagggcggccccctgtacaagaatggcagcctgagaaatgctgacagcgagatcaagcacagcacccccagccccaccaagtacagcctgagccccagcaagagctacaagtacagccccaagaccccaccccgctgggccgaggaccagaacagcctgaggaagatgatctgccaggaggtgaaggccatcaccaagctgaacagcagcaagagcgccagccgccaccgctggcccacagaaaattatggcccagattctgtgcctgatggctaccagggcagccagaccttccatggagcccccctgactgtggccaccaccggccccagcgtgtactacagccagagccctgcctacaacagccagtacctgctgcggcctgctgccaacgtgacccccaccaagggcagcagcaacacagagttcaagagcaccaaggagggcttcagcattgctgtgtctgcagatggcttcaagtttggcatcagcgagcccggcaaccaggagaagaagtctgagaagcccctggagaatgacaccggcttccaggcccaggacatcagcggccagaagaatggccggggcgtcatcttcggccagaccagcagcaccttcacctttgctgatgtggccaagagcaccagcggggagggcttccagtttgggaagaaggaccccaacttcaagggcttctctggagctggggagaagctgttcagcagccagtgtgggaagatggccaacaaggccaacaccagcggggactttgagaaggatgatgatgcctgcaagacagaagattctgatgacatccactttgagcctgtggtgcagatgcctgagaaggtggagctggtgactggagaggagggggagaaggtgctgtacagccagggcgtgaagctgttccgctttgatgctgagatcagccagtggaaggagcggggcctgggcaacctgaagatcctgaagaatgaggtgaatggcaagcccaggatgctgatgagaagagaccaggtgctgaaggtgtgtgccaaccactggatcaccaccaccatgaacctgaagcccctgagcggcagtgaccgggcctggatgtggctggccagtgacttcagtgatggagatgccaagctggagcggctggccgcccagttcaagaccccagagctggccgaggagttcaagcagaagtttgaggagtgccagaggctgctgctggacatccccctgcagaccccccacaagctggtggacaccggccgggccgccaagctgatccagagagctgaggagatgaagagcggcctgaaggacttcaagaccttcctgaccaatgaccagaccaaggtgacagaggaggagaacaagggcagcggcaccggggctgctggggccagtgacaccaccatcaagcccaacccagaaaatacaggccccaccctggagtgggacaactatgacctgcgggaggatgccctggatgacaacgtgagcagcagctctgtgcatgacagccccctggccagcagccctgtgaggaagaacatcttccgctttgatgagagcaccaccggcttcaacttctccttcaagagcgccctgagcctgagcaagagccctgccaagctgaaccagagcggcacctctgtgggcacagatgaggagagtgatgtgacccaggaggaggagagagatggccagtactttgagcctgtggtgcccctgcctgacctggtggaggtgtcctctggagaggagaatgagcaggtggtgttcagccacagagctgagctgtaccgctatgacaaggatgtgggccagtggaaggagcggggcattggagacatcaagatcctgcagaactatgacaacaagcaggtgagaattgtgatgaggcgggaccaggtgctgaagctgtgtgccaaccaccgcatcaccccagacatgagcctgcagaacatgaagggcacagagcgggtgtgggtgtggacagcctgtgactttgctgatggagagaggaaggtggagcacctggccgtgcgcttcaagctgcaggatgtggccgacagcttcaagaagatctttgatgaggccaagacagcccaggagaaggacagcctcatcacccctcatgtgagccgcagcagcaccccccgggagagcccctgtgggaagattgctgtggccgtgctggaggagaccacccgggagaggacagatgtgatccagggagatgatgtggctgatgctgccagcgaggtggaggtgagcagcaccagcgagaccaccaccaaggctgtggtgagcccccccaagtttgtgtttggaagtgaatctgtgaagaggatcttcagcagcgagaagagcaacccctttgccttcggcaacagcagcgccaccggcagcctgtttggcttctccttcaatgcccccctgaagagcaatgattctgagaccagctctgtggcccagagcggcagcgagagcaaggtggagcccaagaagtgtgagctgagcaagaacagcgacatcgagcagagcagtgacagcaaggtgaagaacctgagcgccagcttccccatggaggagagcagcatcaactacaccttcaagaccccagagaaggagccccccctgtggcacgccgagttcaccaaggaggagctggtgcagaagctgagcagcaccaccaagtctgctgaccagctgaatggcctgctgcgggagacagaggccaccagcgctgtgctgatggagcagatcaagctgctgaagtctgagatccggcggctggagaggaaccaggaggagagcgctgccaacgtggagcacctgaagaatgtgctgctgcagttcatcttcctgaagccaggcagcgagcgggagagcctgctgcccgtcatcaacaccatgctgcagctgagccctgaggagaagggcaagctggccgctgtggcccagggcctgcaggagaccagcatccccaagaagaagtag

SEQ ID NO: 167099 - DNA, 1935 bp, synthetic construct
  misc_feature 1..1935: note = Description of Artificial Sequence: Synthetic coding sequence
  source 1..1935: mol_type = other DNA
atgctgatgaggcgggaccaggtgctgaaggtgtgtgccaaccactggatcaccaccaccatgaacctgaagcccctgagcggcagtgaccgggcctggatgtggctggccagtgacttcagtgatggagatgccaagctggagcggctggccgcccagttcaagaccccagagctggccgaggagttcaagcagaagtttgaggagtgccagaggctgctgctggacatccccctgcagaccccccacaagctggtggacaccggccgggccgccaagctgatccagagagctgaggagatgaagagcggcctgaaggacttcaagaccttcctgaccaatgaccagaccaaggtgacagaggaggagaacaagggcagcggcactggagctgctggggccagtgacaccaccatcaagcccaaccctgagaacacaggccccaccctggagtgggacaactatgacctgagagaagatgccctggatgacaacgtgagcagcagctctgtgcatgacagccccctggccagcagccctgtgaggaagaacatcttccgctttgatgagagcaccaccggcttcaacttctccttcaagagcgccctgagcctgagcaagagccctgccaagctgaaccagagcggcacctctgtgggcacagatgaggagagtgatgtgacccaggaggaggagagagatggccagtactttgagcctgtggtgcccctgcctgacctggtggaggtgagcagcggggaggagaatgagcaggtggtgttcagccacagagctgagctgtaccgctatgacaaggatgtgggccagtggaaggagcggggcatcggggacatcaagatcctgcagaactatgacaacaagcaggtgcgcatcgtgatgagaagagaccaggtgctgaagctgtgtgccaaccaccgcatcaccccagacatgagcctgcagaacatgaagggcacagagcgggtgtgggtgtggacagcctgtgactttgctgatggagagaggaaggtggagcacctggccgtgcgcttcaagctgcaggatgtggccgacagcttcaagaagatctttgatgaggccaagacagcccaggagaaggacagcctcatcaccccccacgtgagccgcagcagcaccccccgggagagcccctgtgggaagattgctgtggccgtgctggaggagaccacccgggagaggacagatgtgatccagggagatgatgtggctgatgctgccagcgaggtggaggtgagcagcaccagcgagaccaccaccaaggctgtggtgtccccacccaagtttgtgtttggcagcgagagcgtgaagaggatcttcagcagcgagaagagcaacccctttgcctttggaaacagcagcgccaccggcagcctgtttggcttctccttcaatgcccccctgaagagcaatgacagcgagaccagctctgtggcccagagcggcagcgagagcaaggtggagcccaagaagtgtgagctgagcaagaacagcgacatcgagcagagcagtgacagcaaggtgaagaacctgagcgccagcttccccatggaggagagcagcatcaactacaccttcaagaccccagagaaggagccccccctgtggcatgctgagttcaccaaggaggagctggtgcagaagctgagcagcaccaccaagtctgctgaccagctgaatggcctgctgcgggagacagaggccaccagcgctgtgctgatggagcagatcaagctgctgaagtctgagatccggcggctggagaggaaccaggaggagagcgctgccaacgtggagcacctgaagaatgtgctgctgcagttcatcttcctgaagccaggcagcgagcgggagcccagcagctgctacaagtatgatgtggccgcccagccctag

SEQ ID NO: 167100 - DNA, 5247 bp, synthetic construct; identical to SEQ ID NO: 167098
  misc_feature 1..5247: note = Description of Artificial Sequence: Synthetic coding sequence
  source 1..5247: mol_type = other DNA

SEQ ID NO: 167101 - DNA, 3042 bp, synthetic construct
  misc_feature 1..3042: note = Description of Artificial Sequence: Synthetic coding sequence
  source 1..3042: mol_type = other DNA
atgctgaagtctgtgatgcaggagctggaggactacagcgagggcggccccctgtacaagaatggcagcctgagaaatgctgacagcgagatcaagcacagcacccccagccccaccaagtacagcctgagccccagcaagagctacaagtacagccccaagaccccaccccgctgggccgaggaccagaacagcctgaggaagatgatctgccaggaggtgaaggccatcaccaagctgaacagcagcaagagcgccagccgccaccgctggcccacagagaactacggccctgacagcgtgcctgatggctaccagggcagccagaccttccacggggcccccctgactgtggccaccaccggccccagcgtgtactacagccagagccctgcctacaacagccagtacctgctgcggcctgctgccaacgtgacccccaccaagggcagcagcaacacagagttcaagagcaccaaggagggcttcagcattgctgtgtctgcagatggcttcaagtttggcatcagcgagcccggcaaccaggagaagaagtctgagaagcccctggagaatgacaccggcttccaggcccaggacatcagcggccagaagaatggccggggcgtcatcttcggccagaccagcagcaccttcacctttgctgatgtggccaagagcaccagcggggagggcttccagtttgggaagaaggaccccaacttcaagggcttcagcggggccggggagaagctgttcagcagccagtgtgggaagatggccaacaaggccaacaccagcggggactttgagaaggatgatgatgcctgcaagacagaggacagtgatgacatccactttgagcctgtggtgcagatgcctgagaaggtggagctggtgactggagaggagggggagaaggtgctgtacagccagggcgtgaagctgttccgctttgatgctgagatcagccagtggaaggagcggggcctgggcaacctgaagatcctgaagaatgaggtgaatggcaagcccaggatgctgatgaggcgggaccaggtgctgaaggtgtgtgccaaccactggatcaccaccaccatgaacctgaagcccctgagcggcagtgaccgggcctggatgtggctggccagtgacttcagtgatggagatgccaagctggagcggctggccgcccagttcaagaccccagagctggccgaggagttcaagcagaagtttgaggagtgccagaggctgctgctggacatccccctgcagaccccccacaagctggtggacaccggccgggccgccaagctgatccagagagctgaggagatgaagagcggcctgaaggacttcaagaccttcctgaccaatgaccagaccaaggtgacagaggaggagaacaagggcagcggcactggagctgctggggccagtgacaccaccatcaagcccaaccctgagaacacaggccccaccctggagtgggacaactatgacctgagagaagatgccctggatgacaacgtgagcagcagctctgtgcatgacagccccctggccagcagccctgtgaggaagaacatcttccgctttgatgagagcaccaccggcttcaacttctccttcaagagcgccctgagcctgagcaagagccctgccaagctgaaccagagcggcacctctgtgggcacagatgaggagagtgatgtgacccaggaggaggagagagatggccagtactttgagcctgtggtgcccctgcctgacctggtggaggtgagcagcggggaggagaatgagcaggtggtgttcagccacatggccgagctgtaccgctatgacaaggatgtgggccagtggaaggagcggggcatcggggacatcaagatcctgcagaactatgacaacaagcaggtgcgcatcgtgatgagaagagaccaggtgctgaagctgtgtgccaaccaccgcatcaccccagacatgagcctgcagaacatgaagggcacagagcgggtgtgggtgtggacagcctgtgactttgctgatggagagaggaaggtggagcacctggccgtgcgcttcaagctgcaggatgtggccgacagcttcaagaagatctttgatgaggccaagacagcccaggagaaggacagcctcatcaccccccacgtgagccgcagcagcaccccccgggagagcccctgtgggaagattgctgtggccgtgctggaggagaccacccgggagaggacagatgtgatccagggagatgatgtggctgatgctgccagcgaggtggaggtgagcagcaccagcgagaccaccaccaaggctgtggtgtccccacccaagtttgtgtttggcagcgagagcgtgaagaggatcttcagcagcgagaagagcaacccctttgcctttggaaacagcagcgccaccggcagcctgtttggcttctccttcaatgcccccctgaagagcaatgacagcgagaccagctctgtggcccagagcggcagcgagagcaaggtggagcccaagaagtgtgagctgagcaagaacagcgacatcgagcagagcagtgacagcaaggtgaagaacctgagcgccagcttccccatggaggagagcagcatcaactacaccttcaagaccccagagaaggagccccccctgtggcatgctgagttcaccaaggaggagctggtgcagaagctgagcagcaccaccaagtctgctgaccagctgaatggcctgctgcgggagacagaggccaccagcgctgtgctgatggagcagatcaagctgctgaagtctgagatccggcggctggagaggaaccaggaggagagcgctgccaacgtggagcacctgaagaatgtgctgctgcagttcatcttcctgaagccaggcagcgagcgggagagcctgctgcctgtgatcaacaccatgctgcagctgagccctgaggagaagggcaagctggccgctgtggcccagggcctgcaggagaccagcatccccaagaagaagtag

SEQ ID NO: 167102 - DNA, 5271 bp, synthetic construct
  misc_feature 1..5271: note = Description of Artificial Sequence: Synthetic coding sequence
  source 1..5271: mol_type = other DNA
atgaggaggagcaaggcctatggagagcgctacctggcctctgtgcagggcagcgcccccagccctgggaagaagctgcggggcttctactttgccaagctgtactatgaggccaaggagtatgacctggccaagaagtatgtgtgcacctacctgtctgtgcaggagcgggacccccgggcccaccgcttcctgggcctgctgtatgagctggaggagaacacagagaaggctgtggagtgctacagaagaagcctggagctgaaccccccccagaaggacctggtgctgaagattgctgagctgctgtgcaagaatgatgtgacagatggccgggccaagtactgggtggagcgggccgccaagctgtttcctggcagccctgccatctacaagctgaaggagcacctgctggactgtgaaggagaagatggctggaacaagctgtttgactggatccagagcgagctgtatgtgcggccagatgatgtgcacatgaacatccggctggtggagctgtaccgcagcaacaagaggctgaaggatgctgtggcccgctgccacgaggccgagaggaacatcgccctgcggagcagcctggagtggaacagctgtgtggtgcagaccctgaaggagtacctggagagcctgcagtgcctggagagtgacaagagtgactggagggccaccaacacagacctgctgctggcctatgccaacctgatgctgctgaccctgagcaccagagatgtgcaggagagccgggagctgctggagagctttgattctgccctgcagagcgccaagagcagcctgggcggcaatgatgagctgagcgccaccttcctggagatgaagggccacttctacatgcatgctggcagcctgctgctgaagatgggccagcacggcaacaacgtgcagtggcaggccctgtctgagctggccgccctgtgctacgtgattgccttccaggtgccccggcccaagatcaagctgatcaagggggaggccggccagaacctgctggagatgatggcctgtgaccggctgagccagagcggccacatgctgctgaacctgagccggggcaagcaggacttcctgaaggaggtggtggagacctttgccaacaagagcggccagagcgtgctgtacaatgccctcttcagcagccagagcagcaaggacaccagcttcctgggcagtgatgacatcggcaacattgatgtgcaggagcctgagctggaggacctggcccgctatgatgtgggcgccatccaggcccacaacggcagcctgcagcacctgacctggctgggcctgcagtggaacagcctgcctgccctgcccggcatcaggaagtggctgaagcagctgttccaccacctgccccaggagaccagccggctggagaccaatgcccctgagagcatctgcatcctggacctggaggtgttcctgctgggcgtggtgtacaccagccacctgcagctgaaggagaagtgcaacagccaccacagcagctaccagcccctgtgcctgcccctgcctgtgtgcaagaggctgtgcacagagcggcagaagtcctggtgggatgctgtgtgcaccctcatccacaggaaggctgtgcccggcaacagcgctgagctgcggctggtggtgcagcacgagatcaacaccctgcgggcccaggagaagcacggcctgcagcctgccctgctggtgcactgggccaagtgcctgcagaagatgggccggggcctgaacagcagctatgaccagcaggagtacatcggccgctctgtgcactactggaagaaggtgctgcccctgctgaagatcatcaagaagaacagcatccctgagcccatcgaccccctcttcaagcacttccacagcgtggacatccaggccagcgagatcgtggagtatgaagaagatgcccacatcacctttgccatcctggatgctgtgcacggcaacattgaagatgctgtgacagcctttgagagcatcaagtctgtggtgtcctactggaacctggccctgatcttccacaggaaggcagaagatattgaaaatgatgctgtgtttcctgaggagcaggaggagtgcaagaactacctgaggaagacccgggactacctgatcaagatcattgatgacagcgacagcaacctgtctgtggtgaagaagctgcctgtgcccctggagagcgtgaaggagatgctgaagtctgtgatgcaggagctggaggactacagcgagggcggccccctgtacaagaatggcagcctgagaaatgctgacagcgagatcaagcacagcacccccagccccaccaagtacagcctgagccccagcaagagctacaagtacagccccaagaccccaccccgctgggccgaggaccagaacagcctgaggaagatgatctgccaggaggtgaaggccatcaccaagctgaacagcagcaagagcgccagccgccaccgctggcccacagaaaattatggcccagattctgtgcctgatggctaccagggcagccagaccttccatggagcccccctgactgtggccaccaccggccccagcgtgtactacagccagagccctgcctacaacagccagtacctgctgcggcctgctgccaacgtgacccccaccaagggcagcagcaacacagagttcaagagcaccaaggagggcttcagcattgctgtgtctgcagatggcttcaagtttggcatcagcgagcccggcaaccaggagaagaagtctgagaagcccctggagaatgacaccggcttccaggcccaggacatcagcggccagaagaatggccggggcgtcatcttcggccagaccagcagcaccttcacctttgctgatgtggccaagagcaccagcggggagggcttccagtttgggaagaaggaccccaacttcaagggcttctctggagctggggagaagctgttcagcagccagtgtgggaagatggccaacaaggccaacaccagcggggactttgagaaggatgatgatgcctgcaagacagaagattctgatgacatccactttgagcctgtggtgcagatgcctgagaaggtggagctggtgactggagaggagggggagaaggtgctgtacagccagggcgtgaagctgttccgctttgatgctgagatcagccagtggaaggagcggggcctgggcaacctgaagatcctgaagaatgaggtgaatggcaagcccaggatgctgatgagaagagaccaggtgctgaaggtgtgtgccaaccactggatcaccaccaccatgaacctgaagcccctgagcggcagtgaccgggcctggatgtggctggccagtgacttcagtgatggagatgccaagctggagcggctggccgcccagttcaagaccccagagctggccgaggagttcaagcagaagtttgaggagtgccagaggctgctgctggacatccccctgcagaccccccacaagctggtggacaccggccgggccgccaagctgatccagagagctgaggagatgaagagcggcctgaaggacttcaagaccttcctgaccaatgaccagaccaaggtgacagaggaggagaacaagggcagcggcaccggggctgctggggccagtgacaccaccatcaagcccaacccagaaaatacaggccccaccctggagtgggacaactatgacctgcgggaggatgccctggatgacaacgtgagcagcagctctgtgcatgacagccccctggccagcagccctgtgaggaagaacatcttccgctttgatgagagcaccaccggcttcaacttctccttcaagagcgccctgagcctgagcaagagccctgccaagctgaaccagagcggcacctctgtgggcacagatgaggagagtgatgtgacccaggaggaggagagagatggccagtactttgagcctgtggtgcccctgcctgacctggtggaggtgtcctctggagaggagaatgagcaggtggtgttcagccacatggccgagctgtaccgctatgacaaggatgtgggccagtggaaggagcggggcattggagacatcaagatcctgcagaactatgacaacaagcaggtgagaattgtgatgaggcgggaccaggtgctgaagctgtgtgccaaccaccgcatcaccccagacatgagcctgcagaacatgaagggcacagagcgggtgtgggtgtggacagcctgtgactttgctgatggagagaggaaggtggagcacctggccgtgcgcttcaagctgcaggatgtggccgacagcttcaagaagatctttgatgaggccaagacagcccaggagaaggacagcctcatcacccctcatgtgagccgcagcagcaccccccgggagagcccctgtgggaagattgctgtggccgtgctggaggagaccacccgggagaggacagatgtgatccagggagatgatgtggctgatgctgccagcgaggtggaggtgagcagcaccagcgagaccaccaccaaggctgtggtgagcccccccaagtttgtgtttggaagtgaatctgtgaagaggatcttcagcagcgagaagagcaacccctttgccttcggcaacagcagcgccaccggcagcctgtttggcttctccttcaatgcccccctgaagagcaatgattctgagaccagctctgtggcccagagcggcagcgagagcaaggtggagcccaagaagtgtgagctgagcaagaacagcgacatcgagcagagcagtgacagcaaggtgaagaacctgagcgccagcttccccatggaggagagcagcatcaactacaccttcaagaccccagagaaggagccccccctgtggcacgccgagttcaccaaggaggagctggtgcagaagctgagcagcaccaccaagtctgctgaccagctgaatggcctgctgcgggagacagaggccaccagcgctgtgctgatggagcagatcaagctgctgaagtctgagatccggcggctggagaggaaccaggaggagagcgctgccaacgtggagcacctgaagaatgtgctgctgcagttcatcttcctgaagccaggcagcgagcgggagagcctgctgcccgtcatcaacaccatgctgcagctgagccctgaggagaagggcaagctggccgctgtggcccagggcctgcaggagaccagcatccccaagaagaagtag

SEQ ID NO: 167103 - DNA, 5247 bp, synthetic construct
  misc_feature 1..5247: note = Description of Artificial Sequence: Synthetic coding sequence
  source 1..5247: mol_type = other DNA
atgaatgtgatgggcttcaacacagaccggctggcctggaccaggaacaagctgcggggcttctactttgccaagctgtactatgaggccaaggagtatgacctggccaagaagtatgtgtgcacctacctgtctgtgcaggagcgggacccccgggcccaccgcttcctgggcctgctgtatgagctggaggagaacacagagaaggctgtggagtgctacagaagaagcctggagctgaaccccccccagaaggacctggtgctgaagattgctgagctgctgtgcaagaatgatgtgacagatggccgggccaagtactgggtggagcgggccgccaagctgtttcctggcagccctgccatctacaagctgaaggagcacctgctggactgtgaaggagaagatggctggaacaagctgtttgactggatccagagcgagctgtatgtgcggccagatgatgtgcacatgaacatccggctggtggagctgtaccgcagcaacaagaggctgaaggatgctgtggcccgctgccacgaggccgagaggaacatcgccctgcggagcagcctggagtggaacagctgtgtggtgcagaccctgaaggagtacctggagagcctgcagtgcctggagagtgacaagagtgactggagggccaccaacacagacctgctgctggcctatgccaacctgatgctgctgaccctgagcaccagagatgtgcaggagagccgggagctgctggagagctttgattctgccctgcagagcgccaagagcagcctgggcggcaatgatgagctgagcgccaccttcctggagatgaagggccacttctacatgcatgctggcagcctgctgctgaagatgggccagcacggcaacaacgtgcagtggcaggccctgtctgagctggccgccctgtgctacgtgattgccttccaggtgccccggcccaagatcaagctgatcaagggggaggccggccagaacctgctggagatgatggcctgtgaccggctgagccagagcggccacatgctgctgaacctgagccggggcaagcaggacttcctgaaggaggtggtggagacctttgccaacaagagcggccagagcgtgctgtacaatgccctcttcagcagccagagcagcaaggacaccagcttcctgggcagtgatgacatcggcaacattgatgtgcaggagcctgagctggaggacctggcccgctatgatgtgggcgccatccaggcccacaacggcagcctgcagcacctgacctggctgggcctgcagtggaacagcctgcctgccctgcccggcatcaggaagtggctgaagcagctgttccaccacctgccccaggagaccagccggctggagaccaatgcccctgagagcatctgcatcctggacctggaggtgttcctgctgggcgtggtgtacaccagccacctgcagctgaaggagaagtgcaacagccaccacagcagctaccagcccctgtgcctgcccctgcctgtgtgcaagaggctgtgcacagagcggcagaagtcctggtgggatgctgtgtgcaccctcatccacaggaaggctgtgcccggcaacagcgctgagctgcggctggtggtgcagcacgagatcaacaccctgcgggcccaggagaagcacggcctgcagcctgccctgctggtgcactgggccaagtgcctgcagaagatgggccggggcctgaacagcagctatgaccagcaggagtacatcggccgctctgtgcactactggaagaaggtgctgcccctgctgaagatcatcaagaagaacagcatccctgagcccatcgaccccctcttcaagcacttccacagcgtggacatccaggccagcgagatcgtggagtatgaagaagatgcccacatcacctttgccatcctggatgctgtgcacggcaacattgaagatgctgtgacagcctttgagagcatcaagtctgtggtgtcctactggaacctggccctgatcttccacaggaaggcagaagatattgaaaatgatgctgtgtttcctgaggagcaggaggagtgcaagaactacctgaggaagacccgggactacctgatcaagatcattgatgacagcgacagcaacctgtctgtggtgaagaagctgcctgtgcccctggagagcgtgaaggagatgctgaagtctgtgatgcaggagctggaggactacagcgagggcggccccctgtacaagaatggcagcctgagaaatgctgacagcgagatcaagcacagcacccccagccccaccaagtacagcctgagccccagcaagagctacaagtacagccccaagaccccaccccgctgggccgaggaccagaacagcctgaggaagatgatctgccaggaggtgaaggccatcaccaagctgaacagcagcaagagcgccagccgccaccgctggcccacagaaaattatggcccagattctgtgcctgatggctaccagggcagccagaccttccatggagcccccctgactgtggccaccaccggccccagcgtgtactacagccagagccctgcctacaacagccagtacctgctgcggcctgctgccaacgtgacccccaccaagggcagcagcaacacagagttcaagagcaccaaggagggcttcagcattgctgtgtctgcagatggcttcaagtttggcatcagcgagcccggcaaccaggagaagaagtctgagaagcccctggagaatgacaccggcttccaggcccaggacatcagcggccagaagaatggccggggcgtcatcttcggccagaccagcagcaccttcacctttgctgatgtggccaagagcaccagcggggagggcttccagtttgggaagaaggaccccaacttcaagggcttctctggagctggggagaagctgttcagcagccagtgtgggaagatggccaacaaggccaacaccagcggggactttgagaaggatgatgatgcctgcaagacagaagattctgatgacatccactttgagcctgtggtgcagatgcctgagaaggtggagctggtgactggagaggagggggagaaggtgctgtacagccagggcgtgaagctgttccgctttgatgctgagatcagccagtggaaggagcggggcctgggcaacctgaagatcctgaagaatgaggtgaatggcaagcccaggatgctgatgagaagagaccaggtgctgaaggtgtgtgccaaccactggatcaccaccaccatgaacctgaagcccctgagcggcagtgaccgggcctggatgtggctggccagtgacttcagtgatggagatgccaagctggagcggctggccgcccagttcaagaccccagagctggccgaggagttcaagcagaagtttgaggagtgccagaggctgctgctggacatccccctgcagaccccccacaagctggtggacaccggccgggccgccaagctgatccagagagctgaggagatgaagagcggcctgaaggacttcaagaccttcctgaccaatgaccagaccaaggtgacagaggaggagaacaagggcagcggcaccggggctgctggggccagtgacaccaccatcaagcccaacccagaaaatacaggccccaccctggagtgggacaactatgacctgcgggaggatgccctggatgacaacgtgagcagcagctctgtgcatgacagccccctggccagcagccctgtgaggaagaacatcttccgctttgatgagagcaccaccggcttcaacttctccttcaagagcgccctgagcctgagcaagagccctgccaagctgaaccagagcggcacctctgtgggcacagatgaggagagtgatgtgacccaggaggaggagagagatggccagtactttgagcctgtggtgcccctgcctgacctggtggaggtgtcctctggagaggagaatgagcaggtggtgttcagccacatggccgagctgtaccgctatgacaaggatgtgggccagtggaaggagcggggcattggagacatcaagatcctgcagaactatgacaacaagcaggtgagaattgtgatgaggcgggaccaggtgctgaagctgtgtgccaaccaccgcatcaccccagacatgagcctgcagaacatgaagggcacagagcgggtgtgggtgtggacagcctgtgactttgctgatggagagaggaaggtggagcacctggccgtgcgcttcaagctgcaggatgtggccgacagcttcaagaagatctttgatgaggccaagacagcccaggagaaggacagcctcatcacccctcatgtgagccgcagcagcaccccccgggagagcccctgtgggaagattgctgtggccgtgctggaggagaccacccgggagaggacagatgtgatccagggagatgatgtggctgatgctgccagcgaggtggaggtgagcagcaccagcgagaccaccaccaaggctgtggtgagcccccccaagtttgtgtttggaagtgaatctgtgaagaggatcttcagcagcgagaagagcaacccctttgccttcggcaacagcagcgccaccggcagcctgtttggcttctccttcaatgcccccctgaagagcaatgattctgagaccagctctgtggcccagagcggcagcgagagcaaggtggagcccaagaagtgtgagctgagcaagaacagcgacatcgagcagagcagtgacagcaaggtgaagaacctgagcgccagcttccccatggaggagagcagcatcaactacaccttcaagaccccagagaaggagccccccctgtggcacgccgagttcaccaaggaggagctggtgcagaagctgagcagcaccaccaagtctgctgaccagctgaatggcctgctgcgggagacagaggccaccagcgctgtgctgatggagcagatcaagctgctgaagtctgagatccggcggctggagaggaaccaggaggagagcgctgccaacgtggagcacctgaagaatgtgctgctgcagttcatcttcctgaagccaggcagcgagcgggagagcctgctgcccgtcatcaacaccatgctgcagctgagccctgaggagaagggcaagctggccgctgtggcccagggcctgcaggagaccagcatccccaagaagaagtag

SEQ ID NO: 167104 - DNA, 1935 bp, synthetic construct
  misc_feature 1..1935: note = Description of Artificial Sequence: Synthetic coding sequence
  source 1..1935: mol_type = other DNA
atgctgatgaggcgggaccaggtgctgaaggtgtgtgccaaccactggatcaccaccaccatgaacctgaagcccctgagcggcagtgaccgggcctggatgtggctggccagtgacttcagtgatggagatgccaagctggagcggctggccgcccagttcaagaccccagagctggccgaggagttcaagcagaagtttgaggagtgccagaggctgctgctggacatccccctgcagaccccccacaagctggtggacaccggccgggccgccaagctgatccagagagctgaggagatgaagagcggcctgaaggacttcaagaccttcctgaccaatgaccagaccaaggtgacagaggaggagaacaagggcagcggcactggagctgctggggccagtgacaccaccatcaagcccaaccctgagaacacaggccccaccctggagtgggacaactatgacctgagagaagatgccctggatgacaacgtgagcagcagctctgtgcatgacagccccctggccagcagccctgtgaggaagaacatcttccgctttgatgagagcaccaccggcttcaacttctccttcaagagcgccctgagcctgagcaagagccctgccaagctgaaccagagcggcacctctgtgggcacagatgaggagagtgatgtgacccaggaggaggagagagatggccagtactttgagcctgtggtgcccctgcctgacctggtggaggtgagcagcggggaggagaatgagcaggtggtgttcagccacatggccgagctgtaccgctatgacaaggatgtgggccagtggaaggagcggggcatcggggacatcaagatcctgcagaactatgacaacaagcaggtgcgcatcgtgatgagaagagaccaggtgctgaagctgtgtgccaaccaccgcatcaccccagacatgagcctgcagaacatgaagggcacagagcgggtgtgggtgtggacagcctgtgactttgctgatggagagaggaaggtggagcacctggccgtgcgcttcaagctgcaggatgtggccgacagcttcaagaagatctttgatgaggccaagacagcccaggagaaggacagcctcatcaccccccacgtgagccgcagcagcaccccccgggagagcccctgtgggaagattgctgtggccgtgctggaggagaccacccgggagaggacagatgtgatccagggagatgatgtggctgatgctgccagcgaggtggaggtgagcagcaccagcgagaccaccaccaaggctgtggtgtccccacccaagtttgtgtttggcagcgagagcgtgaagaggatcttcagcagcgagaagagcaacccctttgcctttggaaacagcagcgccaccggcagcctgtttggcttctccttcaatgcccccctgaagagcaatgacagcgagaccagctctgtggcccagagcggcagcgagagcaaggtggagcccaagaagtgtgagctgagcaagaacagcgacatcgagcagagcagtgacagcaaggtgaagaacctgagcgccagcttccccatggaggagagcagcatcaactacaccttcaagaccccagagaaggagccccccctgtggcatgctgagttcaccaaggaggagctggtgcagaagctgagcagcaccaccaagtctgctgaccagctgaatggcctgctgcgggagacagaggccaccagcgctgtgctgatggagcagatcaagctgctgaagtctgagatccggcggctggagaggaaccaggaggagagcgctgccaacgtggagcacctgaagaatgtgctgctgcagttcatcttcctgaagccaggcagcgagcgggagcccagcagctgctacaagtatgatgtggccgcccagccctag

SEQ ID NO: 167105 - DNA, 5301 bp, synthetic construct
  misc_feature 1..5301: note = Description of Artificial Sequence: Synthetic coding sequence
  source 1..5301: mol_type = other DNA
atgagctgcagcaaggcctatggagagagatatgtggcctctgtgcagggcagcgcccccagccccaggaagaagagcacccggggcttctactttgccaagctgtactatgaggccaaggagtatgacctggccaagaagtacatctgcacctacatcaacgtgcgggagatggacccccgggcccaccgcttcctgggcctgctgtatgagctggaggagaacacagagaaggctgtggagtgctaccgccgctctgtggagctgaaccccacccagaaggacctggtgctgaagattgctgagctgctgtgcaagaatgatgtgacagatggccgggcagagtactgggtggagagagctgccaagctgtttcctggcagccctgccatctacaagctgaaggagcagctgctggactgtgagggggaggatggctggaacaagctgtttgacctgatccagagcgagctgtatgtgcggccagatgatgtgcacgtgaacatccggctggtggagctgtaccgcagcaccaagaggctgaaggatgctgtggcccgctgccatgaagctgagagaaatattgccctgcggagcagcctggagtggaacagctgtgtggtgcagaccctgaaggagtacctggagagcctgcagtgcctggagagtgacaagagtgactggagggccaccaacacagacctgctgctggcctatgccaacctgatgctgctgaccctgagcaccagagatgtgcaggagagccgggagctgctggagagctttgacagcgccctgcagagcgccaagagcagcctgggcggcaatgatgagctgagcgccaccttcctggagatgaagggccacttctacatgcacgccggcagcctgctgctgaagatgggccagcacggcaacaacgtgcagtggagggccctgtctgagctggccgccctgtgctacctgattgccttccaggtgccccggcccaagatcaagctgatcaagggggaggccggccagaacctgctggagatgatggcctgtgaccggctgagccagagcggccacatgctgctgaacctgagccggggcaagcaggacttcctgaaggtggtggtggagacctttgccaacaagagcggccagagcgccctgtatgatgccctcttcagcagccagagccccaaggacaccagcttcctgggcagtgatgacatcggcaacattgatgtgcaggagcctgagctggaggacctggcccgctatgatgtgggcgccatccgggcccacaacggcagcctgcagcacctgacctggctgggcctgcagtggaacagcctgcctgccctgcccggcatcaggaagtggctgaagcagctgttccaccacctgccccaggagaccagccggctggagaccaatgcccctgagagcatctgcatcctggacctggaggtgttcctgctgggcgtggtgtacaccagccacctgcagctgaaggagaagtgcaacagccaccacagcagctaccagcccctgtgcctgcccctgcctgtgtgcaagcagctgtgcacagagcggcagaagtcctggtgggatgctgtgtgcaccctcatccacaggaaggctgtgcccggcaacagcgccaagctgcggctgctggtgcagcacgagatcaacaccctgcgggcccaggagaagcacggcctgcagcctgccctgctggtgcactgggccaagtgcctgcagaagatgggcagcggcctgaacagcttctatgaccagcgggagtacatcggccgctctgtgcactactggaagaaggtgctgcccctgctgaagatcatcaagaagaagaacagcatccctgagcccatcgaccccctcttcaagcacttccacagcgtggacatccaggccagcgagatcgtggagtatgaagaagatgcccacgtgacctttgccatcctggatgctgtgaatggaaatattgaagatgccatgacagcctttgagagcatcaagtctgtggtgtcctactggaacctggccctgatcttccacaggaaggcagaagatattgccaatgatgccctgagccctgaggagcaggaggagtgcaagaactacctgaggaagacccggggctacctgatcaagatcctggatgacagcgacagcaacctgtctgtggtgaagaagctgcctgtgcccctggagagcgtgaaggagatgctgaagtctgtgatgcaggagctggagaactacagcgagggcggccccctgtacaagaatggcagcctgagaaatgctgacagcgagatcaagcacagcacccccagccccaccaagtacagcctgagccccagcaagagctacaagtacagccccaagaccccaccccgctgggccgaggaccagaacagcctgctgaagatgatccggcaggaggtgaaggccatcaaggaggagatgcaggagctgaagctgaacagcagcaagagcgccagccaccaccgctggcccacagaaaattatggcccagattctgtgcctgatggctaccagggcagccagaccttccatggagcccccctgactgtggccaccaccggccccagcgtgtactacagccagagccctgcctacaacagccagtacctgctgcggcctgctgccaacgtgacccccaccaagggcagcagcaacacagagttcaagagcaccaaggagggcttcagcatccctgtgtctgcagatggcttcaagtttggcatcagcgagcccggcaaccaggagaagaagtctgagaagcccctggagaatgacaccggcctgcaggcccaggacatcagcggcaggaagaagggccggggcgtcatcttcggccagaccagcagcaccttcacctttgctgatgtggccaagagcaccagcggggagggcttccagtttgggaagaaggacctgaacttcaagggcttctctggagctggggagaagctgttcagcagccagtatggcaagatggccaacaaggccaacaccagcggggactttgagaaggatgatgatgcctacaagacagaagattctgatgacatccactttgagcctgtggtgcagatgcctgagaaggtggagctggtgactggagaggagggggagaaggtgctgtacagccagggcgtgaagctgttccgctttgatgctgaggtgtcccagtggaaggagcggggcctgggcaacctgaagatcctgaagaatgaggtgaatggcaaggtgaggatgctgatgcagcgggagcaggtgctgaaggtgtgtgccaaccactggatcaccaccaccatgaacctgaagcccctgagcggcagtgaccgggcctggatgtggagcgccagtgacttcagtgatggagatgccaagctggagcggctggccgccaagttcaagaccccagagctggccgaggagttcaagcagaagtttgaggagtgccagaggctgctgctggacatccccctgcagaccccccacaagctggtggacaccggccgggccgccaagctgatccagagagctgaggagatgaagagcggcctgaaggacttcaagaccttcctgaccaatgaccagaccaaggtggccgaggaggagaacaagggcagcggcaccggggctgctggggccagtgacaccaccatcaagcccaatgcagaaaatacaggccccaccctggagtgggacaactatgacctgcgggaggatgccctggatgacagcgtgagcagcagctctgtgcacgccagccccctggccagcagccctgtgaggaagaacctcttccactttgatgagagcaccaccggcagcaacttctccttcaagagcgccctgagcctgagcaagagccctgccaagctgaaccagagcggcacctctgtgggcacagatgaggagagtgatgtgacccaggaggaggagagagatggccagtactttgagcctgtggtgcccctgcctgacctggtggaggtgtcctctggagaggagaatgagcaggtggtgttcagccacagagctgagttctaccgctatgacaaggatgtgggccagtggaaggagcggggcattggagacatcaagatcctgcagaactatgacaacaagcacgtgcgcatcctgatgaggcgggaccaggtgctgaagctgtgtgccaaccaccgcatcaccccagacatgagcctgcagaacatgaagggcacagagcgggtgtgggtgtggacagcctgtgactttgctgatggagagaggaaggtggagcacctggccgtgcgcttcaagctgcaggatgtggccgacagcttcaagaagatctttgatgaggccaagacagcccaggagaaggacagcctcatcacccctcatgtgagccgcagcagcaccccccgggagagcccctgtgggaagattgctgtggccgtgctggaggagaccacccgggagaggacagatgtgatccagggagatgatgtggctgatgctgccagcgaggtggaggtgagcagcaccagcgagaccaccaccaaggctgtggtgagcccccccaagtttgtgtttggaagtgaatctgtgaagaggatcttcagcagcgagaagagcaagccctttgccttcggcaacagcagcgccaccggcagcctgtttggcttctccttcaatgcccccctgaagagcaacaacagcgagaccagctctgtggcccagagcggcagcgagagcaaggtggagcccaagaagtgtgagctgagcaagaacagcgacatcgagcagagcagtgacagcaaggtgaagaacctgagcgccagcttccccacagaggagagcagcatcaactacaccttcaagaccccagagaaggagccccccctgtggtacgccgagttcaccaaggaggagctggtgcagaagctgagcagcaccaccaagtctgctgaccacctgaatggcctgctgcgggagattgaggccaccaatgctgtgctgatggagcagatcaagctgctgaagtctgagatccggcggctggagaggaaccaggagcaggaggtgtctgctgccaacgtggagcacctgaagaatgtgctgctgcagttcatcttcctgaagccaggcagcgagcgggagcggctgctgcccgtcatcaacaccatgctgcagctgagcctggaggagaagggcaagctggccgctgtggcccaggccgagcggggctttgtgctgaacagcaccttctag

SEQ ID NO: 167106 - DNA, 471 bp, synthetic construct
  misc_feature 1..471: note = Description of Artificial Sequence: Synthetic coding sequence
  source 1..471: mol_type = other DNA
atggacccccgggcccaccgcttcctgggcctgctgtatgagctggaggagaacacagagaaggctgtggagtgctacagaagatctgtggagctgaaccccacccagaaggacctggtgctgaagattgctgagctgctgtgcaagaatgatgtgacagatggccgggcagagtactgggtggagcgggccgccaagctgtttcctggcagccctgccatctacaagctgaaggagcagctgctggactgtgaaggagaagatggctggaacaagctgtttgacctgatccagagcgagctgtatgtgcggccagatgatgtgcacgtgaacatccggctggtggagctgtaccgcagcaccaagaggctgaaggatgctgtggcccgctgccacgaggccgagaggaacatcgccctgcggagcagcctggagtggaacagctgtgtggtgcagaccctgaagttctag

SEQ ID NO: 167107 - DNA, 3378 bp, synthetic construct
  misc_feature 1..3378: note = Description of Artificial Sequence: Synthetic coding sequence
  source 1..3378: mol_type = other DNA
atgctgctgaccctgagcaccagagatgtgcaggagagccgggagctgctggagagctttgacagcgccctgcagagcgccaagagcagcctgggcggcaatgatgagctgagcgccaccttcctggagatgaagggccacttctacatgcacgccggcagcctgctgctgaagatgggccagcacggcaacaacgtgcagtggagggccctgtctgagctggccgccctgtgctacctgattgccttccaggtgccccggcccaagatcaagctgatcaagggggaggccggccagaacctgctggagatgatggcctgtgaccggctgagccagagcggccacatgctgctgaacctgagccggggcaagcaggacttcctgaaggtggtggtggagacctttgccaacaagagcggccagagcgccctgtatgatgccctcttcagcagccagagccccaaggacaccagcttcctgggcagtgatgacatcggcaacattgatgtgcaggagcctgagctggaggacctggcccgctatgatgtgggcgccatccgggcccacaacggcagcctgcagcacctgacctggctgggcctgcagtggaacagcctgcctgccctgcccggcatcaggaagtggctgaagcagctgttccaccacctgccccaggagaccagccggctggagaccaatgcccctgagagcatctgcatcctggacctggaggtgttcctgctgggcgtggtgtacaccagccacctgcagctgaaggagaagtgcaacagccaccacagcagctaccagcccctgtgcctgcccctgcctgtgtgcaagcagctgtgcacagagcggcagaagtcctggtgggatgctgtgtgcaccctcatccacaggaaggctgtgcccggcaacagcgccaagctgcggctgctggtgcagcacgagatcaacaccctgcgggcccaggagaagcacggcctgcagcctgccctgctggtgcactgggccaagtgcctgcagaagatgggcagcggcctgaacagcttctatgaccagcgggagtacatcggccgctctgtgcactactggaagaaggtgctgcccctgctgaagatcatcaagaagaagaacagcatccctgagcccatcgaccccctcttcaagcacttccacagcgtggacatccaggccagcgagatcgtggagtatgaagaagatgcccacgtgacctttgccatcctggatgctgtgaatggaaatattgaagatgccatgacagcctttgagagcatcaagtctgtggtgtcctactggaacctggccctgatcttccacaggaaggcagaagatattgccaatgatgccctgagccctgaggagcaggaggagtgcaagaactacctgaggaagacccggggctacctgatcaagatcctggatgacagcgacagcaacctgtctgtggtgaagaagctgcctgtgcccctggagagcgtgaaggagatgctgaagtctgtgatgcaggagctggagaactacagcgagggcggccccctgtacaagaatggcagcctgagaaatgctgacagcgagatcaagcacagcacccccagccccaccaagtacagcctgagccccagcaagagctacaagtacagccccaagaccccaccccgctgggccgaggaccagaacagcctgctgaagatgatccggcaggaggtgaaggccatcaaggaggagatgcaggagctgaagctgaacagcagcaagagcgccagccaccaccgctggcccacagaaaattatggcccagattctgtgcctgatggctaccagggcagccagaccttccatggagcccccctgactgtggccaccaccggccccagcgtgtactacagccagagccctgcctacaacagccagtacctgctgcggcctgctgccaacgtgacccccaccaagggcagcagcaacacagagttcaagagcaccaaggagggcttcagcatccctgtgtctgcagatggcttcaagtttggcatcagcgagcccggcaaccaggagaagaagtctgagaagcccctggagaatgacaccggcctgcaggcccaggacatcagcggcaggaagaagggccggggcgtcatcttcggccagaccagcagcaccttcacctttgctgatgtggccaagagcaccagcggggagggcttccagtttgggaagaaggacctgaacttcaagggcttctctggagctggggagaagctgttcagcagccagtatggcaagatggccaacaaggccaacaccagcggggactttgagaaggatgatgatgcctacaagacagaagattctgatgacatccactttgagcctgtggtgcagatgcctgagaaggtggagctggtgactggagaggagggggagaaggtgctgtacagccagggcgtgaagctgttccgctttgatgctgaggtgtcccagtggaaggagcggggcctgggcaacctgaagatcctgaagaatgaggtgaatggcaaggtgaggatgctgatgcagcgggagcaggtgctgaaggtgtgtgccaaccactggatcaccaccaccatgaacctgaagcccctgagcggcagtgaccgggcctggatgtggagcgccagtgacttcagtgatggagatgccaagctggagcggctggccgccaagttcaagaccccagagctggccgaggagttcaagcagaagtttgaggagtgccagaggctgctgctggacatccccctgcagaccccccacaagctggtggacaccggccgggccgccaagctgatccagagagctgaggagatgaagagcggcagcgagagcaaggtggagcccaagaagtgtgagctgagcaagaacagcgacatcgagcagagcagtgacagcaaggtgaagaacctgagcgccagcttccccacagaggagagcagcatcaactacaccttcaagaccccagagaaggagccccccctgtggtatgcagagttcaccaaggaggagctggtgcagaagctgagcagcaccaccaagtctgctgaccacctgaatggcctgctgcgggagattgaggccaccaatgctgtgctgatggagcagatcaagctgctgaagtctgagatccggcggctggagaggaaccaggagcaggaggtgtctgctgccaacgtggagcacctgaagaatgtgctgctgcagttcatcttcctgaagccaggcagcgagcgggagcggctgctgcctgtgatcaacaccatgctgcagctgagcctggaggagaagggcaagctggccgctgtggcccagggcgaggagtag

SEQ ID NO: 167108 - DNA, 423 bp, synthetic construct
  misc_feature 1..423: note = Description of Artificial Sequence: Synthetic coding sequence
  source 1..423: mol_type = other DNA
acagaggagagcagcatcaactacaccttcaagaccccagagaaggagccccccctgtggtacgccgagttcaccaaggaggagctggtgcagaagctgagcagcaccaccaagtctgctgaccacctgaatggcctgctgcgggagattgaggccaccaatgctgtgctgatggagcagatcaagctgctgaagtctgagatccggcggctggagaggaaccaggagcaggaggtgtctgctgccaacgtggagcacctgaagaatgtgctgctgcagttcatcttcctgaagccaggcagcgagcgggagcggctgctgcccgtcatcaacaccatgctgcagctgagcctggaggagaagggcaagctggccgctgtggcccagggcctgcaggagaccagcatccccaagaagaagtag

SEQ ID NO: 167109 - DNA, 5277 bp, synthetic construct
  misc_feature 1..5277: note = Description of Artificial Sequence: Synthetic coding sequence
  source 1..5277: mol_type = other DNA
atgagctgcagcaaggcctatggagagagatatgtggcctctgtgcagggcagcgcccccagccccaggaagaagagcacccggggcttctactttgccaagctgtactatgaggccaaggagtatgacctggccaagaagtacatctgcacctacatcaacgtgcgggagatggacccccgggcccaccgcttcctgggcctgctgtatgagctggaggagaacacagagaaggctgtggagtgctaccgccgctctgtggagctgaaccccacccagaaggacctggtgctgaagattgctgagctgctgtgcaagaatgatgtgacagatggccgggcagagtactgggtggagagagctgccaagctgtttcctggcagccctgccatctacaagctgaaggagcagctgctggactgtgagggggaggatggctggaacaagctgtttgacctgatccagagcgagctgtatgtgcggccagatgatgtgcacgtgaacatccggctggtggagctgtaccgcagcaccaagaggctgaaggatgctgtggcccgctgccatgaagctgagagaaatattgccctgcggagcagcctggagtggaacagctgtgtggtgcagaccctgaaggagtacctggagagcctgcagtgcctggagagtgacaagagtgactggagggccaccaacacagacctgctgctggcctatgccaacctgatgctgctgaccctgagcaccagagatgtgcaggagagccgggagctgctggagagctttgacagcgccctgcagagcgccaagagcagcctgggcggcaatgatgagctgagcgccaccttcctggagatgaagggccacttctacatgcacgccggcagcctgctgctgaagatgggccagcacggcaacaacgtgcagtggagggccctgtctgagctggccgccctgtgctacctgattgccttccaggtgccccggcccaagatcaagctgatcaagggggaggccggccagaacctgctggagatgatggcctgtgaccggctgagccagagcggccacatgctgctgaacctgagccggggcaagcaggacttcctgaaggtggtggtggagacctttgccaacaagagcggccagagcgccctgtatgatgccctcttcagcagccagagccccaaggacaccagcttcctgggcagtgatgacatcggcaacattgatgtgcaggagcctgagctggaggacctggcccgctatgatgtgggcgccatccgggcccacaacggcagcctgcagcacctgacctggctgggcctgcagtggaacagcctgcctgccctgcccggcatcaggaagtggctgaagcagctgttccaccacctgccccaggagaccagccggctggagaccaatgcccctgagagcatctgcatcctggacctggaggtgttcctgctgggcgtggtgtacaccagccacctgcagctgaaggagaagtgcaacagccaccacagcagctaccagcccctgtgcctgcccctgcctgtgtgcaagcagctgtgcacagagcggcagaagtcctggtgggatgctgtgtgcaccctcatccacaggaaggctgtgcccggcaacagcgccaagctgcggctgctggtgcagcacgagatcaacaccctgcgggcccaggagaagcacggcctgcagcctgccctgctggtgcactgggccaagtgcctgcagaagatgggcagcggcctgaacagcttctatgaccagcgggagtacatcggccgctctgtgcactactggaagaaggtgctgcccctgctgaagatcatcaagaagaagaacagcatccctgagcccatcgaccccctcttcaagcacttccacagcgtggacatccaggccagcgagatcgtggagtatgaagaagatgcccacgtgacctttgccatcctggatgctgtgaatggaaatattgaagatgccatgacagcctttgagagcatcaagtctgtggtgtcctactggaacctggccctgatcttccacaggaaggcagaagatattgccaatgatgccctgagccctgaggagcaggaggagtgcaagaactacctgaggaagacccggggctacctgatcaagatcctggatgacagcgacagcaacctgtctgtggtgaagaagctgcctgtgcccctggagagcgtgaaggagatgctgaagtctgtgatgcaggagctggagaactacagcgagggcggccccctgtacaagaatggcagcctgagaaatgctgacagcgagatcaagcacagcacccccagccccaccaagtacagcctgagccccagcaagagctacaagtacagccccaagaccccaccccgctgggccgaggaccagaacagcctgctgaagatgatccggcaggaggtgaaggccatcaaggaggagatgcaggagctgaagctgaacagcagcaagagcgccagccaccaccgctggcccacagaaaattatggcccagattctgtgcctgatggctaccagggcagccagaccttccatggagcccccctgactgtggccaccaccggccccagcgtgtactacagccagagccctgcctacaacagccagtacctgctgcggcctgctgccaacgtgacccccaccaagggcagcagcaacacagagttcaagagcaccaaggagggcttcagcatccctgtgtctgcagatggcttcaagtttggcatcagcgagcccggcaaccaggagaagaagtctgagaagcccctggagaatgacaccggcctgcaggcccaggacatcagcggcaggaagaagggccggggcgtcatcttcggccagaccagcagcaccttcacctttgctgatgtggccaagagcaccagcggggagggcttccagtttgggaagaaggacctgaacttcaagggcttctctggagctggggagaagctgttcagcagccagtatggcaagatggccaacaaggccaacaccagcggggactttgagaaggatgatgatgcctacaagacagaagattctgatgacatccactttgagcctgtggtgcagatgcctgagaaggtggagctggtgactggagaggagggggagaaggtgctgtacagccagggcgtgaagctgttccgctttgatgctgaggtgtcccagtggaaggagcggggcctgggcaacctgaagatcctgaagaatgaggtgaatggcaaggtgaggatgctgatgcagcgggagcaggtgctgaaggtgtgtgccaaccactggatcaccaccaccatgaacctgaagcccctgagcggcagtgaccgggcctggatgtggagcgccagtgacttcagtgatggagatgccaagctggagcggctggccgccaagttcaagaccccagagctggccgaggagttcaagcagaagtttgaggagtgccagaggctgctgctggacatccccctgcagaccccccacaagctggtggacaccggccgggccgccaagctgatccagagagctgaggagatgaagagcggcctgaaggacttcaagaccttcctgaccaatgaccagaccaaggtggccgaggaggagaacaagggcagcggcaccggggctgctggggccagtgacaccaccatcaagcccaatgcagaaaatacaggccccaccctggagtgggacaactatgacctgcgggaggatgccctggatgacagcgtgagcagcagctctgtgcacgccagccccctggccagcagccctgtgaggaagaacctcttccactttgatgagagcaccaccggcagcaacttctccttcaagagcgccctgagcctgagcaagagccctgccaagctgaaccagagcggcacctctgtgggcacagatgaggagagtgatgtgacccaggaggaggagagagatggccagtactttgagcctgtggtgcccctgcctgacctggtggaggtgtcctctggagaggagaatgagcaggtggtgttcagccacagagctgagttctaccgctatgacaaggatgtgggccagtggaaggagcggggcattggagacatcaagatcctgcagaactatgacaacaagcacgtgcgcatcctgatgaggcgggaccaggtgctgaagctgtgtgccaaccaccgcatcaccccagacatgagcctgcagaacatgaagggcacagagcgggtgtgggtgtggacagcctgtgactttgctgatggagagaggaaggtggagcacctggccgtgcgcttcaagctgcaggatgtggccgacagcttcaagaagatctttgatgaggccaagacagcccaggagaaggacagcctcatcacccctcatgtgagccgcagcagcaccccccgggagagcccctgtgggaagattgctgtggccgtgctggaggagaccacccgggagaggacagatgtgatccagggagatgatgtggctgatgctgccagcgaggtggaggtgagcagcaccagcgagaccaccaccaaggctgtggtgagcccccccaagtttgtgtttggaagtgaatctgtgaagaggatcttcagcagcgagaagagcaagccctttgccttcggcaacagcagcgccaccggcagcctgtttggcttctccttcaatgcccccctgaagagcaacaacagcgagaccagctctgtggcccagagcggcagcgagagcaaggtggagcccaagaagtgtgagctgagcaagaacagcgacatcgagcagagcagtgacagcaaggtgaagaacctgagcgccagcttccccacagaggagagcagcatcaactacaccttcaagaccccagagaaggagccccccctgtggtacgccgagttcaccaaggaggagctggtgcagaagctgagcagcaccaccaagtctgctgaccacctgaatggcctgctgcgggagattgaggccaccaatgctgtgctgatggagcagatcaagctgctgaagtctgagatccggcggctggagaggaaccaggagcaggaggtgtctgctgccaacgtggagcacctgaagaatgtgctgctgcagttcatcttcctgaagccaggcagcgagcgggagcggctgctgcccgtcatcaacaccatgctgcagctgagcctggaggagaagggcaagctggccgctgtggcccagggcgaggagtag

SEQ ID NO: 167110 - DNA, 5301 bp, synthetic construct
  misc_feature 1..5301: note = Description of Artificial Sequence: Synthetic coding sequence
  source 1..5301: mol_type = other DNA
atgagctgcagcaaggcctatggagagagatatgtggcctctgtgcagggcagcgcccccagccccaggaagaagagcacccggggcttctactttgccaagctgtactatgaggccaaggagtatgacctggccaagaagtacatctgcacctacatcaacgtgcgggagatggacccccgggcccaccgcttcctgggcctgctgtatgagctggaggagaacacagagaaggctgtggagtgctaccgccgctctgtggagctgaaccccacccagaaggacctggtgctgaagattgctgagctgctgtgcaagaatgatgtgacagatggccgggccaagtactgggtggagagagctgccaagctgtttcctggcagccctgccatctacaagctgaaggagcagctgctggactgtgagggggaggatggctggaacaagctgtttgacctgatccagagcgagctgtatgtgcggccagatgatgtgcacgtgaacatccggctggtggagctgtaccgcagcaccaagaggctgaaggatgctgtggcccgctgccatgaagctgagagaaatattgccctgcggagcagcctggagtggaacagctgtgtggtgcagaccctgaaggagtacctggagagcctgcagtgcctggagagtgacaagagtgactggagggccaccaacacagacctgctgctggcctatgccaacctgatgctgctgaccctgagcaccagagatgtgcaggagagccgggagctgctggagagctttgacagcgccctgcagagcgccaagagcagcctgggcggcaatgatgagctgagcgccaccttcctggagatgaagggccacttctacatgcacgccggcagcctgctgctgaagatgggccagcacggcaacaacgtgcagtggagggccctgtctgagctggccgccctgtgctacctgattgccttccaggtgccccggcccaagatcaagctgatcaagggggaggccggccagaacctgctggagatgatggcctgtgaccggctgagccagagcggccacatgctgctgaacctgagccggggcaagcaggacttcctgaaggtggtggtggagacctttgccaacaagagcggccagagcgccctgtatgatgccctcttcagcagccagagccccaaggacaccagcttcctgggcagtgatgacatcggcaacattgatgtgcaggagcctgagctggaggacctggcccgctatgatgtgggcgccatccgggcccacaacggcagcctgcagcacctgacctggctgggcctgcagtggaacagcctgcctgccctgcccggcatcaggaagtggctgaagcagctgttccaccacctgccccaggagaccagccggctggagaccaatgcccctgagagcatctgcatcctggacctggaggtgttcctgctgggcgtggtgtacaccagccacctgcagctgaaggagaagtgcaacagccaccacagcagctaccagcccctgtgcctgcccctgcctgtgtgcaagcagctgtgcacagagcggcagaagtcctggtgggatgctgtgtgcaccctcatccacaggaaggctgtgcccggcaacagcgccaagctgcggctgctggtgcagcacgagatcaacaccctgcgggcccaggagaagcacggcctgcagcctgccctgctggtgcactgggccaagtgcctgcagaagatgggcagcggcctgaacagcttctatgaccagcgggagtacatcggccgctctgtgcactactggaagaaggtgctgcccctgctgaagatcatcaagaagaagaacagcatccctgagcccatcgaccccctcttcaagcacttccacagcgtggacatccaggccagcgagatcgtggagtatgaagaagatgcccacgtgacctttgccatcctggatgctgtgaatggaaatattgaagatgccatgacagcctttgagagcatcaagtctgtggtgtcctactggaacctggccctgatcttccacaggaaggcagaagatattgccaatgatgccctgagccctgaggagcaggaggagtgcaagaactacctgaggaagacccggggctacctgatcaagatcctggatgacagcgacagcaacctgtctgtggtgaagaagctgcctgtgcccctggagagcgtgaaggagatgctgaagtctgtgatgcaggagctggagaactacagcgagggggaccccctgtacaagaatggcagcctgagaaatgctgacagcgagatcaagcacagcacccccagccccaccaagtacagcctgagccccagcaagagctacaagtacagccccaagaccccaccccgctgggccgaggaccagaacagcctgctgaagatgatccggcaggaggtgaaggccatcaaggaggagatgcaggagctgaagctgaacagcagcaagagcgccagccaccaccgctggcccacagaaaattatggcccagattctgtgcctgatggctaccagggcagccagaccttccatggagcccccctgactgtggccaccaccggccccagcgtgtactacagccagagccctgcctacaacagccagtacctgctgcggcctgctgccaacgtgacccccaccaagggcagcagcaacacagagttcaagagcaccaaggagggcttcagcatccctgtgtctgcagatggcttcaagtttggcatcagcgagcccggcaaccaggagaaggagagcgagaagcccctggagaatgacaccggcttccaggcccaggacatcagcggccagaagaatggccggggcgtcatcttcggccagaccagcagcaccttcacctttgctgatgtggccaagagcaccagcggggagggcttccagtttgggaagaaggaccccaacttcaagggcttctctggagctggggagaagctgttcagcagccagtgtgggaagatggccaacaaggccaacaccagcggggactttgagaaggatgatgatgcctacaagacagaagattctgatgacatccactttgagcctgtggtgcagatgcctgagaaggtggagctggtgattggagaggagggggagaaggtgctgtacagccagggcgtgaagctgttccgctttgatgctgaggtgcggcagtggaaggagcggggcctgggcaacctgaagatcctgaagaatgaggtgaatggcaagcccaggatgctgatgagaagagagcaggtgctgaaggtgtgtgccaaccactggatcaccaccaccatgaacctgaagcccctgagcggcagtgaccgggcctggatgtggagcgccagtgacttcagtgatggagatgccaagctggagcggctggccgccaagttcaagaccccagagctggccgaggagttcaagcagaagtttgaggagtgccagcagctgctgctggacatccccctgcagaccccccacaagctggtggacaccggccgggccgccaagctgatccagagagctgaggagatgaagagcggcctgaaggacttcaagaccttcctgaccaatgaccagaccaaggtgacagaggaggagaacaagggcagcggcaccggggctgctggggccagtgacaccaccatcaagcccaacccagaaaatacaggccccaccctggagtgggacaactgtgacctgcgggaggatgccctggatgacagcgtgagcagcagctctgtgcacgccagccccctggccagcagccctgtgaggaagaacctcttccactttggagagagcaccaccggcagcaacttctccttcaagagcgccctgagccccagcaagagccctgccaagctgaaccagagcggcacctctgtgggcacagatgaggagagtgatgtgacccaggaggaggagagagatggccagtactttgagcctgtggtgcccctgcctgacctggtggaggtgtcctctggagaggagaatgagaaggtggtgttcagccacagagctgagctgtaccgctatgacaaggatgtgggccagtggaaggagcggggcattggagacatcaagatcctgcagaactatgacaacaagcaggtgagaattgtgatgaggcgggaccaggtgctgaagctgtgtgccaaccacaccatcaccccagacatgagcctgcagaacatgaagggcacagagcgggtgtgggtgtggacagcctgtgactttgctgatggagagaggaaggtggagcacctggccgtgcgcttcaagctgcaggatgtggccgacagcttcaagaagatctttgatgaggccaagacagcccaggagaaggacagcctcatcacccctcatgtgagccgcagcagcaccccccgggagagcccctgtgggaagattgctgtggccgtgctggaggagaccacccgggagaggacagatgtgatccagggagatgatgtggctgatgctgccagcgaggtggaggtgagcagcaccagcgagaccaccaccaaggctgtggtgagcccccccaagtttgtgtttggaagtgaatctgtgaagaggatcttcagcagcgagaagagcaagccctttgccttcggcaacagcagcgccaccggcagcctgtttggcttctccttcaatgccagcctgaagagcaacaacagcgagaccagctctgtggcccagagcggcagcgagagcaaggtggagcccaagaagtgtgagctgagcaagaacagcgacatcgagcagagcagtgacagcaaggtgaagaacctgagcgccagcttccccatggaggagagcagcatcaactacaccttcaagaccccagagaaggagccccccctgtggcacgccgagttcaccaaggaggagctggtgcagaagctgagcagcaccaccaagtctgctgaccacctgaatggcctgctgcgggaggccgaggccaccagcgctgtgctgatggagcagatcaagctgctgaagtctgagatccggcggctggagaggaaccaggagcaggaggagagcgctgccaacgtggagcacctgaagaatgtgctgctgcagttcatcttcctgaagccaggcagcgagcgggagcggctgctgcccgtcatcaacaccatgctgcagctgagccctgaggagaagggcaagctggccgctgtggcccaggccgagcggggctttgtgctgaacagcaccttctag

SEQ ID NO: 167111 - DNA, 3378 bp, synthetic construct
  misc_feature 1..3378: note = Description of Artificial Sequence: Synthetic coding sequence
  source 1..3378: mol_type = other DNA
atgctgctgaccctgagcaccagagatgtgcaggagagccgggagctgctggagagctttgacagcgccctgcagagcgccaagagcagcctgggcggcaatgatgagctgagcgccaccttcctggagatgaagggccacttctacatgcacgccggcagcctgctgctgaagatgggccagcacggcaacaacgtgcagtggagggccctgtctgagctggccgccctgtgctacctgattgccttccaggtgccccggcccaagatcaagctgatcaagggggaggccggccagaacctgctggagatgatggcctgtgaccggctgagccagagcggccacatgctgctgaacctgagccggggcaagcaggacttcctgaaggtggtggtggagacctttgccaacaagagcggccagagcgccctgtatgatgccctcttcagcagccagagccccaaggacaccagcttcctgggcagtgatgacatcggcaacattgatgtgcaggagcctgagctggaggacctggcccgctatgatgtgggcgccatccgggcccacaacggcagcctgcagcacctgacctggctgggcctgcagtggaacagcctgcctgccctgcccggcatcaggaagtggctgaagcagctgttccaccacctgccccaggagaccagccggctggagaccaatgcccctgagagcatctgcatcctggacctggaggtgttcctgctgggcgtggtgtacaccagccacctgcagctgaaggagaagtgcaacagccaccacagcagctaccagcccctgtgcctgcccctgcctgtgtgcaagcagctgtgcacagagcggcagaagtcctggtgggatgctgtgtgcaccctcatccacaggaaggctgtgcccggcaacagcgccaagctgcggctgctggtgcagcacgagatcaacaccctgcgggcccaggagaagcacggcctgcagcctgccctgctggtgcactgggccaagtgcctgcagaagatgggcagcggcctgaacagcttctatgaccagcgggagtacatcggccgctctgtgcactactggaagaaggtgctgcccctgctgaagatcatcaagaagaagaacagcatccctgagcccatcgaccccctcttcaagcacttccacagcgtggacatccaggccagcgagatcgtggagtatgaagaagatgcccacgtgacctttgccatcctggatgctgtgaatggaaatattgaagatgccatgacagcctttgagagcatcaagtctgtggtgtcctactggaacctggccctgatcttccacaggaaggcagaagatattgccaatgatgccctgagccctgaggagcaggaggagtgcaagaactacctgaggaagacccggggctacctgatcaagatcctggatgacagcgacagcaacctgtctgtggtgaagaagctgcctgtgcccctggagagcgtgaaggagatgctgaagtctgtgatgcaggagctggagaactacagcgagggggaccccctgtacaagaatggcagcctgagaaatgctgacagcgagatcaagcacagcacccccagccccaccaagtacagcctgagccccagcaagagctacaagtacagccccaagaccccaccccgctgggccgaggaccagaacagcctgctgaagatgatccggcaggaggtgaaggccatcaaggaggagatgcaggagctgaagctgaacagcagcaagagcgccagccaccaccgctggcccacagaaaattatggcccagattctgtgcctgatggctaccagggcagccagaccttccatggagcccccctgactgtggccaccaccggccccagcgtgtactacagccagagccctgcctacaacagccagtacctgctgcggcctgctgccaacgtgacccccaccaagggcagcagcaacacagagttcaagagcaccaaggagggcttcagcatccctgtgtctgcagatggcttcaagtttggcatcagcgagcccggcaaccaggagaaggagagcgagaagcccctggagaatgacaccggcttccaggcccaggacatcagcggccagaagaatggccggggcgtcatcttcggccagaccagcagcaccttcacctttgctgatgtggccaagagcaccagcggggagggcttccagtttgggaagaaggaccccaacttcaagggcttctctggagctggggagaagctgttcagcagccagtgtgggaagatggccaacaaggccaacaccagcggggactttgagaaggatgatgatgcctacaagacagaagattctgatgacatccactttgagcctgtggtgcagatgcctgagaaggtggagctggtgattggagaggagggggagaaggtgctgtacagccagggcgtgaagctgttccgctttgatgctgaggtgcggcagtggaaggagcggggcctgggcaacctgaagatcctgaagaatgaggtgaatggcaagcccaggatgctgatgagaagagagcaggtgctgaaggtgtgtgccaaccactggatcaccaccaccatgaacctgaagcccctgagcggcagtgaccgggcctggatgtggagcgccagtgacttcagtgatggagatgccaagctggagcggctggccgccaagttcaagaccccagagctggccgaggagttcaagcagaagtttgaggagtgccagcagctgctgctggacatccccctgcagaccccccacaagctggtggacaccggccgggccgccaagctgatccagagagctgaggagatgaagagcggcagcgagagcaaggtggagcccaagaagtgtgagctgagcaagaacagcgacatcgagcagagcagtgacagcaaggtgaagaacctgagcgccagcttccccatggaggagagcagcatcaactacaccttcaagaccccagagaaggagccccccctgtggcatgctgagttcaccaaggaggagctggtgcagaagctgagcagcaccaccaagtctgctgaccacctgaatggcctgctgcgggaggccgaggccaccagcgctgtgctgatggagcagatcaagctgctgaagtctgagatccggcggctggagaggaaccaggagcaggaggagagcgctgccaacgtggagcacctgaagaatgtgctgctgcagttcatcttcctgaagccaggcagcgagcgggagcggctgctgcctgtgatcaacaccatgctgcagctgagccctgaggagaagggcaagctggccgctgtggcccagggcgaggagtag

SEQ ID NO: 167112 - DNA, 471 bp, synthetic construct
  misc_feature 1..471: note = Description of Artificial Sequence: Synthetic coding sequence
  source 1..471: mol_type = other DNA
atggacccccgggcccaccgcttcctgggcctgctgtatgagctggaggagaacacagagaaggctgtggagtgctacagaagatctgtggagctgaaccccacccagaaggacctggtgctgaagattgctgagctgctgtgcaagaatgatgtgacagatggccgggccaagtactgggtggagcgggccgccaagctgtttcctggcagccctgccatctacaagctgaaggagcagctgctggactgtgaaggagaagatggctggaacaagctgtttgacctgatccagagcgagctgtatgtgcggccagatgatgtgcacgtgaacatccggctggtggagctgtaccgcagcaccaagaggctgaaggatgctgtggcccgctgccacgaggccgagaggaacatcgccctgcggagcagcctggagtggaacagctgtgtggtgcagaccctgaagttctag

SEQ ID NO: 167113 - DNA, 5277 bp, synthetic construct
  misc_feature 1..5277: note = Description of Artificial Sequence: Synthetic coding sequence
  source 1..5277: mol_type = other DNA
atgagctgcagcaaggcctatggagagagatatgtggcctctgtgcagggcagcgcccccagccccaggaagaagagcacccggggcttctactttgccaagctgtactatgaggccaaggagtatgacctggccaagaagtacatctgcacctacatcaacgtgcgggagatggacccccgggcccaccgcttcctgggcctgctgtatgagctggaggagaacacagagaaggctgtggagtgctaccgccgctctgtggagctgaaccccacccagaaggacctggtgctgaagattgctgagctgctgtgcaagaatgatgtgacagatggccgggccaagtactgggtggagagagctgccaagctgtttcctggcagccctgccatctacaagctgaaggagcagctgctggactgtgagggggaggatggctggaacaagctgtttgacctgatccagagcgagctgtatgtgcggccagatgatgtgcacgtgaacatccggctggtggagctgtaccgcagcaccaagaggctgaaggatgctgtggcccgctgccatgaagctgagagaaatattgccctgcggagcagcctggagtggaacagctgtgtggtgcagaccctgaaggagtacctggagagcctgcagtgcctggagagtgacaagagtgactggagggccaccaacacagacctgctgctggcctatgccaacctgatgctgctgaccctgagcaccagagatgtgcaggagagccgggagctgctggagagctttgacagcgccctgcagagcgccaagagcagcctgggcggcaatgatgagctgagcgccaccttcctggagatgaagggccacttctacatgcacgccggcagcctgctgctgaagatgggccagcacggcaacaacgtgcagtggagggccctgtctgagctggccgccctgtgctacctgattgccttccaggtgccccggcccaagatcaagctgatcaagggggaggccggccagaacctgctggagatgatggcctgtgaccggctgagccagagcggccacatgctgctgaacctgagccggggcaagcaggacttcctgaaggtggtggtggagacctttgccaacaagagcggccagagcgccctgtatgatgccctcttcagcagccagagccccaaggacaccagcttcctgggcagtgatgacatcggcaacattgatgtgcaggagcctgagctggaggacctggcccgctatgatgtgggcgccatccgggcccacaacggcagcctgcagcacctgacctggctgggcctgcagtggaacagcctgcctgccctgcccggcatcaggaagtggctgaagcagctgttccaccacctgccccaggagaccagccggctggagaccaatgcccctgagagcatctgcatcctggacctggaggtgttcctgctgggcgtggtgtacaccagccacctgcagctgaaggagaagtgcaacagccaccacagcagctaccagcccctgtgcctgcccctgcctgtgtgcaagcagctgtgcacagagcggcagaagtcctggtgggatgctgtgtgcaccctcatccacaggaaggctgtgcccggcaacagcgccaagctgcggctgctggtgcagcacgagatcaacaccctgcgggcccaggagaagcacggcctgcagcctgccctgctggtgcactgggccaagtgcctgcagaagatgggcagcggcctgaacagcttctatgaccagcgggagtacatcggccgctctgtgcactactggaagaaggtgctgcccctgctgaagatcatcaagaagaagaacagcatccctgagcccatcgaccccctcttcaagcacttccacagcgtggacatccaggccagcgagatcgtggagtatgaagaagatgcccacgtgacctttgccatcctggatgctgtgaatggaaatattgaagatgccatgacagcctttgagagcatcaagtctgtggtgtcctactggaacctggccctgatcttccacaggaaggcagaagatattgccaatgatgccctgagccctgaggagcaggaggagtgcaagaactacctgaggaagacccggggctacctgatcaagatcctggatgacagcgacagcaacctgtctgtggtgaagaagctgcctgtgcccctggagagcgtgaaggagatgctgaagtctgtgatgcaggagctggagaactacagcgagggggaccccctgtacaagaatggcagcctgagaaatgctgacagcgagatcaagcacagcacccccagccccaccaagtacagcctgagccccagcaagagctacaagtacagccccaagaccccaccccgctgggccgaggaccagaacagcctgctgaagatgatccggcaggaggtgaaggccatcaaggaggagatgcaggagctgaagctgaacagcagcaagagcgccagccaccaccgctggcccacagaaaattatggcccagattctgtgcctgatggctaccagggcagccagaccttccatggagcccccctgactgtggccaccaccggccccagcgtgtactacagccagagccctgcctacaacagccagtacctgctgcggcctgctgccaacgtgacccccaccaagggcagcagcaacacagagttcaagagcaccaaggagggcttcagcatccctgtgtctgcagatggcttcaagtttggcatcagcgagcccggcaaccaggagaaggagagcgagaagcccctggagaatgacaccggcttccaggcccaggacatcagcggccagaagaatggccggggcgtcatcttcggccagaccagcagcaccttcacctttgctgatgtggccaagagcaccagcggggagggcttccagtttgggaagaaggaccccaacttcaagggcttctctggagctggggagaagctgttcagcagccagtgtgggaagatggccaacaaggccaacaccagcggggactttgagaaggatgatgatgcctacaagacagaagattctgatgacatccactttgagcctgtggtgcagatgcctgagaaggtggagctggtgattggagaggagggggagaaggtgctgtacagccagggcgtgaagctgttccgctttgatgctgaggtgcggcagtggaaggagcggggcctgggcaacctgaagatcctgaagaatgaggtgaatggcaagcccaggatgctgatgagaagagagcaggtgctgaaggtgtgtgccaaccactggatcaccaccaccatgaacctgaagcccctgagcggcagtgaccgggcctggatgtggagcgccagtgacttcagtgatggagatgccaagctggagcggctggccgccaagttcaagaccccagagctggccgaggagttcaagcagaagtttgaggagtgccagcagctgctgctggacatccccctgcagaccccccacaagctggtggacaccggccgggccgccaagctgatccagagagctgaggagatgaagagcggcctgaaggacttcaagaccttcctgaccaatgaccagaccaaggtgacagaggaggagaacaagggcagcggcaccggggctgctggggccagtgacaccaccatcaagcccaacccagaaaatacaggccccaccctggagtgggacaactgtgacctgcgggaggatgccctggatgacagcgtgagcagcagctctgtgcacgccagccccctggccagcagccctgtgaggaagaacctcttccactttggagagagcaccaccggcagcaacttctccttcaagagcgccctgagccccagcaagagccctgccaagctgaaccagagcggcacctctgtgggcacagatgaggagagtgatgtgacccaggaggaggagagagatggccagtactttgagcctgtggtgcccctgcctgacctggtggaggtgtcctctggagaggagaatgagaaggtggtgttcagccacagagctgagctgtaccgctatgacaaggatgtgggccagtggaaggagcggggcattggagacatcaagatcctgcagaactatgacaacaagcaggtgagaattgtgatgaggcgggaccaggtgctgaagctgtgtgccaaccacaccatcaccccagacatgagcctgcagaacatgaagggcacagagcgggtgtgggtgtggacagcctgtgactttgctgatggagagaggaaggtggagcacctggccgtgcgcttcaagctgcaggatgtggccgacagcttcaagaagatctttgatgaggccaagacagcccaggagaaggacagcctcatcacccctcatgtgagccgcagcagcaccccccgggagagcccctgtgggaagattgctgtggccgtgctggaggagaccacccgggagaggacagatgtgatccagggagatgatgtggctgatgctgccagcgaggtggaggtgagcagcaccagcgagaccaccaccaaggctgtggtgagcccccccaagtttgtgtttggaagtgaatctgtgaagaggatcttcagcagcgagaagagcaagccctttgccttcggcaacagcagcgccaccggcagcctgtttggcttctccttcaatgccagcctgaagagcaacaacagcgagaccagctctgtggcccagagcggcagcgagagcaaggtggagcccaagaagtgtgagctgagcaagaacagcgacatcgagcagagcagtgacagcaaggtgaagaacctgagcgccagcttccccatggaggagagcagcatcaactacaccttcaagaccccagagaaggagccccccctgtggcacgccgagttcaccaaggaggagctggtgcagaagctgagcagcaccaccaagtctgctgaccacctgaatggcctgctgcgggaggccgaggccaccagcgctgtgctgatggagcagatcaagctgctgaagtctgagatccggcggctggagaggaaccaggagcaggaggagagcgctgccaacgtggagcacctgaagaatgtgctgctgcagttcatcttcctgaagccaggcagcgagcgggagcggctgctgcccgtcatcaacaccatgctgcagctgagccctgaggagaagggcaagctggccgctgtggcccagggcgaggagtag

SEQ ID NO: 167114 - DNA, 5298 bp, synthetic construct
  misc_feature 1..5298: note = Description of Artificial Sequence: Synthetic coding sequence
  source 1..5298: mol_type = other DNA
atgaggaggagcaaggcagatgtggagagatatgtggcctctgtgctgggcctgacccccagcccccggcagaagtccatgaagggcttctactttgccaagctgtactatgaggccaaggagtatgacctggccaagaagtacatctgcacctacatcaacgtgcaggagcgggaccccaaggcccaccgcttcctgggcctgctgtatgagctggaggagaacacagagaaggctgtggagtgctaccgccgctctgtggagctgaaccccacccagaaggacctggtgctgaagattgctgagctgctgtgcaagaatgatgtgacagatggccgggccaagtactgggtggagagagctgccaagctgtttcctggcagccctgccatctacaagctgaaggagcagctgctggactgtgagggggaggatggctggaacaagctgtttgacctgatccagagcgagctgtatgtgcggccagatgatgtgcacgtgaacatccggctggtggagctgtaccgcagcaccaagaggctgaaggatgctgtggcccactgccatgaagctgagagaaatattgccctgcggagcagcctggagtggaacagctgtgtggtgcagaccctgaaggagtacctggagagcctgcagtgcctggagagtgacaagagtgactggcaggccaccaacacagacctgctgctggcctatgccaacctgatgctgctgaccctgagcaccagagatgtgcaggagaaccgggagctgctggagagctttgacagcgccctgcagagcgccaagagcagcctgggcggcaatgatgagctgagcgccaccttcctggagatgaagggccacttctacatgtatgccggcagcctgctgctgaagatgggccagcacggcaacaacgtgcagtggagggccctgtctgagctggccgccctgtgctacctgattgccttccaggtgccccggcccaagatcaagctgcgggagggcaaggccggccagaacctgctggagatgatggcctgtgaccggctgagccagagcggccacatgctgctgagcctgagccggggcaagcaggacttcctgaaggaggtggtggagacctttgccaacaagattggccagagcgccctgtatgatgccctcttcagcagccagagccccaaggacaccagcttcctgggcagtgatgacatcggcaagattgatgtgcaggagcctgagctggaggacctggcccgctatgatgtgggcgccatccgggcccacaacggcagcctgcagcacctgacctggctgggcctgcagtggaacagcctgcctgccctgcccggcatcaggaagtggctgaagcagctgttccaccggctgccccatgagaccagccggctggagaccaatgcccctgagagcatctgcatcctggacctggaggtgttcctgctgggcgtggtgtacaccagccacctgcagctgaaggagaagtgcaacagccaccacagcagctaccagcccctgtgcctgcccttccctgtgtgcaagcagctgtgcacagagcggcagaagtcctggtgggatgctgtgtgcaccctcatccacaggaaggctgtgcccggcaacctggccaagctgcggctgctggtgcagcacgagatcaacaccctgcgggcccaggagaagcacggcctgcagcctgccctgctggtgcactgggccaagtacctgcagaagacaggcagcggcctgaacagcttctacggccagctggagtacatcggccgctctgtgcactactggaagaaggtgctgcccctgctgaagatcatcaagaagaacagcatccctgagcccatcgaccccctcttcaagcacttccacagcgtggacatccaggccagcgagatcgtggagtatgaggaggatgcccacatcacctttgccatgctggatgctgtgaatggaaatattgaagatgctgtgacagcctttgagagcatcaagtctgtggtgtcctactggaacctggccctgatcttccacaggaaggccgaggacattgaaaatgatgccctgagccctgaggagcaggaggagtgcaggaactacctgaccaagacccgggactacctgatcaagatcattgatgatggagacagcaacctgtctgtggtgaagaagctgcctgtgcccctggagagcgtgaagcagatgctgaacagcgtgatgcaggagctggaggactacagcgagggcggccccctgtacaagaatggcagcctgagaaatgctgacagcgagatcaagcacagcacccccagccccaccaagtacagcctgagccccagcaagagctacaagtacagccctgagaccccaccccgctggacagaagatagaaacagcctgctgaacatgatctgccagcaggtggaggccatcaagaaggagatgcaggagctgaagctgaacagcagcaagagcgccagccgccaccgctggcccacagagaactacggccctgacagcgtgcctgatggctaccagggcagccagaccttccacggggcccccctgactgtggccaccaccggccccagcgtgtactacagccagagccctgcctacaacagccagtacctgctgcggcctgctgccaacgtgacccccaccaagggcagcagcaacacagagttcaagagcaccaaggagggcttcagcatccctgtgtctgcagatggcttcaagtttggcatcagcgagcccggcaaccaggagaagaagcgggagaagcccctggagaatgacaccggcttccaggcccaggacatcagcggcaggaagaagggccggggcgtcatcttcggccagaccagcagcaccttcacctttgctgatgtggccaagagcaccagcggggagggcttccagtttgggaagaaggacctgaacttcaagggcttcagcggggccggggagaagctgttcagcagccgctatggcaagatggccaacaaggccaacaccagcggggactttgagaaggatgatgatgcctacaagacagaggacagtgatgacatccactttgagcctgtggtgcagatgcctgagaaggtggagctggtgactggagaggagggggagaaggtgctgtacagccagggcgtgaagctgttccgctttgatgctgaggtgcggcagtggaaggagcggggcctgggcaacctgaagatcctgaagaatgaggtgaatggcaagctgaggatgctgatgaggcgggagcaggtgctgaaggtgtgtgccaaccactggatcaccaccaccatgaacctgaagcccctgagcggcagtgaccgggcctggatgtggagcgccagtgacttcagtgatggagatgccaagctggagcggctggccgccaagttcaagaccccagagctggccgaggagttcaagcagaagtttgaggagtgccagaggctgctgctggacatccccctgcagaccccccacaagctggtggacaccggccgggccgccaagctgatccagagagctgaggagatgaagagcggcctgaaggacttcaagaccttcctgaccaatgaccagaccaaggtgacagaggaggagaacaagggcagcggcactggagctgctggggccagtgacaccaccatcaagcccaatgctgagaacacaggccccaccctggagtgggacaactatgacctgagagaagatgccctggatgattctgtgagcagcagctctgtgcacgccagccccctggccagcagccctgtgaggaagaacctcttccgctttgatgagagcaccaccggcagcaacttctccttcaagagcgccctgagcctgagcaagagccctgccaagctgaaccagagcggcacctctgtgggcacagatgaggagagcgtggtgacccaggaggaggagagagatggccagtactttgagcctgtggtgcccctgcctgacctggtggaggtgagcagcggggaggagaatgagcaggtggtgttcagccacagagctgagatctaccgctatgacaaggatgtgggccagtggaaggagcggggcatcggggacatcaagatcctgcagaactatgacaacaagcaggtgcgcatcgtgatgagaagagaccaggtgctgaagctgtgtgccaaccaccgcatcaccccagacatgagcctgcagaacatgaagggcacagagcgggtgtgggtgtggacagcctgtgactttgctgatggagagaggaaggtggagcacctggccgtgcgcttcaagctgcaggatgtggccgacagcttcaagaagatctttgatgaggccaagacagcccaggagaaggacagcctcatcaccccccacgtgagccgcagcagcaccccccgggagagcccctgtgggaagattgctgtggccatcctggaggagaccacccgggagaggacagatgtgatccagggagatgatgtggctgatgctgccagcgaggtggaggtgagcagcaccagcgagaccaccaccaaggctgtggtgtccccacccaagtttgtgtttgtgtctgagagcgtgaagaggatcttcagcagcgagaagagcaagccctttgtgtttggaaacagcagcgccaccggcagcctgtttggcttctccttcaatgcccccctgaagagcaacaacagcgagaccagctctgtggcccagagcggcagcgagagcaaggtggagcccaagaagtgtgagctgagcaagaacagcgacatcgagcagagcagtgacagcaaggtgaagaacctgagcgccagcttccccacagaggagagcagcatcaactacaccttcaagaccccagagaaggagccccccctgtggcatgctgagttcaccaaggaggagctggtgcagaagctgcggagcaccaccaagtctgctgaccacctgaatggcctgctgcgggagattgaggccaccaatgctgtgctgatggagcagatcaagctgctgaagtctgagatccggcggctggagaggaaccaggagcgggagaagtctgctgccaacctggagtacctgaagaatgtgctgctgcagttcatcttcctgaagccaggcagcgagcgggagcggctgctgcctgtgatcaacaccatgctgcagctgagccctgaggagaagggcaagctggccgctgtggcccaggatgaggaggagaatgccagccgcagcagcggctag

SEQ ID NO: 167115 - DNA, 2715 bp, synthetic construct
  misc_feature 1..2715: note = Description of Artificial Sequence: Synthetic coding sequence
  source 1..2715: mol_type = other DNA
atgaggaggagcaaggcagatgtggagagatatgtggcctctgtgctgggcctgacccccagcccccggcagaagtccatgaagggcttctactttgccaagctgtactatgaggccaaggagtatgacctggccaagaagtacatctgcacctacatcaacgtgcaggagcgggaccccaaggcccaccgcttcctgggcctgctgtatgagctggaggagaacacagagaaggctgtggagtgctaccgccgctctgtggagctgaaccccacccagaaggacctggtgctgaagattgctgagctgctgtgcaagaatgatgtgacagatggccgggccaagtactgggtggagagagctgccaagctgtttcctggcagccctgccatctacaagctgaaggagcagctgctggactgtgagggggaggatggctggaacaagctgtttgacctgatccagagcgagctgtatgtgcggccagatgatgtgcacgtgaacatccggctggtggagctgtaccgcagcaccaagaggctgaaggatgctgtggcccactgccatgaagctgagagaaatattgccctgcggagcagcctggagtggaacagctgtgtggtgcagaccctgaaggagtacctggagagcctgcagtgcctggagagtgacaagagtgactggcaggccaccaacacagacctgctgctggcctatgccaacctgatgctgctgaccctgagcaccagagatgtgcaggagaaccgggagctgctggagagctttgacagcgccctgcagagcgccaagagcagcctgggcggcaatgatgagctgagcgccaccttcctggagatgaagggccacttctacatgtatgccggcagcctgctgctgaagatgggccagcacggcaacaacgtgcagtggagggccctgtctgagctggccgccctgtgctacctgattgccttccaggtgccccggcccaagatcaagctgcgggagggcaaggccggccagaacctgctggagatgatggcctgtgaccggctgagccagagcggccacatgctgctgagcctgagccggggcaagcaggacttcctgaaggaggtggtggagacctttgccaacaagattggccagagcgccctgtatgatgccctcttcagcagccagagccccaaggacaccagcttcctgggcagtgatgacatcggcaagattgatgtgcaggagcctgagctggaggacctggcccgctatgatgtgggcgccatccgggcccacaacggcagcctgcagcacctgacctggctgggcctgcagtggaacagcctgcctgccctgcccggcatcaggaagtggctgaagcagctgttccaccggctgccccatgagaccagccggctggagaccaatgcccctgagagcatctgcatcctggacctggaggtgttcctgctgggcgtggtgtacaccagccacctgcagctgaaggagaagtgcaacagccaccacagcagctaccagcccctgtgcctgcccttccctgtgtgcaagcagctgtgcacagagcggcagaagtcctggtgggatgctgtgtgcaccctcatccacaggaaggctgtgcccggcaacctggccaagctgcggctgctggtgcagcacgagatcaacaccctgcgggcccaggagaagcacggcctgcagcctgccctgctggtgcactgggccaagtacctgcagaagacaggcagcggcctgaacagcttctacggccagctggagtacatcggccgctctgtgcactactggaagaaggtgctgcccctgctgaagatcatcaagaagaacagcatccctgagcccatcgaccccctcttcaagcacttccacagcgtggacatccaggccagcgagatcgtggagtatgaggaggatgcccacatcacctttgccatgctggatgctgtgaatggaaatattgaagatgctgtgacagcctttgagagcatcaagtctgtggtgtcctactggaacctggccctgatcttccacaggaaggccgaggacattgaaaatgatgccctgagccctgaggagcaggaggagtgcaggaactacctgaccaagacccgggactacctgatcaagatcattgatgatggagacagcaacctgtctgtggtgaagaagctgcctgtgcccctggagagcgtgaagcagatgctgaacagcgtgatgcaggagctggaggactacagcgagggcggccccctgtacaagaatggcagcctgagaaatgctgacagcgagatcaagcacagcacccccagccccaccaagtacagcctgagccccagcaagagctacaagtacagccctgagaccccaccccgctggacagaagatagaaacagcctgctgaacatgatctgccagcaggtggaggccatcaagaaggagatgcaggagctgaagctgaacagcagcaagagcgccagccgccaccgctggcccacagagaactacggccctgacagcgtgcctgatggctaccagggcagccagaccttccacggggcccccctgacagaagctgcccaccgccacttcaccatcgagaagcatggagacagcaagtggatcatctaccgcttcaccaagcagctgtgtggcacagagcgggcccgggccaagatctcctag

SEQ ID NO: 167116 - DNA, 459 bp, synthetic construct
  misc_feature 1..459: note = Description of Artificial Sequence: Synthetic coding sequence
  source 1..459: mol_type = other DNA
atgtggagcggcaccagcccccgctgctgggtgagcccccggcggctggaccgctacatctgcacctacatcaacgtgcaggagcgggaccccaaggcccaccgcttcctgggcctgctgtatgagctggaggagaacacagagaaggctgtggagtgctacagaagatctgtggagctgaaccccacccagaaggacctggtgctgaagattgctgagctgctgtgcaagaatgatgtgacagatggccgggccaagtactgggtggagcgggccgccaagctgtttcctggcagccctgccatctacaagctgaaggagcagctgctggactgtgaaggagaagatggctggaacaagctgtttgacctgatccagagcgagctgtatgtgcggccagatgatgtgcacgtgaacatccggctggtggagctgtaccgcagcaccaagaggctgtag

SEQ ID NO: 167117 - DNA, 2715 bp, synthetic construct; identical to SEQ ID NO: 167115
  misc_feature 1..2715: note = Description of Artificial Sequence: Synthetic coding sequence
  source 1..2715: mol_type = other DNA

SEQ ID NO: 167118 - DNA, 5298 bp, synthetic construct; identical to SEQ ID NO: 167114
  misc_feature 1..5298: note = Description of Artificial Sequence: Synthetic coding sequence
  source 1..5298: mol_type = other DNA

SEQ ID NO: 167119 - DNA, 2715 bp, synthetic construct; identical to SEQ ID NO: 167115
  misc_feature 1..2715: note = Description of Artificial Sequence: Synthetic coding sequence
  source 1..2715: mol_type = other DNA

SEQ ID NO: 167120 - DNA, 5298 bp, synthetic construct
  misc_feature 1..5298: note = Description of Artificial Sequence: Synthetic coding sequence
  source 1..5298: mol_type = other DNA
atgaggaggagcaaggcagatgtggagagatatgtggcctctgtgctgggcctgacccccagcccccggcagaagtccatgaagggcttctactttgccaagctgtactatgaggccaaggagtatgacctggccaagaagtacatctgcacctacatcaacgtgcaggagcgggaccccaaggcccaccgcttcctgggcctgctgtatgagctggaggagaacacagagaaggctgtggagtgctaccgccgctctgtggagctgaaccccacccagaaggacctggtgctgaagattgctgagctgctgtgcaagaatgatgtgacagatggccgggccaagtactgggtggagagagctgccaagctgtttcctggcagccctgccatctacaagctgaaggagcagctgctggactgtgagggggaggatggctggaacaagctgtttgacctgatccagagcgagctgtatgtgcggccagatgatgtgcacgtgaacatccggctggtggagctgtaccgcagcaccaagaggctgaaggatgctgtggcccactgccatgaagctgagagaaatattgccctgcggagcagcctggagtggaacagctgtgtggtgcagaccctgaaggagtacctggagagcctgcagtgcctggagagtgacaagagtgactggagggccaccaacacagacctgctgctggcctatgccaacctgatgctgctgaccctgagcaccagagatgtgcaggagaaccgggagctgctggagagctttgacagcgccctgcagagcgccaagagcagcctgggcggcaatgatgagctgagcgccaccttcctggagatgaagggccacttctacatgtatgccggcagcctgctgctgaagatgggccagcacggcaacaacgtgcagtggagggccctgtctgagctggccgccctgtgctacctgattgccttccaggtgccccggcccaagatcaagctgcgggagggcaaggccggccagaacctgctggagatgatggcctgtgaccggctgagccagagcggccacatgctgctgagcctgagccggggcaagcaggacttcctgaaggaggtggtggagacctttgccaacaagattggccagagcgccctgtatgatgccctcttcagcagccagagccccaaggacaccagcttcctgggcagtgatgacatcggcaagattgatgtgcaggagcctgagctggaggacctggcccgctatgatgtgggcgccatccgggcccacaacggcagcctgcagcacctgacctggctgggcctgcagtggaacagcctgcctgccctgcccggcatcaggaagtggctgaagcagctgttccaccggctgccccatgagaccagccggctggagaccaatgcccctgagagcatctgcatcctggacctggaggtgttcctgctgggcgtggtgtacaccagccacctgcagctgaaggagaagtgcaacagccaccacagcagctaccagcccctgtgcctgcccttccctgtgtgcaagcagctgtgcacagagcggcagaagtcctggtgggatgctgtgtgcaccctcatccacaggaaggctgtgcccggcaacctggccaagctgcggctgctggtgcagcacgagatcaacaccctgcgggcccaggagaagcacggcctgcagcctgccctgctggtgcactgggccaagtacctgcagaagacaggcagcggcctgaacagcttctacggccagctggagtacatcggccgctctgtgcactactggaagaaggtgctgcccctgctgaagatcatcaagaagaacagcatccctgagcccatcgaccccctcttcaagcacttccacagcgtggacatccaggccagcgagatcgtggagtatgaggaggatgcccacatcacctttgccatcctggatgctgtgaatggaaatattgaagatgctgtgacagcctttgagagcatcaagtctgtggtgtcctactggaacctggccctgatcttccacaggaaggccgaggacattgaaaatgatgccctgagccctgaggagcaggaggagtgcaggaactacctgaccaagacccgggactacctgatcaagatcattgatgatggagacagcaacctgtctgtggtgaagaagctgcctgtgcccctggagagcgtgaagcagatgctgaacagcgtgatgcaggagctggaggactacagcgagggcggccccctgtacaagaatggcagcctgagaaatgctgacagcgagatcaagcacagcacccccagccccaccaagtacagcctgagccccagcaagagctacaagtacagccctgagaccccaccccgctggacagaagatagaaacagcctgctgaacatgatctgccagcaggtggaggccatcaagaaggagatgcaggagctgaagctgaacagcagcaagagcgccagccgccaccgctggcccacagagaactacggccctgacagcgtgcctgatggctaccagggcagccagaccttccacggggcccccctgactgtggccaccaccggccccagcgtgtactacagccagagccctgcctacaacagccagtacctgctgcggcctgctgccaacgtgacccccaccaagggcagcagcaacacagagttcaagagcaccaaggagggcttcagcatccctgtgtctgcagatggcttcaagtttggcatcagcgagcccggcaaccaggagaagaagcgggagaagcccctggagaatgacaccggcctgcaggcccaggacatccggggcaggaagaagggccggggcgtcatcttcggccagaccagcagcaccttcacctttgctgatgtggccaagagcaccagcggggagggcttccagtttgggaagaaggacctgaacttcaagggcttcagcggggccggggagaagctgttcagcagccgctatggcaagatggccaacaaggccaacaccagcggggactttgagaaggatgatgatgcctacaagacagaggacagtgatgacatccactttgagcctgtggtgcagatgcctgagaaggtggagctggtgactggagaggagggggagaaggtgctgtacagccagggcgtgaagctgttccgctttgatgctgaggtgcggcagtggaaggagcggggcctgggcaacctgaagatcctgaagaatgaggtgaatggcaagctgaggatgctgatgaggcgggagcaggtgctgaaggtgtgtgccaaccactggatcaccaccaccatgaacctgaagcccctgagcggcagtgaccgggcctggatgtggagcgccagtgacttcagtgatggagatgccaagctggagcggctggccgccaagttcaagaccccagagctggccgaggagttcaagcagaagtttgaggagtgccagaggctgctgctggacatccccctgcagaccccccacaagctggtggacaccggccgggccgccaagctgatccagagagctgaggagatgaagagcggcctgaaggacttcaagaccttcctgaccaatgaccagaccaaggtgacagaggaggagaacaagggcagcggcactggagtggccggggccagtgacaccaccatcaagcccaatgctgagaacacaggccccaccctggagtgggacaactatgacctgagagaagatgccctggatgattctgtgagcagcagctctgtgcacgccagccccctggccagcagccctgtgaggaagaacctcttccgctttgatgagagcaccaccggcagcaacttctccttcaagagcgccctgagcctgagcaagagccctgccaagctgaaccagagcggcacctctgtgggcacagatgaggagagcgtggtgacccaggaggaggagagagatggccagtactttgagcctgtggtgcccctgcctgacctggtggaggtgagcagcggggaggagaatgagcaggtggtgttcagccacagagctgagatctaccgctatgacaaggatgtgggccagtggaaggagcggggcatcggggacatcaagatcctgcagaactatgacaacaagcaggtgcgcatcgtgatgagaagagaccaggtgctgaagctgtgtgccaaccaccgcatcaccccagacatgagcctgcagaacatgaagggcacagagcgggtgtgggtgtggacagcctgtgactttgctgatggagagaggaaggtggagcacctggccgtgcgcttcaagctgcaggatgtggccgacagcttcaagaagatctttgatgaggccaagacagcccaggagaaggacagcctcatcaccccccacgtgagccgcagcagcaccccccgggagagcccctgtgggaagattgctgtggccgtgctggaggagatcacccgggagaggacagatgtgatccagggagatgatgtggctgatgctgccagcgaggtggaggtgagcagcaccagcgagaccaccaccaaggctgtggtgtccccacccaagtttgtgtttgtgtctgagagcgtgaagaggatcttcagcagcgagaagagcaagccctttgcctttggaaacagcagcgccaccggcagcctgtttggcttctccttcaatgcccccctgaagagcaacaacagcgagaccagctctgtggcccagagcggcagcgagagcaaggtggagcccaagaagtgtgagctgagcaagaacagcgacatcgagcagagcagtgacagcaaggtgaagaacctgagcgccagcttccccacagaggagagcagcatcaactacaccttcaagaccccagagaaggagccccccctgtggcatgctgagttcaccaaggaggagctggtgcagaagctgcggagcaccaccaagtctgctgaccacctgaatggcctgctgcgggagattgaggccaccaatgctgtgctgatggagcagatcaagctgctgaagtctgagatccggcggctggagaggaaccaggagcgggagaagtctgctgccaacctggagtacctgaagaatgtgctgctgcagttcatcttcctgaagccaggcagcgagcgggagcggctgctgcctgtgatcaacaccatgctgcagctgagccctgaggagaagggcaagctggccgctgtggcccaggatgaggaggagaaccccagccgcagcagcggctag

SEQ ID NO: 167121 - DNA, 1407 bp, synthetic construct
  misc_feature 1..1407: note = Description of Artificial Sequence: Synthetic coding sequence
  source 1..1407: mol_type = other DNA
atgggcacagccaccccagatggccgggaggaccaggagcggctgtgggtgtctgtggaggatgcccagatgcacacagtgaccatctggctgactgtgcggccagacatgacagtggccagcctgaaggacatggtgttcctggactatggcttcccccctgtgctgcagcagtgggtgattggccagaggctggcccgggaccaggagaccctgcacagccatggagtgcggcagaatggagacagcgcctacctgtacctgctgagcgccaggaacaccagcctgaacccccaggagctgcagcgggagcggcagctgaggatgctggaggacctgggcttcaaggacctgaccctgcagccccggggccccctggagcccggcccccccaagccaggagtgccccaggagcccggccggggccagccagatgctgtgcctgagcccccacctgtgggctggcagtgccccggctgcaccttcatcaacaagcccaccaggcctggctgtgagatgtgctgccgggcccggcctgaggcctaccaggtgcctgccagctaccagccagatgaggaggagcgggcccggctggccggggaggaggaggccctgcggcagtaccagcagaggaagcagcagcagcaggagggcaactacctgcagcacgtgcagctggaccagaggagcctggtgctgaacacagagccagcagaatgtcctgtgtgctacagcgtgctggcccctggagaggccgtggtgctgagagaatgtctgcacaccttctgcagagaatgtctgcagggcaccatccggaacagccaggaggccgaggtgtcctgccccttcatcgacaacacctacagctgcagcggcaagctgctggagcgggagatcaaggccctgctgaccccagaggactaccagcgcttcctggacctgggcatcagcattgctgagaacagaagtgccttctcctaccactgcaagaccccagactgcaagggctggtgcttctttgaagatgatgtgaatgagttcacctgccctgtgtgcttccacgtgaactgcctgctgtgcaaggccatccacgagcagatgaactgcaaggagtaccaggaggacctggccctgcgggcccagaatgatgtggccgcccggcagaccacagagatgctgaaggtgatgctgcagcagggcgaggccatgcgctgcccccagtgccagatcgtggtgcagaagaaggatggctgtgactggatccgctgcaccgtgtgccacacagagatctgctgggtgaccaagggcccccgctggggccctgggggccctggggacaccagcggcggctgccgctgccgggtgaatggcatcccctgccaccccagctgccagaactgccactag

SEQ ID NO: 167122 - DNA, 1533 bp, synthetic construct
  misc_feature 1..1533: note = Description of Artificial Sequence: Synthetic coding sequence
  source 1..1533: mol_type = other DNA
atggatgagaagaccaagaaggccgaggagatggccctgagcctgaccagggctgtggccggaggagatgagcaggtggccatgaagtgtgccatctggctggccgagcagagggtgcccctgtctgtgcagctgaagccagaggtgagccccacccaggacatccggctgtgggtgtctgtggaggatgcccagatgcacacagtgaccatctggctgactgtgcggccagacatgacagtggccagcctgaaggacatggtgttcctggactatggcttcccccctgtgctgcagcagtgggtgattggccagaggctggcccgggaccaggagaccctgcacagccatggagtgcggcagaatggagacagcgcctacctgtacctgctgagcgccaggaacaccagcctgaacccccaggagctgcagcgggagcggcagctgaggatgctggaggacctgggcttcaaggacctgaccctgcagccccggggccccctggagcccggcccccccaagccaggagtgccccaggagcccggccggggccagccagatgctgtgcctgagcccccacctgtgggctggcagtgccccggctgcaccttcatcaacaagcccaccaggcctggctgtgagatgtgctgccgggcccggcctgaggcctaccaggtgcctgccagctaccagccagatgaggaggagcgggcccggctggccggggaggaggaggccctgcggcagtaccagcagaggaagcagcagcagcaggagggcaactacctgcagcacgtgcagctggaccagaggagcctggtgctgaacacagagccagcagaatgtcctgtgtgctacagcgtgctggcccctggagaggccgtggtgctgagagaatgtctgcacaccttctgcagagaatgtctgcagggcaccatccggaacagccaggaggccgaggtgtcctgccccttcatcgacaacacctacagctgcagcggcaagctgctggagcgggagatcaaggccctgctgaccccagaggactaccagcgcttcctggacctgggcatcagcattgctgagaacagaagtgccttctcctaccactgcaagaccccagactgcaagggctggtgcttctttgaagatgatgtgaatgagttcacctgccctgtgtgcttccacgtgaactgcctgctgtgcaaggccatccacgagcagatgaactgcaaggagtaccaggaggacctggccctgcgggcccagaatgatgtggccgcccggcagaccacagagatgctgaaggtgatgctgcagcagggcgaggccatgcgctgcccccagtgccagatcgtggtgcagaagaaggatggctgtgactggatccgctgcaccgtgtgccacacagagatctgctgggtgaccaagggcccccgctggggccctgggggccctggggacaccagcggcggctgccgctgccgggtgaatggcatcccctgccaccccagctgccagaactgccactag

SEQ ID NO: 167123 - DNA, 1011 bp, synthetic construct
  misc_feature 1..1011: note = Description of Artificial Sequence: Synthetic coding sequence
  source 1..1011: mol_type = other DNA
atggatgagaagaccaagaaggccgaggagatggccctgagcctgaccagggctgtggccggaggagatgagcaggtggccatgaagtgtgccatctggctggccgagcagagggtgcccctgtctgtgcagctgaagccagaggtgagccccacccaggacatccggctgtgggtgtctgtggaggatgcccagatgcacacagtgaccatctggctgactgtgcggccagacatgacagtggccagcctgaaggacatggtgttcctggactatggcttcccccctgtgctgcagcagtgggtgattggccagaggctggcccgggaccaggagaccctgcacagccatggagtgcggcagaatggagacagcgcctacctgtacctgctgagcgccaggaacaccagcctgaacccccaggagctgcagcgggagcggcagctgaggatgctggaggacctgggcttcaaggacctgaccctgcagccccggggccccctggagcccggcccccccaagccaggagtgccccaggagcccggccggggccagccagatgctgtgcctgagcccccacctgtgggctggcagtgccccggctgcaccttcatcaacaagcccaccaggcctggctgtgagatgtgctgccgggcccggcctgaggcctaccaggtgcctgccagctaccagccagatgaggaggagcgggcccggctggccggggaggaggaggccctgcggcagtaccagcagaggaagcagcagcagcaggagggcaactacctgcagcacgtgcagctggaccagaggagcctggtgctgaacacagagccagcagaatgtcctgtgtgctacagcgtgctggcccctggagaggccgtggtgctgcggagcgcctgccgggcccccagcgccacagccaggagaagaagaagccctgcccccagcctgaccacccccacccgggcccgggccagctgctggaggggccgcagccgccgctcctag

SEQ ID NO: 167124 - DNA, 792 bp, synthetic construct
  misc_feature 1..792: note = Description of Artificial Sequence: Synthetic coding sequence
  source 1..792: mol_type = other DNA
atggatgagaagaccaagaaggccgaggagatggccctgagcctgaccagggctgtggccggaggagatgagcaggtggccatgaagtgtgccatctggctggccgagcagagggtgcccctgtctgtgcagctgaagccagaggtgagccccacccaggacatccgcagcagaggagagaagacagaggaggtgggggaggtgcgggaggtgcctgaccacggcggcccccgggtgctgccccgggtggacagcaagagctctgtggagcccctggagggccccaactggctgtgggtgtctgtggaggatgcccagatgcacacagtgaccatctggctgactgtgcggccagacatgacagtggccagcctgaaggacatggtgttcctggactatggcttcccccctgtgctgcagcagtgggtgattggccagaggctggcccgggaccaggagaccctgcacagccacggcgtgcggcagaatggagacagcgcctacctgtacctgctgagcgccaggaacaccagcctgaacccccaggagctgcagcgggagcggcagctgaggatgctggaggacctgggcttcaaggacctgaccctgcagccccggggccccctggagcccggcccccccaagccaggagtgccccaggagcccggccggggccagccagatgctgtgcctgagcccccacctgtgggctggcagtgccccggctgcaccttcatcaacaagcccacccggcccggctgtgagatgtgctgccgggcccggcctgagtag

SEQ ID NO: 167125 - DNA, 819 bp, synthetic construct
  misc_feature 1..819: note = Description of Artificial Sequence: Synthetic coding sequence
  source 1..819: mol_type = other DNA
atggatgagaagaccaagaaggccgaggagatggccctgagcctgaccagggctgtggccggaggagatgagcaggtggccatgaagtgtgccatctggctggccgagcagagggtgcccctgtctgtgcagctgaagccagaggtgagccccacccaggacatccggctgtgggtgtctgtggaggatgcccagatgcacacagtgaccatctggctgactgtgcggccagacatgacagtggccagcctgaaggacatggtgttcctggactatggcttcccccctgtgctgcagcagtgggtgattggccagaggctggcccgggaccaggagaccctgcacagccatggagtgcggcagaatggagacagcgcctacctgtacctgctgagcgccaggaacaccagcctgaacccccaggagctgcagcgggagcggcagctgaggatgctggaggacctgggcttcaaggacctgaccctgcagccccggggccccctggagcccggcccccccaagccaggagtgccccaggagcccggccggggccagccagatgctgtgcctgagcccccacctgtgggctggcagtgccccggctgcaccttcatcaacaagcccaccaggcctggctgtgagatgtgctgccgggcccggcctgaggcctaccaggtgcctgccagctaccagccagatgaggaggagcgggcccggctggccggggaggaggaggccctgcggcagtaccagcagggcgtgcctgctggccaccacccccagcagcccggcggcggcggcctgctgcccctgcactag

SEQ ID NO: 167126 - DNA, 354 bp, synthetic construct
  misc_feature 1..354: note = Description of Artificial Sequence: Synthetic coding sequence
  source 1..354: mol_type = other DNA
atggatgagaagaccaagaaggccgaggagatggccctgagcctgaccagggctgtggccggaggagatgagcaggtggccatgaagtgtgccatctggctggccgagcagagggtgcccctgtctgtgcagctgaagccagaggtgagccccacccaggacatccggctgtgggtgtctgtggaggatgcccagatgcacacagtgaccatctggctgactgtgcggccagacatgacagtggccagcctgaaggacatggtgttcctggactatggcttcccccctgtgctgcagcagtgggtgattggccagaggctggcccgggaccaggagaccctgcacagccactag

SEQ ID NO: 167127 - DNA, 768 bp, synthetic construct
  misc_feature 1..768: note = Description of Artificial Sequence: Synthetic coding sequence
  source 1..768: mol_type = other DNA
tgagaaatggccctgagcctgaccagggctgtggccggaggagatgagcaggtggccatgaagtgtgccatctggctggccgagcagagggtgcccctgtctgtgcagctgaagccagaggtgagccccacccaggacatccgcagcagaggagagaagacagaggaggtgggggaggtgcgggaggtgcctgaccacggcggcccccgggtgctgccccgggtggacagcaagagctctgtggagcccctggagggccccaactggctgtgggtgtctgtggaggatgcccagatgcacacagtgaccatctggctgactgtgcggccagacatgacagtggccagcctgaaggacatggtgttcctggactatggcttcccccctgtgctgcagcagtgggtgattggccagaggctggcccgggaccaggagaccctgcacagccacggcgtgcggcagaatggagacagcgcctacctgtacctgctgagcgccaggaacaccagcctgaacccccaggagctgcagcgggagcggcagctgaggatgctggaggacctgggcttcaaggacctgaccctgcagccccggggccccctggagcccggcccccccaagccaggagtgccccaggagcccggccggggccagccagatgctgtgcctgagcccccacctgtgggctggcagtgccccggctgcaccttcatcaacaagcccacccggcccggctgtgagatgtgctgccgggcccggcctgagtag

SEQ ID NO: 167128 - DNA, 819 bp, synthetic construct; identical to SEQ ID NO: 167125
  misc_feature 1..819: note = Description of Artificial Sequence: Synthetic coding sequence
  source 1..819: mol_type = other DNA

SEQ ID NO: 167129 - DNA, 4830 bp, synthetic construct
  misc_feature 1..4830: note = Description of Artificial Sequence: Synthetic coding sequence
  source 1..4830: mol_type = other DNA
atgaacagccctgtggaccccggggcccggcaggccctgaggaagaagcccccagagaggaccccagaggacctgaacaccatctacagctacctgcacggcatggagatcctgagcaacctgcgggagcaccagctgcggctgatgtctgcccgggcccgctatgagcgctacagcggcaaccaggtgctcttctgcagcgagaccatcgcccgctgctggtacatcctgctgagcggctctgtgctggtgaagggctccatggtgctgcccccctgcagctttgggaagcagtttggaggcaagaggggctgtgactgcctggtgctggagcccagcgagatgattgtggtggagaatgccaaggacaatgaagattccatcctgcagcgggagatcccagcccggcagagcagaagacgcttcaggaagatcaactacaagggggagcggcagaccatcacagatgatgtggaggtgaacagctacctgagcctgcctgctgacctgaccaagatgcacctgacagagaacccccacccccaggtgacccacgtgagcagcagccagagcggctgcagcatcgccagtgacagcggcagcagcagcctgagtgacatctaccaggccacagaaagtgaggtgggagatgtggacctgacccggctgcctgagggccctgtggacagtgaagatgatgaggaggaggatgaggagattgacagaacagaccccctgcagggccgggacctggtgcgggagtgcctggagaaggagcctgctgacaagacagatgatgacatcgagcagctgctggagttcatgcaccagctgcctgcctttgccaacatgaccatgtctgtgagaagagagctgtgcagcgtgatgatctttgaggtggtggagcaggccggggccatcatcctggaggatggccaggagctggacagctggtacgtgatcctgaatggaacagtggagatcagccacccagatggcaaggtggagaacctcttcatgggcaacagctttggcatcacccccaccctggacaagcagtacatgcacggcatcgtgaggaccaaggtggatgactgccagtttgtgtgcatcgcccagcaggactactggaggatcctgaaccacgtggagaagaacacccacaaggtggaggaggagggggagatcgtgatggtgcatgagcaccgggagctggacaggagcggcaccaggaagggccacatcgtcatcaaggccaccccagagcggctcatcatgcacctgattgaggagcacagcatcgtggaccccacctacatcgaggacttcctgctgacctaccgcaccttcctggagagccccctggatgtgggcatcaagctgctggagtggttcaagattgacagcctgcgggacaaggtgaccagaattgtgctgctgtgggtgaacaaccacttcaatgactttgaaggagaccctgccatgacccgcttcctggaggagtttgagaagaacctggaggacaccaagatgaatggccacctgcggctgctgaacatcgcctgtgccgccaaggccaagtggaggcaggtggtgctgcagaaggccagccgggagagccccctgcagttcagcctgaatggaggcagcgagaagggcttcggcatctttgtggagggcgtggagcccggcagcaaggctgctgacagcggcctgaagagaggagaccagatcatggaggtgaatggccagaactttgagaacatcaccttcatgaaggctgtggagatcctgaggaacaacacccacctggccctgactgtgaagaccaacatctttgtgttcaaggagctgctcttcagaacagagcaggagaagtctggagtgccccacatccccaagattgctgagaagaagagcaacagacacagcatccagcacgtgcctggggacatcgagcagaccagccaggagaagggcagcaagaaggtgaaggccaacacagtgtctgggggcaggaacaagatcaggaagatcctggacaagacccgcttcagcatcctgccccccaagctgttcagtgatggcggcctgagccagagccaggatgacagcatcgtgggcaccaggcactgccgccacagcctggccatcatgcccatccctggcaccctgagcagcagcagcccagacctgctgcagcccaccacctccatgctggacttcagcaaccccagcgacatcccagaccaggtgatccgggtcttcaaggtggaccagcagagctgctacatcatcatcagcaaggacaccacagccaaggaggtggtgttccacgctgtgcatgaatttggcctgactggagccagtgacacctacagcctgtgtgaggtgtctgtgaccccagagggcgtcatcaagcagaggcggctgcctgaccagttcagcaagctggccgaccgcatccagctgaatggccgctactacctgaagaacaacatggagacagagaccctgtgcagtgatgaagatgcccaggagctggtgaaggagagccagctgtccatgctgcagctgagcaccatcgaggtggccacccagctgtccatgagggactttgacctcttcagaaatattgagcccacagagtacattgatgacctcttcaagctgaacagcaagacaggcaacacccacctgaagagatttgaggacatcgtgaaccaggagaccttctgggtggccagcgagatcctgacagaggccaaccagctgaagaggatgaagatcatcaagcacttcatcaagatcgccctgcactgccgggagtgcaagaacttcaacagcatgtttgccatcatcagcggcctgaacctggcctctgtggcccggctgcggggcacctgggagaagctgcccagcaaatatgagaagcacctgcaggacctgcaggacatctttgaccccagcaggaacatggccaagtacagaaacatcctgagcagccagagcatgcagccccccatcatccccctcttccctgtggtgaagaaggacatgaccttcctgcacgagggcaatgacagcaaggtggatggcctggtgaactttgagaagctgaggatgatcagcaaggagatccggcaggtggtgaggatgaccagcgccaacatggaccctgccatgatgttccggcagaggaagaagcgctggaggagcctgggcagcctgagccagggcagcaccaacagcaacatgctggatgtgcagggcggggcccacaagaagagggcccggcgcagcagcctgctgaatgccaagaagctgtatgaagatgcccagatggccaggaaggtgaagcagtacctgagcagcctggatgtggagacagatgaggagaagttccagatgatgagcctgcagtgggagcccgcctacggcaccctgaccaagaacctgtctgagaagaggtctgccaagagcagcgagatgagccctgtgcccatgaggtctgctggccagaccaccaaggcccacctgcaccagccccaccgggtgtcccaggtgctgcaggtgcctgctgtgaacctgcaccccatcaggaagaagggccagaccaaggaccctgccctgaacaccagcctgccccagaaggtgctgggcaccacagaggagatcagcggcaagaagcacacagaggacaccatctctgtggccagcagcctgcacagcagccccccagccagcccccagggcagcccccacaagggctacaccctcatccccagcgccaagagtgacaacctgagtgacagcagccacagcgagatcagcagccgcagcagcatcgtgagcaactgcagcgtggacagcatgtctgctgccctgcaggatgagcgctgcagcagccaggccctggccgtgcctgagagcactggagccctggagaagacagagcacgccagcggcatcggggaccacagccagcacggccctggctggaccctgctgaagcccagcctcatcaagtgcctggccgtgagcagctctgtgtccaatgaggagatcagccaggagcacatcatcattgaagctgctgacagcggccggggctcctggaccagctgcagcagcagcagccatgacaacttccagagcctgcccaaccccaagtcctgggacttcctgaacagctaccgccacacccacctggatgaccccatcgccgaggtggagcccacagacagcgagccctacagctgcagcaagagctgcagcaggacctgtggccagtgcaagggcagcctggagaggaagtcctggaccagcagcagcagcctgagtgacacctatgagcccaactatggaacagtgaagcagagggtgctggagagcaccccagctgagagcagcgagggcctggaccccaaggatgccacagatcctgtgtacaagacagtgaccagcagcacagagaagggcctcatcgtgtactgtgtgaccagccccaagaaggatgaccgctaccgggagcccccacccaccccacctggctacctgggcatcagcctggccgacctgaaggagggcccccacacccacctgaagcccccagactacagcgtggccgtgcagaggagcaagatgatgcacaacagcctgagccggctgcccccagccagcctgagcagcaacctggtggcctgtgtgcccagcaagatcgtgacccagccccagaggcacaacctgcagcccttccaccccaagctgggagatgtgacagatgctgacagcgaggctgatgaaaatgagcaggtgtctgctgtgtag

SEQ ID NO: 167130 - DNA, 4530 bp, synthetic construct
  misc_feature 1..4530: note = Description of Artificial Sequence: Synthetic coding sequence
  source 1..4530: mol_type = other DNA
atgaacagccctgtggaccccggggcccggcaggccctgaggaagaagcccccagagaggaccccagaggacctgaacaccatctacagctacctgcacggcatggagatcctgagcaacctgcgggagcaccagctgcggctgatgtctgcccgggcccgctatgagcgctacagcggcaaccaggtgctcttctgcagcgagaccatcgcccgctgctggtacatcctgctgagcggctctgtgctggtgaagggctccatggtgctgcccccctgcagctttgggaagcagtttggaggcaagaggggctgtgactgcctggtgctggagcccagcgagatgattgtggtggagaatgccaaggacaatgaagattccatcctgcagcgggagatcccagcccggcagagcagaagacgcttcaggaagatcaactacaagggggagcggcagaccatcacagatgatgtggaggtgaacagctacctgagcctgcctgctgacctgaccaagatgcacctgacagagaacccccacccccaggtgacccacgtgagcagcagccagagcggctgcagcatcgccagtgacagcggcagcagcagcctgagtgacatctaccaggccacagaaagtgaggtgggagatgtggacctgacccggctgcctgagggccctgtggacagtgaagatgatgaggaggaggatgaggagattgacagaacagaccccctgcagggccgggacctggtgcgggagtgcctggagaaggagcctgctgacaagacagatgatgacatcgagcagctgctggagttcatgcaccagctgcctgcctttgccaacatgaccatgtctgtgagaagagagctgtgcagcgtgatgatctttgaggtggtggagcaggccggggccatcatcctggaggatggccaggagctggacagctggtacgtgatcctgaatggaacagtggagatcagccacccagatggcaaggtggagaacctcttcatgggcaacagctttggcatcacccccaccctggacaagcagtacatgcacggcatcgtgaggaccaaggtggatgactgccagtttgtgtgcatcgcccagcaggactactggaggatcctgaaccacgtggagaagaacacccacaaggtggaggaggagggggagatcgtgatggtgcatgagcaccgggagctggacaggagcggcaccaggaagggccacatcgtcatcaaggccaccccagagcggctcatcatgcacctgattgaggagcacagcatcgtggaccccacctacatcgaggacttcctgctgacctaccgcaccttcctggagagccccctggatgtgggcatcaagctgctggagtggttcaagattgacagcctgcgggacaaggtgaccagaattgtgctgctgtgggtgaacaaccacttcaatgactttgaaggagaccctgccatgacccgcttcctggaggagtttgagaagaacctggaggacaccaagatgaatggccacctgcggctgctgaacatcgcctgtgccgccaaggccaagtggaggcaggtggtgctgcagaaggccagccgggagagccccctgcagttcagcctgaatggaggcagcgagaagggcttcggcatctttgtggagggcgtggagcccggcagcaaggctgctgacagcggcctgaagagaggagaccagatcatggaggtgaatggccagaactttgagaacatcaccttcatgaaggctgtggagatcctgaggaacaacacccacctggccctgactgtgaagaccaacatctttgtgttcaaggagctgctcttcagaacagagcaggagaagtctggagtgccccacatccccaagattgctgagaagaagagcaacagacacagcatccagcacgtgcctggggacatcgagcagaccagccaggagaagggcagcaagaaggtgaaggccaacacagtgtctgggggcaggaacaagatcaggaagatcctggacaagacccgcttcagcatcctgccccccaagctgttcagtgatggcggcctgagccagagccaggatgacagcatcgtgggcaccaggcactgccgccacagcctggccatcatgcccatccctggcaccctgagcagcagcagcccagacctgctgcagcccaccacctccatgctggacttcagcaaccccagcgctgtgggcttctactacatcccagaccaggtgatccgggtcttcaaggtggaccagcagagctgctacatcatcatcagcaaggacaccacagccaaggaggtggtgttccacgctgtgcatgaatttggcctgaccggggccagtgacacctacagcctgtgtgaggtgtctgtgaccccagagggcgtcatcaagcagaggcggctgcctgaccagttcagcaagctggccgaccgcatccagctgaatggccgctactacctgaagaacaacatggagacagagaccctgtgcagtgatgaagatgcccaggagctggtgaaggagagccagctgtccatgctgcagctgagcaccatcgaggtggccacccagctgtccatgagggactttgacctcttcaggaacatcgagcccacagagtacattgatgacctcttcaagctgaacagcaagacaggcaacacccacctgaagagatttgaagatattgtgaaccaggagaccttctgggtggccagcgagatcctgacagaggccaaccagctgaagaggatgaagatcatcaagcacttcatcaagatcgccctgcactgccgggagtgcaagaacttcaacagcatgtttgccatcatcagcggcctgaacctggcctctgtggcccggctgcggggcacctgggagaagctgcccagcaaatatgagaagcacctgcaggacctgcaggacatctttgaccccagcaggaacatggccaagtacagaaacatcctgagcagccagagcatgcagccccccatcatccccctcttccctgtggtgaagaaggacatgaccttcctgcacgagggcaatgacagcaaggtggatggcctggtgaactttgagaagctgaggatgatcagcaaggagatccggcaggtggtgaggatgaccagcgccaacatggaccctgccatgatgttccggcagaggaagaagcgctggaggagcctgggcagcctgagccagggcagcaccaacagcaacatgctggatgtgcagggcggggcccacaagaagagggcccggcgcagcagcctgctgaatgccaagaagctgtatgaagatgcccagatggccaggaaggtgaagcagtacctgagcagcctggatgtggagacagatgaggagaagttccagatgatgagcctgcagtgggagcccgcctacggcaccctgaccaagaacctgtctgagaagaggtctgccaagagcagcgagatgagccctgtgcccatgaggtctgctggccagaccaccaaggcccacctgcaccagccccaccgggtgtcccaggtgctgcaggtgcctgctgtgaacctgcaccccatcaggaagaagggccagaccaaggaccctgccctgaacaccagcctgccccagaaggtgctgggcaccacagaggagatcagcggcaagaagcacacagaggacaccatctctgtggccagcagcctgcacagcagccccccagccagcccccagggcagcccccacaagggctacaccctcatccccagcgccaagagtgacaacctgagtgacagcagccacagcgagatcagcagccgcagcagcatcgtgagcaactgcagcgtggacagcatgtctgctgccctgcaggatgagcgctgcagcagccaggccctggccgtgcctgagagcactggagccctggagaagacagaacatgccagcggcattggagaccacagccagcacggccctggctggaccctgctgaagcccagcctcatcaagtgcctggccgtgagcagctctgtgtccaatgaggagatcagccaggagcacatcatcatcgaggccgctgacagcggccggggctcctggaccagctgcagcagcagcagccatgacaacttccagagcctgcccaaccccaagtcctgggacttcctgaacagctaccgccacacccacctggatgaccccatcgccgaggtggagcccacagattctgagccctacagctgcagcaagagctgcagcaggacctgtggccagtgcaagggcagcctggagaggaagtcctggaccagcagcagcagcctgagtgacacctatgagcccaactacggcaccgtgaagcagagggtgctggagagcaccccagctgagagcagcgagggcctggaccccaaggatgccacagatcctgtgtacaagacagtgaccagcagcacagagaagggcctgattgaaaatgagcaggtgtctgctgtgtag

SEQ ID NO: 167131 - DNA, 4530 bp, synthetic construct
  misc_feature 1..4530: note = Description of Artificial Sequence: Synthetic coding sequence
  source 1..4530: mol_type = other DNA
atgaacagccctgtggaccccggggcccggcaggccctgaggaagaagcccccagagaggaccccagaggacctgaacaccatctacagctacctgcacggcatggagatcctgagcaacctgcgggagcaccagctgcggctgatgtctgcccgggcccgctatgagcgctacagcggcaaccaggtgctcttctgcagcgagaccatcgcccgctgctggtacatcctgctgagcggctctgtgctggtgaagggctccatggtgctgcccccctgcagctttgggaagcagtttggaggcaagaggggctgtgactgcctggtgctggagcccagcgagatgattgtggtggagaatgccaaggacaatgaagattccatcctgcagcgggagatcccagcccggcagagcagaagacgcttcaggaagatcaactacaagggggagcggcagaccatcacagatgatgtggaggtgaacagctacctgagcctgcctgctgacctgaccaagatgcacctgacagagaacccccacccccaggtgacccacgtgagcagcagccagagcggctgcagcatcgccagtgacagcggcagcagcagcctgagtgacatctaccaggccacagaaagtgaggtgggagatgtggacctgacccggctgcctgagggccctgtggacagtgaagatgatgaggaggaggatgaggagattgacagaacagaccccctgcagggccgggacctggtgcgggagtgcctggagaaggagcctgctgacaagacagatgatgacatcgagcagctgctggagttcatgcaccagctgcctgcctttgccaacatgaccatgtctgtgagaagagagctgtgcagcgtgatgatctttgaggtggtggagcaggccggggccatcatcctggaggatggccaggagctggacagctggtacgtgatcctgaatggaacagtggagatcagccacccagatggcaaggtggagaacctcttcatgggcaacagctttggcatcacccccaccctggacaagcagtacatgcacggcatcgtgaggaccaaggtggatgactgccagtttgtgtgcatcgcccagcaggactactggaggatcctgaaccacgtggagaagaacacccacaaggtggaggaggagggggagatcgtgatggtgcatgagcaccgggagctggacaggagcggcaccaggaagggccacatcgtcatcaaggccaccccagagcggctcatcatgcacctgattgaggagcacagcatcgtggaccccacctacatcgaggacttcctgctgacctaccgcaccttcctggagagccccctggatgtgggcatcaagctgctggagtggttcaagattgacagcctgcgggacaaggtgaccagaattgtgctgctgtgggtgaacaaccacttcaatgactttgaaggagaccctgccatgacccgcttcctggaggagtttgagaagaacctggaggacaccaagatgaatggccacctgcggctgctgaacatcgcctgtgccgccaaggccaagtggaggcaggtggtgctgcagaaggccagccgggagagccccctgcagttcagcctgaatggaggcagcgagaagggcttcggcatctttgtggagggcgtggagcccggcagcaaggctgctgacagcggcctgaagagaggagaccagatcatggaggtgaatggccagaactttgagaacatcaccttcatgaaggctgtggagatcctgaggaacaacacccacctggccctgactgtgaagaccaacatctttgtgttcaaggagctgctcttcagaacagagcaggagaagtctggagtgccccacatccccaagattgctgagaagaagagcaacagacacagcatccagcacgtgcctggggacatcgagcagaccagccaggagaagggcagcaagaaggtgaaggccaacacagtgtctgggggcaggaacaagatcaggaagatcctggacaagacccgcttcagcatcctgccccccaagctgttcagtgatggcggcctgagccagagccaggatgacagcatcgtgggcaccaggcactgccgccacagcctggccatcatgcccatccctggcaccctgagcagcagcagcccagacctgctgcagcccaccacctccatgctggacttcagcaaccccagcgccaagggcttcaagaacatcccagaccaggtgatccgggtcttcaaggtggaccagcagagctgctacatcatcatcagcaaggacaccacagccaaggaggtggtgttccacgctgtgcatgaatttggcctgaccggggccagtgacacctacagcctgtgtgaggtgtctgtgaccccagagggcgtcatcaagcagaggcggctgcctgaccagttcagcaagctggccgaccgcatccagctgaatggccgctactacctgaagaacaacatggagacagagaccctgtgcagtgatgaagatgcccaggagctggtgaaggagagccagctgtccatgctgcagctgagcaccatcgaggtggccacccagctgtccatgagggactttgacctcttcaggaacatcgagcccacagagtacattgatgacctcttcaagctgaacagcaagacaggcaacacccacctgaagagatttgaagatattgtgaaccaggagaccttctgggtggccagcgagatcctgacagaggccaaccagctgaagaggatgaagatcatcaagcacttcatcaagatcgccctgcactgccgggagtgcaagaacttcaacagcatgtttgccatcatcagcggcctgaacctggcctctgtggcccggctgcggggcacctgggagaagctgcccagcaaatatgagaagcacctgcaggacctgcaggacatctttgaccccagcaggaacatggccaagtacagaaacatcctgagcagccagagcatgcagccccccatcatccccctcttccctgtggtgaagaaggacatgaccttcctgcacgagggcaatgacagcaaggtggatggcctggtgaactttgagaagctgaggatgatcagcaaggagatccggcaggtggtgaggatgaccagcgccaacatggaccctgccatgatgttccggcagaggaagaagcgctggaggagcctgggcagcctgagccagggcagcaccaacagcaacatgctggatgtgcagggcggggcccacaagaagagggcccggcgcagcagcctgctgaatgccaagaagctgtatgaagatgcccagatggccaggaaggtgaagcagtacctgagcagcctggatgtggagacagatgaggagaagttccagatgatgagcctgcagtgggagcccgcctacggcaccctgaccaagaacctgtctgagaagaggtctgccaagagcagcgagatgagccctgtgcccatgaggtctgctggccagaccaccaaggcccacctgcaccagccccaccgggtgtcccaggtgctgcaggtgcctgctgtgaacctgcaccccatcaggaagaagggccagaccaaggaccctgccctgaacaccagcctgccccagaaggtgctgggcaccacagaggagatcagcggcaagaagcacacagaggacaccatctctgtggccagcagcctgcacagcagccccccagccagcccccagggcagcccccacaagggctacaccctcatccccagcgccaagagtgacaacctgagtgacagcagccacagcgagatcagcagccgcagcagcatcgtgagcaactgcagcgtggacagcatgtctgctgccctgcaggatgagcgctgcagcagccaggccctggccgtgcctgagagcactggagccctggagaagacagaacatgccagcggcattggagaccacagccagcacggccctggctggaccctgctgaagcccagcctcatcaagtgcctggccgtgagcagctctgtgtccaatgaggagatcagccaggagcacatcatcatcgaggccgctgacagcggccggggctcctggaccagctgcagcagcagcagccatgacaacttccagagcctgcccaaccccaagtcctgggacttcctgaacagctaccgccacacccacctggatgaccccatcgccgaggtggagcccacagattctgagccctacagctgcagcaagagctgcagcaggacctgtggccagtgcaagggcagcctggagaggaagtcctggaccagcagcagcagcctgagtgacacctatgagcccaactacggcaccgtgaagcagagggtgctggagagcaccccagctgagagcagcgagggcctggaccccaaggatgccacagatcctgtgtacaagacagtgaccagcagcacagagaagggcctgattggcaagaagcagaccagctacttctag

SEQ ID NO: 167132 - DNA, 4515 bp, synthetic construct
  misc_feature 1..4515: note = Description of Artificial Sequence: Synthetic coding sequence
  source 1..4515: mol_type = other DNA
atgaacagccctgtggaccccggggcccggcaggccctgaggaagaagcccccagagaggaccccagaggacctgaacaccatctacagctacctgcacggcatggagatcctgagcaacctgcgggagcaccagctgcggctgatgtctgcccgggcccgctatgagcgctacagcggcaaccaggtgctcttctgcagcgagaccatcgcccgctgctggtacatcctgctgagcggctctgtgctggtgaagggctccatggtgctgcccccctgcagctttgggaagcagtttggaggcaagaggggctgtgactgcctggtgctggagcccagcgagatgattgtggtggagaatgccaaggacaatgaagattccatcctgcagcgggagatcccagcccggcagagcagaagacgcttcaggaagatcaactacaagggggagcggcagaccatcacagatgatgtggaggtgaacagctacctgagcctgcctgctgacctgaccaagatgcacctgacagagaacccccacccccaggtgacccacgtgagcagcagccagagcggctgcagcatcgccagtgacagcggcagcagcagcctgagtgacatctaccaggccacagaaagtgaggtgggagatgtggacctgacccggctgcctgagggccctgtggacagtgaagatgatgaggaggaggatgaggagattgacagaacagaccccctgcagggccgggacctggtgcgggagtgcctggagaaggagcctgctgacaagacagatgatgacatcgagcagctgctggagttcatgcaccagctgcctgcctttgccaacatgaccatgtctgtgagaagagagctgtgcagcgtgatgatctttgaggtggtggagcaggccggggccatcatcctggaggatggccaggagctggacagctggtacgtgatcctgaatggaacagtggagatcagccacccagatggcaaggtggagaacctcttcatgggcaacagctttggcatcacccccaccctggacaagcagtacatgcacggcatcgtgaggaccaaggtggatgactgccagtttgtgtgcatcgcccagcaggactactggaggatcctgaaccacgtggagaagaacacccacaaggtggaggaggagggggagatcgtgatggtgcatgagcaccgggagctggacaggagcggcaccaggaagggccacatcgtcatcaaggccaccccagagcggctcatcatgcacctgattgaggagcacagcatcgtggaccccacctacatcgaggacttcctgctgacctaccgcaccttcctggagagccccctggatgtgggcatcaagctgctggagtggttcaagattgacagcctgcgggacaaggtgaccagaattgtgctgctgtgggtgaacaaccacttcaatgactttgaaggagaccctgccatgacccgcttcctggaggagtttgagaagaacctggaggacaccaagatgaatggccacctgcggctgctgaacatcgcctgtgccgccaaggccaagtggaggcaggtggtgctgcagaaggccagccgggagagccccctgcagttcagcctgaatggaggcagcgagaagggcttcggcatctttgtggagggcgtggagcccggcagcaaggctgctgacagcggcctgaagagaggagaccagatcatggaggtgaatggccagaactttgagaacatcaccttcatgaaggctgtggagatcctgaggaacaacacccacctggccctgactgtgaagaccaacatctttgtgttcaaggagctgctcttcagaacagagcaggagaagtctggagtgccccacatccccaagattgctgagaagaagagcaacagacacagcatccagcacgtgcctggggacatcgagcagaccagccaggagaagggcagcaagaaggtgaaggccaacacagtgtctgggggcaggaacaagatcaggaagatcctggacaagacccgcttcagcatcctgccccccaagctgttcagtgatggcggcctgagccagagccaggatgacagcatcgtgggcaccaggcactgccgccacagcctggccatcatgcccatccctggcaccctgagcagcagcagcccagacctgctgcagcccaccacctccatgctggacttcagcaaccccagcgacatcccagaccaggtgatccgggtcttcaaggtggaccagcagagctgctacatcatcatcagcaaggacaccacagccaaggaggtggtgttccacgctgtgcatgaatttggcctgactggagccagtgacacctacagcctgtgtgaggtgtctgtgaccccagagggcgtcatcaagcagaggcggctgcctgaccagttcagcaagctggccgaccgcatccagctgaatggccgctactacctgaagaacaacatggagacagagaccctgtgcagtgatgaagatgcccaggagctggtgaaggagagccagctgtccatgctgcagctgagcaccatcgaggtggccacccagctgtccatgagggactttgacctcttcagaaatattgagcccacagagtacattgatgacctcttcaagctgaacagcaagacaggcaacacccacctgaagagatttgaggacatcgtgaaccaggagaccttctgggtggccagcgagatcctgacagaggccaaccagctgaagaggatgaagatcatcaagcacttcatcaagatcgccctgcactgccgggagtgcaagaacttcaacagcatgtttgccatcatcagcggcctgaacctggcctctgtggcccggctgcggggcacctgggagaagctgcccagcaaatatgagaagcacctgcaggacctgcaggacatctttgaccccagcaggaacatggccaagtacagaaacatcctgagcagccagagcatgcagccccccatcatccccctcttccctgtggtgaagaaggacatgaccttcctgcacgagggcaatgacagcaaggtggatggcctggtgaactttgagaagctgaggatgatcagcaaggagatccggcaggtggtgaggatgaccagcgccaacatggaccctgccatgatgttccggcagaggaagaagcgctggaggagcctgggcagcctgagccagggcagcaccaacagcaacatgctggatgtgcagggcggggcccacaagaagagggcccggcgcagcagcctgctgaatgccaagaagctgtatgaagatgcccagatggccaggaaggtgaagcagtacctgagcagcctggatgtggagacagatgaggagaagttccagatgatgagcctgcagtgggagcccgcctacggcaccctgaccaagaacctgtctgagaagaggtctgccaagagcagcgagatgagccctgtgcccatgaggtctgctggccagaccaccaaggcccacctgcaccagccccaccgggtgtcccaggtgctgcaggtgcctgctgtgaacctgcaccccatcaggaagaagggccagaccaaggaccctgccctgaacaccagcctgccccagaaggtgctgggcaccacagaggagatcagcggcaagaagcacacagaggacaccatctctgtggccagcagcctgcacagcagccccccagccagcccccagggcagcccccacaagggctacaccctcatccccagcgccaagagtgacaacctgagtgacagcagccacagcgagatcagcagccgcagcagcatcgtgagcaactgcagcgtggacagcatgtctgctgccctgcaggatgagcgctgcagcagccaggccctggccgtgcctgagagcactggagccctggagaagacagagcacgccagcggcatcggggaccacagccagcacggccctggctggaccctgctgaagcccagcctcatcaagtgcctggccgtgagcagctctgtgtccaatgaggagatcagccaggagcacatcatcattgaagctgctgacagcggccggggctcctggaccagctgcagcagcagcagccatgacaacttccagagcctgcccaaccccaagtcctgggacttcctgaacagctaccgccacacccacctggatgaccccatcgccgaggtggagcccacagacagcgagccctacagctgcagcaagagctgcagcaggacctgtggccagtgcaagggcagcctggagaggaagtcctggaccagcagcagcagcctgagtgacacctatgagcccaactatggaacagtgaagcagagggtgctggagagcaccccagctgagagcagcgagggcctggaccccaaggatgccacagatcctgtgtacaagacagtgaccagcagcacagagaagggcctgattgaaaatgagcaggtgtctgctgtgtag

SEQ ID NO: 167133 - DNA, 4806 bp, synthetic construct
  misc_feature 1..4806: note = Description of Artificial Sequence: Synthetic coding sequence
  source 1..4806: mol_type = other DNA
atgaacagccctgtggaccccggggcccggcaggccctgaggaagaagcccccagagaggaccccagaggacctgaacaccatctacagctacctgcacggcatggagatcctgagcaacctgcgggagcaccagctgcggctgatgtctgcccgggcccgctatgagcgctacagcggcaaccaggtgctcttctgcagcgagaccatcgcccgctgctggtacatcctgctgagcggctctgtgctggtgaagggctccatggtgctgcccccctgcagctttgggaagcagtttggaggcaagaggggctgtgactgcctggtgctggagcccagcgagatgattgtggtggagaatgccaaggacaatgaagattccatcctgcagcgggagatcccagcccggcagagcagaagacgcttcaggaagatcaactacaagggggagcggcagaccatcacagatgatgtggaggtgaacagctacctgagcctgcctgctgacctgaccaagatgcacctgacagagaacccccacccccaggtgacccacgtgagcagcagccagagcggctgcagcatcgccagtgacagcggcagcagcagcctgagtgacatctaccaggccacagaaagtgaggtgggagatgtggacctgacccggctgcctgagggccctgtggacagtgaagatgatgaggaggaggatgaggagattgacagaacagaccccctgcagggccgggacctggtgcgggagtgcctggagaaggagcctgctgacaagacagatgatgacatcgagcagctgctggagttcatgcaccagctgcctgcctttgccaacatgaccatgtctgtgagaagagagctgtgcagcgtgatgatctttgaggtggtggagcaggccggggccatcatcctggaggatggccaggagctggacagctggtacgtgatcctgaatggaacagtggagatcagccacccagatggcaaggtggagaacctcttcatgggcaacagctttggcatcacccccaccctggacaagcagtacatgcacggcatcgtgaggaccaaggtggatgactgccagtttgtgtgcatcgcccagcaggactactggaggatcctgaaccacgtggagaagaacacccacaaggtggaggaggagggggagatcgtgatggtgcatgagcaccgggagctggacaggagcggcaccaggaagggccacatcgtcatcaaggccaccccagagcggctcatcatgcacctgattgaggagcacagcatcgtggaccccacctacatcgaggacttcctgctgacctaccgcaccttcctggagagccccctggatgtgggcatcaagctgctggagtggttcaagattgacagcctgcgggacaaggtgaccagaattgtgctgctgtgggtgaacaaccacttcaatgactttgaaggagaccctgccatgacccgcttcctggaggagtttgagaagaacctggaggacaccaagatgaatggccacctgcggctgctgaacatcgcctgtgccgccaaggccaagtggaggcaggtggtgctgcagaaggccagccgggagagccccctgcagttcagcctgaatggaggcagcgagaagggcttcggcatctttgtggagggcgtggagcccggcagcaaggctgctgacagcggcctgaagagaggagaccagatcatggaggtgaatggccagaactttgagaacatcaccttcatgaaggctgtggagatcctgaggaacaacacccacctggccctgactgtgaagaccaacatctttgtgttcaaggagctgctcttcagaacagagcaggagaagtctggagtgccccacatccccaagattgctgagaagaagagcaacagacacagcatccagcacgtgcctggggacatcgagcagaccagccaggagaagggcagcaagaaggtgaaggccaacacagtgtctgggggcaggaacaagatcaggaagatcctggacaagacccgcttcagcatcctgccccccaagctgttcagtgatggcggcctgagccagagccaggatgacagcatcgtgggcaccaggcactgccgccacagcctggccatcatgcccatccctggcaccctgagcagcagcagcccagacctgctgcagcccaccacctccatgctggacttcagcaaccccagcgacatcccagaccaggtgatccgggtcttcaaggtggaccagcagagctgctacatcatcatcagcaaggacaccacagccaaggaggtggtgttccacgctgtgcatgaatttggcctgactggagccagtgacacctacagcctgtgtgaggtgtctgtgaccccagagggcgtcatcaagcagaggcggctgcctgaccagttcagcaagctggccgaccgcatccagctgaatggccgctactacctgaagaacaacatggagacagagaccctgtgcagtgatgaagatgcccaggagctggtgaaggagagccagctgtccatgctgcagctgagcaccatcgaggtggccacccagctgtccatgagggactttgacctcttcagaaatattgagcccacagagtacattgatgacctcttcaagctgaacagcaagacaggcaacacccacctgaagagatttgaggacatcgtgaaccaggagaccttctgggtggccagcgagatcctgacagaggccaaccagctgaagaggatgaagatcatcaagcacttcatcaagatcgccctgcactgccgggagtgcaagaacttcaacagcatgtttgccatcatcagcggcctgaacctggcctctgtggcccggctgcggggcacctgggagaagctgcccagcaaatatgagaagcacctgcaggacctgcaggacatctttgaccccagcaggaacatggccaagtacagaaacatcctgagcagccagagcatgcagccccccatcatccccctcttccctgtggtgaagaaggacatgaccttcctgcacgagggcaatgacagcaaggtggatggcctggtgaactttgagaagctgaggatgatcagcaaggagatccggcaggtggtgaggatgaccagcgccaacatggaccctgccatgatgttccggcagaggagcctgagccagggcagcaccaacagcaacatgctggatgtgcagggcggggcccacaagaagagggcccggcgcagcagcctgctgaatgccaagaagctgtatgaagatgcccagatggccaggaaggtgaagcagtacctgagcagcctggatgtggagacagatgaggagaagttccagatgatgagcctgcagtgggagcccgcctacggcaccctgaccaagaacctgtctgagaagaggtctgccaagagcagcgagatgagccctgtgcccatgaggtctgctggccagaccaccaaggcccacctgcaccagccccaccgggtgtcccaggtgctgcaggtgcctgctgtgaacctgcaccccatcaggaagaagggccagaccaaggaccctgccctgaacaccagcctgccccagaaggtgctgggcaccacagaggagatcagcggcaagaagcacacagaggacaccatctctgtggccagcagcctgcacagcagccccccagccagcccccagggcagcccccacaagggctacaccctcatccccagcgccaagagtgacaacctgagtgacagcagccacagcgagatcagcagccgcagcagcatcgtgagcaactgcagcgtggacagcatgtctgctgccctgcaggatgagcgctgcagcagccaggccctggccgtgcctgagagcactggagccctggagaagacagagcacgccagcggcatcggggaccacagccagcacggccctggctggaccctgctgaagcccagcctcatcaagtgcctggccgtgagcagctctgtgtccaatgaggagatcagccaggagcacatcatcattgaagctgctgacagcggccggggctcctggaccagctgcagcagcagcagccatgacaacttccagagcctgcccaaccccaagtcctgggacttcctgaacagctaccgccacacccacctggatgaccccatcgccgaggtggagcccacagacagcgagccctacagctgcagcaagagctgcagcaggacctgtggccagtgcaagggcagcctggagaggaagtcctggaccagcagcagcagcctgagtgacacctatgagcccaactatggaacagtgaagcagagggtgctggagagcaccccagctgagagcagcgagggcctggaccccaaggatgccacagatcctgtgtacaagacagtgaccagcagcacagagaagggcctcatcgtgtactgtgtgaccagccccaagaaggatgaccgctaccgggagcccccacccaccccacctggctacctgggcatcagcctggccgacctgaaggagggcccccacacccacctgaagcccccagactacagcgtggccgtgcagaggagcaagatgatgcacaacagcctgagccggctgcccccagccagcctgagcagcaacctggtggcctgtgtgcccagcaagatcgtgacccagccccagaggcacaacctgcagcccttccaccccaagctgggagatgtgacagatgctgacagcgaggctgatgaaaatgagcaggtgtctgctgtgtag

SEQ ID NO: 167134 - DNA, 3615 bp, synthetic construct
  misc_feature 1..3615: note = Description of Artificial Sequence: Synthetic coding sequence
  source 1..3615: mol_type = other DNA
atgaacagccctgtggaccccggggcccggcaggccctgaggaagaagcccccagagaggaccccagaggacctgaacaccatctacagctacctgcacggcatggagatcctgagcaacctgcgggagcaccagctgcggctgatgtctgcccgggcccgctatgagcgctacagcggcaaccaggtgctcttctgcagcgagaccatcgcccgctgctggtacatcctgctgagcggctctgtgctggtgaagggctccatggtgctgcccccctgcagctttgggaagcagtttggaggcaagaggggctgtgactgcctggtgctggagcccagcgagatgattgtggtggagaatgccaaggacaatgaagattccatcctgcagcgggagatcccagcccggcagagcagaagacgcttcaggaagatcaactacaagggggagcggcagaccatcacagatgatgtggaggtgaacagctacctgagcctgcctgctgacctgaccaagatgcacctgacagagaacccccacccccaggtgacccacgtgagcagcagccagagcggctgcagcatcgccagtgacagcggcagcagcagcctgagtgacatctaccaggccacagaaagtgaggtgggagatgtggacctgacccggctgcctgagggccctgtggacagtgaagatgatgaggaggaggatgaggagattgacagaacagaccccctgcagggccgggacctggtgcgggagtgcctggagaaggagcctgctgacaagacagatgatgacatcgagcagctgctggagttcatgcaccagctgcctgcctttgccaacatgaccatgtctgtgagaagagagctgtgcagcgtgatgatctttgaggtggtggagcaggccggggccatcatcctggaggatggccaggagctggacagctggtacgtgatcctgaatggaacagtggagatcagccacccagatggcaaggtggagaacctcttcatgggcaacagctttggcatcacccccaccctggacaagcagtacatgcacggcatcgtgaggaccaaggtggatgactgccagtttgtgtgcatcgcccagcaggactactggaggatcctgaaccacgtggagaagaacacccacaaggtggaggaggagggggagatcgtgatggtgcatgagcaccgggagctggacaggagcggcaccaggaagggccacatcgtcatcaaggccaccccagagcggctcatcatgcacctgattgaggagcacagcatcgtggaccccacctacatcgaggacttcctgctgacctaccgcaccttcctggagagccccctggatgtgggcatcaagctgctggagtggttcaagattgacagcctgcgggacaaggtgaccagaattgtgctgctgtgggtgaacaaccacttcaatgactttgaaggagaccctgccatgacccgcttcctggaggagtttgagaagaacctggaggacaccaagatgaatggccacctgcggctgctgaacatcgcctgtgccgccaaggccaagtggaggcaggtggtgctgcagaaggccagccgggagagccccctgcagttcagcctgaatggaggcagcgagaagggcttcggcatctttgtggagggcgtggagcccggcagcaaggctgctgacagcggcctgaagagaggagaccagatcatggaggtgaatggccagaactttgagaacatcaccttcatgaaggctgtggagatcctgaggaacaacacccacctggccctgactgtgaagaccaacatctttgtgttcaaggagctgctcttcagaacagagcaggagaagtctggagtgccccacatccccaagattgctgagaagaagagcaacagacacagcatccagcacgtgcctggggacatcgagcagaccagccaggagaagggcagcaagaaggtgaaggccaacacagtgtctgggggcaggaacaagatcaggaagatcctggacaagacccgcttcagcatcctgccccccaagctgttcagtgatggcggcctgagccagagccaggatgacagcatcgtgggcaccaggcactgccgccacagcctggccatcatgcccatccctggcaccctgagcagcagcagcccagacctgctgcagcccaccacctccatgctggacttcagcaaccccagcgacatcccagaccaggtgatccgggtcttcaaggtggaccagcagagctgctacatcatcatcagcaaggacaccacagccaaggaggtggtgttccacgctgtgcatgaatttggcctgactggagccagtgacacctacagcctgtgtgaggtgtctgtgaccccagagggcgtcatcaagcagaggcggctgcctgaccagttcagcaagctggccgaccgcatccagctgaatggccgctactacctgaagaacaacatggagacagagaccctgtgcagtgatgaagatgcccaggagctggtgaaggagagccagctgtccatgctgcagctgagcaccatcgaggtggccacccagctgtccatgagggactttgacctcttcagaaatattgagcccacagagtacattgatgacctcttcaagctgaacagcaagacaggcaacacccacctgaagagatttgaggacatcgtgaaccaggagaccttctgggtggccagcgagatcctgacagaggccaaccagctgaagaggatgaagatcatcaagcacttcatcaagatcgccctgcactgccgggagtgcaagaacttcaacagcatgtttgccatcatcagcggcctgaacctggcctctgtggcccggctgcggggcacctgggagaagctgcccagcaaatatgagaagcacctgcaggacctgcaggacatctttgaccccagcaggaacatggccaagtacagaaacatcctgagcagccagagcatgcagccccccatcatccccctcttccctgtggtgaagaaggacatgaccttcctgcacgagggcaatgacagcaaggtggatggcctggtgaactttgagaagctgaggatgatcagcaaggagatccggcaggtggtgaggatgaccagcgccaacatggaccctgccatgatgttccggcagaggagcctgagccagggcagcaccaacagcaacatgctggatgtgcagggcggggcccacaagaagagggcccggcgcagcagcctgctgaatgccaagaagctgtatgaagatgcccagatggccaggaaggtgaagcagtacctgagcagcctggatgtggagacagatgaggagaagttccagatgatgagcctgcagtgggagcccgcctacggcaccctgaccaagaacctgtctgagaagaggtctgccaagagcagcgagatgagccctgtgcccatgaggtctgctggccagaccaccaaggcccacctgcaccagccccaccgggtgtcccaggtgctgcaggtgcctgctgtgaacctgcaccccatcaggaagaagggccagaccaaggaccctgccctgatgtag

SEQ ID NO: 167135 - DNA, 4176 bp, synthetic construct
  misc_feature 1..4176: note = Description of Artificial Sequence: Synthetic coding sequence
  source 1..4176: mol_type = other DNA
atgaacagccctgtggaccccggggcccggcaggccctgaggaagaagcccccagagaggaccccagaggacctgaacaccatctacagctacctgcacggcatggagatcctgagcaacctgcgggagcaccagctgcggctgatgtctgcccgggcccgctatgagcgctacagcggcaaccaggtgctcttctgcagcgagaccatcgcccgctgctggtacatcctgctgagcggctctgtgctggtgaagggctccatggtgctgcccccctgcagctttgggaagcagtttggaggcaagaggggctgtgactgcctggtgctggagcccagcgagatgattgtggtggagaatgccaaggacaatgaagattccatcctgcagcgggagatcccagcccggcagagcagaagacgcttcaggaagatcaactacaagggggagcggcagaccatcacagatgatgtggaggtgaacagctacctgagcctgcctgctgacctgaccaagatgcacctgacagagaacccccacccccaggtgacccacgtgagcagcagccagagcggctgcagcatcgccagtgacagcggcagcagcagcctgagtgacatctaccaggccacagaaagtgaggtgggagatgtggacctgacccggctgcctgagggccctgtggacagtgaagatgatgaggaggaggatgaggagattgacagaacagaccccctgcagggccgggacctggtgcgggagtgcctggagaaggagcctgctgacaagacagatgatgacatcgagcagctgctggagttcatgcaccagctgcctgcctttgccaacatgaccatgtctgtgagaagagagctgtgcagcgtgatgatctttgaggtggtggagcaggccggggccatcatcctggaggatggccaggagctggacagctggtacgtgatcctgaatggaacagtggagatcagccacccagatggcaaggtggagaacctcttcatgggcaacagctttggcatcacccccaccctggacaagcagtacatgcacggcatcgtgaggaccaaggtggatgactgccagtttgtgtgcatcgcccagcaggactactggaggatcctgaaccacgtggagaagaacacccacaaggtggaggaggagggggagatcgtgatggtgcatgagcaccgggagctggacaggagcggcaccaggaagggccacatcgtcatcaaggccaccccagagcggctcatcatgcacctgattgaggagcacagcatcgtggaccccacctacatcgaggacttcctgctgacctaccgcaccttcctggagagccccctggatgtgggcatcaagctgctggagtggttcaagattgacagcctgcgggacaaggtgaccagaattgtgctgctgtgggtgaacaaccacttcaatgactttgaaggagaccctgccatgacccgcttcctggaggagtttgagaagaacctggaggacaccaagatgaatggccacctgcggctgctgaacatcgcctgtgccgccaaggccaagtggaggcaggtggtgctgcagaaggccagccgggagagccccctgcagttcagcctgaatggaggcagcgagaagggcttcggcatctttgtggagggcgtggagcccggcagcaaggctgctgacagcggcctgaagagaggagaccagatcatggaggtgaatggccagaactttgagaacatcaccttcatgaaggctgtggagatcctgaggaacaacacccacctggccctgactgtgaagaccaacatctttgtgttcaaggagctgctcttcagaacagagcaggagaagtctggagtgccccacatccccaagattgctgagaagaagagcaacagacacagcatccagcacgtgcctggggacatcgagcagaccagccaggagaagggcagcaagaaggtgaaggccaacacagtgtctgggggcaggaacaagatcaggaagatcctggacaagacccgcttcagcatcctgccccccaagctgttcagtgatggcggcctgagccagagccaggatgacagcatcgtgggcaccaggcactgccgccacagcctggccatcatgcccatccctggcaccctgagcagcagcagcccagacctgctgcagcccaccacctccatgctggacttcagcaaccccagcgacatcccagaccaggtgatccgggtcttcaaggtggaccagcagagctgctacatcatcatcagcaaggacaccacagccaaggaggtggtgttccacgctgtgcatgaatttggcctgactggagccagtgacacctacagcctgtgtgaggtgtctgtgaccccagagggcgtcatcaagcagaggcggctgcctgaccagttcagcaagctggccgaccgcatccagctgaatggccgctactacctgaagaacaacatggagacagagaccctgtgcagtgatgaagatgcccaggagctggtgaaggagagccagctgtccatgctgcagctgagcaccatcgaggtggccacccagctgtccatgagggactttgacctcttcagaaatattgagcccacagagtacattgatgacctcttcaagctgaacagcaagacaggcaacacccacctgaagagatttgaggacatcgtgaaccaggagaccttctgggtggccagcgagatcctgacagaggccaaccagctgaagaggatgaagatcatcaagcacttcatcaagatcgccctgcactgccgggagtgcaagaacttcaacagcatgtttgccatcatcagcggcctgaacctggcctctgtggcccggctgcggggcacctgggagaagctgcccagcaaatatgagaagcacctgcaggacctgcaggacatctttgaccccagcaggaacatggccaagtacagaaacatcctgagcagccagagcatgcagccccccatcatccccctcttccctgtggtgaagaaggacatgaccttcctgcacgagggcaatgacagcaaggtggatggcctggtgaactttgagaagctgaggatgatcagcaaggagatccggcaggtggtgaggatgaccagcgccaacatggaccctgccatgatgttccggcagaggagcctgagccagggcagcaccaacagcaacatgctggatgtgcagggcggggcccacaagaagagggcccggcgcagcagcctgctgaatgccaagaagctgtatgaagatgcccagatggccaggaaggtgaagcagtacctgagcagcctggatgtggagacagatgaggagaagttccagatgatgagcctgcagtgggagcccgcctacggcaccctgaccaagaacctgtctgagaagaggtctgccaagagcagcgagatgagccctgtgcccatgaggtctgctggccagaccaccaaggcccacctgcaccagccccaccgggtgtcccaggtgctgcaggtgcctgctgtgaacctgcaccccatcaggaagaagggccagaccaaggaccctgccctgaacaccagcctgccccagaaggtgctgggcaccacagaggagatcagcggcaagaagcacacagaggacaccatctctgtggccagcagcctgcacagcagccccccagccagcccccagggcagcccccacaaggtgggcagcatcatcagtgaccacagcagcaagatcagcggccagagctgccccggcatcggcggggcctacctgcagaagaagatcctgcagatcaccaggagcacagccaagaggacagacagcacagagaaggccacagaagaaaatagagacaggaccagctgtgagaacaccaccaggaagaggatgaccagccccttccggcggctgcgggagaggatgctgagccgggagcggctggtgaacagccagaaggaggacacagaccacaaccaggccacagagagctgtgagaaggtgaaggatgtgggcagcaacatcaaggatgagaagggcagcgccatcttcaacagcaacagccagggcaacagcaacaccctgaactgcttctacacccgcttcaagagcaagaggaggaagaccctgtag

SEQ ID NO: 167136 - DNA, 2484 bp, synthetic construct
  misc_feature 1..2484: note = Description of Artificial Sequence: Synthetic coding sequence
  source 1..2484: mol_type = other DNA
atgaacagccctgtggaccccggggcccggcaggccctgaggaagaagcccccagagaggaccccagaggacctgaacaccatctacagctacctgcacggcatggagatcctgagcaacctgcgggagcaccagctgcggctgatgtctgcccgggcccgctatgagcgctacagcggcaaccaggtgctcttctgcagcgagaccatcgcccgctgctggtacatcctgctgagcggctctgtgctggtgaagggctccatggtgctgcccccctgcagctttgggaagcagtttggaggcaagaggggctgtgactgcctggtgctggagcccagcgagatgattgtggtggagaatgccaaggacaatgaagattccatcctgcagcgggagatcccagcccggcagagcagaagacgcttcaggaagatcaactacaagggggagcggcagaccatcacagatgatgtggaggtgaacagctacctgagcctgcctgctgacctgaccaagatgcacctgacagagaacccccacccccaggtgacccacgtgagcagcagccagagcggctgcagcatcgccagtgacagcggcagcagcagcctgagtgacatctaccaggccacagaaagtgaggtgggagatgtggacctgacccggctgcctgagggccctgtggacagtgaagatgatgaggaggaggatgaggagattgacagaacagaccccctgcagggccgggacctggtgcgggagtgcctggagaaggagcctgctgacaagacagatgatgacatcgagcagctgctggagttcatgcaccagctgcctgcctttgccaacatgaccatgtctgtgagaagagagctgtgcagcgtgatgatctttgaggtggtggagcaggccggggccatcatcctggaggatggccaggagctggacagctggtacgtgatcctgaatggaacagtggagatcagccacccagatggcaaggtggagaacctcttcatgggcaacagctttggcatcacccccaccctggacaagcagtacatgcacggcatcgtgaggaccaaggtggatgactgccagtttgtgtgcatcgcccagcaggactactggaggatcctgaaccacgtggagaagaacacccacaaggtggaggaggagggggagatcgtgatggtgcatgagcaccgggagctggacaggagcggcaccaggaagggccacatcgtcatcaaggccaccccagagcggctcatcatgcacctgattgaggagcacagcatcgtggaccccacctacatcgaggacttcctgctgacctaccgcaccttcctggagagccccctggatgtgggcatcaagctgctggagtggttcaagattgacagcctgcgggacaaggtgaccagaattgtgctgctgtgggtgaacaaccacttcaatgactttgaaggagaccctgccatgacccgcttcctggaggagtttgagaagaacctggaggacaccaagatgaatggccacctgcggctgctgaacatcgcctgtgccgccaaggccaagtggaggcaggtggtgctgcagaaggccagccgggagagccccctgcagttcagcctgaatggaggcagcgagaagggcttcggcatctttgtggagggcgtggagcccggcagcaaggctgctgacagcggcctgaagagaggagaccagatcatggaggtgaatggccagaactttgagaacatcaccttcatgaaggctgtggagatcctgaggaacaacacccacctggccctgactgtgaagaccaacatctttgtgttcaaggagctgctcttcagaacagagcaggagaagtctggagtgccccacatccccaagattgctgagaagaagagcaacagacacagcatccagcacgtgcctggggacatcgagcagaccagccaggagaagggcagcaagaaggtgaaggccaacacagtgtctgggggcaggaacaagatcaggaagatcctggacaagacccgcttcagcatcctgccccccaagctgttcagtgatggcggcctgagccagagccaggatgacagcatcgtgggcaccaggcactgccgccacagcctggccatcatgcccatccctggcaccctgagcagcagcagcccagacctgctgcagcccaccacctccatgctggacttcagcaaccccagcgacatcccagaccaggtgatccgggtcttcaaggtggaccagcagagctgctacatcatcatcagcaaggacaccacagccaaggaggtggtgttccacgctgtgcatgaatttggcctgactggagccagtgacacctacagcctgtgtgaggtgtctgtgaccccagagggcgtcatcaagcagaggcggctgcctgaccagttcagcaagctggccgaccgcatccagctgaatggaagatag

SEQ ID NO: 167137 - DNA, 1551 bp, synthetic construct
  misc_feature 1..1551: note = Description of Artificial Sequence: Synthetic coding sequence
  source 1..1551: mol_type = other DNA
atggctgacaacctgagtgacaccctgaagaagctgaagatcacagctgtggacaagacagaggacagcctggagggctgcctggactgcctgctgcaggccctggcccagaacaacacagagaccagcgagaagatccaggccagcggcatcctgcagctgtttgccagcctgctgaccccccagagcagctgcaaggccaaggtggccaacatcatcgccgaggtggccaagaatgagttcatgaggatcccctgtgtggatgctggcctcatcagccccctggtgcagctgctgaacagcaaggaccaggaggtgctgctgcagacaggccgggccctgggcaacatctgctatgacagccagagcagcaaggagcagtttgccagcaccaacattgctgaggagctggtgaagctgttcaagaagcagattgaacatgacaagcgggagatgatctttgaggtgctggcccccctggccgagaatgatgccatcaagctgcagctggtggaggccggcctggtggagtgcctgctggagatcgtgcagcagaaggtggacagcgacaaggaggatgacatcacagagctgaagacaggcagtgacctgatggtgctgctgctgctgggagatgagagcatgcagaagctgtttgaaggaggaaaaggatctgtgttccagagggtgctgtcctggatccccagcaacaaccaccagctgcagctggccggggccctggccatcgccaactttgccagaaatgatgccaactgcatccacatggtggacaatggaattgtggagaagctgatggacctgctggacagacatgtggaggatggaaatgtgacagtgcagcacgccgccctgagcgccctgaggaacctggccatccctgtgatcaacaaggccaagatgctgtctgctggggtgacagaagctgtgctgaagttcctgaagtctgagatgcctcctgtgcagttcaagctgctgggcaccctgaggatgctgattgatgcccaggccgaggccgctgagcagctgggcaagaatgtgaagctggtggagcggctggtggagtggtgtgaggccaaggaccatgctggggtgatgggagagagcaaccggctgctgagcgccctgatccgccacagcaagagcaaggatgtgatcaagaccatcgtgcagagcggcggcatcaagcacctggtgaccatggccaccagcgagcacgtgatcatgcagaatgaggccctggtggccctggccctgattgctgccctggagctgggcacagctgagaaggacctggagagcgccaagctggtgcagatcctgcaccggctgctggctgatgagaggtctgcccctgagatcaagtacaacagcatggtgctgatctgtgccctgatgggctctgaatgtctgcacaaggaggtgcaggacctggccttcctggatgtggtgtccaagctgcggagccatgagaacaagtctgtggcccagcaggccagcctgacagagcagaggctgactgtggagagctag

SEQ ID NO: 167138 - DNA, 1827 bp, synthetic construct
  misc_feature 1..1827: note = Description of Artificial Sequence: Synthetic coding sequence
  source 1..1827: mol_type = other DNA
atggctgacaacctgagtgacaccctgaagaagctgaagatcacagctgtggacaagacagaggacagcctggagggctgcctggactgcctgctgcaggccctggcccagaacaacacagagaccagcgagaagatccaggccagcggcatcctgcagctgtttgccagcctgctgaccccccagagcagctgcaaggccaaggtggccaacatcatcgccgaggtggccaagaatgagttcatgaggatcccctgtgtggatgctggcctcatcagccccctggtgcagctgctgaacagcaaggaccaggaggtgctgctgcagacaggccgggccctgggcaacatctgctatgacagccatgagggccgctctgctgtggaccaggccggcggggcccagatcgtcatcgaccacctgcggagcctgtgcagcatcacagatcctgccaatgagaagctgctgactgtgttctgtggcatgctgatgaactacagcaatgaaaatgacagcctgcaggcccagctgatcaacatgggcgtcatccccaccctggtgaagctgctgggcatccactgccagaatgctgccctgacagagatgtgcctggtggcctttggaaacctggccgagctggagagcagcaaggagcagtttgccagcaccaacattgctgaggagctggtgaagctgttcaagaagcagattgaacatgacaagcgggagatgatctttgaggtgctggcccccctggccgagaatgatgccatcaagctgcagctggtggaggccggcctggtggagtgcctgctggagatcgtgcagcagaaggtggacagcgacaaggaggatgacatcacagagctgaagacaggcagtgacctgatggtgctgctgctgctgggagatgagagcatgcagaagctgtttgaaggaggaaaaggatctgtgttccagagggtgctgtcctggatccccagcaacaaccaccagctgcagctggccggggccctggccatcgccaactttgccagaaatgatgccaactgcatccacatggtggacaatggaattgtggagaagctgatggacctgctggacagacatgtggaggatggaaatgtgacagtgcagcacgccgccctgagcgccctgaggaacctggccatccctgtgatcaacaaggccaagatgctgtctgctggggtgacagaagctgtgctgaagttcctgaagtctgagatgcctcctgtgcagttcaagctgctgggcaccctgaggatgctgattgatgcccaggccgaggccgctgagcagctgggcaagaatgtgaagctggtggagcggctggtggagtggtgtgaggccaaggaccatgctggggtgatgggagagagcaaccggctgctgagcgccctgatccgccacagcaagagcaaggatgtgatcaagaccatcgtgcagagcggcggcatcaagcacctggtgaccatggccaccagcgagcacgtgatcatgcagaatgaggccctggtggccctggccctgattgctgccctggagctgggcacagctgagaaggacctggagagcgccaagctggtgcagatcctgcaccggctgctggctgatgagaggtctgcccctgagatcaagtacaacagcatggtgctgatctgtgccctgatgggctctgaatgtctgcacaaggaggtgcaggacctggccttcctggatgtggtgtccaagctgcggagccatgagaacaagtctgtggcccagcaggccagcctgacagagcagaggctgactgtggagagctag

SEQ ID NO: 167139 - DNA, 1680 bp, synthetic construct
  misc_feature 1..1680: note = Description of Artificial Sequence: Synthetic coding sequence
  source 1..1680: mol_type = other DNA
atggctgacaacctgagtgacaccctgaagaagctgaagatcacagctgtggacaagacagaggacagcctggagggctgcctggactgcctgctgcaggccctggcccagaacaacacagagaccagcgagaagatccaggccagcggcatcctgcagctgtttgccagcctgctgaccccccagagcagctgcaaggccaaggtggccaacatcatcgccgaggtggccaagaatgagttcatgaggatcccctgtgtggatgctggcctcatcagccccctggtgcagctgctgaacagcaaggaccaggaggtgctgctgcagacaggccgggccctgggcaacatctgctatgacagccacagcctgcaggcccagctgatcaacatgggcgtcatccccaccctggtgaagctgctgggcatccactgccagaatgctgccctgacagagatgtgcctggtggccttcggcaacctggccgagctggagagcagcaaggagcagtttgccagcaccaacattgctgaggagctggtgaagctgttcaagaagcagatcgagcatgacaagcgggagatgatctttgaggtgctggcccccctggctgaaaatgatgccatcaagctgcagctggtggaggccggcctggtggagtgcctgctggagatcgtgcagcagaaggtggacagcgacaaggaggatgacatcacagagctgaagacaggcagtgacctgatggtgctgctgctgctgggagatgagagcatgcagaagctgtttgagggcggcaagggcagcgtcttccagagggtgctgtcctggatccccagcaacaaccaccagctgcagctggccggggccctggccatcgccaactttgccagaaatgatgccaactgcatccacatggtggacaatggcatcgtggagaagctgatggacctgctggacagacatgtggaggatggaaatgtgacagtgcagcacgccgccctgagcgccctgaggaacctggccatccctgtgatcaacaaggccaagatgctgtctgctggggtgacagaggccgtgctgaagttcctgaagtctgagatgcctcctgtgcagttcaagctgctgggcaccctgaggatgctgattgatgcccaggccgaggccgctgagcagctgggcaagaatgtgaagctggtggagcggctggtggagtggtgtgaggccaaggaccacgccggcgtgatgggagagagcaaccggctgctgagcgccctgatccgccacagcaagagcaaggatgtgatcaagaccatcgtgcagagcggcggcatcaagcacctggtgaccatggccaccagcgagcacgtgatcatgcagaatgaggccctggtggccctggccctgattgctgccctggagctgggcacagctgagaaggacctggagagcgccaagctggtgcagatcctgcaccggctgctggctgatgagaggtctgcccctgagatcaagtacaacagcatggtgctgatctgtgccctgatgggcagcgagtgcctgcacaaggaggtgcaggacctggccttcctggatgtggtgtccaagctgcggagccatgagaacaagtctgtggcccagcaggccagcctgacagagcagaggctgactgtggagagctag

SEQ ID NO: 167140 - DNA, 1677 bp, synthetic construct
  misc_feature 1..1677: note = Description of Artificial Sequence: Synthetic coding sequence
  source 1..1677: mol_type = other DNA
atggacaacctgagtgacaccctgaagaagctgaagatcacagctgtggacaagacagaggacagcctggagggctgcctggactgcctgctgcaggccctggcccagaacaacacagagaccagcgagaagatccaggccagcggcatcctgcagctgtttgccagcctgctgaccccccagagcagctgcaaggccaaggtggccaacatcatcgccgaggtggccaagaatgagttcatgaggatcccctgtgtggatgctggcctcatcagccccctggtgcagctgctgaacagcaaggaccaggaggtgctgctgcagacaggccgggccctgggcaacatctgctatgacagccacagcctgcaggcccagctgatcaacatgggcgtcatccccaccctggtgaagctgctgggcatccactgccagaatgctgccctgacagagatgtgcctggtggcctttggaaacctggccgagctggagagcagcaaggagcagtttgccagcaccaacattgctgaggagctggtgaagctgttcaagaagcagattgaacatgacaagcgggagatgatctttgaggtgctggcccccctggccgagaatgatgccatcaagctgcagctggtggaggccggcctggtggagtgcctgctggagatcgtgcagcagaaggtggacagcgacaaggaggatgacatcacagagctgaagacaggcagtgacctgatggtgctgctgctgctgggagatgagagcatgcagaagctgtttgaaggaggaaaaggatctgtgttccagagggtgctgtcctggatccccagcaacaaccaccagctgcagctggccggggccctggccatcgccaactttgccagaaatgatgccaactgcatccacatggtggacaatggaattgtggagaagctgatggacctgctggacagacatgtggaggatggaaatgtgacagtgcagcacgccgccctgagcgccctgaggaacctggccatccctgtgatcaacaaggccaagatgctgtctgctggggtgacagaagctgtgctgaagttcctgaagtctgagatgcctcctgtgcagttcaagctgctgggcaccctgaggatgctgattgatgcccaggccgaggccgctgagcagctgggcaagaatgtgaagctggtggagcggctggtggagtggtgtgaggccaaggaccatgctggggtgatgggagagagcaaccggctgctgagcgccctgatccgccacagcaagagcaaggatgtgatcaagaccatcgtgcagagcggcggcatcaagcacctggtgaccatggccaccagcgagcacgtgatcatgcagaatgaggccctggtggccctggccctgattgctgccctggagctgggcacagctgagaaggacctggagagcgccaagctggtgcagatcctgcaccggctgctggctgatgagaggtctgcccctgagatcaagtacaacagcatggtgctgatctgtgccctgatgggctctgaatgtctgcacaaggaggtgcaggacctggccttcctggatgtggtgtccaagctgcggagccatgagaacaagtctgtggcccagcaggccagcctgacagagcagaggctgactgtggagagctag

SEQ ID NO: 167141 - DNA, 1824 bp, synthetic construct
  misc_feature 1..1824: note = Description of Artificial Sequence: Synthetic coding sequence
  source 1..1824: mol_type = other DNA
atggacaacctgagtgacaccctgaagaagctgaagatcacagctgtggacaagacagaggacagcctggagggctgcctggactgcctgctgcaggccctggcccagaacaacacagagaccagcgagaagatccaggccagcggcatcctgcagctgtttgccagcctgctgaccccccagagcagctgcaaggccaaggtggccaacatcatcgccgaggtggccaagaatgagttcatgaggatcccctgtgtggatgctggcctcatcagccccctggtgcagctgctgaacagcaaggaccaggaggtgctgctgcagacaggccgggccctgggcaacatctgctatgacagccatgagggccgctctgctgtggaccaggccggcggggcccagatcgtgattgaccacctgcggagcctgtgcagcatcacagatcctgccaatgagaagctgctgaccgtcttctgtggcatgctgatgaactacagcaatgaaaatgacagcctgcaggcccagctgatcaacatgggcgtcatccccaccctggtgaagctgctgggcatccactgccagaatgctgccctgacagagatgtgcctggtggccttcggcaacctggccgagctggagagcagcaaggagcagtttgccagcaccaacattgctgaggagctggtgaagctgttcaagaagcagatcgagcatgacaagcgggagatgatctttgaggtgctggcccccctggctgaaaatgatgccatcaagctgcagctggtggaggccggcctggtggagtgcctgctggagatcgtgcagcagaaggtggacagcgacaaggaggatgacatcacagagctgaagacaggcagtgacctgatggtgctgctgctgctgggagatgagagcatgcagaagctgtttgagggcggcaagggcagcgtcttccagagggtgctgtcctggatccccagcaacaaccaccagctgcagctggccggggccctggccatcgccaactttgccagaaatgatgccaactgcatccacatggtggacaatggcatcgtggagaagctgatggacctgctggacagacatgtggaggatggaaatgtgacagtgcagcacgccgccctgagcgccctgaggaacctggccatccctgtgatcaacaaggccaagatgctgtctgctggggtgacagaggccgtgctgaagttcctgaagtctgagatgcctcctgtgcagttcaagctgctgggcaccctgaggatgctgattgatgcccaggccgaggccgctgagcagctgggcaagaatgtgaagctggtggagcggctggtggagtggtgtgaggccaaggaccacgccggcgtgatgggagagagcaaccggctgctgagcgccctgatccgccacagcaagagcaaggatgtgatcaagaccatcgtgcagagcggcggcatcaagcacctggtgaccatggccaccagcgagcacgtgatcatgcagaatgaggccctggtggccctggccctgattgctgccctggagctgggcacagctgagaaggacctggagagcgccaagctggtgcagatcctgcaccggctgctggctgatgagaggtctgcccctgagatcaagtacaacagcatggtgctgatctgtgccctgatgggcagcgagtgcctgcacaaggaggtgcaggacctggccttcctggatgtggtgtccaagctgcggagccatgagaacaagtctgtggcccagcaggccagcctgacagagcagaggctgactgtggagagctag

SEQ ID NO: 167142 - DNA, 1824 bp, synthetic construct
  misc_feature 1..1824: note = Description of Artificial Sequence: Synthetic coding sequence
  source 1..1824: mol_type = other DNA
atggctgacaacctgagtgacaccctgaagaagctgaagatcacagctgtggacaagacagaggacagcctggagggctgcctggactgcctgctgcaggccctggcccagaacaacacagagaccagcgagaagatccaggccagcggcatcctgcagctgtttgccagcctgctgaccccccagagcagctgcaaggccaaggtggccaacatcatcgccgaggtggccaagaatgagttcatgaggatcccctgtgtggatgctggcctcatcagccccctggtgcagctgctgaacagcaaggaccaggaggtgctgctgcagacaggccgggccctgggcaacatctgctatgacagccatgagggccgctctgctgtggaccaggccggcggggcccagatcgtcatcgaccacctgcggagcctgtgcagcatcacagatcctgccaatgagaagctgctgactgtgttctgtggcatgctgatgaactacagcaatgaaaatgacagcctgcaggcccagctgatcaacatgggcgtcatccccaccctggtgaagctgctgggcatccactgccagaatgctgccctgacagagatgtgcctggtggcctttggaaacctggccgagctggagagcagcaaggagcagtttgccagcaccaacattgctgaggagctggtgaagctgttcaagaagcagattgaacatgacaagcgggagatgatctttgaggtgctggcccccctggccgagaatgatgccatcaagctgcagctggtggaggccggcctggtggagtgcctgctggagatcgtgcagcagaaggtggacagcgacaaggaggatgacatcacagagctgaagacaggcagtgacctgatggtgctgctgctgctgggagatgagagcatgcagaagctgtttgaaggaggaaaaggatctgtgttccagagggtgctgtcctggatccccagcaacaaccaccagctgcagctggccggggccctggccatcgccaactttgccagaaatgatgccaactgcatccacatggtggacaatggaattgtggagaagctgatggacctgctggacagacatgtggaggatggaaatgtgacagtgcagcacgccgccctgagcgccctgaggaacctggccatccctgtgatcaacaaggccaagatgctgtctgctggggtgacagaagctgtgctgaagttcctgaagtctgagatgcctcctgtgcagttcaagctgctgggcaccctgaggatgctgattgatgcccaggaggccgctgagcagctgggcaagaatgtgaagctggtggagcggctggtggagtggtgtgaggccaaggaccacgccggcgtgatgggagagagcaaccggctgctgagcgccctgatccgccacagcaagagcaaggatgtgatcaagaccatcgtgcagagcggcggcatcaagcacctggtgaccatggccaccagcgagcacgtgatcatgcagaatgaggccctggtggccctggccctgattgctgccctggagctgggcacagctgagaaggacctggagagcgccaagctggtgcagatcctgcaccggctgctggctgatgagaggtctgcccctgagatcaagtacaacagcatggtgctgatctgtgccctgatgggcagcgagtgcctgcacaaggaggtgcaggacctggccttcctggatgtggtgtccaagctgcggagccatgagaacaagtctgtggcccagcaggccagcctgacagagcagaggctgactgtggagagctag

SEQ ID NO: 167143 - DNA, 555 bp, synthetic construct
  misc_feature 1..555: note = Description of Artificial Sequence: Synthetic coding sequence
  source 1..555: mol_type = other DNA
atgagggagtacaagctggtggtgctgggcagcggaggagtgggcaagagcgccctgactgtgcagtttgtgcagggcatctttgtggagaagtatgaccccaccattgaagattcctacaggaagcaggtggaggtggatgcccagcagtgcatgctggagatcctggacacagctggaacagagcagttcaccgccatgagggacctgtacatgaagaatggccagggctttgccctggtgtacagcatcacagcccagagcaccttcaatgacctgcaggacctgcgggagcagatcctgcgggtgaaggacacagatgatgtgcccatgatcctggtgggcaacaagtgtgacctggaggatgagcgggtggtgggcaaggagcagggccagaacctggcccggcagtggaacaactgtgccttcctggagagcagcgccaagagcaagatcaacgtgaatgagatcttctatgacctggtgcggcagatcaacaggaagacccctgtgcctgggaaggccaggaagaagagcagctgccagctgctgtag

SEQ ID NO: 167144 - DNA, 555 bp, synthetic construct; identical to SEQ ID NO: 167143
  misc_feature 1..555: note = Description of Artificial Sequence: Synthetic coding sequence
  source 1..555: mol_type = other DNA

SEQ ID NO: 167145 - DNA, 357 bp, synthetic construct
  misc_feature 1..357: note = Description of Artificial Sequence: Synthetic coding sequence
  source 1..357: mol_type = other DNA
atgagggacctgtacatgaagaatggccagggctttgccctggtgtacagcatcacagcccagagcaccttcaatgacctgcaggacctgcgggagcagatcctgcgggtgaaggacacagatgatgtgcccatgatcctggtgggcaacaagtgtgacctggaggatgagcgggtggtgggcaaggagcagggccagaacctggcccggcagtggaacaactgtgccttcctggagagcagcgccaagagcaagatcaacgtgaatgagatcttctatgacctggtgcggcagatcaacaggaagacccctgtgcctgggaaggccaggaagaagagcagctgccagctgctgtag

SEQ ID NO: 167146 - DNA, 555 bp, synthetic construct; identical to SEQ ID NO: 167143
  misc_feature 1..555: note = Description of Artificial Sequence: Synthetic coding sequence
  source 1..555: mol_type = other DNA

SEQ ID NO: 167147 - DNA, 99 bp, synthetic construct
  misc_feature 1..99: note = Description of Artificial Sequence: Synthetic coding sequence
  source 1..99: mol_type = other DNA
atgagggagtacaagctggtggtgctgggcagcggaggagtgggcaagagcgccctgactgtgcagtttgtgcagggcatctttgtggagaagtactag

SEQ ID NO: 167148 - DNA, 429 bp, synthetic construct
  misc_feature 1..429: note = Description of Artificial Sequence: Synthetic coding sequence
  source 1..429: mol_type = other DNA
atgagggagtacaagctggtggtgctgggcagcggaggagtgggcaagagcgccctggagcagttcaccgccatgagggacctgtacatgaagaatggccagggctttgccctggtgtacagcatcacagcccagagcaccttcaatgacctgcaggacctgcgggagcagatcctgcgggtgaaggacacagatgatgtgcccatgatcctggtgggcaacaagtgtgacctggaggatgagcgggtggtgggcaaggagcagggccagaacctggcccggcagtggaacaactgtgccttcctggagagcagcgccaagagcaagatcaacgtgaatgagatcttctatgacctggtgcggcagatcaacaggaagacccctgtgcctgggaaggccaggaagaagagcagctgccagctgctgtag

SEQ ID NO: 167149 - DNA, 384 bp, synthetic construct
  misc_feature 1..384: note = Description of Artificial Sequence: Synthetic coding sequence
  source 1..384: mol_type = other DNA
atgagggagtacaagctggtggtgctgggcagcggaggagtgggcaagagcgccctgactgtgcagtttgtgcagggcatctttgtggagaagtatgaccccaccattgaagattcctacaggaagcaggtggaggtggatgcccagcagtgcatgctggagatcctggacacagctggaacagagcagttcaccgccatgagggacctgtacatgaagaatggccagggctttgccctggtgtacagcatcacagcccagagcaccttcaatgacctgcaggacctgcgggagcagatcctgcgggtgaaggacacagatgatgtgcccatgatcctggtgggcaacaagtgtgacctggaggatgagcgggtggtgggctag

SEQ ID NO: 167150 - DNA, 429 bp, synthetic construct
  misc_feature 1..429: note = Description of Artificial Sequence: Synthetic coding sequence
  source 1..429: mol_type = other DNA
atgagggagtacaagctggtggtgctgggcagcggaggagtgggcaagagcgccctgactgtgcagtttgtgcagggcatctttgtggagaagtatgaccccaccattgaagattcctacaggaagcaggtggaggtggatgcccagcagtgcatgctggagatcctggacacagctggaacagagcagttcaccgccatgagggacctgtacatgaagaatggccagggctttgccctggtgtacagcatcacagcccagagcaccttcaatgacctgcaggacctgcgggagcagatcctgcgggtgaaggacacagatgatgtgcccatgatcctggtgggcaacaagtgtgacctggaggatgagcgggtggtgggcaaggagcagggccagaacctggacaatggcaccaccgtgcacagctag

SEQ ID NO: 167151 - DNA, 147 bp, synthetic construct
  misc_feature 1..147: note = Description of Artificial Sequence: Synthetic coding sequence
  source 1..147: mol_type = other DNA
atgagggagtacaagctggtggtgctgggcagcggaggagtgggcaagagcgccctgactgtgcagtttgtgcagggcatctttgtggagaagtatgaccccaccattgaagattcctacaggaagcaggtggaggtggatgcctag

SEQ ID NO: 167152 - DNA, 36 bp, synthetic construct
  misc_feature 1..36: note = Description of Artificial Sequence: Synthetic coding sequence
  source 1..36: mol_type = other DNA
atgagggagtacaagctggtggtgctgggcagctag

SEQ ID NO: 167153 - DNA, 264 bp, synthetic construct
  misc_feature 1..264: note = Description of Artificial Sequence: Synthetic coding sequence
  source 1..264: mol_type = other DNA
atgagggagtacaagctggtggtgctgggcagcggaggagtgggcaagagcgccctgactgtgcagtttgtgcagggcatctttgtggagaagtatgaccccaccattgaagattcctacaggaagcaggtggaggtggatgcccagcagtgcatgctggagatcctggacacagctggaacagagcagttcaccgccatgagggacctgtacatgaagaatggccagggctttgccctggtgtacagcatcacagcccagtag

SEQ ID NO: 167154 - DNA, 555 bp, synthetic construct; identical to SEQ ID NO: 167143
  misc_feature 1..555: note = Description of Artificial Sequence: Synthetic coding sequence
  source 1..555: mol_type = other DNA

SEQ ID NO: 167155 - DNA, 306 bp, synthetic construct
  misc_feature 1..306: note = Description of Artificial Sequence: Synthetic coding sequence
  source 1..306: mol_type = other DNA
atgagggagtacaagctggtggtgctgggcagcggaggagtgggcaagagcgccctgactgtgcagtttgtgcagggcatctttgtggagaagtatgaccccaccattgaagattcctacaggaagcaggtggaggtggatgcccagcagtgcatgctggagatcctggacacagctggaacagagcagttcaccgccatgagggacctgtacatgaagaatggccagggctttgccctggtgtacagcatcacagcccagagcaccttcaatgacctgcaggacctgcgggagcagatcctgtag

SEQ ID NO: 167156 - DNA, 162 bp, synthetic construct
  misc_feature 1..162: note = Description of Artificial Sequence: Synthetic coding sequence
  source 1..162: mol_type = other DNA
atgagggagtacaagctggtggtgctgggcagcggaggagtgggcaagagcgccctgactgtgcagtttgtgcagggcatctttgtggagaagtatgaccccaccattgaagattcctacaggaagcaggtggaggtggatgcccagcagtgcatgctgtag

SEQ ID NO: 167157 - DNA, 429 bp, synthetic construct; identical to SEQ ID NO: 167148
  misc_feature 1..429: note = Description of Artificial Sequence: Synthetic coding sequence
  source 1..429: mol_type = other DNA

SEQ ID NO: 167158 - DNA, 498 bp, synthetic construct
  misc_feature 1..498: note = Description of Artificial Sequence: Synthetic coding sequence
  source 1..498: mol_type = other DNA
atgagggagtacaagctggtggtgctgggcagcggaggagtgggcaagagcgccctgactgtgcagtttgtgcagggcatctttgtggagaagtatgaccccaccattgaagattcctacaggaaggagcagttcaccgccatgagggacctgtacatgaagaatggccagggctttgccctggtgtacagcatcacagcccagagcaccttcaatgacctgcaggacctgcgggagcagatcctgcgggtgaaggacacagatgatgtgcccatgatcctggtgggcaacaagtgtgacctggaggatgagcgggtggtgggcaaggagcagggccagaacctggcccggcagtggaacaactgtgccttcctggagagcagcgccaagagcaagatcaacgtgaatgagatcttctatgacctggtgcggcagatcaacaggaagacccctgtgcctgggaaggccaggaagaagagcagctgccagctgctgtag

SEQ ID NO: 167159 - DNA, 420 bp, synthetic construct
  misc_feature 1..420: note = Description of Artificial Sequence: Synthetic coding sequence
  source 1..420: mol_type = other DNA
atgagggagtacaagctggtggtgctgggcagcggaggagtgggcaagagcgccctgactgtgcagtttgtgcagggcatctttgtggagaagtatgaccccaccattgaagattcctacaggaagcaggtggaggtggatgcccagcagtgcatgctggagatcctggacacagctggaacagagcagttcaccgccatgagggacctgtacatgaagaatggccagggctttgccctggtgtacagcatcacagcccagagcaccttcaatgacctgcaggacctgcgggagcagatcctgcgggtgaaggacacagatgatgtgcccatgatcctggtgggcaacaagtgtgacctggaggatgagcgggtggtgggcaaggagcagggccagaacctggcccggcagtggaactag

SEQ ID NO: 167160 - DNA, 282 bp, synthetic construct
  misc_feature 1..282: note = Description of Artificial Sequence: Synthetic coding sequence
  source 1..282: mol_type = other DNA
atgagggagtacaagctggtggtgctgggcagcggaggagtgggcaagagcgccctgactgtgcagtttgtgcagggcatctttgtggagaagtatgaccccaccattgaagattcctacaggaagcaggtggaggtggatgcccagcagtgcatgctggagatcctggacacagctggaacagagcagttcaccgccatgagggacctgtacatgaagaatggccagggctttgccctggtgtacagcatcacagcccagagcaccttcaatgacctgtag

SEQ ID NO: 167161 - DNA, 36 bp, synthetic construct; identical to SEQ ID NO: 167152
  misc_feature 1..36: note = Description of Artificial Sequence: Synthetic coding sequence
  source 1..36: mol_type = other DNA

SEQ ID NO: 167162 - DNA, 297 bp, synthetic construct
  misc_feature 1..297: note = Description of Artificial Sequence: Synthetic coding sequence
  source 1..297: mol_type = other DNA
atgagggagtacaagctggtggtgctgggcagcggaggagtgggcaagagcgccctgactgtgcagtttgtgcagggcatctttgtggagaagtatgaccccaccattgaagattcctacaggaagcaggtggaggtggatgcccagcagtgcatgctggagatcctggacacagctggaacagagcagttcaccgccatgagggacctgtacatgaagaatggccagggctttgccctggtgtacagcatcacagcccagagcaccttcaatgacctgcaggacctgcgggagtag

SEQ ID NO: 167163 - DNA, 414 bp, synthetic construct
  misc_feature 1..414: note = Description of Artificial Sequence: Synthetic coding sequence
  source 1..414: mol_type = other DNA
atgagggagtacaagctggtggtgctgggcagcggaggagtgggcaagagcgccctgactgtgcagtttgtgcagggcatctttgtggagaagtatgaccccaccattgaagattcctacaggaagcaggtggaggtggatgcccagcagtgcatgctggagatcctggacacagctggcaccgtgcccatgatcctggtgggcaacaagtgtgacctggaggatgagcgggtggtgggcaaggagcagggccagaacctggcccggcagtggaacaactgtgccttcctggagagcagcgccaagagcaagatcaacgtgaatgagatcttctatgacctggtgcggcagatcaacaggaagacccctgtgcctgggaaggccaggaagaagagcagctgccagctgctgtag

SEQ ID NO: 167164 - DNA, 357 bp, synthetic construct; identical to SEQ ID NO: 167145
  misc_feature 1..357: note = Description of Artificial Sequence: Synthetic coding sequence
  source 1..357: mol_type = other DNA

SEQ ID NO: 167165 - DNA, 369 bp, synthetic construct
  misc_feature 1..369: note = Description of Artificial Sequence: Synthetic coding sequence
  source 1..369: mol_type = other DNA
atgagggagtacaagctggtggtgctgggcagcggaggagtgggcaagagcgccctgactgtgcagtttgtgcagggcatctttgtggagaagtatgaccccaccattgaagattcctacaggaagcaggtggaggtggatgcccagcagtgcatgctggagatcctggacacagctggaacagagcagttcaccgccatgagggacctgtacatgaagaatggccagggctttgccctggtgtacagcatcacagcccagagcaccttcaatgacctgcaggacctgcgggagcagatcctgcgggtgaaggacacagatgatgtgcccatgatcctggtgggcaacaagtgtgacctggaggactag

SEQ ID NO: 167166 - DNA, 258 bp, synthetic construct
  misc_feature 1..258: note = Description of Artificial Sequence: Synthetic coding sequence
  source 1..258: mol_type = other DNA
atgagggagtacaagctggtggtgctgggcagcggaggagtgggcaagagcgccctgactgtgcagtttgtgcagggcatctttgtggagaagtatgaccccaccattgaagattcctacaggaagcaggtggaggtggatgcccagcagtgcatgctggagatcctggacacagctggaacagagcagttcaccgccatgagggacctgtacatgaagaatggccagggctttgccctggtgtacagcatcacctag

SEQ ID NO: 167167 - DNA, 552 bp, synthetic construct
  misc_feature 1..552: note = Description of Artificial Sequence: Synthetic coding sequence
  source 1..552: mol_type = other DNA
atgagggagtacaaggtggtggtgctgggcagcggaggagtgggcaagagcgccctgactgtgcagtttgtgacaggcaccttcatcgagaagtatgaccccaccatcgaggacttctacaggaaggagattgaggtggacagcagccccagcgtgctggagatcctggacacagctggaacagagcagtttgcctccatgagggacctgtacatcaagaatggccagggcttcatcctggtgtacagcctggtgaaccagcagagcttccaggacatcaagcccatgagggaccagatcatccgggtgaagagatatgagaaggtgcctgtgatcctggtgggcaacaaggtggacctggagagcgagcgggaggtgagcagcagcgagggccgggccctggccgaggagtggggctgccccttcatggagaccagcgccaagagcaagaccatggtggatgagctgtttgctgagatcgtgcggcagatgaactatgctgcccagcctgacaaggatgacccctgctgcagcgcctgcaacatccagtag

SEQ ID NO: 167168 - DNA, 1671 bp, synthetic construct
  misc_feature 1..1671: note = Description of Artificial Sequence: Synthetic coding sequence
  source 1..1671: mol_type = other DNA
atgaatgaaggagcccctggggacagcgacctggagacagaggcccgggtgccctggagcatcatgggccactgcctgaggacaggccaggccaggatgtctgccacccccaccccagctggggagggcgccaggagagatgagctgtttggcatcctgcagatcctgcaccagtgcatcctgagcagtggagatgcctttgtgctgactggagtgtgctgctcctggaggcagaatggcaagccaccctacagccagaaggaggacaaggaggtgcagacaggctacatgaatgcccagatcgagatcatcccctgcaagatctgtggggacaagagcagcggcatccactacggcgtcatcacctgtgagggctgcaagggcttcttcagaagaagccagcagagcaatgccacctacagctgcccccggcagaagaactgcctgattgacaggaccagcaggaaccgctgccagcactgccgcctgcagaagtgcctggccgtgggcatgagcagagatgctgtgaagtttggccgcatgagcaagaagcagagggacagcctgtatgcagaggtgcagaagcacaggatgcagcagcagcagagggaccaccagcagcagcctggagaggccgagcccctgacccccacctacaacatcagcgccaacggcctgacagagctgcatgatgacctgagcaactacattgatggccacaccccagagggcagcaaggctgacagcgctgtgtcctccttctacctggacatccagcccagcccagaccagagcggcctggacatcaatggcatcaagccagagcccatctgtgactacaccccagccagcggcttcttcccctactgcagcttcaccaacggggagaccagccccaccgtgtccatggccgagctggagcacctggcccagaacatcagcaagagccacctggagacctgccagtacctgcgggaggagctgcagcagatcacctggcagaccttcctgcaggaggagattgagaactaccagaacaagcagcgggaggtgatgtggcagctgtgtgccatcaagatcacagaggccatccagtatgtggtggagtttgccaagagaattgatggcttcatggagctgtgccagaatgaccagatcgtgctgctgaaggccggcagcctggaggtggtgttcatccgcatgtgccgggcctttgacagccagaacaacacagtgtactttgatggcaagtatgccagcccagatgtgttcaagagcctgggctgtgaggacttcatcagctttgtgtttgaatttgggaagagcctgtgcagcatgcacctgacagaagatgaaattgccctcttcagcgcctttgtgctgatgtctgctgaccgctcctggctgcaggagaaggtgaagattgagaagctgcagcagaagatccagctggccctgcagcacgtgctgcagaagaaccaccgggaggatggcatcctgaccaagctgatctgcaaggtgtccaccctgcgggccctgtgtggccgccacacagagaagctgatggccttcaaggccatctacccagacatcgtgcggctgcacttcccccccctgtacaaggagctgttcaccagcgagtttgagcccgccatgcagattgatggatag

SEQ ID NO: 167169 - DNA, 1647 bp, synthetic construct
  misc_feature 1..1647: note = Description of Artificial Sequence: Synthetic coding sequence
  source 1..1647: mol_type = other DNA
atgaatgaaggagcccctggggacagcgacctggagacagaggcccgggtgccctggagcatcatgggccactgcctgaggacaggccaggccaggatgtctgccacccccaccccagctggggagggcgcccggagcagcagcacctgcagcagcctgagccgcctcttctggagccagctggagcacatcaactgggatggagccacagccaagaacttcatcaacctgcgggagttcttctccttcctgctgcctgccctgaggaaggcccagatcgagatcatcccctgcaagatctgtggggacaagagcagcggcatccactacggcgtcatcacctgtgagggctgcaagggcttcttcagaagaagccagcagagcaatgccacctacagctgcccccggcagaagaactgcctgattgacaggaccagcaggaaccgctgccagcactgccgcctgcagaagtgcctggccgtgggcatgagcagagatgctgtgaagtttggccgcatgagcaagaagcagagggacagcctgtatgcagaggtgcagaagcacaggatgcagcagcagcagagggaccaccagcagcagcctggagaggccgagcccctgacccccacctacaacatcagcgccaacggcctgacagagctgcatgatgacctgagcaactacattgatggccacaccccagagggcagcaaggctgacagcgctgtgtcctccttctacctggacatccagcccagcccagaccagagcggcctggacatcaatggcatcaagccagagcccatctgtgactacaccccagccagcggcttcttcccctactgcagcttcaccaacggggagaccagccccaccgtgtccatggccgagctggagcacctggcccagaacatcagcaagagccacctggagacctgccagtacctgcgggaggagctgcagcagatcacctggcagaccttcctgcaggaggagattgagaactaccagaacaagcagcgggaggtgatgtggcagctgtgtgccatcaagatcacagaggccatccagtatgtggtggagtttgccaagagaattgatggcttcatggagctgtgccagaatgaccagatcgtgctgctgaaggccggcagcctggaggtggtgttcatccgcatgtgccgggcctttgacagccagaacaacacagtgtactttgatggcaagtatgccagcccagatgtgttcaagagcctgggctgtgaggacttcatcagctttgtgtttgaatttgggaagagcctgtgcagcatgcacctgacagaagatgaaattgccctcttcagcgcctttgtgctgatgtctgctgaccgctcctggctgcaggagaaggtgaagattgagaagctgcagcagaagatccagctggccctgcagcacgtgctgcagaagaaccaccgggaggatggcatcctgaccaagctgatctgcaaggtgtccaccctgcgggccctgtgtggccgccacacagagaagctgatggccttcaaggccatctacccagacatcgtgcggctgcacttcccccccctgtacaaggagctgttcaccagcgagtttgagcccgccatgcagattgatggatag

SEQ ID NO: 167170 - DNA, 1572 bp, synthetic construct
  misc_feature 1..1572: note = Description of Artificial Sequence: Synthetic coding sequence
  source 1..1572: mol_type = other DNA
atggagagcgccccagctgccccagaccctgctgccagcgagcccggcagcagcggggctgatgctgctgctggcagccgggagacccccctgaaccaggagagcgccaggaagtctgagcccccagcccctgtgcggcggcagagctacagcagcaccagccggggcatctctgtgaccaagaagacccacaccagccagatcgagatcatcccctgcaagatctgtggggacaagagcagcggcatccactatggagtcatcacctgtgagggctgcaagggcttcttccgccgcagccagcagagcaatgccacctacagctgcccccggcagaagaactgcctgattgacaggaccagcaggaaccgctgccagcactgccgcctgcagaagtgcctggccgtgggcatgagcagagatgctgtgaagtttggaaggatgagcaagaagcagagggacagcctgtatgcagaggtgcagaagcacaggatgcagcagcagcagagggaccaccagcagcagcccggggaggccgagcccctgacccccacctacaacatcagcgccaacggcctgacagagctgcatgatgacctgagcaactacattgatggccacaccccagagggcagcaaggctgacagcgctgtgagcagcttctacctggacatccagcccagcccagaccagagcggcctggacatcaatggcatcaagccagagcccatctgtgactacaccccagccagcggcttcttcccctactgcagcttcaccaatggagagaccagccccaccgtgtccatggccgagctggagcacctggcccagaacatcagcaagagccacctggagacctgccagtacctgcgggaggagctgcagcagatcacctggcagaccttcctgcaggaggagattgagaactaccagaacaagcagcgggaggtgatgtggcagctgtgtgccatcaagatcacagaggccatccagtatgtggtggagtttgccaagagaattgatggcttcatggagctgtgccagaatgaccagatcgtgctgctgaaggccggcagcctggaggtggtgttcatccgcatgtgccgggcctttgacagccagaacaacacagtgtactttgatggcaagtatgccagcccagatgtgttcaagagcctgggctgtgaggacttcatcagctttgtgtttgaatttgggaagagcctgtgcagcatgcacctgacagaagatgagatcgccctcttcagcgcctttgtgctgatgtctgctgaccgctcctggctgcaggagaaggtgaagattgagaagctgcagcagaagatccagctggccctgcagcacgtgctgcagaagaaccacagagaagatggcatcctgaccaagctgatctgcaaggtgtccaccctgcgggccctgtgtggccgccacacagagaagctgatggccttcaaggccatctacccagacatcgtgcggctgcacttcccccccctgtacaaggagctgttcaccagcgagtttgagcccgccatgcagattgatggatag

SEQ ID NO: 167171 - DNA, 1407 bp, synthetic construct
  misc_feature 1..1407: note = Description of Artificial Sequence: Synthetic coding sequence
  source 1..1407: mol_type = other DNA
atgatgtactttgtgattgctgccatgaaggcccagatcgagatcatcccctgcaagatctgtggggacaagagcagcggcatccactacggcgtcatcacctgtgagggctgcaagggcttcttcagaagaagccagcagagcaatgccacctacagctgcccccggcagaagaactgcctgattgacaggaccagcaggaaccgctgccagcactgccgcctgcagaagtgcctggccgtgggcatgagcagagatgctgtgaagtttggccgcatgagcaagaagcagagggacagcctgtatgcagaggtgcagaagcacaggatgcagcagcagcagagggaccaccagcagcagcctggagaggccgagcccctgacccccacctacaacatcagcgccaacggcctgacagagctgcatgatgacctgagcaactacattgatggccacaccccagagggcagcaaggctgacagcgctgtgtcctccttctacctggacatccagcccagcccagaccagagcggcctggacatcaatggcatcaagccagagcccatctgtgactacaccccagccagcggcttcttcccctactgcagcttcaccaacggggagaccagccccaccgtgtccatggccgagctggagcacctggcccagaacatcagcaagagccacctggagacctgccagtacctgcgggaggagctgcagcagatcacctggcagaccttcctgcaggaggagattgagaactaccagaacaagcagcgggaggtgatgtggcagctgtgtgccatcaagatcacagaggccatccagtatgtggtggagtttgccaagagaattgatggcttcatggagctgtgccagaatgaccagatcgtgctgctgaaggccggcagcctggaggtggtgttcatccgcatgtgccgggcctttgacagccagaacaacacagtgtactttgatggcaagtatgccagcccagatgtgttcaagagcctgggctgtgaggacttcatcagctttgtgtttgaatttgggaagagcctgtgcagcatgcacctgacagaagatgaaattgccctcttcagcgcctttgtgctgatgtctgctgaccgctcctggctgcaggagaaggtgaagattgagaagctgcagcagaagatccagctggccctgcagcacgtgctgcagaagaaccaccgggaggatggcatcctgaccaagctgatctgcaaggtgtccaccctgcgggccctgtgtggccgccacacagagaagctgatggccttcaaggccatctacccagacatcgtgcggctgcacttcccccccctgtacaaggagctgttcaccagcgagtttgagcccgccatgcagattgatggatag

SEQ ID NO: 167172 - DNA, 1557 bp, synthetic construct
  misc_feature 1..1557: note = Description of Artificial Sequence: Synthetic coding sequence
  source 1..1557: mol_type = other DNA
atggaccgggccccccagaggcagcaccgggccagccgggagctgctggccgccaagaagacccacaccagccagatcgaggtgatcccctgcaagatctgtggggacaagagcagcggcatccactatggagtcatcacctgtgagggctgcaagggcttcttccgccgcagccagcgctgcaatgctgcctacagctgcacccggcagcagaactgccccatcgacaggaccagcaggaaccgctgccagcactgccgcctgcagaagtgcctggccctgggcatgagcagagatgctgtgaagtttggaaggatgagcaagaagcagagggacagcctgcacgccgaggtgcagaagcagctgcagcagaggcagcagcagcagcaggagcctgtggtgaagaccccacctgctggggcccagggcgctgacaccctgacctacaccctgggcctgcctgatggccagctgcccctgggcagcagcccagacctgcctgaggccagcgcctgccccccaggcctgctgaaggccagcggcagcggccccagctacagcaacaacctggccaaggccggcctgaatggagccagctgccacctggagtacagccctgagcggggcaaggccgagggccgggagagcttctacagcacaggcagccagctgaccccagacagatgtggcctgcgctttgaggagcaccgccaccctggcctgggggagctgggccagggccctgacagctatggcagccccagcttccgcagcaccccagaggccccctatgccagcctgacagaaattgagcacctggtgcagagcgtgtgcaagagctaccgggagacctgccagctgcggctggaggacctgctgcggcagaggagcaacatcttcagccgggaggaggtgacaggctaccagaggaagtccatgtgggagatgtgggagcgctgtgcccaccacctgacagaggccatccagtatgtggtggagtttgccaagaggctgagcggcttcatggagctgtgccagaatgaccagatcgtgctgctgaaggccggggccatggaggtggtgctggtgaggatgtgccgggcctacaatgctgacaacagaacagtgttctttgagggcaagtatggaggcatggagctgttccgggccctgggctgcagcgagctgatcagcagcatctttgacttcagccacagcctgagcgccctgcacttctctgaagatgaaattgccctgtacacagccctggtgctgatcaatgcccacaggcctggcctgcaggagaagaggaaggtggagcagctgcagtacaacctggagctggccttccaccaccacctgtgcaagacccaccggcagagcatcctggccaagctgccccccaagggcaagctgcggagcctgtgcagccagcacgtggagcggctgcagatcttccagcacctgcaccccatcgtggtgcaggccgccttcccccccctgtacaaggagctgttcagcacagaaacagagagccctgtgggcctgagcaagtag

SEQ ID NO: 167173 - DNA, 1494 bp, synthetic construct
  misc_feature 1..1494: note = Description of Artificial Sequence: Synthetic coding sequence
  source 1..1494: mol_type = other DNA
atgaggacccagattgaagtcatcccctgcaagatctgtggggacaagagcagcggcatccactacggcgtcatcacctgtgagggctgcaagggcttcttcagaagaagccagcgctgcaatgctgcctacagctgcacccggcagcagaactgccccatcgacaggaccagcaggaaccgctgccagcactgccgcctgcagaagtgcctggccctgggcatgagcagagatgctgtgaagtttggccgcatgagcaagaagcagagggacagcctgcatgctgaggtgcagaagcagctgcagcagaggcagcagcagcagcaggagcctgtggtgaagaccccacctgctggggcccagggcgctgacaccctgacctacaccctgggcctgcctgatggccagctgcccctgggcagcagcccagacctgcctgaggccagcgcctgccccccaggcctgctgaaggccagcggcagcggccccagctacagcaacaacctggccaaggccggcctgaatggagccagctgccacctggagtacagccctgagcggggcaaggccgagggccgggagagcttctacagcacaggcagccagctgaccccagacagatgtggcctgcgctttgaggagcaccgccaccctggcctgggggagctgggccagggccctgacagctatggcagccccagcttccgcagcaccccagaggccccctatgccagcctgacagaaattgagcacctggtgcagagcgtgtgcaagagctaccgggagacctgccagctgcggctggaggacctgctgcggcagaggagcaacatcttcagccgggaggaggtgacaggctaccagaggaagtccatgtgggagatgtgggagcgctgtgcccaccacctgacagaggccatccagtatgtggtggagtttgccaagaggctgagcggcttcatggagctgtgccagaatgaccagatcgtgctgctgaaggccggggccatggaggtggtgctggtgaggatgtgccgggcctacaatgctgacaacagaacagtgttctttgagggcaagtatggaggcatggagctgttccgggccctgggctgcagcgagctgatcagcagcatctttgacttcagccacagcctgagcgccctgcacttctctgaagatgagatcgccctgtacacagccctggtgctgatcaatgcccaccggcccggcctgcaggagaagaggaaggtggagcagctgcagtacaacctggagctggccttccaccaccacctgtgcaagacccaccggcagagcatcctggccaagctgccccccaagggcaagctgcggagcctgtgcagccagcacgtggagcggctgcagatcttccagcacctgcaccccatcgtggtgcaggccgccttcccccccctgtacaaggagctgttcagcacagaaacagagagccctgtgggcctgagcaagtag

SEQ ID NO: 167174 - DNA, 1719 bp, synthetic construct
  misc_feature 1..1719: note = Description of Artificial Sequence: Synthetic coding sequence
  source 1..1719: mol_type = other DNA
atgtggggcaccggccccagcgctgggaaggacaggatgagcggccggccctggccccacccctggagcaagagcggcaccccatctgagcaggacagaagagccaccggcctggtgtcctgtgaacatggaggcggcaagtttgagggccagagccaccaggcccctggccccccaggcggcggccgcacaggctgcctggagctgctggccgccaagaagacccacaccagccagatcgaggtgatcccctgcaagatctgtggggacaagagcagcggcatccactatggagtcatcacctgtgagggctgcaagggcttcttccgccgcagccagcgctgcaatgctgcctacagctgcacccggcagcagaactgccccatcgacaggaccagcaggaaccgctgccagcactgccgcctgcagaagtgcctggccctgggcatgagcagagatgctgtgaagtttggaaggatgagcaagaagcagagggacagcctgcacgccgaggtgcagaagcagctgcagcagaggcagcagcagcagcaggagcctgtggtgaagaccccacctgctggggcccagggcgctgacaccctgacctacaccctgggcctgcctgatggccagctgcccctgggcagcagcccagacctgcctgaggccagcgcctgccccccaggcctgctgaaggccagcggcagcggccccagctacagcaacaacctggccaaggccggcctgaatggagccagctgccacctggagtacagccctgagcggggcaaggccgagggccgggagagcttctacagcacaggcagccagctgaccccagacagatgtggcctgcgctttgaggagcaccgccaccctggcctgggggagctgggccagggccctgacagctatggcagccccagcttccgcagcaccccagaggccccctatgccagcctgacagaaattgagcacctggtgcagagcgtgtgcaagagctaccgggagacctgccagctgcggctggaggacctgctgcggcagaggagcaacatcttcagccgggaggaggtgacaggctaccagaggaagtccatgtgggagatgtgggagcgctgtgcccaccacctgacagaggccatccagtatgtggtggagtttgccaagaggctgagcggcttcatggagctgtgccagaatgaccagatcgtgctgctgaaggccggggccatggaggtggtgctggtgaggatgtgccgggcctacaatgctgacaacagaacagtgttctttgagggcaagtatggaggcatggagctgttccgggccctgggctgcagcgagctgatcagcagcatctttgacttcagccacagcctgagcgccctgcacttctctgaagatgaaattgccctgtacacagccctggtgctgatcaatgcccacaggcctggcctgcaggagaagaggaaggtggagcagctgcagtacaacctggagctggccttccaccaccacctgtgcaagacccaccggcagagcatcctggccaagctgccccccaagggcaagctgcggagcctgtgcagccagcacgtggagcggctgcagatcttccagcacctgcaccccatcgtggtgcaggccgccttcccccccctgtacaaggagctgttcagcacagaaacagagagccctgtgggcctgagcaagtag

SEQ ID NO: 167175 - DNA, 2835 bp, synthetic construct
  misc_feature 1..2835: note = Description of Artificial Sequence: Synthetic coding sequence
  source 1..2835: mol_type = other DNA
atgctggacagcttcagccaggagagcaccctgcccttccgggaggccaggaagaggaccagcttccagcctgtgcaggtgtggaggaacttcaccgccagccagaccacagagagccctgcctgcagcggggccagcctgggggagatgacagcctggaccatgggcgcccggggcctggacaagaggggcagcttcttcaagctgattgacaccatcgccagcgagattggagagctgaagcaggagatggtgaggacagatgtgaacctggagaatggcctggagcctgctgagacccacagcatggtgcgccacaaggatggcggctacagcgaggaggaggatgtgaagacctgtgcccgggacagcggctatgacagcctgagcaaccggctgagcatcctggaccggctgctgcacacccaccccatctggctgcagctgagcctgtctgaggaggaggccgctgaggtgctgcaggcccagcccccaggcatcttcctggtgcacaagagcaccaagatgcagaagaaggtgctgagcctgcggctgccctgtgaatttggagcccccctgaaggagtttgccatcaaggagagcacctacaccttcagcctggagggcagcggcatcagctttgctgacctcttccggctgattgccttctactgcatcagcagagatgtgctgcccttcaccctgaagctgccctatgccatcagcacagccaagtctgaggcccagctggaggagctggcccagatgggcctgaacttctggagcagccctgctgacagcaagccacccaacctgcccccaccccaccggcccctgagcagtgatggagtgtgcccagccagcctgcggcagctgtgcctgatcaacggggtgcacagcatcaagaccaggaccccatctgagctggagtgcagccagaccaatggagccctgtgcttcatcaaccccctcttcctgaaggtgcacagccaggacctgagcggcggcctgaagaggcccagcaccaggaccccaaatgccaacggcacagagaggaccaggagccccccaccccggcccccacctccagccatcaacagcctgcacaccagcccccggctggccaggacagagacccagacctccatgcctgagaccgtgaaccacaacaagcacggcaatgtggccctgcccggcaccaagcccacccccatccccccaccccggctgaagaagcaggccagcttcctggaggccgagggcggggccaagaccctgagcggcggccggcctggagctggccctgagctggagctgggcacagctggcagccctggaggagcccctcctgaggccgcccctggggactgcacccgggcccccccacccagcagcgagagcaggcctccctgccacggcggccggcagaggctgagtgacatgagcatcagcaccagcagcagtgacagcctggagtttgaccgctccatgcccctgtttggctatgaggccgacaccaacagcagcctggaggactatgaaggagagagtgaccaggagaccatggccccacccatcaagagcaagaagaagaggagcagcagctttgtgctgcccaagctggtgaagagccagctgcagaaggtgtctggagtcttcagcagcttcatgaccccagagaagaggatggtgagaagaattgctgagctgagccgggacaagtgcacctacttcggctgcctggtgcaggactatgtgtccttcctgcaggagaacaaggagtgccacgtgagcagcacagacatgctgcagaccatccggcagttcatgacccaggtgaagaactacctgagccagagcagcgagctggacccccccatcgagagcctcatccctgaggaccagattgatgtggtgctggagaaggccatgcacaagtgcatcctgaagcccctgaagggccacgtggaggccatgctgaaggacttccacatggctgatggctcctggaagcagctgaaggagaacctgcagctggtgcggcagaggaacccccaggagctgggcgtgtttgcccccaccccagactttgtggatgtggagaagatcaaggtgaagttcatgaccatgcagaagatgtacagccctgagaagaaggtgatgctgctgctgcgggtgtgcaagctgatctacacagtgatggagaacaacagcggccgcatgtacggggctgatgacttcctgcctgtgctgacctacgtgattgcccagtgtgacatgctggagctggacacagaaattgagtacatgatggagctgctggaccccagcctgctgcacggggagggcggctactacctgaccagcgcctatggagccctgagcctcatcaagaacttccaggaggagcaggccgcccggctgctgagcagcgagacccgggacaccctgcggcagtggcacaagaggaggaccaccaacagaaccatccccagcgtggatgacttccagaactacctgcgggtggccttccaggaggtgaacagcggctgcaccgggaagaccctgctggtgcggccctacatcaccacagaagatgtgtgccagatctgtgccgagaagttcaaggtgggggaccctgaggagtacagcctcttcctgtttgtggatgagacctggcagcagctggccgaggacacctacccccagaagatcaaggccgagctgcacagccggccccagccccacatcttccactttgtgtacaagaggatcaagaatgacccctacggcatcatcttccagaatggagaggaggacctgaccaccagctag

SEQ ID NO: 167176 - DNA, 1389 bp, synthetic construct
  misc_feature 1..1389: note = Description of Artificial Sequence: Synthetic coding sequence
  source 1..1389: mol_type = other DNA
atgacagcctggaccatgggcgcccggggcctggacaagaggggcagcttcttcaagctgattgacaccatcgccagcgagatcggggagctgaagcaggagatggtgaggacagatgtgaacctggagaatggcctggagcctgctgagacccacagcatggtgcgccacaaggatggcggctacagcgaggaggaggatgtgaagacctgtgcccgggacagcggctatgacagcctgagcaaccggctgagcatcctggaccggctgctgcacacccaccccatctggctgcagctgagcctgtctgaggaggaggccgctgaggtgctgcaggcccagcccccaggcatcttcctggtgcacaagagcaccaagatgcagaagaaggtgctgagcctgcggctgccctgtgaatttggagcccccctgaaggagtttgccatcaaggagagcacctacaacgtggtgctggagaaggccatgcacaagtgcatcctgaagcccctgaagggccacgtggaggccatgctgaaggacttccacatggctgatggctcctggaagcagctgaaggagaacctgcagctggtgcggcagaggaacccccaggagctgggcgtgtttgcccccaccccagactttgtggatgtggagaagatcaaggtgaagttcatgaccatgcagaagatgtacagccctgagaagaaggtgatgctgctgctgcgggtgtgcaagctgatctacacagtgatggagaacaacagcggccgcatgtacggggctgatgacttcctgcctgtgctgacctacgtgattgcccagtgtgacatgctggagctggacacagaaattgagtacatgatggagctgctggaccccagcctgctgcacggggagggcggctactacctgaccagcgcctatggagccctgagcctcatcaagaacttccaggaggagcaggccgcccggctgctgagcagcgagacccgggacaccctgcggcagtggcacaagaggaggaccaccaacagaaccatccccagcgtggatgacttccagaactacctgcgggtggccttccaggaggtgaacagcggctgcaccgggaagaccctgctggtgcggccctacatcaccacagaagatgtgtgccagatctgtgccgagaagttcaaggtgggggaccctgaggagtacagcctcttcctgtttgtggatgagacctggcagcagctggccgaggacacctacccccagaagatcaaggccgagctgcacagccggccccagccccacatcttccactttgtgtacaagaggatcaagaatgacccctacggcatcatcttccagaatggagaggaggacctgaccaccagctag

SEQ ID NO: 167177 - DNA, 717 bp, synthetic construct
  misc_feature 1..717: note = Description of Artificial Sequence: Synthetic coding sequence
  source 1..717: mol_type = other DNA
atgagcagcggctacagcagcctggaggaggatgctgaggacttcttcttcaccgcccggaccagcttcttcagaagagccccccagggcaagcccaggagcggccagcaggatgtggagaaggagaaggagacccacagctacctgagcaaggaggagatcaaggagaaggtgcacaagtacaacctggccgtgacagacaagctgaagatgaccctgaacagcaatggcatctacacaggcttcatcaaggtgcagatggagctgtgcaagccaccccagaccagccccaacagcggcaagctgagccccagcagcaatggctgcatgaacaccctgcacatcagcagcaccaacacagtgggggaggtgattgaggccctgctgaagaagttcctggtgacagagagccctgccaagtttgccctgtacaagcgctgccaccgggaggaccaggtgtatgcctgcaagctgagtgaccgggagcaccccctgtacctgcggctggtggccggccccaggacagacaccctgagctttgtgctgcgggagcatgaaattggagagtgggaggccttcagcctgcctgagctgcagaacttcctgcgcatcctggacaaggaggaggatgagcagctgcagaacctgaagaggcgctacacagcctaccggcagaagctggaggaggccctgcgggaggtgtggaagccagactag

SEQ ID NO: 167178 - DNA, 507 bp, synthetic construct
  misc_feature 1..507: note = Description of Artificial Sequence: Synthetic coding sequence
  source 1..507: mol_type = other DNA
atgaccctgaacagcaatggcatctacacaggcttcatcaaggtgcagatggagctgtgcaagccaccccagaccagccccaacagcggcaagctgagccccagcagcaatggctgcatgaacaccctgcacatcagcagcaccaacacagtgggggaggtgattgaggccctgctgaagaagttcctggtgacagagagccctgccaagtttgccctgtacaagcgctgccaccgggaggaccaggtgtatgcctgcaagctgagtgaccgggagcaccccctgtacctgcggctggtggccggccccaggacagacaccctgagctttgtgctgcgggagcatgaaattggagagtgggaggccttcagcctgcctgagctgcagaacttcctgcgcatcctggacaaggaggaggatgagcagctgcagaacctgaagaggcgctacacagcctaccggcagaagctggaggaggccctgcgggaggtgtggaagccagactag

SEQ ID NO: 167179 - DNA, 717 bp, synthetic construct; identical to SEQ ID NO: 167177
  misc_feature 1..717: note = Description of Artificial Sequence: Synthetic coding sequence
  source 1..717: mol_type = other DNA

SEQ ID NO: 167180 - DNA, 1014 bp, synthetic construct
  misc_feature 1..1014: note = Description of Artificial Sequence: Synthetic coding sequence
  source 1..1014: mol_type = other DNA
atgaccatgatggcccaccagtaccccagctggatcttcatcaatgagaagaccttcatcacccgggagcagctgaacagcctgctgaagacctacaacatcttctatgagaaccagaagaacctgcacatcctgtatggagaaacagaagatggcaagctgattgtggagggcatgctggacatcttctggggcgtgaagaggcccatccagctgaagatccaggatgagaagcccttcagcagcttcacctccatgaagagcagtgatgtgttcagcagcaagggcatgacccgctggggcgagtttgatgacctgtaccgcatcagcgagctggacaggacccagatccccatgtctgagaagaggaacagccaggaggactacctgagctaccacagcaacaccctgaagccccacgccaaggatgagccagacagccctgtgctgtaccgcaccatgtctgaggccgccctggtgaggaagaggatgaagcccctgatgatggacaggaaggagcggcagaagaacagagccagcatcaatggccacttctacaaccacgagaccagcatcttcatcccagcctttgaaagtgagaccaaggtgcgggtgaacagcaacatgaggacagaggaggtgatcaagcagctgctgcagaagttcaagattgagaacagcccccaggactttgccctgcacatcatctttgccactggagagcagaggcggctgaagaagacagacatccccctgctgcagaggctgctgcagggccccagcgagaagaatgcccgcatcttcctgatggacaaggatgctgaggagatcagcagtgatgtggcccagtacatcaacttccacttcagcctgctggagagcatcctgcagaggctgaatgaggaggagaagcgggagatccagagaattgtgaccaagttcaacaaggagaaggccatcatcctgaagtgcctgcagaacaagctggtgatcaagacagagaccaccgtgtag

SEQ ID NO: 167181 - DNA, 978 bp, synthetic construct
  misc_feature 1..978: note = Description of Artificial Sequence: Synthetic coding sequence
  source 1..978: mol_type = other DNA
atgctgtgggaggagaccggggccgccccagccccagcccgggccagtgacctgccctaccgcatccacttcctgagcagcggcctcatcctggtgacccggcagctgacagaagatggcaagctgattgtggagggcatgctggacatcttctggggcgtgaagaggcccatccagctgaagatccaggatgagaagcccttcagcagcttcacctccatgaagagcagtgatgtgttcagcagcaagggcatgacccgctggggcgagtttgatgacctgtaccgcatcagcgagctggacaggacccagatccccatgtctgagaagaggaacagccaggaggactacctgagctaccacagcaacaccctgaagccccacgccaaggatgagccagacagccctgtgctgtaccgcaccatgtctgaggccgccctggtgaggaagaggatgaagcccctgatgatggacaggaaggagcggcagaagaacagagccagcatcaatggccacttctacaaccacgagaccagcatcttcatcccagcctttgaaagtgagaccaaggtgcgggtgaacagcaacatgaggacagaggaggtgatcaagcagctgctgcagaagttcaagattgagaacagcccccaggactttgccctgcacatcatctttgccactggagagcagaggcggctgaagaagacagacatccccctgctgcagaggctgctgcagggccccagcgagaagaatgcccgcatcttcctgatggacaaggatgctgaggagatcagcagtgatgtggcccagtacatcaacttccacttcagcctgctggagagcatcctgcagaggctgaatgaggaggagaagcgggagatccagagaattgtgaccaagttcaacaaggagaaggccatcatcctgaagtgcctgcagaacaagctggtgatcaagacagagaccaccgtgtag

SEQ ID NO: 167182 - DNA, 1110 bp, synthetic construct
  misc_feature 1..1110: note = Description of Artificial Sequence: Synthetic coding sequence
  source 1..1110: mol_type = other DNA
atgctgtgggaggagaccggggccgccccagccccagcccgggccagtgacctgccctaccgcatcagcagtgaccacctgaagaaggaggagaagatgaccatgatggcccaccagtaccccagctggatcttcatcaatgagaagaccttcatcacccgggagcagctgaacagcctgctgaagacctacaacatcttctatgagaaccagaagaacctgcacatcctgtatggagaaacagaagatggcaagctgattgtggagggcatgctggacatcttctggggcgtgaagaggcccatccagctgaagatccaggatgagaagcccttcagcagcttcacctccatgaagagcagtgatgtgttcagcagcaagggcatgacccgctggggcgagtttgatgacctgtaccgcatcagcgagctggacaggacccagatccccatgtctgagaagaggaacagccaggaggactacctgagctaccacagcaacaccctgaagccccacgccaaggatgagccagacagccctgtgctgtaccgcaccatgtctgaggccgccctggtgaggaagaggatgaagcccctgatgatggacaggaaggagcggcagaagaacagagccagcatcaatggccacttctacaaccacgagaccagcatcttcatcccagcctttgaaagtgagaccaaggtgcgggtgaacagcaacatgaggacagaggaggtgatcaagcagctgctgcagaagttcaagattgagaacagcccccaggactttgccctgcacatcatctttgccactggagagcagaggcggctgaagaagacagacatccccctgctgcagaggctgctgcagggccccagcgagaagaatgcccgcatcttcctgatggacaaggatgctgaggagatcagcagtgatgtggcccagtacatcaacttccacttcagcctgctggagagcatcctgcagaggctgaatgaggaggagaagcgggagatccagagaattgtgaccaagttcaacaaggagaaggccatcatcctgaagtgcctgcagaacaagctggtgatcaagacagagaccaccgtgtag

SEQ ID NO: 167183 - DNA, 912 bp, synthetic construct
  misc_feature 1..912: note = Description of Artificial Sequence: Synthetic coding sequence
  source 1..912: mol_type = other DNA
atgaccatgatggcccaccagtaccccagctggatcttcatcaatgagaagaccttcatcacccgggagcagctgaacagcctgctgaagacctacaacatcttctatgagaaccagaagaacctgcacatcctgtatggagaaacagaagatggcaagctgattgtggagggcatgctggacatcttctggggcgtgaagaggcccatccagctgaagatccaggatgagaagcccttcagcagcttcacctccatgaagagcagtgatgtgttcagcagcaagggcatgacccgctggggcgagtttgatgacctgtaccgcatcagcgagctggacaggacccagatccccatgtctgagaagaggaacagccaggaggactacctgagctaccacagcaacaccctgaagccccacgccaaggatgagccagacagccctgtgctgtaccgcaccatgtctgaggccgccctggtgaggaagaggatgaagcccctgatgatggacaggaaggagcggcagaagaacagagccagcatcaatggccacttctacaaccacgagattgagaacagcccccaggactttgccctgcacatcatctttgccactggagagcagaggcggctgaagaagacagacatccccctgctgcagaggctgctgcagggccccagcgagaagaatgcccgcatcttcctgatggacaaggatgctgaggagatcagcagtgatgtggcccagtacatcaacttccacttcagcctgctggagagcatcctgcagaggctgaatgaggaggagaagcgggagatccagagaattgtgaccaagttcaacaaggagaaggccatcatcctgaagtgcctgcagaacaagctggtgatcaagacagagaccaccgtgtag

SEQ ID NO: 167184 - DNA, 3141 bp, synthetic construct
  misc_feature 1..3141: note = Description of Artificial Sequence: Synthetic coding sequence
  source 1..3141: mol_type = other DNA
atgctgagcaggaccctgagctacaagtacagagacctggacagcaccttcagcagcctgggcgccagtgatgatcctgctgagctgagcacccagctgagcgcccctggggtgctgaaggtgtttggagacagcgtgtgcaccggcacccactacaagtctgtgctggccaccggcaccagcagcgcccgggagctggtgaaggaggccctggagagatatgccctggacccccggcaggccggccagtatgtgctgtgtgatgtggtgggccaggccggagatgctggccagcgctggcaggcccgctgcttccgggtgtttggagacagcgagaagcccctgctgatccaggagctgtggaagccccgggagggcctgagcagaagatttgagctgaggaagagaagtgatgtggaggagctggccgccaaggaggtggacaccatcacagctggcatcaatgcccaggcccggcggctgcagaggagccgggccaagggcacccccaccccagccctgggagatgcccggagcagccccccaccccggctgcggaggacagtgtctgagaccagcctgagccctgtgaatgccctgcctgctgctgcccagggccctgaggagcccggcccagatgccatgagatacagcctgtaccagagcccccacctgctgctgctgcagggctacagccagcagcaccctggggtgtgtgcccagcccggccctgcccacggcggccctgctgaccccagcaagcccagcatcagcctgagcgccccagacatcctgcccctgcactgcaccatccggcggcagcccctgcctgattctggccaggccgccggccgcctggtgctggagcccatccctggggcccacatctctgtgaacttcagcgaggtgggccacaggacagtggtgctgcaccacggggacctgctgagcctgggcctgtactacctgctgctcttcaaggaccctgcccaggcccagcccctgcctgcccgggccctggcccggctgcgggctgtgccccagagctgccgcctgtgtggggccgccctgggcgcccggggggccgccagccccacccaggccgccctgccccggcggcagcagctgctgctggagtttgagccccacctggaggacaccctgctgcagaggatcatgaccctcatcgagcctggaggagatgaccacaagctgaccccagccttcctgctgtgcctgtgcatccagcacagcgccacccacttccagcccggcaccttcggccagctgctgctgaagatcgcccggctcatccgggagaccgtgtgggagaagaccaaggagctggccgagaagcaggcccagctgcaggagcccatcagcctggccagctgtgccatggctgacctggtgcctgacctgcagcccatcctcttctggatgagcaacagcattgagctgctgtacttcatccagcagaagtgccccctgtacatgcagagcatggaggagcagctggacatcaccggcagcaaggagagcctcttcagctgcaccctgacagccagcgaggaggccatggctgtgctggaggaggtggtgctgtatgccttccagcagtgtgtgtactacgtgtccaagagcctgtacatctgcctgcctgccctgctggagtgcccccccttccagacagagcggcgggagagctggagcagcgcccctgagctgcctgaggagctgcggcgggtggtgtctgtgtaccaggccgccctggacctgctgcggcagctgcaggtgcaccctgaggtggccagccagatgctggcctacctgttcttcttcagcggcaccctgctgctgaaccagctgctggaccggggccccagcctgagctgcttccactggccccggggcgtgcaggcctgtgcccggctgcagcagctgctggagtggatgaggtctgctggctttggagctgctggggagcacttcttccagaagctgagctgcaccctgaacctgctggccaccccccgggcccagctgatccagatgtcctggacagccctgcgggccgccttccctgccctgagccctgcccagctgcaccggctgctgacccactaccagctggccagcgccatgggccccatgagcacctgggagcccggggcccaggacagccctgaggccttccgctcagaagatgtgctggagagctatgagaaccccccacccatcgtgctgcccagtgatggcttccaggtggacctggaggccaactgcctggatgacagcatctaccagcacctgctgtatgtgcgccacttcctgtggggcctgcggagccgggccagccctggcagccctggccggcccggcagcggggccagccagcctgtgtgcccagagggcatgcaccacgtggtgctggatggccacctggaggcccccagctgccccctggccccccgggaccccggccctgctgcccgggaggtggcccctgagaggaccctgcccctgcggggggccccctgggcccaggcccctcctggccggcagcccagcagaggaggcagccaggccggccccccccacacagacagcagctgcctgctgaccccacccagcacccccctgggccctgagcccggggaccctgactggccagagagcggcggcccctgtgggaaggccctgcctgagcggcagagaaatggcctgagcggcctgcggggagctgcccctgagggggacagcgctgccctggccgaggagagccccccagcccccagcagccgcagcagcagcacagaggacttctgctacgtgttcaccgtggagctggagcggggccccagcggcctgggcatgggcctgattgatggcatgcacacccacctgggcgcccctggcctgtacatccagaccctgctgcccggcagccctgctgctgctgatggccgcctgagcctgggggaccgcatcctggaggtgaatggcagcagcctgctgggcctgggctacctgcgggctgtggacctgatcagacatggaggcaagaagatgaggttcctggtggccaagagtgatgtggagacagccaagaagatccacttccgcaccccacccctgtag

SEQ ID NO: 167185 - DNA, 3228 bp, synthetic construct
  misc_feature 1..3228: note = Description of Artificial Sequence: Synthetic coding sequence
  source 1..3228: mol_type = other DNA
atgttttatggcacccacttcatcatgagcccccccaccaagagcaagctgaagaggcagagccagctgctgagctccatgctgagcaggaccctgagctacaagtacagagacctggacagcaccttcagcagcctgggcgccagtgatgatcctgctgagctgagcacccagctgagcgcccctggggtgctgaaggtgtttggagacagcgtgtgcaccggcacccactacaagtctgtgctggccaccggcaccagcagcgcccgggagctggtgaaggaggccctggagagatatgccctggacccccggcaggccggccagtatgtgctgtgtgatgtggtgggccaggccggagatgctggccagcgctggcaggcccgctgcttccgggtgtttggagacagcgagaagcccctgctgatccaggagctgtggaagccccgggagggcctgagcagaagatttgagctgaggaagagaagtgatgtggaggagctggccgccaaggaggtggacaccatcacagctggcatcaatgcccaggcccggcggctgcagaggagccgggccaagggcacccccaccccagccctgggagatgcccggagcagccccccaccccggctgcggaggacagtgtctgagaccagcctgagccctgtgaatgccctgcctgctgctgcccagggccctgaggagcccggcccagatgccatgagatacagcctgtaccagagcccccacctgctgctgctgcagggctacagccagcagcacgacagcctggtgtatgtgctgaacagagacagacacacagtgggccagaggacccccagcagcaagcccagcatcagcctgagcgccccagacatcctgcccctgcactgcaccatccggcggcagcccctgcctgacagcggccaggccgccggccgcctggtgctggagcccatccctggggcccacatctctgtgaacttcagcgaggtgggccacaggacagtggtgctgcaccacggggacctgctgagcctgggcctgtactacctgctgctcttcaaggaccctgcccaggcccagcccctgcctgcccgggccctggcccggctgcgggctgtgccccagagctgccgcctgtgtggggccgccctgggcgcccggggagctgccagccccacccaggccgccctgccccggcggcagcagctgctgctggagtttgagccccacctggaggacaccctgctgcagaggatcatgaccctgattgagcctggaggagatgaccacaagctgaccccagccttcctgctgtgcctgtgcatccagcacagcgccacccacttccagcccggcaccttcggccagctgctgctgaagatcgcccggctcatccgggagaccgtgtgggagaagaccaaggagctggccgagaagcaggcccagctgcaggagcccatcagcctggccagctgtgccatggctgacctggtgcctgacctgcagcccatcctcttctggatgagcaacagcattgagctgctgtacttcatccagcagaagtgccccctgtacatgcagagcatggaggagcagctggacatcaccggcagcaaggagagcctcttcagctgcaccctgacagccagcgaggaggccatggctgtgctggaggaggtggtgctgtatgccttccagcagtgtgtgtactacgtgtccaagagcctgtacatctgcctgcctgccctgctggagtgcccccccttccagacagaaagaagagagagctggagcagcgcccctgagctgcctgaggagctgcggcgggtggtgtctgtgtaccaggccgccctggacctgctgcggcagctgcaggtgcaccctgaggtggccagccagatgctggcctacctgttcttcttcagcggcaccctgctgctgaaccagctgctggaccggggccccagcctgagctgcttccactggccccggggcgtgcaggcctgtgcccggctgcagcagctgctggagtggatgaggtctgctggctttggagctgctggggagcacttcttccagaagctgagctgcaccctgaacctgctggccaccccccgggcccagctgatccagatgtcctggacagccctgcgggccgccttccctgccctgagccctgcccagctgcaccggctgctgacccactaccagctggccagcgccatgggccccatgagcacctgggagcccggggcccaggacagccctgaggccttccgctcagaagatgtgctggagagctatgaaaatcctccacccatcgtgctgcccagtgatggcttccaggtggacctggaggccaactgcctggatgacagcatctaccagcacctgctgtatgtgcgccacttcctgtggggcctgcggagccgggccagccctggcagccctggccggcccggcagcggggccagccagcctgtgtgcccagagggcatgcaccacgtggtgctggatggccacctggaggcccccagctgccccctggccccccgggaccccggccctgctgcccgggaggtggcccctgagaggaccctgcccctgcggggggccccctgggcccaggcccctcctggccggcagcccagccggggcggcagccaggccggccccccccacacagacagcagctgcctgctgaccccacccagcacccccctgggccctgagcccggggaccctgactggccagagagcggcggcccctgtgggaaggccctgcctgagcggcagagaaatggcctgagcggcctgcggggggccgcccctgagggggacagcgctgccctggccgaggagagccccccagcccccagcagccgcagcagcagcacagaggacttctgctacgtgttcaccgtggagctggagcggggccccagcggcctgggcatgggcctgattgatggcatgcacacccacctgggcgcccctggcctgtacatccagaccctgctgcccggcagccctgctgctgctgatggccgcctgagcctgggggaccgcatcctggaggtgaatggcagcagcctgctgggcctgggctacctgcgggctgtggacctgatccgccacggcggcaagaagatgaggttcctggtggccaagagtgatgtggagacagccaagaagatccacttccgcaccccacccctgtag

SEQ ID NO: 167186 - DNA, 405 bp, synthetic construct
  misc_feature 1..405: note = Description of Artificial Sequence: Synthetic coding sequence
  source 1..405: mol_type = other DNA
atgttttatggcacccacttcatcatgagcccccccaccaagagcaagctgaagaggcagagccagctgctgagctccatgctgagcaggaccctgagctacaagtacagagacctggacagcaccttcagcagcctgggcgccagtgatgatcctgctgagctgagcacccagctgagcgcccctggggtgctgaaggtgtttggagacagcgtgtgcaccggcacccactacaagtctgtgctggccaccggcaccagcagcgcccgggagctggtgaaggaggccctggagagatatgccctggacccccggcaggccggccagtatgtgctgtgtgatgtggtgggccaggccggagatgctggccagcgctggcaggcccgctgcttccgggtcttctag

SEQ ID NO: 167187 - DNA, 1629 bp, synthetic construct
  misc_feature 1..1629: note = Description of Artificial Sequence: Synthetic coding sequence
  source 1..1629: mol_type = other DNA
atgttttatggcacccacttcatcatgagcccccccaccaagagcaagctgaagaggcagagccagctgctgagctccatgctgagcaggaccctgagctacaagtacagagacctggacagcaccttcagcagcctgggcgccagtgatgatcctgctgagctgagcacccagctgagcgcccctggggtgctgaaggtgtttggagacagcgtgtgcaccggcacccactacaagtctgtgctggccaccggcaccagcagcgcccgggagctggtgaaggaggccctggagagatatgccctggacccccggcaggccggccagtatgtgctgtgtgatgtggtgggccaggccggagatgctggccagcgctggcaggcccgctgcttccgggtgtttggagacagcgagaagcccctgctgatccaggagctgtggaagccccgggagggcctgagcagaagatttgagctgaggaagagaagtgatgtggaggagctggccgccaaggaggtggacaccatcacagctggcatcaatgcccaggcccggcggctgcagaggagccgggccaagggcacccccaccccagccctgggagatgcccggagcagccccccaccccggctgcggaggacagtgtctgagaccagcctgagccctgtgaatgccctgcctgctgctgcccagggccctgaggagcccggcccagatgccatgagatacagcctgtaccagagcccccacctgctgctgctgcagggctacagccagcagcacgacagcctggtgtatgtgctgaacagagacagacacacagtgggccagaggacccccagcagcaagcccagcatcagcctgagcgccccagacatcctgcccctgcactgcaccatccggcggcagcccctgcctgacagcggccaggccgccggccgcctggtgctggagcccatccctggggcccacatctctgtgaacttcagcgaggtgggccacaggacagtggtgctgcaccacggggacctgctgagcctgggcctgtactacctgctgctcttcaaggaccctgcccaggcccagcccctgcctgcccgggccctggcccggctgcgggctgtgccccagagctgccgcctgtgtggggccgccctgggcgcccggggagctgccagccccacccaggccgccctgccccggcggcagcagctgctgctggagtttgagccccacctggaggacaccctgctgcagaggatcatgaccctgattgagcctggaggagatgaccacaagctgaccccagccttcctgctgtgcctgtgcatccagcacagcgccacccacttccagcccggcaccttcggccagctgctgctgaagatcgcccggctcatccgggagaccgtgtgggagaagaccaaggagctggccgagaagcaggcccagctgctggagggcattgctgtgctgctgcatgctgatggccagaggggcggccacggcggggccggcggcggcggcgctgtgcggctgcctgctgtgcggctgctgtgcctgcaggtgcctgtgcacctgcccccaggcaccccaggagtgcctgccatcccagatggagccccctag

SEQ ID NO: 167188 - DNA, 2508 bp, synthetic construct
  misc_feature 1..2508: note = Description of Artificial Sequence: Synthetic coding sequence
  source 1..2508: mol_type = other DNA
atgagatacagcctgtaccagagcccccacctgctgctgctgcagggctacagccagcagcacgacagcctggtgtatgtgctgaacagagacagacacacagtgggccagaggacccccagcagcaagcccagcatcagcctgagcgccccagacatcctgcccctgcactgcaccatccggcggcagcccctgcctgacagcggccaggccgccggccgcctggtgctggagcccatccctggggcccacatctctgtgaacttcagcgaggtgggccacaggacagtggtgctgcaccacggggacctgctgagcctgggcctgtactacctgctgctcttcaaggaccctgcccaggcccagcccctgcctgcccgggccctggcccggctgcgggctgtgccccagagctgccgcctgtgtggggccgccctgggcgcccggggagctgccagccccacccaggccgccctgccccggcggcagcagctgctgctggagtttgagccccacctggaggacaccctgctgcagaggatcatgaccctgattgagcctggaggagatgaccacaagctgaccccagccttcctgctgtgcctgtgcatccagcacagcgccacccacttccagcccggcaccttcggccagctgctgctgaagatcgcccggctcatccgggagaccgtgtgggagaagaccaaggagctggccgagaagcaggcccagctgcaggagcccatcagcctggccagctgtgccatggctgacctggtgcctgacctgcagcccatcctcttctggatgagcaacagcattgagctgctgtacttcatccagcagaagtgccccctgtacatgcagagcatggaggagcagctggacatcaccggcagcaaggagagcctcttcagctgcaccctgacagccagcgaggaggccatggctgtgctggaggaggtggtgctgtatgccttccagcagtgtgtgtactacgtgtccaagagcctgtacatctgcctgcctgccctgctggagtgcccccccttccagacagaaagaagagagagctggagcagcgcccctgagctgcctgaggagctgcggcgggtggtgtctgtgtaccaggccgccctggacctgctgcggcagctgcaggtgcaccctgaggtggccagccagatgctggcctacctgttcttcttcagcggcaccctgctgctgaaccagctgctggaccggggccccagcctgagctgcttccactggccccggggcgtgcaggcctgtgcccggctgcagcagctgctggagtggatgaggtctgctggctttggagctgctggggagcacttcttccagaagctgagctgcaccctgaacctgctggccaccccccgggcccagctgatccagatgtcctggacagccctgcgggccgccttccctgccctgagccctgcccagctgcaccggctgctgacccactaccagctggccagcgccatgggccccatgagcacctgggagcccggggcccaggacagccctgaggccttccgctcagaagatgtgctggagagctatgaaaatcctccacccatcgtgctgcccagtgatggcttccaggtggacctggaggccaactgcctggatgacagcatctaccagcacctgctgtatgtgcgccacttcctgtggggcctgcggagccgggccagccctggcagccctggccggcccggcagcggggccagccagcctgtgtgcccagagggcatgcaccacgtggtgctggatggccacctggaggcccccagctgccccctggccccccgggaccccggccctgctgcccgggaggtggcccctgagaggaccctgcccctgcggggggccccctgggcccaggcccctcctggccggcagcccagccggggcggcagccaggccggccccccccacacagacagcagctgcctgctgaccccacccagcacccccctgggccctgagcccggggaccctgactggccagagagcggcggcccctgtgggaaggccctgcctgagcggcagagaaatggcctgagcggcctgcggggggccgcccctgagggggacagcgctgccctggccgaggagagccccccagcccccagcagccgcagcagcagcacagaggacttctgctacgtgttcaccgtggagctggagcggggccccagcggcctgggcatgggcctgattgatggcatgcacacccacctgggcgcccctggcctgtacatccagaccctgctgcccggcagccctgctgctgctgatggccgcctgagcctgggggaccgcatcctggaggtgaatggcagcagcctgctgggcctgggctacctgcgggctgtggacctgatccgccacggcggcaagaagatgaggttcctggtggccaagagtgatgtggagacagccaagaagatccacttccgcaccccacccctgtag

SEQ ID NO: 167189 - DNA, 2085 bp, synthetic construct
  misc_feature 1..2085: note = Description of Artificial Sequence: Synthetic coding sequence
  source 1..2085: mol_type = other DNA
atgtgcagcacaggcaccggcacccgctgggccagcggccccccaccagccagccctgccagcgccagccagccccccaccagctgcctgtacacagcccccagcgctggcaacagaagcaggacagctgcccggccccggggcggctggctggagcccatccctggggcccacatctctgtgaacttcagcgaggtgggccacaggacagtggtgctgcaccacggggacctgctgagcctgggcctgtactacctgctgctcttcaaggaccctgcccaggcccagcccctgcctgcccgggccctggcccggctgcgggctgtgccccagagctgccgcctgtgtggggccgccctgggcgcccggggagctgccagccccacccaggccgccctgccccggcggcagcagctgctgctggagtttgagccccacctggaggacaccctgctgcagaggatcatgaccctgattgagcctggaggagatgaccacaagctgaccccagccttcctgctgtgcctgtgcatccagcacagcgccacccacttccagcccggcaccttcggccagctgctgctgaagatcgcccggctcatccgggagaccgtgtgggagaagaccaaggagctggccgagaagcaggcccagctgcaggagcccatcagcctggccagctgtgccatggctgacctggtgcctgacctgcagcccatcctcttctggatgagcaacagcattgagctgctgtacttcatccagcagaagtgccccctgtacatgcagagcatggaggagcagctggacatcaccggcagcaaggagagcctcttcagctgcaccctgacagccagcgaggaggccatggctgtgctggaggaggtggtgctgtatgccttccagcagtgtgtgtactacgtgtccaagagcctgtacatctgcctgcctgccctgctggagtgcccccccttccagacagaaagaagagagagctggagcagcgcccctgagctgcctgaggagctgcggcgggtggtgtctgtgtaccaggccgccctggacctgctgcggcagctgcaggtgcaccctgaggtggccagccagatgctggcctacctgttcttcttcagcggcaccctgctgctgaaccagctgctggaccggggccccagcctgagctgcttccactggccccggggcgtgcaggcctgtgcccggctgcagcagctgctggagtggatgaggtctgctggctttggagctgctggggagcacttcttccagaagctgagctgcaccctgaacctgctggccaccccccgggcccagctgatccagatgtcctggacagccctgcgggccgccttccctgccctgagccctgcccagctgcaccggctgctgacccactaccagctggccagcgccatgggccccatgagcacctgggagcccggggcccaggacagccctgaggccttccgctcagaagatgtgctggagagctatgaaaatcctccacccatcgtgctgcccagtgatggcttccaggtggacctggaggccaactgcctggatgacagcatctaccagcacctgctgtatgtgcgccacttcctgtggggcctgcggagccgggccagccctggcagccctggccggcccggcagcggggccagccagcctgtgtgcccagagggcatgcaccacgtggtgctggatggccacctggaggcccccagctgccccctggccccccgggaccccggccctgctgcccgggaggtggcccctgagaggaccctgcccctgcggggggccccctgggcccaggcccctcctggccggcagcccccaggcctgtacatccagaccctgctgcccggcagccctgctgctgctgatggccgcctgagcctgggggaccgcatcctggaggtgaatggcagcagcctgctgggcctgggctacctgcgggctgtggacctgatcagacatggaggcaagaagatgaggttcctggtggccaagagtgatgtggagacagccaagaagatccacttccgcaccccacccctgtag

SEQ ID NO: 167190 - DNA, 369 bp, synthetic construct
  misc_feature 1..369: note = Description of Artificial Sequence: Synthetic coding sequence
  source 1..369: mol_type = other DNA
atgaagctggccgccatgatcaagaagatgtgccccagcgacagcgagctgagcatcccagccaagaactgctacaggatggtgatcctgggcagcagcaaggtgggcaagacagccatcgtgagccgcttcctgaccggccgctttgaagatgcctacacccccaccatcgaggacttccacaggaagttctacagcatccggggggaggtgtaccagctggacatcctggacaccagcggcaaccaccccttccctgccatgaggcggctgagcatcctgacagaccccaggcaccaggtgctgccccaggagcagaaccagggcgagcggggccgggcccctggccacctgcggcagcagggctag

SEQ ID NO: 167191 - DNA, 2394 bp, synthetic construct
  misc_feature 1..2394: note = Description of Artificial Sequence: Synthetic coding sequence
  source 1..2394: mol_type = other DNA
atgggcaccctgggcaaggcccgggaggcccccaggaagcccagccacggctgccgggccgccagcaaggcccggctggaggccaagccagccaacagccccttccccagccaccccagcctggcccacatcacccagttcaggatgatggtgtccctgggccacctggccaagggggccagcctggatgacctgattgacagctgcatccagagctttgatgctgatggcaacctgtgccgcagcaaccagctgctgcaggtgatgctgaccatgcacagaattgtcatcagcagcgctgagctgctgcagaaggtgatcaccctgtacaaggatgccctggccaagaacagccctggcctgtgcctgaagatctgctactttgtgcgctactggatcacagagttctgggtgatgttcaagatggatgccagcctgacagacaccatggaggagttccaggagctggtgaaggccaagggggaggagctgcactgccgcctgattgacaccacccagatcaatgcccgggactggagcaggaagctgacccagaggatcaagagcaacaccagcaagaagaggaaggtgtccctgctgtttgaccacctggagcctgaggagctgtctgagcacctgacctacctggagttcaagagcttccgccgcatctccttcagtgactaccagaactacctggtgaacagctgtgtgaaggagaaccccaccatggagaggagcatcgccctgtgcaatggcatcagccagtgggtgcagctgatggtgctgagccggcccaccccccagctgcgggcagaggtgttcatcaagttcatccaggtggcccagaagctgcaccagctgcagaacttcaacaccctgatggccgtcatcggcggcctgtgccacagcagcatcagccggctgaaggagaccagcagccacgtgccccatgagatcaacaaggtgctgggggagatgacagagctgctgagcagcagcagaaattatgacaactacagaagagcctacggggagtgcacagacttcaagatccccatcctgggcgtgcacctgaaggacctgatcagcctgtatgaggccatgccagactacctggaggatggcaaggtgaatgtgcacaagctgctggccctgtacaaccacatcagcgagctggtgcagctgcaggaggtggccccacccctggaggccaacaaggacctggtgcacctgctgaccctgagcctggacctgtactacacagaagatgagatctatgagctgtcctatgcccgggagcccaggaaccaccgggccccacccctgacccccagcaagccccctgtggtggtggactgggccagcggcgtgagccccaagccagaccccaagaccatcagcaagcacgtgcagaggatggtggacagcgtcttcaagaactatgaccatgaccaggacggctacatcagccaggaggagtttgagaagattgctgccagcttccccttctccttctgtgtgatggacaaggaccgggagggcctcatcagcagagatgagatcacagcctacttcatgagggccagcagcatctacagcaagctgggcctgggcttcccccacaacttccaggagaccacctacctgaagcccaccttctgtgacaactgtgccggcttcctgtggggcgtcatcaagcagggctaccgctgcaaggactgtggcatgaactgccacaagcagtgcaaggacctggtggtgtttgagtgcaagaagagggccaagaaccctgtggcccccacagagaacaacacctctgtgggccctgtgagcaacctgtgcagcctgggcgccaaggacctgctgcacgcccctgaggagggccccttcaccttccccaatggagaggccgtggagcacggggaggagagcaaggacaggaccatcatgctgatgggcgtgagcagccagaagatcagcctgcggctgaagagagctgtggcccacaaggccacccagacagagagccagccctggattggcagcgagggccccagcggcccctttgtgctgagcagccccaggaagacagcccaggacaccctgtatgtgctgcccagccccaccagcccctgccccagccctgtgctggtgaggaagagggcctttgtgaagtgggagaacaaggacagcctcatcaagagcaaggaggagctgcggcacctgcggctgcccacctaccaggagctggagcaggagatcaacaccctgaaggctgacaatgatgccctgaagatccagctgaagtatgcccagaagaagattgagagcctgcagctggagaagagcaaccacgtgctggcccagatggagcagggcgactgcagctag

SEQ ID NO: 167192 - DNA, 1794 bp, synthetic construct
  misc_feature 1..1794: note = Description of Artificial Sequence: Synthetic coding sequence
  source 1..1794: mol_type = other DNA
atgggcaccctgggcaaggcccgggaggcccccaggaagcccagccacggctgccgggccgccagcaaggcccggctggaggccaagccagccaacagccccttccccagccaccccagcctggcccacatcacccagttcaggatgatggtgtccctgggccacctggccaagggggccagcctggatgacctgattgacagctgcatccagagctttgatgctgatggcaacctgtgccgcagcaaccagctgctgcaggtgatgctgaccatgcacagaattgtcatcagcagcgctgagctgctgcagaaggtgatcaccctgtacccagatgccctggccaagaacagccctggcctgtgcctgaagatctgctactttgtgcgctactggatcacagagttctgggtgatgttcaagatggatgccagcctgacagacaccatggaggagttccaggagctggtgaaggccaagggggaggagctgcactgccgcctgattgacaccacccagatcaatgcccgggactggagcaggaagctgacccagaggatcaagagcaacaccagcaagaagaggaaggtgtccctgctgtttgaccacctggagcctgaggagctgtctgagcacctgacctacctggagttcaagagcttccgccgcatctccttcagtgactaccagaactacctggtgaacagctgtgtgaaggagaaccccaccatggagaggagcatcgccctgtgcaatggcatcagccagtgggtgcagctgatggtgctgagccggcccaccccccagctgcgggcagaggtgttcatcaagttcatccaggtggcccagaagctgcaccagctgcagaacttcaacaccctgatggccgtcatcggcggcctgtgccacagcagcatcagccggctgaaggagaccagcagccacgtgccccatgagatcaacaaggtgctgggggagatgacagagctgctgagcagcagcagaaattatgacaactacagaagagcctacggggagtgcacagacttcaagatccccatcctgggcgtgcacctgaaggacctgatcagcctgtatgaggccatgccagactacctggaggatggcaaggtgaatgtgcacaagctgctggccctgtacaaccacatcagcgagctggtgcagctgcaggaggtggccccacccctggaggccaacaaggacctggtgcacctgctgaccctgagcctggacctgtactacacagaagatgagatctatgagctgtcctatgcccgggagcccaggaaccaccgggcccccagcgtcttcaagaactatgaccatgaccaggacggctacatcagccaggaggagtttgagaagattgctgccagcttccccttctccttctgtgtgatggacaaggaccgggagggcctcatcagcagagatgagatcacagcctacttcatgagggccagcagcatctacagcaagctgggcctgggcttcccccacaacttccaggagaccacctacctgaagcccaccttctgtgacaactgtgccggcttcctgtggggcgtcatcaagcagggctaccgctgcaaggactgtggcatgaactgccacaagcagtgcaaggacctggtggtgtttgagtgcaagaagagggccaagaaccctgtggcccccacagagaacaacacctctgtgggccctgtgagcaacctgtgcagcctgggcgccaaggacctgctgcacggcaacaagtacagcgagagcaggtag

SEQ ID NO: 167193 - DNA, 1641 bp, synthetic construct
  misc_feature 1..1641: note = Description of Artificial Sequence: Synthetic coding sequence
  source 1..1641: mol_type = other DNA
atgggcaccctgggcaaggcccgggaggcccccaggaagcccagccacggctgccgggccgccagcaaggcccggctggaggccaagccagccaacagccccttccccagccaccccagcctggcccacatcacccagttcaggatgatggtgtccctgggccacctggccaagggggccagcctggatgacctgattgacagctgcatccagagctttgatgctgatggcaacctgtgccgcagcaaccagctgctgcaggtgatgctgaccatgcacagaattgtcatcagcagcgctgagctgctgcagaaggtgatcaccctgtacccagatgccctggccaagaacagccctggcctgtgcctgaagatctgctactttgtgcgctactggatcacagagttctgggtgatgttcaagatggatgccagcctgacagacaccatggaggagttccaggagctggtgaaggccaagggggaggagctgcactgccgcctgattgacaccacccagatcaatgcccgggactggagcaggaagctgacccagaggatcaagagcaacaccagcaagaagaggaaggtgtccctgctgtttgaccacctggagcctgaggagctgtctgagcacctgacctacctggagttcaagagcttccgccgcatctccttcagtgactaccagaactacctggtgaacagctgtgtgaaggagaaccccaccatggagaggagcatcgccctgtgcaatggcatcagccagtgggtgcagctgatggtgctgagccggcccaccccccagctgcgggcagaggtgttcatcaagttcatccaggtggcccagaagctgcaccagctgcagaacttcaacaccctgatggccgtcatcggcggcctgtgccacagcagcatcagccggctgaaggagaccagcagccacgtgccccatgagatcaacaaggtgctgggggagatgacagagctgctgagcagcagcagaaattatgacaactacagaagagcctacggggagtgcacagacttcaagatccccatcctgggcgtgcacctgaaggacctgatcagcctgtatgaggccatgccagactacctggaggatggcaaggtgaatgtgcacaagctgctggccctgtacaaccacatcagcgagctggtgcagctgcaggaggtggccccacccctggaggccaacaaggacctggtgcacctgctgaccctgagcctggacctgtactacacagaagatgagatctatgagctgtcctatgcccgggagcccaggaaccaccgggcccccagcgtcttcaagaactatgaccatgaccaggacggctacatcagccaggaggagtttgagaagattgctgccagcttccccttctccttctgtgtgatggacaaggaccgggagggcctcatcagcagagatgagatcacagcctacttcatgagggccagcagcatctacagcaagctgggcctgggcttcccccacaacttccaggagaccacctacctgaagcccaccttctgtgacaactgtgccggcttcctgtggggcgtcatcaagcagggctaccgctgcaagggcaacaagtacagcgagagcaggtag

SEQ ID NO: 167194 - DNA, 2289 bp, synthetic construct
  misc_feature 1..2289: note = Description of Artificial Sequence: Synthetic coding sequence
  source 1..2289: mol_type = other DNA
atgggcaccctgggcaaggcccgggaggcccccaggaagcccagccacggctgccgggccgccagcaaggcccggctggaggccaagccagccaacagccccttccccagccaccccagcctggcccacatcacccagttcaggatgatggtgtccctgggccacctggccaagggggccagcctggatgacctgattgacagctgcatccagagctttgatgctgatggcaacctgtgccgcagcaaccagctgctgcaggtgatgctgaccatgcacagaattgtcatcagcagcgctgagctgctgcagaaggtgatcaccctgtacaaggatgccctggccaagaacagccctggcctgtgcctgaagatctgctactttgtgcgctactggatcacagagttctgggtgatgttcaagatggatgccagcctgacagacaccatggaggagttccaggagctggtgaaggccaagggggaggagctgcactgccgcctgattgacaccacccagatcaatgcccgggactggagcaggaagctgacccagaggatcaagagcaacaccagcaagaagaggaaggtgtccctgctgtttgaccacctggagcctgaggagctgtctgagcacctgacctacctggagttcaagagcttccgccgcatctccttcagtgactaccagaactacctggtgaacagctgtgtgaaggagaaccccaccatggagaggagcatcgccctgtgcaatggcatcagccagtgggtgcagctgatggtgctgagccggcccaccccccagctgcgggcagaggtgttcatcaagttcatccaggtggcccagaagctgcaccagctgcagaacttcaacaccctgatggccgtcatcggcggcctgtgccacagcagcatcagccggctgaaggagaccagcagccacgtgccccatgagatcaacaaggtgctgggggagatgacagagctgctgagcagcagcagaaattatgacaactacagaagagcctacggggagtgcacagacttcaagatccccatcctgggcgtgcacctgaaggacctgatcagcctgtatgaggccatgccagactacctggaggatggcaaggtgaatgtgcacaagctgctggccctgtacaaccacatcagcgagctggtgcagctgcaggaggtggccccacccctggaggccaacaaggacctggtgcacctgctgaccctgagcctggacctgtactacacagaagatgagatctatgagctgtcctatgcccgggagcccaggaaccaccgggcccccagcgtcttcaagaactatgaccatgaccaggacggctacatcagccaggaggagtttgagaagattgctgccagcttccccttctccttctgtgtgatggacaaggaccgggagggcctcatcagcagagatgagatcacagcctacttcatgagggccagcagcatctacagcaagctgggcctgggcttcccccacaacttccaggagaccacctacctgaagcccaccttctgtgacaactgtgccggcttcctgtggggcgtcatcaagcagggctaccgctgcaaggactgtggcatgaactgccacaagcagtgcaaggacctggtggtgtttgagtgcaagaagagggccaagaaccctgtggcccccacagagaacaacacctctgtgggccctgtgagcaacctgtgcagcctgggcgccaaggacctgctgcacgcccctgaggagggccccttcaccttccccaacggggaggccgtggagcacggggaggagagcaaggacaggaccatcatgctgatgggcgtgagcagccagaagatcagcctgcggctgaagagagctgtggcccacaaggccacccagacagagagccagccctggattggcagcgagggccccagcggcccctttgtgctgagcagccccaggaagacagcccaggacaccctgtatgtgctgcccagccccaccagcccctgccccagccctgtgctggtgaggaagagggcctttgtgaagtgggagaacaaggacagcctcatcaagagcaaggaggagctgcggcacctgcggctgcccacctaccaggagctggagcaggagatcaacaccctgaaggctgacaatgatgccctgaagatccagctgaagtatgcccagaagaagattgagagcctgcagctggagaagagcaaccacgtgctggcccagatggagcagggcgactgcagctag

SEQ ID NO: 167195 - DNA, 2250 bp, synthetic construct
  misc_feature 1..2250: note = Description of Artificial Sequence: Synthetic coding sequence
  source 1..2250: mol_type = other DNA
atgatggtgtccctgggccacctggccaagggggccagcctggatgacctgattgacagctgcatccagagctttgatgctgatggcaacctgtgccgcagcaaccagctgctgcaggtgatgctgaccatgcacagaattgtcatcagcagcgctgagctgctgcagaaggtgatcaccctgtacaaggatgccctggccaagaacagccctggcctgtgcctgaagatctgctactttgtgcgctactggatcacagagttctgggtgatgttcaagatggatgccagcctgacagacaccatggaggagttccaggagctggtgaaggccaagggggaggagctgcactgccgcctgattgacaccacccagatcaatgcccgggactggagcaggaagctgacccagaggatcaagagcaacaccagcaagaagaggaaggtgtccctgctgtttgaccacctggagcctgaggagctgtctgagcacctgacctacctggagttcaagagcttccgccgcatctccttcagtgactaccagaactacctggtgaacagctgtgtgaaggagaaccccaccatggagaggagcatcgccctgtgcaatggcatcagccagtgggtgcagctgatggtgctgagccggcccaccccccagctgcgggcagaggtgttcatcaagttcatccaggtggcccagaagctgcaccagctgcagaacttcaacaccctgatggccgtcatcggcggcctgtgccacagcagcatcagccggctgaaggagaccagcagccacgtgccccatgagatcaacaaggtgctgggggagatgacagagctgctgagcagcagcagaaattatgacaactacagaagagcctacggggagtgcacagacttcaagatccccatcctgggcgtgcacctgaaggacctgatcagcctgtatgaggccatgccagactacctggaggatggcaaggtgaatgtgcacaagctgctggccctgtacaaccacatcagcgagctggtgcagctgcaggaggtggccccacccctggaggccaacaaggacctggtgcacctgctgaccctgagcctggacctgtactacacagaagatgagatctatgagctgtcctatgcccgggagcccaggaaccaccgggccccacccctgacccccagcaagccccctgtggtggtggactgggccagcggcgtgagccccaagccagaccccaagaccatcagcaagcacgtgcagaggatggtggacagcgtcttcaagaactatgaccatgaccaggacggctacatcagccaggaggagtttgagaagattgctgccagcttccccttctccttctgtgtgatggacaaggaccgggagggcctcatcagcagagatgagatcacagcctacttcatgagggccagcagcatctacagcaagctgggcctgggcttcccccacaacttccaggagaccacctacctgaagcccaccttctgtgacaactgtgccggcttcctgtggggcgtcatcaagcagggctaccgctgcaaggactgtggcatgaactgccacaagcagtgcaaggacctggtggtgtttgagtgcaagaagagggccaagaaccctgtggcccccacagagaacaacacctctgtgggccctgtgagcaacctgtgcagcctgggcgccaaggacctgctgcacgcccctgaggagggccccttcaccttccccaatggagaggccgtggagcacggggaggagagcaaggacaggaccatcatgctgatgggcgtgagcagccagaagatcagcctgcggctgaagagagctgtggcccacaaggccacccagacagagagccagccctggattggcagcgagggccccagcggcccctttgtgctgagcagccccaggaagacagcccaggacaccctgtatgtgctgcccagccccaccagcccctgccccagccctgtgctggtgaggaagagggcctttgtgaagtgggagaacaaggacagcctcatcaagagcaaggaggagctgcggcacctgcggctgcccacctaccaggagctggagcaggagatcaacaccctgaaggctgacaatgatgccctgaagatccagctgaagtatgcccagaagaagattgagagcctgcagctggagaagagcaaccacgtgctggcccagatggagcagggcgactgcagctag

SEQ ID NO: 167196 - DNA, 1446 bp, synthetic construct
  misc_feature 1..1446: note = Description of Artificial Sequence: Synthetic coding sequence
  source 1..1446: mol_type = other DNA
atgggcaccctgggcaaggcccgggaggcccccaggaagcccagccacggctgccgggccgccagcaaggcccggctggaggccaagccagccaacagccccttccccagccaccccagcctggcccacatcacccagttcaggatgatggtgtccctgggccacctggccaagggggccagcctggatgacctgattgacagctgcatccagagctttgatgctgatggcaacctgtgccgcagcaaccagctgctgcaggtgatgctgaccatgcacagaattgtcatcagcagcgctgagctgctgcagaaggtgatcaccctgtacccagatgccctggccaagaacagccctggcctgtgcctgaagatctgctactttgtgcgctactggatcacagagttctgggtgatgttcaagatggatgccagcctgacagacaccatggaggagttccaggagctggtgaaggccaagggggaggagctgcactgccgcctgattgacaccacccagatcaatgcccgggactggagcaggaagctgacccagaggatcaagagcaacaccagcaagaagaggaaggtgtccctgctgtttgaccacctggagcctgaggagctgtctgagcacctgacctacctggagttcaagagcttccgccgcatctccttcagtgactaccagaactacctggtgaacagctgtgtgaaggagaaccccaccatggagaggagcatcgccctgtgcaatggcatcagccagtgggtgcagctgatggtgctgagccggcccaccccccagctgcgggcagaggtgttcatcaagttcatccaggtggcccagaagctgcaccagctgcagaacttcaacaccctgatggccgtcatcggcggcctgtgccacagcagcatcagccggctgaaggagaccagcagccacgtgccccatgagatcaacaaggtgctgggggagatgacagagctgctgagcagcagcagaaattatgacaactacagaagagcctacggggagtgcacagacttcaagatccccatcctgggcgtgcacctgaaggacctgatcagcctgtatgaggccatgccagactacctggaggatggcaaggtgaatgtgcacaagctgctggccctgtacaaccacatcagcgagctggtgcagctgcaggaggtggccccacccctggaggccaacaaggacctggtgcacctgctgaccctgagcctggacctgtactacacagaagatgagatctatgagctgtcctatgcccgggagcccaggaaccaccgggcccccagcgtcttcaagaactatgaccatgaccaggacggctacatcagccaggaggagtttgagaagattgctgccagcttccccttctccttctgtgtgatggacaaggacagaagtggggcctag

SEQ ID NO: 167197 - DNA, 1641 bp, synthetic construct
  misc_feature 1..1641: note = Description of Artificial Sequence: Synthetic coding sequence
  source 1..1641: mol_type = other DNA
atgggcaccctgggcaaggcccgggaggcccccaggaagcccagccacggctgccgggccgccagcaaggcccggctggaggccaagccagccaacagccccttccccagccaccccagcctggcccacatcacccagttcaggatgatggtgtccctgggccacctggccaagggggccagcctggatgacctgattgacagctgcatccagagctttgatgctgatggcaacctgtgccgcagcaaccagctgctgcaggtgatgctgaccatgcacagaattgtcatcagcagcgctgagctgctgcagaaggtgatcaccctgtacaaggatgccctggccaagaacagccctggcctgtgcctgaagatctgctactttgtgcgctactggatcacagagttctgggtgatgttcaagatggatgccagcctgacagacaccatggaggagttccaggagctggtgaaggccaagggggaggagctgcactgccgcctgattgacaccacccagatcaatgcccgggactggagcaggaagctgacccagaggatcaagagcaacaccagcaagaagaggaaggtgtccctgctgtttgaccacctggagcctgaggagctgtctgagcacctgacctacctggagttcaagagcttccgccgcatctccttcagtgactaccagaactacctggtgaacagctgtgtgaaggagaaccccaccatggagaggagcatcgccctgtgcaatggcatcagccagtgggtgcagctgatggtgctgagccggcccaccccccagctgcgggcagaggtgttcatcaagttcatccaggtggcccagaagctgcaccagctgcagaacttcaacaccctgatggccgtcatcggcggcctgtgccacagcagcatcagccggctgaaggagaccagcagccacgtgccccatgagatcaacaaggtgctgggggagatgacagagctgctgagcagcagcagaaattatgacaactacagaagagcctacggggagtgcacagacttcaagatccccatcctgggcgtgcacctgaaggacctgatcagcctgtatgaggccatgccagactacctggaggatggcaaggtgaatgtgcacaagctgctggccctgtacaaccacatcagcgagctggtgcagctgcaggaggtggccccacccctggaggccaacaaggacctggtgcacctgctgaccctgagcctggacctgtactacacagaagatgagatctatgagctgtcctatgcccgggagcccaggaaccaccgggcccccagcgtcttcaagaactatgaccatgaccaggacggctacatcagccaggaggagtttgagaagattgctgccagcttccccttctccttctgtgtgatggacaaggaccgggagggcctcatcagcagagatgagatcacagcctacttcatgagggccagcagcatctacagcaagctgggcctgggcttcccccacaacttccaggagaccacctacctgaagcccaccttctgtgacaactgtgccggcttcctgtggggcgtcatcaagcagggctaccgctgcaagggcaacaagtacagcgagagcaggtag

SEQ ID NO: 167198 - DNA, 1794 bp, synthetic construct
  misc_feature 1..1794: note = Description of Artificial Sequence: Synthetic coding sequence
  source 1..1794: mol_type = other DNA
atgggcaccctgggcaaggcccgggaggcccccaggaagcccagccacggctgccgggccgccagcaaggcccggctggaggccaagccagccaacagccccttccccagccaccccagcctggcccacatcacccagttcaggatgatggtgtccctgggccacctggccaagggggccagcctggatgacctgattgacagctgcatccagagctttgatgctgatggcaacctgtgccgcagcaaccagctgctgcaggtgatgctgaccatgcacagaattgtcatcagcagcgctgagctgctgcagaaggtgatcaccctgtacaaggatgccctggccaagaacagccctggcctgtgcctgaagatctgctactttgtgcgctactggatcacagagttctgggtgatgttcaagatggatgccagcctgacagacaccatggaggagttccaggagctggtgaaggccaagggggaggagctgcactgccgcctgattgacaccacccagatcaatgcccgggactggagcaggaagctgacccagaggatcaagagcaacaccagcaagaagaggaaggtgtccctgctgtttgaccacctggagcctgaggagctgtctgagcacctgacctacctggagttcaagagcttccgccgcatctccttcagtgactaccagaactacctggtgaacagctgtgtgaaggagaaccccaccatggagaggagcatcgccctgtgcaatggcatcagccagtgggtgcagctgatggtgctgagccggcccaccccccagctgcgggcagaggtgttcatcaagttcatccaggtggcccagaagctgcaccagctgcagaacttcaacaccctgatggccgtcatcggcggcctgtgccacagcagcatcagccggctgaaggagaccagcagccacgtgccccatgagatcaacaaggtgctgggggagatgacagagctgctgagcagcagcagaaattatgacaactacagaagagcctacggggagtgcacagacttcaagatccccatcctgggcgtgcacctgaaggacctgatcagcctgtatgaggccatgccagactacctggaggatggcaaggtgaatgtgcacaagctgctggccctgtacaaccacatcagcgagctggtgcagctgcaggaggtggccccacccctggaggccaacaaggacctggtgcacctgctgaccctgagcctggacctgtactacacagaagatgagatctatgagctgtcctatgcccgggagcccaggaaccaccgggcccccagcgtcttcaagaactatgaccatgaccaggacggctacatcagccaggaggagtttgagaagattgctgccagcttccccttctccttctgtgtgatggacaaggaccgggagggcctcatcagcagagatgagatcacagcctacttcatgagggccagcagcatctacagcaagctgggcctgggcttcccccacaacttccaggagaccacctacctgaagcccaccttctgtgacaactgtgccggcttcctgtggggcgtcatcaagcagggctaccgctgcaaggactgtggcatgaactgccacaagcagtgcaaggacctggtggtgtttgagtgcaagaagagggccaagaaccctgtggcccccacagagaacaacacctctgtgggccctgtgagcaacctgtgcagcctgggcgccaaggacctgctgcacggcaacaagtacagcgagagcaggtag

SEQ ID NO: 167199 - DNA, 1830 bp, synthetic construct
  misc_feature 1..1830: note = Description of Artificial Sequence: Synthetic coding sequence
  source 1..1830: mol_type = other DNA
atggccggcaccctggacctggacaagggctgcaccgtggaggagctgctgcggggctgcatcgaggcctttgatgattctgggaaggtgcgggacccccagctggtgaggatgttcctgatgatgcacccctggtacatccccagcagccagctggccgccaagctgctgcacatctaccagcagagcaggaaggacaacagcaacagcctgcaggtgaagacctgccacctggtgcgctactggatcagcgccttccctgctgagtttgacctgaaccctgagctggccgagcagatcaaggagctgaaggccctgctggaccaggagggcaacagaagacacagcagcctgattgatattgattctgtgcccacctacaagtggaagaggcaggtgacccagaggaaccctgtgggccagaagaagaggaagatgagcctgctgtttgaccacctggagcccatggagctggccgagcacctgacctacctggagtaccgctccttctgcaagatcctcttccaggactaccacagctttgtgacccacggctgcaccgtggacaaccctgtgctggagcgcttcatcagcctcttcaacagcgtgtcccagtgggtgcagctgatgatcctgagcaagcccacagccccccagagggccctggtgatcacccactttgtgcacgtggccgagaagctgctgcagctgcagaacttcaacaccctgatggctgtggtgggcggcctgagccacagcagcatcagccggctgaaggagacccacagccacgtgtccccagagaccatcaagctgtgggagggcctgacagagctggtgacagccactggaaactacggcaactacagaagaaggctggccgcctgtgtgggcttccgcttccccatcctgggcgtgcacctgaaggacctggtggccctgcagctggccctgcctgactggctggaccctgcccggacccggctgaatggagccaagatgaagcagctgttcagcatcctggaggagctggccatggtgaccagcctgcggccccctgtgcaggccaacccagacctgctgagcctgctgactgtgtccctggaccagtaccagacagaagatgagctgtaccagctgagcctgcagcgggagcccaggagcaagagcagccccaccagccccaccagctgcaccccaccaccccggccccctgtgctggaggagtggaccagcgctgccaagcccaagctggaccaggccctggtggtggagcacatcgagaagatggtggagagcgtcttcaggaactttgatgtggatggagatggccacatcagccaggaggagttccagatcatccggggcaacttcccctacctgagcgccttcggggacctggaccagaaccaggacggctgcatcagccgggaggagatggtgtcctacttcctgcggagcagctctgtgctgggcggccgcatgggctttgtgcacaacttccaggagagcaacagcctgcggcctgtggcctgccgccactgcaaggccctgatcctgggcatctacaagcagggcctgaagtgccgggcctgtggggtgaactgccacaagcagtgcaaggaccggctgtctgtggagtgcagaagaagagcccagagcgtgtccctggagggcagcgcccccagccccagccccatgcacagccaccaccaccgggccttctccttcagcctgccccggcccggccggcggggcagcaggcctcctgagatccgggaggaggaggtgcagacagtggaggatggagtgtttgacatccacctgtag

SEQ ID NO: 167200 - DNA, 1833 bp, synthetic construct
  misc_feature 1..1833: note = Description of Artificial Sequence: Synthetic coding sequence
  source 1..1833: mol_type = other DNA
atggccggcaccctggacctggacaagggctgcaccgtggaggagctgctgcggggctgcatcgaggcctttgatgattctgggaaggtgcgggacccccagctggtgaggatgttcctgatgatgcacccctggtacatccccagcagccagctggccgccaagctgctgcacatctaccagcagagcaggaaggacaacagcaacagcctgcaggtgaagacctgccacctggtgcgctactggatcagcgccttccctgctgagtttgacctgaaccctgagctggccgagcagatcaaggagctgaaggccctgctggaccaggagggcaacagaagacacagcagcctgattgatattgattctgtgcccacctacaagtggaagaggcaggtgacccagaggaaccctgtgggccagaagaagaggaagatgagcctgctgtttgaccacctggagcccatggagctggccgagcacctgacctacctggagtaccgctccttctgcaagatcctcttccaggactaccacagctttgtgacccacggctgcaccgtggacaaccctgtgctggagcgcttcatcagcctcttcaacagcgtgtcccagtgggtgcagctgatgatcctgagcaagcccacagccccccagagggccctggtgatcacccactttgtgcacgtggccgagaagctgctgcagctgcagaacttcaacaccctgatggctgtggtgggcggcctgagccacagcagcatcagccggctgaaggagacccacagccacgtgtccccagagaccatcaagctgtgggagggcctgacagagctggtgacagccactggaaactacggcaactacagaagaaggctggccgcctgtgtgggcttccgcttccccatcctgggcgtgcacctgaaggacctggtggccctgcagctggccctgcctgactggctggaccctgcccggacccggctgaatggagccaagatgaagcagctgttcagcatcctggaggagctggccatggtgaccagcctgcggccccctgtgcaggccaacccagacctgctgagcctgctgactgtgtccctggaccagtaccagacagaagatgagctgtaccagctgagcctgcagcgggagcccaggagcaagagcagccccaccagccccaccagctgcaccccaccaccccggccccctgtgctggaggagtggaccagcgctgccaagcccaagctggaccaggccctggtggtggagcacatcgagaagatggtggagagcgtcttcaggaactttgatgtggatggagatggccacatcagccaggaggagttccagatcatccggggcaacttcccctacctgagcgccttcggggacctggaccagaaccaggacggctgcatcagccgggaggagatggtgtcctacttcctgcggagcagctctgtgctgggcggccgcatgggctttgtgcacaacttccaggagagcaacagcctgcggcctgtggcctgccgccactgcaaggccctgatcctgggcatctacaagcagggcctgaagtgccgggcctgtggggtgaactgccacaagcagtgcaaggaccggctgtctgtggagtgcagaagaagagcccagagcgtgtccctggagggcagcgcccccagccccagccccatgcacagccaccaccaccgggccttctccttcagcctgccccggcccggccggcggggcagcaggcctcctgctgagatccgggaggaggaggtgcagacagtggaggatggagtgtttgacatccacctgtag

SEQ ID NO: 167201 - DNA, 1830 bp, synthetic construct; identical to SEQ ID NO: 167199
  misc_feature 1..1830: note = Description of Artificial Sequence: Synthetic coding sequence
  source 1..1830: mol_type = other DNA

SEQ ID NO: 167202 - DNA, 1830 bp, synthetic construct; identical to SEQ ID NO: 167199
  misc_feature 1..1830: note = Description of Artificial Sequence: Synthetic coding sequence
  source 1..1830: mol_type = other DNA

SEQ ID NO: 167203 - DNA, 432 bp, synthetic construct
  misc_feature 1..432: note = Description of Artificial Sequence: Synthetic coding sequence
  source 1..432: mol_type = other DNA
atggccggcaccctggacctggacaagggctgcaccgtggaggagctgctgcggggctgcatcgaggcctttgatgattctgggaaggtgcgggacccccagctggtgaggatgttcctgatgatgcacccctggtacatccccagcagccagctggccgccaagctgctgcacatctaccagcagagcaggaaggacaacagcaacagcctgcaggtgaagacctgccacctggtgcgctactggatcagcgccttccctgctgagtttgacctgaaccctgagctggccgagcagatcaaggagctgaaggccctgctggaccaggagggcaacagaagacacagcagcctgattgatattgattctgtgtgtgtgggggagcaccggggcctgggcggccacagcgtgtcctacaccatctgtgcctag

SEQ ID NO: 167204 - DNA, 1731 bp, synthetic construct
  misc_feature 1..1731: note = Description of Artificial Sequence: Synthetic coding sequence
  source 1..1731: mol_type = other DNA
atgaacaggaaggacagcaagaggaagagccaccaggagtgcaccgggaagattggaggccggggccggccccggcaggtgcggcggcacaagacctgccccagcccccgggagatcagcaaggtgatggcctccatgaacctgggcctgctgtctgagggcggctgcagtgaagatgagctgctggagaagtgcatccagagctttgattctgctggcagcctgtgccacgaggaccacatgctgaacatggtgctggccatgcacagctgggtgctgcccagcgctgacctggccgcccggctgctgaccagctaccagaaggccaccggggacacccaggagctgcggcggctgcagatctgccacctggtgcgctactggctgatgaggcaccctgaggtgatgcaccaggacccccagctggaggaggtgattggccgcttctgggccaccgtggcccgggagggcaacagcgcccagaggcggctgggggacagcagtgacctgctgagccctgggggccctggcccccccctgcccatgagcagccctggcctgggcaagaagaggaaggtgtccctgctgtttgaccacctggagaccggggagctggcccagcacctgacctacctggagttccgctccttccaggccatcacagccctgctggagctgacagagctgctggccagccacaacaactatgcccgctacagaaggacctgggccggctgtgccggcttccggctgcctgtgctgggcgtgcacctgaaggacctggtgtccctgcacgaggcccagcctgaccggctgcctgatggccgcctgcacctgcccaagctgaacaacctgtacctgcggctgcaggagctggtggccctgcagggccagcaccccccctgcagcgccaatgaagacctgctgcacctgctgaccctgagcctggacctcttctacacagaagatgagatctatgagctgtcctatgcccgggagccccgctgccccaagagcctgccccccagccccttcaatgcccccctggtggtggagtgggcccctggggtgacccccaagccagacagagtgaccctgggcagacatgtggagcagctggtggagagcgtcttcaagaactatgaccctgagggccggggcaccatcagccaggaggactttgagcggctgagcggcaacttcccctttgcctgccacggcctgcaccccccaccccggcagggccggggcagcttcagccgggaggagctgaccggctacctgctgcgggccagcgccatctgcagcaagctgggcctggccttcctgcacaccttccacgaggtgaccttcaggaagcccaccttctgtgacagctgcagcggcttcctgtggggcgtgaccaagcagggctaccgctgccgggagtgtggcctgtgctgccacaagcactgccgggaccaggtgaaggtggagtgcaagaagaggcctggggccaagggagatgctggccccccaggggcccctgtgcccagcaccccagcccctcatgccagctgtggcagcgaggagaaccacagctacaccctgagcctggagcctgagaccggctgccagctgcggcatgcctggacccagacagagagcccccaccccagctgggagacagacacagtgccctgccctgtgatggacccccccagcacagccagcagcaagctggacagctag

SEQ ID NO: 167205 - DNA, 1854 bp, synthetic construct
  misc_feature 1..1854: note = Description of Artificial Sequence: Synthetic coding sequence
  source 1..1854: mol_type = other DNA
atgaacaggaaggacagcaagaggaagagccaccaggagtgcaccgggaagattggaggccggggccggccccggcaggtgcggcggcacaagacctgccccagcccccgggagatcagcaaggtgatggcctccatgaacctgggcctgctgtctgagggcggctgcagtgaagatgagctgctggagaagtgcatccagagctttgattctgctggcagcctgtgccacgaggaccacatgctgaacatggtgctggccatgcacagctgggtgctgcccagcgctgacctggccgcccggctgctgaccagctaccagaaggccaccggggacacccaggagctgcggcggctgcagatctgccacctggtgcgctactggctgatgaggcaccctgaggtgatgcaccaggacccccagctggaggaggtgattggccgcttctgggccaccgtggcccgggagggcaacagcgcccagaggcggctgggggacagcagtgacctgctgagccctgggggccctggcccccccctgcccatgagcagccctggcctgggcaagaagaggaaggtgtccctgctgtttgaccacctggagaccggggagctggcccagcacctgacctacctggagttccgctccttccaggccatcaccccccaggacctgcggagctatgtgctgcagggctctgtgcggggctgcccagccctggagggctctgtgggcctgagcaacagcgtgagccgctgggtgcaggtgatggtgctgagccggcccggccccctgcagagggcccaggtgctggacaagttcatccacgtggcccagaggctgcaccagctgcagaacttcaacaccctgatggctgtgactggaggcctgtgccacagcgccatcagccggctgaaggacagccacgcccacctgagcccagacagcaccaaggccctgctggagctgacagagctgctggccagccacaacaactatgcccgctacagaaggacctgggccggctgtgccggcttccggctgcctgtgctgggcgtgcacctgaaggacctggtgtccctgcacgaggcccagcctgaccggctgcctgatggccgcctgcacctgcccaagctgaacaacctgtacctgcggctgcaggagctggtggccctgcagggccagcaccccccctgcagcgccaatgaagacctgctgcacctgctgaccctgagcctggacctcttctacacagaagatgagatctatgagctgtcctatgcccgggagccccgctgccccaagagcctgccccccagccccttcaatgcccccctggtggtggagtgggcccctggggtgacccccaagccagacagagtgaccctgggccgccacgtggagcagctggtggagagcgtcttcaagaactatgaccctgagggccggggcaccatcagccaggaggactttgagcggctgagcggcaacttcccctttgcctgccacggcctgcaccccccaccccggcagggccggggcagcttcagccgggaggagctgaccggctacctgctgcgggccagcgccatctgcagcaagctgggcctggccttcctgcacaccttccacgaggtgaccttcaggaagcccaccttctgtgacagctgcagcggcttcctgtggggcgtgaccaagcagggctaccgctgccgcggggagtggggcgtgtctgagtgggagggcagcctgggcccccaggccggccgcatggatgacacagacaggaccccagctgctgccttcccccagagcgctggctgtgtggccaccaacacagctgagaccaggtag

SEQ ID NO: 167206 - DNA, 1455 bp, synthetic construct
  misc_feature 1..1455: note = Description of Artificial Sequence: Synthetic coding sequence
  source 1..1455: mol_type = other DNA
atgaacaggaaggacagcaagaggaagagccaccaggagtgcaccgggaagattggaggccggggccggccccggcaggtgcggcggcacaagacctgccccagcccccgggagatcagcaaggtgatggcctccatgaacctgggcctgctgtctgagggcggctgcagtgaagatgagctgctggagaagtgcatccagagctttgattctgctggcagcctgtgccacgaggaccacatgctgaacatggtgctggccatgcacagctgggtgctgcccagcgctgacctggccgcccggctgctgaccagctaccagaaggccaccggggacacccaggagctgcggcggctgcagatctgccacctggtgcgctactggctgatgaggcaccctgaggtgatgcaccaggacccccagctggaggaggtgattggccgcttctgggccaccgtggcccgggagggcaacagcgcccagaggcggctgggggacagcagtgacctgctgagccctgggggccctggcccccccctgcccatgagcagccctggcctgggcaagaagaggaaggtgtccctgctgtttgaccacctggagaccggggagctggcccagcacctgacctacctggagttccgctccttccaggccatcaccctgagcctggacctcttctacacagaagatgagatctatgagctgtcctatgcccgggagccccgctgccccaagagcctgccccccagccccttcaatgcccccctggtggtggagtgggcccctggggtgacccccaagccagacagagtgaccctgggcagacatgtggagcagctggtggagagcgtcttcaagaactatgaccctgagggccggggcaccatcagccaggaggactttgagcggctgagcggcaacttcccctttgcctgccacggcctgcaccccccaccccggcagggccggggcagcttcagccgggaggagctgaccggctacctgctgcgggccagcgccatctgcagcaagctgggcctggccttcctgcacaccttccacgaggtgaccttcaggaagcccaccttctgtgacagctgcagcggcttcctgtggggcgtgaccaagcagggctaccgctgccgggagtgtggcctgtgctgccacaagcactgccgggaccaggtgaaggtggagtgcaagaagaggcctggggccaagggagatgctggccccccaggggcccctgtgcccagcaccccagcccctcatgccagctgtggcagcgaggagaaccacagctacaccctgagcctggagcctgagaccggctgccagctgcggcatgcctggacccagacagagagcccccaccccagctgggagacagacacagtgccctgccctgtgatggacccccccagcacagccagcagcaagctggacagctag

SEQ ID NO: 167207 - DNA, 1746 bp, synthetic construct
  misc_feature 1..1746: note = Description of Artificial Sequence: Synthetic coding sequence
  source 1..1746: mol_type = other DNA
atgaacaggaaggacagcaagaggaagagccaccaggagtgcaccgggaagattggaggccggggccggccccggcaggtgcggcggcacaagacctgccccagcccccgggagatcagcaaggtgatggcctccatgaacctgggcctgctgtctgagggcggctgcagtgaagatgagctgctggagaagtgcatccagagctttgattctgctggcagcctgtgccacgaggaccacatgctgaacatggtgctggccatgcacagctgggtgctgcccagcgctgacctggccgcccggctgctgaccagctaccagaaggccaccggggacacccaggagctgcggcggctgcagatctgccacctggtgcgctactggctgatgaggcaccctgaggtgatgcaccaggacccccagctggaggaggtgattggccgcttctgggccaccgtggcccgggagggcaacagcgcccagaggcggctgggggacagcagtgacctgctgagccctgggggccctggcccccccctgcccatgagcagccctggcctgggcaagaagaggaaggtgtccctgctgtttgaccacctggagaccggggagctggcccagcacctgacctacctggagttccgctccttccaggccatcaccccccaggacctgcggagctatgtgctgcagggctctgtgcggggctgcccagccctggagggctctgtgggcctgagcaacagcgtgagccgctgggtgcaggtgatggtgctgagccggcccggccccctgcagagggcccaggtgctggacaagttcatccacgtggcccagaggctgcaccagctgcagaacttcaacaccctgatggctgtgactggaggcctgtgccacagcgccatcagccggctgaaggacagccacgcccacctgagcccagacagcaccaagctgagcctggacctcttctacacagaagatgagatctatgagctgtcctatgcccgggagccccgctgccccaagagcctgccccccagccccttcaatgcccccctggtggtggagtgggcccctggggtgacccccaagccagacagagtgaccctgggccgccacgtggagcagctggtggagagcgtcttcaagaactatgaccctgagggccggggcaccatcagccaggaggactttgagcggctgagcggcaacttcccctttgcctgccacggcctgcaccccccaccccggcagggccggggcagcttcagccgggaggagctgaccggctacctgctgcgggccagcgccatctgcagcaagctgggcctggccttcctgcacaccttccacgaggtgaccttcaggaagcccaccttctgtgacagctgcagcggcttcctgtggggcgtgaccaagcagggctaccgctgcagagaatgtggcctgtgctgccacaagcactgccgggaccaggtgaaggtggagtgcaagaagaggcctggggccaagggagatgctggccccccaggggcccctgtgcccagcaccccagccccccacgccagctgtggcagcgaggagaaccacagctacaccctgagcctggagcctgagaccggctgccagctgcggcatgcctggacccagacagagagcccccaccccagctgggagacagacacagtgccctgccctgtgatggacccccccagcacagccagcagcaagctggacagctag

SEQ ID NO: 167208 - DNA, 2022 bp, synthetic construct
  misc_feature 1..2022: note = Description of Artificial Sequence: Synthetic coding sequence
  source 1..2022: mol_type = other DNA
atgaacaggaaggacagcaagaggaagagccaccaggagtgcaccgggaagattggaggccggggccggccccggcaggtgcggcggcacaagacctgccccagcccccgggagatcagcaaggtgatggcctccatgaacctgggcctgctgtctgagggcggctgcagtgaagatgagctgctggagaagtgcatccagagctttgattctgctggcagcctgtgccacgaggaccacatgctgaacatggtgctggccatgcacagctgggtgctgcccagcgctgacctggccgcccggctgctgaccagctaccagaaggccaccggggacacccaggagctgcggcggctgcagatctgccacctggtgcgctactggctgatgaggcaccctgaggtgatgcaccaggacccccagctggaggaggtgattggccgcttctgggccaccgtggcccgggagggcaacagcgcccagaggcggctgggggacagcagtgacctgctgagccctgggggccctggcccccccctgcccatgagcagccctggcctgggcaagaagaggaaggtgtccctgctgtttgaccacctggagaccggggagctggcccagcacctgacctacctggagttccgctccttccaggccatcaccccccaggacctgcggagctatgtgctgcagggctctgtgcggggctgcccagccctggagggctctgtgggcctgagcaacagcgtgagccgctgggtgcaggtgatggtgctgagccggcccggccccctgcagagggcccaggtgctggacaagttcatccacgtggcccagaggctgcaccagctgcagaacttcaacaccctgatggctgtgactggaggcctgtgccacagcgccatcagccggctgaaggacagccacgcccacctgagcccagacagcaccaaggccctgctggagctgacagagctgctggccagccacaacaactatgcccgctacagaaggacctgggccggctgtgccggcttccggctgcctgtgctgggcgtgcacctgaaggacctggtgtccctgcacgaggcccagcctgaccggctgcctgatggccgcctgcacctgcccaagctgaacaacctgtacctgcggctgcaggagctggtggccctgcagggccagcaccccccctgcagcgccaatgaagacctgctgcacctgctgaccctgagcctggacctcttctacacagaagatgagatctatgagctgtcctatgcccgggagccccgctgccccaagagcctgccccccagccccttcaatgcccccctggtggtggagtgggcccctggggtgacccccaagccagacagagtgaccctgggccgccacgtggagcagctggtggagagcgtcttcaagaactatgaccctgagggccggggcaccatcagccaggaggactttgagcggctgagcggcaacttcccctttgcctgccacggcctgcaccccccaccccggcagggccggggcagcttcagccgggaggagctgaccggctacctgctgcgggccagcgccatctgcagcaagctgggcctggccttcctgcacaccttccacgaggtgaccttcaggaagcccaccttctgtgacagctgcagcggcttcctgtggggcgtgaccaagcagggctaccgctgcagagaatgtggcctgtgctgccacaagcactgccgggaccaggtgaaggtggagtgcaagaagaggcctggggccaagggagatgctggccccccaggggcccctgtgcccagcaccccagccccccacgccagctgtggcagcgaggagaaccacagctacaccctgagcctggagcctgagaccggctgccagctgcggcatgcctggacccagacagagagcccccaccccagctgggagacagacacagtgccctgccctgtgatggacccccccagcacagccagcagcaagctggacagctag

SEQ ID NO: 167209 - DNA, 1980 bp, synthetic construct
  misc_feature 1..1980: note = Description of Artificial Sequence: Synthetic coding sequence
  source 1..1980: mol_type = other DNA
atgaacaggaaggacagcaagaggaagagccaccaggagtgcaccgggaagattggaggccggggccggccccggcaggtgcggcggcacaagacctgccccagcccccgggagatcagcaaggtgatggcctccatgaacctgggcctgctgtctgagggcggctgcagtgaagatgagctgctggagaagtgcatccagagctttgattctgctggcagcctgtgccacgaggaccacatgctgaacatggtgctggccatgcacagctgggtgctgcccagcgctgacctggccgcccggctgctgaccagctaccagaaggccaccggggacacccaggagctgcggcggctgcagatctgccacctggtgcgctactggctgatgaggcaccctgaggtgatgcaccaggacccccagctggaggaggtgattggccgcttctgggccaccgtggcccgggagggcaacagcgcccagaggcggctgggggacagcagtgacctgcccggcctgggcaagaagaggaaggtgtccctgctgtttgaccacctggagaccggggagctggcccagcacctgacctacctggagttccgctccttccaggccatcaccccccaggacctgcggagctatgtgctgcagggctctgtgcggggctgcccagccctggagggctctgtgggcctgagcaacagcgtgagccgctgggtgcaggtgatggtgctgagccggcccggccccctgcagagggcccaggtgctggacaagttcatccacgtggcccagaggctgcaccagctgcagaacttcaacaccctgatggctgtgactggaggcctgtgccacagcgccatcagccggctgaaggacagccacgcccacctgagcccagacagcaccaaggccctgctggagctgacagagctgctggccagccacaacaactatgcccgctacagaaggacctgggccggctgtgccggcttccggctgcctgtgctgggcgtgcacctgaaggacctggtgtccctgcacgaggcccagcctgaccggctgcctgatggccgcctgcacctgcccaagctgaacaacctgtacctgcggctgcaggagctggtggccctgcagggccagcaccccccctgcagcgccaatgaagacctgctgcacctgctgaccctgagcctggacctcttctacacagaagatgagatctatgagctgtcctatgcccgggagccccgctgccccaagagcctgccccccagccccttcaatgcccccctggtggtggagtgggcccctggggtgacccccaagccagacagagtgaccctgggccgccacgtggagcagctggtggagagcgtcttcaagaactatgaccctgagggccggggcaccatcagccaggaggactttgagcggctgagcggcaacttcccctttgcctgccacggcctgcaccccccaccccggcagggccggggcagcttcagccgggaggagctgaccggctacctgctgcgggccagcgccatctgcagcaagctgggcctggccttcctgcacaccttccacgaggtgaccttcaggaagcccaccttctgtgacagctgcagcggcttcctgtggggcgtgaccaagcagggctaccgctgcagagaatgtggcctgtgctgccacaagcactgccgggaccaggtgaaggtggagtgcaagaagaggcctggggccaagggagatgctggccccccaggggcccctgtgcccagcaccccagccccccacgccagctgtggcagcgaggagaaccacagctacaccctgagcctggagcctgagaccggctgccagctgcggcatgcctggacccagacagagagcccccaccccagctgggagacagacacagtgccctgccctgtgatggacccccccagcacagccagcagcaagctggacagctag

SEQ ID NO: 167210 - DNA, 1815 bp, synthetic construct
  misc_feature 1..1815: note = Description of Artificial Sequence: Synthetic coding sequence
  source 1..1815: mol_type = other DNA
atgaacaggaaggacagcaagaggaagagccaccaggagtgcaccgggaagattggaggccggggccggccccggcaggtgcggcggcacaagacctgccccagcccccgggagatcagcaaggtgatggcctccatgaacctgggcctgctgtctgagggcggctgcagtgaagatgagctgctggagaagtgcatccagagctttgattctgctggcagcctgtgccacgaggaccacatgctgaacatggtgctggccatgcacagctgggtgctgcccagcgctgacctggccgcccggctgctgaccagctaccagaaggccaccggggacacccaggagctgcggcggctgcagatctgccacctggtgcgctactggctgatgaggcaccctgaggtgatgcaccaggacccccagctggaggaggtgattggccgcttctgggccaccgtggcccgggagggcaacagcgcccagaggcggctgggggacagcagtgacctgctgagccctgggggccctggcccccccctgcccatgagcagccctggcctgggcaagaagaggaaggtgtccctgctgtttgaccacctggagaccggggagctggcccagcacctgacctacctggagttccgctccttccaggccatcaccccccaggacctgcggagctatgtgctgcagggctctgtgcggggctgcccagccctggagggctctgtgggcctgagcaacagcgtgagccgctgggtgcaggtgatggtgctgagccggcccggccccctgcagagggcccaggtgctggacaagttcatccacgtggcccagaggctgcaccagctgcagaacttcaacaccctgatggctgtgactggaggcctgtgccacagcgccatcagccggctgaaggacagccacgcccacctgagcccagacagcaccaaggagctggtggccctgcagggccagcaccccccctgcagcgccaatgaagacctgctgcacctgctgaccctgagcctggacctcttctacacagaagatgagatctatgagctgtcctatgcccgggagccccgctgccccaagagcctgccccccagccccttcaatgcccccctggtggtggagtgggcccctggggtgacccccaagccagacagagtgaccctgggcagacatgtggagcagctggtggagagcgtcttcaagaactatgaccctgagggccggggcaccatcagccaggaggactttgagcggctgagcggcaacttcccctttgcctgccacggcctgcaccccccaccccggcagggccggggcagcttcagccgggaggagctgaccggctacctgctgcgggccagcgccatctgcagcaagctgggcctggccttcctgcacaccttccacgaggtgaccttcaggaagcccaccttctgtgacagctgcagcggcttcctgtggggcgtgaccaagcagggctaccgctgccgggagtgtggcctgtgctgccacaagcactgccgggaccaggtgaaggtggagtgcaagaagaggcctggggccaagggagatgctggccccccaggggcccctgtgcccagcaccccagcccctcatgccagctgtggcagcgaggagaaccacagctacaccctgagcctggagcctgagaccggctgccagctgcggcatgcctggacccagacagagagcccccaccccagctgggagacagacacagtgccctgccctgtgatggacccccccagcacagccagcagcaagctggacagctag

SEQ ID NO: 167211 - DNA, 1857 bp, synthetic construct
  misc_feature 1..1857: note = Description of Artificial Sequence: Synthetic coding sequence
  source 1..1857: mol_type = other DNA
atgaagaaggatgtgcgcatcctgctggtgggggagccccgggtgggcaagaccagcctcatcatgagcctggtgtctgaggagttccctgaggaggtgccccccagggctgaggagatcaccatcccagcagatgtgaccccagagcgggtgcccacccacatcgtggactacagcgaggccgagcagagtgatgagcagctgcaccaggagatcagccaggccaacgtcatctgcatcgtgtatgctgtgaacaacaagcacagcattgacaaggtgaccagccgctggatccccctcatcaatgaaagaacagacaaggacagccggctgcccctcatcctggtgggcaacaagagtgacctggtggagtacagctccatggagaccatcctgcccatcatgaaccagtacacagaaattgagacctgtgtggagtgcagcgccaagaacctgaagaacatcagcgagctgttctactatgcccagaaggctgtgctgcaccccaccggccccctgtactgcccagaggagaaggagatgaagccagcctgcatcaaggccctgacccgcatcttcaagatcagtgaccaggacaatgatggcaccctgaatgatgctgagctgaacttcttccagaggatctgcttcaacacccccctggccccccaggccctggaggatgtgaagaatgtggtgaggaagcacatcagtgatggagtggccgacagcggcctgaccctgaagggcttcctgttcctgcacaccctcttcatccagagaggaagacatgagaccacctggacagtgctgcggcgcttcggctatgatgatgacctggacctgaccccagagtacctgttccccctgctgaagatccccccagactgcaccacagagctgaaccaccacgcctacctgttcctgcagagcacctttgacaagcatgacctggaccgggactgtgccctgagcccagatgagctgaaggacctcttcaaggtgttcccctacatcccctggggcccagatgtgaacaacacagtgtgcaccaatgaaagaggctggatcacctaccagggcttcctgagccagtggaccctgaccacctacctggatgtgcagcgctgcctggagtacctgggctacctgggctacagcatcctgacagagcaggagagccaggccagcgctgtgacagtgacccgggacaagaagattgacctgcagaagaagcagacccagagaaatgtgttccgctgcaacgtcatcggcgtgaagaactgtgggaagagcggcgtgctgcaggccctgctgggcaggaacctgatgaggcagaagaagatccgggaggaccacaagagctactatgccatcaacacagtgtatgtgtatggccaggagaagtacctgctgctgcatgacatcagcgagagcgagttcctgacagaagctgagatcatctgtgatgtggtgtgcctggtgtatgatgtgagcaaccccaagagctttgagtactgtgcccgcatcttcaagcagcacttcatggacagccgcatcccctgcctgattgtggccgccaagagtgacctgcacgaggtgaagcaggagtacagcatcagccccacagacttctgcaggaagcacaagatgcccccaccccaggccttcacctgcaacacagcagatgcccccagcaaggacatctttgtgaagctgaccaccatggccatgtacccccacgtgacccaggccgacctgaagagcagcaccttctggctgcgggccagctttggagccaccgtgtttgctgtgctgggctttgccatgtacaaggccctgctgaagcagaggtag

SEQ ID NO: 167212 - DNA, 1980 bp, synthetic construct
  misc_feature 1..1980: note = Description of Artificial Sequence: Synthetic coding sequence
  source 1..1980: mol_type = other DNA
atgaagaaggatgtgcgcatcctgctggtgggggagccccgggtgggcaagaccagcctcatcatgagcctggtgtctgaggagttccctgaggaggtgccccccagggctgaggagatcaccatcccagcagatgtgaccccagagcgggtgcccacccacatcgtggactacagcgaggccgagcagagtgatgagcagctgcaccaggagatcagccaggccaacgtcatctgcatcgtgtatgctgtgaacaacaagcacagcattgacaaggtgaccagccgctggatccccctcatcaatgaaagaacagacaaggacagccggctgcccctcatcctggtgggcaacaagagtgacctggtggagtacagctccatggagaccatcctgcccatcatgaaccagtacacagaaattgagacctgtgtggagtgcagcgccaagaacctgaagaacatcagcgagctgttctactatgcccagaaggctgtgctgcaccccaccggccccctgtactgcccagaggagaaggagatgaagccagcctgcatcaaggccctgacccgcatcttcaagatcagtgaccaggacaatgatggcaccctgaatgatgctgagctgaacttcttccagaggatctgcttcaacacccccctggccccccaggccctggaggatgtgaagaatgtggtgaggaagcacatcagtgatggagtggccgacagcggcctgaccctgaagggcttcctgttcctgcacaccctcttcatccagagaggaagacatgagaccacctggacagtgctgcggcgcttcggctatgatgatgacctggacctgaccccagagtacctgttccccctgctgaagatccccccagactgcaccacagagctgaaccaccacgcctacctgttcctgcagagcacctttgacaagcatgacctggaccgggactgtgccctgagcccagatgagctgaaggacctcttcaaggtgttcccctacatcccctggggcccagatgtgaacaacacagtgtgcaccaatgaaagaggctggatcacctaccagggcttcctgagccagtggaccctgaccacctacctggatgtgcagcgctgcctggagtacctgggctacctgggctacagcatcctgacagagcaggagagccaggccagcgctgtgacagtgacccgggacaagaagattgacctgcagaagaagcagacccagagaaatgtgttccgctgcaacgtcatcggcgtgaagaactgtgggaagagcggcgtgctgcaggccctgctgggcaggaacctgatgaggcagaagaagatccgggaggaccacaagagctactatgccatcaacacagtgtatgtgtatggccaggagaagtacctgctgctgcatgacatcagcgagagcgagttcctgacagaagctgagatcatctgtgatgtggtgtgcctggtgtatgatgtgagcaaccccaagagctttgagtactgtgcccgcatcttcaagcagcacttcatggacagccgcatcccctgcctgattgtggccgccaagagtgacctgcacgaggtgaagcaggagtacagcatcagccccacagacttctgcaggaagcacaagatgcccccaccccaggccttcacctgcaacacagcagatgcccccagcaaggacatctttgtgaagctgaccaccatggccatgtacccccacgcccggctgcgctgcatgtgcacctgcaaccgctgcaccttctgcatctgccagaacttcctgaacagcgacctgctgcagagcgtgaagaacaagatcttcaccgctgtgctgaacagacatgtgacccaggccgacctgaagagcagcaccttctggctgcgggccagctttggagccaccgtgtttgctgtgctgggctttgccatgtacaaggccctgctgaagcagaggtag

SEQ ID NO: 167213 - DNA, 2076 bp, synthetic construct
  misc_feature 1..2076: note = Description of Artificial Sequence: Synthetic coding sequence
  source 1..2076: mol_type = other DNA
atgaagaaggatgtgcgcatcctgctggtgggggagccccgggtgggcaagaccagcctcatcatgagcctggtgtctgaggagttccctgaggaggtgccccccagggctgaggagatcaccatcccagcagatgtgaccccagagcgggtgcccacccacatcgtggactacagcgaggccgagcagagtgatgagcagctgcaccaggagatcagccaggccaacgtcatctgcatcgtgtatgctgtgaacaacaagcacagcattgacaaggtgaccagccgctggatccccctcatcaatgaaagaacagacaaggacagccggctgcccctcatcctggtgggcaacaagagtgacctggtggagtacagctccatggagaccatcctgcccatcatgaaccagtacacagaaattgagacctgtgtggagtgcagcgccaagaacctgaagaacatcagcgagctgttctactatgcccagaaggctgtgctgcaccccaccggccccctgtactgcccagaggagaaggagatgaagccagcctgcatcaaggccctgacccgcatcttcaagatcagtgaccaggacaatgatggcaccctgaatgatgctgagctgaacttcttccagaggatctgcttcaacacccccctggccccccaggccctggaggatgtgaagaatgtggtgaggaagcacatcagtgatggagtggccgacagcggcctgaccctgaagggcttcctgttcctgcacaccctcttcatccagagaggaagacatgagaccacctggacagtgctgcggcgcttcggctatgatgatgacctggacctgaccccagagtacctgttccccctgctgaagatccccccagactgcaccacagagctgaaccaccacgcctacctgttcctgcagagcacctttgacaagcatgacctggaccgggactgtgccctgagcccagatgagctgaaggacctcttcaaggtgttcccctacatcccctggggcccagatgtgaacaacacagtgtgcaccaatgaaagaggctggatcacctaccagggcttcctgagccagtggaccctgaccacctacctggatgtgcagcgctgcctggagtacctgggctacctgggctacagcatcctgacagagcaggagagccaggccagcgctgtgacagtgacccgggacaagaagattgacctgcagaagaagcagacccagagaaatgtgttccgctgcaacgtcatcggcgtgaagaactgtgggaagagcggcgtgctgcaggccctgctgggcaggaacctgatgaggcagaagaagatccgggaggaccacaagagctactatgccatcaacacagtgtatgtgtatggccaggagaagtacctgctgctgcatgacatcagcgagagcgagttcctgacagaagctgagatcatctgtgatgtggtgtgcctggtgtatgatgtgagcaaccccaagagctttgagtactgtgcccgcatcttcaagcagcacttcatggacagccgcatcccctgcctgattgtggccgccaagagtgacctgcacgaggtgaagcaggagtacagcatcagccccacagacttctgcaggaagcacaagatgcccccaccccaggccttcacctgcaacacagcagatgcccccagcaaggacatctttgtgaagctgaccaccatggccatgtacccagaggaccactacagagaccggctgagccgggacatgggccacacagacagaattgagaacctgaggaagatctgggtgttcctgaagacagccttccacgcccggctgcgctgcatgtgcacctgcaaccgctgcaccttctgcatctgccagaacttcctgaacagcgacctgctgcagagcgtgaagaacaagatcttcaccgctgtgctgaacagacatgtgacccaggccgacctgaagagcagcaccttctggctgcgggccagctttggagccaccgtgtttgctgtgctgggctttgccatgtacaaggccctgctgaagcagaggtag

SEQ ID NO: 167214 - DNA, 1953 bp, synthetic construct
  misc_feature 1..1953: note = Description of Artificial Sequence: Synthetic coding sequence
  source 1..1953: mol_type = other DNA
atgaagaaggatgtgcgcatcctgctggtgggggagccccgggtgggcaagaccagcctcatcatgagcctggtgtctgaggagttccctgaggaggtgccccccagggctgaggagatcaccatcccagcagatgtgaccccagagcgggtgcccacccacatcgtggactacagcgaggccgagcagagtgatgagcagctgcaccaggagatcagccaggccaacgtcatctgcatcgtgtatgctgtgaacaacaagcacagcattgacaaggtgaccagccgctggatccccctcatcaatgaaagaacagacaaggacagccggctgcccctcatcctggtgggcaacaagagtgacctggtggagtacagctccatggagaccatcctgcccatcatgaaccagtacacagaaattgagacctgtgtggagtgcagcgccaagaacctgaagaacatcagcgagctgttctactatgcccagaaggctgtgctgcaccccaccggccccctgtactgcccagaggagaaggagatgaagccagcctgcatcaaggccctgacccgcatcttcaagatcagtgaccaggacaatgatggcaccctgaatgatgctgagctgaacttcttccagaggatctgcttcaacacccccctggccccccaggccctggaggatgtgaagaatgtggtgaggaagcacatcagtgatggagtggccgacagcggcctgaccctgaagggcttcctgttcctgcacaccctcttcatccagagaggaagacatgagaccacctggacagtgctgcggcgcttcggctatgatgatgacctggacctgaccccagagtacctgttccccctgctgaagatccccccagactgcaccacagagctgaaccaccacgcctacctgttcctgcagagcacctttgacaagcatgacctggaccgggactgtgccctgagcccagatgagctgaaggacctcttcaaggtgttcccctacatcccctggggcccagatgtgaacaacacagtgtgcaccaatgaaagaggctggatcacctaccagggcttcctgagccagtggaccctgaccacctacctggatgtgcagcgctgcctggagtacctgggctacctgggctacagcatcctgacagagcaggagagccaggccagcgctgtgacagtgacccgggacaagaagattgacctgcagaagaagcagacccagagaaatgtgttccgctgcaacgtcatcggcgtgaagaactgtgggaagagcggcgtgctgcaggccctgctgggcaggaacctgatgaggcagaagaagatccgggaggaccacaagagctactatgccatcaacacagtgtatgtgtatggccaggagaagtacctgctgctgcatgacatcagcgagagcgagttcctgacagaagctgagatcatctgtgatgtggtgtgcctggtgtatgatgtgagcaaccccaagagctttgagtactgtgcccgcatcttcaagcagcacttcatggacagccgcatcccctgcctgattgtggccgccaagagtgacctgcacgaggtgaagcaggagtacagcatcagccccacagacttctgcaggaagcacaagatgcccccaccccaggccttcacctgcaacacagcagatgcccccagcaaggacatctttgtgaagctgaccaccatggccatgtacccagaggaccactacagagaccggctgagccgggacatgggccacacagacagaattgagaacctgaggaagatctgggtgttcctgaagacagccctgcacgtgacccaggccgacctgaagagcagcaccttctggctgcgggccagctttggagccaccgtgtttgctgtgctgggctttgccatgtacaaggccctgctgaagcagaggtag

SEQ ID NO: 167215 - DNA, 744 bp, synthetic construct
  misc_feature 1..744: note = Description of Artificial Sequence: Synthetic coding sequence
  source 1..744: mol_type = other DNA
atgaagaaggatgtgcgcatcctgctggtgggggagccccgggtgggcaagaccagcctcatcatgagcctggtgtctgaggagttccctgaggaggtgccccccagggctgaggagatcaccatcccagcagatgtgaccccagagcgggtgcccacccacatcgtggactacagcgaggccgagcagagtgatgagcagctgcaccaggagatcagccaggccaacgtcatctgcatcgtgtatgctgtgaacaacaagcacagcattgacaaggtgaccagccgctggatccccctcatcaatgaaagaacagacaaggacagccggctgcccctcatcctggtgggcaacaagagtgacctggtggagtacagctccatggagaccatcctgcccatcatgaaccagtacacagaaattgagacctgtgtggagtgcagcgccaagaacctgaagaacatcagcgagctgttctactatgcccagaaggctgtgctgcaccccaccggccccctgtactgcccagaggagaaggagatgaagccagcctgcatcaaggccctgacccgcatcttcaagatcagtgaccaggacaatgatggcaccctgaatgatgctgagctgaacttcttccagaggatctgcttcaacacccccctggcccccaggtttggatttgagcaggtgctggtgctgctcttcctgcagttctgggccctgctgtgcaccaagcactactag

SEQ ID NO: 167216 - DNA, 1857 bp, synthetic construct
  misc_feature 1..1857: note = Description of Artificial Sequence: Synthetic coding sequence
  source 1..1857: mol_type = other DNA
atgagaagagatgtgcgcatcctgctgctgggggaggcccaggtgggcaagaccagcctcatcctgagcctggtgggggaggagttccctgaggaggtgccccccagggctgaggagatcaccatcccagcagatgtgaccccagagaaggtgcccacccacatcgtggactacagcgaggccgagcagacagatgaggagctgcgggaggagatccacaaggccaacgtggtgtgtgtggtgtatgatgtgtctgaggaggccaccatcgagaagatccgcaccaagtggatccccctggtgaatggaggcaccacccagggcccccgggtgcccatcatcctggtgggcaacaagagtgacctgcggagcggcagctccatggaggccgtgctgcccatcatgagccagtttcctgagattgagacctgtgtggagtgcagcgccaagaacctgaggaacatcagcgagctgttctactatgcccagaaggctgtgctgcaccccacagcccccctgtatgaccctgaggccaagcagctgcggcctgcctgtgcccaggccctgacccgcatcttccggctgagtgaccaggacctggaccaggccctgagtgatgaggagctgaatgccttccagaagagctgcttcggccaccccctggccccccaggccctggaggatgtgaagacagtggtgtgcagaaatgtggccggcggcgtgagagaagatcggctgaccctggatggcttcctgttcctgaacaccctcttcatccagagaggaagacatgagaccacctggaccatcctgcggcgcttcggctacagtgatgccctggagctgacagctgactacctgagccccctcatccacgtgcccccaggctgcagcacagagctgaaccacctgggctaccagtttgtgcagagggtgtttgagaagcatgaccaggacagagatggagccctgagccctgtggagctgcagagcctcttcagcgtcttccctgctgccccctggggccctgagctgcccaggacagtgaggacagaagctggccgcctgcccctgcacggctacctgtgccagtggaccctggtgacctacctggatgtgcgcagctgcctgggccacctgggctacctgggctaccccaccctgtgtgagcaggaccaggcccacgccatcaccgtgacccgggagaagaggctggaccaggagaagggccagacccagaggtctgtgctgctgtgcaaggtggtgggcgcccggggcgtgggcaagagcgccttcctgcaggccttcctgggccggggcctgggccaccaggacacccgggagcagcccccaggctacgccatcgacacagtgcaggtgaatggccaggagaagtacctgatcctgtgtgaggtgggcacagatggcctgctggccaccagcctggatgccacctgtgatgtggcctgcctgatgtttgatggcagtgaccccaagagctttgcccactgtgcctctgtgtacaagcaccactacatggatggccagaccccctgcctgtttgtgagcagcaaggctgacctgcctgagggcgtggccgtgtctggccccagccctgctgagttctgcaggaagcaccggctgcctgcccctgtgcccttcagctgtgccggccctgctgagcccagcaccaccatcttcacccagctggccaccatggccgccttcccccacctggtgcacgccgagctgcaccccagcagcttctggctgcggggcctgctgggcgtggtgggcgctgctgtggccgctgtgctgtccttcagcctgtacagagtgctggtgaagagccagtag

SEQ ID NO: 167217 - DNA, 777 bp, synthetic construct
  misc_feature 1..777: note = Description of Artificial Sequence: Synthetic coding sequence
  source 1..777: mol_type = other DNA
atgccaccccagcagggcgaccctgccttcccagacagatgtgaggcccctcctgtgcccccccggcgggagcggggcggccggggcggccggggccctggagagcccggcggccggggccgggccggcggcgctgagggccggggcgtgaagtgtgtgctggtgggagatggagctgtgggcaagaccagcctggtggtgtcctacaccaccaacggctaccccacagagtacatccccacagcctttgacaacttctctgctgtggtgtctgtggatggccggcctgtgcggctgcagctgtgtgacacagctggccaggatgaatttgacaagctgcggcccctgtgctacaccaacacagacatcttcctgctgtgcttctctgtggtgagccccagcagcttccagaatgtgtctgagaagtgggtgcctgagatccgctgccactgccccaaggcccccatcatcctggtgggcacccagagcgacctgagagaagatgtgaaggtgctgattgagctggacaagtgcaaggagaagcctgtgcctgaggaggccgccaagctgtgtgccgaggagatcaaggccgccagctacatcgagtgcagcgccctgacccagaagaacctgaaggaggtgtttgatgctgccatcgtggccggcatccagtacagcgacacccagcagcagcccaagaagagcaagagcaggaccccagacaagatgaagaacctgagcaagtcctggtggaagaagtactgctgctttgtgtag

SEQ ID NO: 167218 - DNA, 1527 bp, synthetic construct
  misc_feature 1..1527: note = Description of Artificial Sequence: Synthetic coding sequence
  source 1..1527: mol_type = other DNA
atggaccacctgggcgccagcctgtggccccaggtgggcagcctgtgcctgctgctggccggggccgcctgggcccccccacccaacctgcctgaccccaagtttgagagcaaggccgccctgctggccgcccggggccctgaggagctgctgtgcttcacagagcggctggaggacctggtgtgcttctgggaggaggccgccagcgctggggtgggccctggcaactacagcttctcctaccagctggaggatgagccctggaagctgtgccgcctgcaccaggcccccacagcccggggagctgtgcgcttctggtgcagcctgcccacagctgacaccagcagctttgtgcccctggagctgcgggtgacagctgccagcggggccccccgctaccacagggtcatccacatcaatgaggtggtgctgctggatgcccctgtgggcctggtggcccggctggctgatgaaagtggccacgtggtgctgcgctggctgcccccacctgagacccccatgaccagccacatccgctatgaggtggatgtgtctgctggaaatggagctggctctgtgcagagggtggagatcctggagggccgcacagaatgtgtgctgagcaacctgcggggccgcacccgctacacctttgctgtgcgggccaggatggccgagcccagctttggaggcttctggagcgcctggagcgagcctgtgtccctgctgacccccagcgacctggaccccctcatcctgaccctgagcctcatcctggtggtgatcctggtgctgctgactgtgctggccctgctgagccacagaagagccctgaagcagaagatctggccaggcatccccagccctgagagcgagtttgagggcctcttcaccacccacaagggcaacttccagctgtggctgtaccagaatgatggctgcctgtggtggagcccctgcacccccttcacagaagatcctccagccagcctggaggtgctgtctgagcgctgctggggcaccatgcaggccgtggagcctggaacagatgatgagggccccctgctggagcctgtgggcagcgagcacgcccaggacacctacctggtgctggacaagtggctgctgcccaggaaccccccatctgaggacctgcccggccctgggggctctgtggacatcgtggccatggatgagggcagcgaggccagcagctgcagcagcgccctggccagcaagcccagccctgagggcgccagcgctgccagctttgagtacaccatcctggaccccagcagccagctgctgcggccctggaccctgtgcccagagctgccccccaccccaccccacctgaagtacctgtacctggtggtgtctgacagcggcatcagcacagactacagcagcggggacagccagggcgcccagggcggcctgagtgatggcccctacagcaacccctatgagaacagcctcatcccagctgctgagcccctgcccccatcctatgtggcctgcagctag

SEQ ID NO: 167219 - DNA, 2550 bp, synthetic construct
  misc_feature 1..2550: note = Description of Artificial Sequence: Synthetic coding sequence
  source 1..2550: mol_type = other DNA
atggctgctgctgccccagctgctgctgctgccagcagcgaggccccagctgccagcgccacagctgagcctgaggccggggaccaggacagccgggaggtgcgggtgctgcagagcctgcggggcaagatctgtgaggccaagaacctgctgccctacctgggcccccacaagatgagggactgcttctgcaccatcaacctggaccaggaggaggtgtaccgcacccaggtggtggagaagagcctgagccccttcttcagcgaggagttctactttgagatccccaggaccttccagtacctgtccttctacgtgtatgacaagaatgtgctgcagagggacctgcgcatcggcaaggtggccatcaagaaggaggacctgtgcaaccacagcggcaaggagacctggttcagcctgcagcctgtggacagcaacagcgaggtgcagggcaaggtgcacctggagctgaagctgaatgagctgatcacagaaaatggcaccgtgtgccagcagctggtggtgcacatcaaggcctgccacggcctgcccctcatcaatggccagagctgtgacccctatgccaccgtgtccctggtgggccccagcagaaatgaccagaagaagaccaaggtgaagaagaagaccagcaacccccagttcaatgagatcttctactttgaggtgaccaggagcagcagctacaccaggaagagccagttccaggtggaggaggaggacatcgagaagctggagatcagaattgacctgtggaacaacggcaacctggtgcaggatgtgttcctgggggagatcaaggtgcctgtgaatgtgctgaggacagacagcagccaccaggcctggtacctgctgcagccccgggacaatggaaacaagagcagcaagacagatgacctgggcagcctgcggctgaacatctgctacacagaagattatgtgctgcccagcgagtactacggccccctgaagaccctgctgctgaagagcccagatgtgcagcccatcagcgccagcgctgcctacatcctgtctgagatctgccgggacaagaatgatgctgtgctgcccctggtgcggctgctgctgcaccacgacaagctggtgccctttgccacagctgtggccgagctggacctgaaggacacccaggatgccaacaccatcttccggggcaacagcctggccacccgctgcctggatgagatgatgaagatcgtgggcggccactacctgaaggtgaccctgaagcccatcctggatgagatctgtgacagcagcaagagctgtgaaattgaccccatcaagctgaaggagggggacaacgtggagaacaacaaggagaacctgcgctactacgtggacaagctgttcaacaccatcgtgaagagctccatgagctgccccaccgtgatgtgtgacatcttctacagcctgcggcagatggccacccagcgcttccccaatgacccccacgtgcagtacagcgctgtgagcagctttgtgttcctgcgcttctttgctgtggccgtggtgagcccccacaccttccacctgcggccccaccacccagatgcccagaccatccgcaccctgaccctcatcagcaagaccatccagaccctgggctcctggggcagcctgagcaagagcaagagcagcttcaaggagaccttcatgtgtgagttcttcaagatgttccaggaggagggctacatcatcgctgtgaagaagttcctggatgagatcagcagcacagagaccaaggagagcagcggcaccagcgagcctgtgcacctgaaggagggggagatgtacaagagggcccagggccgcaccagaattggcaagaagaacttcaagaagcgctggttctgcctgaccagccgggagctgacctaccacaagcagcccgggaaggatgccatctacaccatccctgtgaagaacatcctggccgtggagaagctggaggagagcagcttcaacaagaagaacatgttccaggtgatccacacagagaagcccctgtatgtgcaggccaacaactgtgtggaggccaatgagtggattgatgtgctgtgccgggtgagccgctgcaaccagaaccggctgtccttctaccaccccagcgtgtacctgaatggaaactggctgtgctgccaggagaccggggagaacaccctgggctgcaagccctgcacagctggggtgcctgctgacatccagattgatattgatgaggaccgggagacagagcgcatctacagcctcttcaccctgagcctgctgaagctgcagaagatggaggaggcctgtggcaccatcgctgtgtaccagggcccccagaaggagccagatgactacagcaactttgtgattgaagattctgtgaccaccttcaagaccatccagcagatcaagagcatcatcgagaagctggatgagccccatgagaagtacaggaagaagaggagcagcagcgccaagtatggcagcaaagaaaaccccatcgtgggcaaggccagctag

SEQ ID NO: 167220 - DNA, 834 bp, synthetic construct
  misc_feature 1..834: note = Description of Artificial Sequence: Synthetic coding sequence
  source 1..834: mol_type = other DNA
atgatgaagatcgtgggcggccactacctgaaggtgaccctgaagcccatcctggatgagatctgtgacagcagcaagagctgtgaaattgaccccatcaagctgaaggagggggacaacgtggagaacaacaaggagaacctgcgctactacgtggacaagctgttcaacaccatcgtgaagagctccatgagctgccccaccgtgatgtgtgacatcttctacagcctgcggcagatggccacccagcgcttccccaatgacccccacgtgcagtacagcgctgtgagcagctttgtgttcctgcgcttctttgctgtggccgtggtgagcccccacaccttccacctgcggccccaccacccagatgcccagaccatccgcaccctgaccctcatcagcaagaccatccagaccctgggctcctggggcagcctgagcaagagcaagagcagcttcaaggagaccttcatgtgtgagttcttcaagatgttccaggaggagggctacatcatcgctgtgaagaagttcctggatgagatcagcagcacagagaccaaggagagcagcggcaccagcgagcctgtgcacctgaaggagggggagatgtacaagagggcccagggccgcaccagaattggcaagaagaacttcaagaagcgctggttctgcctgaccagccgggagctgacctaccacaagcagcccggcagctgtgtgtatgccctgctgtggggcttctcctggttctctgtgaaggtgtccctgcccctgattgtgaccctggtgaaccccttcagcaacatcaccgtggtgtatggcttcagccactag

SEQ ID NO: 167221 - DNA, 2553 bp, synthetic construct
  misc_feature 1..2553: note = Description of Artificial Sequence: Synthetic coding sequence
  source 1..2553: mol_type = other DNA
atggctgctgctgccccagctgctgctgctgccagcagcgaggccccagctgccagcgccacagctgagcctgaggccggggaccaggacagccgggaggtgcgggtgctgcagagcctgcggggcaagatctgtgaggccaagaacctgctgccctacctgggcccccacaagatgagggactgcttctgcaccatcaacctggaccaggaggaggtgtaccgcacccaggtggtggagaagagcctgagccccttcttcagcgaggagttctactttgagatccccaggaccttccagtacctgtccttctacgtgtatgacaagaatgtgctgcagagggacctgcgcatcggcaaggtggccatcaagaaggaggacctgtgcaaccacagcggcaaggagacctggttcagcctgcagcctgtggacagcaacagcgaggtgcagggcaaggtgcacctggagctgaagctgaatgagctgatcacagaaaatggcaccgtgtgccagcagctggtggtgcacatcaaggcctgccacggcctgcccctcatcaatggccagagctgtgacccctatgccaccgtgtccctggtgggccccagcagaaatgaccagaagaagaccaaggtgaagaagaagaccagcaacccccagttcaatgagatcttctactttgaggtgaccaggagcagcagctacaccaggaagagccagttccaggtggaggaggaggacatcgagaagctggagatcagaattgacctgtggaacaacggcaacctggtgcaggatgtgttcctgggggagatcaaggtgcctgtgaatgtgctgaggacagacagcagccaccaggcctggtacctgctgcagccccgggacaatggaaacaagagcagcaagacagatgacctgggcagcctgcggctgaacatctgctacacagaagattatgtgctgcccagcgagtactacggccccctgaagaccctgctgctgaagagcccagatgtgcagcccatcagcgccagcgctgcctacatcctgtctgagatctgccgggacaagaatgatgctgtgctgcccctggtgcggctgctgctgcaccacgacaagctggtgccctttgccacagctgtggccgagctggacctgaaggacacccaggatgccaacaccatcttccggggcaacagcctggccacccgctgcctggatgagatgatgaagatcgtgggcggccactacctgaaggtgaccctgaagcccatcctggatgagatctgtgacagcagcaagagctgtgaaattgaccccatcaagctgaaggagggggacaacgtggagaacaacaaggagaacctgcgctactacgtggacaagctgttcaacaccatcgtgaagagctccatgagctgccccaccgtgatgtgtgacatcttctacagcctgcggcagatggccacccagcgcttccccaatgacccccacgtgcagtacagcgctgtgagcagctttgtgttcctgcgcttctttgctgtggccgtggtgagcccccacaccttccacctgcggccccaccacccagatgcccagaccatccgcaccctgaccctcatcagcaagaccatccagaccctgggctcctggggcagcctgagcaagagcaagagcagcttcaaggagaccttcatgtgtgagttcttcaagatgttccaggaggagggctacatcatcgctgtgaagaagttcctggatgagatcagcagcacagagaccaaggagagcagcggcaccagcgagcctgtgcacctgaaggagggggagatgtacaagagggcccagggccgcaccagaattggcaagaagaacttcaagaagcgctggttctgcctgaccagccgggagctgacctaccacaagcagcccggcagcaaggatgccatctacaccatccctgtgaagaacatcctggccgtggagaagctggaggagagcagcttcaacaagaagaacatgttccaggtgatccacacagagaagcccctgtatgtgcaggccaacaactgtgtggaggccaatgagtggattgatgtgctgtgccgggtgagccgctgcaaccagaaccggctgtccttctaccaccccagcgtgtacctgaatggaaactggctgtgctgccaggagactggagagaacaccctgggctgcaagccctgcacagctggggtgcctgctgacatccagattgatattgatgaagatcgggagacagagcgcatctacagcctcttcaccctgagcctgctgaagctgcagaagatggaggaggcctgtggcaccatcgctgtgtaccagggcccccagaaggagccagatgactacagcaactttgtgattgaggacagcgtgaccaccttcaagaccatccagcagatcaagagcatcatcgagaagctggatgagccccatgagaagtacaggaagaagaggagcagcagcgccaagtatggcagcaaggagaaccccatcgtgggcaaggccagctag

SEQ ID NO: 167222 - DNA, 2505 bp, synthetic construct
  misc_feature 1..2505: note = Description of Artificial Sequence: Synthetic coding sequence
  source 1..2505: mol_type = other DNA
atggctgtggaggatgagggcctgcgggtcttccagagcgtgaagatcaagatcggggaggccaagaacctgcccagctacccaggccccagcaagatgagggactgctactgcaccgtgaacctggaccaggaggaggtgttccgcaccaagatcgtggagaagagcctgtgccccttctatggagaggacttctactgtgagatccccaggagcttccgccacctgtccttctacatctttgacagagatgtgttcagaagagacagcatcatcggcaaggtggccatccagaaggaggacctgcagaagtaccacaacagagacacctggttccagctgcagcacgtggatgctgacagcgaggtgcagggcaaggtgcacctggagctgcggctgtctgaggtgatcacagacaccggggtggtgtgccacaagctggccaccagaattgtggagtgccagggcctgcccatcgtgaatggccagtgtgacccctatgccaccgtgaccctggccggccccttccgctctgaggccaagaagaccaaggtgaagaggaagaccaacaacccccagtttgatgaggtgttctactttgaggtgacccggccctgcagctacagcaagaagagccactttgattttgaggaggaggatgtggacaagctggagatccgggtggacctgtggaatgccagcaacctgaagtttggagatgagttcctgggggagctgcgcatccccctgaaggtgctgcggcagagcagcagctatgaggcctggtacttcctgcagccccgggacaatggcagcaagagcctgaagccagatgacctgggcagcctgcggctgaatgtggtgtacacagaagatcatgtgttcagcagtgactactacagccccctgcgggacctgctgctgaagtctgcagatgtggagcctgtgtctgccagcgctgcccacatcctgggggaggtgtgccgggagaagcaggaggccgctgtgcccctggtgcggctcttcctgcactacggccgggtggtgcccttcatcagcgccatcgccagcgctgaggtgaagaggacccaggaccccaacaccatcttccggggcaacagcctggccagcaagtgcattgatgagaccatgaagctggccggcatgcactacctgcacgtgaccctgaagccagccatcgaggagatctgccagagccacaagccctgtgaaattgatcctgtgaagctgaaggatggagagaacctggagaacaacatggagaacctgcggcagtatgtggacagagtcttccacgccatcacagagagcggcgtgtcctgccccaccgtgatgtgtgacatcttcttcagcctgcgggaggccgccgccaagcgcttccaggatgatcctgatgtgcgctacacagctgtgagcagcttcatcttcctgcgcttctttgccccagccatcctgagccccaacctcttccagctgaccccccaccacacagacccccagaccagcaggaccctgaccctcatcagcaagacagtgcagaccctgggcagcctgagcaagagcaagagcgccagcttcaaggagagctacatggccaccttctatgagttcttcaatgagcagaagtatgcagatgctgtgaagaacttcctggacctgatcagcagcagcggccggcgggaccccaagtctgtggagcagcccatcgtgctgaaggagggcttcatgatcaagagggcccagggcaggaagagatttggcatgaagaacttcaagaagcgctggttccggctgaccaaccacgagttcacctaccacaagagcaagggggaccagcccctgtacagcatccccatcgagaacatcctggccgtggagaagctggaggaggagagcttcaagatgaagaacatgttccaggtgatccagcctgagcgggccctgtacatccaggccaacaactgtgtggaggccaaggactggattgacatcctgaccaaggtgtcccagtgcaaccagaagaggctgactgtgtaccaccccagcgcctacctgagcggccactggctgtgctgccgggcccccagcgacagcgcccctggctgcagcccctgcacaggaggcctgcctgccaacatccagctggacattgatggagaccgggagacagagcgcatctacagcctcttcaacctgtacatgagcaagctggagaagatgcaggaggcctgtggcagcaagtctgtgtatgatggccctgagcaggaggagtacagcacctttgtgattgatgacccccaggagacctacaagaccctgaagcaggtgattgctggggtgggcgccctggagcaggagcacgcccagtacaagagggacaagttcaagaagaccaagtatggcagccaggagcaccccatcggggacaagagcttccagaactacatccggcagcagagcgagaccagcacccacagcatctag

SEQ ID NO: 167223 - DNA, 2409 bp, synthetic construct
  misc_feature 1..2409: note = Description of Artificial Sequence: Synthetic coding sequence
  source 1..2409: mol_type = other DNA
atgagggactgctactgcaccgtgaacctggaccaggaggaggtgttccgcaccaagatcgtggagaagagcctgtgccccttctatggagaggacttctactgtgagatccccaggagcttccgccacctgtccttctacatctttgacagagatgtgttcagaagagacagcatcatcggcaaggtggccatccagaaggaggacctgcagaagtaccacaacagagacacctggttccagctgcagcacgtggatgctgacagcgaggtgcagggcaaggtgcacctggagctgcggctgtctgaggtgatcacagacaccggggtggtgtgccacaagctggccaccagaattgtggagtgccagggcctgcccatcgtgaatggccagtgtgacccctatgccaccgtgaccctggccggccccttccgctctgaggccaagaagaccaaggtgaagaggaagaccaacaacccccagtttgatgaggtgttctactttgaggtgacccggccctgcagctacagcaagaagagccactttgattttgaggaggaggatgtggacaagctggagatccgggtggacctgtggaatgccagcaacctgaagtttggagatgagttcctgggggagctgcgcatccccctgaaggtgctgcggcagagcagcagctatgaggcctggtacttcctgcagccccgggacaatggcagcaagagcctgaagccagatgacctgggcagcctgcggctgaatgtggtgtacacagaagatcatgtgttcagcagtgactactacagccccctgcgggacctgctgctgaagtctgcagatgtggagcctgtgtctgccagcgctgcccacatcctgggggaggtgtgccgggagaagcaggaggccgctgtgcccctggtgcggctcttcctgcactacggccgggtggtgcccttcatcagcgccatcgccagcgctgaggtgaagaggacccaggaccccaacaccatcttccggggcaacagcctggccagcaagtgcattgatgagaccatgaagctggccggcatgcactacctgcacgtgaccctgaagccagccatcgaggagatctgccagagccacaagccctgtgaaattgatcctgtgaagctgaaggatggagagaacctggagaacaacatggagaacctgcggcagtatgtggacagagtcttccacgccatcacagagagcggcgtgtcctgccccaccgtgatgtgtgacatcttcttcagcctgcgggaggccgccgccaagcgcttccaggatgatcctgatgtgcgctacacagctgtgagcagcttcatcttcctgcgcttctttgccccagccatcctgagccccaacctcttccagctgaccccccaccacacagacccccagaccagcaggaccctgaccctcatcagcaagacagtgcagaccctgggcagcctgagcaagagcaagagcgccagcttcaaggagagctacatggccaccttctatgagttcttcaatgagcagaagtatgcagatgctgtgaagaacttcctggacctgatcagcagcagcggccggcgggaccccaagtctgtggagcagcccatcgtgctgaaggagggcttcatgatcaagagggcccagggcaggaagagatttggcatgaagaacttcaagaagcgctggttccggctgaccaaccacgagttcacctaccacaagagcaagggggaccagcccctgtacagcatccccatcgagaacatcctggccgtggagaagctggaggaggagagcttcaagatgaagaacatgttccaggtgatccagcctgagcgggccctgtacatccaggccaacaactgtgtggaggccaaggactggattgacatcctgaccaaggtgtcccagtgcaaccagaagaggctgactgtgtaccaccccagcgcctacctgagcggccactggctgtgctgccgggcccccagcgacagcgcccctggctgcagcccctgcacaggaggcctgcctgccaacatccagctggacattgatggagaccgggagacagagcgcatctacagcctcttcaacctgtacatgagcaagctggagaagatgcaggaggcctgtggcagcaagtctgtgtatgatggccctgagcaggaggagtacagcacctttgtgattgatgacccccaggagacctacaagaccctgaagcaggtgattgctggggtgggcgccctggagcaggagcacgcccagtacaagagggacaagttcaagaagaccaagtatggcagccaggagcaccccatcggggacaagagcttccagaactacatccggcagcagagcgagaccagcacccacagcatctag

SEQ ID NO: 167224 - DNA, 399 bp, synthetic construct
  misc_feature 1..399: note = Description of Artificial Sequence: Synthetic coding sequence
  source 1..399: mol_type = other DNA
atggctgtggaggatgagggcctgcgggtcttccagagcgtgaagatcaagatcggggaggccaagaacctgcccagctacccaggccccagcaagatgagggactgctactgcaccgtgaacctggaccaggaggaggtgttccgcaccaagatcgtggagaagagcctgtgccccttctatggagaggacttctactgtgagatccccaggagcttccgccacctgtccttctacatctttgacagagatgtgttcagaagagacagcatcatcggccagagcgcccctggagctgctgctgagcggggccaccaccgccactggggccgcctgccccaggcccggcacacccaccggcgggtgcccggccccccccaccgggagtgggccatgtag

SEQ ID NO: 167225 - DNA, 2412 bp, synthetic construct
  misc_feature 1..2412: note = Description of Artificial Sequence: Synthetic coding sequence
  source 1..2412: mol_type = other DNA
atggccaagaggagcagcctgtacatcagaattgtggagggcaagaacctgcctgccaaggacatcaccggcagcagtgacccctactgcatcgtgaaggtggacaatgagcccatcatcagaacagccaccgtgtggaagaccctgtgccccttctggggcgaggagtaccaggtgcacctgccccccaccttccacgctgtggccttctacgtgatggatgaagatgccctgagcagagatgatgtgattggcaaggtgtgcctgacccgggacaccatcgccagccaccccaagggcttcagcggctgggcccacctgacagaggtggaccctgatgaggaggtgcagggcgagatccacctgcggctggaggtgtggccaggggcccgggcctgccgcctgcgctgcagcgtgctggaggcccgggacctggcccccaaggacagaaatggcaccagtgacccctttgtgcgggtgcgctacaagggccgcacccgggagaccagcatcgtgaagaagagctgctacccccgctggaatgagacctttgaatttgagctgcaggagggcgccatggaggccctgtgtgtggaggcctgggactgggacctggtgtccagaaatgacttcctgggcaaggtggtgattgatgtgcagaggctgcgggtggtgcagcaggaggagggctggttccggctgcagcctgaccagagcaagagcagaagacatgatgagggcaacctgggcagcctgcagctggaggtgcggctgagagatgagaccgtgctgcccagcagctactaccagcccctggtgcacctgctgtgccacgaggtgaagctgggcatgcagggccctggccagctgatccccctcatcgaggagaccaccagcacagaatgtcggcaggatgtggccaccaacctgctgaagctgttcctgggccagggcctggccaaggacttcctggacctgctcttccagctggagctgagcaggaccagcgagaccaacaccctcttccgcagcaacagcctggccagcaagtccatggagagcttcctgaaggtggccggcatgcagtacctgcatggagtgctgggccccatcatcaacaaggtgtttgaggagaagaagtatgtggagctggaccccagcaaggtggaggtgaaggatgtgggctgcagcggcctgcaccggccccagacagaggccgaggtgctggagcagagcgcccagaccctgcgggcccacctgggcgccctgctgagcgccctgagccgctctgtgcgggcctgcccagctgtggtgcgggccaccttccggcagctgttcagaagagtgcgggagcgcttccctggggcccagcatgaaaatgtgcccttcatcgctgtgaccagcttcctgtgcctgcgcttcttctccccagccatcatgagccccaagctgttccacctgcgggagagacatgctgatgcccggaccagcaggaccctgctgctgctggccaaggctgtgcagaatgtgggcaacatggacaccccagccagccgggccaaggaggcctggatggagcccctgcagcccaccgtgcggcagggcgtggcccagctgaaggacttcatcaccaagctggtggacatcgaggagaaggatgagctggacctgcagaggaccctgagcctgcaggcccctcctgtgaaggagggccccctcttcatccacaggaccaagggcaagggccccctgatgagcagcagcttcaagaagctgtacttcagcctgaccacagaggccctgagctttgccaagacccccagcagcaagaagagcgccctgatcaagctggccaacatccgggctgctgagaaggtggaggagaagagctttggaggcagccacgtgatgcaggtgatctacacagatgatgctggccggccccagacagcctacctgcagtgcaagtgtgtgaatgagctgaaccagtggctgagcgccctgaggaaggtgtccatcaacaacacaggcctgctgggcagctaccaccctggggtcttccggggggacaagtggagctgctgccaccagaaggagaagacaggccagggctgtgacaagaccaggagccgggtgaccctgcaggagtggaatgaccccctggaccatgacctggaggcccagctgatctaccgccacctgctgggcgtggaggccatgctgtgggagcggcaccgggagctgtctggaggagctgaggccggcaccgtgcccaccagccctgggaaggtgcctgaggacagcctggcccggctgctgcgggtgctgcaggacctgcgggaggcccacagcagcagccctgctggcagccccccatctgagcccaactgcctgctggagctgcagacctag

SEQ ID NO: 167226 - DNA, 2274 bp, synthetic construct
  misc_feature 1..2274: note = Description of Artificial Sequence: Synthetic coding sequence
  source 1..2274: mol_type = other DNA
atggccaagaggagcagcctgtacatcagaattgtggagggcaagaacctgcctgccaaggacatcaccggcagcagtgacccctactgcatcgtgaaggtggacaatgagcccatcatcagaacagccaccgtgtggaagaccctgtgccccttctggggcgaggagtaccaggtgcacctgccccccaccttccacgctgtggccttctacgtgatggatgaagatgccctgagcagagatgatgtgattggcaaggtgtgcctgacccgggacaccatcgccagccaccccaagggcttcagcggctgggcccacctgacagaggtggaccctgatgaggaggtgcagggcgagatccacctgcggctggaggtgtggccaggggcccgggcctgccgcctgcgctgcagcgtgctggaggcccgggacctggcccccaaggacagaaatggcaccagtgacccctttgtgcgggtgcgctacaagggccgcacccgggagaccagcatcgtgaagaagagctgctacccccgctggaatgagacctttgaatttgagctgcaggagggcgccatggaggccctgtgtgtggaggcctgggactgggacctggtgtccagaaatgacttcctgggcaaggtggtgattgatgtgcagaggctgcgggtggtgcagcaggaggagggctggttccggctgcagcctgaccagagcaagagcagaagacatgatgagggcaacctgggcagcctgcagctggaggtgcggctgagagatgagaccgtgctgcccagcagctactaccagcccctggtgcacctgctgtgccacgaggtgaagctgggcatgcagggccctggccagctgatccccctcatcgaggagaccaccagcacagaatgtcggcaggatgtggccaccaacctgctgaagctgttcctgggccagggcctggccaaggacttcctggacctgctcttccagctggagctgagcaggaccagcgagaccaacaccctcttccgcagcaacagcctggccagcaagtccatggagagcttcctgaaggtggccggcatgcagtacctgcatggagtgctgggccccatcatcaacaaggtgtttgaggagaagaagtatgtggagctggaccccagcaaggtggaggtgaaggatgtgggctgcagcggcctgcaccggccccagacagaggccgaggtgctggagcagagcgcccagaccctgcgggcccacctgggcgccctgctgagcgccctgagccgctctgtgcgggcctgcccagctgtggtgcgggccaccttccggcagctgttcagaagagtgcgggagcgcttccctggggcccagcatgaaaatgtgcccttcatcgctgtgaccagcttcctgtgcctgcgcttcttctccccagccatcatgagccccaagctgttccacctgcgggagagacatgctgatgcccggaccagcaggaccctgctgctgctggccaaggctgtgcagaatgtgggcaacatggacaccccagccagccgggccaaggaggcctggatggagcccctgcagcccaccgtgcggcagggcgtggcccagctgaaggacttcatcaccaagctggtggacatcgaggagaaggatgagctggacctgcagaggaccctgagcctgcaggcccctcctgtgaaggagggccccctcttcatccacaggaccaagggcaagggccccctgatgagcagcagcttcaagaagctgtacttcagcctgaccacagaggccctgagctttgccaagacccccagcagcaaatgtgtgaatgagctgaaccagtggctgagcgccctgaggaaggtgtccatcaacaacacaggcctgctgggcagctaccaccctggggtcttccggggggacaagtggagctgctgccaccagaaggagaagacaggccagggctgtgacaagaccaggagccgggtgaccctgcaggagtggaatgaccccctggaccatgacctggaggcccagctgatctaccgccacctgctgggcgtggaggccatgctgtgggagcggcaccgggagctgtctggaggagctgaggccggcaccgtgcccaccagccctgggaaggtgcctgaggacagcctggcccggctgctgcgggtgctgcaggacctgcgggaggcccacagcagcagccctgctggcagccccccatctgagcccaactgcctgctggagctgcagacctag

SEQ ID NO: 167227 - DNA, 2196 bp, synthetic construct
  misc_feature 1..2196: note = Description of Artificial Sequence: Synthetic coding sequence
  source 1..2196: mol_type = other DNA
atggatgaagatgccctgagcagagatgatgtgattggcaaggtgtgcctgacccgggacaccatcgccagccaccccaagggcttcagcggctgggcccacctgacagaggtggaccctgatgaggaggtgcagggcgagatccacctgcggctggaggtgtggccaggggcccgggcctgccgcctgcgctgcagcgtgctggaggcccgggacctggcccccaaggacagaaatggcaccagtgacccctttgtgcgggtgcgctacaagggccgcacccgggagaccagcatcgtgaagaagagctgctacccccgctggaatgagacctttgaatttgagctgcaggagggcgccatggaggccctgtgtgtggaggcctgggactgggacctggtgtccagaaatgacttcctgggcaaggtggtgattgatgtgcagaggctgcgggtggtgcagcaggaggagggctggttccggctgcagcctgaccagagcaagagcagaagacatgatgagggcaacctgggcagcctgcagctggaggtgcggctgagagatgagaccgtgctgcccagcagctactaccagcccctggtgcacctgctgtgccacgaggtgaagctgggcatgcagggccctggccagctgatccccctcatcgaggagaccaccagcacagaatgtcggcaggatgtggccaccaacctgctgaagctgttcctgggccagggcctggccaaggacttcctggacctgctcttccagctggagctgagcaggaccagcgagaccaacaccctcttccgcagcaacagcctggccagcaagtccatggagagcttcctgaaggtggccggcatgcagtacctgcatggagtgctgggccccatcatcaacaaggtgtttgaggagaagaagtatgtggagctggaccccagcaaggtggaggtgaaggatgtgggctgcagcggcctgcaccggccccagacagaggccgaggtgctggagcagagcgcccagaccctgcgggcccacctgggcgccctgctgagcgccctgagccgctctgtgcgggcctgcccagctgtggtgcgggccaccttccggcagctgttcagaagagtgcgggagcgcttccctggggcccagcatgaaaatgtgcccttcatcgctgtgaccagcttcctgtgcctgcgcttcttctccccagccatcatgagccccaagctgttccacctgcgggagagacatgctgatgcccggaccagcaggaccctgctgctgctggccaaggctgtgcagaatgtgggcaacatggacaccccagccagccgggccaaggaggcctggatggagcccctgcagcccaccgtgcggcagggcgtggcccagctgaaggacttcatcaccaagctggtggacatcgaggagaaggatgagctggacctgcagaggaccctgagcctgcaggcccctcctgtgaaggagggccccctcttcatccacaggaccaagggcaagggccccctgatgagcagcagcttcaagaagctgtacttcagcctgaccacagaggccctgagctttgccaagacccccagcagcaagaagagcgccctgatcaagctggccaacatccgggctgctgagaaggtggaggagaagagctttggaggcagccacgtgatgcaggtgatctacacagatgatgctggccggccccagacagcctacctgcagtgcaagtgtgtgaatgagctgaaccagtggctgagcgccctgaggaaggtgtccatcaacaacacaggcctgctgggcagctaccaccctggggtcttccggggggacaagtggagctgctgccaccagaaggagaagacaggccagggctgtgacaagaccaggagccgggtgaccctgcaggagtggaatgaccccctggaccatgacctggaggcccagctgatctaccgccacctgctgggcgtggaggccatgctgtgggagcggcaccgggagctgtctggaggagctgaggccggcaccgtgcccaccagccctgggaaggtgcctgaggacagcctggcccggctgctgcgggtgctgcaggacctgcgggaggcccacagcagcagccctgctggcagccccccatctgagcccaactgcctgctggagctgcagacctag

SEQ ID NO: 167228 - DNA, 2415 bp, synthetic construct
  misc_feature 1..2415: note = Description of Artificial Sequence: Synthetic coding sequence
  source 1..2415: mol_type = other DNA
atggccaagagcagcagcctgaatgtgcgggtggtggagggccgggccctgcctgccaaggatgtgtctggcagcagtgacccctactgcctggtgaaggtggatgatgaggtggtggccaggacagccaccgtgtggaggagcctgggccccttctggggcgaggagtacacagtgcacctgcccctggacttccaccagctggccttctacgtgctggatgaagatactgtgggccatgatgacatcatcggcaagatcagcctgagccgggaggccatcacagctgacccccggggcatcgacagctggatcaacctgagccgggtggaccctgatgctgaggtgcagggcgagatctgcctgtctgtgcagatgctggaggatggccagggccgctgcctgcgctgccacgtgctgcaggcccgggacctggccccccgggacatcagcggcaccagtgacccctttgcccgggtcttctggggcagccagagcctggagaccagcaccatcaagaagacccgcttcccccactgggatgaggtgctggagctgcgggagatgcctggggcccccagccccctgcgggtggagctgtgggactgggacatggtgggcaagaatgacttcctgggcatggtggagttcagccccaagaccctgcagcagaagccacccaagggctggttccggctgctgcccttccccagggcagaagaagattctgggggcaacctgggcgccctgcgggtgaaggtgcggctgattgaggacagagtgctgcccagccagtgctaccagcccctgatggagctgctgatggagagcgtgcagggccctgctgaggaggacacagccagccccctggccctgctggaggagctgaccctgggggactgccggcaggacctggccaccaagctggtgaagctgttcctgggccggggcctggccggccgcttcctggactacctgacccggcgggaggtggcccggaccatggaccccaacaccctcttccgcagcaacagcctggccagcaagtccatggagcagttcatgaagctggtgggcatgccctacctgcacgaggtgctgaagcctgtgatcagccgggtgtttgaggagaagaagtacatggagctggacccctgcaagatggacctgggccgcacccggcgcatctccttcaagggggccctgtctgaggagcagatgagggagaccagcctgggcctgctgaccggctacctgggccccatcgtggatgccatcgtgggctctgtgggccgctgccccccagccatgaggctggccttcaagcagctgcaccggcgggtggaggagcgcttcccccaggccgagcaccaggatgtgaagtacctggccatcagcggcttcctgttcctgcgcttctttgccccagccatcctgacccccaagctgtttgacctgcgggaccagcacgccgacccccagaccagccgcagcctgctgctgctggccaaggctgtgcagagcatcggcaacctgggccagcagctgggccagggcaaggagctgtggatggcccccctgcaccccttcctgctgcagtgtgtgtcccgggtgcgggacttcctggaccggctggtggatgtggatggagatgaagctggggtgcctgcccgggccctcttcccccccagcgccatcgtgcgggagggctacctgctgaagaggaaggaggagcccgccggcctggccaccaggtttgccttcaagaagcgctacgtgtggctgagcggggagaccctgtccttcagcaagagccctgagtggcagatgtgccacagcatccctgtgagccacatccgggctgtggagcgggtggatgagggcgccttccagctgccccacgtgatgcaggtggtgacccaggacggcaccggggccctgcacaccacctacctgcagtgcaagaatgtgaatgagctgaaccagtggctgagcgccctgaggaaggccagcgcccccaaccccaacaagctggccgcctgccaccctggggccttccgcagcgcccgctggacctgctgcctgcaggccgagaggtctgctgctggctgcagcaggacccacagcgctgtgaccctgggggactggagcgaccccctggaccctgatgctgaggcccagacagtgtaccggcagctgctgctgggccgggaccagctgcggctgaagctgctggaggacagcaacatggacaccaccctggaggccgacaccggggcctgcccagaggtgctggcccggcagagagctgccacagcccggctgctggaggtgctggccgacctggaccgggcccacgaggagttccagcagcaggagcggggcaaggccgccctgggccccctgggcccctag

SEQ ID NO: 167229 - DNA, 2331 bp, synthetic construct
  misc_feature 1..2331: note = Description of Artificial Sequence: Synthetic coding sequence
  source 1..2331: mol_type = other DNA
atggccaagagcagcagcctgaatgtgcgggtggtggagggccgggccctgcctgccaaggatgtgtctggcagcagtgacccctactgcctggtgaaggtggatgatgaggtggtggccaggacagccaccgtgtggaggagcctgggccccttctggggcgaggagtacacagtgcacctgcccctggacttccaccagctggccttctacgtgctggatgaagatactgtgggccatgatgacatcatcggcaagatcagcctgagccgggaggccatcacagctgacccccggggcatcgacagctggatcaacctgagccgggtggaccctgatgctgaggtgcagggcgagatctgcctgtctgtgcagatgctggaggatggccagggccgctgcctgcgctgccacgtgctgcaggcccgggacctggccccccgggacatcagcggcaccagtgacccctttgcccgggtcttctggggcagccagagcctggagaccagcaccatcaagaagacccgcttcccccactgggatgaggtgctggagctgcgggagatgcctggggcccccagccccctgcgggtggagctgtgggactgggacatggtgggcaagaatgacttcctgggcatggtggagttcagccccaagaccctgcagcagaagccacccaagggctggttccggctgctgcccttccccagggcagaagaagattctgggggcaacctgggcgccctgcgggtgaaggtgcggctgattgaggacagagtgctgcccagccagtgctaccagcccctgatggagctgctgatggagagcgtgcagggccctgctgaggaggacacagccagccccctggccctgctggaggagctgaccctgggggactgccggcaggacctggccaccaagctggtgaagctgttcctgggccggggcctggccggccgcttcctggactacctgacccggcgggaggtggcccggaccatggaccccaacaccctcttccgcagcaacagcctggccagcaagtccatggagcagttcatgaagctggtgggcatgccctacctgcacgaggtgctgaagcctgtgatcagccgggtgtttgaggagaagaagtacatggagctggacccctgcaagatggacctgggccgcacccggcgcatctccttcaagggggccctgtctgaggagcagatgagggagaccagcctgggcctgctgaccggctacctgggccccatcgtggatgccatcgtgggctctgtgggccgctgccccccagccatgaggctggccttcaagcagctgcaccggcgggtggaggagcgcttcccccaggccgagcaccaggatgtgaagtacctggccatcagcggcttcctgttcctgcgcttctttgccccagccatcctgacccccaagctgtttgacctgcgggaccagcacgccgacccccagaccagccgcagcctgctgctgctggccaaggctgtgcagagcatcggcaacctgggccagcagctgggccagggcaaggagctgtggatggcccccctgcaccccttcctgctgcagtgtgtgtcccgggtgcgggacttcctggaccggctggtggatgtggatggagatgaagctggggtgcctgcccgggccctcttcccccccagcgccatcgtgcgggagggctacctgctgaagaggaaggaggagcccgccggcctggccaccaggtttgccttcaagaagcgctacgtgtggctgagcggggagaccctgtccttcagcaagagccctgagtggcaggtggtgacccaggacggcaccggggccctgcacaccacctacctgcagtgcaagaatgtgaatgagctgaaccagtggctgagcgccctgaggaaggccagcgcccccaaccccaacaagctggccgcctgccaccctggggccttccgcagcgcccgctggacctgctgcctgcaggccgagaggtctgctgctggctgcagcaggacccacagcgctgtgaccctgggggactggagcgaccccctggaccctgatgctgaggcccagacagtgtaccggcagctgctgctgggccgggaccagctgcggctgaagctgctggaggacagcaacatggacaccaccctggaggccgacaccggggcctgcccagaggtgctggcccggcagagagctgccacagcccggctgctggaggtgctggccgacctggaccgggcccacgaggagttccagcagcaggagcggggcaaggccgccctgggccccctgggcccctag

SEQ ID NO: 167230 - DNA, 2421 bp, synthetic construct
  misc_feature 1..2421: note = Description of Artificial Sequence: Synthetic coding sequence
  source 1..2421: mol_type = other DNA
atggccaagagcagcagcctgaatgtgcgggtggtggagggccgggccctgcctgccaaggatgtgtctggcagcagtgacccctactgcctggtgaaggtggatgatgaggtggtggccaggacagccaccgtgtggaggagcctgggccccttctggggcgaggagtacacagtgcacctgcccctggacttccaccagctggccttctacgtgctggatgaagatactgtgggccatgatgacatcatcggcaagatcagcctgagccgggaggccatcacagctgacccccggggcatcgacagctggatcaacctgagccgggtggaccctgatgctgaggtgcagggcgagatctgcctgtctgtgcagatgctggaggatggccagggccgctgcctgcgctgccacgtgctgcaggcccgggacctggccccccgggacatcagcggcaccagtgacccctttgcccgggtcttctggggcagccagagcctggagaccagcaccatcaagaagacccgcttcccccactgggatgaggtgctggagctgcgggagatgcctggggcccccagccccctgcgggtggagctgtgggactgggacatggtgggcaagaatgacttcctgggcatggtggagttcagccccaagaccctgcagcagaagccacccaagggctggttccggctgctgcccttccccagggcagaagaagattctgggggcaacctgggcgccctgcgggtgaaggtgcggctgattgaggacagagtgctgcccagccagtgctaccagcccctgatggagctgctgatggagagcgtgcagggccctgctgaggaggacacagccagccccctggccctgctggaggagctgaccctgggggactgccggcaggacctggccaccaagctggtgaagctgttcctgggccggggcctggccggccgcttcctggactacctgacccggcgggaggtggcccggaccatggaccccaacaccctcttccgcagcaacagcctggccagcaagtccatggagcagttcatgaagctggtgggcatgccctacctgcacgaggtgctgaagcctgtgatcagccgggtgtttgaggagaagaagtacatggagctggacccctgcaagatggacctgggccgcacccggcgcatctccttcaagggggccctgtctgaggagcagatgagggagaccagcctgggcctgctgaccggctacctgggccccatcgtggatgccatcgtgggctctgtgggccgctgccccccagccatgaggctggccttcaagcagctgcaccggcgggtggaggagcgcttcccccaggccgagcaccagcaggatgtgaagtacctggccatcagcggcttcctgttcctgcgcttctttgccccagccatcctgacccccaagctgtttgacctgcgggaccagcacgccgacccccagaccagccgcagcctgctgctgctggccaaggctgtgcagagcatcggcaacctgggccagcagctgggccagggcaaggagctgtggatggcccccctgcaccccttcctgctgcagtgtgtgtcccgggtgcgggacttcctggaccggctggtggatgtggatggagatgaggaggccggcgtgcctgcccgggccctcttcccccccagcgccatcgtgcgggagggctacctgctgaagaggaaggaggagcccgccggcctggccaccaggtttgccttcaagaagcgctacgtgtggctgagcggggagaccctgtccttcagcaagagccctgagtggcagatgtgccacagcatccctgtgagccacatccgggctgtggagcgggtggatgagggcgccttccagctgccccacgtgatgcaggtggtgacccaggacggcaccggggccctgcacaccacctacctgcagtgcaagaatgtgaatgagctgaaccagtggctgagcgccctgaggaaggccagcgcccccaaccccaacaagctggccgcctgccaccctggggccttccgcagcgcccgctggacctgctgcctgcaggccgagaggtctgctgctggctgcagcaggacccacagcgctgtgaccctgggggactggagcgaccccctggaccctgatgctgaggcccagacagtgtaccggcagctgctgctgggccgggaccagctgcggctgaagctgctggaggacagcaacatggacaccaccctggaggccgacaccggggcctgcccagaggtgctggcccggcagagagctgccacagcccggctgctggaggtgctggccgacctggaccgggcccacgaggagttccagcagcaggagcggggcaaggccgccctgggccccctgggcccctag

SEQ ID NO: 167231 - DNA, 3714 bp, synthetic construct
  misc_feature 1..3714: note = Description of Artificial Sequence: Synthetic coding sequence
  source 1..3714: mol_type = other DNA
atgcagaagtctgtgcgctacaatgaaggacatgccctgtacctggccttcctggccaggaaggagggcaccaagaggggcttcctgagcaagaagacagctgaggccagccgctggcatgagaagtggtttgccctgtaccagaatgtgctcttctactttgaaggagagcagagctgcaggcctgctggcatgtacctgctggagggctgcagctgtgagaggaccccagccccaccccgggccggggccggccagggcggcgtgagagatgccctggacaagcagtactacttcaccgtgctgtttggacatgagggccagaagcccctggagctgcgctgtgaggaggagcaggacggcaaggagtggatggaggccatccaccaggccagctatgctgacatcctgattgaaagagaggtgctgatgcagaagtacatccacctggtgcagatcgtggagacagagaagattgctgccaaccagctgcggcaccagctggaggaccaggacacagaaattgagcggctgaagtctgagatcatcgccctgaacaagaccaaggagaggatgaggccctaccagagcaaccaggaggatgaggaccctgacatcaagaagatcaagaaggtgcagagcttcatgaggggctggctgtgcaggaggaagtggaagaccatcgtgcaggactacatctgcagcccccacgccgagagcatgaggaagaggaaccagatcgtgttcaccatggtggaggccgagagtgaatatgtgcaccagctgtacatcctggtgaatggcttcctgcggcccctgaggatggccgccagcagcaagaagccacccatcagccatgatgatgtgagcagcatcttcctgaacagcgagaccatcatgttcctgcacgagatcttccaccagggcctgaaggcccgcatcgccaactggcccaccctcatcctggccgacctgtttgacatcctgctgcccatgctgaacatctaccaggagtttgtgaggaaccaccagtacagcctgcaggtgctggccaactgcaagcagaacagagactttgacaagctgctgaagcagtatgaggccaacccagcctgtgagggccgcatgctggagaccttcctgacctaccccatgttccagatcccccgctacatcatcaccctgcacgagctgctggcccacacccctcatgagcacgtggagaggaagagcctggagtttgccaagagcaagctggaggagctgagccgggtgatgcatgatgaggtgtctgacacagagaacatcaggaagaacctggccatcgagaggatgattgtggagggctgtgacatcctgctggacaccagccagaccttcatccggcagggcagcctcatccaggtgcccagcgtggagcggggcaagctgagcaaggtgcggctgggcagcctgagcctgaagaaggagggggagcggcagtgcttcctgttcaccaagcacttcctgatctgcaccaggagcagcggcggcaagctgcacctgctgaagacaggaggagtgctgagcctgattgactgcaccctcatcgaggagccagatgccagtgatgatgacagcaaaggaagtggccaggtgtttggccacctggacttcaagatcgtggtggagcccccagatgctgctgccttcaccgtggtgctgctggcccccagccggcaggagaaggccgcctggatgtctgacatcagccagtgtgtggacaacatccgctgcaatggcctgatgaccatcgtgtttgaggagaacagcaaggtgacagtgccccacatgatcaagagtgatgcccggctgcacaaggatgacacagacatctgcttcagcaagaccctgaacagctgcaaggtgccccagatccgctatgcctctgtggagcggctgctggagcggctgacagacctgcgcttcctgagcattgacttcctgaacaccttcctgcacacctaccgcatcttcaccacagctgctgtggtgctgggcaagctgagtgacatctacaagaggcccttcaccagcatccctgtgcgcagcctggagctgttctttgccaccagccagaacaacagaggagagcacctggtggatggcaagagcccccggctgtgcaggaagttcagcagccccccacccctggccgtgtccaggaccagcagccctgtgcgggccaggaagctgagcctgaccagccccctgaacagcaagattggagccctggacctgaccaccagcagcagccccaccaccaccacccagagccctgctgccagccccccaccccacacaggccagatccccctggacctgagccggggcctgagcagccctgagcagagccctggcaccgtggaggagaatgtggacaacccccgggtggacctgtgcaacaagctgaagaggagcatccagaaggctgtgctggagagcgccccagctgaccgggccggcgtggagagcagccctgctgctgacaccacagagctgagcccctgccgcagccccagcacccccaggcacctgcgctaccggcagcccggcggccagacagctgacaatgcccactgcagcgtgtccccagccagcgcctttgccatcgccacagctgctgctggccacggcagccccccaggcttcaacaacacagagaggacctgtgacaaggagttcatcatcagaagaacagccaccaacagagtgctgaatgtgctgcggcactgggtgtccaagcacgcccaggactttgagctgaacaatgagctgaagatgaatgtgctgaacctgctggaggaggtgctgcgggaccctgacctgctgccccaggagaggaaggccgccgccaacatcctgcgggccctgagccaggatgaccaggatgacatccacctgaagctggaggacatcatccagatgacagactgcatgaaggccgagtgctttgagagcctgagcgccatggagctggccgagcagatcaccctgctggaccacgtgatcttccgcagcatcccctatgaggagttcctgggccagggctggatgaagctggacaagaatgaaagaacaccctacatcatgaagaccagccagcacttcaatgacatgagcaacctggtggccagccagatcatgaactatgcagatgtgagcagccgggccaatgccatcgagaagtgggtggccgtggccgacatctgccgctgcctgcacaactacaatggagtgctggagatcaccagcgccctgaacagaagtgccatctaccgcctgaagaagacctgggccaaggtgtccaagcagaccaaggccctgatggacaagctgcagaagacagtgagcagcgagggccgcttcaagaacctgcgggagaccctgaagaactgcaaccccccagctgtgccctacctgggcatgtacctgacagacctggccttcatcgaggagggcacccccaacttcacagaggagggcctggtgaacttcagcaagatgaggatgatcagccacatcatccgggagatccggcagttccagcagaccagctacagaattgaccaccagcccaaggtggcccagtacctgctggacaaggacctgatcattgatgaggacaccctgtatgagctgagcctgaagattgagccccggctgcctgcctag

SEQ ID NO: 167232 - DNA, 4431 bp, synthetic construct
  misc_feature 1..4431: note = Description of Artificial Sequence: Synthetic coding sequence
  source 1..4431: mol_type = other DNA
atgaccagcagcagccctgctggcctggagggcagtgacctgagcagcatcaacaccatgatgtctgctgtgatgtctgtgggcaaggtgacagaaaatggaggcagcccccagggcatcaagagccccagcaagcccccaggccccaaccgcatcggcagaagaaaccaggagaccaaggaggagaagagcagctacaactgccccctgtgtgagaagatctgcaccacccagcaccagctgaccatgcacatccggcagcacaacacagacaccggcggcgctgaccacagctgcagcatctgtgggaagagcctgagcagcgccagcagcctggacagacacatgctggtgcacagcggggagcggccctacaagtgcaccgtgtgtggccagagcttcaccaccaatggaaacatgcaccgccacatgaagatccacgagaaggaccccaacagcgccacagccacagccccacccagccccctgaagagaagaaggctgagcagcaagaggaagctgagccatgatgctgagagcgagagagaagatcctgccccagccaagaagatggtggaggatggccagagcggggacctggagaagaaggcagatgaggtgttccactgccctgtgtgcttcaaggagtttgtgtgcaagtatggcctggagacccacatggagacccacagcgacaaccccctgcgctgtgacatctgctgcgtgaccttccgcacccaccggggcctgctgcggcacaatgccctggtgcacaagcagctgcccagagatgccatgggccggcccttcatccagaacaaccccagcatcccagctggcttccatgacctgggcttcacagacttcagctgcaggaagttcccccgcatcagccaggcctggtgtgagaccaacctgcggcgctgcatcagcgagcagcacagatttgtgtgtgacacctgtgacaaggccttccccatgctgtgcagcctggccctgcacaagcagacccacgtggccgctgaccagggccaggagaagccccaggccacccccctgcctggagatgccctggaccagaagggcttcctggccctgctgggcctgcagcacaccaaggatgtgcggcctgccccagctgaggagcccctgcctgatgacaaccaggccatccagctgcagaccctgaagtgccagctgccccaggaccccggctgcaccaacctgctgagcctgagcccctttgaagctgccagcctgggcggcagcctgactgtgctgcctgccaccaaggacagcatcaagcacctgagcctgcagcccttccagaagggcttcatcatccagcctgacagcagcatcgtggtgaagcccatcagcggggagagcgccatcgagctggccgacatccagcagatcctgaagatggccgccagcgccccaccccagatcagcctgccccccttcagcaaggccccagctgcccccctgcaggccatcttcaagcacatgccacccctgaagcccaagcccctggtgacccccaggacagtggtggccaccagcaccccacctcctctcatcaatgcccagcaggccagccctggctgcatcagccccagcctgcccccaccacccctgaagctgctgaagggctctgtggaggccgccagcaatgcccacctgctgcagagcaagagcggcacccagccccatgctgccacccggctgagcctgcagcagcccagggctgagctgcccggccagcctgagatgaagacccagctggagcaggacagcatcatcgaggccctgctgcccctgtccatggaggccaagatcaagcaggagatcacagaaggagagctgaaggccttcatgacagcccctgggggcaagaagaccccagccatgaggaaggtgctgtacccctgccgcttctgcaaccaggtgtttgccttctctggagtgctgcgggcccacgtgcgcagccacctgggcatcagcccctaccagtgcaacatctgtgactacatcgctgctgacaaggccgccctgatccgccacctgcggacccacagcggggagcggccctacatctgcaagatctgccactaccccttcaccgtgaaggccaactgtgagcggcacctgaggaagaagcacctgaaggccaccaggaaggacatcgagaagaacatcgagtatgtgagcagcagcgctgctgagctggtggatgccttctgtgccccagacacagtgtgccgcctgtgtggggaggacctgaagcactaccgggccctgcgcatccacatgaggacccactgcggccggggcctgggcggcggccacaagggcaggaagccctttgagtgcaaggagtgcagcgctgcctttgctgccaagaggaactgcatccaccacatcctgaagcagcacctgcacgtgcctgagcaggacatcgagagctatgtgctggccgcagatggcctgggccctgctgaggccccagctgctgaggccagcggccgcggggaggacagcggctgtgccgccctgggggactgcaagcccctgacagccttcctggagccccagaatggcttcctgcaccggggccccacccagcccccacctcctcatgtgtccatcaagctggagcccgccagcagctttgctgtggacttcaatgagcccctggacttcagccagaagggcctggccctggtgcaggtgaagcaggagaacatctccttcctgagccccagcagcctggtgccctatgactgcagcatggagcccatcgacctgagcatccccaagaacttcagaaaaggagacaaggacctggccacccccagcgaggccaagaagccagaggaggaggccggcagcagcgagcagcccagcccctgcccagcccctggccccagcctgcctgtgaccctgggccccagcggcatcctggagagccccatggccccagccccagctgccaccccagagcccccagcccagcccctgcagggccctgtgcagctggccgtgcccatctacagcagcgccctggtgagcagcccccccctggtgggcagcagcgccctgctgtctggaacagccctgctgcggcccctgcggcccaagccacccctgctgctgcccaagccccctgtgacagaggagctgccccccctggccagcatcgcccagatcatcagctctgtgtcctctgcccccaccctgctgaagaccaaggtggccgaccccggccctgccagcacaggcagcaacaccacagccagtgacagcctgggcggctctgtgcccaaggccgccaccacagccaccccagctgccaccaccagccccaaggagagcagcgagcccccagccccagccagcagccctgaggccgccagccccacagagcagggccctgctggcaccagcaagaagaggggcaggaagaggggcatgaggagccggccccgggccaacagcggaggagtggacctggacagcagtggagaatttgccagcattgagaagatgctggccaccacagacaccaacaagttcagccccttcctgcagacagctgaggacaacacccaggatgaggtggccggggccccagctgaccaccacggccccagtgatgaggagcagggcagccccccagaggacaagctgctgcgggccaagaggaacagctacaccaactgcctgcagaagatcacctgcccccactgccccagggtcttcccctgggccagcagcctgcagaggcacatgctgacccacacaggccagaagcccttcccctgccagaagtgtgatgccttcttcagcaccaagagcaactgtgagcggcaccagctgaggaagcatggagtgaccacctgcagcctgcggagaaatggcctcatcccccagagcaaggagagtgatgtgggcagccatgacagcactggagagcggccctacaagtgccagacctgtgagaggaccttcaccctgaagcacagcctggtgcgccaccagaggatccaccagaaggcccggcatgccaagcaccacggcaaggacagcgacaaggaggagcggggggaggaggacagtgaaaatgaaagcacccacagcggcaacaatgctgtgtctgaaaatgaagctgagctggccccaaatgccagcaaccacatggctgtgaccaggagcaggaaggagggcctggccagcgccaccaaggactgcagccaccgggaggagaaggtgacagctggctggcccagcgagcccggccagggcgacctgaaccctgagagccctgctgccctgggccaggacctgctggagcccaggagcaagaggcctgcccaccccatcctggccacagcagatggagccagccagctggtgggcatggagtag

SEQ ID NO: 167233 - DNA, 5064 bp, synthetic construct
  misc_feature 1..5064: note = Description of Artificial Sequence: Synthetic coding sequence
  source 1..5064: mol_type = other DNA
atgaccagcagcagccctgctggcctggagggcagtgacctgagcagcatcaacaccatgatgtctgctgtgatgtctgtgggcaaggtgacagaaaatggaggcagcccccagggcatcaagagccccagcaagcccccaggccccaaccgcatcggcagaagaaaccaggagaccaaggaggagaagagcagctacaactgccccctgtgtgagaagatctgcaccacccagcaccagctgaccatgcacatccggcagcacaacacagacaccggcggcgctgaccacagctgcagcatctgtgggaagagcctgagcagcgccagcagcctggacagacacatgctggtgcacagcggggagcggccctacaagtgcaccgtgtgtggccagagcttcaccaccaatggaaacatgcaccgccacatgaagatccacgagaaggaccccaacagcgccacagccacagccccacccagccccctgaagagaagaaggctgagcagcaagaggaagctgagccatgatgctgagagcgagagagaagatcctgccccagccaagaagatggtggaggatggccagagcggggacctggagaagaaggcagatgaggtgttccactgccctgtgtgcttcaaggagtttgtgtgcaagtatggcctggagacccacatggagacccacagcgacaaccccctgcgctgtgacatctgctgcgtgaccttccgcacccaccggggcctgctgcggcacaatgccctggtgcacaagcagctgcccagagatgccatgggccggcccttcatccagaacaaccccagcatcccagctggcttccatgacctgggcttcacagacttcagctgcaggaagttcccccgcatcagccaggcctggtgtgagaccaacctgcggcgctgcatcagcgagcagcacagatttgtgtgtgacacctgtgacaaggccttccccatgctgtgcagcctggccctgcacaagcagacccacgtggccgctgaccagggccaggagaagccccaggccacccccctgcctggagatgccctggaccagaagggcttcctggccctgctgggcctgcagcacaccaaggatgtgcggcctgccccagctgaggagcccctgcctgatgacaaccaggccatccagctgcagaccctgaagtgccagctgccccaggaccccggctgcaccaacctgctgagcctgagcccctttgaagctgccagcctgggcggcagcctgactgtgctgcctgccaccaaggacagcatcaagcacctgagcctgcagcccttccagaagggcttcatcatccagcctgacagcagcatcgtggtgaagcccatcagcggggagagcgccatcgagctggccgacatccagcagatcctgaagatggccgccagcgccccaccccagatcagcctgccccccttcagcaaggccccagctgcccccctgcaggccatcttcaagcacatgccacccctgaagcccaagcccctggtgacccccaggacagtggtggccaccagcaccccacctcctctcatcaatgcccagcaggccagccctggctgcatcagccccagcctgcccccaccacccctgaagctgctgaagggctctgtggaggccgccagcaatgcccacctgctgcagagcaagagcggcacccagccccatgctgccacccggctgagcctgcagcagcccagggctgagctgcccggccagcctgagatgaagacccagctggagcaggacagcatcatcgaggccctgctgcccctgtccatggaggccaagatcaagcaggagatcacagaaggagagctgaaggccttcatgacagcccctgggggcaagaagaccccagccatgaggaaggtgctgtacccctgccgcttctgcaaccaggtgtttgccttctctggagtgctgcgggcccacgtgcgcagccacctgggcatcagcccctaccagtgcaacatctgtgactacatcgctgctgacaaggccgccctgatccgccacctgcggacccacagcggggagcggccctacatctgcaagatctgccactaccccttcaccgtgaaggccaactgtgagcggcacctgaggaagaagcacctgaaggccaccaggaaggacatcgagaagaacatcgagtatgtgagcagcagcgctgctgagctggtggatgccttctgtgccccagacacagtgtgccgcctgtgtggggaggacctgaagcactaccgggccctgcgcatccacatgaggacccactgcggccggggcctgggcggcggccacaagggcaggaagccctttgagtgcaaggagtgcagcgctgcctttgctgccaagaggaactgcatccaccacatcctgaagcagcacctgcacgtgcctgagcaggacatcgagagctatgtgctggccgcagatggcctgggccctgctgaggccccagctgctgaggccagcggccgcggggaggacagcggctgtgccgccctgggggactgcaagcccctgacagccttcctggagccccagaatggcttcctgcaccggggccccacccagcccccacctcctcatgtgtccatcaagctggagcccgccagcagctttgctgtggacttcaatgagcccctggacttcagccagaagggcctggccctggtgcaggtgaagcaggagaacatctccttcctgagccccagcagcctggtgccctatgactgcagcatggagcccatcgacctgagcatccccaagaacttcagaaaaggagacaaggacctggccacccccagcgaggccaagaagccagaggaggaggccggcagcagcgagcagcccagcccctgcccagcccctggccccagcctgcctgtgaccctgggccccagcggcatcctggagagccccatggccccagccccagctgccaccccagagcccccagcccagcccctgcagggccctgtgcagctggccgtgcccatctacagcagcgccctggtgagcagcccccccctggtgggcagcagcgccctgctgtctggaacagccctgctgcggcccctgcggcccaagccacccctgctgctgcccaagccccctgtgacagaggagctgccccccctggccagcatcgcccagatcatcagctctgtgtcctctgcccccaccctgctgaagaccaaggtggccgaccccggccctgccagcacaggcagcaacaccacagccagtgacagcctgggcggctctgtgcccaaggccgccaccacagccaccccagctgccaccaccagccccaaggagagcagcgagcccccagccccagccagcagccctgaggccgccagccccacagagcagggccctgctggcaccagcaagaagaggggcaggaagaggggcatgaggagccggccccgggccaacagcggaggagtggacctggacagcagtggagaatttgccagcattgagaagatgctggccaccacagacaccaacaagttcagccccttcctgcagacagctgaggacaacacccaggatgaggtggccggggccccagctgaccaccacggccccagtgatgaggagcagggcagccccccagaggacaagctgctgcgggccaagaggaacagctacaccaactgcctgcagaagatcacctgcccccactgccccagggtcttcccctgggccagcagcctgcagaggcacatgctgacccacacagacagccagagtgatgctgagacagctgctgctgctggggaggtgctggacctgaccagccgggaccgggagcagcccagcgagggcgccacagagctgcggcaggtggccggagatgcccctgtggagcaggccacagctgagacagccagccctgtgcaccgggaggagcacggccgcggggagagccatgagcctgaggaggagcacggcacagaggagagcactggagatgctgatggagcagaagaagatgccagcagcaaccagagcctggacctggactttgccaccaagctgatggacttcaagctggccgagggagatggagaggccggggccggcggggccgccagccaggagcagaagctggcctgtgacacctgtgggaagagcttcaagttcctgggcaccctgagccgccacaggaaggcccacggccggcaggagcccaaggatgagaagggagatggagccagcacagctgaggagggcccccagcctgcccctgagcaggaggagaagcccccagagaccccagctgaggtggtggagagcgcccctggagctggggaggccccagctgagaagctggccgaggagacagagggccccagtgatggagagagcgctgctgagaagaggagcagcgagaagagtgatgatgacaagaagcccaagacagacagccccaagtctgtggccagcaaggctgacaagaggaagaaggtgtgcagcgtgtgcaacaagcgcttctggagcctgcaggacctgaccaggcacatgaggagccacactggagagcggccctacaagtgccagacctgtgagaggaccttcaccctgaagcacagcctggtgcgccaccagaggatccaccagaaggcccggcatgccaagcaccacggcaaggacagcgacaaggaggagcggggggaggaggacagtgaaaatgaaagcacccacagcggcaacaatgctgtgtctgaaaatgaggccgagctggccccaaatgccagcaaccacatggctgtgaccaggagcaggaaggagggcctggccagcgccaccaaggactgcagccaccgggaggagaaggtgacagctggctggcccagcgagcccggccagggcgacctgaaccctgagagccctgctgccctgggccaggacctgctggagcccaggagcaagaggcctgcccaccccatcctggccacagcagatggagccagccagctggtgggcatggagtag

SEQ ID NO: 167234 - DNA, 5064 bp, synthetic construct; identical to SEQ ID NO: 167233
  misc_feature 1..5064: note = Description of Artificial Sequence: Synthetic coding sequence
  source 1..5064: mol_type = other DNA

SEQ ID NO: 167235 - DNA, 5229 bp, synthetic construct
  misc_feature 1..5229: note = Description of Artificial Sequence: Synthetic coding sequence
  source 1..5229: mol_type = other DNA
atgaccagcagcagccctgctggcctggagggcagtgacctgagcagcatcaacaccatgatgtctgctgtgatgtctgtgggcaaggtgacagaaaatggaggcagcccccagggcatcaagagccccagcaagcccccaggccccaaccgcatcggcagaagaaaccaggagaccaaggaggagaagagcagctacaactgccccctgtgtgagaagatctgcaccacccagcaccagctgaccatgcacatccggcagcacaacacagacaccggcggcgctgaccacagctgcagcatctgtgggaagagcctgagcagcgccagcagcctggacagacacatgctggtgcacagcggggagcggccctacaagtgcaccgtgtgtggccagagcttcaccaccaatggaaacatgcaccgccacatgaagatccacgagaaggaccccaacagcgccacagccacagccccacccagccccctgaagagaagaaggctgagcagcaagaggaagctgagccatgatgctgagagcgagagagaagatcctgccccagccaagaagatggtggaggatggccagagcggggacctggagaagaaggcagatgaggtgttccactgccctgtgtgcttcaaggagtttgtgtgcaagtatggcctggagacccacatggagacccacagcgacaaccccctgcgctgtgacatctgctgcgtgaccttccgcacccaccggggcctgctgcggcacaatgccctggtgcacaagcagctgcccagagatgccatgggccggcccttcatccagaacaaccccagcatcccagctggcttccatgacctgggcttcacagacttcagctgcaggaagttcccccgcatcagccaggcctggtgtgagaccaacctgcggcgctgcatcagcgagcagcacagatttgtgtgtgacacctgtgacaaggccttccccatgctgtgcagcctggccctgcacaagcagacccacgtggccgctgaccagggccaggagaagccccaggccacccccctgcctggagatgccctggaccagaagggcttcctggccctgctgggcctgcagcacaccaaggatgtgcggcctgccccagctgaggagcccctgcctgatgacaaccaggccatccagctgcagaccctgaagtgccagctgccccaggaccccggctgcaccaacctgctgagcctgagcccctttgaagctgccagcctgggcggcagcctgactgtgctgcctgccaccaaggacagcatcaagcacctgagcctgcagcccttccagaagggcttcatcatccagcctgacagcagcatcgtggtgaagcccatcagcggggagagcgccatcgagctggccgacatccagcagatcctgaagatggccgccagcgccccaccccagatcagcctgccccccttcagcaaggccccagctgcccccctgcaggccatcttcaagcacatgccacccctgaagcccaagcccctggtgacccccaggacagtggtggccaccagcaccccacctcctctcatcaatgcccagcaggccagccctggctgcatcagccccagcctgcccccaccacccctgaagctgctgaagggctctgtggaggccgccagcaatgcccacctgctgcagagcaagagcggcacccagccccatgctgccacccggctgagcctgcagcagcccagggctgagctgcccggccagcctgagatgaagacccagctggagcaggacagcatcatcgaggccctgctgcccctgtccatggaggccaagatcaagcaggagatcacagaaggagagctgaaggccttcatgacagcccctgggggcaagaagaccccagccatgaggaaggtgctgtacccctgccgcttctgcaaccaggtgtttgccttctctggagtgctgcgggcccacgtgcgcagccacctgggcatcagcccctaccagtgcaacatctgtgactacatcgctgctgacaaggccgccctgatccgccacctgcggacccacagcggggagcggccctacatctgcaagatctgccactaccccttcaccgtgaaggccaactgtgagcggcacctgaggaagaagcacctgaaggccaccaggaaggacatcgagaagaacatcgagtatgtgagcagcagcgctgctgagctggtggatgccttctgtgccccagacacagtgtgccgcctgtgtggggaggacctgaagcactaccgggccctgcgcatccacatgaggacccactgcggccggggcctgggcggcggccacaagggcaggaagccctttgagtgcaaggagtgcagcgctgcctttgctgccaagaggaactgcatccaccacatcctgaagcagcacctgcacgtgcctgagcaggacatcgagagctatgtgctggccgcagatggcctgggccctgctgaggccccagctgctgaggccagcggccgcggggaggacagcggctgtgccgccctgggggactgcaagcccctgacagccttcctggagccccagaatggcttcctgcaccggggccccacccagcccccacctcctcatgtgtccatcaagctggagcccgccagcagctttgctgtggacttcaatgagcccctggacttcagccagaagggcctggccctggtgcaggtgaagcaggagaacatctccttcctgagccccagcagcctggtgccctatgactgcagcatggagcccatcgacctgagcatccccaagaacttcagaaaaggagacaaggacctggccacccccagcgaggccaagaagccagaggaggaggccggcagcagcgagcagcccagcccctgcccagcccctggccccagcctgcctgtgaccctgggccccagcggcatcctggagagccccatggccccagccccagctgccaccccagagcccccagcccagcccctgcagggccctgtgcagctggccgtgcccatctacagcagcgccctggtgagcagcccccccctggtgggcagcagcgccctgctgtctggaacagccctgctgcggcccctgcggcccaagccacccctgctgctgcccaagccccctgtgacagaggagctgccccccctggccagcatcgcccagatcatcagctctgtgtcctctgcccccaccctgctgaagaccaaggtggccgaccccggccctgccagcacaggcagcaacaccacagccagtgacagcctgggcggctctgtgcccaaggccgccaccacagccaccccagctgccaccaccagccccaaggagagcagcgagcccccagccccagccagcagccctgaggccgccagccccacagagcagggccctgctggcaccagcaagaagaggggcaggaagaggggcatgaggagccggccccgggccaacagcggaggagtggacctggacagcagtggagaatttgccagcattgagaagatgctggccaccacagacaccaacaagttcagccccttcctgcagacagctgaggacaacacccaggatgaggtggccggggccccagctgaccaccacggccccagtgatgaggagcagggcagccccccagaggacaagctgctgcgggccaagaggaacagctacaccaactgcctgcagaagatcacctgcccccactgccccagggtcttcccctgggccagcagcctgcagaggcacatgctgacccacacaggccagaagcccttcccctgccagaagtgtgatgccttcttcagcaccaagagcaactgtgagcggcaccagctgaggaagcatggagtgaccacctgcagcctgcggagaaatggcctcatcccccagagcaaggagagtgatgtgggcagccatgacagcacagacagccagagtgatgctgagacagctgctgctgctggggaggtgctggacctgaccagccgggaccgggagcagcccagcgagggcgccacagagctgcggcaggtggccggagatgcccctgtggagcaggccacagctgagacagccagccctgtgcaccgggaggagcacggccgcggggagagccatgagcctgaggaggagcacggcacagaggagagcactggagatgctgatggagctgaggaggatgccagcagcaaccagagcctggacctggactttgccaccaagctgatggacttcaagctggccgagggagatggagaggccggggccggcggggccgccagccaggagcagaagctggcctgtgacacctgtgggaagagcttcaagttcctgggcaccctgagccgccacaggaaggcccacggccggcaggagcccaaggatgagaagggagatggagccagcacagctgaggagggcccccagcctgcccctgagcaggaggagaagcccccagagaccccagctgaggtggtggagagcgcccctggggccggggaggccccagctgagaagctggccgaggagacagagggccccagtgatggagagagcgctgctgagaagaggagcagcgagaagagtgatgatgacaagaagcccaagacagacagccccaagtctgtggccagcaaggctgacaagaggaagaaggtgtgcagcgtgtgcaacaagcgcttctggagcctgcaggacctgaccaggcacatgaggagccacactggagagcggccctacaagtgccagacctgtgagaggaccttcaccctgaagcacagcctggtgcgccaccagaggatccaccagaaggcccggcatgccaagcaccacggcaaggacagcgacaaggaggagcggggggaggaggacagtgaaaatgaaagcacccacagcggcaacaatgctgtgtctgaaaatgaagctgagctggccccaaatgccagcaaccacatggctgtgaccaggagcaggaaggagggcctggccagcgccaccaaggactgcagccaccgggaggagaaggtgacagctggctggcccagcgagcccggccagggcgacctgaaccctgagagccctgctgccctgggccaggacctgctggagcccaggagcaagaggcctgcccaccccatcctggccacagcagatggagccagccagctggtgggcatggagtag

SEQ ID NO: 167236 - DNA, 15 bp, synthetic construct
  misc_feature 1..15: note = Description of Artificial Sequence: Synthetic coding sequence
  source 1..15: mol_type = other DNA
atgaccagcagctag

SEQ ID NO: 167237 - DNA, 495 bp, synthetic construct
  misc_feature 1..495: note = Description of Artificial Sequence: Synthetic coding sequence
  source 1..495: mol_type = other DNA
atgaccagcagcagccctgctggcctggagggcagtgacctgagcagcatcaacaccatgatgtctgctgtgatgtctgtgggcaaggtgacagaaaatggaggcagcccccagggcatcaagagccccagcaagcccccaggccccaaccgcatcggcagaagaaaccaggagaccaaggaggagaagagcagctacaactgccccctgtgtgagaagatctgcaccacccagcaccagctgaccatgcacatccggcagcacaacacagacaccggcggcgctgaccacagctgcagcatctgtgggaagagcctgagcagcgccagcagcctggacagacacatgctggtgcacagcggggagcggccctacaagtgcaccgtgtgtggccagagcttcaccaccaatggaaacatgcaccgccacatgaagatccacgagaaggaccccaacagcgccacagccacagccccacccagccccctgaagtag

SEQ ID NO: 167238 - DNA, 2337 bp, synthetic construct
  misc_feature 1..2337: note = Description of Artificial Sequence: Synthetic coding sequence
  source 1..2337: mol_type = other DNA
atgaccagcagcagccctgctggcctggagggcagtgacctgagcagcatcaacaccatgatgtctgctgtgatgtctgtgggcaaggtgacagaaaatggaggcagcccccagggcatcaagagccccagcaagcccccaggccccaaccgcatcggcagaagaaaccaggagaccaaggaggagaagagcagctacaactgccccctgtgtgagaagatctgcaccacccagcaccagctgaccatgcacatccggcagcacaacacagacaccggcggcgctgaccacagctgcagcatctgtgggaagagcctgagcagcgccagcagcctggacagacacatgctggtgcacagcggggagcggccctacaagtgcaccgtgtgtggccagagcttcaccaccaatggaaacatgcaccgccacatgaagatccacgagaaggaccccaacagcgccacagccacagccccacccagccccctgaagagaagaaggctgagcagcaagaggaagctgagccatgatgctgagagcgagagagaagatcctgccccagccaagaagatggtggaggatggccagagcggggacctggagaagaaggcagatgaggtgttccactgccctgtgtgcttcaaggagtttgtgtgcaagtatggcctggagacccacatggagacccacagcgacaaccccctgcgctgtgacatctgctgcgtgaccttccgcacccaccggggcctgctgcggcacaatgccctggtgcacaagcagctgcccagagatgccatgggccggcccttcatccagaacaaccccagcatcccagctggcttccatgacctgggcttcacagacttcagctgcaggaagttcccccgcatcagccaggcctggtgtgagaccaacctgcggcgctgcatcagcgagcagcacagatttgtgtgtgacacctgtgacaaggccttccccatgctgtgcagcctggccctgcacaagcagacccacgtggccgctgaccagggccaggagaagccccaggccacccccctgcctggagatgccctggaccagaagggcttcctggccctgctgggcctgcagcacaccaaggatgtgcggcctgccccagctgaggagcccctgcctgatgacaaccaggccatccagctgcagaccctgaagtgccagctgccccaggaccccggctgcaccaacctgctgagcctgagcccctttgaagctgccagcctgggcggcagcctgactgtgctgcctgccaccaaggacagcatcaagcacctgagcctgcagcccttccagaagggcttcatcatccagcctgacagcagcatcgtggtgaagcccatcagcggggagagcgccatcgagctggccgacatccagcagatcctgaagatggccgccagcgccccaccccagatcagcctgccccccttcagcaaggccccagctgcccccctgcaggccatcttcaagcacatgccacccctgaagcccaagcccctggtgacccccaggacagtggtggccaccagcaccccacctcctctcatcaatgcccagcaggccagccctggctgcatcagccccagcctgcccccaccacccctgaagctgctgaagggctctgtggaggccgccagcaatgcccacctgctgcagagcaagagcggcacccagccccatgctgccacccggctgagcctgcagcagcccagggctgagctgcccggccagcctgagatgaagacccagctggagcaggacagcatcatcgaggccctgctgcccctgtccatggaggccaagatcaagcaggagatcacagaaggagagctgaaggccttcatgacagcccctgggggcaagaagaccccagccatgaggaaggtgctgtacccctgccgcttctgcaaccaggtgtttgccttctctggagtgctgcgggcccacgtgcgcagccacctgggcatcagcccctaccagtgcaacatctgtgactacatcgctgctgacaaggccgccctgatccgccacctgcggacccacagcggggagcggccctacatctgcaagatctgccactaccccttcaccgtgaaggccaactgtgagcggcacctgaggaagaagcacctgaaggccaccaggaaggacatcgagaagaacatcgagtatgtgagcagcagcgctgctgagctggtggatgccttctgtgccccagacacagtgtgccgcctgtgtggggaggacctgaagcactaccgggccctgcgcatccacatgaggacccactgcggccgctag

SEQ ID NO: 167239 - DNA, 411 bp, synthetic construct
  misc_feature 1..411: note = Description of Artificial Sequence: Synthetic coding sequence
  source 1..411: mol_type = other DNA
atgaccagcagcagccctgctggcctggagggcagtgacctgagcagcatcaacaccatgatgtctgctgtgatgtctgtgggcaaggtgacagaaaatggaggcagcccccagggcatcaagagccccagcaagcccccaggccccaaccgcatcggcagaagaaaccaggagaccaaggaggagaagagcagctacaactgccccctgtgtgagaagatctgcaccacccagcaccagctgaccatgcacatccggcagcacaacacagacaccggcggcgctgaccacagctgcagcatctgtgggaagagcctgagcagcgccagcagcctggacagacacatgctggtgcacagcggggagcggccctacaagtgcaccgtgtgtggccagagcttcaccacctag

SEQ ID NO: 167240 - DNA, 189 bp, synthetic construct
  misc_feature 1..189: note = Description of Artificial Sequence: Synthetic coding sequence
  source 1..189: mol_type = other DNA
atgaccagcagcagccctgctggcctggagggcagtgacctgagcagcatcaacaccatgatgtctgctgtgatgtctgtgggcaaggtgacagaaaatggaggcagcccccagggcatcaagagccccagcaagcccccaggccccaaccgcatcggcagaagaaaccaggtgtctgtgcacacctag

SEQ ID NO: 167241 - DNA, 834 bp, synthetic construct
  misc_feature 1..834: note = Description of Artificial Sequence: Synthetic coding sequence
  source 1..834: mol_type = other DNA
atgagcaagagcctgaagaagctggtggaggagagccgggagaagaaccagcctgaggtggacatgtctgaccggggcatcagcaacatgctggatgtgaatggcctcttcaccctgagccacatcacccagctggtgctgagccacaacaagctgaccatggtgccccccaacattgctgagctgaagaacctggaggtgctgaacttcttcaacaaccagatcgaggagctgcccacccagatcagcagcctgcagaagctgaagcacctgaacctgggcatgaaccggctgaacaccctgccccggggcttcggcagcctgcctgccctggaggtgctggacctgacctacaacaacctgtctgagaacagcctgcccggcaacttcttctacctgaccaccctgcgggccctgtacctgagtgacaatgactttgagatcctgcccccagacatcggcaagctgaccaagctgcagatcctgagcctgcgggacaatgacctgatcagcctgcccaaggagatcggggagctgacccagctgaaggagctgcacatccagggcaaccggctgactgtgctgcccccagagctgggcaacctggacctgaccggccagaagcaggtgttcaaggccgagaacaacccctgggtgacccccatcgctgaccagttccagctgggcgtgagccacgtgtttgagtacatccgctctgagacctacaagtacctgtatggccgccacatgcaggccaaccctgagccccccaagaagaacaatgacaagagcaagaagatcagcaggaagcccctggccgccaagaacagatag

SEQ ID NO: 167242 - DNA, 675 bp, synthetic construct
  misc_feature 1..675: note = Description of Artificial Sequence: Synthetic coding sequence
  source 1..675: mol_type = other DNA
atggtgccccccaacattgctgagctgaagaacctggaggtgctgaacttcttcaacaaccagatcgaggagctgcccacccagatcagcagcctgcagaagctgaagcacctgaacctgggcatgaaccggctgaacaccctgccccggggcttcggcagcctgcctgccctggaggtgctggacctgacctacaacaacctgtctgagaacagcctgcccggcaacttcttctacctgaccaccctgcgggccctgtacctgagtgacaatgactttgagatcctgcccccagacatcggcaagctgaccaagctgcagatcctgagcctgcgggacaatgacctgatcagcctgcccaaggagattggagagctgacccagctgaaggagctgcacatccagggcaaccggctgactgtgctgcccccagagctgggcaacctggacctgaccggccagaagcaggtgttcaaggccgagaacaacccctgggtgacccccatcgctgaccagttccagctgggcgtgagccacgtgtttgagtacatccgctctgagacctacaagtacctgtatggccgccacatgcaggccaaccctgagccccccaagaagaacaatgacaagagcaagaagatcagcaggaagcccctggccgccaagaacagatag

SEQ ID NO: 167243 - DNA, 834 bp, synthetic construct; identical to SEQ ID NO: 167241
  misc_feature 1..834: note = Description of Artificial Sequence: Synthetic coding sequence
  source 1..834: mol_type = other DNA

SEQ ID NO: 167244 - DNA, 945 bp, synthetic construct
  misc_feature 1..945: note = Description of Artificial Sequence: Synthetic coding sequence
  source 1..945: mol_type = other DNA
atggccgccacagccagcgctggagctgggggcattgatggcaagcccaggaccagccccaagtctgtgaagttcctgtttggaggcctggccggcatgggcgccaccgtgtttgtgcagcccctggacctggtgaagaacaggatgcagctgagcggggagggcgccaagacccgggagtacaagaccagcttccacgccctgaccagcatcctgaaggccgagggcctgcggggcatctacacaggcctgtctgctggcctgctgcggcaggccacctacaccaccacccggctgggcatctacacagtgctgtttgagcggctgaccggggctgatggcaccccacctggcttcctgctgaaggctgtgattggcatgacagctggggccaccggggcctttgtgggcaccccagctgaggtggccctgatccgcatgacagcagatggccgcctgcctgctgaccagaggcggggctacaagaatgtgttcaatgccctgatccgcatcacccgggaggagggcgtgctgaccctgtggaggggctgcatccccaccatggcccgggctgtggtggtgaatgctgcccagctggccagctacagccagagcaagcagttcctgctggacagcggctacttcagtgacaacatcctgtgccacttctgtgcctccatgatcagcggcctggtgaccacagctgcctccatgcctgtggacatcgccaagacccgcatccagaacatgaggatgattgatggcaagccagagtacaagaatggcctggatgtgctcttcaaggtggtgcgctatgagggcttcttcagcctgtggaagggcttcaccccctactatgcccggctgggcccccacacagtgctgaccttcatcttcctggagcagatgaacaaggcctacaagaggctcttcctgtctggatag

SEQ ID NO: 167245 - DNA, 1530 bp, synthetic construct; identical to SEQ ID NO: 144100
  misc_feature 1..1530: note = Description of Artificial Sequence: Synthetic coding sequence
  source 1..1530: mol_type = other DNA

SEQ ID NO: 167246 - DNA, 600 bp, synthetic construct
  misc_feature 1..600: note = Description of Artificial Sequence: Synthetic coding sequence
  source 1..600: mol_type = other DNA
atggccaagtctgctgaggtgaagctggccatcttcggccgggccggcgtgggcaagagcgccctggtggtgcgcttcctgaccaagcgcttcatctgggagtatgaccccaccctggagagcacctaccgccaccaggccaccattgatgatgaggtggtgtccatggagatcctggacacagctggccaggaggacaccatccagcgggagggccacatgcgctggggcgagggctttgtgctggtgtatgacatcacagaccggggcagctttgaggaggtgctgcccctgaagaacatcctggatgagatcaagaagcccaagaatgtgaccctcatcctggtgggcaacaaggctgacctggaccacagccggcaggtgtccacagaggagggggagaagctggccacagagctggcctgtgccttctatgagtgcagcgcctgcacaggagagggcaacatcacagagatcttctatgagctgtgccgggaggtgagaagaagaaggatggtgcagggcaagaccaggagaagaagcagcaccacccacgtgaagcaggccatcaacaagatgctgaccaagatcagcagctag

SEQ ID NO: 167247 - DNA, 120 bp, synthetic construct
  misc_feature 1..120: note = Description of Artificial Sequence: Synthetic coding sequence
  source 1..120: mol_type = other DNA
atggccaagtctgctgaggtgaagctggccatcttcggccgggccggcgtgggcaagagcgccctggtggtgcgcttcctgaccaagcgcttcatctgggagtatgaccccaccctgtag

SEQ ID NO: 167248 - DNA, 600 bp, synthetic construct; identical to SEQ ID NO: 167246
  misc_feature 1..600: note = Description of Artificial Sequence: Synthetic coding sequence
  source 1..600: mol_type = other DNA

SEQ ID NO: 167249 - DNA, 600 bp, synthetic construct; identical to SEQ ID NO: 167246
  misc_feature 1..600: note = Description of Artificial Sequence: Synthetic coding sequence
  source 1..600: mol_type = other DNA

SEQ ID NO: 167250 - DNA, 543 bp, synthetic construct
  misc_feature 1..543: note = Description of Artificial Sequence: Synthetic coding sequence
  source 1..543: mol_type = other DNA
atggccaagtctgctgaggtgaagctggccatcttcggccgggccggcgtgggcaagtctgagagcacctaccgccaccaggccaccattgatgatgaggtggtgtccatggagatcctggacacagctggccaggaggacaccatccagcgggagggccacatgcgctggggcgagggctttgtgctggtgtatgacatcacagaccggggcagctttgaggaggtgctgcccctgaagaacatcctggatgagatcaagaagcccaagaatgtgaccctcatcctggtgggcaacaaggctgacctggaccacagccggcaggtgtccacagaggagggggagaagctggccacagagctggcctgtgccttctatgaatgttctgcctgcaccggggagggcaacatcacagagatcttctatgagctgtgccgggaggtgagaagaagaaggatggtgcagggcaagacccggcggcgcagcagcaccacccacgtgaagcaggccatcaacaagatgctgaccaagatcagcagctag

SEQ ID NO: 167251 - DNA, 612 bp, synthetic construct
  misc_feature 1..612: note = Description of Artificial Sequence: Synthetic coding sequence
  source 1..612: mol_type = other DNA
atggtgtccacctacagagtggccgtgctgggcgcccggggcgtgggcaagagcgccatcgtgcggcagttcctgtacaatgagttcagcgaggtgtgtgtgcccaccacagcccggcggctgtacctgcctgctgtggtgatgaatggacatgtgcatgacctgcagatcctggacttcccccccatcagcgccttccctgtgaacaccctgcaggagtgggccgacacctgctgccggggcctgcggtctgtgcacgcctacatcctggtgtatgacatctgctgctttgacagctttgaatatgtgaagaccatccggcagcagatcctggagaccagggtcatcggcaccagcgagacccccatcatcatcgtgggcaacaagagggacctgcagaggggccgggtcatcccccgctggaatgtgagccacctggtgaggaagacctggaagtgtggctacgtggagtgcagcgccaagtacaactggcacatcctgctgctcttcagcgagctgctgaagtctgtgggctgtgcccgctgcaagcacgtgcatgctgccctgcgcttccagggcgccctgcggaggaacagatgtgccatcatgtag

SEQ ID NO: 167252 - DNA, 729 bp, synthetic construct
  misc_feature 1..729: note = Description of Artificial Sequence: Synthetic coding sequence
  source 1..729: mol_type = other DNA
atgaggcccctgtccatgagcggccacttcctgctggcccccatccctgagagcagcagtgactacctgctgcccaaggacatcaagctggccgtgctgggcgccggccgggtgggcaagagcgccatgattgtgcgcttcctgaccaagcgcttcatcggggactatgagcccaacacaggcaagctgtacagccggctggtgtatgtggagggggaccagctgagcctgcagatccaggacaccccaggaggagtgcagatccaggacagcctgccccaggtggtggacagcctgagcaaatgtgtgcagtgggccgagggcttcctgctggtgtacagcatcacagattatgacagctacctgagcatccggcccctgtaccagcacatcaggaaggtgcacccagacagcaaggcccctgtgatcatcgtgggcaacaagggggacctgctgcacgcccggcaggtgcagacccaggacggcatccagctggccaatgagctgggcagcctcttcctggagatcagcaccagcgagaactatgaagatgtgtgtgatgtgttccagcacctgtgcaaggaggtgtccaagatgcacggcctgtctggagagaggagaagagccagcatcatcccccggcccaggagccccaacatgcaggacctgaagaggcgcttcaagcaggccctgagccccaaggtgaaggcccccagcgccctgggctag

SEQ ID NO: 167253 - DNA, 747 bp, synthetic construct
  misc_feature 1..747: note = Description of Artificial Sequence: Synthetic coding sequence
  source 1..747: mol_type = other DNA
atgaggctcatccagaacatgtgcaccatcgccgagtacccagcccctggaaatgctgctgccagtgactgctgcgtgggcgctgctggaagaaggctggtgaagattgctgtggtgggcgccagcggcgtgggcaagacagccctggtggtgcgcttcctgaccaagcgcttcatcggggactatgaaagaaatgccggcaacctgtacacccggcaggtgcagatcgagggggagaccctggccctgcaggtgcaggacaccccaggcatccaggtgcatgagaacagcctgagctgcagcgagcagctgaaccgctgcatccgctgggcagatgctgtggtgattgtgttcagcatcacagactacaagagctatgagctgatcagccagctgcaccagcacgtgcagcagctgcacctgggcacccggctgcctgtggtggtggtggccaacaaggctgacctgctgcacatcaagcaggtggacccccagctgggcctgcagctggcctccatgctgggctgcagcttctatgaggtgtctgtgtctgagaactacaatgatgtgtacagcgccttccacgtgctgtgcaaggaggtgagccacaagcagcagcccagcagcaccccagagaagaggaggaccagcctcatcccccggcccaagagccccaacatgcaggacctgaagaggcgcttcaagcaggccctgagcgccaaggtgaggacagtgacctctgtgtag

SEQ ID NO: 167254 - DNA, 927 bp, synthetic construct
  misc_feature 1..927: note = Description of Artificial Sequence: Synthetic coding sequence
  source 1..927: mol_type = other DNA
atgaccctgaatggaggcggcagcggggccggcggcagcagaggaggcggccaggagcgggagaggagaagaggcagcaccccctggggccctgccccacccctgcacagaagatccatgcctgtggatgagcgggacctgcaggccgccctgacccctggggccctgacagctgctgctgctggcaccggcacccagggcccccggctggactggccagaggacagcgaggacagcctgagcagcggcggcagtgacagtgatgagagcgtgtacaaggtgctgctgctgggcgcccctggggtgggcaagagcgccctggcccgcatctttggaggagtggaggatggccctgaggccgaggccgccggccacacctatgacaggagcatcgtggtggatggagaggaggccagcctgatggtgtatgacatctgggagcaggacggcggccgctggctgcccggccactgcatggccatgggagatgcctacgtgattgtgtacagcgtgacagacaagggcagctttgagaaggccagcgagctgcgggtgcagctgcggcgggcccggcagacagatgatgtgcccatcatcctggtgggcaacaagagtgacctggtgcgcagccgggaggtgtctgtggatgagggccgggcctgtgctgtggtgtttgactgcaagttcatcgagaccagcgctgccctgcaccacaacgtgcaggccctgtttgagggcgtggtgcggcagatccggctgcggcgggacagcaaggaggccaatgcccggcggcaggccggcacccggcggcgggagagcctgggcaagaaggccaagcgcttcctgggcagaattgtggccaggaacagcaggaagatggccttccgggccaagagcaagagctgccacgacctgtctgtgctgtag

SEQ ID NO: 167255 - DNA, 927 bp, synthetic construct; identical to SEQ ID NO: 167254
  misc_feature 1..927: note = Description of Artificial Sequence: Synthetic coding sequence
  source 1..927: mol_type = other DNA

SEQ ID NO: 167256 - DNA, 579 bp, synthetic construct
  misc_feature 1..579: note = Description of Artificial Sequence: Synthetic coding sequence
  source 1..579: mol_type = other DNA
atgcaggccatcaagtgtgtggtggtgggagatggagctgtgggcaagacctgcctgctgatctcctacaccaccaatgccttccctggagagtacatccccaccgtgtttgacaactacagcgccaacgtgatggtggatggcaagcctgtgaacctgggcctgtgggacacagctggccaggaggactatgaccggctgcggcccctgagctacccccagacagatgtgttcctgatctgcttcagcctggtgtccccagccagctttgaaaatgtgcgggccaagtggtacccagaggtgcgccaccactgcccccacacccccatcctgctggtgggcaccaagctggacctgagagatgacaaggacaccatcgagcggctgcgggacaagaagctggcccccatcacctacccccagggcctggccatggcccgggagatcggctctgtgaagtacctggagtgcagcgccctgacccagaggggcctgaagacagtgtttgatgaggccatccgggctgtgctgtgccccccacctgtgaagaagccaggcaagaagtgcaccgtcttctag

SEQ ID NO: 167257 - DNA, 942 bp, synthetic construct
  misc_feature 1..942: note = Description of Artificial Sequence: Synthetic coding sequence
  source 1..942: mol_type = other DNA
atgcccaacacagccatgaagaagaaggtgctgctgatgggcaagagcggcagcggcaagacctccatgaggagcatcatctttgccaactacatcgcccgggacacccggcggctgggcgccaccattgatgtggagcacagccacgtgcgcttcctgggcaacctggtgctgaacctgtgggactgtggcggccaggacaccttcatggagaactacttcaccagccagagggacaacatcttcagaaatgtggaggtgctgatctacgtgtttgatgtggagagccgggagctggagaaggacatgcactactaccagagctgcctggaggccatcctgcagaacagcccagatgccaagatcttctgcctggtgcacaagatggacctggtgcaggaggaccagagggacctgatcttcaaggagcgggaggaggacctgcggcggctgagccggcccctggagtgtgcctgcttccgcaccagcatctgggatgagaccctgtacaaggcctggagcagcatcgtgtaccagctgatccccaacgtgcagcagctggagatgaacctgaggaactttgcccagatcatcgaggctgatgaggtgctgctgtttgagcgggccaccttcctggtgatcagccactaccagtgcaaggagcagagagatgtgcacagatttgagaagatcagcaacatcatcaagcagttcaagctgagctgcagcaagctggccgccagcttccagagcatggaggtgaggaacagcaactttgctgccttcatcgacatcttcaccagcaacacctacgtgatggtggtgatgtctgaccccagcatccccagcgctgccaccctcatcaacatcagaaatgccaggaagcactttgagaagctggagcgggtggatggccccaagcacagcctgctgatgaggtag

SEQ ID NO: 167258 - DNA, 1125 bp, synthetic construct
  misc_feature 1..1125: note = Description of Artificial Sequence: Synthetic coding sequence
  source 1..1125: mol_type = other DNA
atggaggagagtgacagcgagaagaccacagagaaggagaacctgggccccaggatggacccccccctgggggagcctgagggcagcctgggctgggtgctgcccaacacagccatgaagaagaaggtgctgctgatgggcaagagcggcagcggcaagacctccatgaggagcatcatctttgccaactacatcgcccgggacacccggcggctgggcgccaccatcctggaccgcatccacagcctgcagatcaacagcagcctgagcacctacagcctggtggacagcgtgggcaacaccaagacctttgatgtggagcacagccacgtgcgcttcctgggcaacctggtgctgaacctgtgggactgtggcggccaggacaccttcatggagaactacttcaccagccagagggacaacatcttcagaaatgtggaggtgctgatctacgtgtttgatgtggagagccgggagctggagaaggacatgcactactaccagagctgcctggaggccatcctgcagaacagcccagatgccaagatcttctgcctggtgcacaagatggacctggtgcaggaggaccagagggacctgatcttcaaggagcgggaggaggacctgcggcggctgagccggcccctggagtgcagctgcttccgcaccagcatctgggatgagaccctgtacaaggcctggagcagcatcgtgtaccagctgatccccaacgtgcagcagctggagatgaacctgaggaactttgctgagatcattgaagcagatgaggtgctgctgtttgagcgggccaccttcctggtgatcagccactaccagtgcaaggagcagagagatgcccacagatttgagaagatcagcaacatcatcaagcagttcaagctgagctgcagcaagctggccgccagcttccagagcatggaggtgaggaacagcaactttgctgccttcatcgacatcttcaccagcaacacctacgtgatggtggtgatgtctgaccccagcatccccagcgctgccaccctcatcaacatcagaaatgccaggaagcactttgagaagctggagcgggtggatggccccaagcagtgcctgctgatgaggtag

SEQ ID NO: 167259 - DNA, 1041 bp, synthetic construct
  misc_feature 1..1041: note = Description of Artificial Sequence: Synthetic coding sequence
  source 1..1041: mol_type = other DNA
atggaggagagtgacagcgagaagaccacagagaaggagaacctgggccccaggatggacccccccctgggggagcctgagggcagcctgggctgggtgctgcccaacacagccatgaagaagaaggtgctgctgatgggcaagagcggcagcggcaagacctccatgaggagcatcatctttgccaactacatcgcccgggacacccggcggctgggcgccaccattgatgtggagcacagccacgtgcgcttcctgggcaacctggtgctgaacctgtgggactgtggcggccaggacaccttcatggagaactacttcaccagccagagggacaacatcttcagaaatgtggaggtgctgatctacgtgtttgatgtggagagccgggagctggagaaggacatgcactactaccagagctgcctggaggccatcctgcagaacagcccagatgccaagatcttctgcctggtgcacaagatggacctggtgcaggaggaccagagggacctgatcttcaaggagcgggaggaggacctgcggcggctgagccggcccctggagtgcagctgcttccgcaccagcatctgggatgagaccctgtacaaggcctggagcagcatcgtgtaccagctgatccccaacgtgcagcagctggagatgaacctgaggaactttgctgagatcattgaagcagatgaggtgctgctgtttgagcgggccaccttcctggtgatcagccactaccagtgcaaggagcagagagatgcccacagatttgagaagatcagcaacatcatcaagcagttcaagctgagctgcagcaagctggccgccagcttccagagcatggaggtgaggaacagcaactttgctgccttcatcgacatcttcaccagcaacacctacgtgatggtggtgatgtctgaccccagcatccccagcgctgccaccctcatcaacatcagaaatgccaggaagcactttgagaagctggagcgggtggatggccccaagcagtgcctgctgatgaggtag

SEQ ID NO: 167260 - DNA, 585 bp, synthetic construct
  misc_feature 1..585: note = Description of Artificial Sequence: Synthetic coding sequence
  source 1..585: mol_type = other DNA
atgaagaagaaggtgctgctgatgggcaagagcggcagcggcaagacctccatgaggagcatcatctttgccaactacatcgcccgggacacccggcggctgggcgccaccattgatgtggagcacagccacgtgcgcttcctgggcaacctggtgctgaacctgtgggactgtggcggccaggacaccttcatggagaactacttcaccagccagagggacaacatcttcagaaatgtggaggtgctgatctacgtgtttgatgtggagagccgggagctggagaaggacatgcactactaccagagctgcctggaggccatcctgcagaacagcccagatgccaagatcttctgcctggtgcacaagatggacctggtgcaggaggaccagagggacctgatcttcaaggagcgggaggaggacctgcggcggctgagccggcccctggagtgcagctgcttccgcaccagcatctgggatgagaccctgtacaaggcctggagcagcatcgtgtaccagctgatccccaacgtgcagcagctggagatgaacctgaggaactttgctgagatcattgaatag

SEQ ID NO: 167261 - DNA, 1200 bp, synthetic construct
  misc_feature 1..1200: note = Description of Artificial Sequence: Synthetic coding sequence
  source 1..1200: mol_type = other DNA
atgagcctgcagtatggagctgaggagacccccctggccggcagctatggagctgctgacagcttccccaaggactttggctacggcgtggaggaggaggaggaggaggccgctgctgctgggggcggcgtgggcgctggggccggcggcggctgcggccctgggggcgctgacagcagcaagccccgcatcctgctgatgggcctgcggcgcagcggcaagagcagcatccagaaggtggtgttccacaagatgagccccaatgagaccctcttcctggagagcaccaacaagatctacaaggatgacatcagcaacagcagctttgtgaacttccagatctgggacttccctggccagatggacttctttgaccccacctttgattatgagatgatcttccggggcactggagccctgatctacgtgattgatgcccaggatgactacatggaggccctgacccggctgcacatcaccgtgtccaaggcctacaaggtgaacccagacatgaactttgaggtgttcatccacaaggtggatggcctgagtgatgaccacaagattgagacccagagggacatccaccagagggccaatgatgacctggctgatgctggcctggagaagctgcacctgtccttctacctgaccagcatctatgaccacagcatctttgaggccttcagcaaggtggtgcagaagctgatcccccagctgcccaccctggagaacctgctgaacatcttcatcagcaacagcggcatcgagaaggccttcctgtttgatgtggtgtccaagatctacatcgccacagacagcagccctgtggacatgcagagctatgagctgtgctgtgacatgattgatgtggtgattgatgtgtcctgcatctacggcctgaaggaggatggcagcggcagcgcctatgacaaggagagcatggccatcatcaagctgaacaacaccaccgtgctgtacctgaaggaggtgaccaagttcctggccctggtgtgcatcctgcgggaggagagctttgagaggaagggcctgattgactacaacttccactgcttcaggaaggccatccacgaggtgtttgaggtgggcgtgaccagccacaggagctgtggccaccagaccagcgccagcagcctgaaggccctgacccacaacggcaccccaagaaatgccatctag

SEQ ID NO: 167262 - DNA, 750 bp, synthetic construct
  misc_feature 1..750: note = Description of Artificial Sequence: Synthetic coding sequence
  source 1..750: mol_type = other DNA
atggaggccctggcccggctgcacctgactgtgacccgggcctacaaggtgaacacagacatcaactttgaggtgttcatccacaaggtggatggcctgagtgatgaccacaagattgagacccagagggacatccaccagagggccaatgatgacctggctgatgctggcctggagaagatccacctgtccttctacctgaccagcatctatgaccacagcatctttgaggccttcagcaaggtggtgcagaagctgatcccccagctgcccaccctggagaacctgctgaacatcttcatcagcaacagcggcatcgagaaggccttcctgtttgatgtggtgtccaagatctacatcgccacagacagcacccctgtggacatgcagacctatgagctgtgctgtgacatgattgatgtggtgattgacatcagctgcatctacggcctgaaggaggatggagctggcaccccctatgacaaggagagcacagccatcatcaagctgaacaacaccaccgtgctgtacctgaaggaggtgaccaagttcctggccctggtgtgctttgtgcgggaggagagctttgagaggaagggcctgattgactacaacttccactgcttcaggaaggccatccacgaggtgtttgaggtgaggatgaaggtggtgaagagcaggaaggtgcagaaccggctgcagaagaagaagagggccacccccaacggcaccccccgggtgctgctgtag

SEQ ID NO: 167263 - DNA, 1203 bp, synthetic construct
  misc_feature 1..1203: note = Description of Artificial Sequence: Synthetic coding sequence
  source 1..1203: mol_type = other DNA
atgagccaggtgctgggcaagccccagccccaggatgaagatgatgctgaggaggaggaggaggaggatgagctggtgggcctggccgactatggagatggccctgacagcagtgatgctgaccctgacagcggcacagaggagggcgtgctggacttcagtgaccccttcagcacagaggtgaagccccgcatcctgctgatgggcctgcggcgcagcggcaagagcagcatccagaaggtggtgttccacaagatgagccccaatgagaccctcttcctggagagcaccaacaagatctgcagagaagatgtgagcaacagcagctttgtgaacttccagatctgggacttccctggccagattgacttctttgaccccacctttgattatgagatgatcttccggggcaccggggccctgatctttgtgattgacagccaggatgactacatggaggccctggcccggctgcacctgactgtgacccgggcctacaaggtgaacacagacatcaactttgaggtgttcatccacaaggtggatggcctgagtgatgaccacaagattgagacccagagggacatccaccagagggccaatgatgacctggctgatgctggcctggagaagatccacctgtccttctacctgaccagcatctatgaccacagcatctttgaggccttcagcaaggtggtgcagaagctgatcccccagctgcccaccctggagaacctgctgaacatcttcatcagcaacagcggcatcgagaaggccttcctgtttgatgtggtgtccaagatctacatcgccacagacagcacccctgtggacatgcagacctatgagctgtgctgtgacatgattgatgtggtgattgacatcagctgcatctacggcctgaaggaggatggagctggcaccccctatgacaaggagagcacagccatcatcaagctgaacaacaccaccgtgctgtacctgaaggaggtgaccaagttcctggccctggtgtgctttgtgcgggaggagagctttgagaggaagggcctgattgactacaacttccactgcttcaggaaggccatccacgaggtgtttgaggtgaggatgaaggtggtgaagagcaggaaggtgcagaaccggctgcagaagaagaagagggccaccccaaatggcaccccccgggtgctgctgtag

SEQ ID NO: 167264 - DNA, 348 bp, synthetic construct
  misc_feature 1..348: note = Description of Artificial Sequence: Synthetic coding sequence
  source 1..348: mol_type = other DNA
atgctgcgggacaccatgaagtcctggaatgacagccagagcgacctgtgcagcacagaccaggaggaggaggaggagatgatctttggagaaaatgaagatgacctggatgagatgatggacctgagtgacctgcccaccagcctgtttgcctgcagcgtgcatgaagctgtgtttgaggcccgggagcagaaggagaggaacatgaacttcacccgggagcagagccgccacccagcctggtggttcatgtctgtgaaggtgaagctgaagaggaagaagaggcagaagacccccaacaggaagctgcccaggagaggagcccccaccctgcggccccagaggtag

SEQ ID NO: 167265 - DNA, 726 bp, synthetic construct
  misc_feature 1..726: note = Description of Artificial Sequence: Synthetic coding sequence
  source 1..726: mol_type = other DNA
atgctgcgggacaccatgaagtcctggaatgacagccagagcgacctgtgcagcacagaccaggaggaggaggaggagatgatctttggagaaaatgaagatgacctggatgagatgatggacctgagtgacctgcccaccagcctgtttgcctgcagcgtgcatgaagctgtgtttgaggcccgggagcagaaggagagatttgaggccctcttcaccatctatgatgaccaggtgaccttccagctgttcaagagcttccggcgggtgcgcatcaacttcagcaagccagaggccgccgcccgggccagaattgagctgcacgagacagacttcaacggccagaagctgaagctgtactttgcccaggtgcagatgtctggagaggtgcgggacaagagctacctgctgcccccccagcctgtgaagcagttcctgatcagccccccagccagcccccctgtgggctggaagcagagtgaagatgccatgcctgtgatcaactatgacctgctgtgtgctgtgtccaagctgggccctggagagaagtatgagctgcacgccggcacagagagcaccccatctgtggtggtgcacgtgtgtgagagcgagacagaggaggaggaggagaccaagaaccccaagcagaagatcgcccagacccggcggccagaccccccaacagctgccctgaatgagccccagacctttgactgtgccctgtag

SEQ ID NO: 167266 - DNA, 522 bp, synthetic construct
  misc_feature 1..522: note = Description of Artificial Sequence: Synthetic coding sequence
  source 1..522: mol_type = other DNA
atgctgcgggacaccatgaagtcctggaatgacagccagagcgacctgtgcagcacagaccaggaggaggaggaggagatgatctttggagaaaatgaagatgacctggatgagatgatggacctgagtgacctgcccaccagcctgtttgcctgcagcgtgcatgaagctgtgtttgaggcccgggagcagaaggagagatttgaggccctcttcaccatctatgatgaccaggtgaccttccagctgttcaagagcttccggcgggtgcgcatcaacttcagcaagccagaggccgccgcccgggccagaattgagctgcacgagacagacttcaacggccagaagctgaagctgtactttgcccaggagaggaacatgaacttcacccgggagcagagccgccacccagcctggtggttcatgtctgtgaaggtgaagctgaagaggaagaagaggcagaagacccccaacaggaagctgcccaggagaggagcccccaccctgcggccccagaggtag

SEQ ID NO: 167267 - DNA, 198 bp, synthetic construct
  misc_feature 1..198: note = Description of Artificial Sequence: Synthetic coding sequence
  source 1..198: mol_type = other DNA
atgctgcgggacaccatgaagtcctggaatgacagccagagcgacctgtgcagcacagaccaggaggaggaggaggagatgatctttggagaaaatgaagatgacctggatgagatgatggacctgagtgacctgcccaccagcctgtttgcctgcagcgtgcatgaagctgtgtttgaggcccgggagcagaagtag

SEQ ID NO: 167268 - DNA, 696 bp, synthetic construct
  misc_feature 1..696: note = Description of Artificial Sequence: Synthetic coding sequence
  source 1..696: mol_type = other DNA
atgctgcgggacaccatgaagtcctggaatgacagccagagcgacctgtgcagcacagaccaggaggaggaggaggagatgatctttggagaaaatgaagatgacctggatgagatgatggacctgagtgacctgcccaccagcctgtttgcctgcagcgtgcatgaagctgtgtttgaggcccgggagcagaaggagagatttgaggccctcttcaccatctatgatgaccaggtgaccttccagctgttcaagagcttccggcgggtgcgcatcaacttcagcaagccagaggccgccgcccgggccagaattgagctgcacgagacagacttcaacggccagaagctgaagctgtactttgcccagagctacctgctgcccccccagcctgtgaagcagttcctgatcagccccccagccagcccccctgtgggctggaagcagagtgaagatgccatgcctgtgatcaactatgacctgctgtgtgctgtgtccaagctgggccctggagagaagtatgagctgcacgccggcacagagagcaccccatctgtggtggtgcacgtgtgtgagagcgagacagaggaggaggaggagaccaagaaccccaagcagaagatcgcccagacccggcggccagaccccccaacagctgccctgaatgagccccagacctttgactgtgccctgtag

SEQ ID NO: 167269 - DNA, 552 bp, synthetic construct
  misc_feature 1..552: note = Description of Artificial Sequence: Synthetic coding sequence
  source 1..552: mol_type = other DNA
atgctgcgggacaccatgaagtcctggaatgacagccagagcgacctgtgcagcacagaccaggaggaggaggaggagatgatctttggagaaaatgaagatgacctggatgagatgatggacctgagtgacctgcccaccagcctgtttgcctgcagcgtgcatgaagctgtgtttgaggcccgggagcagaaggtgcagatgtctggagaggtgcgggacaagagctacctgctgcccccccagcctgtgaagcagttcctgatcagccccccagccagcccccctgtgggctggaagcagagtgaagatgccatgcctgtgatcaactatgacctgctgtgtgctgtgtccaagctgggccctggagagaagtatgagctgcacgccggcacagagagcaccccatctgtggtggtgcacgtgtgtgagagcgagacagaggaggaggaggagaccaagaaccccaagcagaagatcgcccagacccggcggccagaccccccaacagctgccctgaatgagccccagacctttgactgtgccctgtag

SEQ ID NO: 167270 - DNA, 900 bp, synthetic construct
  misc_feature 1..900: note = Description of Artificial Sequence: Synthetic coding sequence
  source 1..900: mol_type = other DNA
atgcacagcctggccacagctgcccctgtgcccaccaccctggcccaggtggaccgggagaagatctaccagtggatcaatgagctgagcagccctgagacccgggagaatgccctgctggagctgagcaagaagcgggagagcgtgcctgacctggcccccatgctgtggcacagctttggcaccatcgccgccctgctgcaggagatcgtgaacatctaccccagcatcaacccccccaccctgacagcccaccagagcaacagagtgtgcaatgccctggccctgctgcagtgtgtggccagccaccctgagaccaggtctgccttcctggccgcccacatccccctcttcctgtaccccttcctgcacacagtgtccaagacccggccctttgagtacctgcggctgaccagcctgggcgtgattggagccctggtgaagacagatgagcaggaggtgatcaacttcctgctgaccacagagatcatccccctgtgcctgcgcatcatggagagcggcagcgagctgagcaagacagtggccaccttcatcctgcagaagatcctgctggatgacaccggcctggcctacatctgccagacctatgagcgcttcagccacgtggccatgatcctgggcaagatggtgctgcagctgagcaaggagcccagcgcccggctgctgaagcacgtggtgcgctgctacctgcggctgagtgacaacccccgggcccgggaggccctgcggcagtgcctgcctgaccagctgaaggacaccacctttgcccaggtgctgaaggatgacaccaccaccaagcgctggctggcccagctggtgaagaacctgcaggagggccaggtgacagacccccggggcatccccctgcccccccagtag

SEQ ID NO: 167271 - DNA, 996 bp, synthetic construct
  misc_feature 1..996: note = Description of Artificial Sequence: Synthetic coding sequence
  source 1..996: mol_type = other DNA
atgcacagcctggccacagctgcccctgtgcccaccaccctggcccaggtggaccgggagaagatctaccagtggatcaatgagctgagcagccctgagacccgggagaatgccctgctggagctgagcaagaagcgggagagcgtgcctgacctggcccccatgctgtggcacagctttggcaccatcgccgccctgctgcaggagatcgtgaacatctaccccagcatcaacccccccaccctgacagcccaccagagcaacagagtgtgcaatgccctggccctgctgcagtgtgtggccagccaccctgagaccaggtctgccttcctggccgcccacatccccctcttcctgtaccccttcctgcacacagtgtccaagacccggccctttgagtacctgcggctgaccagcctgggcgtgattgtggagaccggcttccaccacgtgggccaggccgacctggagctgcccaccagcagtgacctgcctgccagcgccagccagagcgctggcatcactggagccctggtgaagacagatgagcaggaggtgatcaacttcctgctgaccacagagatcatccccctgtgcctgcgcatcatggagagcggcagcgagctgagcaagacagtggccaccttcatcctgcagaagatcctgctggatgacaccggcctggcctacatctgccagacctatgagcgcttcagccacgtggccatgatcctgggcaagatggtgctgcagctgagcaaggagcccagcgcccggctgctgaagcacgtggtgcgctgctacctgcggctgagtgacaacccccgggcccgggaggccctgcggcagtgcctgcctgaccagctgaaggacaccacctttgcccaggtgctgaaggatgacaccaccaccaagcgctggctggcccagctggtgaagaacctgcaggagggccaggtgacagacccccggggcatccccctgcccccccagtag

SEQ ID NO: 167272 - DNA, 900 bp, synthetic construct; identical to SEQ ID NO: 167270
  misc_feature 1..900: note = Description of Artificial Sequence: Synthetic coding sequence
  source 1..900: mol_type = other DNA

SEQ ID NO: 167273 - DNA, 777 bp, synthetic construct
  misc_feature 1..777: note = Description of Artificial Sequence: Synthetic coding sequence
  source 1..777: mol_type = other DNA
atgcacagcctggccacagctgcccctgtgcccaccaccctggcccaggtggaccgggagaagatctaccagtggatcaatgagctgagcagccctgagacccgggagaatgccctgctggagctgagcaagaagcgggagagcgtgcctgacctggcccccatgctgtggcacagctttggcaccatcgccgccctgctgcaggagatcgtgaacatctaccccagcatcaacccccccaccctgacagcccaccagagcaacagagtgtgcaatgccctggccctgctgcagtgtgtggccagccaccctgagaccaggtctgccttcctggccgcccacatccccctcttcctgtaccccttcctgcacacagtgtccaagacccggccctttgagtacctgcggctgaccagcctgggcgtgattggagccctggtgaagacagatgagcaggaggtgatcaacttcctgctgaccacagagatcatccccctgtgcctgcgcatcatggagagcggcagcgagctgagcaagacagtggccaccttcatcctgcagaagatcctgctggatgacaccggcctggcctacatctgccagacctatgagcgcttcagccacgtggccatgatcctgggcaagatggtgctgcagctgagcaaggagcccagcgcccggctgctgaagcacgtggtgcgctgctacctgcggctgagtgacaacccccgcttcagtgacctgaccttctgctggagcagcttccagaggaagtag

SEQ ID NO: 167274 - DNA, 990 bp, synthetic construct
  misc_feature 1..990: note = Description of Artificial Sequence: Synthetic coding sequence
  source 1..990: mol_type = other DNA
atggccgccctgggcggagatggcctgcggctgctgtctgtgtccaggcctgagcggcccccagagagcgctgccctgggcggcctgggccctggcctgtgctgctgggtgtctgtgttcagctgcctgagcctggcctgcagctatgtgggcagcctgtatgtgtggaagtctgagctgccccgggaccaccctgctgtgatcaagaggcgcttcacctctgtgctggtggtgagcagcctgagccccctgtgtgtgctgctgtggagggagctgaccggcatccagcccggcaccagcctgctgaccctgatgggcttccggctggagggcatcttccctgctgccctgctgcccctgctgctgaccatgatcctcttcctgggccccctgatgcagctgtccatggactgcccctgtgacctggctgatggcctgaaggtggtgctggcccccaggtcctgggcccgctgcctgacagacatgcgctggctgaggaaccaggtgattgcccccctgacagaggagctggtgttccgggcctgcatgctgcccatgctggccccctgcatgggcctgggccctgctgtgttcacctgccccctcttcttcggcgtggcccacttccaccacatcatcgagcagctgcgcttccggcagagctctgtgggcaacatcttcctgtctgctgccttccagttctcctacacagctgtgtttggagcctacacagccttcctgttcatcagaacaggccacctgattggccctgtgctgtgccacagcttctgcaactacatgggcttccctgctgtgtgtgccgccctggagcacccccagaggcggcccctgctggccggctacgccctgggcgtgggcctcttcctgctgctgctgcagcccctgacagaccccaagctgtatggcagcctgcccctgtgtgtgctgctggagcgggccggggacagcgaggcccccctgtgcagctag

SEQ ID NO: 167275 - DNA, 927 bp, synthetic construct
  misc_feature 1..927: note = Description of Artificial Sequence: Synthetic coding sequence
  source 1..927: mol_type = other DNA
atggccgccctgggcggagatggcctgcggctgctgtctgtgtccaggcctgagcggcccccagagagcgctgccctgggcggcctgggccctggcctgtgctgctgggtgtctgtgttcagctgcctgagcctggcctgcagctatgtgggcagcctgtatgtgtggaagtctgagctgccccgggaccaccctgctgtgatcaagaggcgcttcacctctgtgctggtggtgagcagcctgagccccctgtgtgtgctgctgtggagggagctgaccggcatccagcccggcaccagcctgctgaccctgatgggcttccggctggagggcatcttccctgctgccctgctgcccctgctgctgaccatgatcctcttcctgggccccctgatgcagctgtccatggactgcccctgtgacctggctgatggcctgaaggtggtgctggcccccaggtcctgggcccgctgcctgacagacatgcgctggctgaggaaccaggtgattgcccccctgacagaggagctggtgttccgggcctgcatgctgcccatgctggccccctgcatgggcctgggccctgctgtgttcacctgccccctcttcttcggcgtggcccacttccaccacatcatcgagcagctgcgcttccggcagagctctgtgggcaacatcttcctgtctgctggccacctgattggccctgtgctgtgccacagcttctgcaactacatgggcttccctgctgtgtgtgccgccctggagcacccccagaggcggcccctgctggccggctacgccctgggcgtgggcctcttcctgctgctgctgcagcccctgacagaccccaagctgtatggcagcctgcccctgtgtgtgctgctggagagagctggggacagcgaggcccccctgtgcagctag

SEQ ID NO: 167276 - DNA, 1164 bp, synthetic construct
  misc_feature 1..1164: note = Description of Artificial Sequence: Synthetic coding sequence
  source 1..1164: mol_type = other DNA
atggtgcccaagggggccaccatgctggtgatccccccaggcctgtctgaggaggaggaggccctgcagaagaagttcaacaagctgaagaagaagaagaaggccctgctggccctgaagaagcagagcagcagcagcaccaccagccagggcggcgtgaagaggagcctgtctgagcagcctgtgatggacacagccacagccacagagcaggccaagcagctggtgaagagcggggccatcagcgccatcaaggccgagaccaagaacagcggcttcaagaggagcaggaccctggagggcaagctgaaggaccctgagaagggccctgtgcccaccttccagcccttccagaggagcatctctgcagatgatgacctgcaggagagcagccggcggccccagaggaagagcctgtatgagagctttgtgagcagcagtgaccggctgcgggagctgggcccagatggagaggaggccgagggccctggagctggagatggccccccaagaagctttgactggggctatgaggagaggtctggggcccacagcagcgccagccccccaagaagccgcagccgggacaggagccatgaaagaaacagagaccgggaccgggaccgggagcgggaccgggaccgggaccgggaccgggaccgggagcgggaccgggaccgggaccgggaccgggaccgggaccgggagcgggaccgggaccgggagcgggaccgggaccgggaccgggagggccccttccgccgcagtgacagcttccctgagcggcgggcccccaggaaaggaaacaccctgtatgtgtatggagaggacatgacccccaccctgctgcggggggccttcagccccttcggcaacatcatcgacctgtccatggacccccccaggaactgtgcctttgtgacctatgagaagatggagagcgctgaccaggccgtggccgagctgaatggcacccaggtggagagcgtgcagctgaaggtgaacatcgccaggaagcagcccatgctggatgctgccaccgggaagtctgtgtggggcagcctggccgtgcagaacagccccaagggctgccaccgggacaagaggacccagatcgtgtacagtgatgatgtgtacaaggagaacctggtggatggcttctag

SEQ ID NO: 167277 - DNA, 1143 bp, synthetic construct
  misc_feature 1..1143: note = Description of Artificial Sequence: Synthetic coding sequence
  source 1..1143: mol_type = other DNA
atgctggtgattcctcctggcctgtctgaggaggaggaggccctgcagaagaagttcaacaagctgaagaagaagaagaaggccctgctggccctgaagaagcagagcagcagcagcaccaccagccagggcggcgtgaagaggagcctgtctgagcagcctgtgatggacacagccacagccacagagcaggccaagcagctggtgaagagcggggccatcagcgccatcaaggccgagaccaagaacagcggcttcaagaggagcaggaccctggagggcaagctgaaggaccctgagaagggccctgtgcccaccttccagcccttccagaggagcatctctgcagatgatgacctgcaggagagcagcagaagaccccagaggaagagcctgtatgagagctttgtgagcagcagtgaccggctgcgggagctgggcccagatggagaggaggccgagggccctggagctggagatggcccccccaggagctttgactggggctatgaggagaggtctggggcccacagcagcgccagcccccccaggagccgcagccgggacaggagccatgagaggaacagagaccgggaccgggaccgggagcgggaccgggaccgggaccgggaccgggaccgggagcgggaccgggaccgggaccgggaccgggaccgggaccgggagcgggaccgggaccgggagcgggaccgggaccgggaccgggagggccccttcagaagaagtgacagcttccctgagcggcgggcccccaggaagggcaacaccctgtatgtgtatggagaggacatgacccccaccctgctgcggggggccttcagcccctttggaaacatcatcgacctgtccatggaccccccaagaaactgtgcctttgtgacctatgagaagatggagagcgctgaccaggccgtggccgagctgaatggcacccaggtggagagcgtgcagctgaaggtgaacatcgccaggaagcagcccatgctggatgctgccaccgggaagtctgtgtggggcagcctggccgtgcagaacagccccaagggctgccaccgggacaagaggacccagatcgtgtacagtgatgatgtgtacaaggagaacctggtggatggcttctag

SEQ ID NO: 167278 - DNA, 1143 bp, synthetic construct; identical to SEQ ID NO: 167277
  misc_feature 1..1143: note = Description of Artificial Sequence: Synthetic coding sequence
  source 1..1143: mol_type = other DNA

SEQ ID NO: 167279 - DNA, 1143 bp, synthetic construct; identical to SEQ ID NO: 167277
  misc_feature 1..1143: note = Description of Artificial Sequence: Synthetic coding sequence
  source 1..1143: mol_type = other DNA

SEQ ID NO: 167280 - DNA, 885 bp, synthetic construct
  misc_feature 1..885: note = Description of Artificial Sequence: Synthetic coding sequence
  source 1..885: mol_type = other DNA
atgctggtgattcctcctggcctgtctgaggaggaggaggccctgcagaagaagttcaacaagctgaagaagaagaagaaggccctgctggccctgaagaagcagagcagcagcagcaccaccagccagggcggcgtgaagaggagcctgtctgagcagcctgtgatggacacagccacagccacagagcaggccaagcagctggtgaagagcggggccatcagcgccatcaaggccgagaccaagaacagcggcttcaagaggagcaggaccctggagggcaagctgaaggaccctgagaagggccctgtgcccaccttccagcccttccagaggagcatctctgcagatgatgacctgcaggagagcagcagaagaccccagaggaagagcctgtatgagagctttgtgagcagcagtgaccggctgcgggagctgggcccagatggagaggaggccgagggccctggagctggagatggcccccccaggagctttgactggggctatgaggagaggtctggggcccacagcagcgccagcccccccaggagccgcagccgggacaggagccatgagaggaacagagaccgggaccgggaccgggagcgggaccgggaccgggaccgggaccgggaccgggagcgggaccgggaccgggaccgggaccgggaccgggaccgggagcgggaccgggaccgggagcgggaccgggaccgggaccgggagggccccttcagaagaagtgacagcttccctgagcggcgggcccccaggaagggcaacaccctgtatgtgtatggagaggacatgacccccaccctgctgcggggggccttcagcccctttggaaacatcatcgacctgtccatggaccccccatag

SEQ ID NO: 167281 - DNA, 480 bp, synthetic construct
  misc_feature 1..480: note = Description of Artificial Sequence: Synthetic coding sequence
  source 1..480: mol_type = other DNA
atgctggtgattcctcctggcctgtctgaggaggaggaggccctgcagaagaagttcaacaagctgaagaagaagaagaaggccctgctggccctgaagaagcagagcagcagcagcaccaccagccagggcggcgtgaagaggagcctgtctgagcagcctgtgatggacacagccacagccacagagcaggccaagcagctggtgaagagcggggccatcagcgccatcaaggccgagaccaagaacagcggcttcaagaggagcaggaccctggagggcaagctgaaggaccctgagaagggccctgtgcccaccttccagcccttccagaggagcatctctgcagatgatgacctgcaggagagcagcagaagaccccagaggaagagcctgtatgagagctttgtgagcagcagtgaccggctgcgggagctgggcccagatggagaggaggccgagggccctggggccggctag

SEQ ID NO: 167282 - DNA, 723 bp, synthetic construct
  misc_feature 1..723: note = Description of Artificial Sequence: Synthetic coding sequence
  source 1..723: mol_type = other DNA
atgctggtgattcctcctggcctgtctgaggaggaggaggccctgcagaagaagttcaacaagctgaagaagaagaagaaggccctgctggccctgaagaagcagagcagcagcagcaccaccagccagggcggcgtgaagaggagcctgtctgagcagcctgtgatggacacagccacagccacagagcaggccaagcagctggtgaagagcggggccatcagcgccatcaaggccgagaccaagaacagcggcttcaagaggagcaggaccctggagggcaagctgaaggaccctgagaagggccctgtgcccaccttccagcccttccagaggagcatctctgcagatgatgacctgcaggagagcagcagaagaccccagaggaagagcctgtatgaaagtgaccggctgcgggagctgggcccagatggagaggaggccgagggccctggagctggagatggccccccaagaagctttgactggggctatgaggagaggtctggggcccacagcagcgccagccccccaagaagccgcagccgggacaggagccatgaaagaaacagagaccgggaccgggaccgggagcgggaccgggaccgggaccgggaccgggaccgggagcgggaccgggaccgggaccgggaccgggaccgggaccgggagcgggaccgggaccgggagcgggaccgggaccgggaccgggagggcccctag

SEQ ID NO: 167283 - DNA, 480 bp, synthetic construct; identical to SEQ ID NO: 167281
  misc_feature 1..480: note = Description of Artificial Sequence: Synthetic coding sequence
  source 1..480: mol_type = other DNA

SEQ ID NO: 167284 - DNA, 480 bp, synthetic construct; identical to SEQ ID NO: 167281
  misc_feature 1..480: note = Description of Artificial Sequence: Synthetic coding sequence
  source 1..480: mol_type = other DNA

SEQ ID NO: 167285 - DNA, 1005 bp, synthetic construct
  misc_feature 1..1005: note = Description of Artificial Sequence: Synthetic coding sequence
  source 1..1005: mol_type = other DNA
atgctggtgattcctcctggcctgtctgaggaggaggaggccctgcagaagaagttcaacaagctgaagaagaagaagaaggccctgctggccctgaagaagcagagcagcagcagcaccaccagccagggcggcgtgaagaggagcctgtctgagcagcctgtgatggacacagccacagccacagagcaggccaagcagctggtgaagagcggggccatcagcgccatcaaggccgagaccaagaacagcggcttcaagaggagcaggaccctggagggcaagctgaaggaccctgagaagggccctgtgcccaccttccagcccttccagaggagcatctctgcagatgatgacctgcaggagagcagcagaagaccccagaggaagagcctgtatgaaagtgaccggctgcgggagctgggcccagatggagaggaggccgagggccctggagctggagatggccccccaagaagctttgactggggctatgaggagaggtctggggcccacagcagcgccagccccccaagaagccgcagccgggacaggagccatgaaagaaacagagaccgggaccgggaccgggagcgggaccgggaccgggaccgggaccgggaccgggagcgggaccgggaccgggaccgggaccgggaccgggaccgggagcgggaccgggaccgggagcgggaccgggaccgggaccgggagggccccttccgccgcagtgacagcttccctgagcggcgggcccccaggaaaggaaacaccctgtatgtgtatggagaggacatgacccccaccctgctgcggggggccttcagccccttcggcaacatcatcgacctgtccatggacccccccaggaactgtgcctttgtgacctatgagaagatggagagcgctgaccaggccgtggccgagctgaatggcacccaggtggagagcgtgcagctgaaggtgaacatcgccaggaagcagcccatgctggatgctgcctag

SEQ ID NO: 167286 - DNA, 723 bp, synthetic construct; identical to SEQ ID NO: 167282
  misc_feature 1..723: note = Description of Artificial Sequence: Synthetic coding sequence
  source 1..723: mol_type = other DNA

SEQ ID NO: 167287 - DNA, 480 bp, synthetic construct; identical to SEQ ID NO: 167281
  misc_feature 1..480: note = Description of Artificial Sequence: Synthetic coding sequence
  source 1..480: mol_type = other DNA

SEQ ID NO: 167288 - DNA, 1005 bp, synthetic construct; identical to SEQ ID NO: 167285
  misc_feature 1..1005: note = Description of Artificial Sequence: Synthetic coding sequence
  source 1..1005: mol_type = other DNA

SEQ ID NO: 167289 - DNA, 480 bp, synthetic construct; identical to SEQ ID NO: 167281
  misc_feature 1..480: note = Description of Artificial Sequence: Synthetic coding sequence
  source 1..480: mol_type = other DNA

SEQ ID NO: 167290 - DNA, 1143 bp, synthetic construct; identical to SEQ ID NO: 167277
  misc_feature 1..1143: note = Description of Artificial Sequence: Synthetic coding sequence
  source 1..1143: mol_type = other DNA

SEQ ID NO: 167291 - DNA, 885 bp, synthetic construct; identical to SEQ ID NO: 167280
  misc_feature 1..885: note = Description of Artificial Sequence: Synthetic coding sequence
  source 1..885: mol_type = other DNA

SEQ ID NO: 167292 - DNA, 723 bp, synthetic construct; identical to SEQ ID NO: 167282
  misc_feature 1..723: note = Description of Artificial Sequence: Synthetic coding sequence
  source 1..723: mol_type = other DNA

SEQ ID NO: 167293 - DNA, 885 bp, synthetic construct; identical to SEQ ID NO: 167280
  misc_feature 1..885: note = Description of Artificial Sequence: Synthetic coding sequence
  source 1..885: mol_type = other DNA

SEQ ID NO: 167294 - DNA, 1005 bp, synthetic construct; identical to SEQ ID NO: 167285
  misc_feature 1..1005: note = Description of Artificial Sequence: Synthetic coding sequence
  source 1..1005: mol_type = other DNA

SEQ ID NO: 167295 - DNA, 1005 bp, synthetic construct; identical to SEQ ID NO: 167285
  misc_feature 1..1005: note = Description of Artificial Sequence: Synthetic coding sequence
  source 1..1005: mol_type = other DNA

SEQ ID NO: 167296 - DNA, 1005 bp, synthetic construct; identical to SEQ ID NO: 167285
  misc_feature 1..1005: note = Description of Artificial Sequence: Synthetic coding sequence
  source 1..1005: mol_type = other DNA

SEQ ID NO: 167297 - DNA, 1053 bp, synthetic construct
  misc_feature 1..1053: note = Description of Artificial Sequence: Synthetic coding sequence
  source 1..1053: mol_type = other DNA
atgctggtgattcctcctggcctgtctgaggaggaggaggccctgcagaagaagttcaacaagctgaagaagaagaagaaggccctgctggccctgaagaagcagagcagcagcagcaccaccagccagggcggcgtgaagaggagcctgtctgagcagcctgtgatggacacagccacagccacagagcaggccaagcagctggtgaagagcggggccatcagcgccatcaaggccgagaccaagaacagcggcttcaagaggagcaggaccctggagggcaagctgaaggaccctgagaagggccctgtgcccaccttccagcccttccagaggagcatctctgcagatgatgacctgcaggagagcagcagaagaccccagaggaagagcctgtatgagagctttgactggggctatgaggagaggtctggggcccacagcagcgccagcccccccaggagccgcagccgggacaggagccatgagaggaacagagaccgggaccgggaccgggagcgggaccgggaccgggaccgggaccgggaccgggagcgggaccgggaccgggaccgggaccgggaccgggaccgggagcgggaccgggaccgggagcgggaccgggaccgggaccgggagggccccttcagaagaagtgacagcttccctgagcggcgggcccccaggaagggcaacaccctgtatgtgtatggagaggacatgacccccaccctgctgcggggggccttcagcccctttggaaacatcatcgacctgtccatggaccccccaagaaactgtgcctttgtgacctatgagaagatggagagcgctgaccaggccgtggccgagctgaatggcacccaggtggagagcgtgcagctgaaggtgaacatcgccaggaagcagcccatgctggatgctgccaccgggaagtctgtgtggggcagcctggccgtgcagaacagccccaagggctgccaccgggacaagaggacccagatcgtgtacagtgatgatgtgtacaaggagaacctggtggatggcttctag

SEQ ID NO: 167298 - DNA, 1143 bp, synthetic construct; identical to SEQ ID NO: 167277
  misc_feature 1..1143: note = Description of Artificial Sequence: Synthetic coding sequence
  source 1..1143: mol_type = other DNA

SEQ ID NO: 167299 - DNA, 723 bp, synthetic construct; identical to SEQ ID NO: 167282
  misc_feature 1..723: note = Description of Artificial Sequence: Synthetic coding sequence
  source 1..723: mol_type = other DNA

SEQ ID NO: 167300 - DNA, 1005 bp, synthetic construct; identical to SEQ ID NO: 167285
  misc_feature 1..1005: note = Description of Artificial Sequence: Synthetic coding sequence
  source 1..1005: mol_type = other DNA

SEQ ID NO: 167301 - DNA, 885 bp, synthetic construct; identical to SEQ ID NO: 167280
  misc_feature 1..885: note = Description of Artificial Sequence: Synthetic coding sequence
  source 1..885: mol_type = other DNA

SEQ ID NO: 167302 - DNA, 885 bp, synthetic construct; identical to SEQ ID NO: 167280
  misc_feature 1..885: note = Description of Artificial Sequence: Synthetic coding sequence
  source 1..885: mol_type = other DNA

SEQ ID NO: 167303 - DNA, 885 bp, synthetic construct; identical to SEQ ID NO: 167280
  misc_feature 1..885: note = Description of Artificial Sequence: Synthetic coding sequence
  source 1..885: mol_type = other DNA

SEQ ID NO: 167304 - DNA, 723 bp, synthetic construct; identical to SEQ ID NO: 167282
  misc_feature 1..723: note = Description of Artificial Sequence: Synthetic coding sequence
  source 1..723: mol_type = other DNA

SEQ ID NO: 167305 - DNA, 1143 bp, synthetic construct; identical to SEQ ID NO: 167277
  misc_feature 1..1143: note = Description of Artificial Sequence: Synthetic coding sequence
  source 1..1143: mol_type = other DNA

SEQ ID NO: 167306 - DNA, 480 bp, synthetic construct; identical to SEQ ID NO: 167281
  misc_feature 1..480: note = Description of Artificial Sequence: Synthetic coding sequence
  source 1..480: mol_type = other DNA

SEQ ID NO: 167307 - DNA, 1164 bp, synthetic construct; identical to SEQ ID NO: 167276
  misc_feature 1..1164: note = Description of Artificial Sequence: Synthetic coding sequence
  source 1..1164: mol_type = other DNA

SEQ ID NO: 167308 - DNA, 1164 bp, synthetic construct; identical to SEQ ID NO: 167276
  misc_feature 1..1164: note = Description of Artificial Sequence: Synthetic coding sequence
  source 1..1164: mol_type = other DNA

SEQ ID NO: 167309 - DNA, 1164 bp, synthetic construct; identical to SEQ ID NO: 167276
  misc_feature 1..1164: note = Description of Artificial Sequence: Synthetic coding sequence
  source 1..1164: mol_type = other DNA

SEQ ID NO: 167310 - DNA, 1164 bp, synthetic construct; identical to SEQ ID NO: 167276
  misc_feature 1..1164: note = Description of Artificial Sequence: Synthetic coding sequence
  source 1..1164: mol_type = other DNA

SEQ ID NO: 167311 - DNA, 1164 bp, synthetic construct; identical to SEQ ID NO: 167276
  misc_feature 1..1164: note = Description of Artificial Sequence: Synthetic coding sequence
  source 1..1164: mol_type = other DNA

SEQ ID NO: 167312 - DNA, 3294 bp, synthetic construct
  misc_feature 1..3294: note = Description of Artificial Sequence: Synthetic coding sequence
  source 1..3294: mol_type = other DNA
atggccacccaggtgatgggccagagcagcggcggcggcggcctcttcaccagcagcggcaacatcggcatggccctgcccaatgacatgtatgacctgcatgacctgagcaaggccgagctggccgccccccagctgatcatgctggccaacgtggccctgactggagaggtgaatggcagctgctgtgactacctggtgggggaggagcggcagatggccgagctgatgcctgtgggggacaacaacttcagtgacagcgaggagggggagggcctggaggagagcgctgacatcaagggggagccccacggcctggagaacatggagctgcggagcctggagctgtctgtggtggagccccagcctgtgtttgaggccagcggggccccagacatctacagcagcaacaaggacctgcccccagagaccccaggagctgaggacaagggcaagagcagcaagaccaagcccttccgctgcaagccctgccagtatgaggccgagagcgaggagcagtttgtgcaccacatccgggtgcacagcgccaagaagttctttgtggaggagagcgctgagaagcaggccaaggcccgggagagcggcagcagcacagctgaggagggggacttcagcaagggccccatccgctgtgacagatgtggctacaacaccaacagatatgaccactacacagcccacctgaagcaccacaccagggctggggacaatgaaagagtgtacaagtgcatcatctgcacctacaccaccgtgtctgagtaccactggaggaagcacctgaggaaccacttccccaggaaggtgtacacctgtgggaagtgcaactacttcagtgacaggaagaacaactacgtgcagcacgtgaggacccacactggagagcggccctacaagtgtgagctgtgcccctacagcagcagccagaagacccacctgaccaggcacatgaggacccacagcggggagaagcccttcaagtgtgaccagtgcagctatgtggccagcaaccagcacgaggtgaccaggcatgcccggcaggtgcacaacggccccaagcccctgaactgcccccactgtgactacaagacagctgacaggagcaacttcaagaagcacgtggagctgcacgtgaacccccggcagttcaactgccctgtgtgtgactatgctgccagcaagaagtgcaacctgcagtaccacttcaagagcaagcaccccacctgccccaacaagaccatggatgtgtccaaggtgaagctgaagaagaccaagaagcgggaggccgacctgcctgacaacatcaccaatgagaagacagaaattgagcagaccaagatcaagggagatgtggccggcaagaagaatgagaagtctgtgaaggccgagaagagagatgtgtccaaggagaagaagcccagcaacaacgtgtctgtcatccaggtgaccaccaggaccaggaagtctgtgacagaggtgaaggagatggatgtgcacacaggcagcaacagcgagaagttcagcaagaccaagaagagcaagaggaagctggaggtggacagccacagcctgcacggccctgtgaatgatgaggagagcagcaccaagaagaagaagaaggtggagagcaagagcaagaacaacagccaggaggtgcccaagggggacagcaaggtggaggagaacaagaagcagaacacctgcatgaagaagagcaccaagaagaagaccctgaagaacaagagcagcaagaagagcagcaagccaccccagaaggagcctgtggagaagggcagcgcccagatggaccccccccagatgggccctgcccccacagaggccgtgcagaagggccctgtgcaggtggagcccccaccacccatggagcacgcccagatggagggcgcccagatccggcctgccccagatgagcctgtgcagatggaggtggtgcaggagggccctgcccagaaggagctgctgccccctgtggagcccgcccagatggtgggcgcccagatcgtgctggcccacatggagctgcccccacccatggagacagcccagacagaggtggcccagatgggccctgcccccatggagcccgcccagatggaggtggcccaggtggagagcgcccccatgcaggtggtgcagaaggagcctgtgcagatggagctgagcccccccatggaggtggtgcagaaggagcctgtgcagatcgagctgagcccccccatggaggtggtgcagaaggagcctgtgaagattgagctgagcccccccatcgaggtggtgcagaaggagcctgtgcagatggagctgagcccccccatgggcgtggtgcagaaggagcccgcccagcgggagcccccaccaccccgggagccccccctgcacatggagcccatcagcaagaagccacccctgaggaaggacaagaaggagaagagcaacatgcagagcgagcgggccaggaaggagcaggtgctgattgaggtgggcctggtgcctgtgaaggacagctggctgctgaaggagagcgtgtccacagaggacctgagcccccccagcccccccctgcccaaggagaacctgcgggaggaggccagcggggaccagaagctgctgaacacaggagagggcaacaaggaggcccccctgcagaaggtgggcgctgaggaggctgatgagagcctgcccggcctggccgccaacatcaatgaaagcacccacatcagcagcagcggccagaacctgaacaccccagagggggagaccctgaatggcaagcaccagacagacagcatcgtgtgtgagatgaagatggacacagaccagaacacccgggagaacctgaccggcatcaacagcacagtggaggagcctgtgagccccatgctgcccccatctgctgtggaggagcgggaggccgtgtccaagacagccctggccagccccccagccaccatggccgccaatgaaagccaggagattgatgaagatgagggcatccacagccatgagggcagtgacctgagtgacaacatgtctgagggcagtgatgacagcggcctgcatggagcccggcctgtgccccaggagagcagcaggaagaatgccaaggaggccctggccgtgaaggccgccaagggggactttgtgtgcatcttctgtgacaggagcttcaggaagggcaaggactacagcaagcacctgaacagacacctggtgaatgtgtactacctggaggaggccgcccagggccaggagtag

SEQ ID NO: 167313 - DNA, 3225 bp, synthetic construct
  misc_feature 1..3225: note = Description of Artificial Sequence: Synthetic coding sequence
  source 1..3225: mol_type = other DNA
atggccacccaggtgatgggccagagcagcggcggcggcggcctcttcaccagcagcggcaacatcggcatggccctgcccaatgacatgtatgacctgcatgacctgagcaaggccgagctggccgccccccagctgatcatgctggccaacgtggccctgactggagaggtgaatggcagctgctgtgactacctggtgggggaggagcggcagatggccgagctgatgcctgtgggggacaacaacttcagtgacagcgaggagggggagggcctggaggagagcgctgacatcaagggggagccccacggcctggagaacatggagctgcggagcctggagctgtctgtggtggagccccagcctgtgtttgaggccagcggggccccagacatctacagcagcaacaaggacctgcccccagagaccccaggagctgaggacaagggcaagagcagcaagaccaagcccttccgctgcaagccctgccagtatgaggccgagagcgaggagcagtttgtgcaccacatccgggtgcacagcgccaagaagttctttgtggaggagagcgctgagaagcaggccaaggcccgggagagcggcagcagcacagctgaggagggggacttcagcaagggccccatccgctgtgacagatgtggctacaacaccaacagatatgaccactacacagcccacctgaagcaccacaccagggctggggacaatgaaagagtgtacaagtgcatcatctgcacctacaccaccgtgtctgagtaccactggaggaagcacctgaggaaccacttccccaggaaggtgtacacctgtgggaagtgcaactacttcagtgacaggaagaacaactacgtgcagcacgtgaggacccacacaggcaagaggcccagcggggagaagcccttcaagtgtgaccagtgcagctatgtggccagcaaccagcacgaggtgaccaggcatgcccggcaggtgcacaacggccccaagcccctgaactgcccccactgtgactacaagacagctgacaggagcaacttcaagaagcacgtggagctgcacgtgaacccccggcagttcaactgccctgtgtgtgactatgctgccagcaagaagtgcaacctgcagtaccacttcaagagcaagcaccccacctgccccaacaagaccatggatgtgtccaaggtgaagctgaagaagaccaagaagcgggaggccgacctgcctgacaacatcaccaatgagaagacagaaattgagcagaccaagatcaagggagatgtggccggcaagaagaatgagaagtctgtgaaggccgagaagagagatgtgtccaaggagaagaagcccagcaacaacgtgtctgtcatccaggtgaccaccaggaccaggaagtctgtgacagaggtgaaggagatggatgtgcacacaggcagcaacagcgagaagttcagcaagaccaagaagagcaagaggaagctggaggtggacagccacagcctgcacggccctgtgaatgatgaggagagcagcaccaagaagaagaagaaggtggagagcaagagcaagaacaacagccaggaggtgcccaagggggacagcaaggtggaggagaacaagaagcagaacacctgcatgaagaagagcaccaagaagaagaccctgaagaacaagagcagcaagaagagcagcaagccaccccagaaggagcctgtggagaagggcagcgcccagatggaccccccccagatgggccctgcccccacagaagctgtgcagaagggccctgtgcaggtggagcccccaccacccatggagcacgcccagatggagggcgcccagatccggcctgccccagatgagcctgtgcagatggaggtggtgcaggagggccctgcccagaaggagctgctgccccctgtggagcccgcccagatggtgggcgcccagatcgtgctggcccacatggagctgcccccacccatggagacagcccagacagaggtggcccagatgggccctgcccccatggagcccgcccagatggaggtggcccaggtggagagcgcccccatgcaggtggtgcagaaggagcctgtgcagatggagctgagcccccccatggaggtggtgcagaaggagcctgtgcagatcgagctgagcccccccatggaggtggtgcagaaggagcctgtgaagattgagctgagcccccccatcgaggtggtgcagaaggagcctgtgcagatggagctgagcccccccatgggcgtggtgcagaaggagcccgcccagcgggagcccccaccaccccgggagccccccctgcacatggagcccatcagcaagaagccacccctgaggaaggacaagaaggagaagagcaacatgcagagcgagcgggccaggaaggagcaggtgctgattgaggtgggcctggtgcctgtgaaggacagctggctgctgaaggagagcgtgtccacagaggacctgagcccccccagcccccccctgcccaaggagaacctgcgggaggaggccagcggggaccagaagctgctgaacacaggagagggcaacaaggaggcccccctgcagaaggtgggcgctgaggaggctgatgagagcctgcccggcctggccgccaacatcaatgaaagcacccacatcagcagcagcggccagaacctgaacaccccagagggggagaccctgaatggcaagcaccagacagacagcatcgtgtgtgagatgaagatggacacagaccagaacacccgggagaacctgaccggcatcaacagcacagtggaggagcctgtgagccccatgctgccccccagcgctgtggaggagcgggaggccgtgtccaagacagccctggccagccccccagccaccatggccgccaatgaaagccaggagattgatgaagatgagggcatccacagccatgagggcagtgacctgagtgacaacatgtctgagggcagtgatgattctggcctgcacggggcccggcctgtgccccaggagagcagcaggaagaatgccaaggaggccctggccgtgaaggccgccaagggggactttgtgtgcatcttctgtgaccgctccttcaggaagggcaaggactacagcaagcacctgaacagacacctggtgaatgtgtactacctggaggaggccgcccagggccaggagtag

SEQ ID NO: 167314 - DNA, 1383 bp, synthetic construct
  misc_feature 1..1383: note = Description of Artificial Sequence: Synthetic coding sequence
  source 1..1383: mol_type = other DNA
atggccacccaggtgatgggccagagcagcggcggcggcggcctcttcaccagcagcggcaacatcggcatggccctgcccaatgacatgtatgacctgcatgacctgagcaaggccgagctggccgccccccagctgatcatgctggccaacgtggccctgactggagaggtgaatggcagctgctgtgactacctggtgggggaggagcggcagatggccgagctgatgcctgtgggggacaacaacttcagtgacagcgaggagggggagggcctggaggagagcgctgacatcaagggggagccccacggcctggagaacatggagctgcggagcctggagctgtctgtggtggagccccagcctgtgtttgaggccagcggggccccagacatctacagcagcaacaaggacctgcccccagagaccccaggagctgaggacaagggcaagagcagcaagaccaagcccttccgctgcaagccctgccagtatgaggccgagagcgaggagcagtttgtgcaccacatccgggtgcacagcgccaagaagttctttgtggaggagagcgctgagaagcaggccaaggcccgggagagcggcagcagcacagctgaggagggggacttcagcaagggccccatccgctgtgacagatgtggctacaacaccaacagatatgaccactacacagcccacctgaagcaccacaccagggctggggacaatgaaagagtgtacaagtgcatcatctgcacctacaccaccgtgtctgagtaccactggaggaagcacctgaggaaccacttccccaggaaggtgtacacctgtgggaagtgcaactacttcagtgacaggaagaacaactacgtgcagcacgtgaggacccacactggagagcggccctacaagtgtgagctgtgcccctacagcagcagccagaagacccacctgaccaggcacatgaggacccacagcggggagaagcccttcaagtgtgaccagtgcagctatgtggccagcaaccagcacgaggtgaccaggcatgcccggcaggtgcacaacggccccaagcccctgaactgcccccactgtgactacaagacagctgacaggagcaacttcaagaagcacgtggagctgcacgtgaacccccggcagttcaactgccctgtgtgtgactatgctgccagcaagaagtgcaacctgcagtaccacttcaagagcaagcaccccacctgccccaacaagaccatggatgtgtccaaggtgaagctgaagaagaccaagaagcgggaggccgacctgcctgacaacatcaccaatgagaagacagaaattgagcagaccaagaagaagaagaagaagaagaagaagtag

SEQ ID NO: 167315 - DNA, 5745 bp, synthetic construct
  misc_feature 1..5745: note = Description of Artificial Sequence: Synthetic coding sequence
  source 1..5745: mol_type = other DNA
atggctgatggaaaaggagatgctgctgctgtggccggggccggggctgaggccccagctgtggccggggctggagatggagtggagacagagagcatggtgcggggccacaggcctgtgtccccagcccctggggccagcggcctgcggccctgcctgtggcagctggagacagagctgcgggagcaggaggtgtctgaggtgagcagcctgaactactgccgctccttctgccagaccctgctgcagtatgccagcaacaagaatgccagcgagcacatcgtgtacctgctggaggtgtaccgcctggccatccagagctttgccagcgcccggccctacctgaccacagaatgtgaagatgtgctgctggtgctgggccgcctggtgctgagctgctttgagctgctgctgtctgtgtctgagagcgagctgccctgtgaggtgtggctgcccttcctgcagagcctgcaggagagccatgatgccctgctggagtttggaaacaacaacctgcagatcctggtgcacgtgaccaaggagggcgtgtggaagaaccctgtgctgctgaagatcctgagccagcagcctgtggagacagaggaggtgaacaagctgattgcccaggagggccccagcttcctgcagatgaggatcaagcacctgctgaagagcaactgcatcccccaggccacagccctgagcaagctgtgtgccgagagcaaggagatcagcaatgtgtcctccttccagcaggcctacatcacctgcctgtgcagcatgctgcccaatgaagatgccatcaaggagatcgccaaggtggactgcaaggaggtgctggacatcatctgcaacctggagagcgagggccaggacaacacagcctttgtgctgtgcaccacctacctgacccagcagctgcagacagcctctgtgtactgctcctgggagctgaccctcttctggagcaagctgcagaggagaattgaccccagcctggacaccttcctggagcgctgccggcagtttggagtcatcgccaagacccagcagcacctgttctgcctgatccgggtcatccagacagaggcccaggatgctggcctgggcgtgtccatcctgctgtgtgtgcgggccctgcagctgcggagcagtgaagatgaggagatgaaggcctctgtgtgcaagaccatcgcctgcctgctgcctgaggacctggaggtgagaagagcctgccagctgacagagttcctgattgagcccagcctggatggcttcaacatgctggaggagctgtacctgcagcctgaccagaagtttgatgaagaaaatgcccctgtgcccaacagcctgcgctgtgagctgctgctggccctgaaggcccactggccctttgatcctgagttctgggactggaagaccctgaagaggcactgccaccagctgctgggccaggaggccagtgacagtgatgatgacctgagcggctatgagatgagcatcaatgacacagatgtgctggagagcttcctgagtgactatgatgagggcaaggaggacaagcagtacagaagaagagacctgacagaccagcacaaggagaagagggacaagaagcccatcggcagcagcgagcgctaccagcgctggctgcagtacaagttcttctgcctgctgtgcaagagagaatgtattgaggcccgcatcctgcaccacagcaagatgcacatggaggatggcatctacacctgccctgtgtgcatcaagaagttcaagaggaaggagatgtttgtgccccacgtgatggagcacgtgaagatgccacccagcagaagagacaggagcaagaagaagctgctgctgaagggcagccagaagggcatctgccccaagagccccagcgccatccctgagcagaaccacagcctgaatgaccaggccaagggggagagccatgaatatgtgaccttcagcaagctggaggactgccacctgcaggaccgggacctgtacccctgccccggcacagactgcagcagggtcttcaagcagttcaagtacctgtctgtgcacctgaaggccgagcaccagaacaatgatgaaaatgccaagcactacctggacatgaagaacagaagagagaagtgcacctactgccgccgccacttcatgtctgccttccacctgcgggagcacgagcaggtgcactgcggcccccagccctacatgtgtgtgtccattgactgctacgccaggtttggatctgtgaatgagctgctgaaccacaagcagaagcatgatgacctgcgctacaagtgtgagctgaatggctgcaacatcgtgttcagtgacctgggccagctgtaccaccacgaggcccagcacttcagagatgccagctacacctgcaacttcctgggctgcaagaagttctactacagcaagattgagtaccagaaccacctgtccatgcacaacgtggagaacagcaatggagacatcaagaagtctgtgaagctggaggagagcgccactggagagaagcaggactgcatcaaccagccccacctgctgaaccagacagacaagagccacctgcctgaggacctcttctgtgccgagagcgccaacagccagattgacacagaaacagctgagaacctgaaggagaacagcgacagcaacagcagtgaccagctgagccacagcagcagcgcctccatgaatgaggagctgattgacaccctggaccacagcgagaccatgcaggatgtgctgctgagcaatgagaaggtgtttggccccagcagcctgaaggagaagtgcagctccatggctgtgtgctttgatggcaccaagttcacctgtggctttgatggctgcggcagcacctacaagaatgcccggggcatgcagaagcacctgaggaaggtgcacccctaccacttcaagcccaagaagatcaagaccaaggacctcttccccagcctgggcaatgagcacaaccagaccacagagaagctggatgctgagcccaagccctgcagcgacaccaacagcgacagcccagatgagggcctggaccacaacatccacatcaagtgcaagcgggagcaccagggctacagcagcgagagcagcatctgtgccagcaagaggccctgcacagaggacaccatgctggagctgctgctgcggctgaagcacctgagcctgaagaacagcatcacccacggcagcttcagcggcagcctgcagggctaccccagcagcggggccaagagcctgcagagcgtgagcagcatcagtgacctgaacttccagaaccaggatgagaacatgcccagccagtacctggcccagctggccgccaagcccttcttctgtgagctgcagggctgcaagtatgaatttgtgacccgggaggccctgctgatgcactacctgaagaagcacaactacagcaaggagaaggtgctgcagctgaccatgttccagcaccgctacagccccttccagtgccacatctgccagaggagcttcaccaggaagacccacctgcgcatccactacaagaacaagcaccagattggaagtgaccgggccacccacaagctgctggacaatgaaaaatgtgaccacgagggcccctgcagcgtggaccggctgaagggggactgcagcgctgagctgggcggggaccccagcagcaacagcgagaagccccactgccaccccaagaaggatgagtgcagcagcgagacagacctggagagcagctgtgaggagacagagagcaagaccagtgacatcagcagccccatcggcagccaccgggaggagcaggagggccgggagggccggggcagcagaagaacagtggccaagggcaacctgtgctacatcctgaacaagtaccacaagcccttccactgcatccacaagacctgcaacagcagcttcaccaacctgaagggcctcatccgccactacagaacagtgcaccagtacaacaaggagcagctgtgcctggagaaggacaaggcccggaccaagcgggagctggtgaagtgcaagaagatctttgcctgcaagtacaaggagtgcaacaagcgcttcctgtgcagcaaggccctggccaagcactgcagcgacagccacaacctggaccacatcgaggagcccaaggtgctgtctgaggccggcagcgctgcccgcttcagctgcaaccagccccagtgcccagctgtgttctacaccttcaacaagctgaagcaccacctgatggagcagcacaacatcgagggggagatccacagcgactatgagatccactgtgacctgaatggctgcggccagatcttcacccacaggagcaactacagccagcacgtgtactaccgccacaaggactactatgatgacctcttccgcagccagaaggtggccaatgaaaggctgctgcggtctgagaaggtgtgccagacagctgacacccagggccacgagcaccagaccacccggcgctccttcaatgccaagagcaagaagtgtggcctcatcaaggagaagaaggcccccatctccttcaagaccagggctgaggccctgcacatgtgtgtggagcacagcgagcacacccagtacccctgcatggtgcagggctgcctgtctgtggtgaagctggagagcagcatcgtgcgccactacaagaggacccaccagatgagcagcgcctacctggagcagcagatggagaacctggtggtgtgtgtgaagtatggcaccaagatcaaggaggagccccccagcgaggccgacccctgcatcaagaaggaggagaacagaagctgtgagagcgagaggacagagcacagccacagccctggggacagcagcgcccccatccagaacacagactgctgccacagcagcgagagagatggcggccagaagggctgcatcgagagcagctctgtgtttgatgctgacaccctgctgtaccggggcaccctgaagtgcaaccacagcagcaagaccaccagcctggagcagtgcaacatcgtgcagcccccaccaccctgcaagattgagaacagcatccccaaccccaatggaacagaaagtggcacctacttcaccagcttccagctgcccctgccccgcatcaaggagagcgagacccggcagcacagcagcggccaggagaacacagtgaagaaccccacccacgtgcccaaggagaacttcaggaagcacagccagcccaggagctttgacctgaagacctacaagcccatgggctttgagagcagcttcctgaagttcatccaggagagcgaggagaaggaggatgactttgatgactgggagcccagcgagcacctgaccctgagcaacagcagccagagcagcaatgacctgactggaaatgtggtggccaacaacatggtgaatgattctgagcctgaggtggacatcccccacagcagcagtgacagcaccatccacgagaacctgacagccatcccccccctgattgtggccgagaccaccaccgtgcccagcctggagaacctgcgggtggtgctggacaaggccctgacagactgtggggagctggccctgaagcagctgcactacctgcggcctgtggtggtgctggagaggagcaagttcagcacccccatcctggacctcttccccaccaagaagacagatgagctgtgtgtgggcagcagctag

SEQ ID NO: 167316 - DNA, 4824 bp, synthetic construct
  misc_feature 1..4824: note = Description of Artificial Sequence: Synthetic coding sequence
  source 1..4824: mol_type = other DNA
atgttctaccatgacctcttctaccgggagctgaccctcttctggagcaagctgcagaggagaattgaccccagcctggacaccttcctggagcgctgccggcagtttggagtgattgccaagacccagcagcacctgttctgcctgatccgggtcatccagacagaggcccaggatgctggcctgggcgtgtccatcctgctgtgtgtgcgggccctgcagctgcggagcagtgaagatgaggagatgaaggcctctgtgtgcaagaccatcgcctgcctgctgcctgaggacctggaggtgcggcgggcctgccagctgacagagttcctgattgagcccagcctggatggcttcaacatgctggaggagctgtacctgcagcctgaccagaagtttgatgaggagaatgcccctgtgcccaacagcctgcgctgtgagctgctgctggccctgaaggcccactggccctttgatcctgagttctgggactggaagaccctgaagaggcactgccaccagctgctgggccaggaggccagtgacagtgatgatgacctgagcggctatgagatgagcatcaatgacacagatgtgctggagagcttcctgagtgactatgatgagggcaaggaggacaagcagtacagaagaagagacctgacagaccagcacaaggagaagagggacaagaagcccatcggcagcagcgagcgctaccagcgctggctgcagtacaagttcttctgcctgctgtgcaagcgggagtgcatcgaggcccgcatcctgcaccacagcaagatgcacatggaggatggcatctacacctgccctgtgtgcatcaagaagttcaagaggaaggagatgtttgtgccccacgtgatggagcacgtgaagatgccacccagccggcgggacaggagcaagaagaagctgctgctgaagggcagccagaagggcatctgccccaagagccccagcgccatccctgagcagaaccacagcctgaatgaccaggccaagggggagagccatgaatatgtgaccttcagcaagctggaggactgccacctgcaggaccgggacctgtacccctgccctggaacagactgcagcagggtcttcaagcagttcaagtacctgtctgtgcacctgaaggccgagcaccagaacaatgatgaaaatgccaagcactacctggacatgaagaacagaagagagaagtgcacctactgcagaagacacttcatgtctgccttccacctgcgggagcacgagcaggtgcactgcggcccccagccctacatgtgtgtgtccattgactgctacgcccgcttcggctctgtgaatgagctgctgaaccacaagcagaagcatgatgacctgcgctacaagtgtgagctgaatggctgcaacatcgtgttcagtgacctgggccagctgtaccaccacgaggcccagcacttcagagatgccagctacacctgcaacttcctgggctgcaagaagttctactacagcaagattgagtaccagaaccacctgtccatgcacaacgtggagaacagcaatggagacatcaagaagtctgtgaagctggaggagagcgccaccggggagaagcaggactgcatcaaccagccccacctgctgaaccagacagacaagagccacctgcctgaagatctcttctgtgccgagagcgccaacagccagattgacacagaaacagctgagaacctgaaggaaaattctgacagcaacagcagtgaccagctgagccacagcagcagcgcctccatgaatgaggagctgattgacaccctggaccacagcgagaccatgcaggatgtgctgctgagcaatgagaaggtgtttggccccagcagcctgaaggagaagtgcagctccatggctgtgtgctttgatggcaccaagttcacctgtggctttgatggctgcggcagcacctacaagaatgcccggggcatgcagaagcacctgaggaaggtgcacccctaccacttcaagcccaagaagatcaagaccaaggacctcttccccagcctgggcaatgagcacaaccagaccacagagaagctggatgctgagcccaagccctgcagcgacaccaacagcgacagcccagatgagggcctggaccacaacatccacatcaagtgcaagcgggagcaccagggctacagcagcgagagcagcatctgtgccagcaagaggccctgcacagaggacaccatgctggagctgctgctgcggctgaagcacctgagcctgaagaacagcatcacccacggcagcttcagcggcagcctgcagggctaccccagcagcggggccaagagcctgcagagcgtgagcagcatcagtgacctgaacttccagaaccaggatgagaacatgcccagccagtacctggcccagctggccgccaagcccttcttctgtgagctgcagggctgcaagtatgaatttgtgacccgggaggccctgctgatgcactacctgaagaagcacaactacagcaaggagaaggtgctgcagctgaccatgttccagcaccgctacagccccttccagtgccacatctgccagaggagcttcaccaggaagacccacctgcgcatccactacaagaacaagcaccagatcggcagtgaccgggccacccacaagctgctggacaatgagaagtgtgaccacgagggcccctgcagcgtggaccggctgaagggggactgcagcgctgagctgggcggggaccccagcagcaacagcgagaagccccactgccaccccaagaaggatgaatgtagcagcgagacagacctggagagcagctgtgaggagacagagagcaagaccagtgacatcagcagccccatcggcagccaccgggaggagcaggagggccgggagggccggggcagcagaagaacagtggccaagggcaacctgtgctacatcctgaacaagtaccacaagcccttccactgcatccacaagacctgcaacagcagcttcaccaacctgaagggcctcatccgccactacagaacagtgcaccagtacaacaaggagcagctgtgcctggagaaggacaaggcccggaccaagcgggagctggtgaagtgcaagaagatctttgcctgcaagtacaaggagtgcaacaagcgcttcctgtgcagcaaggccctggccaagcactgcagcgacagccacaacctggaccacatcgaggagcccaaggtgctgtctgaggccggcagcgctgcccgcttcagctgcaaccagccccagtgcccagctgtgttctacaccttcaacaagctgaagcaccacctgatggagcagcacaacattgaaggagagatccacagcgactatgagatccactgtgacctgaatggctgcggccagatcttcacccacaggagcaactacagccagcacgtgtactaccgccacaaggactactatgatgacctcttccgcagccagaaggtggccaatgaaaggctgctgcggtctgagaaggtgtgccagacagctgacacccagggccacgagcaccagaccaccaggaggagcttcaatgccaagagcaagaagtgtggcctcatcaaggagaagaaggcccccatctccttcaagaccagggctgaggccctgcacatgtgtgtggagcacagcgagcacacccagtacccctgcatggtgcagggctgcctgtctgtggtgaagctggagagcagcatcgtgcgccactacaagaggacccaccagatgagcagcgcctacctggagcagcagatggagaacctggtggtgtgtgtgaagtatggcaccaagatcaaggaggagcccccatctgaggccgacccctgcatcaagaaggaggagaacagaagctgtgagagcgagaggacagagcacagccacagccctggggacagcagcgcccccatccagaacacagactgctgccacagcagcgagagagatggcggccagaagggctgcatcgagagcagctctgtgtttgatgctgacaccctgctgtaccggggcaccctgaagtgcaaccacagcagcaagaccaccagcctggagcagtgcaacatcgtgcagcccccaccaccctgcaagattgaaaattccatccccaaccccaacggcacagagagcggcacctacttcaccagcttccagctgcccctgccccgcatcaaggagagcgagacccggcagcacagcagcggccaggagaacacagtgaagaaccccacccacgtgcccaaggagaacttcaggaagcacagccagcccaggagctttgacctgaagacctacaagcccatgggctttgagagcagcttcctgaagttcatccaggagagcgaggagaaggaggatgactttgatgactgggagcccagcgagcacctgaccctgagcaacagcagccagagcagcaatgacctgactggaaatgtggtggccaacaacatggtgaatgacagcgagcctgaggtggacatcccccacagcagcagtgacagcaccatccacgagaacctgacagccatccccccactcatcgtggccgagaccaccaccgtgcccagcctggagaacctgcgggtggtgctggacaaggccctgacagactgtggggagctggccctgaagcagctgcactacctgcggcctgtggtggtgctggagaggagcaagttcagcacccccatcctggacctcttccccaccaagaagacagatgagctgtgtgtgggcagcagctag

SEQ ID NO: 167317 - DNA, 1641 bp, synthetic construct
  misc_feature 1..1641: note = Description of Artificial Sequence: Synthetic coding sequence
  source 1..1641: mol_type = other DNA
atgttctactaccccaacgtgctgcagaggcacacaggctgctttgccaccatctggctggccgccacccggggcagccggctggtgaagcgggagtacctgcgggtgaatgtggtgaagacctgtgaggagatcctgaactacgtgctggtgcgggtgcagcccccccagcccggcctgccccggccccgcttcagcctgtacctgagcgcccagctgcagattggagtcatccgggtgtacagccagcagtgccagtacctggtggaggacatccagcacatcctggagcggctgcaccgggcccagctgcagatcagaattgacatggagacagagctgcccagcctgctgctgcccaaccacctggccatgatggagaccctggaggatgccccagaccccttcttcggcatgatgtctgtggacccccggctgcccagcccctttgacatcccccagatccgccacctgctggaggccgccatccctgagcgggtggaggagatccccccagaggtgcccacagagccccgggagcctgagcgcatccctgtgacagtgctgcccccagaggccatcaccatcctggaggccgagcccatccgcatgctggagattgaaggagagcgggagctgcctgaggtgtcccggcgggagctggacctgctgattgctgaggaggaggccatcctgctggagatcccccggctgcccccaccagccccagctgaggtggagggcattggagaggccctgggccctgaggagctgcggctgaccggctgggagcccggggccctgctgatggaggtgaccccacctgaggagctgcggctgcctgccccacccagccctgagcggcggccccctgtgcccccacctccaagaagaagaagaagaagaaggctgctcttctgggacaaggagacccagatcagccctgagaagttccaggagcagctgcagacccgggcccactgctgggagtgccccatggtgcagcccccagagaggaccatccggggccctgctgagctgttccgcacccccaccctgagcggctggctgcccccagagctgctgggcctgtggacccactgtgcccagcccccacccaaggccctgcggcgggagctgcctgaggaggccgctgctgaggaggagaggaggaagattgaggtgcccagcgagattgaggtgccccgggaggccctggagcccagcgtgcccctgatggtgtccctggagatcagcctggaggccgctgaggaggagaagagccgcatcagcctcatccccccagaggagcgctgggcctggccagaggtggaggcccctgaggccccagccctgcctgtggtgcctgagctgcctgaggtgcccatggagatgcccctggtgctgcccccagagctggagctgctgagcctggaggccgtgcacagagctgtggccctggagctgcaggccaaccgggagccagacttcagcagcctggtgagccccctgagccccaggaggatggccgcccgggtcttctacctgctgctggtgctgagcgcccagcagatcctgcacgtgaagcaggagaagccctacggccgcctgctgatccagcccggcccccgcttccactag

SEQ ID NO: 167318 - DNA, 1590 bp, synthetic construct
  misc_feature 1..1590: note = Description of Artificial Sequence: Synthetic coding sequence
  source 1..1590: mol_type = other DNA
atgttctactaccccaacgtgctgcagaggcacacaggctgctttgccaccatctggctggccgccacccggggcagccggctggtgaagcgggagtacctgcgggtgaatgtggtgaagacctgtgaggagatcctgaactacgtgctggtgcgggtgcagcccccccagcccggcctgccccggccccgcttcagcctgtacctgagcgcccagctgcagattggagtcatccgggtgtacagccagcagtgccagtacctggtggaggacatccagcacatcctggagcggctgcaccgggcccagctgcagatcagaattgacatggagacagagctgcccagcctgctgctgcccaaccacctggccatgatggagaccctggaggatgccccagaccccttcttcggcatgatgtctgtggacccccggctgcccagcccctttgacatcccccagatccgccacctgctggaggccgccatccctgagcgggtggaggagatccccccagaggtgcccacagagccccgggagcctgagcgcatccctgtgacagtgctgcccccagaggccatcaccatcctggaggccgagcccatccgcatgctggagattgaaggagagcgggagctgcctgaggtgtcccggcgggagctggacctgctgattgctgaggaggaggccatcctgctggagatcccccggctgcccccaccagccccagctgaggtggagggcattggagaggccctgggccctgaggagctgcggctgaccggctgggagcccggggccctgctgatgagaagacctcctgtgcccccaccacccaggagaagaagaagaagaaggctgctcttctgggacaaggagacccagatcagccctgagaagttccaggagcagctgcagacccgggcccactgctgggagtgccccatggtgcagcccccagagaggaccatccggggccctgctgagctgttccgcacccccaccctgagcggctggctgcccccagagctgctgggcctgtggacccactgtgcccagcccccacccaaggccctgcggcgggagctgcctgaggaggccgctgctgaggaggagaggaggaagattgaggtgcccagcgagattgaggtgccccgggaggccctggagcccagcgtgcccctgatggtgtccctggagatcagcctggaggccgctgaggaggagaagagccgcatcagcctcatccccccagaggagcgctgggcctggccagaggtggaggcccctgaggccccagccctgcctgtggtgcctgagctgcctgaggtgcccatggagatgcccctggtgctgcccccagagctggagctgctgagcctggaggccgtgcacagagctgtggccctggagctgcaggccaaccgggagccagacttcagcagcctggtgagccccctgagccccaggaggatggccgcccgggtcttctacctgctgctggtgctgagcgcccagcagatcctgcacgtgaagcaggagaagccctacggccgcctgctgatccagcccggcccccgcttccactag

SEQ ID NO: 167319 - DNA, 225 bp, synthetic construct
  misc_feature 1..225: note = Description of Artificial Sequence: Synthetic coding sequence
  source 1..225: mol_type = other DNA
atgttctactaccccaacgtgctgcagaggcacacaggctgctttgccaccatctggctggccgccacccggggcagccggctggtgaagcgggagtacctgcgggtgaatgtggtgaagacctgtgaggagatcctgaactacgtgctggtgcgggtgcagcccccccagcccggcctgccccggccccgcttcagcctgtacctgagcgcccagctgcagtag

SEQ ID NO: 167320 - DNA, 1641 bp, synthetic construct; identical to SEQ ID NO: 167317
  misc_feature 1..1641: note = Description of Artificial Sequence: Synthetic coding sequence
  source 1..1641: mol_type = other DNA

SEQ ID NO: 167321 - DNA, 699 bp, synthetic construct
  misc_feature 1..699: note = Description of Artificial Sequence: Synthetic coding sequence
  source 1..699: mol_type = other DNA
atggccggggacacagaggtgtggaagcagatgttccaggagctgatgagggaggtgaagccctggcaccgctggaccctgcggccagacaagggcctgctgcccaacgtgctgaagccaggctggatgcagtaccagcagtggacctttgcccgcttccagtgcagcagctgcagcaggaactgggccagcgcccaggtgctggtgctcttccacatgaactggagcgaggagaagagccggggccaggtgaagatgagggtcttcacccagcgctgcaagaagtgcccccagcccctgtttgaggaccctgagttcacccaggagaacatcagccgcatcctgaagaacctggtgttccgcatcctgaagaagtgctaccggggccgcttccagctgattgaggaggtgcccatgatcaaggacatcagcctggagggcccccacaacagcgacaactgtgaggcctgcctgcagggcttctgtgccggccccatccaggtgaccagcctgccccccagccagaccccccgggtgcacagcatctacaaggtggaggaggtggtgaagccctgggccagcggggagaatgtgtacagctatgcctgccagaaccacatctgcaggaacctgagcatcttctgctgctgcgtcatcctgattgtgattgtggtgattgtggtgaagacagccatctag

SEQ ID NO: 167322 - DNA, 741 bp, synthetic construct
  misc_feature 1..741: note = Description of Artificial Sequence: Synthetic coding sequence
  source 1..741: mol_type = other DNA
atggtggtggacttctggacctgggagcagaccttccaggagctgatccaggaggccaagccccgggccacctggaccctgaagctggatggcaacctgcagctggactgcctggcccagggctggaagcagtaccagcagagggccttcggctggttccgctgcagcagctgccagaggtcctgggccagcgcccaggtgcagatcctgtgccacacctactgggagcactggaccagccagggccaggtgaggatgaggctgtttggccagcgctgccagaagtgctcctggagccagtatgagatgcctgagttcagcagtgacagcaccatgaggatcctgagcaacctggtgcagcacatcctgaagaagtactatggaaatggcaccaggaagagccctgagatgcctgtgatcctggaggtgtccctggagggcagccatgacacagccaactgtgaggcctgcaccctgggcatctgtggccagggcctgaagagctgcatgaccaagcccagcaagagcctgctgccccacctgaagacaggcaacagcagccctggcatcggggctgtgtacctggccaaccaggccaagaaccagagcgctgaggccaaggaggccaagggcagcggctatgagaagctgggccccagccgggaccctgaccccctgaacatctgtgtgttcatcctgctgctggtgttcatcgtggtgaagtgcttcaccagcgagtag

SEQ ID NO: 167323 - DNA, 447 bp, synthetic construct
  misc_feature 1..447: note = Description of Artificial Sequence: Synthetic coding sequence
  source 1..447: mol_type = other DNA
atggcccgggccctgtgccgcctgccccggcggggcctgtggctgctgctggcccaccacctgttcatgaccacagcctgccaggaggccaactacggggccctgctgcgggagctgtgcctgacccagttccaggtggacatggaggccgtgggggagaccctgtggtgtgactggggccgcaccatccgcagctaccgggagctggccgactgcacctggcacatggccgagaagctgggctgcttctggcccaatgctgaggtggaccgcttcttcctggccgtgcacggccgctacttccgcagctgccccatcagcggccgggctgtgcgggaccccccaggcagcatcctgtaccccttcatcgtggtgcccatcaccgtgaccctgctggtgacagccctggtggtgtggcagagcaagaggacagagggcatcgtgtag

SEQ ID NO: 167324 - DNA, 381 bp, synthetic construct
  misc_feature 1..381: note = Description of Artificial Sequence: Synthetic coding sequence
  source 1..381: mol_type = other DNA
atgaccacagcctgccaggaggccaactacggggccctgctgcgggagctgtgcctgacccagttccaggtggacatggaggccgtgggggagaccctgtggtgtgactggggccgcaccatccgcagctaccgggagctggccgactgcacctggcacatggccgagaagctgggctgcttctggcccaatgctgaggtggaccgcttcttcctggccgtgcacggccgctacttccgcagctgccccatcagcggccgggctgtgcgggaccccccaggcagcatcctgtaccccttcatcgtggtgcccatcaccgtgaccctgctggtgacagccctggtggtgtggcagagcaagaggacagagggcatcgtgtag

SEQ ID NO: 167325 - DNA, 381 bp, synthetic construct; identical to SEQ ID NO: 167324
  misc_feature 1..381: note = Description of Artificial Sequence: Synthetic coding sequence
  source 1..381: mol_type = other DNA

SEQ ID NO: 167326 - DNA, 381 bp, synthetic construct; identical to SEQ ID NO: 167324
  misc_feature 1..381: note = Description of Artificial Sequence: Synthetic coding sequence
  source 1..381: mol_type = other DNA

SEQ ID NO: 167327 - DNA, 528 bp, synthetic construct
  misc_feature 1..528: note = Description of Artificial Sequence: Synthetic coding sequence
  source 1..528: mol_type = other DNA
atggccagcctgcgggtggagagagctgggggcccccggctgcccaggaccagggtgggccggcctgctgccctgcggctgctgctgctgctgggcgctgtgctgaacccccatgaggccctggcccagcccctgcccaccaccggcaccccaggcagcgagggcggcaccgtgaagaactatgaaacagctgtgcagttctgctggaaccactacaaggaccagatggaccccatcgagaaggactggtgtgactgggccatgatcagccggccctacagcaccctgcgggactgcctggagcactttgctgagctgtttgacctgggcttccccaaccccctggccgagcgcatcatctttgagacccaccagatccactttgccaactgcagcctggtgcagcccaccttcagtgaccccccagaagatgtgctgctggccatgatcatcgcccccatctgcctgatccccttcctgatcaccctggtggtgtggaggagcaaggacagcgaggcccaggcctag

SEQ ID NO: 167328 - DNA, 447 bp, synthetic construct
  misc_feature 1..447: note = Description of Artificial Sequence: Synthetic coding sequence
  source 1..447: mol_type = other DNA
atggagactggagccctgcggcggccccagctgctgcccctgctgctgctgctgtgtggcggctgccccagggctgggggctgcaatgaaacaggcatgctggagcggctgcccctgtgtgggaaggcctttgctgacatgatgggcaaggtggatgtgtggaagtggtgcaacctgtctgagttcatcgtgtactatgagagcttcaccaactgcacagagatggaggccaacgtggtgggctgctactggcccaaccccctggcccagggcttcatcaccggcatccaccggcagttcttcagcaactgcaccgtggacagagtgcacctggaggaccccccagatgaggtgctgatccccctgattgtcatccctgtggtgctgactgtggccatggccggcctggtggtgtggaggagcaagaggacagacaccctgctgtag

SEQ ID NO: 167329 - DNA, 447 bp, synthetic construct; identical to SEQ ID NO: 167328
  misc_feature 1..447: note = Description of Artificial Sequence: Synthetic coding sequence
  source 1..447: mol_type = other DNA

SEQ ID NO: 167330 - DNA, 456 bp, synthetic construct
  misc_feature 1..456: note = Description of Artificial Sequence: Synthetic coding sequence
  source 1..456: mol_type = other DNA
atggagactggagccctgcggcggccccagctgctgcccctgctgctgctgctgtgtggcggctgccccagggctgggggctgcaatgaaacaggcatgctggagcggctgcccctgtgtgggaaggcctttgctgacatgatgggcaaggtggatgtgtggaagtggtgcaacctgtctgagttcatcgtgtactatgagagcttcaccaactgcacagagatggaggccaacgtggtgggctgctactggcccaaccccctggcccagggcttcatcaccggcatccaccggcagttcttcagcaactgcaccgtggacagagtgcacctggaggaccccccagatgaggtgctgatccccctgattgtcatccctgtggtgctgactgtggccatggccggcctggtggtgtggaggagcaagaggacagacaccctgctgtgtggcaactag

SEQ ID NO: 167331 - DNA, 606 bp, synthetic construct
  misc_feature 1..606: note = Description of Artificial Sequence: Synthetic coding sequence
  source 1..606: mol_type = other DNA
atggtgtcctggatcatcagccggctggtggtgctgatcttcggcaccctgtacccagcctactacagctacaaggctgtgaagagcaaggacatcaaggagtatgtgaagtggatgatgtactggatcatctttgccctcttcaccacagctgagaccttcacagacatcttcctgtgctggttccccttctactatgagctgaagatcgcctttgtggcctggctgctgagcccctacaccaagggcagcagcctgctgtacaggaagtttgtgcaccccaccctgagcagcaaggagaaggagattgatgactgcctggtgcaggccaaggacaggagctatgatgccctggtgcactttgggaagaggggcctgaatgtggccgccacagctgctgtgatggccgccagcaagggccagggcgccctgtctgagcggctgcggagcttctccatgcaggacctgaccaccatcagaggagatggagccccagcccccagcggccccccacctcctggcagcggccgggccagcggcaagcacggccagcccaagatgagccgcagcgccagcgagagcgccagcagcagcggcacagcctag

SEQ ID NO: 167332 - DNA, 525 bp, synthetic construct
  misc_feature 1..525: note = Description of Artificial Sequence: Synthetic coding sequence
  source 1..525: mol_type = other DNA
atggaccacctgcaggccggcggcgtgaagtggatgatgtactggatcatctttgccctcttcaccacagctgagaccttcacagacatcttcctgtgctggttccccttctactatgagctgaagatcgcctttgtggcctggctgctgagcccctacaccaagggcagcagcctgctgtacaggaagtttgtgcaccccaccctgagcagcaaggagaaggagattgatgactgcctggtgcaggccaaggacaggagctatgatgccctggtgcactttgggaagaggggcctgaatgtggccgccacagctgctgtgatggccgccagcaagggccagggcgccctgtctgagcggctgcgctccttctccatgcaggacctgaccaccatcagaggagatggagccccagcccccagcggccccccacctcctggcagcggccgggccagcggcaagcacggccagcccaagatgagccgcagcgccagcgagagcgccagcagcagcggcacagcctag

SEQ ID NO: 167333 - DNA, 627 bp, synthetic construct
  misc_feature 1..627: note = Description of Artificial Sequence: Synthetic coding sequence
  source 1..627: mol_type = other DNA
atgcagaaggtgctgagcaatggccagacagaggaggtgcgcagcggcagccgcctcatcttcggcaccctgtacccagcctactacagctacaaggctgtgaagagcaaggacatcaaggagtatgtgaagtggatgatgtactggatcatctttgccctcttcaccacagctgagaccttcacagacatcttcctgtgctggttccccttctactatgagctgaagatcgcctttgtggcctggctgctgagcccctacaccaagggcagcagcctgctgtacaggaagtttgtgcaccccaccctgagcagcaaggagaaggagattgatgactgcctggtgcaggccaaggacaggagctatgatgccctggtgcactttgggaagaggggcctgaatgtggccgccacagctgctgtgatggccgccagcaagggccagggcgccctgtctgagcggctgcgctccttctccatgcaggacctgaccaccatcagaggagatggagccccagcccccagcggccccccacctcctggcagcggccgggccagcggcaagcacggccagcccaagatgagccgcagcgccagcgagagcgccagcagcagcggcacagcctag

SEQ ID NO: 167334 - DNA, 543 bp, synthetic construct
  misc_feature 1..543: note = Description of Artificial Sequence: Synthetic coding sequence
  source 1..543: mol_type = other DNA
atgagcctgcacccctgccgcctgaacaacctgcccaaccaggtgaagtggatgatgtactggatcatctttgccctcttcaccacagctgagaccttcacagacatcttcctgtgctggttccccttctactatgagctgaagatcgcctttgtggcctggctgctgagcccctacaccaagggcagcagcctgctgtacaggaagtttgtgcaccccaccctgagcagcaaggagaaggagattgatgactgcctggtgcaggccaaggacaggagctatgatgccctggtgcactttgggaagaggggcctgaatgtggccgccacagctgctgtgatggccgccagcaagggccagggcgccctgtctgagcggctgcgctccttctccatgcaggacctgaccaccatcagaggagatggagccccagcccccagcggccccccacctcctggcagcggccgggccagcggcaagcacggccagcccaagatgagccgcagcgccagcgagagcgccagcagcagcggcacagcctag

SEQ ID NO: 167335 - DNA, 432 bp, synthetic construct
  misc_feature 1..432: note = Description of Artificial Sequence: Synthetic coding sequence
  source 1..432: mol_type = other DNA
atggtgtcctggatcatcagccggctggtggtgctgatcttcggcaccctgtacccagcctactacagctacaaggctgtgaagagcaaggacatcaaggagtatgtgaagtggatgatgtactggatcatctttgccctcttcaccacagctgagaccttcacagacatcttcctgtgctgggacagagtgccctacagaagagactgtggggccagcgcctgcaggaccagccccccatctggagaaacagcccccctgctgccccgggccccccaccaccggggcctgggcggccctgctgccaacacagccagcctgcgctgccctggggtgctgctgcgggccctggccgcccaggccccaccccgcatcctgcggagccgcttcaggaagaagagcaccagcagcagcgccacagagaccacctag

SEQ ID NO: 167336 - DNA, 759 bp, synthetic construct
  misc_feature 1..759: note = Description of Artificial Sequence: Synthetic coding sequence
  source 1..759: mol_type = other DNA
atggtgtcctggatcatcagccggctggtggtgctgatcttcggcaccctgtacccagcctacagcagctacaaggctgtgaagaccaagaatgtgaaggagtatgtgaagtggatgatgtactggatcgtgtttgccttcttcaccacagctgagaccctgacagacatcgtgctgtcctggttccccttctactttgagctgaagatcgccttcgtcatctggctgctgagcccctacaccaagggcagctctgtgctgtacaggaagtttgtgcaccccaccctgagcaacaaggagaaggagattgatgagtacatcacccaggcccgggacaagagctatgagaccatgatgagggtgggcaagaggggcctgaacctggccgccaatgctgctgtgacagctgctgccaagggcgtgctgtctgagaagctgcggagcttctccatgcaggacctgaccctcatcagagatgaagatgccctgcccctgcagaggccagatggccgcctgcggcccagccctggcagcctgctggacaccatcgaggacctgggagatgatcctgccctgagcctgcggagcagcaccaacccagctgacagcaggacagaggcctctgaagatgacatgggagacaaggcccccaagagggccaagcccatcaagaaggcccccaaggccgagcccctggccagcaagaccctgaagacccggcccaagaagaagaccagcggcggcggggacagcgcctag

SEQ ID NO: 167337 - DNA, 765 bp, synthetic construct
  misc_feature 1..765: note = Description of Artificial Sequence: Synthetic coding sequence
  source 1..765: mol_type = other DNA
atggtgtcctggatcatcagccggctggtggtgctgatcttcggcaccctgtacccagcctacagcagctacaaggctgtgaagaccaagaatgtgaaggagtatgtgaagtggatgatgtactggatcgtgtttgccttcttcaccacagctgagaccctgacagacatcgtgctgtcctggttccccttctactttgagctgaagatcgccttcgtcatctggctgctgagcccctacaccaagggcagctctgtgctgtacaggaagtttgtgcaccccaccctgagcaacaaggagaaggagattgatgagtacatcacccaggcccgggacaagagctatgagaccatgatgagggtgggcaagaggggcctgaacctggccgccaatgctgctgtgacagctgctgccaagggccagggcgtgctgtctgagaagctgcggagcttctccatgcaggacctgaccctcatcagagatgaagatgccctgcccctgcagaggccagatggccgcctgcggcccagccctggcagcctgctggacaccatcgaggacctgggagatgatcctgccctgagcctgcggagcagcaccaacccagctgacagcaggacagaggcctctgaagatgacatgggagacaaggcccccaagagggccaagcccatcaagaaggcccccaaggccgagcccctggccagcaagaccctgaagacccggcccaagaagaagaccagcggcggcggggacagcgcctag

SEQ ID NO: 167338 - DNA, 723 bp, synthetic construct
  misc_feature 1..723: note = Description of Artificial Sequence: Synthetic coding sequence
  source 1..723: mol_type = other DNA
atgctgtacccagcctactacagctacaaggctgtgaagaccaagaatgtgaaggagtatgtgcgctggatgatgtactggatcgtgtttgccctgtacaccgtcatcgagaccgtggccgaccagacagtggcctggttccccctgtactatgagctgaagatcgcctttgtgatctggctgctgagcccctacaccaagggggccagcctcatctacaggaagttcctgcaccccctgctgagcagcaaggagcgggagattgatgactacatcgtgcaggccaaggagcggggctatgagaccatggtgaactttggccggcagggcctgaacctggccgccacagctgctgtgacagctgctgtgaagagccagggcgccatcacagagcggctgcgctccttctccatgcatgacctgaccaccatccagggagatgagcctgtgggccagaggccctaccagcccctgcctgaggccaagaagaagagcaagccagcccccagcgagagcgctggctacggcatccccctgaaggatggagatgagaagacagatgaggaggccgagggcccctacagcgacaatgagatgctgacccacaagggcctgcggcgcagccagagcatgaagtctgtgaagaccaccaagggcaggaaggaggtgcgctatggcagcctgaagtacaaggtgaagaagaggccccaggtgtacttctag

SEQ ID NO: 167339 - DNA, 768 bp, synthetic construct
  misc_feature 1..768: note = Description of Artificial Sequence: Synthetic coding sequence
  source 1..768: mol_type = other DNA
atggtgtcctggatgatcagcagagctgtggtgctggtgtttggcatgctgtacccagcctactacagctacaaggctgtgaagaccaagaatgtgaaggagtatgtgcgctggatgatgtactggatcgtgtttgccctgtacacagtgattgaaacagtggccgaccagacagtggcctggttccccctgtactatgagctgaagatcgccttcgtcatctggctgctgagcccctacaccaagggggccagcctcatctacaggaagttcctgcaccccctgctgagcagcaaggagcgggagattgatgactacatcgtgcaggccaaggagcggggctatgagaccatggtgaactttggccggcagggcctgaacctggccgccacagctgctgtgacagctgctgtgaagagccagggcgccatcacagagcggctgcggagcttctccatgcatgacctgaccaccatccagggagatgagcctgtgggccagaggccctaccagcccctgcctgaggccaagaagaagagcaagccagcccccagcgagagcgctggctacggcatccccctgaaggatggagatgagaagacagatgaggaggccgagggcccctacagcgacaatgagatgctgacccacaagggcctgcggcgcagccagagcatgaagtctgtgaagaccaccaagggcaggaaggaggtgcgctatggcagcctgaagtacaaggtgaagaagaggccccaggtgtacttctag

SEQ ID NO: 167340 - DNA, 774 bp, synthetic construct
  misc_feature 1..774: note = Description of Artificial Sequence: Synthetic coding sequence
  source 1..774: mol_type = other DNA
ctgatgatgtggctgctggtggagcgggccctgatccagctggtgtttggcatgctgtacccagcctactacagctacaaggctgtgaagaccaagaatgtgaaggagtatgtgcgctggatgatgtactggatcgtgtttgccctgtacacagtgattgaaacagtggccgaccagacagtggcctggttccccctgtactatgagctgaagatcgccttcgtcatctggctgctgagcccctacaccaagggggccagcctcatctacaggaagttcctgcaccccctgctgagcagcaaggagcgggagattgatgactacatcgtgcaggccaaggagcggggctatgagaccatggtgaactttggccggcagggcctgaacctggccgccacagctgctgtgacagctgctgtgaagagccagggcgccatcacagagcggctgcggagcttctccatgcatgacctgaccaccatccagggagatgagcctgtgggccagaggccctaccagcccctgcctgaggccaagaagaagagcaagccagcccccagcgagagcgctggctacggcatccccctgaaggatggagatgagaagacagatgaggaggccgagggcccctacagcgacaatgagatgctgacccacaagggcctgcggcgcagccagagcatgaagtctgtgaagaccaccaagggcaggaaggaggtgcgctatggcagcctgaagtacaaggtgaagaagaggccccaggtgtacttctag

SEQ ID NO: 167341 - DNA, 774 bp, synthetic construct
  misc_feature 1..774: note = Description of Artificial Sequence: Synthetic coding sequence
  source 1..774: mol_type = other DNA
atggtgtcctggatgatctgccgcctggtggtgctggtgtttggcatgctgtgcccagcctatgccagctacaaggctgtgaagaccaagaacatccgggagtatgtgcgctggatgatgtactggatcgtgtttgccctcttcatggctgctgagatcgtgacagacatcttcatctcctggttccccttctactatgagatcaagatggcctttgtgctgtggctgctgagcccctacaccaagggggccagcctgctgtacaggaagtttgtgcaccccagcctgagcagacatgagaaggagattgatgcctacatcgtgcaggccaaggagaggagctatgaaacagtgctgagctttgggaagaggggcctgaacattgctgccagcgctgctgtgcaggccgccaccaagagccagggcgccctggccggccgcctgcggagcttctccatgcaggacctgcggagcatcagtgatgccccagccccagcctaccatgaccccctgtacctggaggaccaggtgagccaccggcggccccccatcggctaccgggccggcggcctgcaggacagcgacacagaagatgagtgctggagcgacacagaggccgtgccccgggccccagcccggccccgggagaagcccctcatccgcagccagagcctgcgggtggtgaagaggaagccccctgtgcgggagggcaccagccgcagcctgaaggtgaggaccaggaagaagacagtgcccagtgatgtggacagctag

SEQ ID NO: 167342 - DNA, 522 bp, synthetic construct
  misc_feature 1..522: note = Description of Artificial Sequence: Synthetic coding sequence
  source 1..522: mol_type = other DNA
atggtgtcctggatgatctgccgcctggtggtgctggtgtttggcatgctgtgcccagcctatgccagctacaaggctgtgaagaccaagaacatccgggagtatgtgcgctggatgatgtactggatcgtgtttgccctcttcatggctgctgagatcgtgacagacatcttcatctcctggttccccttctactatgagatcaagatggcctttgtgctgtggctgctgagcccctacaccaagggggccagcctgctgtacaggaagtttgtgcaccccagcctgagcagacatgagaaggagattgatgcctacatcgtgcaggccaaggagaggagctatgaaacagtgctgagctttgggaagaggggcctgaacattgctgccagcgctgctgtgcaggccgccaccaagggcactggacctggggcctgcaggacagccacccccaggatgtctgtgggccagatcctgcggcagagccctggccggcagcccggccctgagaggagcccctag

SEQ ID NO: 167343 - DNA, 570 bp, synthetic construct
  misc_feature 1..570: note = Description of Artificial Sequence: Synthetic coding sequence
  source 1..570: mol_type = other DNA
atgtctgctgccatgagggagagatttgaccgcttcctgcacgagaagaactgcatgacagacctgctggccaagctggaggccaagacaggagtgaacagaagcttcatcgccctgggcgtcatcggcctggtggccctgtacctggtgtttggctatggagccagcctgctgtgcaacctgattggcttcggctacccagcctacatcagcatcaaggccatcgagagccccaacaaggaggatgacacccagtggctgacctactgggtggtgtatggagtcttcagcattgctgagttcttcagtgacatcttcctgtcctggttccccttctactacatgctgaagtgtggcttcctgctgtggtgcatggcccccagccccagcaatggagctgagctgctgtacaagaggatcatccggcccttcttcctgaagcatgagagccagatggacagcgtggtgaaggacctgaaggacaaggccaaggagacagcagatgccatcaccaaggaggccaagaaggccaccgtgaacctgctgggggaggagaagaagagcacctag

SEQ ID NO: 167344 - DNA, 396 bp, synthetic construct
  misc_feature 1..396: note = Description of Artificial Sequence: Synthetic coding sequence
  source 1..396: mol_type = other DNA
atgtctgctgccatgagggagagatttgaccgcttcctgcacgagaagaactgcatgacagacctgctggccaagctggaggccaagacaggagtgaacagaagcttcatcgccctgggcgtcatcggcctggtggccctgtacctggtgtttggctatggagccagcctgctgtgcaacctgattggcttcggctacccagcctacatcagcatcaaggccatcgagagccccaacaaggaggatgacacccagtggctgacctactgggtggtgtatggagtcttcagcattgctgagttcttcagtgacatcttcctgtcctggttccccttctactacatgctgaaggtgtggagcggcctgggcttcctgctgccccgctgcctgctgtag

SEQ ID NO: 167345 - DNA, 1413 bp, synthetic construct
  misc_feature 1..1413: note = Description of Artificial Sequence: Synthetic coding sequence
  source 1..1413: mol_type = other DNA
atgcacttcagcatccctgagacagagagccgcagcggggacagcggcggcagcgcctacgtggcctacaacatccacgtgaatggagtgctgcactgccgggtgcgctacagccagctgctgggcctgcacgagcagctgaggaaggagtatggagccaacgtgctgcctgccttcccccccaagaagctgttcagcctgaccccagctgaggtggagcagaggcgggagcagctggagaagtacatgcaggccgtgcggcaggaccccctgctgggcagcagcgagaccttcaacagcttcctgcggcgggcccagcaggagacccagcaggtgcccacagaggaggtgtccctggaggtgctgctgagcaatggccagaaggtgctggtgaatgtgctgaccagtgaccagacagaagatgtgctggaggccgtggccgccaagctggacctgcctgatgacctgattggctacttcagcctcttcctggtgcgggagaaggaggatggagccttctcctttgtgaggaagctgcaggagtttgagctgccctacgtgtctgtgaccagcctgcggagccaggagtacaagatcgtgctgaggaagagctactgggacagcgcctatgatgatgatgtgatggagaacagagtgggcctgaacctgctgtatgcccagacagtgtctgacatcgagcggggctggatcctggtgaccaaggagcagcaccggcagctgaagagcctgcaggagaaggtgtccaagaaggagttcctgcggctggcccagaccctgcggcactacggctacctgcgctttgatgcctgtgtggccgacttccctgagaaggactgccctgtggtggtgtctgctggcaacagcgagctgagcctgcagctgcggctgcccggccagcagctgcgggagggcagcttccgggtgaccaggatgcgctgctggagggtgaccagctctgtgcccctgcccagcggcagcaccagcagccctggccggggccgcggggaggtgcggctggagctggcctttgagtacctgatgagcaaggaccggctgcagtgggtgaccatcaccagcccccaggccatcatgatgagcatctgcctgcagagcatggtggatgagctgatggtgaagaagagcggcggcagcatcaggaagatgctgcggcggcgggtgggcggcaccctgcggcggagtgacagccagcaggccgtgaagagcccccccctgctggagagcccagatgccacccgggagagcatggtgaagctgagcagcaagctgtctgctgtgtccctgcggggcatcggcagccccagcacagatgccagcgccagtgatgtgcacggcaactttgcctttgagggcattggagatgaggacctgtag

SEQ ID NO: 167346 - DNA, 2814 bp, synthetic construct
  misc_feature 1..2814: note = Description of Artificial Sequence: Synthetic coding sequence
  source 1..2814: mol_type = other DNA
atgcaccggccccggcggcggggcaccaggcctcccctgctggccctgctggccgccctgctgctggccgcccggggagctgctgcccaggagacagagctgtctgtgtctgctgagctggtgcccaccagctcctggaacatcagcagcgagctgaacaaggacagctacctgaccctggatgagcccatgaacaacatcaccaccagcctgggccagacagctgagctgcactgcaaggtgtctggcaaccccccacccaccatccgctggttcaagaatgatgcccctgtggtgcaggagccccggcggctgtccttccgcagcaccatctacggcagccggctgcgcatccggaacctggacaccacagacaccggctacttccagtgtgtggccaccaacgggaaggaggtggtgagcagcactggagtgctgtttgtgaagtttggccccccacccacagccagccctggctacagtgatgaatatgaggaggatggcttctgccagccctaccggggcatcgcctgtgcccgcttcatcggcaacagaacagtgtacatggagagcctgcacatgcagggcgagattgagaaccagatcacagctgccttcaccatgattggcaccagcagccacctgagtgacaagtgcagccagtttgccatccccagcctgtgccactacgccttcccctactgtgatgagaccagctctgtgcccaagccccgggacctgtgcagagatgaatgtgagatcctggagaatgtgctgtgccagacagagtacatctttgcccggagcaaccccatgatcctgatgaggctgaagctgcccaactgtgaggacctgccccagcctgagagccctgaggccgccaactgcatcagaattggcatccccatggctgaccccatcaacaagaaccacaagtgctacaacagcactggagtggactaccggggcaccgtgtctgtgaccaagagcggccggcagtgccagccctggaacagccagtacccccacacccacaccttcaccgccctgcgcttccctgagctgaatggaggccacagctactgcagaaatcctggcaaccagaaggaggccccctggtgcttcaccctggatgagaacttcaagagtgacctgtgtgacatcccagcctgtgacagcaaggacagcaaggagaagaacaagatggagatcctgtacatcctggtgcccagcgtggccatccccctggccatcgccctgctcttcttcttcatctgtgtgtgcaggaacaaccagaagagcagcagcgcccctgtgcagaggcagcccaagcacgtgcggggccagaatgtggagatgtccatgctgaatgcctacaagcccaagagcaaggccaaggagctgcccctgtctgctgtgcgcttcatggaggagctgggagaatgtgccttcggcaagatctacaagggccacctgtacctgcccggcatggaccacgcccagctggtggccatcaagaccctgaaggactacaacaacccccagcagtggacagagttccagcaggaggccagcctgatggccgagctgcaccaccccaacatcgtgtgcctgctgggcgctgtgacccaggagcagcctgtgtgcatgctgtttgagtacatcaaccagggcgacctgcacgagttcctgatcatgaggagcccccacagtgatgtgggctgcagcagtgatgaagatggcaccgtgaagagcagcctggaccatggagacttcctgcacatcgccatccagattgctgctggcatggagtacctgagcagccacttctttgtgcacaaggacctggccgccaggaacatcctgattggagagcagctgcacgtgaagatcagtgacctgggcctgagccgggagatctacagcgctgactactacagagtgcagagcaagagcctgctgcccatccgctggatgcctcctgaggccatcatgtatggcaagttcagcagtgacagcgacatctggagctttggagtggtgctgtgggagatcttctcctttggcctgcagccctactacggcttcagcaaccaggaggtgattgagatggtgaggaagaggcagctgctgccctgcagcgaggactgcccccccaggatgtacagcctgatgacagagtgctggaatgagatccccagcagaagaccccgcttcaaggacatccacgtgcggctgcgctcctgggagggcctgagcagccacaccagcagcaccacccccagcggcggcaatgccaccacccagaccaccagcctgagcgccagccctgtgagcaacctgagcaacccccgctaccccaactacatgttccccagccagggcatcaccccccagggccagattgctggcttcatcggcccccccatcccccagaaccagcgcttcatccccatcaatggctaccccatccccccaggctatgctgccttccctgctgcccactaccagcccactggaccacccagggtcatccagcactgccccccacccaagagccgcagccccagcagcgccagcggcagcaccagcactggacatgtgaccagcctgcccagcagcggcagcaaccaggaggccaacatccccctgctgccccacatgagcatccccaaccaccctgggggcatgggcatcaccgtgtttggaaacaagagccagaagccctacaagattgacagcaagcaggccagcctgctgggagatgccaacatccacggccacacagagagcatgatctctgctgagctgtag

SEQ ID NO: 167347 - DNA, 1182 bp, synthetic construct
  misc_feature 1..1182: note = Description of Artificial Sequence: Synthetic coding sequence
  source 1..1182: mol_type = other DNA
atgcaccggccccggcggcggggcaccaggcctcccctgctggccctgctggccgccctgctgctggccgcccggggagctgctgcccaggagacagagctgtctgtgtctgctgagctggtgcccaccagctcctggaacatcagcagcgagctgaacaaggacagctacctgaccctggatgagcccatgaacaacatcaccaccagcctgggccagacagctgagctgcactgcaaggtgtctggcaaccccccacccaccatccgctggttcaagaatgatgcccctgtggtgcaggagccccggcggctgtccttccgcagcaccatctacggcagccggctgcgcatccggaacctggacaccacagacaccggctacttccagtgtgtggccaccaacgggaaggaggtggtgagcagcactggagtgctgtttgtgaagtttggccccccacccacagccagccctggctacagtgatgaatatgaggaggatggcttctgccagccctaccggggcatcgcctgtgcccgcttcatcggcaacagaacagtgtacatggagagcctgcacatgcagggcgagattgagaaccagatcacagctgccttcaccatgattggcaccagcagccacctgagtgacaagtgcagccagtttgccatccccagcctgtgccactacgccttcccctactgtgatgagaccagctctgtgcccaagccccgggacctgtgcagagatgaatgtgagatcctggagaatgtgctgtgccagacagagtacatctttgcccggagcaaccccatgatcctgatgaggctgaagctgcccaactgtgaggacctgccccagcctgagagccctgaggccgccaactgcatcagaattggcatccccatggctgaccccatcaacaagaaccacaagtgctacaacagcactggagtggactaccggggcaccgtgtctgtgaccaagagcggccggcagtgccagccctggaacagccagtacccccacacccacaccttcaccgccctgcgcttccctgagctgaatggaggccacagctactgcagaaatcctggcaaccagaaggaggccccctggtgcttcaccctggatgagaacttcaagagtgacctgtgtgacatcccagcctgtgggaagtag

SEQ ID NO: 167348 - DNA, 2823 bp, synthetic construct
  misc_feature 1..2823: note = Description of Artificial Sequence: Synthetic coding sequence
  source 1..2823: mol_type = other DNA
cgggcccggggctgcagcgccaggagaagaggcacccggccccccctgctggccctgctggccgccctgctgctggccgcccggggagctgctgcccaggagacagagctgtctgtgtctgctgagctggtgcccaccagctcctggaacatcagcagcgagctgaacaaggacagctacctgaccctggatgagcccatgaacaacatcaccaccagcctgggccagacagctgagctgcactgcaaggtgtctggcaaccccccacccaccatccgctggttcaagaatgatgcccctgtggtgcaggagccccggcggctgtccttccgcagcaccatctacggcagccggctgcgcatccggaacctggacaccacagacaccggctacttccagtgtgtggccaccaacgggaaggaggtggtgagcagcactggagtgctgtttgtgaagtttggacctccacccacagccagccctggctacagtgatgaatatgaagaagatggcttctgccagccctaccggggcatcgcctgtgcccgcttcatcggcaacagaacagtgtacatggagagcctgcacatgcagggcgagattgagaaccagatcacagctgccttcaccatgattggcaccagcagccacctgagtgacaagtgcagccagtttgccatccccagcctgtgccactacgccttcccctactgtgatgagaccagctctgtgcccaagccccgggacctgtgcagagatgaatgtgagatcctggagaatgtgctgtgccagacagagtacatctttgcccggagcaaccccatgatcctgatgaggctgaagctgcccaactgtgaggacctgccccagcctgagagccctgaggccgccaactgcatccgcatcggcatccccatggctgaccccatcaacaagaaccacaagtgctacaacagcactggagtggactaccggggcaccgtgtctgtgaccaagagcggccggcagtgccagccctggaacagccagtacccccacacccacaccttcaccgccctgcgcttccctgagctgaatggaggccacagctactgcaggaaccctggcaaccagaaggaggccccctggtgcttcaccctggatgagaacttcaagagtgacctgtgtgacatcccagcctgtgacagcaaggacagcaaggagaagaacaagatggagatcctgtacatcctggtgcccagcgtggccatccccctggccatcgccctgctcttcttcttcatctgtgtgtgcaggaacaaccagaagagcagcagcgcccctgtgcagaggcagcccaagcacgtgcggggccagaatgtggagatgtccatgctgaatgcctacaagcccaagagcaaggccaaggagctgcccctgtctgctgtgcgcttcatggaggagctgggggagtgtgccttcggcaagatctacaagggccacctgtacctgcccggcatggaccacgcccagctggtggccatcaagaccctgaaggactacaacaacccccagcagtggacagagttccagcaggaggccagcctgatggccgagctgcaccaccccaacatcgtgtgcctgctgggcgctgtgacccaggagcagcctgtgtgcatgctgtttgagtacatcaaccagggcgacctgcacgagttcctgatcatgaggagcccccacagtgatgtgggctgcagcagtgatgaagatggcaccgtgaagagcagcctggaccacggggacttcctgcacatcgccatccagattgctgctggcatggagtacctgagcagccacttctttgtgcacaaggacctggccgccaggaacatcctgattggagagcagctgcacgtgaagatcagtgacctgggcctgagccgggagatctacagcgctgactactacagagtgcagagcaagagcctgctgcccatccgctggatgcctcctgaggccatcatgtatggcaagttcagcagtgacagcgacatctggagctttggagtggtgctgtgggagatcttctcctttggcctgcagccctactacggcttcagcaaccaggaggtgattgagatggtgaggaagaggcagctgctgccctgcagcgaggactgcccccccaggatgtacagcctgatgacagagtgctggaatgagatccccagccggcggccccgcttcaaggacatccacgtgcggctgcgctcctgggagggcctgagcagccacaccagcagcaccaccccatctggaggaaatgccaccacccagaccaccagcctgagcgccagccctgtgagcaacctgagcaacccccgctaccccaactacatgttccccagccagggcatcaccccccagggccagattgctggcttcatcggcccccccatcccccagaaccagcgcttcatccccatcaatggctaccccatccccccaggctacgccgccttccctgctgcccactaccagcccaccggcccccccagggtcatccagcactgccccccacccaagagccgcagccccagcagcgccagcggcagcaccagcacaggccacgtgaccagcctgcccagcagcggcagcaaccaggaggccaacatccccctgctgccccacatgagcatccccaaccaccctgggggcatgggcatcaccgtgtttggaaacaagagccagaagccctacaagattgacagcaagcaggccagcctgctgggagatgccaacatccacggccacacagagagcatgatctctgctgagctgtag

SEQ ID NO: 167349 - DNA, 1167 bp, synthetic construct
  misc_feature 1..1167: note = Description of Artificial Sequence: Synthetic coding sequence
  source 1..1167: mol_type = other DNA
atgctgtttgagtacatcaaccagggcgacctgcacgagttcctgatcatgaggagcccccacagtgatgtgggctgcagcagtgatgaagatggcaccgtgaagagcagcctggaccacggggacttcctgcacatcgccatccagattgctgctggcatggagtacctgagcagccacttctttgtgcacaaggacctggccgccaggaacatcctgattggagagcagctgcacgtgaagatcagtgacctgggcctgagccgggagatctacagcgctgactactacagagtgcagagcaagagcctgctgcccatccgctggatgcctcctgaggccatcatgtatggcaagttcagcagtgacagcgacatctggagctttggagtggtgctgtgggagatcttctcctttggcctgcagccctactacggcttcagcaaccaggaggtgattgagatggtgaggaagaggcagctgctgccctgcagcgaggactgcccccccaggatgtacagcctgatgacagagtgctggaatgagatccccagccggcggccccgcttcaaggacatccacgtgcggctgcgctcctgggagggcctgagcagccacaccagcagcaccaccccatctggaggaaatgccaccacccagaccaccagcctgagcgccagccctgtgagcaacctgagcaacccccgctaccccaactacatgttccccagccagggcatcaccccccagggccagattgctggcttcatcggcccccccatcccccagaaccagcgcttcatccccatcaatggctaccccatccccccaggctacgccgccttccctgctgcccactaccagcccaccggcccccccagggtcatccagcactgccccccacccaagagccgcagccccagcagcgccagcggcagcaccagcacaggccacgtgaccagcctgcccagcagcggcagcaaccaggaggccaacatccccctgctgccccacatgagcatccccaaccaccctgggggcatgggcatcaccgtgtttggaaacaagagccagaagccctacaagattgacagcaagcaggccagcctgctgggagatgccaacatccacggccacacagagagcatgatctctgctgagctgtag

SEQ ID NO: 167350 - DNA, 2832 bp, synthetic construct
  misc_feature 1..2832: note = Description of Artificial Sequence: Synthetic coding sequence
  source 1..2832: mol_type = other DNA
atggcccggggcagcgccctgccccggcggcccctgctgtgcatcccagctgtgtgggccgccgccgccctgctgctgtctgtgtccaggaccagcggggaggtggaggtgctggaccccaatgaccccctgggccccctggatggccaggacggccccatccccaccctgaagggctacttcctgaacttcctggagcctgtgaacaacatcaccatcgtgcagggccagacagccatcctgcactgcaaggtggccggcaaccccccacccaacgtgcgctggctgaagaatgatgcccctgtggtgcaggagccccggcgcatcatcatcaggaagacagaatatggcagccggctgcgcatccaggacctggacaccacagacaccggctactaccagtgtgtggccaccaacggcatgaagaccatcacagccactggagtgctgtttgtgcggctgggccccacccacagccccaaccacaacttccaggatgactaccatgaagatggcttctgccagccctaccggggcatcgcctgtgcccgcttcatcggcaacagaaccatctacgtggacagcctgcagatgcagggcgagattgaaaatcgcatcacagctgccttcaccatgattggcaccagcacccacctgagtgaccagtgcagccagtttgccatccccagcttctgccactttgtgttccccctgtgtgatgcccggagcaggacccccaagccccgggagctgtgcagagatgaatgtgaggtgctggagagtgacctgtgccggcaggagtacaccatcgcccggagcaaccccctcatcctgatgaggctgcagctgcccaagtgtgaggccctgcccatgcctgagagcccagatgctgccaactgcatgagaattggcatcccagctgagcggctgggccgctaccaccagtgctacaacggcagcggcatggactaccggggcacagccagcaccaccaagagcggccaccagtgccagccctgggccctgcagcacccccacagccaccacctgagcagcacagacttccctgagctgggcggcggccacgcctactgcaggaaccctgggggccagatggagggcccctggtgcttcacccagaacaagaatgtgaggatggagctgtgtgatgtgcccagctgcagcccccgggacagcagcaagatgggcatcctgtacatcctggtgcccagcatcgccatccccctggtgattgcctgcctcttcttcctggtgtgcatgtgcaggaacaagcagaaggccagcgccagcaccccccagaggcggcagctgatggccagccccagccaggacatggagatgcccctcatcaaccagcacaagcaggccaagctgaaggagatcagcctgtctgctgtgcgcttcatggaggagctgggagaagatagatttgggaaggtgtacaagggccacctgtttggacctgcccctggagagcagacccaggccgtggccatcaagaccctgaaggacaaggccgagggccccctgcgggaggagttcagacatgaggccatgctgcgggcccggctgcagcaccccaacgtggtgtgcctgctgggcgtggtgaccaaggaccagcccctgtccatgatcttctcctactgcagccacggggacctgcacgagttcctggtgatgaggagcccccacagtgatgtgggcagcacagatgatgacagaacagtgaagagcgccctggagcccccagactttgtgcacctggtggcccagattgctgctggcatggagtacctgagcagccaccacgtggtgcacaaggacctggccaccagaaatgtgctggtgtatgacaagctgaatgtgaagatcagtgacctgggcctcttccgggaggtgtatgctgctgactactacaagctgctgggcaacagcctgctgcccatccgctggatggcccctgaggccatcatgtatggcaagttcagcattgacagcgacatctggagctatggagtggtgctgtgggaggtgttctcctatggcctgcagccctactgcggctacagcaaccaggatgtggtggagatgatccggaaccggcaggtgctgccctgcccagatgactgcccagcctgggtgtatgccctgatgattgagtgctggaatgagttccccagcagaagaccccgcttcaaggacatccacagccggctgcgggcctggggcaacctgagcaactacaacagcagcgcccagaccagcggggccagcaacaccacccagaccagcagcctgagcaccagccctgtgtccaatgtgtccaatgcccgctacgtgggccccaagcagaaggccccacccttcccccagccccagttcatccccatgaagggccagatccggcccatggtgcccccaccccagctgtatgtgcctgtgaatggctaccagcctgtgcctgcctacggggcctacctgcccaacttctaccctgtgcagatccccatgcagatggccccccagcaggtgcccccccagatggtgcccaagcccagcagccaccacagcggcagcggcagcaccagcacaggctacgtgaccacagcccccagcaacacctccatggctgacagagctgccctgctgtctgagggcgcagatgacacccagaatgccccagaagatggagcccagagcacagtgcaggaggccgaggaggaggaggagggctctgtgcctgagacagagctgctgggggactgtgacaccctgcaggtggatgaggcccaggtgcagctggaggcctag

SEQ ID NO: 167351 - DNA, 1239 bp, synthetic construct
  misc_feature 1..1239: note = Description of Artificial Sequence: Synthetic coding sequence
  source 1..1239: mol_type = other DNA
atgggccaggaccagaccaagcagcagatcgagaagggcctgcagctgtaccagagcaaccagacagagaaggccctgcaggtgtggaccaaggtgctggagaagagcagtgacctgatgggccgcttccgggtgctgggctgcctggtgacagcccacagcgagatgggccgctacaaggagatgctgaagtttgctgtggtgcagattgacacagcccgggagctggaggatgctgacttcctgctggagagctacctgaacctggcccggagcaatgagaagctgtgtgagttccacaagaccatctcctactgcaagacctgcctgggcctgcccggcaccagggctggggcccagctgggcggccaggtgtccctgtccatgggaaatgccttcctgggcctgtctgtgttccagaaggccctggagagctttgagaaggccctgcgctatgcccacaacaatgatgatgccatgctggagtgccgggtgtgctgcagcctgggcagcttctacgcccaggtgaaggactatgagaaggccctcttcttcccctgcaaggctgctgagctggtgaacaactacggcaagggctggagcctgaagtaccgggccatgagccagtaccacatggctgtggcctaccgcctgctgggccgcctgggcagcgccatggagtgctgtgaggagagcatgaagatcgccctgcagcacggggaccggcccctgcaggccctgtgcctgctgtgctttgctgacatccacaggagcagaggagacctggagacagccttccccaggtatgattctgccatgagcatcatgacagaaattggcaaccggctgggccaggtgcaggccctgctgggcgtggccaagtgctgggtggccaggaaggccctggacaaggccctggatgccatcgagcgggcccaggacctggccgaggaggtgggcaacaagctgagccagctgaagctgcactgcctgtctgagagcatctaccgcagcaagggcctgcagcgggagctgcgggcccacgtggtgcgcttccatgaatgtgtggaggagacagagctgtactgcggcctgtgtggggagagcatcggggagaagaacagccggctgcaggccctgccctgcagccacatcttccacctgcgctgcctgcagaacaacggcaccaggagctgccccaactgcagaagaagctccatgaagccaggctttgtgtag

SEQ ID NO: 167352 - DNA, 1062 bp, synthetic construct
  misc_feature 1..1062: note = Description of Artificial Sequence: Synthetic coding sequence
  source 1..1062: mol_type = other DNA
atgggccaggaccagaccaagcagcagatcgagaagggcctgcagctgtaccagagcaaccagacagagaaggccctgcaggtgtggaccaaggtgctggagaagagcagtgacctgatgggccgcttccgggtgctgggctgcctggtgacagcccacagcgagatgggccgctacaaggagatgctgaagtttgctgtggtgcagattgacacagcccgggagctggaggatgctgacttcctgctggagagctacctgaacctggcccggagcaatgagaagctgtgtgagttccacaagaccatctcctactgcaagacctgcctgggcctgcccggcaccagggctggggcccagctgggcggccaggtgtccctgtccatgggaaatgccttcctgggcctgtctgtgttccagaaggccctggagagctttgagaaggccctgcgctatgcccacaacaatgatgatgccatgctggagtgccgggtgtgctgcagcctgggcagcttctacgcccaggtgaaggactatgagaaggccctcttcttcccctgcaaggctgctgagctggtgaacaactacggcaagggctggagcctgaagtaccgggccatgagccagtaccacatggctgtggcctaccgcctgctgggccgcctgggcagcgccatggagtgctgtgaggagagcatgaagatcgccctgcagcacggggaccggcccctgcaggccctgtgcctgctgtgctttgctgacatccacaggagcagaggagacctggagctgagccagctgaagctgcactgcctgtctgagagcatctaccgcagcaagggcctgcagcgggagctgcgggcccacgtggtgcgcttccatgaatgtgtggaggagacagagctgtactgcggcctgtgtggggagagcattggagagaagaacagccggctgcaggccctgccctgcagccacatcttccacctgcgctgcctgcagaacaacggcaccaggagctgccccaactgccgccgcagctccatgaagccaggctttgtgtag

SEQ ID NO: 167353 - DNA, 2010 bp, synthetic construct
  misc_feature 1..2010: note = Description of Artificial Sequence: Synthetic coding sequence
  source 1..2010: mol_type = other DNA
atgggcacagccctggtgtaccacgaggacatgacagccacccggctgctgtgggatgatcctgaatgtgaaattgaaagacctgagcggctgacagctgccctggaccggctgcggcagaggggcctggagcagcgctgcctgcggctgagcgcccgggaggccagcgaggaggagctgggcctggtgcacagcccagaatatgtgtccctggtgcgggagacccaggtgctgggcaaggaggagctgcaggccctgagcggccagtttgatgccatctacttccaccccagcaccttccactgtgcccggctggccgccggggccggcctgcagctggtggatgctgtgctgactggagctgtgcagaatggcctggccctggtgcggcccccaggccaccacggccagagagctgctgccaacggcttctgtgtgttcaacaacgtggccatcgccgccgcccacgccaagcagaagcacggcctgcaccgcatcctggtggtggactgggatgtgcaccacggccagggcatccagtacctgtttgaagatgaccccagcgtgctgtacttctcctggcacagatatgaacatggccgcttctggcccttcctgcgggagagtgatgctgatgctgtgggccggggccagggcctgggcttcaccgtgaacctgccctggaaccaggtgggcatgggaaatgctgactatgtggccgccttcctgcacctgctgctgcccctggcctttgaatttgatcctgagctggtgctggtgtctgctggctttgacagcgccatcggggaccctgagggccagatgcaggccaccccagagtgctttgcccacctgacccagctgctgcaggtgctggccggcggccgggtgtgtgctgtgctggagggcggctaccacctggagagcctggccgagagcgtgtgcatgacagtgcagaccctgctgggggaccctgccccacccctgagcggccccatggccccctgccagagcgccctggagagcatccagagcgcccgggccgcccaggccccccactggaagagcctgcagcagcaggatgtgacagctgtgcccatgagccccagcagccacagccctgagggccggcccccacccctgctgcccggcggccctgtgtgcaaggctgctgccagcgcccccagcagcctgctggaccagccctgcctgtgcccagcccccagcgtgaggacagctgtggccctgaccaccccagacatcaccctggtgctgcccccagatgtgatccagcaggaggccagcgccctgcgggaggagacagaggcctgggcccggccccatgagagcctggcccgggaggaggccctgacagccctgggcaagctgctgtacctgctggatggcatgctggatggccaggtgaacagcggcattgctgccaccccagccagcgctgctgctgccaccctggatgtggccgtgcggcggggcctgagccatggagcccagaggctgctgtgtgtggccctgggccagctggaccggcccccagacctggcccatgatggccgcagcctgtggctgaacatccggggcaaggaggccgccgccctgtccatgtttcatgtgtccacccccctgcctgtgatgactggaggcttcctgagctgcatcctgggcctggtgctgcccctggcctacggcttccagcctgacctggtgctggtggccctgggccctggccacggcctgcagggcccccacgccgccctgctggccgccatgctgcggggcctggccggcggccgggtgctggccctgctggaggagaacagcaccccccagctggccggcatcctggcccgggtgctgaatggagaggccccacccagcctgggccccagctctgtggccagcccagaagatgtgcaggccctgatgtacctgcggggccagctggagccccagtggaagatgctgcagtgccacccccacctggtggcctag

SEQ ID NO: 167354 - DNA, 1206 bp, synthetic construct
  misc_feature 1..1206: note = Description of Artificial Sequence: Synthetic coding sequence
  source 1..1206: mol_type = other DNA
atgcagcgctgctggcagggcgacccccgggtgcggcccaccttccaggagatcaccagcgagacagaggacctgtgtgagaagccagatgatgaggtgaaggagacagcccatgacctggatgtgaagagccccccagagcccaggtctgaggtggtgcctgcccggctgaagagggccagcgcccccacctttgacaatgactacagcctgtctgagctgctgagccagctggacagcggcgtgtcccaggccgtggagggccctgaggagctgagccgcagcagcagcgagagcaagctgcccagcagcggcagcggcaagaggctgtctggagtgtcctctgtggacagcgccttcagcagccggggcagcctgagcctgagctttgagcgggagcccagcaccagtgacctgggcaccacagatgtgcagaagaagaagctggtggatgccatcgtgtctggggacaccagcaagctgatgaagatcctgcagccccaggatgtggacctggccctggacagcggggccagcctgctgcacctggccgtggaggccggccaggaggagtgtgccaagtggctgctgctgaacaatgccaaccccaacctgagcaacagaagaggcagcacccccctgcacatggctgtggagcggcgggtgcggggcgtggtggagctgctgctggccaggaagatctctgtgaatgccaaggatgaggaccagtggacagccctgcactttgctgcccagaatggagatgagagcagcacccggctgctgctggagaagaatgcctctgtgaatgaggtggactttgagggccgcacccccatgcacgtggcctgccagcacggccaggagaacatcgtgcgcatcctgctgcggcggggcgtggatgtgtccctgcagggcaaggatgcctggcactgcaccaccctggccggccccccagcccaccggcaggccgccggccaggccgccggcggggagtgtgagaggccagatgctggctgggaggatgccatcgcccctggccgcacagcccgggccctgccccggggcccccacccccacaggcctgtgctgcggcggcagaggctgcagcctgctggaacagacaccccagcccggccccggcggcggggcacccgggccctgcccggctgcagctgcatcggggccctggcccggcggccctag

SEQ ID NO: 167355 - DNA, 2355 bp, synthetic construct
  misc_feature 1..2355: note = Description of Artificial Sequence: Synthetic coding sequence
  source 1..2355: mol_type = other DNA
atggagggagatggcggcaccccctgggccctggccctgctgcggacctttgatgctggggagttcaccggctgggagaaggtgggcagcggcggcttcggccaggtgtacaaggtgagacatgtgcactggaagacctggctggccatcaagtgcagccccagcctgcacgtggatgaccgggagaggatggagctgctggaggaggccaagaagatggagatggccaagttccgctacatcctgcctgtgtatggcatctgccgggagcctgtgggcctggtgatggagtacatggagaccggcagcctggagaagctgctggccagcgagcccctgccctgggacctgcgcttccgcatcatccatgaaacagctgtgggcatgaacttcctgcactgcatggccccacccctgctgcacctggacctgaagccagccaacatcctgctggatgcccactaccacgtgaagatcagtgactttggcctggccaagtgcaatggcctgagccacagccatgacctgtccatggatggcctgtttggcaccatcgcctacctgcccccagagcgcatccgggagaagagccggctgtttgacaccaagcatgatgtgtacagctttgccatcgtcatctggggcgtgctgacccagaagaagccctttgctgatgagaagaacatcctgcacatcatggtgaaggtggtgaagggccacaggcctgagctgccccctgtgtgccgggcccggccccgggcctgcagccacctgatccggctgatgcagcgctgctggcagggcgacccccgggtgcggcccaccttccaggagatcaccagcgagacagaggacctgtgtgagaagccagatgatgaggtgaaggagacagcccatgacctggatgtgaagagccccccagagcccaggtctgaggtggtgcctgcccggctgaagagggccagcgcccccacctttgacaatgactacagcctgtctgagctgctgagccagctggacagcggcgtgtcccaggccgtggagggccctgaggagctgagccgcagcagcagcgagagcaagctgcccagcagcggcagcggcaagaggctgagcggcgtgtcctctgtggacagcgccttcagcagccggggcagcctgagcctgagctttgagcgggagcccagcaccagtgacctgggcaccacagatgtgcagaagaagaagctggtggatgccatcgtgtctggggacaccagcaagctgatgaagatcctgcagccccaggatgtggacctggccctggacagcggggccagcctgctgcacctggccgtggaggccggccaggaggagtgtgccaagtggctgctgctgaacaatgccaaccccaacctgagcaacagaagaggcagcacccccctgcacatggctgtggagaggagagtgcggggcgtggtggagctgctgctggccaggaagatctctgtgaatgccaaggatgaggaccagtggacagccctgcactttgctgcccagaatggagatgagagcagcacccggctgctgctggagaagaatgcctctgtgaatgaggtggactttgagggccgcacccccatgcacgtggcctgccagcacggccaggagaacatcgtgcgcatcctgctgcggcggggcgtggatgtgtccctgcagggcaaggatgcctggctgcccctgcactatgctgcctggcagggccacctgcccatcgtgaagctgctggccaagcagcccggggtgtctgtgaatgcccagaccctggatggccgcacccccctgcacctggccgcccagaggggccactacagagtggcccgcatcctgattgacctgtgcagtgatgtgaatgtgtgcagcctgctggcccagacccccctgcacgtggccgctgagaccggccacaccagcacagcccggctgctgctgcacagaggagctgggaaggaggccatgaccagtgatggctacacagccctgcacctggccgccagaaatggccacctggccaccgtgaagctgctggtggaggagaaggcagatgtgctggcccggggccccctgaaccagacagccctgcacctggccgccgcccacggccacagcgaggtggtggaggagctggtgtctgcagatgtgattgacctgtttgatgagcagggcctgagcgccctgcacctggccgcccagggcagacatgcccagacagtggagaccctgctgcggcatggagcccacatcaacctgcagagcctgaagttccagggcggccacggccctgctgccaccctgctgcggcgcagcaagacctag

SEQ ID NO: 167356 - DNA, 2499 bp, synthetic construct
  misc_feature 1..2499: note = Description of Artificial Sequence: Synthetic coding sequence
  source 1..2499: mol_type = other DNA
atggagggagatggcggcaccccctgggccctggccctgctgcggacctttgatgctggggagttcaccggctgggagaaggtgggcagcggcggcttcggccaggtgtacaaggtgagacatgtgcactggaagacctggctggccatcaagtgcagccccagcctgcacgtggatgaccgggagaggatggagctgctggaggaggccaagaagatggagatggccaagttccgctacatcctgcctgtgtatggcatctgccgggagcctgtgggcctggtgatggagtacatggagaccggcagcctggagaagctgctggccagcgagcccctgccctgggacctgcgcttccgcatcatccatgaaacagctgtgggcatgaacttcctgcactgcatggccccacccctgctgcacctggacctgaagccagccaacatcctgctggatgcccactaccacgtgaagatcagtgactttggcctggccaagtgcaatggcctgagccacagccatgacctgtccatggatggcctgtttggcaccatcgcctacctgcccccagagcgcatccgggagaagagccggctgtttgacaccaagcatgatgtgtacagctttgccatcgtcatctggggcgtgctgacccagaagaagccctttgctgatgagaagaacatcctgcacatcatggtgaaggtggtgaagggccacaggcctgagctgccccctgtgtgccgggcccggccccgggcctgcagccacctgatccggctgatgcagcgctgctggcagggcgacccccgggtgcggcccaccttccagggcaatggcctgaatggagagctgatccggcaggtgctggccgccctgctgcctgtgacaggccgctggaggagccctggagagggcttccggctggagagcgaggtgatcatccgggtgacctgccccctgagcagcccccaggagatcaccagcgagacagaggacctgtgtgagaagccagatgatgaggtgaaggagacagcccatgacctggatgtgaagagccccccagagcccaggtctgaggtggtgcctgcccggctgaagagggccagcgcccccacctttgacaatgactacagcctgtctgagctgctgagccagctggacagcggcgtgtcccaggccgtggagggccctgaggagctgagccgcagcagcagcgagagcaagctgcccagcagcggcagcggcaagaggctgagcggcgtgtcctctgtggacagcgccttcagcagccggggcagcctgagcctgagctttgagcgggagcccagcaccagtgacctgggcaccacagatgtgcagaagaagaagctggtggatgccatcgtgtctggggacaccagcaagctgatgaagatcctgcagccccaggatgtggacctggccctggacagcggggccagcctgctgcacctggccgtggaggccggccaggaggagtgtgccaagtggctgctgctgaacaatgccaaccccaacctgagcaacagaagaggcagcacccccctgcacatggctgtggagaggagagtgcggggcgtggtggagctgctgctggccaggaagatctctgtgaatgccaaggatgaggaccagtggacagccctgcactttgctgcccagaatggagatgagagcagcacccggctgctgctggagaagaatgcctctgtgaatgaggtggactttgagggccgcacccccatgcacgtggcctgccagcacggccaggagaacatcgtgcgcatcctgctgcggcggggcgtggatgtgtccctgcagggcaaggatgcctggctgcccctgcactatgctgcctggcagggccacctgcccatcgtgaagctgctggccaagcagcccggggtgtctgtgaatgcccagaccctggatggccgcacccccctgcacctggccgcccagaggggccactacagagtggcccgcatcctgattgacctgtgcagtgatgtgaatgtgtgcagcctgctggcccagacccccctgcacgtggccgctgagaccggccacaccagcacagcccggctgctgctgcacagaggagctgggaaggaggccatgaccagtgatggctacacagccctgcacctggccgccagaaatggccacctggccaccgtgaagctgctggtggaggagaaggcagatgtgctggcccggggccccctgaaccagacagccctgcacctggccgccgcccacggccacagcgaggtggtggaggagctggtgtctgcagatgtgattgacctgtttgatgagcagggcctgagcgccctgcacctggccgcccagggcagacatgcccagacagtggagaccctgctgcggcatggagcccacatcaacctgcagagcctgaagttccagggcggccacggccctgctgccaccctgctgcggcgcagcaagacctag

SEQ ID NO: 167357 - DNA, 2166 bp, synthetic construct
  misc_feature 1..2166: note = Description of Artificial Sequence: Synthetic coding sequence
  source 1..2166: mol_type = other DNA
atggagctgctggaggaggccaagaagatggagatggccaagttccgctacatcctgcctgtgtatggcatctgccgggagcctgtgggcctggtgatggagtacatggagaccggcagcctggagaagctgctggccagcgagcccctgccctgggacctgcgcttccgcatcatccacgagacagctgtgggcatgaacttcctgcactgcatggccccacccctgctgcacctggacctgaagccagccaacatcctgctggatgcccactaccacgtgaagatcagtgactttggcctggccaagtgcaatggcctgagccacagccatgacctgtccatggatggcctgtttggcaccatcgcctacctgcccccagagcgcatccgggagaagagccggctgtttgacaccaagcatgatgtgtacagctttgccatcgtcatctggggcgtgctgacccagaagaagccctttgctgatgagaagaacatcctgcacatcatggtgaaggtggtgaagggccacaggcctgagctgccccctgtgtgccgggcccggccccgggcctgcagccacctgatccggctgatgcagcgctgctggcagggcgacccccgggtgcggcccaccttccaggagatcaccagcgagacagaggacctgtgtgagaagccagatgatgaggtgaaggagacagcccatgacctggatgtgaagagccccccagagcccaggtctgaggtggtgcctgcccggctgaagagggccagcgcccccacctttgacaatgactacagcctgtctgagctgctgagccagctggacagcggcgtgtcccaggccgtggagggccctgaggagctgagccgcagcagcagcgagagcaagctgcccagcagcggcagcggcaagaggctgtctggagtgtcctctgtggacagcgccttcagcagccggggcagcctgagcctgagctttgagcgggagcccagcaccagtgacctgggcaccacagatgtgcagaagaagaagctggtggatgccatcgtgtctggggacaccagcaagctgatgaagatcctgcagccccaggatgtggacctggccctggacagcggggccagcctgctgcacctggccgtggaggccggccaggaggagtgtgccaagtggctgctgctgaacaatgccaaccccaacctgagcaacagaagaggcagcacccccctgcacatggctgtggagcggcgggtgcggggcgtggtggagctgctgctggccaggaagatctctgtgaatgccaaggatgaggaccagtggacagccctgcactttgctgcccagaatggagatgagagcagcacccggctgctgctggagaagaatgcctctgtgaatgaggtggactttgagggccgcacccccatgcacgtggcctgccagcacggccaggagaacatcgtgcgcatcctgctgcggcggggcgtggatgtgtccctgcagggcaaggatgcctggctgcccctgcactacgccgcctggcagggccacctgcccatcgtgaagctgctggccaagcagcccggggtgtctgtgaatgcccagaccctggatggccgcacccccctgcacctggccgcccagaggggccactacagagtggcccgcatcctgattgacctgtgcagtgatgtgaatgtgtgcagcctgctggcccagacccccctgcacgtggccgctgagaccggccacaccagcacagcccggctgctgctgcacagaggagctgggaaggaggccatgaccagtgatggctacacagccctgcacctggccgccagaaatggccacctggccaccgtgaagctgctggtggaggagaaggcagatgtgctggcccggggccccctgaaccagacagccctgcacctggccgccgcccacggccacagcgaggtggtggaggagctggtgtctgcagatgtgattgacctgtttgatgagcagggcctgagcgccctgcacctggccgcccagggcagacatgcccagacagtggagaccctgctgcggcacggggcccacatcaacctgcagagcctgaagttccagggcggccacggccctgctgccaccctgctgcggcgcagcaagacctag

SEQ ID NO: 167358 - DNA, 2166 bp, synthetic construct; identical to SEQ ID NO: 167357
  misc_feature 1..2166: note = Description of Artificial Sequence: Synthetic coding sequence
  source 1..2166: mol_type = other DNA

SEQ ID NO: 167359 - DNA, 3132 bp, synthetic construct
  misc_feature 1..3132: note = Description of Artificial Sequence: Synthetic coding sequence
  source 1..3132: mol_type = other DNA
atggccgccagcttcccccccaccctgggcctgagcagcgccccagatgagatccagcacccccacatcaagttcagcgagtggaagttcaagctgttccgggtgcgcagctttgagaagaccccagaggaggcccagaaggagaagaaggacagctttgagggcaagcccagcctggagcagagccctgctgtgctggacaaggcagatggccagaagcctgtgcccacccagcccctgctgaaggcccaccccaagttcagcaagaagttccatgacaatgagaaggcccggggcaaggccatccaccaggccaacctgcggcacctgtgccgcatctgtggcaacagcttccgggcagatgagcacaacagacgctaccctgtgcacggccctgtggatggcaagaccctgggcctgctgaggaagaaggagaagagggccacctcctggccagacctgattgccaaggtgttcagaattgatgtgaaggcagatgtggacagcatccaccccacagagttctgccacaactgctggagcatcatgcacaggaagttcagcagcgccccctgtgaggtgtacttccccagaaatgtgaccatggagtggcacccccacacccccagctgtgacatctgcaacacagcccggcggggcctgaagaggaagagcctgcagcccaacctgcagctgagcaagaagctgaagacagtgctggaccaggcccggcaggcccggcagcacaagagaagagcccaggcccgcatcagcagcaaggatgtgatgaagaagatcgccaactgcagcaagatccacctgagcaccaagctgctggccgtggacttccctgagcactttgtgaagagcatcagctgccagatctgtgagcacatcctggccgaccctgtggagaccaactgcaagcacgtgttctgccgggtgtgcatcctgcgctgcctgaaggtgatgggcagctactgccccagctgccgctacccctgcttccccacagacctggagagccctgtgaagagcttcctgtctgtgctgaacagcctgatggtgaagtgcccagccaaggagtgcaatgaggaggtgtccctggagaagtacaaccaccacatcagcagccacaaggagagcaaggagatctttgtgcacatcaacaagggcggccggccccggcagcacctgctgagcctgacccggcgggcccagaagcaccggctgcgggagctgaagctgcaggtgaaggcctttgctgacaaggaggagggcggagatgtgaagtctgtgtgcatgaccctcttcctgctggccctgcgggccagaaatgagcaccggcaggctgatgagctggaggccatcatgcagggcaaaggaagtggcctgcagcctgctgtgtgcctggccatccgggtgaacaccttcctgagctgcagccagtaccacaagatgtacagaacagtgaaggccatcaccggccggcagatcttccagcccctgcacgccctgagaaatgctgagaaggtgctgctgcccggctaccaccactttgagtggcagccccccctgaagaatgtgagcagcagcacagatgtgggcatcattgatggcctgagcggcctgagcagctctgtggatgactaccctgtggacaccatcgccaagcgcttccgctatgacagcgccctggtgtctgccctgatggacatggaggaggacatcctggagggcatgaggagccaggacctggatgactacctgaatggccccttcaccgtggtggtgaaggagagctgtgatggcatgggagatgtgtctgagaagcacggcagcggccctgtggtgcctgagaaggctgtgcgcttctccttcaccatcatgaagatcaccatcgcccacagcagccagaatgtgaaggtgtttgaggaggccaagcccaacagcgagctgtgctgcaagcccctgtgcctgatgctggctgatgaaagtgaccacgagaccctgacagccatcctgagccccctgattgctgagcgggaggccatgaagagcagcgagctgatgctggagctgggcggcatcctgcggaccttcaagttcatcttccggggcaccggctatgatgagaagctggtgcgggaggtggagggcctggaggccagcggctctgtgtacatctgcaccctgtgtgatgccacccggctggaggccagccagaacctggtgttccacagcatcaccaggagccatgctgagaacctggagagatatgaggtgtggaggagcaacccctaccatgaatctgtggaggagctgcgggacagagtgaagggcgtgtctgccaagcccttcatcgagaccgtgcccagcattgatgccctgcactgtgacattggaaatgctgctgagttctacaagatcttccagctggagattggagaggtgtacaagaaccccaatgccagcaaggaggagaggaagcgctggcaggccaccctggacaagcacctgaggaagaagatgaacctgaagcccatcatgaggatgaatggaaactttgccaggaagctgatgaccaaggagaccgtggatgctgtgtgtgagctgatccccagcgaggagagacatgaggccctgcgggagctgatggacctgtacctgaagatgaagcctgtgtggaggagcagctgcccagccaaggagtgcccagagagcctgtgccagtacagcttcaacagccagagatttgctgagctgctgagcaccaagttcaagtaccgctatgagggcaagatcaccaactacttccacaagaccctggcccacgtgcctgagatcatcgagagagatggcagcatcggggcctgggccagcgagggcaatgaaagtggcaacaagctgttccgccgcttcaggaagatgaatgcccggcagagcaaatgttatgagatggaggatgtgctgaagcaccactggctgtacaccagcaagtacctgcagaagttcatgaatgcccacaatgccctgaagaccagcggcttcaccatgaacccccaggccagcctgggggaccccctgggcatcgaggacagcctggagagccaggacagcatggagttctag

SEQ ID NO: 167360 - DNA, 1584 bp, synthetic construct
  misc_feature 1..1584: note = Description of Artificial Sequence: Synthetic coding sequence
  source 1..1584: mol_type = other DNA
atgagcctgcagatggtgacagtgagcaacaacatcgccctgatccagcccggcttcagcctgatgaactttgatggccaggtgttcttcttcggccagaagggctggcccaagaggagctgccccactggagtcttccacctggatgtgaagcacaaccacgtgaagctgaagcccaccatcttcagcaaggacagctgctacctgccccccctgcgctacccagccacctgcaccttcaagggcagcctggagagcgagaagcaccagtacatcatccacggcggcaagacccccaacaatgaggtgtctgacaagatctacgtgatgagcatcgtgtgcaagaacaacaagaaggtgaccttccgctgcacagagaaggacctggtgggagatgtgcctgaggcccgctatggccacagcatcaacgtggtgtacagccggggcaagtccatgggcgtgctgtttggaggccgcagctacatgcccagcacccacaggaccacagagaagtggaacagcgtggccgactgcctgccctgtgtgttcctggtggactttgaatttggctgtgccaccagctacatcctgcctgagctgcaggacggcctgtccttccacgtgtccatcgccaagaatgacaccatctacatcctgggcggccacagcctggccaacaacatccggcctgccaacctgtaccgcatccgggtggacctgcccctgggcagccctgctgtgaactgcaccgtgctgcccggcggcatctctgtgagcagcgccatcctgacccagaccaacaatgatgaatttgtgattgtgggcggctaccagctggagaaccagaagaggatgatctgcaacatcatcagcctggaggacaacaagattgagatccgggagatggagaccccagactggaccccagacatcaagcacagcaagatctggtttggcagcaacatgggaaatggcaccgtcttcctgggcatccctggggacaacaagcaggtggtgtctgagggcttctacttctacatgctgaagtgtgccgaggatgacaccaatgaggagcagaccaccttcaccaacagccagaccagcacagaggaccccggggacagcaccccatttgaagattctgaggagttctgcttctctgctgaggccaacagctttgatggagatgatgaatttgacacctacaatgaagatgatgaggaggatgaaagtgaaacaggctactggatcacctgctgccccacctgtgatgtggacatcaacacctgggtgcccttctacagcacagagctgaacaagccagccatgatctactgcagccatggagatggccactgggtgcacgcccagtgcatggacctggccgagaggaccctcatccacctgtctgctggcagcaacaagtactactgcaatgaacatgtggagatcgcccgggccctgcacaccccccagagggtgctgcccctgaagaagccacccatgaagagcctgaggaagaagggcagcggcaagatcctgaccccagccaagaagagcttcctgcggcggctgtttgattag

SEQ ID NO: 167361 - DNA, 216 bp, synthetic construct
  misc_feature 1..216: note = Description of Artificial Sequence: Synthetic coding sequence
  source 1..216: mol_type = other DNA
atgagcctgcagatggtgacagtgagcaacaacatcgccctgatccagcccggcttcagcctgatgaactttgatggccaggtgttcttcttcggccagaagggctggcccaagaggagctgccccactggagtcttccacctggatgtgaagcacaaccacgtgaagctgaagcccaccatcttcagcaaggacagctgctacctgcccccatag

SEQ ID NO: 167362 - DNA, 453 bp, synthetic construct
  misc_feature 1..453: note = Description of Artificial Sequence: Synthetic coding sequence
  source 1..453: mol_type = other DNA
atgagcctgcagatggtgacagtgagcaacaacatcgccctgatccagcccggcttcagcctgatgaactttgatggccaggtgttcttcttcggccagaagggctggcccaagaggagctgccccactggagtcttccacctggatgtgaagcacaaccacgtgaagctgaagcccaccatcttcagcaaggacagctgctacctgccccccctgcgctacccagccacctgcaccttcaagggcagcctggagagcgagaagcaccagtacatcatccacggcggcaagacccccaacaatgaggtgtctgacaagatctacgtgatgagcatcgtgtgcaagaacaacaagaaggtgaccttccgctgcacagagaaggacctggtgggagatgtgcctgaggcccgctatggccacagcatcaacgtggtgtacagccggggcaagtag

SEQ ID NO: 167363 - skipped

SEQ ID NO: 167364 - DNA, 1503 bp, synthetic construct
  misc_feature 1..1503: note = Description of Artificial Sequence: Synthetic coding sequence
  source 1..1503: mol_type = other DNA
atggaccacacagagggcagccctgctgaggagcccccagcccacgcccccagccctgggaagtttggagagcggcccccacccaagaggctgacccgggaggccatgaggaactacctgaaggagcggggggaccagacagtgctgatcctgcacgccaaggtggcccagaagagctatggaaatgagaagcgcttcttctgccccccaccctgtgtgtacctgatgggcagcggctggaagaagaagaaggagcagatggagagagatggctgcagcgagcaggagagccagccctgtgccttcatcggcatcggcaacagcgaccaggagatgcagcagctgaacctggagggcaagaactactgcacagccaagaccctgtacatcagtgacagcgacaagaggaagcacttcatgctgtctgtgaagatgttttatggcaacagtgatgacattggagtcttcctgagcaagaggatcaaggtgatcagcaagcccagcaagaagaagcagagcctgaagaatgctgacctgtgcatcgccagcggcaccaaggtggccctcttcaaccggctgcggagccagacagtgtccacccgctacctgcacgtggagggcggcaacttccacgccagcagccagcagtggggcgccttcttcatccacctgctggatgatgatgagagcgagggggaggagttcaccgtgagagatggctacatccactacggccagacagtgaagctggtgtgcagcgtgacaggcatggccctgcccaggctcatcatcaggaaggtggacaagcagacagccctgctggatgctgatgatcctgtgtcccagctgcacaagtgtgccttctacctgaaggacacagagaggatgtacctgtgcctgagccaggagcgcatcatccagttccaggccaccccctgccccaaggagcccaacaaggagatgatcaatgatggagcctcctggaccatcatcagcacagacaaggccgagtacaccttctatgagggcatgggccctgtgctggcccctgtgacccctgtgcctgtggtggagagcctgcagctgaatggaggaggagatgtggccatgctggagctgaccggccagaacttcacccccaacctgcgggtgtggtttggagatgtggaggccgagaccatgtaccgctgtggggagagcatgctgtgtgtggtgcctgacatcagcgccttccgggagggctggcgctgggtgcggcagcctgtgcaggtgcctgtgaccctggtgagaaatgatggcatcatctacagcaccagcctgaccttcacctacaccccagagcccggcccccggccccactgcagcgctgctggggccatcctgcgggccaacagcagccaggtgcccccaaatgaaagcaacaccaacagcgagggcagctacaccaatgccagcaccaacagcacctctgtgaccagcagcacagccaccgtggtgtcctag

SEQ ID NO: 167365 - DNA, 1461 bp, synthetic construct
  misc_feature 1..1461: note = Description of Artificial Sequence: Synthetic coding sequence
  source 1..1461: mol_type = other DNA
atggcctggatcaagaggaagtttggagagcggcccccacccaagaggctgacccgggaggccatgaggaactacctgaaggagcggggggaccagacagtgctgatcctgcacgccaaggtggcccagaagagctatggaaatgagaagcgcttcttctgccccccaccctgtgtgtacctgatgggcagcggctggaagaagaagaaggagcagatggagagagatggctgcagcgagcaggagagccagccctgtgccttcatcggcatcggcaacagcgaccaggagatgcagcagctgaacctggagggcaagaactactgcacagccaagaccctgtacatcagtgacagcgacaagaggaagcacttcatgctgtctgtgaagatgttttatggcaacagtgatgacattggagtcttcctgagcaagaggatcaaggtgatcagcaagcccagcaagaagaagcagagcctgaagaatgctgacctgtgcatcgccagcggcaccaaggtggccctcttcaaccggctgcggagccagacagtgtccacccgctacctgcacgtggagggcggcaacttccacgccagcagccagcagtggggcgccttcttcatccacctgctggatgatgatgagagcgagggggaggagttcaccgtgagagatggctacatccactacggccagacagtgaagctggtgtgcagcgtgacaggcatggccctgcccaggctcatcatcaggaaggtggacaagcagacagccctgctggatgctgatgatcctgtgtcccagctgcacaagtgtgccttctacctgaaggacacagagaggatgtacctgtgcctgagccaggagcgcatcatccagttccaggccaccccctgccccaaggagcccaacaaggagatgatcaatgatggagcctcctggaccatcatcagcacagacaaggccgagtacaccttctatgagggcatgggccctgtgctggcccctgtgacccctgtgcctgtggtggagagcctgcagctgaatggaggaggagatgtggccatgctggagctgaccggccagaacttcacccccaacctgcgggtgtggtttggagatgtggaggccgagaccatgtaccgctgtggggagagcatgctgtgtgtggtgcctgacatcagcgccttccgggagggctggcgctgggtgcggcagcctgtgcaggtgcctgtgaccctggtgagaaatgatggcatcatctacagcaccagcctgaccttcacctacaccccagagcccggcccccggccccactgcagcgctgctggggccatcctgcgggccaacagcagccaggtgcccccaaatgaaagcaacaccaacagcgagggcagctacaccaatgccagcaccaacagcacctctgtgaccagcagcacagccaccgtggtgtcctag

SEQ ID NO: 167366 - DNA, 1458 bp, synthetic construct
  misc_feature 1..1458: note = Description of Artificial Sequence: Synthetic coding sequence
  source 1..1458: mol_type = other DNA
atgggcggctgcaggaagtttggagagcggcccccacccaagaggctgacccgggaggccatgaggaactacctgaaggagcggggggaccagacagtgctgatcctgcacgccaaggtggcccagaagagctatggaaatgagaagcgcttcttctgccccccaccctgtgtgtacctgatgggcagcggctggaagaagaagaaggagcagatggagagagatggctgcagcgagcaggagagccagccctgtgccttcatcggcatcggcaacagcgaccaggagatgcagcagctgaacctggagggcaagaactactgcacagccaagaccctgtacatcagtgacagcgacaagaggaagcacttcatgctgtctgtgaagatgttctacggcaacagtgatgacatcggggtcttcctgagcaagaggatcaaggtgatcagcaagcccagcaagaagaagcagagcctgaagaatgctgacctgtgcatcgccagcggcaccaaggtggccctcttcaaccggctgcggagccagacagtgtccacccgctacctgcacgtggagggcggcaacttccacgccagcagccagcagtggggcgccttcttcatccacctgctggatgatgatgaaagtgaaggagaggagttcaccgtgagagatggctacatccactacggccagacagtgaagctggtgtgcagcgtgacaggcatggccctgcccaggctcatcatcaggaaggtggacaagcagacagccctgctggatgctgatgatcctgtgtcccagctgcacaagtgtgccttctacctgaaggacacagagaggatgtacctgtgcctgagccaggagcgcatcatccagttccaggccaccccctgccccaaggagcccaacaaggagatgatcaatgatggagcctcctggaccatcatcagcacagacaaggccgagtacaccttctatgagggcatgggccctgtgctggcccctgtgacccctgtgcctgtggtggagagcctgcagctgaatggaggaggagatgtggccatgctggagctgaccggccagaacttcacccccaacctgcgggtgtggtttggagatgtggaggccgagaccatgtaccgctgtggggagagcatgctgtgtgtggtgcctgacatcagcgccttccgggagggctggcgctgggtgcggcagcctgtgcaggtgcctgtgaccctggtgagaaatgatggcatcatctacagcaccagcctgaccttcacctacaccccagagcccggcccccggccccactgcagcgctgctggggccatcctgcgggccaacagcagccaggtgcccccaaatgaaagcaacaccaacagcgagggcagctacaccaatgccagcaccaacagcacctctgtgaccagcagcacagccaccgtggtgtcctag

SEQ ID NO: 167367 - DNA, 1464 bp, synthetic construct
  misc_feature 1..1464: note = Description of Artificial Sequence: Synthetic coding sequence
  source 1..1464: mol_type = other DNA
atggcccctgtggtgacaggcaagtttggagagcggcccccacccaagaggctgacccgggaggccatgaggaactacctgaaggagcggggggaccagacagtgctgatcctgcacgccaaggtggcccagaagagctatggaaatgagaagcgcttcttctgccccccaccctgtgtgtacctgatgggcagcggctggaagaagaagaaggagcagatggagagagatggctgcagcgagcaggagagccagccctgtgccttcatcggcatcggcaacagcgaccaggagatgcagcagctgaacctggagggcaagaactactgcacagccaagaccctgtacatcagtgacagcgacaagaggaagcacttcatgctgtctgtgaagatgttctacggcaacagtgatgacatcggggtcttcctgagcaagaggatcaaggtgatcagcaagcccagcaagaagaagcagagcctgaagaatgctgacctgtgcatcgccagcggcaccaaggtggccctcttcaaccggctgcggagccagacagtgtccacccgctacctgcacgtggagggcggcaacttccacgccagcagccagcagtggggcgccttcttcatccacctgctggatgatgatgaaagtgaaggagaggagttcaccgtgagagatggctacatccactacggccagacagtgaagctggtgtgcagcgtgacaggcatggccctgcccaggctcatcatcaggaaggtggacaagcagacagccctgctggatgctgatgatcctgtgtcccagctgcacaagtgtgccttctacctgaaggacacagagaggatgtacctgtgcctgagccaggagcgcatcatccagttccaggccaccccctgccccaaggagcccaacaaggagatgatcaatgatggagcctcctggaccatcatcagcacagacaaggccgagtacaccttctatgagggcatgggccctgtgctggcccctgtgacccctgtgcctgtggtggagagcctgcagctgaatggaggaggagatgtggccatgctggagctgaccggccagaacttcacccccaacctgcgggtgtggtttggagatgtggaggccgagaccatgtaccgctgtggggagagcatgctgtgtgtggtgcctgacatcagcgccttccgggagggctggcgctgggtgcggcagcctgtgcaggtgcctgtgaccctggtgagaaatgatggcatcatctacagcaccagcctgaccttcacctacaccccagagcccggcccccggccccactgcagcgctgctggggccatcctgcgggccaacagcagccaggtgcccccaaatgaaagcaacaccaacagcgagggcagctacaccaatgccagcaccaacagcacctctgtgaccagcagcacagccaccgtggtgtcctag

SEQ ID NO: 167368 - DNA, 1461 bp, synthetic construct; identical to SEQ ID NO: 167365
  misc_feature 1..1461: note = Description of Artificial Sequence: Synthetic coding sequence
  source 1..1461: mol_type = other DNA

SEQ ID NO: 167369 - DNA, 1503 bp, synthetic construct; identical to SEQ ID NO: 167364
  misc_feature 1..1503: note = Description of Artificial Sequence: Synthetic coding sequence
  source 1..1503: mol_type = other DNA

SEQ ID NO: 167370 - DNA, 432 bp, synthetic construct
  misc_feature 1..432: note = Description of Artificial Sequence: Synthetic coding sequence
  source 1..432: mol_type = other DNA
atgaggaactacctgaaggagcggggggaccagacagtgctgatcctgcacgccaaggtggcccagaagagctatggaaatgagaagcgcttcttctgccccccaccctgtgtgtacctgatgggcagcggctggaagaagaagaaggagcagatggagagagatggctgcagcgagcaggagagccagccctgtgccttcatcggcatcggcaacagcgaccaggagatgcagcagctgaacctggagggcaagaactactgcacagccaagaccctgtacatcagtgacagcgacaagaggaagcacttcatgctgtctgtgaagatgttctacggcaacagtgatgacatcggggtcttcctgagcaagaggatcaaggtgatcagcaagcccagcaagaagaagcagagcctgaagaatgctgactag

SEQ ID NO: 167371 - DNA, 87 bp, synthetic construct
  misc_feature 1..87: note = Description of Artificial Sequence: Synthetic coding sequence
  source 1..87: mol_type = other DNA
atggcctggatcaagaggaagtttggagagcggcccccacccaagaggctgacccgggaggccatgaggaactacctgaaggagtag

SEQ ID NO: 167372 - DNA, 294 bp, synthetic construct
  misc_feature 1..294: note = Description of Artificial Sequence: Synthetic coding sequence
  source 1..294: mol_type = other DNA
atggcctggatcaagaggaagtttggagagcggcccccacccaagaggctgacccgggaggccatgaggaactacctgaaggagcggggggaccagacagtgctgatcctgcacgccaaggtggcccagaagagctatggaaatgagaagcgcttcttctgccccccaccctgtgtgtacctgatgggcagcggctggaagaagaagaaggagcagatggagagagatggctgcagcgagcaggagagccagccctgtgccttcatcggcatcggcaacagcgaccaggagtag

SEQ ID NO: 167373 - DNA, 1398 bp, synthetic construct
  misc_feature 1..1398: note = Description of Artificial Sequence: Synthetic coding sequence
  source 1..1398: mol_type = other DNA
atgaggaactacctgaaggagcggggggaccagacagtgctgatcctgcacgccaaggtggcccagaagagctatggaaatgagaagcgcttcttctgccccccaccctgtgtgtacctgatgggcagcggctggaagaagaagaaggagcagatggagagagatggctgcagcgagcaggagagccagccctgtgccttcatcggcatcggcaacagcgaccaggagatgcagcagctgaacctggagggcaagaactactgcacagccaagaccctgtacatcagtgacagcgacaagaggaagcacttcatgctgtctgtgaagatgttctacggcaacagtgatgacatcggggtcttcctgagcaagaggatcaaggtgatcagcaagcccagcaagaagaagcagagcctgaagaatgctgacctgtgcatcgccagcggcaccaaggtggccctcttcaaccggctgcggagccagacagtgtccacccgctacctgcacgtggagggcggcaacttccacgccagcagccagcagtggggcgccttcttcatccacctgctggatgatgatgaaagtgaaggagaggagttcaccgtgagagatggctacatccactacggccagacagtgaagctggtgtgcagcgtgacaggcatggccctgcccaggctcatcatcaggaaggtggacaagcagacagccctgctggatgctgatgatcctgtgtcccagctgcacaagtgtgccttctacctgaaggacacagagaggatgtacctgtgcctgagccaggagcgcatcatccagttccaggccaccccctgccccaaggagcccaacaaggagatgatcaatgatggagcctcctggaccatcatcagcacagacaaggccgagtacaccttctatgagggcatgggccctgtgctggcccctgtgacccctgtgcctgtggtggagagcctgcagctgaatggaggaggagatgtggccatgctggagctgaccggccagaacttcacccccaacctgcgggtgtggtttggagatgtggaggccgagaccatgtaccgctgtggggagagcatgctgtgtgtggtgcctgacatcagcgccttccgggagggctggcgctgggtgcggcagcctgtgcaggtgcctgtgaccctggtgagaaatgatggcatcatctacagcaccagcctgaccttcacctacaccccagagcccggcccccggccccactgcagcgctgctggggccatcctgcgggccaacagcagccaggtgcccccaaatgaaagcaacaccaacagcgagggcagctacaccaatgccagcaccaacagcacctctgtgaccagcagcacagccaccgtggtgtcctag

SEQ ID NO: 167374 - DNA, 474 bp, synthetic construct
  misc_feature 1..474: note = Description of Artificial Sequence: Synthetic coding sequence
  source 1..474: mol_type = other DNA
atgaggaactacctgaaggagcggggggaccagacagtgctgatcctgcacgccaaggtggcccagaagagctatggaaatgagaagcgcttcttctgccccccaccctgtgtgtacctgatgggcagcggctggaagaagaagaaggagcagatggagagagatggctgcagcgagcaggagagccagccctgtgccttcatcggcatcggcaacagcgaccaggagatgcagcagctgaacctggagggcaagaactactgcacagccaagaccctgtacatcagtgacagcgacaagaggaagcacttcatgctgtctgtgaagatgttctacggcaacagtgatgacatcggggtcttcctgagcaagaggatcaaggtgatcagcaagcccagcaagaagaagcagagcctgaagaatgctgacctgtgcatcgccagcggcaccaaggtggccctcttcaacagatag

SEQ ID NO: 167375 - DNA, 150 bp, synthetic construct
  misc_feature 1..150: note = Description of Artificial Sequence: Synthetic coding sequence
  source 1..150: mol_type = other DNA
atggcctggatcaagaggaagtttggagagcggcccccacccaagaggctgacccgggaggccatgaggaactacctgaaggagcggggggaccagacagtgctgatcctgcacgccaaggtggcccagaagagctatggaaatgaatag

SEQ ID NO: 167376 - DNA, 324 bp, synthetic construct
  misc_feature 1..324: note = Description of Artificial Sequence: Synthetic coding sequence
  source 1..324: mol_type = other DNA
atggcctggatcaagaggaagtttggagagcggcccccacccaagaggctgacccgggaggccatgaggaactacctgaaggagcggggggaccagacagtgctgatcctgcacgccaaggtggcccagaagagctatggaaatgagaagcgcttcttctgccccccaccctgtgtgtacctgatgggcagcggctggaagaagaagaaggagcagatggagagagatggctgcagcgagcaggagagccagccctgtgccttcatcggcatcggcaacagcgaccaggagatgcagcagctgaacctggagggcaagaactag

SEQ ID NO: 167377 - DNA, 285 bp, synthetic construct
  misc_feature 1..285: note = Description of Artificial Sequence: Synthetic coding sequence
  source 1..285: mol_type = other DNA
atggcctggatcaagaggaagtttggagagcggcccccacccaagaggctgacccgggaggccatgaggaactacctgaaggagcggggggaccagacagtgctgatcctgcacgccaaggtggcccagaagagctatggaaatgagaagcgcttcttctgccccccaccctgtgtgtacctgatgggcagcggctggaagaagaagaaggagcagatggagagagatggctgcagcgagcaggagagccagccctgtgccttcatcggcatcggcaacagctag

SEQ ID NO: 167378 - DNA, 537 bp, synthetic construct
  misc_feature 1..537: note = Description of Artificial Sequence: Synthetic coding sequence
  source 1..537: mol_type = other DNA
atggaccacacagagggcagccctgctgaggagcccccagcccacgcccccagccctgggaagtttggagagcggcccccacccaagaggctgacccgggaggccatgaggaactacctgaaggagcggggggaccagacagtgctgatcctgcacgccaaggtggcccagaagagctatggaaatgagaagcgcttcttctgccccccaccctgtgtgtacctgatgggcagcggctggaagaagaagaaggagcagatggagagagatggctgcagcgagcaggagagccagccctgtgccttcatcggcatcggcaacagcgaccaggagatgcagcagctgaacctggagggcaagaactactgcacagccaagaccctgtacatcagtgacagcgacaagaggaagcacttcatgctgtctgtgaagatgttttatggcaacagtgatgacattggagtcttcctgagcaagaggatcaaggtgatcagcaagcccagcaagaagaagcagagcctgaagaatgctgactag

SEQ ID NO: 167379 - DNA, 333 bp, synthetic construct
  misc_feature 1..333: note = Description of Artificial Sequence: Synthetic coding sequence
  source 1..333: mol_type = other DNA
atggcctggatcaagaggaagtttggagagcggcccccacccaagaggctgacccgggaggccatgaggaactacctgaaggagcggggggaccagacagtgctgatcctgcacgccaaggtggcccagaagagctatggaaatgagaagcgcttcttctgccccccaccctgtgtgtacctgatgggcagcggctggaagaagaagaaggagcagatggagagagatggctgcagcgagcaggagagccagccctgtgccttcatcggcatcggcaacagcgaccaggagatgcagcagctgaacctggagggcaagaactactgcacctag

SEQ ID NO: 167380 - DNA, 342 bp, synthetic construct
  misc_feature 1..342: note = Description of Artificial Sequence: Synthetic coding sequence
  source 1..342: mol_type = other DNA
atggcctggatcaagaggaagtttggagagcggcccccacccaagaggctgacccgggaggccatgaggaactacctgaaggagcggggggaccagacagtgctgatcctgcacgccaaggtggcccagaagagctatggaaatgagaagcgcttcttctgccccccaccctgtgtgtacctgatgggcagcggctggaagaagaagaaggagcagatggagagagatggctgcagcgagcaggagagccagccctgtgccttcatcggcatcggcaacagcgaccaggagatgcagcagctgaacctggagggcaagaactactgcacagccaagacctag

SEQ ID NO: 167381 - DNA, 147 bp, synthetic construct
  misc_feature 1..147: note = Description of Artificial Sequence: Synthetic coding sequence
  source 1..147: mol_type = other DNA
atggcctggatcaagaggaagtttggagagcggcccccacccaagaggctgacccgggaggccatgaggaactacctgaaggagcggggggaccagacagtgctgatcctgcacgccaaggtggcccagaagagctatggcaactag

SEQ ID NO: 167382 - DNA, 570 bp, synthetic construct
  misc_feature 1..570: note = Description of Artificial Sequence: Synthetic coding sequence
  source 1..570: mol_type = other DNA
atgaggaactacctgaaggagcggggggaccagacagtgctgatcctgcacgccaaggtggcccagaagagctatggaaatgagaagcgcttcttctgccccccaccctgtgtgtacctgatgggcagcggctggaagaagaagaaggagcagatggagagagatggctgcagcgagcaggagagccagccctgtgccttcatcggcatcggcaacagcgaccaggagatgcagcagctgaacctggagggcaagaactactgcacagccaagaccctgtacatcagtgacagcgacaagaggaagcacttcatgctgtctgtgaagatgttctacggcaacagtgatgacatcggggtcttcctgagcaagaggatcaaggtgatcagcaagcccagcaagaagaagcagagcctgaagaatgctgacctgtgcatcgccagcggcaccaaggtggccctcttcaaccggctgcggagccagacagtgtccacccgctacctgcacgtggagggcggcaacttccacgccagcagccagcagtggggcgccttcttcatccacctgtag

SEQ ID NO: 167383 - DNA, 600 bp, synthetic construct
  misc_feature 1..600: note = Description of Artificial Sequence: Synthetic coding sequence
  source 1..600: mol_type = other DNA
atggcctctgtgtctgccctgacagaggagctggacagcatcaccagcgagctgcatgctgtggagatccagatccaggagctgacagagcggcagcaggagctgatccagaagaagaaggtgctgaccaagaagatcaagcagtgcctggaggacagtgatgctggggccagcaatgaatatgacagcagccctgctgcctggaacaaggaggacttcccctggagcggcaaggtgaaggacatcctgcagaatgtgttcaagctggagaagttccggcccctgcagctggagaccatcaacgtgaccatggccggcaaggaggtgttcctggtgatgcccactggaggcggcaagagcctgtgctaccagctgcctgccctgtgcagtgatggcttcaccctggtgatctgccccctcatcagcctgatggaggaccagctgatggtgctgaagcagctgggcatcagcgccaccatgctgaatgccagcagcagcaaggagcacgtgaagtgggtgcatgctgagatggtgaacaagaacagcgagctgaagctgatctacgtgaccccagagaagatcgccaagagcaagatgtag

SEQ ID NO: 167384 - DNA, 636 bp, synthetic construct
  misc_feature 1..636: note = Description of Artificial Sequence: Synthetic coding sequence
  source 1..636: mol_type = other DNA
atggcctctgtgtctgccctgacagaggagctggacagcatcaccagcgagctgcatgctgtggagatccagatccaggagctgacagagcggcagcaggagctgatccagaagaagaaggtgctgaccaagaagatcaagcagtgcctggaggacagtgatgctggggccagcaatgaatatgacagcagccctgctgcctggaacaaggaggacttcccctggagcggcaaggtgaaggacatcctgcagaatgtgttcaagctggagaagttccggcccctgcagctggagaccatcaacgtgaccatggccggcaaggaggtgttcctggtgatgcccactggaggcggcaagagcctgtgctaccagctgcctgccctgtgcagtgatggcttcaccctggtgatctgccccctcatcagcctgatggaggaccagctgatggtgctgaagcagctgggcatcagcgccaccatgctgaatgccagcagcagcaaggagcacgtgaagtgggtgcatgctgagatggtgaacaagaacagcgagctgaagctgatctacgtgaccccagagaagatcgccaagagcaagatgttcatgagccggctggagaaggcctatgaggccaggtag

SEQ ID NO: 167385 - DNA, 1950 bp, synthetic construct
  misc_feature 1..1950: note = Description of Artificial Sequence: Synthetic coding sequence
  source 1..1950: mol_type = other DNA
atggcctctgtgtctgccctgacagaggagctggacagcatcaccagcgagctgcatgctgtggagatccagatccaggagctgacagagcggcagcaggagctgatccagaagaagaaggtgctgaccaagaagatcaagcagtgcctggaggacagtgatgctggggccagcaatgaatatgacagcagccctgctgcctggaacaaggaggacttcccctggagcggcaaggtgaaggacatcctgcagaatgtgttcaagctggagaagttccggcccctgcagctggagaccatcaacgtgaccatggccggcaaggaggtgttcctggtgatgcccactggaggcggcaagagcctgtgctaccagctgcctgccctgtgcagtgatggcttcaccctggtgatctgccccctcatcagcctgatggaggaccagctgatggtgctgaagcagctgggcatcagcgccaccatgctgaatgccagcagcagcaaggagcacgtgaagtgggtgcatgctgagatggtgaacaagaacagcgagctgaagctgatctacgtgaccccagagaagatcgccaagagcaagatgttcatgagccggctggagaaggcctatgaggcccggcgcttcaccagaattgctgtggatgaggtgcactgctgcagccagtggggccatgacttccggccagactacaaggccctgggcatcctgaagaggcagttccccaatgccagcctgattggcctgacagccacagccaccaaccacgtgctgacagatgcccagaagatcctgtgcatcgagaagtgcttcaccttcaccgccagcttcaaccggcccaacctgtactatgaggtgcggcagaagcccagcaacacagaggacttcatcgaggacatcgtgaagctgatcaatggccgctacaagggccagagcggcatcatctactgcttcagccagaaggacagcgagcaggtgacagtgtccctgcagaacctgggcatccatgctggggcctaccacgccaacctggagcctgaggacaagaccaccgtgcacaggaagtggagcgccaatgagatccaggtggtggtggccaccgtggccttcggcatgggcatcgacaagccagatgtgcgctttgtgatccaccacagcatgagcaagtccatggagaactactaccaggagagcggccgggccggcagagatgacatgaaggctgactgcatcctgtactacggctttggagacatcttccgcatcagctccatggtggtgatggagaatgtgggccagcagaagctgtatgagatggtgtcctactgccagaacatcagcaagtgccggcgggtgctgatggcccagcactttgatgaggtgtggaacagcgaggcctgcaacaagatgtgtgacaactgctgcaaggacagcgcctttgagaggaagaacatcacagagtactgccgggacctgatcaagatcctgaagcaggccgaggagctgaatgagaagctgacccccctgaagctgattgacagctggatgggcaagggggccgccaagctgcgggtggccggcgtggtggcccccaccctgccccgggaggacctggagaagatcatcgcccacttcctgatccagcagtacctgaaggaggactacagcttcaccgcctatgccaccatctcctacctgaagattggccccaaggccaacctgctgaacaatgaggcccacgccatcaccatgcaggtgaccaagagcacccagaacagcttccgggcagagagcagccagacctgccacagcgagcagggcgacaagaagatggaggagaagaacagcggcaacttccagaagaaggccgccaacatgctgcagcagagcggcagcaagaacacaggagccaagaagaggaagattgatgatgcctag

SEQ ID NO: 167386 - DNA, 1950 bp, synthetic construct; identical to SEQ ID NO: 167385
  misc_feature 1..1950: note = Description of Artificial Sequence: Synthetic coding sequence
  source 1..1950: mol_type = other DNA

SEQ ID NO: 167387 - DNA, 321 bp, synthetic construct
  misc_feature 1..321: note = Description of Artificial Sequence: Synthetic coding sequence
  source 1..321: mol_type = other DNA
atggcctctgtgtctgccctgacagaggagctggacagcatcaccagcgagctgcatgctgtggagatccagatccaggagctgacagagcggcagcaggagctgatccagaagaagaaggtgctgaccaagaagatcaagcagtgcctggaggacagtgatgctggggccagcaatgaatatgacagcagccctgctgcctggaacaaggaggacttcccctggagcggcaaggtgaaggacatcctgcagaatgtgttcaagctggagaagttccggcccctgcagctggagaccatcaacgtgaccatggccggctag

SEQ ID NO: 167388 - DNA, 294 bp, synthetic construct
  misc_feature 1..294: note = Description of Artificial Sequence: Synthetic coding sequence
  source 1..294: mol_type = other DNA
atggcctctgtgtctgccctgacagaggagctggacagcatcaccagcgagctgcatgctgtggagatccagatccaggagctgacagagcggcagcaggagctgatccagaagaagaaggtgctgaccaagaagatcaagcagtgcctggaggacagtgatgctggggccagcaatgaatatgacagcagccctgctgcctggaacaaggaggacttcccctggagcggcaaggtgaaggacatcctgcagaatgtgttcaagctggagaagttccggcccctgcagctgtag

SEQ ID NO: 167389 - DNA, 219 bp, synthetic construct
  misc_feature 1..219: note = Description of Artificial Sequence: Synthetic coding sequence
  source 1..219: mol_type = other DNA
atggcctctgtgtctgccctgacagaggagctggacagcatcaccagcgagctgcatgctgtggagatccagatccaggagctgacagagcggcagcaggagctgatccagaagaagaaggtgctgaccaagaagatcaagcagtgcctggaggacagtgatgctggggccagcaatgaatatgacagcagccctgctgcctggaacaaggaggactag

SEQ ID NO: 167390 - DNA, 396 bp, synthetic construct
  misc_feature 1..396: note = Description of Artificial Sequence: Synthetic coding sequence
  source 1..396: mol_type = other DNA
atggcctctgtgtctgccctgacagaggagctggacagcatcaccagcgagctgcatgctgtggagatccagatccaggagctgacagagcggcagcaggagctgatccagaagaagaaggtgctgaccaagaagatcaagcagtgcctggaggacagtgatgctggggccagcaatgaatatgacagcagccctgctgcctggaacaaggaggacttcccctggagcggcaaggtgaaggacatcctgcagaatgtgttcaagctggagaagttccggcccctgcagctggagaccatcaacgtgaccatggccggcaaggaggtgttcctggtgatgcccactggaggcggcaagagcctgtgctaccagctgcctgccctgtgcagcgactag

SEQ ID NO: 167391 - DNA, 2976 bp, synthetic construct
  misc_feature 1..2976: note = Description of Artificial Sequence: Synthetic coding sequence
  source 1..2976: mol_type = other DNA
atgagcagccaccacaccaccttcccctttgatcctgagcggcgggtgcgcagcaccctgaagaaggtgtttggatttgacagcttcaagacccccctgcaggagagcgccaccatggctgtggtgaagggcaacaaggatgtgtttgtgtgcatgcccaccggggccggcaagagcctgtgctaccagctgcctgccctgctggccaagggcatcaccatcgtggtgagccccctcatcgccctgatccaggaccaggtggaccacctgctgaccctgaaggtgcgggtgagcagcctgaacagcaagctgagcgcccaggagaggaaggagctgctggccgacctggagcgggagaagccccagaccaagatcctgtacatcaccccagagatggccgccagcagcagcttccagcccaccctgaacagcctggtgagccgccacctgctgagctacctggtggtggatgaggcccactgtgtgtcccagtggggccatgacttccggccagactacctgcggctgggcgccctgcggagccggctgggccacgccccctgtgtggccctgacagccacagccaccccccaggtgcaggaggatgtgtttgctgccctgcacctgaagaagcctgtggccatcttcaagaccccctgcttccgggccaacctcttctatgatgtgcagttcaaggagctgatcagtgacccctacggcaacctgaaggacttctgcctgaaggccctgggccaggaggccgacaagggcctgagcggctgcggcatcgtgtactgcaggacccgggaggcctgtgagcagctggccatcgagctgagctgccggggcgtgaatgccaaggcctaccacgccggcctgaaggccagcgagaggaccctggtgcagaatgactggatggaggagaaggtgcctgtgattgtggccaccatcagctttggcatgggcgtggacaaggccaacgtgcgctttgtggcccactggaacatcgccaagtccatggccggctactaccaggagagcggccgggccggcagagatggcaagcccagctggtgccgcctgtactacagcagaaatgaccgggaccaggtgtccttcctgatcaggaaggaggtggccaagctgcaggagaagaggggcaacaaggccagtgacaaggccaccatcatggcctttgatgccctggtgaccttctgtgaggagctgggctgcagacatgctgccatcgccaagtactttggagatgccctgcctgcctgtgccaagggctgtgaccactgccagaaccccacagctgtgagaagaaggctggaggccctggagaggagcagctcctggagcaagacctgcatcggccccagccagggcaatggatttgatcctgagctgtatgaaggaggcaggaagggctacggggacttcagccgctatgatgagggcagcggcggcagcggagatgagggcagagatgaggcccacaagcgggagtggaacctcttctaccagaagcagatgcagctgaggaagggcaaggaccccaagattgaggagtttgtgcccccagatgagaactgccccctgaaggaggccagcagccgccgcatcccccggctgactgtgaaggcccgggagcactgcctgcggctgctggaggaggccctgagcagcaaccggcagagcaccaggacagcagatgaggccgacctgcgggccaaggctgtggagctggagcacgagaccttcagaaatgccaaggtggccaacctgtacaaggcctctgtgctgaagaaggtggccgacatccaccgggccagcaaggatggccagccctatgacatgggcggcagcgccaagagctgcagcgcccaggccgagcccccagagcccaatgaatatgacatccccccagccagccacgtgtacagcctgaagcccaagagggtgggcgccggcttccccaagggcagctgccccttccagacagccacagagctgatggagaccacccgcatccgggagcaggccccccagcctgagcggggcggggagcacgagccccccagccggccctgtggcctgctggatgaagatggcagcgagcccctgcccggccccagaggagaggtgcctgggggcagcgcccactatggaggccccagccctgagaagaaggccaagagcagcagcggcggcagcagcctggccaagggccgggccagcaagaagcagcagctgctggccacagctgcccacaaggacagccagagcatcgcccgcttcttctgccggcgggtggagagccctgccctgctggccagcgcccctgaggccgagggcgcctgccccagctgtgaaggagtgcagggcccccccatggcccctgagaagtacacaggagaggaggatggagctgggggccacagccctgccccaccccagacagaagaatgtctgcgggagcggcccagcacctgccccccccgggaccagggcaccccagaggtgcagcccaccccagccaaggacacctggaagggcaagaggcccaggagccagcaggagaaccctgagagccagccccagaagaggccccggcccagcgccaagcccagcgtggtggccgaggtgaagggctctgtgtctgccagcgagcagggcaccctgaaccccacagcccaggaccccttccagctgagcgcccctggggtgtccctgaaggaggccgccaacgtggtggtgaagtgcctgacccccttctacaaggagggcaagtttgccagcaaggagctgttcaagggctttgcccggcacctgagccacctgctgacccagaagaccagccctggccgctctgtgaaggaggaggcccagaacctgatccgccacttcttccacggccgggcccgctgtgagagcgaggccgactggcacggcctgtgtggcccccagaggtag

SEQ ID NO: 167392 - DNA, 1308 bp, synthetic construct
  misc_feature 1..1308: note = Description of Artificial Sequence: Synthetic coding sequence
  source 1..1308: mol_type = other DNA
atgagcagccaccacaccaccttcccctttgatcctgagcggcgggtgcgcagcaccctgaagaaggtgtttggatttgacagcttcaagacccccctgcaggagagcgccaccatggctgtggtgaagggcaacaaggatgtgtttgtgtgcatgcccaccggggccggcaagagcctgtgctaccagctgcctgccctgctggccaagggcatcaccatcgtggtgagccccctcatcgccctgatccaggaccaggtggaccacctgctgaccctgaaggtgcgggtgagcagcctgaacagcaagctgagcgcccaggagaggaaggagctgctggccgacctggagcgggagaagccccagaccaagatcctgtacatcaccccagagatggccgccagcagcagcttccagcccaccctgaacagcctggtgagccgccacctgctgagctacctggtggtggatgaggcccactgtgtgtcccagtggggccatgacttccggccagactacctgcggctgggcgccctgcggagccggctgggccacgccccctgtgtggccctgacagccacagccaccccccaggtgcaggaggatgtgtttgctgccctgcacctgaagaagcctgtggccatcttcaagaccccctgcttccgggccaacctcttctatgatgtgcagttcaaggagctgatcagtgacccctacggcaacctgaaggacttctgcctgaaggccctgggccaggaggccgacaagggcctgagcggctgcggcatcgtgtactgcaggacccgggaggcctgtgagcagctggccatcgagctgagctgccggggcgtgaatgccaaggcctaccacgccggcctgaaggccagcgagaggaccctggtgcagaatgactggatggaggagaaggtgcctgtgattgtggccaccatcagctttggcatgggcgtggacaaggccaacgtgcgctttgtggcccactggaacatcgccaagtccatggccggctactaccaggagagcggccgggccggcagagatggcaagcccagctggtgccgcctgtactacagcagaaatgaccgggaccaggtgtccttcctgatcaggaaggaggtggccaagctgcaggagaagaggggcaacaaggccagtgacaaggccaccatcatggcctttgatgccctggtgaccttctgtgaggagctgggccgctggggccggggccacggcaagagcctgcgggccgcctggtgcagccaggtggtgtccagacatgctgagctgtag

SEQ ID NO: 167393 - DNA, 1233 bp, synthetic construct
  misc_feature 1..1233: note = Description of Artificial Sequence: Synthetic coding sequence
  source 1..1233: mol_type = other DNA
atgagcagccaccacaccaccttcccctttgatcctgagcggcgggtgcgcagcaccctgaagaaggtgtttggatttgacagcttcaagacccccctgcaggagagcgccaccatggctgtggtgaagggcaacaaggatgtgtttgtgtgcatgcccaccggggccggcaagagcctgtgctaccagctgcctgccctgctggccaagggcatcaccatcgtggtgagccccctcatcgccctgatccaggaccaggtggaccacctgctgaccctgaaggtgcgggtgagcagcctgaacagcaagctgagcgcccaggagaggaaggagctgctggccgacctggagcgggagaagccccagaccaagatcctgtacatcaccccagagatggccgccagcagcagcttccagcccaccctgaacagcctggtgagccgccacctgctgagctacctggtggtggatgaggcccactgtgtgtcccagtggggccatgacttccggccagactacctgcggctgggcgccctgcggagccggctgggccacgccccctgtgtggccctgacagccacagccaccccccaggtgcaggaggatgtgtttgctgccctgcacctgaagaagcctgtggccatcttcaagaccccctgcttccgggccaacctcttctatgatgtgcagttcaaggagctgatcagtgacccctacggcaacctgaaggacttctgcctgaaggccctgggccaggaggccgacaagggcctgagcggctgcggcatcgtgtactgcaggacccgggaggcctgtgagcagctggccatcgagctgagctgccggggcgtgaatgccaaggcctaccacgccggcctgaaggccagcgagaggaccctggtgcagaatgactggatggaggagaaggtgcctgtgattgtggccaccatcagctttggcatgggcgtggacaaggccaacgtgcgctttgtggcccactggaacatcgccaagtccatggccggctactaccaggagagcggccgggccggcagagatggcaagcccagctggtgccgcctgtactacagcagaaatgaccgggaccaggtgtccttcctgatcaggaaggaggtggccaagctgcaggagaagaggggcaacaaggccagtgacaaggccaccatcatggcctttgatgccctggtgaccttctgtgaggagctgggctag

SEQ ID NO: 167394 - DNA, 3057 bp, synthetic construct
  misc_feature 1..3057: note = Description of Artificial Sequence: Synthetic coding sequence
  source 1..3057: mol_type = other DNA
atgagcagccaccacaccaccttcccctttgatcctgagcggcgggtgcgcagcaccctgaagaaggtgtttggatttgacagcttcaagacccccctgcaggagagcgccaccatggctgtggtgaagggcaacaaggatgtgtttgtgtgcatgcccaccggggccggcaagagcctgtgctaccagctgcctgccctgctggccaagggcatcaccatcgtggtgagccccctcatcgccctgatccaggaccaggtggaccacctgctgaccctgaaggtgcgggtgagcagcctgaacagcaagctgagcgcccaggagaggaaggagctgctggccgacctggagcgggagaagccccagaccaagatcctgtacatcaccccagagatggccgccagcagcagcttccagcccaccctgaacagcctggtgagccgccacctgctgagctacctggtggtggatgaggcccactgtgtgtcccagtggggccatgacttccggccagactacctgcggctgggcgccctgcggagccggctgggccacgccccctgtgtggccctgacagccacagccaccccccaggtgcaggaggatgtgtttgctgccctgcacctgaagaagcctgtggccatcttcaagaccccctgcttccgggccaacctcttctatgatgtgcagttcaaggagctgatcagtgacccctacggcaacctgaaggacttctgcctgaaggccctgggccaggaggccgacaagggcctgagcggctgcggcatcgtgtactgcaggacccgggaggcctgtgagcagctggccatcgagctgagctgccggggcgtgaatgccaaggcctaccacgccggcctgaaggccagcgagaggaccctggtgcagaatgactggatggaggagaaggtgcctgtgattgtggccaccatcagctttggcatgggcgtggacaaggccaacgtgcgctttgtggcccactggaacatcgccaagtccatggccggctactaccaggagagcggccgggccggcagagatggcaagcccagctggtgccgcctgtactacagcagaaatgaccgggaccaggtgtccttcctgatcaggaaggaggtggccaagctgcaggagaagaggggcaacaaggccagtgacaaggccaccatcatggcctttgatgccctggtgaccttctgtgaggagctgggctgcagacatgctgccatcgccaagtactttggagatgccctgcctgcctgtgccaagggctgtgaccactgccagaaccccacagctgtgagaagaaggctggaggccctggagaggagcagctcctggagcaagacctgcatcggccccagccagggcaatggatttgatcctgagctgtatgaaggaggcaggaagggctacggggacttcagccgctatgatgagggcagcggcggcagcggagatgagggcagagatgaggcccacaagcgggagtggaacctcttctaccagaagcagatgcagctgaggaagggcaaggaccccaagattgaggagtttgtgcccccagatgagaactgccccctgaaggaggccagcagccgccgcatcccccggctgactgtgaaggcccgggagcactgcctgcggctgctggaggaggccctgagcagcaaccggcagagcaccaggacagcagatgaggccgacctgcgggccaaggctgtggagctggagcacgagaccttcagaaatgccaaggtggccaacctgtacaaggcctctgtgctgaagaaggtggccgacatccaccgggccagcaaggatggccagccctatgacatgggcggcagcgccaagagctgcagcgcccaggccgagcccccagagcccaatgaatatgacatccccccagccagccacgtgtacagcctgaagcccaagagggtgggcgccggcttccccaagggcagctgccccttccagacagccacagagctgatggagaccacccgcatccgggagcaggccccccagcctgagcggggcggggagcacgagccccccagccggccctgtggcctgctggatgaagatggcagcgagcccctgcccggccccagaggagaggtgcctgggggcagcgcccactatggaggccccagccctgagaagaaggccaagagcagcagcggcggcagcagcctggccaagggccgggccagcaagaagcagcagctgctggccacagctgcccacaaggacagccagagcatcgcccgcttcttctgccggcgggtggagagccctgccctgctggccagcgcccctgaggccgagggcgcctgccccagctgtgaaggagtgcagggcccccccatggcccctgagaagtacacaggagaggaggatggagctgggggccacagccctgccccaccccagacagaagaatgtctgcgggagcggcccagcacctgccccccccgggaccagggcaccccagaggtgcagcccaccccagccaaggacacctggaagggcaagaggcccaggagccagcaggagaaccctgagagccagccccagaagaggccccggcccagcgccaagcccagcgtggtggccgaggtgaagggctctgtgtctgccagcgagcagggcaccctgaaccccacagcccaggaccccttccagctgagcgcccctggggtgtccctgaaggaggccgccaacgtggtggtgaagtgcctgacccccttctacaaggagggcaagtttgccagcaaggagctgttcaagggctttgcccggcacctgagccacctgctgacccagaagaccagccctggccgctctgtgaaggaggaggcccagaacctgatccgccacttcttccacggccgggcccgctgtgagagcggcccccacggctgggtgttctgggacacctgccggggccagaaggtggagggcggcggcgctgctgctggccggcggggcaggaagagcggccccagccccagcagcaagtctggatag

SEQ ID NO: 167395 - DNA, 1761 bp, synthetic construct
  misc_feature 1..1761: note = Description of Artificial Sequence: Synthetic coding sequence
  source 1..1761: mol_type = other DNA
atgttcctggtgcgctgcagacatgctgccatcgccaagtactttggagatgccctgcctgcctgtgccaagggctgtgaccactgccagaaccccacagctgtgagaagaaggctggaggccctggagaggagcagctcctggagcaagacctgcatcggccccagccagggcaatggatttgatcctgagctgtatgagggcggcaggaagggctatggagacttcagccgctatgatgagggcagcggcggcagcggagatgagggcagagatgaggcccacaagcgggagtggaacctcttctaccagaagcagatgcagctgaggaagggcaaggaccccaagattgaggagtttgtgcccccagatgagaactgccccctgaaggaggccagcagccgccgcatcccccggctgactgtgaaggcccgggagcactgcctgcggctgctggaggaggccctgagcagcaaccggcagagcaccaggacagcagatgaagctgacctgcgggccaaggctgtggagctggagcacgagaccttcagaaatgccaaggtggccaacctgtacaaggcctctgtgctgaagaaggtggccgacatccaccgggccagcaaggatggccagccctatgacatgggcggcagcgccaagagctgcagcgcccaggccgagcccccagagcccaatgaatatgacatccccccagccagccacgtgtacagcctgaagcccaagagggtgggcgccggcttccccaagggcagctgccccttccagacagccacagagctgatggagaccacccgcatccgggagcaggccccccagcctgagcggggcggggagcacgagccccccagccggccctgtggcctgctggatgaagatggcagcgagcccctgcccggccccagaggagaggtgcctgggggcagcgcccactacggcggccccagccctgagaagaaggccaagagcagcagcggcggcagcagcctggccaagggccgggccagcaagaagcagcagctgctggccacagctgcccacaaggacagccagagcatcgcccgcttcttctgcagaagagtggagagccctgccctgctggccagcgcccctgaggccgagggcgcctgccccagctgtgagggcgtgcagggcccccccatggcccctgagaagtacaccggggaggaggatggagctgggggccacagccctgccccaccccagacagaggagtgcctgcgggagcggcccagcacctgccccccccgggaccagggcaccccagaggtgcagcccaccccagccaaggacacctggaagggcaagaggcccaggagccagcaggagaaccctgagagccagccccagaagaggccccggcccagcgccaagcccagcgtggtggccgaggtgaagggctctgtgtctgccagcgagcagggcaccctgaaccccacagcccaggaccccttccagctgagcgcccctggggtgtccctgaaggaggccgccaacgtggtggtgaagtgcctgacccccttctacaaggagggcaagtttgccagcaaggagctgttcaagggctttgcccggcacctgagccacctgctgacccagaagaccagccctggccgctctgtgaaggaggaggcccagaacctgatccgccacttcttccacggccgggcccgctgtgagagcgaggccgactggcacggcctgtgtggcccccagaggtag

SEQ ID NO: 167396 - DNA, 1200 bp, synthetic construct; identical to SEQ ID NO: 157323
  misc_feature 1..1200: note = Description of Artificial Sequence: Synthetic coding sequence
  source 1..1200: mol_type = other DNA

SEQ ID NO: 167397 - DNA, 528 bp, synthetic construct
  misc_feature 1..528: note = Description of Artificial Sequence: Synthetic coding sequence
  source 1..528: mol_type = other DNA
atgctgccccccatggccctgcccagcgtgtcctggatgctgctgagctgcctgatcctgctgtgccaggtgcagggcgaggagacccagaaggagctgcccagcccccgcatcagctgccccaagggcagcaaggcctacggcagcccctgctacgccctcttcctgagccccaagtcctggatggatgctgacctggcctgccagaagaggccttctgggaagctggtgtctgtgctgtctggagctgagggcagctttgtgagcagcctggtgcgcagcatcagcaacagctacagctacatctggattggcctgcatgaccccacccagggcagcgagccagatggagatggctgggagtggagcagcacagatgtgatgaactactttgcctgggagaagaaccccagcaccatcctgaaccctggccactgcggcagcctgagccgcagcacaggcttcctgaagtggaaggactacaactgtgatgccaagctgccctacgtgtgcaagttcaaggactag

SEQ ID NO: 167398 - DNA, 528 bp, synthetic construct; identical to SEQ ID NO: 167397
  misc_feature 1..528: note = Description of Artificial Sequence: Synthetic coding sequence
  source 1..528: mol_type = other DNA

SEQ ID NO: 167399 - DNA, 390 bp, synthetic construct
  misc_feature 1..390: note = Description of Artificial Sequence: Synthetic coding sequence
  source 1..390: mol_type = other DNA
atgctgccccccatggccctgcccagcgtgtcctggatgctgctgagctgcctgatcctgctgtgccaggtgcagggcgaggagacccagaaggagctgcccagcccccgcatcagctgccccaagggcagcaaggcctacggcagcccctgctacgccctcttcctgagccccaagtcctggatggatgctgatggcagcgagccagatggagatggctgggagtggagcagcacagatgtgatgaactactttgcctgggagaagaaccccagcaccatcctgaaccctggccactgcggcagcctgagccgcagcacaggcttcctgaagtggaaggactacaactgtgatgccaagctgccctacgtgtgcaagttcaaggactag

SEQ ID NO: 167400 - DNA, 477 bp, synthetic construct
  misc_feature 1..477: note = Description of Artificial Sequence: Synthetic coding sequence
  source 1..477: mol_type = other DNA
atggccagccgctccatgaggctgctgctgctgctgagctgcctggccaagacaggagtgctgggggacatcatcatgaggcccagctgtgcccctggctggttctaccacaagagcaactgctacggctacttcaggaagctgaggaactggagcgatgctgagctggagtgccagagctatggaaatggagcccacctggccagcatcctgagcctgaaggaggccagcaccatcgccgagtacatcagcggctaccagaggagccagcccatctggattggcctgcatgacccccagaagaggcagcagtggcagtggattgatggagccatgtacctgtaccgctcctggagcggcaagtccatgggcggcaacaagcactgtgccgagatgagcagcaacaacaacttcctgacctggagcagcaatgaatgcaacaagaggcagcacttcctgtgcaagtaccggccctag

SEQ ID NO: 167401 - DNA, 477 bp, synthetic construct; identical to SEQ ID NO: 167400
  misc_feature 1..477: note = Description of Artificial Sequence: Synthetic coding sequence
  source 1..477: mol_type = other DNA

SEQ ID NO: 167402 - DNA, 405 bp, synthetic construct
  misc_feature 1..405: note = Description of Artificial Sequence: Synthetic coding sequence
  source 1..405: mol_type = other DNA
atggccagccgctccatgaggctgctgctgctgctgagctgcctggccaagacaggagtgctgggggacatcatcatgaggcccagctgtgcccctggctggttctaccacaagagcaactgctacggctacttcaggaagctgaggaactggagcgatgctgaggtgaggaacctgctgcctgcctggccaggcctgagccgggccaaggaccagcctgagccccagatcagctttgattctggcagctctgtgctgcccggccactatgaggagaagcccctgtggctggtgaagtggagggaggagggctgtgtgttcaacagcttcaacagcgtgtccattgctgaggccggggctgtgtgccagaccctggatggcctgcaggcccacacagacacctag

SEQ ID NO: 167403 - DNA, 375 bp, synthetic construct
  misc_feature 1..375: note = Description of Artificial Sequence: Synthetic coding sequence
  source 1..375: mol_type = other DNA
atggccagccgctccatgaggctgctgctgctgctgagctgcctggccaagacaggagtgctgggggacatcatcatgaggcccagctgtgcccctggctggttctaccacaagagcaactgctacggctacttcaggaagctgaggaactggagcgatgctgagctggagtgccagagctatggaaatggagcccacctggccagcatcctgagcctgaaggaggccagcaccatcgccgagtacatcagcggctaccagaggagccagcccatctggattggcctgcatgacccccagaagcagcccctgaacagctgcctcttcttcctgtggccctgggagggcctgcctgtggagagcctgctgggctag

SEQ ID NO: 167404 - DNA, 900 bp, synthetic construct
  misc_feature 1..900: note = Description of Artificial Sequence: Synthetic coding sequence
  source 1..900: mol_type = other DNA
atgagcagcatcaagattgaatgtgtgctgcctgagaactgccgctgtggggagagccctgtgtgggaggaggtgagcaacagcctgctgtttgtggacatcccagccaagaaggtgtgccgctgggacagcttcaccaagcaggtgcagagggtgaccatggatgcccctgtgtcctctgtggccctgcggcagagcggcggctacgtggccaccatcggcaccaagttctgtgccctgaactggaaggagcagagcgctgtggtgctggccaccgtggacaatgacaagaagaacaaccgcttcaatgatggcaaggtggaccctgctggccgctactttgctggcaccatggccgaggagacagccccagctgtgctggagcggcaccagggcgccctgtacagcctcttcccagaccaccacgtgaagaagtactttgaccaggtggacatcagcaatggcctggactggagcctggaccacaagatcttctactacatcgacagcctgagctacagcgtggatgcctttgattatgacctgcagacaggccagatcagcaacagaagatctgtgtacaagctggagaaggaggagcagatcccagatggcatgtgcattgatgctgagggcaagctgtgggtggcctgctacaacggcggccgggtcatccggctggaccctgtgacaggcaagaggctgcagacagtgaagctgcctgtggacaagaccaccagctgctgcttcggcggcaagaactacagcgagatgtatgtgacctgtgccagagatggcatggaccctgagggcctgctgcggcagcctgaggccggcggcatcttcaagatcaccggcctgggcgtgaagggcatcgccccctacagctatgccggctag

SEQ ID NO: 167405 - DNA, 900 bp, synthetic construct; identical to SEQ ID NO: 167404
  misc_feature 1..900: note = Description of Artificial Sequence: Synthetic coding sequence
  source 1..900: mol_type = other DNA

SEQ ID NO: 167406 - DNA, 900 bp, synthetic construct; identical to SEQ ID NO: 167404
  misc_feature 1..900: note = Description of Artificial Sequence: Synthetic coding sequence
  source 1..900: mol_type = other DNA

SEQ ID NO: 167407 - DNA, 684 bp, synthetic construct
  misc_feature 1..684: note = Description of Artificial Sequence: Synthetic coding sequence
  source 1..684: mol_type = other DNA
atgagcagcatcaagattgaatgtgtgctgcctgagaactgccgctgtggggagagccctgtgtgggaggaggtgagcaacagcctgctgtttgtggacatcccagccaagaaggtgtgccgctgggacagcttcaccaagcaggtgcagagggtgaccatggatgcccctgtgtcctctgtggccctgcggcagagcggcggctacgtggccaccatcggcaccaagttctgtgccctgaactggaaggagcagagcgctgtggtgctggccaccgtggacaatgacaagaagaacaaccgcttcaatgatggcaaggtggaccctgctggccgctactttgctgccaacagaagatctgtgtacaagctggagaaggaggagcagatcccagatggcatgtgcattgatgctgagggcaagctgtgggtggcctgctacaacggcggccgggtcatccggctggaccctgtgacaggcaagaggctgcagacagtgaagctgcctgtggacaagaccaccagctgctgcttcggcggcaagaactacagcgagatgtatgtgacctgtgccagagatggcatggaccctgagggcctgctgcggcagcctgaggccggcggcatcttcaagatcaccggcctgggcgtgaagggcatcgccccctacagctatgccggctag

SEQ ID NO: 167408 - DNA, 3876 bp, synthetic construct
  misc_feature 1..3876: note = Description of Artificial Sequence: Synthetic coding sequence
  source 1..3876: mol_type = other DNA
atgagcagcgctgtgggcccccggggcccccggccccccaccgtgcccccacccatgcaggagctgcctgacctgagccacctgacagaggaggagaggaacatcatcatggctgtgatggaccggcagaaggaggaggaggagaaggaggaggccatgctgaagtgtgtggtgcgggacatggccaagccagctgcctgcaagaccccaagaaatgctgagaaccagccccaccagcccagcccccggctgcaccagcagtttgagagctacaaggagcaggtgaggaagatcggggaggaggcccggcgctaccagggcgagcacaaggatgatgcccccacctgtggcatctgccacaagaccaagtttgctgatggctgcggccacctgtgcagctactgcaggaccaagttctgtgcccgctgtggcggccgggtgtccctgcggagcaacaatgaagacaagtatgtgatgtgggtgtgcaacctgtgcaggaagcagcaggagatcctgaccaagagcggggcctggttcttcggcagcggcccccagcagaccagccaggacggcaccctgagtgacacagccaccggggccggcagcgaggtgccccgggagaagaaggcccggctgcaggagaggagccgcagccagacccccctgagcacagctgctgccagcagccaggatgctgccccacccagcgcccccccagacaggagcaaaggagctgagcccagccagcaggccctgggccctgagcagaagcaggccagcagccgcagccgctctgagcccccccgggagaggaagaagaccccaggcctgtctgagcagaatggaaaaggagccctgaagtctgagaggaagagggtgcccaagaccagcgcccagcctgtggagggcgctgtggaggagcgggagaggaaggagcggcgggagagccggcggctggagaagggccgcagccaggactacccagacaccccagagaagagagatgagggcaaggccgcagatgaggagaagcagaggaaggaggaggactaccagacccgctacagaagtgaccccaacctggcccgctaccctgtgaagcccccacctgaggagcagcagatgaggatgcacgcccgggtgtcccgggcccggcatgagcggcggcacagtgatgtggccctgcccaggacagaggccggggccgccctgcctgagggcaaggccggcaagagggccccagctgctgcccgggccagccccccagacagcccccgggcctacagcgctgagaggacagctgagacccgggcccctggggccaagcagctgaccaaccacagccccccagcccccaggcatggccctgtgcctgctgaggcccctgagctgaaggcccaggagcccctgaggaagcagagccggctggaccccagcagcgctgtgctgatgaggaaggccaagcgggagaaggtggagaccatgctgagaaatgacagcctgagcagtgaccagagcgagagcgtgcggcccagcccccccaagccccacaggagcaagaggggcggcaagaagaggcagatgtctgtgagcagcagcgaggaggagggcgtgtccaccccagagtacaccagctgtgaagatgtggagctggagagcgagagcgtgtctgagaagggggacctggactactactggctggaccctgccacctggcacagccgggagaccagccccatcagcagccaccctgtgacctggcagcccagcaaggagggggaccggctgattggccgggtcatcctgaacaagaggaccaccatgcccaaggacagcggggccctgctgggcctgaaggtggtgggcggcaagatgacagacctgggccgcctgggcgccttcatcaccaaggtgaagaagggcagcctggctgatgtggtgggccacctgcgggctggagatgaggtgctggagtggaatggcaagcccctgcccggggccaccaatgaggaggtgtacaacatcatcctggagagcaagtctgagccccaggtggagatcatcgtgtcccggcccatcggggacatcccccgcatccctgagagcagccacccccccctggagagcagcagcagcagctttgagagccagaagatggagcggcccagcatcagcgtcatcagccccaccagccctggggccctgaaggatgccccccaggtgctgcccggccagctgtctgtgaagctgtggtatgacaaggtgggccaccagctgattgtgaatgtgctgcaggccacagacctgcctgcccgggtggatggccggcccaggaacccctacgtgaagatgtacttcctgcctgacagaagtgacaagagcaagaggaggaccaagacagtgaagaagatcctggagcccaagtggaaccagacctttgtgtacagccacgtgcaccggcgggacttccgggagaggatgctggagatcaccgtgtgggaccagccccgggtgcaggaggaggagagcgagttcctgggggagatcctgattgagctggagacagccctgctggatgatgagccccactggtacaagctgcagacccatgatgagagcagcctgcccctgccccagcccagccccttcatgccccggcggcacatccacggggagagcagcagcaagaagctgcagaggagccagaggatcagtgacagcgacatcagtgactatgaggtggatgatggcatcggcgtggtgcccccaggctaccgcagcagcgcccgggagagcaagagcaccaccctgactgtgcctgagcagcagaggaccacccaccacaggagccgctctgtgagcccccacagaggaaatgaccagggcaagcccaggagccggctgcccaacgtgcccctgcagaggagcctggatgagatccaccccacccggcgcagccgcagccccaccaggcaccatgatgccagccgcagccctgtggaccacaggaccagagatgtggacagccagtacctgtctgagcaggacaggatgcaccggcagaggagccccacccagagccccccagctgacaccagcttcagcagcagaagaggccggcagctgccccaggtgcctgtgcgcagcggcagcattgagcaggagagcggccacaagaagctgaagagcaccatccagaggagcacagaaacaggcatggctgctgagatgaggaagatggtgcggcagcccagccgggagagcacagatggcagcatcaacagctacagcagcgagggcaacctgatcttccctggggtgcggctgggcgctgacagccagttcagtgacttcctggatggcctgggccctgcccagctggtgggccggcagaccctggccaccccagccatgggagacatccagatcggcatggaggacaagaagggccagctggaggtggaggtgatccgggcccggagcctgacccagaagccaggcagcaagagcaccccagccccctacgtgaaggtgtacctgctggagaatggagcctgcatcgccaagaagaagacccgcatcgccaggaagaccctggaccccctgtaccagcagagcctggtgtttgatgagagcccccagggcaaggtgctgcaggtgattgtgtggggagactatggccgcatggaccacaagtgcttcatgggcgtggcccagatcctgctggaggagctggacctgagctccatggtgattggctggtacaagctgtttcctcccagcagcctggtggaccccaccctgacccccctgacccggcgggccagccagagcagcctggagagcagcacaggccccccctgcatccgctcctag

SEQ ID NO: 167409 - DNA, 4428 bp, synthetic construct
  misc_feature 1..4428: note = Description of Artificial Sequence: Synthetic coding sequence
  source 1..4428: mol_type = other DNA
atgagcagcgctgtgggcccccggggcccccggccccccaccgtgcccccacccatgcaggagctgcctgacctgagccacctgacagaggaggagaggaacatcatcatggctgtgatggaccggcagaaggaggaggaggagaaggaggaggccatgctgaagtgtgtggtgcgggacatggccaagccagctgcctgcaagaccccaagaaatgctgagaaccagccccaccagcccagcccccggctgcaccagcagtttgagagctacaaggagcaggtgaggaagatcggggaggaggcccggcgctaccagggcgagcacaaggatgatgcccccacctgtggcatctgccacaagaccaagtttgctgatggctgcggccacctgtgcagctactgcaggaccaagttctgtgcccgctgtggcggccgggtgtccctgcggagcaacaatgaagacatctgtgtgatgtgggtgtgcaacctgtgcaggaagcagcaggagatcctgaccaagagcggggcctggttcttcggcagcggcccccagcagaccagccaggacggcaccctgagtgacacagccaccggggccggcagcgaggtgccccgggagaagaaggcccggctgcaggagaggagccgcagccagacccccctgagcacagctgctgccagcagccaggatgctgccccacccagcgcccccccagacaggagcaaaggagctgagcccagccagcaggccctgggccctgagcagaagcaggccagcagccgcagccgctctgagcccccccgggagaggaagaagaccccaggcctgtctgagcagaatggaaaaggagccctgaagtctgagaggaagagggtgcccaagaccagcgcccagcctgtggagggcgctgtggaggagcgggagaggaaggagcggcgggagagccggcggctggagaagggccgcagccaggactacccagacaccccagagaagagagatgagggcaaggccgcagatgaggagaagcagaggaaggaggaggactaccagacccgctacagaagtgaccccaacctggcccgctaccctgtgaagcccccacctgaggagcagcagatgaggatgcacgcccgggtgtcccgggcccggcatgagcggcggcacagtgatgtggccctgcccaggacagaggccggggccgccctgcctgagggcaaggccggcaagagggccccagctgctgcccgggccagccccccagacagcccccgggcctacagcgctgagaggacagctgagacccgggcccctggggccaagcagctgaccaaccacagccccccagcccccaggcatggccctgtgcctgctgaggcccctgagctgaaggcccaggagcccctgaggaagcagagccggctggaccccagcagcgctgtgctgatgaggaaggccaagcgggagaaggtggagaccatgctgagaaatgacagcctgagcagtgaccagagcgagagcgtgcggcccagcccccccaagccccacaggagcaagaggggcggcaagaagaggcagatgtctgtgagcagcagcgaggaggagggcgtgtccaccccagagtacaccagctgtgaagatgtggagctggagagcgagagcgtgtctgagaagggggacctggactactactggctggaccctgccacctggcacagccgggagaccagccccatcagcagccaccctgtgacctggcagcccagcaaggagggggaccggctgattggccgggtcatcctgaacaagaggaccaccatgcccaaggacagcggggccctgctgggcctgaaggtggtgggcggcaagatgacagacctgggccgcctgggcgccttcatcaccaaggtgaagaagggcagcctggctgatgtggtgggccacctgcgggctggagatgaggtgctggagtggaatggcaagcccctgcccggggccaccaatgaggaggtgtacaacatcatcctggagagcaagtctgagccccaggtggagatcatcgtgtcccggcccatcggggacatcccccgcatccctgagagcagccacccccccctggagagcagcagcagcagctttgagagccagaagatggagcggcccagcatcagcgtcatcagccccaccagccctggggccctgaaggatgccccccaggtgctgcccggccagctgtctgtgaagctgtggtatgacaaggtgggccaccagctgattgtgaatgtgctgcaggccacagacctgcctgcccgggtggatggccggcccaggaacccctacgtgaagatgtacttcctgcctgacagaagtgacaagagcaagaggaggaccaagacagtgaagaagatcctggagcccaagtggaaccagacctttgtgtacagccacgtgcaccggcgggacttccgggagaggatgctggagatcaccgtgtgggaccagccccgggtgcaggaggaggagagcgagttcctgggggagatcctgattgagctggagacagccctgctggatgatgagccccactggtacaagctgcagacccatgatgagagcagcctgcccctgccccagcccagccccttcatgccccggcggcacatccacggggagagcagcagcaagaagctgcagaggagccagaggatcagtgacagcgacatcagtgactatgaggtggatgatggcatcggcgtggtgcccccaggctaccgcagcagcgcccgggagagcaagagcaccaccctgactgtgcctgagcagcagaggaccacccaccacaggagccgctctgtgagcccccacagaggaaatgaccagggcaagcccaggagccggctgcccaacgtgcccctgcagaggagcctggatgagatccaccccacccggcgcagccgcagccccaccaggcaccatgatgccagccgcagccctgtggaccacaggaccagagatgtggacagccagtacctgtctgagcaggacagcgagctgctgatgctgccccgggccaagaggggccgctctgctgagtgcctgcacaccaccaggatgcaccggcagaggagccccacccagagccccccagctgacaccagcttcagcagccggcggggccggcagctgccccaggtgcctgtgcgcagcggcagcattgagcaggccagcctggtggtggaggagaggacccggcagatgaagatgaaggtgcaccgcttcaagcagaccaccggcagcggcagcagccaggagctggaccgggagcagtacagcaagtacaacatccacaaggaccagtaccgcagctgtgacaacgtgtctgccaagagcagtgacagtgatgtgtctgatgtgtctgccatcagcaggaccagcagcgccagccggctgagcagcaccagcttcatgtctgagcagagcgagcggccccggggccgcatccggaggatgggcaccagcggccgcagcatcatgaagagcacctctgtgtctggagagatgtacaccctggagcacaatgatggcagccagagcgacacagctgtgggcaccgtgggcgctgggggcaagaagagaagaagcagcctgagcgccaaggtggtggccatcgtgtccagaagaagccgcagcaccagccagctgagccagacagagagcggccacaagaagctgaagagcaccatccagaggagcacagaaacaggcatggctgctgagatgaggaagatggtgcggcagcccagccgggagagcacagatggcagcatcaacagctacagcagcgagggcaacctgatcttccctggggtgcggctgggcgctgacagccagttcagtgacttcctggatggcctgggccctgcccagctggtgggccggcagaccctggccaccccagccatgggagacatccagatcggcatggaggacaagaagggccagctggaggtggaggtgatccgggcccggagcctgacccagaagccaggcagcaagagcaccccagccccctacgtgaaggtgtacctgctggagaatggagcctgcatcgccaagaagaagacccgcatcgccaggaagaccctggaccccctgtaccagcagagcctggtgtttgatgagagcccccagggcaaggtgctgcaggtgattgtgtggggagactatggccgcatggaccacaagtgcttcatgggcgtggcccagatcctgctggaggagctggacctgagctccatggtgattggctggtacaagctgtttcctcccagcagcctggtggaccccaccctgacccccctgacccggcgggccagccagagcagcctggagagcagcacaggccccccctgcatccgctcctag

SEQ ID NO: 167410 - DNA, 4116 bp, synthetic construct
  misc_feature 1..4116: note = Description of Artificial Sequence: Synthetic coding sequence
  source 1..4116: mol_type = other DNA
atgagcagcgctgtgggcccccggggcccccggccccccaccgtgcccccacccatgcaggagctgcctgacctgagccacctgacagaggaggagaggaacatcatcatggctgtgatggaccggcagaaggaggaggaggagaaggaggaggccatgctgaagtgtgtggtgcgggacatggccaagccagctgcctgcaagaccccaagaaatgctgagaaccagccccaccagcccagcccccggctgcaccagcagtttgagagctacaaggagcaggtgaggaagatcggggaggaggcccggcgctaccagggcgagcacaaggatgatgcccccacctgtggcatctgccacaagaccaagtttgctgatggctgcggccacctgtgcagctactgcaggaccaagttctgtgcccgctgtggcggccgggtgtccctgcggagcaacaatgaaaacaagatcgtgatgtgggtgtgcaacctgtgcaggaagcagcaggagatcctgaccaagagcggggcctggttcttcggcagcggcccccagcagaccagccaggacggcaccctgagtgacacagccaccggggccggcagcgaggtgccccgggagaagaaggcccggctgcaggagaggagccgcagccagacccccctgagcacagctgctgccagcagccaggatgctgccccacccagcgcccccccagacaggagcaaaggagctgagcccagccagcaggccctgggccctgagcagaagcaggccagcagccgcagccgctctgagcccccccgggagaggaagaagaccccaggcctgtctgagcagaatggaaaaggagccctgaagtctgagaggaagagggtgcccaagaccagcgcccagcctgtggagggcgctgtggaggagcgggagaggaaggagcggcgggagagccggcggctggagaagggccgcagccaggactacccagacaccccagagaagagagatgagggcaaggccgcagatgaggagaagcagaggaaggaggaggactaccagacccgctacagaagtgaccccaacctggcccgctaccctgtgaagcccccacctgaggagcagcagatgaggatgcacgcccgggtgtcccgggcccggcatgagcggcggcacagtgatgtggccctgcccaggacagaggccggggccgccctgcctgagggcaaggccggcaagagggccccagctgctgcccgggccagccccccagacagcccccgggcctacagcgctgagaggacagctgagacccgggcccctggggccaagcagctgaccaaccacagccccccagcccccaggcatggccctgtgcctgctgaggcccctgagctgaaggcccaggagcccctgaggaagcagagccggctggaccccagcagcgctgtgctgatgaggaaggccaagcgggagaaggtggagaccatgctgagaaatgacagcctgagcagtgaccagagcgagagcgtgcggcccagcccccccaagccccacaggagcaagaggggcggcaagaagaggcagatgtctgtgagcagcagcgaggaggagggcgtgtccaccccagagtacaccagctgtgaagatgtggagctggagagcgagagcgtgtctgagaagggggacctggactactactggctggaccctgccacctggcacagccgggagaccagccccatcagcagccaccctgtgacctggcagcccagcaaggagggggaccggctgattggccgggtcatcctgaacaagaggaccaccatgcccaaggacagcggggccctgctgggcctgaaggtggtgggcggcaagatgacagacctgggccgcctgggcgccttcatcaccaaggtgaagaagggcagcctggctgatgtggtgggccacctgcgggctggagatgaggtgctggagtggaatggcaagcccctgcccggggccaccaatgaggaggtgtacaacatcatcctggagagcaagtctgagccccaggtggagatcatcgtgtcccggcccatcggggacatcccccgcatccctgagagcagccacccccccctggagagcagcagcagcagctttgagagccagaagatggagcggcccagcatcagcgtcatcagccccaccagccctggggccctgaaggatgccccccaggtgctgcccggccagctgtctgtgaagctgtggtatgacaaggtgggccaccagctgattgtgaatgtgctgcaggccacagacctgcctgcccgggtggatggccggcccaggaacccctacgtgaagatgtacttcctgcctgacagaagtgacaagagcaagaggaggaccaagacagtgaagaagatcctggagcccaagtggaaccagacctttgtgtacagccacgtgcaccggcgggacttccgggagaggatgctggagatcaccgtgtgggaccagccccgggtgcaggaggaggagagcgagttcctgggggagatcctgattgagctggagacagccctgctggatgatgagccccactggtacaagctgcagacccatgatgagagcagcctgcccctgccccagcccagccccttcatgccccggcggcacatccacggggagagcagcagcaagaagctgcagaggagccagaggatcagtgacagcgacatcagtgactatgaggtggatgatggcatcggcgtggtgccccctgtgggctaccgcagcagcgcccgggagagcaagagcaccaccctgactgtgcctgagcagcagaggaccacccaccacaggagccgctctgtgagcccccacagaggaaatgaccagggcaagcccaggagccggctgcccaacgtgcccctgcagaggagcctggatgagatccaccccaccaggaggagccgcagccccaccaggcaccatgatgccagccgcagccctgtggaccacaggaccagagatgtggacagccagtacctgtctgagcaggacagcgagctgctgatgctgccccgggccaagaggggccgctctgcagaatgtctgcacaccaccagcgagctgcagcccttcctggaccgggcccggagcgccagcaccaactgcctgcggccagacaccagcctgcacagccctgagcgggagcggggccgctggagccccagcctggacagaagaagaccacccagcccccgcatccagatccagcacgccagcccagaaaatgacaggatgcaccggcagaggagccccacccagagccccccagctgacaccagcttcagcagcagaagaggccggcagctgccccaggtgcctgtgcgcagcggcagcattgagcaggagagcggccacaagaagctgaagagcaccatccagaggagcacagaaacaggcatggctgctgagatgaggaagatggtgcggcagcccagccgggagagcacagatggcagcatcaacagctacagcagcgagggcaacctgatcttccctggggtgcggctgggcgctgacagccagttcagtgacttcctggatggcctgggccctgcccagctggtgggccggcagaccctggccaccccagccatgggagacatccagatcggcatggaggacaagaagggccagctggaggtggaggtgatccgggcccggagcctgacccagaagccaggcagcaagagcaccccagccccctacgtgaaggtgtacctgctggagaatggagcctgcatcgccaagaagaagacccgcatcgccaggaagaccctggaccccctgtaccagcagagcctggtgtttgatgagagcccccagggcaaggtgctgcaggtgattgtgtggggagactatggccgcatggaccacaagtgcttcatgggcgtggcccagatcctgctggaggagctggacctgagctccatggtgattggctggtacaagctgtttcctcccagcagcctggtggaccccaccctgacccccctgacccggcgggccagccagagcagcctggagagcagcacaggccccccctgcatccgctcctag

SEQ ID NO: 167411 - DNA, 4626 bp, synthetic construct
  misc_feature 1..4626: note = Description of Artificial Sequence: Synthetic coding sequence
  source 1..4626: mol_type = other DNA
atgagcagcgctgtgggcccccggggcccccggccccccaccgtgcccccacccatgcaggagctgcctgacctgagccacctgacagaggaggagaggaacatcatcatggctgtgatggaccggcagaaggaggaggaggagaaggaggaggccatgctgaagtgtgtggtgcgggacatggccaagccagctgcctgcaagaccccaagaaatgctgagaaccagccccaccagcccagcccccggctgcaccagcagtttgagagctacaaggagcaggtgaggaagatcggggaggaggcccggcgctaccagggcgagcacaaggatgatgcccccacctgtggcatctgccacaagaccaagtttgctgatggctgcggccacctgtgcagctactgcaggaccaagttctgtgcccgctgtggcggccgggtgtccctgcggagcaacaatgaagacaagtatgtgatgtgggtgtgcaacctgtgcaggaagcagcaggagatcctgaccaagagcggggcctggttcttcggcagcggcccccagcagaccagccaggacggcaccctgagtgacacagccaccggggccggcagcgaggtgccccgggagaagaaggcccggctgcaggagaggagccgcagccagacccccctgagcacagctgctgccagcagccaggatgctgccccacccagcgcccccccagacaggagcaaaggagctgagcccagccagcaggccctgggccctgagcagaagcaggccagcagccgcagccgctctgagcccccccgggagaggaagaagaccccaggcctgtctgagcagaatggaaaaggagccctgaagtctgagaggaagagggtgcccaagaccagcgcccagcctgtggagggcgctgtggaggagcgggagaggaaggagcggcgggagagccggcggctggagaagggccgcagccaggactacccagacaccccagagaagagagatgagggcaaggccgcagatgaggagaagcagaggaaggaggaggactaccagacccgctacagaagtgaccccaacctggcccgctaccctgtgaagcccccacctgaggagcagcagatgaggatgcacgcccgggtgtcccgggcccggcatgagcggcggcacagtgatgtggccctgcccaggacagaggccggggccgccctgcctgagggcaaggccggcaagagggccccagctgctgcccgggccagccccccagacagcccccgggcctacagcgctgagaggacagctgagacccgggcccctggggccaagcagctgaccaaccacagccccccagcccccaggcatggccctgtgcctgctgaggcccctgagctgaaggcccaggagcccctgaggaagcagagccggctggaccccagcagcgctgtgctgatgaggaaggccaagcgggagaaggtggagaccatgctgagaaatgacagcctgagcagtgaccagagcgagagcgtgcggcccagcccccccaagccccacaggagcaagaggggcggcaagaagaggcagatgtctgtgagcagcagcgaggaggagggcgtgtccaccccagagtacaccagctgtgaagatgtggagctggagagcgagagcgtgtctgagaagggggacctggactactactggctggaccctgccacctggcacagccgggagaccagccccatcagcagccaccctgtgacctggcagcccagcaaggagggggaccggctgattggccgggtcatcctgaacaagaggaccaccatgcccaaggacagcggggccctgctgggcctgaaggtggtgggcggcaagatgacagacctgggccgcctgggcgccttcatcaccaaggtgaagaagggcagcctggctgatgtggtgggccacctgcgggctggagatgaggtgctggagtggaatggcaagcccctgcccggggccaccaatgaggaggtgtacaacatcatcctggagagcaagtctgagccccaggtggagatcatcgtgtcccggcccatcggggacatcccccgcatccctgagagcagccacccccccctggagagcagcagcagcagctttgagagccagaagatggagcggcccagcatcagcgtcatcagccccaccagccctggggccctgaaggatgccccccaggtgctgcccggccagctgtctgtgaagctgtggtatgacaaggtgggccaccagctgattgtgaatgtgctgcaggccacagacctgcctgcccgggtggatggccggcccaggaacccctacgtgaagatgtacttcctgcctgacagaagtgacaagagcaagaggaggaccaagacagtgaagaagatcctggagcccaagtggaaccagacctttgtgtacagccacgtgcaccggcgggacttccgggagaggatgctggagatcaccgtgtgggaccagccccgggtgcaggaggaggagagcgagttcctgggggagatcctgattgagctggagacagccctgctggatgatgagccccactggtacaagctgcagacccatgatgagagcagcctgcccctgccccagcccagccccttcatgccccggcggcacatccacggggagagcagcagcaagaagctgcagaggagccagaggatcagtgacagcgacatcagtgactatgaggtggatgatggcatcggcgtggtgccccctgtgggctaccgcagcagcgcccgggagagcaagagcaccaccctgactgtgcctgagcagcagaggaccacccaccacaggagccgctctgtgagcccccacagaggaaatgaccagggcaagcccaggagccggctgcccaacgtgcccctgcagaggagcctggatgagatccaccccaccaggaggagccgcagccccaccaggcaccatgatgccagccgcagccctgtggaccacaggaccagagatgtggacagccagtacctgtctgagcaggacagcgagctgctgatgctgccccgggccaagaggggccgctctgcagaatgtctgcacaccaccaggcacctggtgcgccactacaagaccctgccccccaagatgcccctgctgcagagcagcagccactggaacatctacagcgagctgcagcccttcctggaccgggcccggagcgccagcaccaactgcctgcggccagacaccagcctgcacagccctgagcgggagaggatgcaccggcagaggagccccacccagagccccccagctgacaccagcttcagcagcagaagaggccggcagctgccccaggtgcctgtgcgcagcggcagcattgagcaggccagcctggtggtggaggagaggacccggcagatgaagatgaaggtgcaccgcttcaagcagaccactggaagtggcagcagccaggagctggaccgggagcagtacagcaagtacaacatccacaaggaccagtaccgcagctgtgacaacgtgtctgccaagagcagtgacagtgatgtgtctgatgtgtctgccatcagcaggaccagcagcgccagccggctgagcagcaccagcttcatgtctgagcagagcgagcggccccggggccgcatcagcagcttcacccccaagatgcagggccgcaggatgggcaccagcggccgcagcatcatgaagagcacctctgtgtctggagagatgtacaccctggagcacaatgatggcagccagagcgacacagctgtgggcaccgtgggcgctgggggcaagaagagaagaagcagcctgagcgccaaggtggtggccatcgtgtccagaagaagccgcagcaccagccagctgagccagacagagagcggccacaagaagctgaagagcaccatccagaggagcacagaaacaggcatggctgctgagatgaggaagatggtgcggcagcccagccgggagagcacagatggcagcatcaacagctacagcagcgagggcaacctgatcttccctggggtgcggctgggcgctgacagccagttcagtgacttcctggatggcctgggccctgcccagctggtgggccggcagaccctggccaccccagccatgggagacatccagatcggcatggaggacaagaagggccagctggaggtggaggtgatccgggcccggagcctgacccagaagccaggcagcaagagcaccccagccccctacgtgaaggtgtacctgctggagaatggagcctgcatcgccaagaagaagacccgcatcgccaggaagaccctggaccccctgtaccagcagagcctggtgtttgatgagagcccccagggcaaggtgctgcaggtgattgtgtggggagactatggccgcatggaccacaagtgcttcatgggcgtggcccagatcctgctggaggagctggacctgagctccatggtgattggctggtacaagctgtttcctcccagcagcctggtggaccccaccctgacccccctgacccggcgggccagccagagcagcctggagagcagcacaggccccccctgcatccgctcctag

SEQ ID NO: 167412 - DNA, 4446 bp, synthetic construct
  misc_feature 1..4446: note = Description of Artificial Sequence: Synthetic coding sequence
  source 1..4446: mol_type = other DNA
atgagcagcgctgtgggcccccggggcccccggccccccaccgtgcccccacccatgcaggagctgcctgacctgagccacctgacagaggaggagaggaacatcatcatggctgtgatggaccggcagaaggaggaggaggagaaggaggaggccatgctgaagtgtgtggtgcgggacatggccaagccagctgcctgcaagaccccaagaaatgctgagaaccagccccaccagcccagcccccggctgcaccagcagtttgagagctacaaggagcaggtgaggaagatcggggaggaggcccggcgctaccagggcgagcacaaggatgatgcccccacctgtggcatctgccacaagaccaagtttgctgatggctgcggccacctgtgcagctactgcaggaccaagttctgtgcccgctgtggcggccgggtgtccctgcggagcaacaatgaaaacaagatcgtgatgtgggtgtgcaacctgtgcaggaagcagcaggagatcctgaccaagagcggggcctggttcttcggcagcggcccccagcagaccagccaggacggcaccctgagtgacacagccaccggggccggcagcgaggtgccccgggagaagaaggcccggctgcaggagaggagccgcagccagacccccctgagcacagctgctgccagcagccaggatgctgccccacccagcgcccccccagacaggagcaaaggagctgagcccagccagcaggccctgggccctgagcagaagcaggccagcagccgcagccgctctgagcccccccgggagaggaagaagaccccaggcctgtctgagcagaatggaaaaggagccctgaagtctgagaggaagagggtgcccaagaccagcgcccagcctgtggagggcgctgtggaggagcgggagaggaaggagcggcgggagagccggcggctggagaagggccgcagccaggactacccagacaccccagagaagagagatgagggcaaggccgcagatgaggagaagcagaggaaggaggaggactaccagacccgctacagaagtgaccccaacctggcccgctaccctgtgaagcccccacctgaggagcagcagatgaggatgcacgcccgggtgtcccgggcccggcatgagcggcggcacagtgatgtggccctgcccaggacagaggccggggccgccctgcctgagggcaaggccggcaagagggccccagctgctgcccgggccagccccccagacagcccccgggcctacagcgctgagaggacagctgagacccgggcccctggggccaagcagctgaccaaccacagccccccagcccccaggcatggccctgtgcctgctgaggcccctgagctgaaggcccaggagcccctgaggaagcagagccggctggaccccagcagcgctgtgctgatgaggaaggccaagcgggagaaggtggagaccatgctgagaaatgacagcctgagcagtgaccagagcgagagcgtgcggcccagcccccccaagccccacaggagcaagaggggcggcaagaagaggcagatgtctgtgagcagcagcgaggaggagggcgtgtccaccccagagtacaccagctgtgaagatgtggagctggagagcgagagcgtgtctgagaagggggacctggactactactggctggaccctgccacctggcacagccgggagaccagccccatcagcagccaccctgtgacctggcagcccagcaaggagggggaccggctgattggccgggtcatcctgaacaagaggaccaccatgcccaaggacagcggggccctgctgggcctgaaggtggtgggcggcaagatgacagacctgggccgcctgggcgccttcatcaccaaggtgaagaagggcagcctggctgatgtggtgggccacctgcgggctggagatgaggtgctggagtggaatggcaagcccctgcccggggccaccaatgaggaggtgtacaacatcatcctggagagcaagtctgagccccaggtggagatcatcgtgtcccggcccatcggggacatcccccgcatccctgagagcagccacccccccctggagagcagcagcagcagctttgagagccagaagatggagcggcccagcatcagcgtcatcagccccaccagccctggggccctgaaggatgccccccaggtgctgcccggccagctgtctgtgaagctgtggtatgacaaggtgggccaccagctgattgtgaatgtgctgcaggccacagacctgcctgcccgggtggatggccggcccaggaacccctacgtgaagatgtacttcctgcctgacagaagtgacaagagcaagaggaggaccaagacagtgaagaagatcctggagcccaagtggaaccagacctttgtgtacagccacgtgcaccggcgggacttccgggagaggatgctggagatcaccgtgtgggaccagccccgggtgcaggaggaggagagcgagttcctgggggagatcctgattgagctggagacagccctgctggatgatgagccccactggtacaagctgcagacccatgatgagagcagcctgcccctgccccagcccagccccttcatgccccggcggcacatccacggggagagcagcagcaagaagctgcagaggagccagaggatcagtgacagcgacatcagtgactatgaggtggatgatggcatcggcgtggtgccccctgtgggctaccgcagcagcgcccgggagagcaagagcaccaccctgactgtgcctgagcagcagaggaccacccaccacaggagccgctctgtgagcccccacagaggaaatgaccagggcaagcccaggagccggctgcccaacgtgcccctgcagaggagcctggatgagatccaccccaccaggaggagccgcagccccaccaggcaccatgatgccagccgcagccctgtggaccacaggaccagagatgtggacagccagtacctgtctgagcaggacagcgagctgctgatgctgccccgggccaagaggggccgctctgcagaatgtctgcacaccaccagcgagctgcagcccttcctggaccgggcccggagcgccagcaccaactgcctgcggccagacaccagcctgcacagccctgagcgggagaggatgcaccggcagaggagccccacccagagccccccagctgacaccagcttcagcagcagaagaggccggcagctgccccaggtgcctgtgcgcagcggcagcattgagcaggccagcctggtggtggaggagaggacccggcagatgaagatgaaggtgcaccgcttcaagcagaccactggaagtggcagcagccaggagctggaccgggagcagtacagcaagtacaacatccacaaggaccagtaccgcagctgtgacaacgtgtctgccaagagcagtgacagtgatgtgtctgatgtgtctgccatcagcaggaccagcagcgccagccggctgagcagcaccagcttcatgtctgagcagagcgagcggccccggggccgcatcagcagcttcacccccaagatgcagggccgcaggatgggcaccagcggccgcagcatcatgaagagcacctctgtgtctggagagatgtacaccctggagcacaatgatggcagccagagcgacacagctgtgggcaccgtgggcgctgggggcaagaagagaagaagcagcctgagcgccaaggtggtggccatcgtgtccagaagaagccgcagcaccagccagctgagccagacagagagcggccacaagaagctgaagagcaccatccagaggagcacagaaacaggcatggctgctgagatgaggaagatggtgcggcagcccagccgggagagcacagatggcagcatcaacagctacagcagcgagggcaacctgatcttccctggggtgcggctgggcgctgacagccagttcagtgacttcctggatggcctgggccctgcccagctggtgggccggcagaccctggccaccccagccatggccccctacgtgaaggtgtacctgctggagaatggagcctgcatcgccaagaagaagacccgcatcgccaggaagaccctggaccccctgtaccagcagagcctggtgtttgatgagagcccccagggcaaggtgctgcaggtgattgtgtggggagactatggccgcatggaccacaagtgcttcatgggcgtggcccagatcctgctggaggagctggacctgagctccatggtgattggctggtacaagctgtttcctcccagcagcctggtggaccccaccctgacccccctgacccggcgggccagccagagcagcctggagagcagcacaggccccccctgcatccgctcctag

SEQ ID NO: 167413 - DNA, 4446 bp, synthetic construct
  misc_feature 1..4446: note = Description of Artificial Sequence: Synthetic coding sequence
  source 1..4446: mol_type = other DNA
atgagcagcgctgtgggcccccggggcccccggccccccaccgtgcccccacccatgcaggagctgcctgacctgagccacctgacagaggaggagaggaacatcatcatggctgtgatggaccggcagaaggaggaggaggagaaggaggaggccatgctgaagtgtgtggtgcgggacatggccaagccagctgcctgcaagaccccaagaaatgctgagaaccagccccaccagcccagcccccggctgcaccagcagtttgagagctacaaggagcaggtgaggaagatcggggaggaggcccggcgctaccagggcgagcacaaggatgatgcccccacctgtggcatctgccacaagaccaagtttgctgatggctgcggccacctgtgcagctactgcaggaccaagttctgtgcccgctgtggcggccgggtgtccctgcggagcaacaatgaagacaaggtggtgatgtgggtgtgcaacctgtgcaggaagcagcaggagatcctgaccaagagcggggcctggttcttcggcagcggcccccagcagaccagccaggacggcaccctgagtgacacagccaccggggccggcagcgaggtgccccgggagaagaaggcccggctgcaggagaggagccgcagccagacccccctgagcacagctgctgccagcagccaggatgctgccccacccagcgcccccccagacaggagcaaaggagctgagcccagccagcaggccctgggccctgagcagaagcaggccagcagccgcagccgctctgagcccccccgggagaggaagaagaccccaggcctgtctgagcagaatggaaaaggagccctgaagtctgagaggaagagggtgcccaagaccagcgcccagcctgtggagggcgctgtggaggagcgggagaggaaggagcggcgggagagccggcggctggagaagggccgcagccaggactacccagacaccccagagaagagagatgagggcaaggccgcagatgaggagaagcagaggaaggaggaggactaccagacccgctacagaagtgaccccaacctggcccgctaccctgtgaagcccccacctgaggagcagcagatgaggatgcacgcccgggtgtcccgggcccggcatgagcggcggcacagtgatgtggccctgcccaggacagaggccggggccgccctgcctgagggcaaggccggcaagagggccccagctgctgcccgggccagccccccagacagcccccgggcctacagcgctgagaggacagctgagacccgggcccctggggccaagcagctgaccaaccacagccccccagcccccaggcatggccctgtgcctgctgaggcccctgagctgaaggcccaggagcccctgaggaagcagagccggctggaccccagcagcgctgtgctgatgaggaaggccaagcgggagaaggtggagaccatgctgagaaatgacagcctgagcagtgaccagagcgagagcgtgcggcccagcccccccaagccccacaggagcaagaggggcggcaagaagaggcagatgtctgtgagcagcagcgaggaggagggcgtgtccaccccagagtacaccagctgtgaagatgtggagctggagagcgagagcgtgtctgagaagggggacctggactactactggctggaccctgccacctggcacagccgggagaccagccccatcagcagccaccctgtgacctggcagcccagcaaggagggggaccggctgattggccgggtcatcctgaacaagaggaccaccatgcccaaggacagcggggccctgctgggcctgaaggtggtgggcggcaagatgacagacctgggccgcctgggcgccttcatcaccaaggtgaagaagggcagcctggctgatgtggtgggccacctgcgggctggagatgaggtgctggagtggaatggcaagcccctgcccggggccaccaatgaggaggtgtacaacatcatcctggagagcaagtctgagccccaggtggagatcatcgtgtcccggcccatcggggacatcccccgcatccctgagagcagccacccccccctggagagcagcagcagcagctttgagagccagaagatggagcggcccagcatcagcgtcatcagccccaccagccctggggccctgaaggatgccccccaggtgctgcccggccagctgtctgtgaagctgtggtatgacaaggtgggccaccagctgattgtgaatgtgctgcaggccacagacctgcctgcccgggtggatggccggcccaggaacccctacgtgaagatgtacttcctgcctgacagaagtgacaagagcaagaggaggaccaagacagtgaagaagatcctggagcccaagtggaaccagacctttgtgtacagccacgtgcaccggcgggacttccgggagaggatgctggagatcaccgtgtgggaccagccccgggtgcaggaggaggagagcgagttcctgggggagatcctgattgagctggagacagccctgctggatgatgagccccactggtacaagctgcagacccatgatgagagcagcctgcccctgccccagcccagccccttcatgccccggcggcacatccacggggagagcagcagcaagaagctgcagaggagccagaggatcagtgacagcgacatcagtgactatgaggtggatgatggcatcggcgtggtgccccctgtgggctaccgcagcagcgcccgggagagcaagagcaccaccctgactgtgcctgagcagcagaggaccacccaccacaggagccgctctgtgagcccccacagaggaaatgaccagggcaagcccaggagccggctgcccaacgtgcccctgcagaggagcctggatgagatccaccccaccaggaggagccgcagccccaccaggcaccatgatgccagccgcagccctgtggaccacaggaccagagatgtggacagccagtacctgtctgagcaggacagcgagctgctgatgctgccccgggccaagaggggccgctctgcagaatgtctgcacaccaccagcgagctgcagcccttcctggaccgggcccggagcgccagcaccaactgcctgcggccagacaccagcctgcacagccctgagcgggagaggatgcaccggcagaggagccccacccagagccccccagctgacaccagcttcagcagcagaagaggccggcagctgccccaggtgcctgtgcgcagcggcagcattgagcaggccagcctggtggtggaggagaggacccggcagatgaagatgaaggtgcaccgcttcaagcagaccactggaagtggcagcagccaggagctggaccgggagcagtacagcaagtacaacatccacaaggaccagtaccgcagctgtgacaacgtgtctgccaagagcagtgacagtgatgtgtctgatgtgtctgccatcagcaggaccagcagcgccagccggctgagcagcaccagcttcatgtctgagcagagcgagcggccccggggccgcatcagcagcttcacccccaagatgcagggccgcaggatgggcaccagcggccgcagcatcatgaagagcacctctgtgtctggagagatgtacaccctggagcacaatgatggcagccagagcgacacagctgtgggcaccgtgggcgctgggggcaagaagagaagaagcagcctgagcgccaaggtggtggccatcgtgtccagaagaagccgcagcaccagccagctgagccagacagagagcggccacaagaagctgaagagcaccatccagaggagcacagaaacaggcatggctgctgagatgaggaagatggtgcggcagcccagccgggagagcacagatggcagcatcaacagctacagcagcgagggcaacctgatcttccctggggtgcggctgggcgctgacagccagttcagtgacttcctggatggcctgggccctgcccagctggtgggccggcagaccctggccaccccagccatggccccctacgtgaaggtgtacctgctggagaatggagcctgcatcgccaagaagaagacccgcatcgccaggaagaccctggaccccctgtaccagcagagcctggtgtttgatgagagcccccagggcaaggtgctgcaggtgattgtgtggggagactatggccgcatggaccacaagtgcttcatgggcgtggcccagatcctgctggaggagctggacctgagctccatggtgattggctggtacaagctgtttcctcccagcagcctggtggaccccaccctgacccccctgacccggcgggccagccagagcagcctggagagcagcacaggccccccctgcatccgctcctag

SEQ ID NO: 167414 - DNA, 5079 bp, synthetic construct
  misc_feature 1..5079: note = Description of Artificial Sequence: Synthetic coding sequence
  source 1..5079: mol_type = other DNA
atgagcagcgctgtgggcccccggggcccccggccccccaccgtgcccccacccatgcaggagctgcctgacctgagccacctgacagaggaggagaggaacatcatcatggctgtgatggaccggcagaaggaggaggaggagaaggaggaggccatgctgaagtgtgtggtgcgggacatggccaagccagctgcctgcaagaccccaagaaatgctgagaaccagccccaccagcccagcccccggctgcaccagcagtttgagagctacaaggagcaggtgaggaagatcggggaggaggcccggcgctaccagggcgagcacaaggatgatgcccccacctgtggcatctgccacaagaccaagtttgctgatggctgcggccacctgtgcagctactgcaggaccaagttctgtgcccgctgtggcggccgggtgtccctgcggagcaacaatgaagacaaggtggtgatgtgggtgtgcaacctgtgcaggaagcagcaggagatcctgaccaagagcggggcctggttcttcggcagcggcccccagcagaccagccaggacggcaccctgagtgacacagccaccggggccggcagcgaggtgccccgggagaagaaggcccggctgcaggagaggagccgcagccagacccccctgagcacagctgctgccagcagccaggatgctgccccacccagcgcccccccagacaggagcaaaggagctgagcccagccagcaggccctgggccctgagcagaagcaggccagcagccgcagccgctctgagcccccccgggagaggaagaagaccccaggcctgtctgagcagaatggaaaaggagccctgaagtctgagaggaagagggtgcccaagaccagcgcccagcctgtggagggcgctgtggaggagcgggagaggaaggagcggcgggagagccggcggctggagaagggccgcagccaggactacccagacaccccagagaagagagatgagggcaaggccgcagatgaggagaagcagaggaaggaggaggactaccagacccgctacagaagtgaccccaacctggcccgctaccctgtgaagcccccacctgaggagcagcagatgaggatgcacgcccgggtgtcccgggcccggcatgagcggcggcacagtgatgtggccctgcccaggacagaggccggggccgccctgcctgagggcaaggccggcaagagggccccagctgctgcccgggccagccccccagacagcccccgggcctacagcgctgagaggacagctgagacccgggcccctggggccaagcagctgaccaaccacagccccccagcccccaggcatggccctgtgcctgctgaggcccctgagctgaaggcccaggagcccctgaggaagcagagccggctggaccccagcagcgctgtgctgatgaggaaggccaagcgggagaaggtggagaccatgctgagaaatgacagcctgagcagtgaccagagcgagagcgtgcggcccagcccccccaagccccacaggagcaagaggggcggcaagaagaggcagatgtctgtgagcagcagcgaggaggagggcgtgtccaccccagagtacaccagctgtgaagatgtggagctggagagcgagagcgtgtctgagaagggggacctggactactactggctggaccctgccacctggcacagccgggagaccagccccatcagcagccaccctgtgacctggcagcccagcaaggagggggaccggctgattggccgggtcatcctgaacaagaggaccaccatgcccaaggacagcggggccctgctgggcctgaaggtggtgggcggcaagatgacagacctgggccgcctgggcgccttcatcaccaaggtgaagaagggcagcctggctgatgtggtgggccacctgcgggctggagatgaggtgctggagtggaatggcaagcccctgcccggggccaccaatgaggaggtgtacaacatcatcctggagagcaagtctgagccccaggtggagatcatcgtgtcccggcccatcggggacatcccccgcatccctgagagcagccacccccccctggagagcagcagcagcagctttgagagccagaagatggagcggcccagcatcagcgtcatcagccccaccagccctggggccctgaaggatgccccccaggtgctgcccggccagctgtctgtgaagctgtggtatgacaaggtgggccaccagctgattgtgaatgtgctgcaggccacagacctgcctgcccgggtggatggccggcccaggaacccctacgtgaagatgtacttcctgcctgacagaagtgacaagagcaagaggaggaccaagacagtgaagaagatcctggagcccaagtggaaccagacctttgtgtacagccacgtgcaccggcgggacttccgggagaggatgctggagatcaccgtgtgggaccagccccgggtgcaggaggaggagagcgagttcctgggggagatcctgattgagctggagacagccctgctggatgatgagccccactggtacaagctgcagacccatgatgagagcagcctgcccctgccccagcccagccccttcatgccccggcggcacatccacggggagagcagcagcaagaagctgcagaggagccagaggatcagtgacagcgacatcagtgactatgaggtggatgatggcatcggcgtggtgccccctgtgggctaccgcagcagcgcccgggagagcaagagcaccaccctgactgtgcctgagcagcagaggaccacccaccacaggagccgctctgtgagcccccacagaggaaatgaccagggcaagcccaggagccggctgcccaacgtgcccctgcagaggagcctggatgagatccaccccaccaggaggagccgcagccccaccaggcaccatgatgccagccgcagccctgtggaccacaggaccagagatgtggacagccagtacctgtctgagcaggacagcgagctgctgatgctgccccgggccaagaggggccgctctgcagaatgtctgcacaccaccaggcacctggtgcgccactacaagaccctgccccccaagatgcccctgctgcagagcagcagccactggaacatctacagcagcatcctgcctgcccacaccaagaccaagtctgtgacccggcaggacatcagcctgcaccacgagtgcttcaacagcacagtgctgcgcttcacagatgagatcctggtgtctgagctgcagcccttcctggaccgggcccggagcgccagcaccaactgcctgcggccagacaccagcctgcacagccctgagcgggagcggggccgctggagccccagcctggacagaagaagaccacccagcccccgcatccagatccagcacgccagcccagaaaatgacagacacagcaggaagtctgagaggagcagcatccagaagcagaccaggaaaggaacagccagtgatgctgagcgggtgctgcccacctgcctgagcagaagaggacatgctgccccccgggccacagaccagcctgtgatccggggcaagcacccagcccggagccgcagcagcgagcacagcagcatccgcaccctgtgcagcatgcaccacctggtgcctgggggcagcgccccacccagccccctgctgaccaggatgcaccggcagaggagccccacccagagccccccagctgacaccagcttcagcagccggcggggccggcagctgccccaggtgcctgtgcgcagcggcagcattgagcaggccagcctggtggtggaggagaggacccggcagatgaagatgaaggtgcaccgcttcaagcagaccaccggcagcggcagcagccaggagctggaccgggagcagtacagcaagtacaacatccacaaggaccagtaccgcagctgtgacaacgtgtctgccaagagcagtgacagtgatgtgtctgatgtgtctgccatcagcaggaccagcagcgccagccggctgagcagcaccagcttcatgtctgagcagagcgagcggccccggggccgcatcagcagcttcacccccaagatgcagggccgcaggatgggcaccagcggccgcagcatcatgaagagcacctctgtgtctggagagatgtacaccctggagcacaatgatggcagccagagcgacacagctgtgggcaccgtgggcgccggcggcaagaagaggaggagcagcctgagcgccaaggtggtggccatcgtgagccgccgcagccgcagcaccagccagctgagccagacagaaagtggccacaagaagctgaagagcaccatccagaggagcacagagaccggcatggctgctgagatgaggaagatggtgcggcagcccagccgggagagcacagatggcagcatcaacagctacagcagcgagggcaacctgatcttccctggggtgcggctgggcgctgacagccagttcagtgacttcctggatggcctgggccctgcccagctggtgggccggcagaccctggccaccccagccatgggagacatccagatcggcatggaggacaagaagggccagctggaggtggaggtgatccgggcccggagcctgacccagaagccaggcagcaagagcaccccagccccctacgtgaaggtgtacctgctggagaatggagcctgcatcgccaagaagaagaccagaattgccaggaagaccctggaccccctgtaccagcagagcctggtgtttgatgagagcccccagggcaaggtgctgcaggtgattgtgtggggagactatggccgcatggaccacaagtgcttcatgggcgtggcccagatcctgctggaggagctggacctgagctccatggtgattggctggtacaagctgttcccccccagcagcctggtggaccccaccctgacccccctgacccggcgggccagccagagcagcctggagagcagcactggaccaccctgcatccgctcctag

SEQ ID NO: 167415 - DNA, 1497 bp, synthetic construct
  misc_feature 1..1497: note = Description of Artificial Sequence: Synthetic coding sequence
  source 1..1497: mol_type = other DNA
atgctgccccgggccaagaggggccgctctgctgagtgcctgcacaccaccaggcacagcaggaagtctgagaggagcagcatccagaagcagaccaggaagggcacagccagtgatgctgagaggatgcaccggcagaggagccccacccagagccccccagctgacaccagcttcagcagccggcggggccggcagctgccccaggtgcctgtgcgcagcggcagcattgagcaggagcaggagaagtacaacagcagcaccaaggccagcctggtggtggaggagaggacccggcagatgaagatgaaggtgcaccgcttcaagcagaccaccggcagcggcagcagccaggagctggaccgggagcagtacagcaagtacaacatccacaaggaccagtaccgcagctgtgacaacgtgtctgccaagagcagtgacagtgatgtgtctgatgtgtctgccatcagcaggaccagcagcgccagccggctgagcagcaccagcttcatgtctgagcagagcgagcggccccggggccgcatcagcagcttcacccccaagatgcagggccgcaggatgggcaccagcggccgcagcatcatgaagagcacctctgtgtctggagagatgtacaccctggagcacaatgatggcagccagagcgacacagctgtgggcaccgtgggcgccggcggcaagaagaggaggagcagcctgagcgccaaggtggtggccatcgtgagccgccgcagccgcagcaccagccagctgagccagacagaaagtggccacaagaagctgaagagcaccatccagaggagcacagagaccggcatggctgctgagatgaggaagatggtgcggcagcccagccgggagagcacagatggcagcatcaacagctacagcagcgagggcaacctgatcttccctggggtgcggctgggcgctgacagccagttcagtgacttcctggatggcctgggccctgcccagctggtgggccggcagaccctggccaccccagccatgggagacatccagatcggcatggaggacaagaagggccagctggaggtggaggtgatccgggcccggagcctgacccagaagccaggcagcaagagcaccccagccccctacgtgaaggtgtacctgctggagaatggagcctgcatcgccaagaagaagaccagaattgccaggaagaccctggaccccctgtaccagcagagcctggtgtttgatgagagcccccagggcaaggtgctgcaggtgattgtgtggggagactatggccgcatggaccacaagtgcttcatgggcgtggcccagatcctgctggaggagctggacctgagctccatggtgattggctggtacaagctgttcccccccagcagcctggtggaccccaccctgacccccctgacccggcgggccagccagagcagcctggagagcagcactggaccaccctgcatccgctcctag

SEQ ID NO: 167416 - DNA, 3039 bp, synthetic construct
  misc_feature 1..3039: note = Description of Artificial Sequence: Synthetic coding sequence
  source 1..3039: mol_type = other DNA
atgtgtgcccctggcatccacgtgagcagcgagggctgggaggaggtgcgctctgtggacagcgaggagggcaccatcgaggccaggagagctgtggccggggacctggactactactggctggaccctgccacctggcacagccgggagaccagccccatcagcagccaccctgtgacctggcagcccagcaaggagggggaccggctgattggccgggtcatcctgaacaagaggaccaccatgcccaaggacagcggggccctgctgggcctgaaggtggtgggcggcaagatgacagacctgggccgcctgggcgccttcatcaccaaggtgaagaagggcagcctggctgatgtggtgggccacctgcgggctggagatgaggtgctggagtggaatggcaagcccctgcccggggccaccaatgaggaggtgtacaacatcatcctggagagcaagtctgagccccaggtggagatcatcgtgtcccggcccatcggggacatcccccgcatccctgagagcagccacccccccctggagagcagcagcagcagctttgagagccagaagatggagcggcccagcatcagcgtcatcagccccaccagccctggggccctgaaggatgccccccaggtgctgcccggccagctgtctgtgaagctgtggtatgacaaggtgggccaccagctgattgtgaatgtgctgcaggccacagacctgcctgcccgggtggatggccggcccaggaacccctacgtgaagatgtacttcctgcctgacagaagtgacaagagcaagaggaggaccaagacagtgaagaagatcctggagcccaagtggaaccagacctttgtgtacagccacgtgcaccggcgggacttccgggagaggatgctggagatcaccgtgtgggaccagccccgggtgcaggaggaggagagcgagttcctgggggagatcctgattgagctggagacagccctgctggatgatgagccccactggtacaagctgcagacccatgatgagagcagcctgcccctgccccagcccagccccttcatgccccggcggcacatccacggggagagcagcagcaagaagctgcagaggagccagaggatcagtgacagcgacatcagtgactatgaggtggatgatggcatcggcgtggtgcccccaggctaccgcagcagcgcccgggagagcaagagcaccaccctgactgtgcctgagcagcagaggaccacccaccacaggagccgctctgtgagcccccacagaggaaatgaccagggcaagcccaggagccggctgcccaacgtgcccctgcagaggagcctggatgagatccaccccacccggcgcagccgcagccccaccaggcaccatgatgccagccgcagccctgtggaccacaggaccagagatgtggacagccagtacctgtctgagcaggacagcgagctgctgatgctgccccgggccaagaggggccgctctgctgagtgcctgcacaccaccagcgagctgcagcccttcctggaccgggcccggagcgccagcaccaactgcctgcggccagacaccagcctgcacagccctgagcgggagcggcacagcaggaagtctgagaggagcagcatccagaagcagaccaggaagggcacagccagtgatgctgagaggatgcaccggcagaggagccccacccagagccccccagctgacaccagcttcagcagccggcggggccggcagctgccccaggtgcctgtgcgcagcggcagcattgagcaggccagcctggtggtggaggagaggacccggcagatgaagatgaaggtgcaccgcttcaagcagaccaccggcagcggcagcagccaggagctggaccgggagcagtacagcaagtacaacatccacaaggaccagtaccgcagctgtgacaacgtgtctgccaagagcagtgacagtgatgtgtctgatgtgtctgccatcagcaggaccagcagcgccagccggctgagcagcaccagcttcatgtctgagcagagcgagcggccccggggccgcatcagcagcttcacccccaagatgcagggccgcaggatgggcaccagcggccgcagcatcatgaagagcacctctgtgtctggagagatgtacaccctggagcacaatgatggcagccagagcgacacagctgtgggcaccgtgggcgccggcggcaagaagaggaggagcagcctgagcgccaaggtggtggccatcgtgagccgccgcagccgcagcaccagccagctgagccagacagaaagtggccacaagaagctgaagagcaccatccagaggagcacagagaccggcatggctgctgagatgaggaagatggtgcggcagcccagccgggagagcacagatggcagcatcaacagctacagcagcgagggcaacctgatcttccctggggtgcggctgggcgctgacagccagttcagtgacttcctggatggcctgggccctgcccagctggtgggccggcagaccctggccaccccagccatgggagacatccagatcggcatggaggacaagaagggccagctggaggtggaggtgatccgggcccggagcctgacccagaagccaggcagcaagagcaccccagccccctacgtgaaggtgtacctgctggagaatggagcctgcatcgccaagaagaagaccagaattgccaggaagaccctggaccccctgtaccagcagagcctggtgtttgatgagagcccccagggcaaggtgctgcaggtgattgtgtggggagactatggccgcatggaccacaagtgcttcatgggcgtggcccagatcctgctggaggagctggacctgagctccatggtgattggctggtacaagctgttcccccccagcagcctggtggaccccaccctgacccccctgacccggcgggccagccagagcagcctggagagcagcactggaccaccctgcatccgctcctag

SEQ ID NO: 167417 - DNA, 660 bp, synthetic construct
  misc_feature 1..660: note = Description of Artificial Sequence: Synthetic coding sequence
  source 1..660: mol_type = other DNA
atggctgctgagatgaggaagatggtgcggcagcccagccgggagagcacagatggcagcatcaacagctacagcagcgagggcaacctgatcttccctggggtgcggctgggcgctgacagccagttcagtgacttcctggatggcctgggccctgcccagctggtgggccggcagaccctggccaccccagccatgggagacatccagatcggcatggaggacaagaagggccagctggaggtggaggtgatccgggcccggagcctgacccagaagccaggcagcaagagcaccccagccccctacgtgaaggtgtacctgctggagaatggagcctgcatcgccaagaagaagacccgcatcgccaggaagaccctggaccccctgtaccagcagagcctggtgtttgatgagagcccccagggcaaggtgctgcaggtgattgtgtggggagactatggccgcatggaccacaagtgcttcatgggcgtggcccagatcctgctggaggagctggacctgagctccatggtgattggctggtacaagctgtttcctcccagcagcctggtggaccccaccctgacccccctgacccggcgggccagccagagcagcctggagagcagcacaggccccccctgcatccgctcctag

SEQ ID NO: 167418 - DNA, 2283 bp, synthetic construct
  misc_feature 1..2283: note = Description of Artificial Sequence: Synthetic coding sequence
  source 1..2283: mol_type = other DNA
atgcccaaggacagcggggccctgctgggcctgaaggtggtgggcggcaagatgacagacctgggccgcctgggcgccttcatcaccaaggtgaagaagggcagcctggctgatgtggtgggccacctgcgggctggagatgaggtgctggagtggaatggcaagcccctgcccggggccaccaatgaggaggtgtacaacatcatcctggagagcaagtctgagccccaggtggagatcatcgtgtcccggcccatcggggacatcccccgcatccctgagagcagccacccccccctggagagcagcagcagcagctttgagagccagaagatggagcggcccagcatcagcgtcatcagccccaccagccctggggccctgaaggatgccccccaggtgctgcccggccagctgtctgtgaagctgtggtatgacaaggtgggccaccagctgattgtgaatgtgctgcaggccacagacctgcctgcccgggtggatggccggcccaggaacccctacgtgaagatgtacttcctgcctgacagaagtgacaagagcaagaggaggaccaagacagtgaagaagatcctggagcccaagtggaaccagacctttgtgtacagccacgtgcacagaagagacttccgggagaggatgctggagatcaccgtgtgggaccagccccgggtgcaggaggaggagagcgagttcctgggggagatcctgattgagctggagacagccctgctggatgatgagccccactggtacaagctgcagacccatgatgagagcagcctgcccctgccccagcccagccccttcatgcccaggaggcacatccatggagagagcagcagcaagaagctgcagaggagccagaggatcagtgacagcgacatcagtgactatgaggtggatgatggcattggagtggtgccccctgtgggctaccgcagcagcgcccgggagagcaagagcaccaccctgactgtgcctgagcagcagaggaccacccaccacaggagccgctctgtgagcccccacagaggaaatgaccagggcaagcccaggagccggctgcccaacgtgcccctgcagaggagcctggatgagatccaccccacccggcgcagccgcagccccaccaggcaccatgatgccagccgcagccctgtggaccacaggaccagagatgtggacagccagtacctgtctgagcaggacagcgagctgctgatgctgccccgggccaagaggggccgctctgctgagtgcctgcacaccaccagcgagctgcagcccttcctggaccgggcccggagcgccagcaccaactgcctgcggccagacaccagcctgcacagccctgagcgggagcggcacagcaggaagtctgagaggagcagcatccagaagcagaccaggaagggcacagccagtgatgctgagaggatgcaccggcagaggagccccacccagagccccccagctgacaccagcttcagcagccggcggggccggcagctgccccaggtgcctgtgcgcagcggcagcattgagcaggagagcggccacaagaagctgaagagcaccatccagaggagcacagagaccggcatggctgctgagatgaggaagatggtgcggcagcccagccgggagagcacagatggcagcatcaacagctacagcagcgagggcaacctgatcttccctggggtgcggctgggcgctgacagccagttcagtgacttcctggatggcctgggccctgcccagctggtgggccggcagaccctggccaccccagccatgggagacatccagatcggcatggaggacaagaagggccagctggaggtggaggtgatccgggcccggagcctgacccagaagccaggcagcaagagcaccccagccccctacgtgaaggtgtacctgctggagaatggagcctgcatcgccaagaagaagaccagaattgccaggaagaccctggaccccctgtaccagcagagcctggtgtttgatgagagcccccagggcaaggtgctgcaggtgattgtgtggggagactatggccgcatggaccacaagtgcttcatgggcgtggcccagatcctgctggaggagctggacctgagctccatggtgattggctggtacaagctgttcccccccagcagcctggtggaccccaccctgacccccctgacccggcgggccagccagagcagcctggagagcagcactggaccaccctgcatccgctcctag

SEQ ID NO: 167419 - DNA, 2481 bp, synthetic construct
  misc_feature 1..2481: note = Description of Artificial Sequence: Synthetic coding sequence
  source 1..2481: mol_type = other DNA
atgtttgctggcttcctgcagttcctgctgctgcacaccctgcacagcggcaccggggacctggactactactggctggaccctgccacctggcacagccgggagaccagccccatcagcagccaccctgtgacctggcagcccagcaaggagggggacaggctcatcggccgggtcatcctgaacaagaggaccaccatgcccaaggacagcggggccctgctgggcctgaaggtggtgggcggcaagatgacagacctgggccgcctgggcgccttcatcaccaaggtgaagaagggcagcctggctgatgtggtgggccacctgcgggctggagatgaggtgctggagtggaatggcaagcccctgcccggggccaccaatgaggaggtgtacaacatcatcctggagagcaagtctgagccccaggtggagatcatcgtgtcccggcccatcggggacatcccccgcatccctgagagcagccacccccccctggagagcagcagcagcagctttgagagccagaagatggagcggcccagcatcagcgtcatcagccccaccagccctggggccctgaaggatgccccccaggtgctgcccggccagctgtctgtgaagctgtggtatgacaaggtgggccaccagctgattgtgaatgtgctgcaggccacagacctgcctgcccgggtggatggccggcccaggaacccctacgtgaagatgtacttcctgcctgacagaagtgacaagagcaagaggaggaccaagacagtgaagaagatcctggagcccaagtggaaccagacctttgtgtacagccacgtgcacagaagagacttccgggagaggatgctggagatcaccgtgtgggaccagccccgggtgcaggaggaggagagcgagttcctgggggagatcctgattgagctggagacagccctgctggatgatgagccccactggtacaagctgcagacccatgatgagagcagcctgcccctgccccagcccagccccttcatgcccaggaggcacatccatggagagagcagcagcaagaagctgcagaggagccagaggatcagtgacagcgacatcagtgactatgaggtggatgatggcattggagtggtgccccctgtgggctaccgcagcagcgcccgggagagcaagagcaccaccctgactgtgcctgagcagcagaggaccacccaccacaggagccgctctgtgagcccccacagaggaaatgaccagggcaagcccaggagccggctgcccaacgtgcccctgcagaggagcctggatgagatccaccccacccggcgcagccgcagccccaccaggcaccatgatgccagccgcagccctgtggaccacaggaccagagatgtggacagccagtacctgtctgagcaggacagcgagctgctgatgctgccccgggccaagaggggccgctctgctgagtgcctgcacaccaccagcgagctgcagcccttcctggaccgggcccggagcgccagcaccaactgcctgcggccagacaccagcctgcacagccctgagcgggagcggcacagcaggaagtctgagaggagcagcatccagaagcagaccaggaagggcacagccagtgatgctgagaggatgcaccggcagaggagccccacccagagccccccagctgacaccagcttcagcagccggcggggccggcagctgccccaggtgcctgtgcgcagcggcagcattgagcaggagagcggccacaagaagctgaagagcaccatccagaggagcacagagaccggcatggctgctgagatgaggaagatggtgcggcagcccagccgggagagcacagatggcagcatcaacagctacagcagcgagggcaacctgatcttccctggggtgcggctgggcgctgacagccagttcagtgacttcctggatggcctgggccctgcccagctggtgggccggcagaccctggccaccccagccatgggagacatccagatcggcatggaggacaagaagggccagctggaggtggaggtgatccgggcccggagcctgacccagaagccaggcagcaagagcaccccagccccctacgtgaaggtgtacctgctggagaatggagcctgcatcgccaagaagaagaccagaattgccaggaagaccctggaccccctgtaccagcagagcctggtgtttgatgagagcccccagggcaaggtgctgcaggtgattgtgtggggagactatggccgcatggaccacaagtgcttcatgggcgtggcccagatcctgctggaggagctggacctgagctccatggtgattggctggtacaagctgttcccccccagcagcctggtggaccccaccctgacccccctgacccggcgggccagccagagcagcctggagagcagcactggaccaccctgcatccgctcctag

SEQ ID NO: 167420 - DNA, 2454 bp, synthetic construct
  misc_feature 1..2454: note = Description of Artificial Sequence: Synthetic coding sequence
  source 1..2454: mol_type = other DNA
atgtgtgcccctggcatccacgtgagcagcgagggctgggaggaggtgcgctctgtggacagcgaggagggcaccatcgaggccaggagagctgtggccggggacctggactactactggctggaccctgccacctggcacagccgggagaccagccccatcagcagccaccctgtgacctggcagcccagcaaggagggggaccggctgattggccgggtcatcctgaacaagaggaccaccatgcccaaggacagcggggccctgctgggcctgaaggtggtgggcggcaagatgacagacctgggccgcctgggcgccttcatcaccaaggtgaagaagggcagcctggctgatgtggtgggccacctgcgggctggagatgaggtgctggagtggaatggcaagcccctgcccggggccaccaatgaggaggtgtacaacatcatcctggagagcaagtctgagccccaggtggagatcatcgtgtcccggcccatcggggacatcccccgcatccctgagagcagccacccccccctggagagcagcagcagcagctttgagagccagaagatggagcggcccagcatcagcgtcatcagccccaccagccctggggccctgaaggatgccccccaggtgctgcccggccagctgtctgtgaagctgtggtatgacaaggtgggccaccagctgattgtgaatgtgctgcaggccacagacctgcctgcccgggtggatggccggcccaggaacccctacgtgaagatgtacttcctgcctgacagaagtgacaagagcaagaggaggaccaagacagtgaagaagatcctggagcccaagtggaaccagacctttgtgtacagccacgtgcaccggcgggacttccgggagaggatgctggagatcaccgtgtgggaccagccccgggtgcaggaggaggagagcgagttcctgggggagatcctgattgagctggagacagccctgctggatgatgagccccactggtacaagctgcagacccatgatgagagcagcctgcccctgccccagcccagccccttcatgccccggcggcacatccacggggagagcagcagcaagaagctgcagaggagccagaggatcagtgacagcgacatcagtgactatgaggtggatgatggcatcggcgtggtgccccctgtgggctaccgcagcagcgcccgggagagcaagagcaccaccctgactgtgcctgagcagcagaggaccacccaccacaggagccgctctgtgagcccccacagaggaaatgaccagggcaagcccaggagccggctgcccaacgtgcccctgcagaggagcctggatgagatccaccccaccaggaggagccgcagccccaccaggcaccatgatgccagccgcagccctgtggaccacaggaccagagatgtggacagccagtacctgtctgagcaggacagcgagctgctgatgctgccccgggccaagaggggccgctctgcagaatgtctgcacaccaccagcgagctgcagcccttcctggaccgggcccggagcgccagcaccaactgcctgcggccagacaccagcctgcacagccctgagcgggagaggatgcaccggcagaggagccccacccagagccccccagctgacaccagcttcagcagcagaagaggccggcagctgccccaggtgcctgtgcgcagcggcagcattgagcaggagagcggccacaagaagctgaagagcaccatccagaggagcacagaaacaggcatggctgctgagatgaggaagatggtgcggcagcccagccgggagagcacagatggcagcatcaacagctacagcagcgagggcaacctgatcttccctggggtgcggctgggcgctgacagccagttcagtgacttcctggatggcctgggccctgcccagctggtgggccggcagaccctggccaccccagccatgggagacatccagatcggcatggaggacaagaagggccagctggaggtggaggtgatccgggcccggagcctgacccagaagccaggcagcaagagcaccccagccccctacgtgaaggtgtacctgctggagaatggagcctgcatcgccaagaagaagacccgcatcgccaggaagaccctggaccccctgtaccagcagagcctggtgtttgatgagagcccccagggcaaggtgctgcaggtgattgtgtggggagactatggccgcatggaccacaagtgcttcatgggcgtggcccagatcctgctggaggagctggacctgagctccatggtgattggctggtacaagctgtttcctcccagcagcctggtggaccccaccctgacccccctgacccggcgggccagccagagcagcctggagagcagcacaggccccccctgcatccgctcctag

SEQ ID NO: 167421 - DNA, 3567 bp, synthetic construct
  misc_feature 1..3567: note = Description of Artificial Sequence: Synthetic coding sequence
  source 1..3567: mol_type = other DNA
atgcagtttgagaccctgcggcaggtgtgcaacagcgtgctgagccacttccacggcgtcttcagcagcccccccaacatcctgcagaatgagctgtttggccagaccctgaacaatgccaggaagaggagccccagcgtgtcccgggaccagaacagaagatatgaccagcgggaggagcgggaggagtacagccagtatgccaccagtgacacagccatgcccaggagccccagcgactatgctgaccggcgcagccagcacgagccccagttctatgaggacagcgaccacctgagctacagagacagcaacagaagaagccaccgccacagcaaggagtacatcgtggatgatgaagatgtggagagcagagatgaatatgaaaggcagaggcgggaggaggagtaccagagccgctacagaagtgaccccaacctggcccgctaccctgtgaagccccagccctatgaggagcagatgagaattcatgctgaggtgtcccgggcccggcatgagcggcggcacagtgatgtgtccctggccaatgctgacctggaggacagccgcatctccatgctgaggatggaccggcccagccggcagaggagcatcagcgagcggcgggccgccatggagaaccagaggagctacagcatggagaggacccgggaggcccagggccccagcagctatgcccagaggaccaccaaccacagcccccccaccccaagaagaagccccctgcccatcgacagaccagacctgcggaggacagacagcctgaggaagcagcaccacctggaccccagcagcgctgtgaggaagaccaagcgggagaagatggagaccatgctgagaaatgacagcctgagcagtgaccagagcgagagcgtgcggcccccaccacccaagccccacaagagcaagaagggcggcaagatgaggcagatcagcctgagcagcagcgaggaggagctggccagcaccccagagtacaccagctgtgatgatgtggagattgaaagtgaatctgtgtctgagaagggggacagccagaagggcaagaggaagaccagcgagcaggccgtgctgagtgacagcaacaccaggtctgagcggcagaaggagatgatgtactttggaggccacagcctggaggaggacctggagtggagcgagccccagatcaaggacagcggcgtggacacctgcagcagcaccaccctgaatgaggagcacagccacagcgacaagcaccctgtgacctggcagcccagcaaggatggagacaggctcatcggccgcatcctgctgaacaagaggctgaaggatggctctgtgccccgggacagcggggccatgctgggcctgaaggtggtgggcggcaagatgacagagagcggccgcctgtgtgccttcatcaccaaggtgaagaagggcagcctggccgacacagtgggccacctgcggcctggagatgaggtgctggagtggaatggccgcctgctgcagggcgccacctttgaggaggtgtacaacatcatcctggagagcaagccagagccccaggtggagctggtggtgtcccggcccatcggggacatcccccgcatcccagacagcacccacgcccagctggagagcagcagcagcagctttgagagccagaagatggaccggcccagcatctctgtgaccagccccatgagccctggcatgctgagagatgtgccccagttcctgagcggccagctgagcatcaagctgtggtttgacaaggtgggccaccagctgattgtgaccatcctgggcgccaaggacctgcccagcagagaagatggccggcccaggaacccctacgtgaagatctacttcctgcctgacagaagtgacaagaacaagaggaggaccaagacagtgaagaagaccctggagcccaagtggaaccagaccttcatctacagccctgtgcaccggcgggagttccgggagaggatgctggagatcaccctgtgggaccaggcccgggtgcgggaggaggagagcgagttcctgggggagatcctgattgagctggagacagccctgctggatgatgagccccactggtacaagctgcagacccatgatgtgagcagcctgcccctgccccaccccagcccctacatgccccggcggcagctgcacggggagagccccacccggcggctgcagaggagcaagaggatcagtgacagcgaggtgtctgactatgactgtgatgatggcatcggcgtggtgtctgactacagacatgatggccgggacctgcagagcagcaccctgtctgtgcctgagcaggtgatgagcagcaaccactgcagccccagcggcagcccccaccgggtggatgtgattggccgcaccaggtcctggagccccagcgtgcccccaccccagagcagaaatgtggagcagggcctgcggggcaccaggaccatgacaggccactacaacaccatcagcaggatggacagacaccgggtgatggatgaccactacagcccagaccgggaccgggactgtgaggccgctgaccggcagccctaccacaggagccgcagcacagagcagaggcccctgctggagaggaccaccaccaggagccgcagcacagagaggccagacaccaacctgatgaggtccatgcccagcctgatgacaggccgcagcgccccacccagccctgccctgagccgcagccaccccaggactggatctgtgcagaccagccccagcagcacccctgtggccggccggcggggccggcagctgccccagctgccccccaagggcaccctggacaggaaggccggcggcaagaagctgcggagcacagtgcagaggagcacagaaacaggcctggccgtggagatgaggaactggatgacccggcaggccagccgggagagcacagatggctccatgaacagctacagcagcgagggcaacctgatcttccctggggtgcggctggccagtgacagccagttcagtgacttcctggatggcctgggccctgcccagctggtgggccggcagaccctggccaccccagccatgggagacatccaggtgggcatgatggacaagaagggccagctggaggtggagatcatccgggcccggggcctggtggtgaagccaggcagcaagaccctgcctgccccctacgtgaaggtgtacctgctggacaacggggtgtgcatcgccaagaagaagaccaaggtggccaggaagaccctggagcccctgtaccagcagctgctgagctttgaggagagcccccagggcaaggtgctgcagatcatcgtgtggggagactatggccgcatggaccacaagagcttcatgggcgtggcccagatcctgctggatgagctggagctgagcaacatggtgattggctggttcaagctgttcccccccagcagcctggtggaccccaccctggcccccctgacccggcgggccagccagagcagcctggagagcagcacaggccccagctacagccgctcctag

SEQ ID NO: 167422 - DNA, 4161 bp, synthetic construct
  misc_feature 1..4161: note = Description of Artificial Sequence: Synthetic coding sequence
  source 1..4161: mol_type = other DNA
atgtctgcccctgtgggcccccggggccgcctggcccccatcccagctgccagccagccccccctgcagcctgagatgccagacctgagccacctgacagaggaggagaggaagatcatcctggccgtgatggaccggcagaagaaggaggtgaaggaggagcacaagccccagctgacccagtggttccccttcagcggcatcacagagctggtgaacaacgtgctgcagccccagcagaagcagcagaatgagaaggagccccagaccaagctgcaccagcagtttgagatgtacaaggagcaggtgaagaagatgggagaggagagccagcagcagcaggagcagaagggagatgcccccacctgtggcatctgccacaagaccaagtttgctgatggctgcggccacaactgcagctactgccagaccaagttctgtgcccgctgtggcggccgggtgtccctgcggagcaacaaggtgatgtgggtgtgcaacctgtgcaggaagcagcaggagatcctgaccaagagcggggcctggttctacaacagcggcagcaacaccccccagcagcctgaccagaaggtgctgcggggcctgagaaatgaggaggccccccaggagaagaagcccaagctgcacgagcagacccagttccagggccccagcggggacctgtctgtgcctgctgtggagaagagccgcagccacggcctgacccggcagcacagcatcaagaatggcagcggcgtgaagcaccacatcgccagtgacatcgccagtgacaggaagaggagccccagcgtgtcccgggaccagaacagaagatatgaccagcgggaggagcgggaggagtacagccagtatgccaccagtgacacagccatgcccaggagccccagcgactatgctgacagaagaagccagcacgagccccagttctatgaagattctgaccacctgagctacagagacagcaacagaagaagccaccgccacagcaaggagtacatcgtggatgatgaagatgtggagagcagagatgaatatgagcggcagaggcgggaggaggagtaccagagccgctacagaagtgaccccaacctggcccgctaccctgtgaagccccagccctatgaggagcagatgagaattcatgctgaggtgtcccgggcccggcatgaaagaagacacagtgatgtgtccctggccaatgctgacctggaggacagccgcatctccatgctgaggatggaccggcccagccggcagaggagcatcagcgagaggagagctgccatggagaaccagaggagctacagcatggagaggacccgggaggcccagggccccagcagctatgcccagaggaccaccaaccacagcccccccaccccccggcgcagccccctgcccatcgacagaccagacctgcggaggacagacagcctgaggaagcagcaccacctggaccccagcagcgctgtgaggaagaccaagcgggagaagatggagaccatgctgagaaatgacagcctgagcagtgaccagagcgagagcgtgcggcccccaccacccaagccccacaagagcaagaagggcggcaagatgaggcagatcagcctgagcagcagcgaggaggagctggccagcaccccagagtacaccagctgtgatgatgtggagattgagagcgagagcgtgtctgagaagggggacatggactacaactggctggaccacacctcctggcacagcagcgaggccagccccatgagcctgcaccctgtgacctggcagcccagcaaggatggagacaggctcatcggccgcatcctgctgaacaagaggctgaaggatggctctgtgccccgggacagcggggccatgctgggcctgaaggtggtgggcggcaagatgacagagagcggccgcctgtgtgccttcatcaccaaggtgaagaagggcagcctggccgacacagtgggccacctgcggcctggagatgaggtgctggagtggaatggccgcctgctgcagggcgccacctttgaggaggtgtacaacatcatcctggagagcaagccagagccccaggtggagctggtggtgtcccggcccatcggggacatcccccgcatcccagacagcacccacgcccagctggagagcagcagcagcagctttgagagccagaagatggaccggcccagcatctctgtgaccagccccatgagccctggcatgctgagagatgtgccccagttcctgagcggccagctgagcatcaagctgtggtttgacaaggtgggccaccagctgattgtgaccatcctgggcgccaaggacctgcccagcagagaagatggccggcccaggaacccctacgtgaagatctacttcctgcctgacagaagtgacaagaacaagaggaggaccaagacagtgaagaagaccctggagcccaagtggaaccagaccttcatctacagccctgtgcaccggcgggagttccgggagaggatgctggagatcaccctgtgggaccaggcccgggtgcgggaggaggagagcgagttcctgggggagatcctgattgagctggagacagccctgctggatgatgagccccactggtacaagctgcagacccatgatgtgagcagcctgcccctgccccaccccagcccctacatgccccggcggcagctgcacggggagagccccacccggcggctgcagaggagcaagaggatcagtgacagcgaggtgtctgactatgactgtgatgatggcatcggcgtggtgtctgactacagacatgatggccgggacctgcagagcagcaccctgtctgtgcctgagcaggtgatgagcagcaaccactgcagccccagcggcagcccccaccgggtggatgtgattggccgcaccaggtcctggagccccagcgtgcccccaccccagagcagaaatgtggagcagggcctgcggggcaccaggaccatgacaggccactacaacaccatcagcaggatggacagacaccgggtgatggatgaccactacagcccagaccgggacagccacttcctgaccctgcccaggagccgctacagccagaccatcgaccaccaccacagagatggccgggactgtgaggccgctgaccggcagccctaccacaggagccgcagcacagagcagaggcccctgctggagaggaccaccaccaggagccgcagcacagagaggccagacaccaacctgatgaggtccatgcccagcctgatgacaggccgcagcgccccacccagccctgccctgagccgcagccaccccaggactggatctgtgcagaccagccccagcagcacccctgtggccggccggcggggccggcagctgccccagctgccccccaagggcaccctggacaggaaggccggcggcaagaagctgcggagcacagtgcagaggagcacagaaacaggcctggccgtggagatgaggaactggatgacccggcaggccagccgggagagcacagatggctccatgaacagctacagcagcgagggcaacctgatcttccctggggtgcggctggccagtgacagccagttcagtgacttcctggatggcctgggccctgcccagctggtgggccggcagaccctggccaccccagccatgggagacatccaggtgggcatgatggacaagaagggccagctggaggtggagatcatccgggcccggggcctggtggtgaagccaggcagcaagaccctgcctgccccctacgtgaaggtgtacctgctggacaacggggtgtgcatcgccaagaagaagaccaaggtggccaggaagaccctggagcccctgtaccagcagctgctgagctttgaggagagcccccagggcaaggtgctgcagatcatcgtgtggggagactatggccgcatggaccacaagagcttcatgggcgtggcccagatcctgctggatgagctggagctgagcaacatggtgattggctggttcaagctgttcccccccagcagcctggtggaccccaccctggcccccctgacccggcgggccagccagagcagcctggagagcagcacaggccccagctacagccgctcctag

SEQ ID NO: 167423 - DNA, 858 bp, synthetic construct
  misc_feature 1..858: note = Description of Artificial Sequence: Synthetic coding sequence
  source 1..858: mol_type = other DNA
atgggccggcagggcctgggcggggccagcgctgctggccgctccatgcagaggagccagagccgcagcagcctgagcgccagctttgaggccctggccggctacttcccctgcatgaacagcctggaggaggaggagggggaggccggcggcaagaagctgcggagcacagtgcagaggagcacagagaccggcctggccgtggagatgaggaactggatgacccggcaggccagccgggagagcacagatggctccatgaacagctacagcagcgagggcaacctgatcttccctggggtgcggctggccagtgacagccagttcagtgacttcctggatggcctgggccctgcccagctggtgggccggcagaccctggccaccccagccatgggagacatccaggtgggcatgatggacaagaagggccagctggaggtggagatcatccgggcccggggcctggtggtgaagccaggcagcaagaccctgcctgccccctacgtgaaggtgtacctgctggacaatggagtgtgcatcgccaagaagaagaccaaggtggccaggaagaccctggagcccctgtaccagcagctgctgagctttgaggagagcccccagggcaaggtgctgcagatcatcgtgtggggagactatggccgcatggaccacaagagcttcatgggcgtggcccagatcctgctggatgagctggagctgagcaacatggtgattggctggttcaagctgtttcctcccagcagcctggtggaccccaccctggcccccctgacccggcgggccagccagagcagcctggagagcagcacaggccccagctacagccgctcctag

SEQ ID NO: 167424 - DNA, 384 bp, synthetic construct
  misc_feature 1..384: note = Description of Artificial Sequence: Synthetic coding sequence
  source 1..384: mol_type = other DNA
atgacagagagcggccgcctgtgtgccttcatcaccaaggtgaagaagggcagcctggccgacacagtgggccacctgcggcctggagatgaggtgctggagtggaatggccgcctgctgcagggcgccacctttgaggaggtgtacaacatcatcctggagagcaagccagagccccaggtggagctggtggtgtcccggcccatcggggacatcccccgcatcccagacagcacccacgcccagctggagagcagcctgcccggcctggcctggtggctgaccagggtcatcccagccctgtgggaggccgaggccggcggcagccggggccaggagattgagaccatcctggccaacacagtgaagccccggctgtactag

SEQ ID NO: 167425 - DNA, 4236 bp, synthetic construct
  misc_feature 1..4236: note = Description of Artificial Sequence: Synthetic coding sequence
  source 1..4236: mol_type = other DNA
atgtctgcccctgtgggcccccggggccgcctggcccccatcccagctgccagccagccccccctgcagcctgagatgccagacctgagccacctgacagaggaggagaggaagatcatcctggccgtgatggaccggcagaagaaggaggtgaaggaggagcacaagccccagctgacccagtggttccccttcagcggcatcacagagctggtgaacaacgtgctgcagccccagcagaagcagcagaatgagaaggagccccagaccaagctgcaccagcagtttgagatgtacaaggagcaggtgaagaagatgggagaggagagccagcagcagcaggagcagaagggagatgcccccacctgtggcatctgccacaagaccaagtttgctgatggctgcggccacaactgcagctactgccagaccaagttctgtgcccgctgtggcggccgggtgtccctgcggagcaacaaggtgatgtgggtgtgcaacctgtgcaggaagcagcaggagatcctgaccaagagcggggcctggttctacaacagcggcagcaacaccccccagcagcctgaccagaaggtgctgcggggcctgagaaatgaggaggccccccaggagaagaagcccaagctgcacgagcagacccagttccagggccccagcggggacctgtctgtgcctgctgtggagaagagccgcagccacggcctgacccggcagcacagcatcaagaatggcagcggcgtgaagcaccacatcgccagtgacatcgccagtgacaggaagaggagccccagcgtgtcccgggaccagaacagaagatatgaccagcgggaggagcgggaggagtacagccagtatgccaccagtgacacagccatgcccaggagccccagcgactatgctgacagaagaagccagcacgagccccagttctatgaagattctgaccacctgagctacagagacagcaacagaagaagccaccgccacagcaaggagtacatcgtggatgatgaagatgtggagagcagagatgaatatgagcggcagaggcgggaggaggagtaccagagccgctacagaagtgaccccaacctggcccgctaccctgtgaagccccagccctatgaggagcagatgagaattcatgctgaggtgtcccgggcccggcatgaaagaagacacagtgatgtgtccctggccaatgctgacctggaggacagccgcatctccatgctgaggatggaccggcccagccggcagaggagcatcagcgagaggagagctgccatggagaaccagaggagctacagcatggagaggacccgggaggcccagggccccagcagctatgcccagaggaccaccaaccacagcccccccaccccccggcgcagccccctgcccatcgacagaccagacctgcggaggacagacagcctgaggaagcagcaccacctggaccccagcagcgctgtgaggaagaccaagcgggagaagatggagaccatgctgagaaatgacagcctgagcagtgaccagagcgagagcgtgcggcccccaccacccaagccccacaagagcaagaagggcggcaagatgaggcagatcagcctgagcagcagcgaggaggagctggccagcaccccagagtacaccagctgtgatgatgtggagattgagagcgagagcgtgtctgagaagggggacagccagaagggcaagaggaagaccagcgagcaggccgtgctgagtgacagcaacaccaggtctgagcggcagaaggagatgatgtactttggaggccacagcctggaggaggacctggagtggagcgagccccagatcaaggacagcggcgtggacacctgcagcagcaccaccctgaatgaggagcacagccacagcgacaagcaccctgtgacctggcagcccagcaaggatggagaccggctgattggccgcatcctgctgaacaagaggctgaaggatggctctgtgccccgggacagcggggccatgctgggcctgaaggtggtgggcggcaagatgacagaaagtggccgcctgtgtgccttcatcaccaaggtgaagaagggcagcctggccgacacagtgggccacctgcggcctggagatgaggtgctggagtggaatggccgcctgctgcagggcgccacctttgaggaggtgtacaacatcatcctggagagcaagccagagccccaggtggagctggtggtgtcccggcccatcggggacatcccccgcatcccagacagcacccacgcccagctggagagcagcagcagcagctttgagagccagaagatggaccggcccagcatctctgtgaccagccccatgagccctggcatgctgagagatgtgccccagttcctgagcggccagctgagcatcaagctgtggtttgacaaggtgggccaccagctgattgtgaccatcctgggcgccaaggacctgcccagccgggaggatggccggcccaggaacccctacgtgaagatctacttcctgcctgacagaagtgacaagaacaagaggaggaccaagacagtgaagaagaccctggagcccaagtggaaccagaccttcatctacagccctgtgcacagaagagagttccgggagaggatgctggagatcaccctgtgggaccaggcccgggtgcgggaggaggagagcgagttcctgggggagatcctgattgagctggagacagccctgctggatgatgagccccactggtacaagctgcagacccatgatgtgagcagcctgcccctgccccaccccagcccctacatgccccggcggcagctgcatggagagagccccacccggcggctgcagaggagcaagaggatcagtgacagcgaggtgtctgactatgactgtgatgatggcattggagtggtgtctgactacagacatgatggccgggacctgcagagcagcaccctgtctgtgcctgagcaggtgatgagcagcaaccactgcagccccagcggcagcccccaccgggtggatgtgattggaagaaccaggtcctggagccccagcgtgcccccaccccagagcagaaatgtggagcagggcctgcggggcaccaggaccatgacaggccactacaacaccatcagcaggatggacagacaccgggtgatggatgaccactacagcccagaccgggaccgggactgtgaggccgctgaccggcagccctaccacaggagccgcagcacagagcagaggcccctgctggagaggaccaccaccaggagccgcagcacagagaggccagacaccaacctgatgaggtccatgcccagcctgatgacaggccgcagcgccccacccagccctgccctgagccgcagccaccccaggacaggctctgtgcagaccagccccagcagcacccctgtggccggcagaagaggccggcagctgccccagctgccccccaagggcaccctggacaggaaggccggcggcaagaagctgcggagcacagtgcagaggagcacagagaccggcctggccgtggagatgaggaactggatgacccggcaggccagccgggagagcacagatggctccatgaacagctacagcagcgagggcaacctgatcttccctggggtgcggctggccagtgacagccagttcagtgacttcctggatggcctgggccctgcccagctggtgggccggcagaccctggccaccccagccatgggagacatccaggtgggcatgatggacaagaagggccagctggaggtggagatcatccgggcccggggcctggtggtgaagccaggcagcaagaccctgcctgccccctacgtgaaggtgtacctgctggacaatggagtgtgcatcgccaagaagaagaccaaggtggccaggaagaccctggagcccctgtaccagcagctgctgagctttgaggagagcccccagggcaaggtgctgcagatcatcgtgtggggagactatggccgcatggaccacaagagcttcatgggcgtggcccagatcctgctggatgagctggagctgagcaacatggtgattggctggttcaagctgtttcctcccagcagcctggtggaccccaccctggcccccctgacccggcgggccagccagagcagcctggagagcagcacaggccccagctacagccgctcctag

SEQ ID NO: 167426 - DNA, 4050 bp, synthetic construct
  misc_feature 1..4050: note = Description of Artificial Sequence: Synthetic coding sequence
  source 1..4050: mol_type = other DNA
atgtctgcccctgtgggcccccggggccgcctggcccccatcccagctgccagccagccccccctgcagcctgagatgccagacctgagccacctgacagaggaggagaggaagatcatcctggccgtgatggaccggcagaagaaggaggaggagaaggagcagagcgtgctgaagaagctgcaccagcagtttgagatgtacaaggagcaggtgaagaagatgggagaggagagccagcagcagcaggagcagaagggagatgcccccacctgtggcatctgccacaagaccaagtttgctgatggctgcggccacaactgcagctactgccagaccaagttctgtgcccgctgtggcggccgggtgtccctgcggagcaacaaggtgatgtgggtgtgcaacctgtgcaggaagcagcaggagatcctgaccaagagcggggcctggttctacaacagcggcagcaacaccccccagcagcctgaccagaaggtgctgcggggcctgagaaatgaggaggccccccaggagaagaagcccaagctgcacgagcagacccagttccagggccccagcggggacctgtctgtgcctgctgtggagaagagccgcagccacggcctgacccggcagcacagcatcaagaatggaagtggagtgaagcaccacatcgccagtgacatcgccagtgacaggaagaggagccccagcgtgtcccgggaccagaacagaagatatgaccagcgggaggagcgggaggagtacagccagtatgccaccagtgacacagccatgcccaggagccccagcgactatgctgaccggcgcagccagcacgagccccagttctatgaggacagcgaccacctgagctacagagacagcaacagaagaagccaccgccacagcaaggagtacatcgtggatgatgaagatgtggagagcagagatgaatatgaaaggcagaggcgggaggaggagtaccagagccgctacagaagtgaccccaacctggcccgctaccctgtgaagccccagccctatgaggagcagatgagaattcatgctgaggtgtcccgggcccggcatgagcggcggcacagtgatgtgtccctggccaatgctgacctggaggacagccgcatctccatgctgaggatggaccggcccagccggcagaggagcatcagcgagcggcgggccgccatggagaaccagaggagctacagcatggagaggacccgggaggcccagggccccagcagctatgcccagaggaccaccaaccacagcccccccaccccaagaagaagccccctgcccatcgacagaccagacctgcggaggacagacagcctgaggaagcagcaccacctggaccccagcagcgctgtgaggaagaccaagcgggagaagatggagaccatgctgagaaatgacagcctgagcagtgaccagagcgagagcgtgcggcccccaccacccaagccccacaagagcaagaagggcggcaagatgaggcagatcagcctgagcagcagcgaggaggagctggccagcaccccagagtacaccagctgtgatgatgtggagattgaaagtgaatctgtgtctgagaagggggacatggactacaactggctggaccacacctcctggcacagcagcgaggccagccccatgagcctgcaccctgtgacctggcagcccagcaaggatggagaccggctgattggccgcatcctgctgaacaagaggctgaaggatggctctgtgccccgggacagcggggccatgctgggcctgaaggtggtgggcggcaagatgacagaaagtggccgcctgtgtgccttcatcaccaaggtgaagaagggcagcctggccgacacagtgggccacctgcggcctggagatgaggtgctggagtggaatggccgcctgctgcagggcgccacctttgaggaggtgtacaacatcatcctggagagcaagccagagccccaggtggagctggtggtgtcccggcccatcggggacatcccccgcatcccagacagcacccacgcccagctggagagcagcagcagcagctttgagagccagaagatggaccggcccagcatctctgtgaccagccccatgagccctggcatgctgagagatgtgccccagttcctgagcggccagctgagcagccagagcctgagcaggaggaccaccccatttgtgccccgggtgcagatcaagctgtggtttgacaaggtgggccaccagctgattgtgaccatcctgggcgccaaggacctgcccagccgggaggatggccggcccaggaacccctacgtgaagatctacttcctgcctgacagaagtgacaagaacaagaggaggaccaagacagtgaagaagaccctggagcccaagtggaaccagaccttcatctacagccctgtgcacagaagagagttccgggagaggatgctggagatcaccctgtgggaccaggcccgggtgcgggaggaggagagcgagttcctgggggagatcctgattgagctggagacagccctgctggatgatgagccccactggtacaagctgcagacccatgatgtgagcagcctgcccctgccccaccccagcccctacatgccccggcggcagctgcatggagagagccccacccggcggctgcagaggagcaagaggatcagtgacagcgaggtgtctgactatgactgtgatgatggcattggagtggtgtctgactacagacatgatggccgggacctgcagagcagcaccctgtctgtgcctgagcaggtgatgagcagcaaccactgcagccccagcggcagcccccaccgggtggatgtgattggaagaaccaggtcctggagccccagcgtgcccccaccccagagcagaaatgtggagcagggcctgcggggcaccaggaccatgacaggccactacaacaccatcagcaggatggacagacaccgggtgatggatgaccactacagcccagaccgggaccgggactgtgaggccgctgaccggcagccctaccacaggagccgcagcacagagcagaggcccctgctggagaggaccaccaccaggagccgcagcacagagaggccagacaccaacctgatgaggtccatgcccagcctgatgacaggccgcagcgccccacccagccctgccctgagccgcagccaccccaggacaggctctgtgcagaccagccccagcagcacccctgtggccggcagaagaggccggcagctgccccagctgccccccaagggcaccctggacaggaaggccggcggcaagaagctgcggagcacagtgcagaggagcacagagaccggcctggccgtggagatgaggaactggatgacccggcaggccagccgggagagcacagatggctccatgaacagctacagcagcgagggcaacctgatcttccctggggtgcggctggccagtgacagccagttcagtgacttcctggatggcctgggccctgcccagctggtgggccggcagaccctggccaccccagccatgggagacatccaggtgggcatgatggacaagaagggccagctggaggtggagatcatccgggcccggggcctggtggtgaagccaggcagcaagaccctgcctgccccctacgtgaaggtgtacctgctggacaatggagtgtgcatcgccaagaagaagaccaaggtggccaggaagaccctggagcccctgtaccagcagctgctgagctttgaggagagcccccagggcaaggtgctgcagatcatcgtgtggggagactatggccgcatggaccacaagagcttcatgggcgtggcccagatcctgctggatgagctggagctgagcaacatggtgattggctggttcaagctgtttcctcccagcagcctggtggaccccaccctggcccccctgacccggcgggccagccagagcagcctggagagcagcacaggccccagctacagccgctcctag

SEQ ID NO: 167427 - DNA, 3492 bp, synthetic construct
  misc_feature 1..3492: note = Description of Artificial Sequence: Synthetic coding sequence
  source 1..3492: mol_type = other DNA
atgcagtttgagaccctgcggcaggtgtgcaacagcgtgctgagccacttccacggcgtcttcagcagcccccccaacatcctgcagaatgagctgtttggccagaccctgaacaatgccaggaagaggagccccagcgtgtcccgggaccagaacagaagatatgaccagcgggaggagcgggaggagtacagccagtatgccaccagtgacacagccatgcccaggagccccagcgactatgctgaccggcgcagccagcacgagccccagttctatgaggacagcgaccacctgagctacagagacagcaacagaagaagccaccgccacagcaaggagtacatcgtggatgatgaagatgtggagagcagagatgaatatgaaaggcagaggcgggaggaggagtaccagagccgctacagaagtgaccccaacctggcccgctaccctgtgaagccccagccctatgaggagcagatgagaattcatgctgaggtgtcccgggcccggcatgagcggcggcacagtgatgtgtccctggccaatgctgacctggaggacagccgcatctccatgctgaggatggaccggcccagccggcagaggagcatcagcgagcggcgggccgccatggagaaccagaggagctacagcatggagaggacccgggaggcccagggccccagcagctatgcccagaggaccaccaaccacagcccccccaccccaagaagaagccccctgcccatcgacagaccagacctgcggaggacagacagcctgaggaagcagcaccacctggaccccagcagcgctgtgaggaagaccaagcgggagaagatggagaccatgctgagaaatgacagcctgagcagtgaccagagcgagagcgtgcggcccccaccacccaagccccacaagagcaagaagggcggcaagatgaggcagatcagcctgagcagcagcgaggaggagctggccagcaccccagagtacaccagctgtgatgatgtggagattgaaagtgaatctgtgtctgagaagggggacatggactacaactggctggaccacacctcctggcacagcagcgaggccagccccatgagcctgcaccctgtgacctggcagcccagcaaggatggagaccggctgattggccgcatcctgctgaacaagaggctgaaggatggctctgtgccccgggacagcggggccatgctgggcctgaaggtggtgggcggcaagatgacagaaagtggccgcctgtgtgccttcatcaccaaggtgaagaagggcagcctggccgacacagtgggccacctgcggcctggagatgaggtgctggagtggaatggccgcctgctgcagggcgccacctttgaggaggtgtacaacatcatcctggagagcaagccagagccccaggtggagctggtggtgtcccggcccatcggggacatcccccgcatcccagacagcacccacgcccagctggagagcagcagcagcagctttgagagccagaagatggaccggcccagcatctctgtgaccagccccatgagccctggcatgctgagagatgtgccccagttcctgagcggccagctgagcatcaagctgtggtttgacaaggtgggccaccagctgattgtgaccatcctgggcgccaaggacctgcccagccgggaggatggccggcccaggaacccctacgtgaagatctacttcctgcctgacagaagtgacaagaacaagaggaggaccaagacagtgaagaagaccctggagcccaagtggaaccagaccttcatctacagccctgtgcacagaagagagttccgggagaggatgctggagatcaccctgtgggaccaggcccgggtgcgggaggaggagagcgagttcctgggggagatcctgattgagctggagacagccctgctggatgatgagccccactggtacaagctgcagacccatgatgtgagcagcctgcccctgccccaccccagcccctacatgccccggcggcagctgcatggagagagccccacccggcggctgcagaggagcaagaggatcagtgacagcgaggtgtctgactatgactgtgatgatggcattggagtggtgtctgactacagacatgatggccgggacctgcagagcagcaccctgtctgtgcctgagcaggtgatgagcagcaaccactgcagccccagcggcagcccccaccgggtggatgtgattggaagaaccaggtcctggagccccagcgtgcccccaccccagagcagaaatgtggagcagggcctgcggggcaccaggaccatgacaggccactacaacaccatcagcaggatggacagacaccgggtgatggatgaccactacagcccagaccgggacagccacttcctgaccctgcccaggagccgctacagccagaccatcgaccaccaccacagagatggccgggactgtgaggccgctgaccggcagccctaccacaggagccgcagcacagagcagaggcccctgctggagaggaccaccaccaggagccgcagcacagagaggccagacaccaacctgatgaggtccatgcccagcctgatgacaggccgcagcgccccacccagccctgccctgagccgcagccaccccaggacaggctctgtgcagaccagccccagcagcacccctgtggccggcagaagaggccggcagctgccccagctgccccccaagggcaccctggacaggaaggccggcggcaagaagctgcggagcacagtgcagaggagcacagagaccggcctggccgtggagatgaggaactggatgacccggcaggccagccgggagagcacagatggctccatgaacagctacagcagcgagggcaacctgatcttccctggggtgcggctggccagtgacagccagttcagtgacttcctggatggcctgggccctgcccagctggtgggccggcagaccctggccaccccagccatgggagacatccaggtgggcatgatggacaagaagggccagctggaggtggagatcatccgggcccggggcctggtggtgaagccaggcagcaagaccctgcctgccccctacgtgaaggtgtacctgctggacaatggagtgtgcatcgccaagaagaagaccaaggtggccaggaagaccctggagcccctgtaccagcagctgctgagctttgaggagagcccccagggcaaggtgctgcagatcatcgtgtggggagactatggccgcatggaccacaagagcttcatgggcgtggcccagatcctgctggatgagctggagctgagcaacatggtgattggctggttcaagctgtttcctcccagcagcctggtggaccccaccctggcccccctgacccggcgggccagccagagcagcctggagagcagcacaggccccagctacagccgctcctag

SEQ ID NO: 167428 - DNA, 927 bp, synthetic construct
  misc_feature 1..927: note = Description of Artificial Sequence: Synthetic coding sequence
  source 1..927: mol_type = other DNA
atgtttaatggagagcccggccctgccagcagcggggccagcagaaatgtggtgcgcagcagcagcatcagcggggagatctgtggcagccagcaggccggcggcggggccggcaccaccacagccaagaagagaagaagcagcctgggcgccaagatggtggccatcgtgggcctgacccagtggagcaagagcaccctgcagctgccccagcctgagggcgccaccaagaagctgcggagcaacatccgccgcagcacagaaacaggaattgctgtggagatgaggagccgggtgacccggcagggcagccgggagagcacagatggcagcaccaacagcaacagcagtgatggcaccttcatcttccccaccacccggctgggcgctgagagccagttcagtgacttcctggatggcctgggccctgcccagatcgtgggccggcagaccctggccaccccacccatgggagatgtgcacatcgccatcatggacaggagcggccagctggaggtggaggtgattgaggcccggggcctgacccccaagccaggcagcaagagcctgcctgccacctacatcaaggtgtacctgctggagaatggagcctgcctggccaagaagaagaccaagatgaccaagaagacctgtgaccccctgtaccagcaggccctgctgtttgatgagggcccccagggcaaggtgctgcaggtgattgtgtggggagactatggccgcatggaccacaagtgcttcatgggcatggcccagatcatgctggatgagctggacctgtctgctgctgtgacaggctggtacaagctgttccccaccagctctgtggccgacagcaccctgggcagcctgacccggcggctgagccagagcagcctggagagcgccaccagccccagctgcagctag

SEQ ID NO: 167429 - DNA, 927 bp, synthetic construct; identical to SEQ ID NO: 167428
  misc_feature 1..927: note = Description of Artificial Sequence: Synthetic coding sequence
  source 1..927: mol_type = other DNA

SEQ ID NO: 167430 - DNA, 810 bp, synthetic construct
  misc_feature 1..810: note = Description of Artificial Sequence: Synthetic coding sequence
  source 1..810: mol_type = other DNA
atggagaggagccagagccggctgagcctgagcgccagctttgaggccctggccatctacttcccctgcatgaacagctttgatgatgaagatgctggggacagccggcggctgaagggggccatccagaggagcacagagaccggcctggccgtggagatgcccagcaggaccctgcggcaggccagccatgagagcattgaggacagcatgaacagctatggcagcgagggcaacctgaactacggcggcgtgtgcctggccagtgatgcccagttcagtgacttcctgggctccatgggccctgcccagtttgtgggccggcagaccctggccaccacccccatgggagatgtggagatcggcctgcaggagagaaatggccagctggaggtggacatcatccaggcccggggcctgacagccaagccaggcagcaagaccctgcctgctgcctacatcaaggcctacctgctggagaatggcatctgcatcgccaagaagaagaccaaggtggccaggaagagcctggaccccctgtacaaccaggtgctgctcttccctgagagcccccagggcaaggtgctgcaggtgattgtgtggggcaactacggccgcatggagaggaagcagttcatgggcgtggcccgggtgctgctggaggagctggacctgaccaccctggccgtgggctggtacaagctgttccccaccagctccatggtggaccctgccaccggccccctgctgcggcaggccagccagctgagcctggagagcacagtgggcccctgtggggagaggagctag

SEQ ID NO: 167431 - DNA, 813 bp, synthetic construct
  misc_feature 1..813: note = Description of Artificial Sequence: Synthetic coding sequence
  source 1..813: mol_type = other DNA
atggagaggagccagagccggctgagcctgagcgccagctttgaggccctggccatctacttcccctgcatgaacagctttgatgatgaagatgctgagggggacagccggcggctgaagggggccatccagaggagcacagaaacaggcctggccgtggagatgcccagcaggaccctgcggcaggccagccatgagagcattgaagattccatgaacagctatggcagcgagggcaacctgaactatggaggagtgtgcctggccagtgatgcccagttcagtgacttcctgggctccatgggccctgcccagtttgtgggccggcagaccctggccaccacccccatgggagatgtggagatcggcctgcaggagagaaatggccagctggaggtggacatcatccaggcccggggcctgacagccaagccaggcagcaagaccctgcctgctgcctacatcaaggcctacctgctggagaatggcatctgcatcgccaagaagaagaccaaggtggccaggaagagcctggaccccctgtacaaccaggtgctgctcttccctgagagcccccagggcaaggtgctgcaggtgattgtgtggggcaactacggccgcatggagaggaagcagttcatgggcgtggcccgggtgctgctggaggagctggacctgaccaccctggccgtgggctggtacaagctgttccccaccagctccatggtggaccctgccaccggccccctgctgcggcaggccagccagctgagcctggagagcacagtgggcccctgtggggagaggagctag

SEQ ID NO: 167432 - DNA, 759 bp, synthetic construct
  misc_feature 1..759: note = Description of Artificial Sequence: Synthetic coding sequence
  source 1..759: mol_type = other DNA
atggaggatggagtggccggcccccagctgggcgctgctgctgaggccgctgaggccgctgaggcccgggcccggcctggggtgaccctgcggccctttgcccccctgtctggagctgctgaggctgatgaaggaggaggagactggagcttcatcgactgtgagatggaggaggtggacctgcaggacctgcccagcgccaccatcgcctgccacctggacccccgggtgtttgtggatggcctgtgccgggccaagtttgagagcctcttccgcacctatgacaaggacatcaccttccagtacttcaagagcttcaagagggtgcgcatcaacttcagcaaccccttctctgctgctgatgcccggctgcagctgcacaagacagagttcctgggcaaggagatgaagctgtactttgcccagaccctgcacatcggcagcagccacctggccccacccaacccagacaagcagttcctgatcagccccccagccagcccccctgtgggctggaagcaggtggaggatgccacccctgtgatcaactatgacctgctgtatgccatcagcaagctgggccctggagagaagtatgagctgcatgctgccacagacaccacccccagcgtggtggtgcacgtgtgtgagagtgaccaggagaaggaggaggaggaggagatggagaggatgaggcggcccaagcccaagatcatccagacccggcggcctgagtacacccccatccacctgtcctag

SEQ ID NO: 167433 - DNA, 594 bp, synthetic construct
  misc_feature 1..594: note = Description of Artificial Sequence: Synthetic coding sequence
  source 1..594: mol_type = other DNA
atgcacttcaggaacttcaactacagcttcagcagcctcatcgcctgtgtggccaacagcgacatcttcagcgagagcgagacccgggccaagtttgagagcctcttccgcacctatgacaaggacatcaccttccagtacttcaagagcttcaagagggtgcgcatcaacttcagcaaccccttctctgctgctgatgcccggctgcagctgcacaagacagagttcctgggcaaggagatgaagctgtactttgcccagaccctgcacatcggcagcagccacctggccccacccaacccagacaagcagttcctgatcagccccccagccagcccccctgtgggctggaagcaggtggaggatgccacccctgtgatcaactatgacctgctgtatgccatcagcaagctgggccctggagagaagtatgagctgcacgccgccacagacaccaccccatctgtggtggtgcacgtgtgtgagagtgaccaggagaaggaggaggaggaggagatggagaggatgagaagacccaagcccaagatcatccagaccaggaggcctgagtacacccccatccacctgtcctag

SEQ ID NO: 167434 - DNA, 729 bp, synthetic construct
  misc_feature 1..729: note = Description of Artificial Sequence: Synthetic coding sequence
  source 1..729: mol_type = other DNA
atgcagggcgagcagggcagaagactcttccggctgctgctgaatgacctgcccggccgggaccggctgccctgcagctacccccagccccacgtggagcaggccagcaccagcgccagcccccggctgctggccgtgaacatccctgaggacaccctgctgagctacccagagagcagcctgcccctgcagaggcactgtgccttccaccgcttcagcaaggccaagtttgagagcctcttccgcacctatgacaaggacatcaccttccagtacttcaagagcttcaagagggtgcgcatcaacttcagcaaccccttctctgctgctgatgcccggctgcagctgcacaagacagagttcctgggcaaggagatgaagctgtactttgcccagaccctgcacatcggcagcagccacctggccccacccaacccagacaagcagttcctgatcagccccccagccagcccccctgtgggctggaagcaggtggaggatgccacccctgtgatcaactatgacctgctgtatgccatcagcaagctgggccctggagagaagtatgagctgcatgctgccacagacaccacccccagcgtggtggtgcacgtgtgtgagagtgaccaggagaaggaggaggaggaggagatggagaggatgaggcggcccaagcccaagatcatccagacccggcggcctgagtacacccccatccacctgtcctag

SEQ ID NO: 167435 - DNA, 354 bp, synthetic construct
  misc_feature 1..354: note = Description of Artificial Sequence: Synthetic coding sequence
  source 1..354: mol_type = other DNA
atgaagctgtactttgcccagaccctgcacatcggcagcagccacctggccccacccaacccagacaagcagttcctgatcagccccccagccagcccccctgtgggctggaagcaggtggaggatgccacccctgtgatcaactatgacctgctgtatgccatcagcaagctgggccctggagagaagtatgagctgcacgccgccacagacaccaccccatctgtggtggtgcacgtgtgtgagagtgaccaggagaaggaggaggaggaggagatggagaggatgagaagacccaagcccaagatcatccagaccaggaggcctgagtacacccccatccacctgtcctag

SEQ ID NO: 167436 - DNA, 354 bp, synthetic construct; identical to SEQ ID NO: 167435
  misc_feature 1..354: note = Description of Artificial Sequence: Synthetic coding sequence
  source 1..354: mol_type = other DNA

SEQ ID NO: 167437 - DNA, 354 bp, synthetic construct; identical to SEQ ID NO: 167435
  misc_feature 1..354: note = Description of Artificial Sequence: Synthetic coding sequence
  source 1..354: mol_type = other DNA

SEQ ID NO: 167438 - DNA, 732 bp, synthetic construct
  misc_feature 1..732: note = Description of Artificial Sequence: Synthetic coding sequence
  source 1..732: mol_type = other DNA
atgagaggagagagctacttcatcggcatgaggagccctggccagcagggccacgtgcctgaagatggcggcctcttcctgctgtgctgcatcgaccgggactgggccgtgacccgctgctttgctgaggaggccttccaggccatcacagacttcaatgacctgcccaacagcctgtttgcctgcaatgtgcaccagagcgtgtttgaaggagaggagagcaaggagaagtttgagggcctcttccgcacctatgatgactgtgtgaccttccagctgttcaagagcttccggcgggtgcgcatcaacttcagcaaccccaagtctgctgcccgggccagaattgagctgcacgagacccagttccggggcaagaagctgaagctgtactttgcccaggtgcagaccccagagacagatggagacaagctgcacctggccccaccccagcctgccaagcagttcctgatcagcccccccagcagcccccctgtgggctggcagcccatcaatgatgccacccctgtgctgaactatgacctgctgtatgctgtggccaagctgggccctggagagaagtatgagctgcacgccggcacagagagcaccccatctgtggtggtgcacgtgtgtgacagcgacatcgaggaggaggaggaccccaagaccagccccaagcccaagatcatccagaccaggaggcctggcctgccccccagcgtgagcaactag

SEQ ID NO: 167439 - DNA, 594 bp, synthetic construct
  misc_feature 1..594: note = Description of Artificial Sequence: Synthetic coding sequence
  source 1..594: mol_type = other DNA
atgcctgcccccagcatggactgtgatgtgtccaccctggtggcctgtgtggtggatgtggaggtgttcaccaaccaggaggtgaaggagaagtttgagggcctcttccgcacctatgatgactgtgtgaccttccagctgttcaagagcttccggcgggtgcgcatcaacttcagcaaccccaagtctgctgcccgggccagaattgagctgcacgagacccagttccggggcaagaagctgaagctgtactttgcccaggtgcagaccccagagacagatggagacaagctgcacctggccccaccccagcctgccaagcagttcctgatcagcccccccagcagcccccctgtgggctggcagcccatcaatgatgccacccctgtgctgaactatgacctgctgtatgctgtggccaagctgggccctggagagaagtatgagctgcacgccggcacagagagcaccccatctgtggtggtgcacgtgtgtgacagcgacatcgaggaggaggaggaccccaagaccagccccaagcccaagatcatccagaccaggaggcctggcctgccccccagcgtgagcaactag

SEQ ID NO: 167440 - DNA, 732 bp, synthetic construct; identical to SEQ ID NO: 167438
  misc_feature 1..732: note = Description of Artificial Sequence: Synthetic coding sequence
  source 1..732: mol_type = other DNA

SEQ ID NO: 167441 - DNA, 732 bp, synthetic construct; identical to SEQ ID NO: 167438
  misc_feature 1..732: note = Description of Artificial Sequence: Synthetic coding sequence
  source 1..732: mol_type = other DNA

SEQ ID NO: 167442 - DNA, 1596 bp, synthetic construct
  misc_feature 1..1596: note = Description of Artificial Sequence: Synthetic coding sequence
  source 1..1596: mol_type = other DNA
atggtggatgtgggcaagtggcccatcttcaccctgctgagcccccaggagatcgccagcatcaggaaggcctgtgtgtttggcaccagcgccagcgaggccctgtatgtgacagacaatgatgaggtgtttgtgtttggcctgaactacagcaactgcctgggcaccggggacaaccagagcaccctggtgcccaagaagctggagggcctgtgtgggaagaagatcaagagcctgtcctatggcagcggcccccacgtgctgctgagcacagaagatggagtggtgtatgcctggggccacaacggctacagccagctgggcaatggcaccaccaaccagggcatcgcccctgtgcaggtgtgcaccaacctgctgatcaagcaggtggtggaggtggcctgtggcagccaccacagcatggccctggccgcagatggagaggtgtttgcctggggctacaacaactgtggccaggtgggcagcggcagcacagccaaccagcccacccccaggaaggtgaccaactgcctgcacatcaagagggtggtgggcatcgcctgtggccagaccagctccatggctgtgctggacaatggagaggtgtatggctggggctacaatggaaatggccagctgggcctgggcaacaacggcaaccagctgacccctgtgcgggtggccgccctgcacagcgtgtgtgtgaaccagatcgtgtgtggctacgcccacaccctggccctgacagatgagggcctgctgtatgcctggggcgccaacacctacggccagctgggcactggaaacaagaacaacctgctgagccctgcccacatcatggtggagaaggagcgggtggtggagattgctgcctgccacagcgcccacaccagcgctgccaagacccagggcggccacgtgtacatgtggggccagtgccggggccagagcgtcatcctgccccacctgacccacttcagctgcacagatgatgtgtttgcctgctttgccaccccagctgtgtcctggaggctgctgtctgtggagcacgaggacttcctgactgtggccgagagcctgaagaaggagtttgacagccctgagacagctgacctgaagttcagaattgatggcaagtacatccacgtgcacaaggctgtgctgaagatccgctgtgagcacttccgctccatgttccagagctactggaatgaagacatgaaggaggtgattgaaattgaccagttctcctaccctgtgtaccgggccttcctgcagtacctgtacacagacacagtggacctgcccccagaagatgccatcggcctgctggacctggccaccagctactgtgagaaccggctgaagaagctgtgccagcacatcatcaagaggggcatcaccgtggagaatgccttcagcctcttctctgctgctgtgcgctatgatgctgaggacctggaggagttctgcttcaagttctgcatcaaccacctgacagaggtgacccagacagctgccttctggcagatggatggccccctgctgaaggagttcatcgccaaggccagcaaatgtggggccttcaagaactag

SEQ ID NO: 167443 - DNA, 1596 bp, synthetic construct; identical to SEQ ID NO: 167442
  misc_feature 1..1596: note = Description of Artificial Sequence: Synthetic coding sequence
  source 1..1596: mol_type = other DNA

SEQ ID NO: 167444 - DNA, 1068 bp, synthetic construct
  misc_feature 1..1068: note = Description of Artificial Sequence: Synthetic coding sequence
  source 1..1068: mol_type = other DNA
atggtggatgtgggcaagtggcccatcttcaccctgctgagcccccaggagatcgccagcatcaggaaggcctgtgtgtttggcaccagcgccagcgaggccctgtatgtgacagacaatgatgaggtgtttgtgtttggcctgaactacagcaactgcctgggcaccggggacaaccagagcaccctggtgcccaagaagctggagggcctgtgtgggaagaagatcaagagcctgtcctatggcagcggcccccacgtgctgctgagcacagaagatggagtggtgtatgcctggggccacaacggctacagccagctgggcaatggcaccaccaaccagggcatcgcccctgtgcaggtgtgcaccaacctgctgatcaagcaggtggtggaggtggcctgtggcagccaccacagcatggccctggccgcagatggagaggtgtttgcctggggctacaacaactgtggccaggtgggcagcggcagcacagccaaccagcccacccccaggaaggtgaccaactgcctgcacatcaagagggtggtgggcatcgcctgtggccagaccagctccatggctgtgctggacaatggagaggtgtatggctggggctacaatggaaatggccagctgggcctgggcaacaacggcaaccagctgacccctgtgcgggtggccgccctgcacagcgtgtgtgtgaaccagatcgtgtgtggctacgcccacaccctggccctgacagatgagggcctgctgtatgcctggggcgccaacacctacggccagctgggcactggaaacaagaacaacctgctgagccctgcccacatcatggtggagaaggagcgggtggtggagattgctgcctgccacagcgcccacaccagcgctgccaagacccagggcggccacgtgtacatgtggggccagtgccggggccagagcgtcatcctgccccacctgacccacttcagctgcacagatgatgtgtttgcctgctttgccaccccagctgtgtcctggaggctgctgtctgtggtgtccatcgtgattggcaagtag

SEQ ID NO: 167445 - DNA, 1656 bp, synthetic construct
  misc_feature 1..1656: note = Description of Artificial Sequence: Synthetic coding sequence
  source 1..1656: mol_type = other DNA
atggaggaggagctgcccctcttcagcggggacagcggcaagcctgtgcaggccaccctgagcagcctgaagatgctggatgtgggcaagtggcccatcttcagcctgtgcagcgaggaggagctgcagctgatccggcaggcctgtgtgtttggatctgctggaaatgaggtgctgtacaccaccgtgaatgatgagatctttgtgctgggcaccaactgctgcggctgcctgggcctgggagatgtgcagagcaccatcgagccccggcggctggacagcctgaatggcaagaagatcgcctgcctgtcctatggcagcggcccccacatcgtgctggccaccacagaaggagaggtgttcacctggggccacaatgcctacagccagctgggcaatggcaccaccaaccacggcctggtgccctgccacatcagcaccaacctgagcaacaagcaggtgattgaggtggcctgtggcagctaccacagcctggtgctgaccagtgatggagaggtgtttgcctggggctacaacaacagcggccaggtgggcagcggcagcacagtgaaccagcccatcccccggcgggtgacaggctgcctgcagaacaaggtggtggtgaccatcgcctgtggccagatgtgctgcatggctgtggtggacacaggagaggtgtatgtgtggggctacaatggaaatggccagctgggcctgggcaacagcggcaaccagcccaccccctgccgggtggccgccctgcagggcatccgggtgcagagggtggcctgtggctacgcccacaccctggtgctgacagatgagggccaggtgtatgcctggggcgccaacagctatggccagctgggcactggaaacaagagcaaccagagctaccccacccctgtgacagtggagaaggaccgcatcattgaaattgctgcctgccacagcacccacaccagcgctgccaagacccagggcggccacgtgtacatgtggggccagtgccggggccagagcgtcatcctgccccacctgacccacttcagctgcacagatgatgtgtttgcctgctttgccaccccagctgtgacctggaggctgctgtctgtggagccagatgaccacctgactgtggccgagagcctgaagcgggagtttgacaacccagacacagctgacctgaagttcctggtggatggcaagtacatctatgcccacaaggtgctgctgaagatccgctgtgagcacttccgcagcagcctggaggacaatgaagatgacatcgtggagatgtctgagttctcctaccctgtgtaccgggccttcctggagtacctgtacacagacagcatcagcctgagccctgaggaggccgtgggcctgctggacctggccaccttctaccgggagaaccggctgaagaagctgtgccagcagaccatcaagcagggcatctgtgaggagaatgccatcgccctgctgtctgctgctgtgaagtatgatgcccaggacctggaggagttctgcttccgcttctgcatcaaccacctgactgtggtgacccagaccagcggctttgctgagatggaccatgacctgctgaagaacttcatcagcaaggccagccgggtgggcgccttcaagaactag

SEQ ID NO: 167446 - DNA, 1671 bp, synthetic construct
  misc_feature 1..1671: note = Description of Artificial Sequence: Synthetic coding sequence
  source 1..1671: mol_type = other DNA
atgtctgccctgccccgggacctggagctgagcaacccccgggagaagctgaccaagcctgtgcaggccaccctgagcagcctgaagatgctggatgtgggcaagtggcccatcttcagcctgtgcagcgaggaggagctgcagctgatccggcaggcctgtgtgtttggcagcgctggaaatgaggtgctgtacaccaccgtgaatgatgagatctttgtgctgggcaccaactgctgcggctgcctgggcctgggagatgtgcagagcaccatcgagccccggcggctggacagcctgaatggcaagaagatcgcctgcctgtcctatggcagcggcccccacatcgtgctggccaccacagaaggagaggtgttcacctggggccacaatgcctacagccagctgggcaatggcaccaccaaccacggcctggtgccctgccacatcagcaccaacctgagcaacaagcaggtgattgaggtggcctgtggcagctaccacagcctggtgctgaccagtgatggagaggtgtttgcctggggctacaacaacagcggccaggtgggcagcggcagcacagtgaaccagcccatccccaggagagtgacaggctgcctgcagaacaaggtggtggtgaccatcgcctgtggccagatgtgctgcatggctgtggtggacaccggggaggtgtatgtgtggggctacaatggaaatggccagctgggcctgggcaacagcggcaaccagcccaccccctgccgggtggccgccctgcagggcatccgggtgcagagggtggcctgtggctacgcccacaccctggtgctgacagatgagggccaggtgtatgcctggggcgccaacagctatggccagctgggcaccggcaacaagagcaaccagagctaccccacccctgtgacagtggagaaggaccgcatcatcgagattgctgcctgccacagcacccacaccagcgctgccaagacccagggcggccacgtgtacatgtggggccagtgccggggccagagcgtcatcctgccccacctgacccacttcagctgcacagatgatgtgtttgcctgctttgccaccccagctgtgacctggaggctgctgtctgtggagccagatgaccacctgactgtggccgagagcctgaagcgggagtttgacaacccagacacagctgacctgaagttcctggtggatggcaagtacatctatgcccacaaggtgctgctgaagatccgctgtgagcacttccgcagcagcctggaggacaatgaagatgacatcgtggagatgtctgagttctcctaccctgtgtaccgggccttcctggagtacctgtacacagacagcatcagcctgagccctgaggaggccgtgggcctgctggacctggccaccttctacagagaaaatcggctgaagaagctgtgccagcagaccatcaagcagggcatctgtgaagaaaatgccatcgccctgctgtctgctgctgtgaagtatgatgcccaggacctggaggagttctgcttccgcttctgcatcaaccacctgactgtggtgacccagaccagcggctttgctgagatggaccatgacctgctgaagaacttcatcagcaaggccagccgggtgggcgccttcaagaactag

SEQ ID NO: 167447 - DNA, 1512 bp, synthetic construct
  misc_feature 1..1512: note = Description of Artificial Sequence: Synthetic coding sequence
  source 1..1512: mol_type = other DNA
atgctgcaggacggcagctgcaagcagatgctgctgatgctgctgattgtgcagcctgtgcaggccaccctgagcagcctgaagatgctggatgtgggcaagtggcccatcttcagcctgtgcagcgaggaggagctgcagctgatccggcaggcctgtgtgtttggatctgctggaaatgaggtgctgtacaccaccgtgaatgatgagatctttgtgctgggcaccaactgctgcggctgcctgggcctgggagatgtgcagagcaccatcgagccccggcggctggacagcctgaatggcaagaagatcgcctgcctgtcctatggcagcggcccccacatcgtgctggccaccacagaaggagaggtgttcacctggggccacaatgcctacagccagctgggcaatggcaccaccaaccacggcctggtgccctgccacatcagcaccaacctgagcaacaagcaggtgattgaggtggcctgtggcagctaccacagcctggtgctgaccagtgatggagaggtgtttgcctggggctacaacaacagcggccaggtgggcagcggcagcacagtgaaccagcccatcccccggcgggtgacaggctgcctgcagaacaaggtggtggtgaccatcgcctgtggccagatgtgctgcatggctgtggtggacacaggagaggtgtatgtgtggggctacaatggaaatggccagctgggcctgggcaacagcggcaaccagcccaccccctgccgggtggccgccctgcagggcatccgggtgcagagggtggcctgtggctacacccacaccagcgctgccaagacccagggcggccacgtgtacatgtggggccagtgccggggccagagcgtcatcctgccccacctgacccacttcagctgcacagatgatgtgtttgcctgctttgccaccccagctgtgacctggaggctgctgtctgtggagccagatgaccacctgactgtggccgagagcctgaagcgggagtttgacaacccagacacagctgacctgaagttcctggtggatggcaagtacatctatgcccacaaggtgctgctgaagatccgctgtgagcacttccgcagcagcctggaggacaatgaagatgacatcgtggagatgtctgagttctcctaccctgtgtaccgggccttcctggagtacctgtacacagacagcatcagcctgagccctgaggaggccgtgggcctgctggacctggccaccttctaccgggagaaccggctgaagaagctgtgccagcagaccatcaagcagggcatctgtgaggagaatgccatcgccctgctgtctgctgctgtgaagtatgatgcccaggacctggaggagttctgcttccgcttctgcatcaaccacctgactgtggtgacccagaccagcggctttgctgagatggaccatgacctgctgaagaacttcatcagcaaggccagccgggtgggcgccttcaagaactag

SEQ ID NO: 167448 - DNA, 1671 bp, synthetic construct
  misc_feature 1..1671: note = Description of Artificial Sequence: Synthetic coding sequence
  source 1..1671: mol_type = other DNA
ccctgcagcaaccgctacccaggcggcggcgctgacaaggccccagcctgtgaggagcctgtgcaggccaccctgagcagcctgaagatgctggatgtgggcaagtggcccatcttcagcctgtgcagcgaggaggagctgcagctgatccggcaggcctgtgtgtttggcagcgctggaaatgaggtgctgtacaccaccgtgaatgatgagatctttgtgctgggcaccaactgctgcggctgcctgggcctgggagatgtgcagagcaccatcgagccccggcggctggacagcctgaatggcaagaagatcgcctgcctgtcctatggcagcggcccccacatcgtgctggccaccacagaaggagaggtgttcacctggggccacaatgcctacagccagctgggcaatggcaccaccaaccacggcctggtgccctgccacatcagcaccaacctgagcaacaagcaggtgattgaggtggcctgtggcagctaccacagcctggtgctgaccagtgatggagaggtgtttgcctggggctacaacaacagcggccaggtgggcagcggcagcacagtgaaccagcccatccccaggagagtgacaggctgcctgcagaacaaggtggtggtgaccatcgcctgtggccagatgtgctgcatggctgtggtggacaccggggaggtgtatgtgtggggctacaatggaaatggccagctgggcctgggcaacagcggcaaccagcccaccccctgccgggtggccgccctgcagggcatccgggtgcagagggtggcctgtggctacgcccacaccctggtgctgacagatgagggccaggtgtatgcctggggcgccaacagctatggccagctgggcaccggcaacaagagcaaccagagctaccccacccctgtgacagtggagaaggaccgcatcatcgagattgctgcctgccacagcacccacaccagcgctgccaagacccagggcggccacgtgtacatgtggggccagtgccggggccagagcgtcatcctgccccacctgacccacttcagctgcacagatgatgtgtttgcctgctttgccaccccagctgtgacctggaggctgctgtctgtggagccagatgaccacctgactgtggccgagagcctgaagcgggagtttgacaacccagacacagctgacctgaagttcctggtggatggcaagtacatctatgcccacaaggtgctgctgaagatccgctgtgagcacttccgcagcagcctggaggacaatgaagatgacatcgtggagatgtctgagttctcctaccctgtgtaccgggccttcctggagtacctgtacacagacagcatcagcctgagccctgaggaggccgtgggcctgctggacctggccaccttctacagagaaaatcggctgaagaagctgtgccagcagaccatcaagcagggcatctgtgaagaaaatgccatcgccctgctgtctgctgctgtgaagtatgatgcccaggacctggaggagttctgcttccgcttctgcatcaaccacctgactgtggtgacccagaccagcggctttgctgagatggaccatgacctgctgaagaacttcatcagcaaggccagccgggtgggcgccttcaagaactag

SEQ ID NO: 167449 - DNA, 834 bp, synthetic construct
  misc_feature 1..834: note = Description of Artificial Sequence: Synthetic coding sequence
  source 1..834: mol_type = other DNA
atgtctggagtgaccacagagaccggcagcctggacagcgccaccgtggccaccagccagcccctggccgagtggcagctgtgcaaggcctctgtgtcccggggcatcattgaaattgctgcctgccacagcacccacaccagcgctgccaagacccagggcggccacgtgtacatgtggggccagtgccggggccagagcgtcatcctgccccacctgacccacttcagctgcacagatgatgtgtttgcctgctttgccaccccagctgtgacctggaggctgctgtctgtggagccagatgaccacctgactgtggccgagagcctgaagcgggagtttgacaacccagacacagctgacctgaagttcctggtggatggcaagtacatctatgcccacaaggtgctgctgaagatccgctgtgagcacttccgcagcagcctggaggacaatgaagatgacatcgtggagatgtctgagttctcctaccctgtgtaccgggccttcctggagtacctgtacacagacagcatcagcctgagccctgaggaggccgtgggcctgctggacctggccaccttctaccgggagaaccggctgaagaagctgtgccagcagaccatcaagcagggcatctgtgaggagaatgccatcgccctgctgtctgctgctgtgaagtatgatgcccaggacctggaggagttctgcttccgcttctgcatcaaccacctgactgtggtgacccagaccagcggctttgctgagatggaccatgacctgctgaagaacttcatcagcaaggccagccgggtgggcgccttcaagaactag

SEQ ID NO: 167450 - DNA, 846 bp, synthetic construct
  misc_feature 1..846: note = Description of Artificial Sequence: Synthetic coding sequence
  source 1..846: mol_type = other DNA
atgctggatgtgggcaagtggcccatcttcagcctgtgcagcgaggaggagctgcagctgatccggcaggcctgtgtgtttggatctgctggaaatgaggtgctgtacaccaccgtgaatgatgagatctttgtgctgggcaccaactgctgcggctgcctgggcctgggagatgtgcagagcaccatcgagccccggcggctggacagcctgaatggcaagaagatcgcctgcctgtcctatggcagcggcccccacatcgtgctggccaccacagaaggagaggtgttcacctggggccacaatgcctacagccagctgggcaatggcaccaccaaccacggcctggtgccctgccacatcagcaccaacctgagcaacaagcaggtgattgaggtggcctgtggcagctaccacagcctggtgctgaccagtgatggagaggtgtttgcctggggctacaacaacagcggccaggtgggcagcggcagcacagtgaaccagcccatcccccggcgggtgacaggctgcctgcagaacaaggtggtggtgaccatcgcctgtggccagatgtgctgcatggctgtggtggacacaggagaggtgtatgtgtggggctacaatggaaatggccagctgggcctgggcaacagcggcaaccagcccaccccctgccgggtggccgccctgcagggcatccgggtgcagagggactacagagactgcagcctgagcctgcacacccacgtgtgtggccaggatgctggctgggcccgggtgcacgtgggccctgtgcccggctctgtgcgggaccccccagccccccaccccctgctgctgcactag

SEQ ID NO: 167451 - DNA, 1359 bp, synthetic construct
  misc_feature 1..1359: note = Description of Artificial Sequence: Synthetic coding sequence
  source 1..1359: mol_type = other DNA
atgagccccaagagaattgccaagagaagaagccccccagcagatgccatccccaagagcaagaaggtgaaggacaccagggctgctgccagccggcgggtgcctggggcccggagctgccagggcgcctgtggccccagccccccagaccagaagaccaggcctgtgagccacaggagccacagcacagagcccggcctggtgctgaccctgggccagggagatgtgggccagctgggcctgggagaaaatgtgatggagaggaagaagccagccctggtgtccatcccagaagatgtggtgcaggccgaggccggcggcatgcacacagtgtgcctgagcaagagcggccaggtgtacagctttggctgcaatgatgagggcgccctgggccgggacacctctgtggagggcagcgagatggtgcctgggaaggtggagctgcaggagaaggtggtgcaggtgtctgctggggacagccacacagctgccctgacagatgatggccgggtcttcctgtggggcagcttccgggacaacaatggagtcatcggcctgctggagcccatgaagaagtccatggtgcctgtgcaggtgcagctggatgtgcctgtggtgaaggtggccagcggaaatgaccacctggtgatgctgacagcagatggagacctgtacaccctgggctgtggggagcagggccagctgggccgggtgcctgagctgtttgccaacagaggaggccggcagggcctggagcggctgctggtgcccaagtgtgtgatgctgaagagccggggcagccggggccacgtgcgcttccaggatgccttctgtggggcctacttcacctttgccatcagccatgagggccacgtgtatggcttcggcctgagcaactaccaccagctgggcaccccaggcacagagagctgcttcatcccccagaacctgaccagcttcaagaacagcaccaagtcctgggtgggcttcagcggcggccagcaccacacagtgtgcatggacagcgagggcaaggcctacagcctgggccgggcagaatatggccgcctgggcctgggggagggcgctgaggagaagagcatccccaccctcatcagccggctgcctgctgtgtcctctgtggcctgtggggcctctgtgggctatgctgtgaccaaggatggccgggtgtttgcctggggcatgggcaccaactaccagctgggcaccggccaggatgaagatgcctggagccctgtggagatgatgggcaagcagctggagaacagagtggtgctgtctgtgtcctctgggggccagcacacagtgctgctggtgaaggacaaggagcagagctag

SEQ ID NO: 167452 - DNA, 1266 bp, synthetic construct
  misc_feature 1..1266: note = Description of Artificial Sequence: Synthetic coding sequence
  source 1..1266: mol_type = other DNA
atgagccccaagagaattgccaagagaagaagccccccagcagatgccatccccaagagcaagaaggtgaaggtgagccacaggagccacagcacagagcccggcctggtgctgaccctgggccagggagatgtgggccagctgggcctgggggagaatgtgatggagaggaagaagccagccctggtgtccatcccagaagatgtggtgcaggccgaggccggcggcatgcacacagtgtgcctgagcaagagcggccaggtgtacagctttggctgcaatgatgaaggagccctgggccgggacacctctgtggagggcagcgagatggtgcctgggaaggtggagctgcaggagaaggtggtgcaggtgtctgctggggacagccacacagctgccctgacagatgatggccgggtcttcctgtggggcagcttccgggacaacaacggggtgattggcctgctggagcccatgaagaagtccatggtgcctgtgcaggtgcagctggatgtgcctgtggtgaaggtggccagcggaaatgaccacctggtgatgctgacagcagatggagacctgtacaccctgggctgtggggagcagggccagctgggccgggtgcctgagctgtttgccaacagaggaggccggcagggcctggagcggctgctggtgcccaagtgtgtgatgctgaagagccggggcagccggggccacgtgcgcttccaggatgccttctgtggggcctacttcacctttgccatcagccatgagggccacgtgtatggcttcggcctgagcaactaccaccagctgggcaccccaggcacagagagctgcttcatcccccagaacctgaccagcttcaagaacagcaccaagtcctgggtgggcttcagcggcggccagcaccacacagtgtgcatggattctgagggcaaggcctacagcctgggccgggcagaatatggccgcctgggcctgggggagggcgctgaggagaagagcatccccaccctcatcagccggctgcctgctgtgtcctctgtggcctgtggggcctctgtgggctatgctgtgaccaaggatggccgggtgtttgcctggggcatgggcaccaactaccagctgggcaccggccaggatgaagatgcctggagccctgtggagatgatgggcaagcagctggagaacagagtggtgctgtctgtgagcagcggcggccagcacacagtgctgctggtgaaggacaaggagcagagctag

SEQ ID NO: 167453 - DNA, 1266 bp, synthetic construct; identical to SEQ ID NO: 167452
  misc_feature 1..1266: note = Description of Artificial Sequence: Synthetic coding sequence
  source 1..1266: mol_type = other DNA

SEQ ID NO: 167454 - DNA, 1266 bp, synthetic construct; identical to SEQ ID NO: 167452
  misc_feature 1..1266: note = Description of Artificial Sequence: Synthetic coding sequence
  source 1..1266: mol_type = other DNA

SEQ ID NO: 167455 - DNA, 693 bp, synthetic construct
  misc_feature 1..693: note = Description of Artificial Sequence: Synthetic coding sequence
  source 1..693: mol_type = other DNA
atgagccccaagagaattgccaagagaagaagccccccagcagatgccatccccaagagcaagaaggtgaaggtgagccacaggagccacagcacagagcccggcctggtgctgaccctgggccagggagatgtgggccagctgggcctgggggagaatgtgatggagaggaagaagccagccctggtgtccatcccagaagatgtggtgcaggccgaggccggcggcatgcacacagtgtgcctgagcaagagcggccaggtgtacagctttggctgcaatgatgaaggagccctgggccgggacacctctgtggagggcagcgagatggtgcctgggaaggtggagctgcaggagaaggtggtgcaggtgtctgctggggacagccacacagctgccctgacagatgatggccgggtcttcctgtggggcagcttccgggacaacaacggggtgattggcctgctggagcccatgaagaagtccatggtgcctgtgcaggtgcagctggatgtgcctgtggtgaaggtggccagcggaaatgaccacctggtgatgctgacagcagatggagacctgtacaccctgggctgtggggagcagggccagctgggccgggtgcctgagctgtttgccaacagaggaggccggcagggcctggagcggctgctggtgcccaagtgtgtgatgtag

SEQ ID NO: 167456 - DNA, 852 bp, synthetic construct
  misc_feature 1..852: note = Description of Artificial Sequence: Synthetic coding sequence
  source 1..852: mol_type = other DNA
atgagccccaagagaattgccaagagaagaagccccccagcagatgccatccccaagagcaagaaggtgaaggtgagccacaggagccacagcacagagcccggcctggtgctgaccctgggccagggagatgtgggccagctgggcctgggggagaatgtgatggagaggaagaagccagccctggtgtccatcccagaagatgtggtgcaggccgaggccggcggcatgcacacagtgtgcctgagcaagagcggccaggtgtacagctttggctgcaatgatgaaggagccctgggccgggacacctctgtggagggcagcgagatggtgcctgggaaggtggagctgcaggagaaggtggtgcaggtgtctgctggggacagccacacagctgccctgacagatgatggccgggtcttcctgtggggcagcttccgggacaacaacggggtgattggcctgctggagcccatgaagaagtccatggtgcctgtgcaggtgcagctggatgtgcctgtggtgaaggtggccagcggaaatgaccacctggtgatgctgacagcagatggagacctgtacaccctgggctgtggggagcagggccagctgggccgggtgcctgagctgtttgccaacagaggaggccggcagggcctggagcggctgctggtgcccaagtgtgtgatgctgaagagccggggcagccggggccacgtgcgcttccaggatgccttctgtggggcctacttcacctttgccatcagccatgagggccacgtgtatggcttcggcctgagcaactaccaccagctgggcaccccaggcacagagagctgcttcatcccctag

SEQ ID NO: 167457 - DNA, 708 bp, synthetic construct
  misc_feature 1..708: note = Description of Artificial Sequence: Synthetic coding sequence
  source 1..708: mol_type = other DNA
atggcccgggaggagtgcaaggccctgctggatggcctgaacaagaccacagcctgctaccaccacctggtgctgactgtgggcggcagcgctgacagccagaacctgcggcaggagctgcagaagacccggcagaaggcccaggagctggccgtgtccacctgtgcccggctgacagctgtgctgcgggaccggggcctggccgcagatgaaagagctgagtttgagcggctgtgggtggccttcagcggctgcctggacctgctggaggccgacatgaggcgggccctggagctgggcgccgccttccccctgcacgccccccggcggcccctggtgaggactggagtggccggggccagcagcggcgtggccgcccgggccctgagcaccaggagcctgcggctggaggccgagggggactttgatgtggccgacctgcgggagctggagcgggaggtgctgcaggtgggggagatgattgacaacatggagatgaaggtgaatgtgccccgctggacagtgcaggcccggcaggccgccggggctgagctgctgagcacagtgtctgctggccccagctctgtggtgtccctgcaggagcggggcggcggctgtgaccccaggaaggccctggccgccatcctgtttggagctgtgctgctggccgctgtggccctggccgtgtgtgtggccaagctgtcctag

SEQ ID NO: 167458 - DNA, 630 bp, synthetic construct
  misc_feature 1..630: note = Description of Artificial Sequence: Synthetic coding sequence
  source 1..630: mol_type = other DNA
atgagagctgctgccatcagcacccccaagctggacaagatgcctggcatgttcttcagcgccaaccccaaggagctgaagggcaccacccacagcctgctggatgacaagatgcagaagagaagacccaagaccttcggcatggacatgaaggcctacctgcgctccatgatcccccacctggagagcggcatgaagagcagcaagagcaaggatgtgctgtctgctgctgaggtgatgcagtggagccagagcctggagaagctgctggccaaccagacaggccagaatgtgtttggcagcttcctgaagtctgagttcagcgaggagaacatcgagttctggctggcctgtgaggactacaagaagacagaaagtgacctgctgccctgcaaggccgaggagatctacaaggcctttgtgcacagtgatgctgccaagcagatcaacatcgacttccgcacccgggagagcacagccaagaagatcaaggcccccacccccacctgctttgatgaggcccagaaggtgatctacaccctgatggagaaggacagctacccccgcttcctgaagagtgacatctacctgaacctgctgaatgacctgcaggccaacagcctgaagtag

SEQ ID NO: 167459 - DNA, 1044 bp, synthetic construct
  misc_feature 1..1044: note = Description of Artificial Sequence: Synthetic coding sequence
  source 1..1044: mol_type = other DNA
atgcctgggaagcccaagcacctgggcgtgcccaacggccgcatggtgctggccgtgtctgatggagagctgagcagcaccaccggcccccagggccagggcgagggccggggcagcagcctgagcatccacagcctgcccagcggccccagcagccccttccccacctttgtgagcagcaagtctgagagccacaggaagagcctgggcagcacagaaggagagagcgagagcaggcctgggaagtactgctgcgtgtacctgcctgatggaacagccagcctggccctggcccggcccggcctgaccatccgggacatgctggccggcatctgtgagaagaggggcctgagcctgcctgacatcaaggtgtacctggtgggcaatgagcagaaggccctggtgctggaccaggactgcaccgtgctggccgaccaggaggtgcggctggagaaccgcatcacctttgagctggagctgacagccctggagcgggtggtgcgcatcagcgccaagcccaccaagaggctgcaggaggccctgcagcccatcctggagaagcacggcctgagccccctggaggtggtgctgcacaggcctggagagaagcagcccctggacctgggcaagctggtgtcctctgtggccgcccagaggctggtgctggacaccctgcccggggtgaagatcagcaaggcccgggacaagagcccctgccgcagccagggctgcccccccaggacccaggacaaggccacccaccccccaccagccagccccagcagcctggtgaaggtgcccagcagcgccaccgggaagaggcagacctgtgacatcgagggcctggtggagctgctgaacagagtgcagagcagcggggcccatgaccagaggggcctgctgaggaaggaggacctggtgctgcctgagttcctgcagctgcctgcccagggccccagcagcgaggagaccccaccccagaccaagtctgctgcccagcccatcggcggcagcctgaacagcaccacagattctgccctgtag

SEQ ID NO: 167460 - DNA, 1701 bp, synthetic construct
  misc_feature 1..1701: note = Description of Artificial Sequence: Synthetic coding sequence
  source 1..1701: mol_type = other DNA
atgcctgggaagcccaagcacctgggcgtgcccaacggccgcatggtgctggccgtgtctgatggagagctgagcagcaccaccggcccccagggccagggcgagggccggggcagcagcctgagcatccacagcctgcccagcggccccagcagccccttccccacagaggagcagcctgtggcctcctgggccctgagctttgagcggctgctgcaggaccccctgggcctggcctacttcacagagttcctgaagaaggagttcagcgcagaaaatgtgaccttctggaaggcctgtgagcgcttccagcagatcccagccagtgacacccagcagctggcccaggaggccaggaacatctaccaggagttcctgagcagccaggccctgagccctgtgaacatcgaccggcaggcctggctgggggaggaggtgctggccgagcccaggccagacatgttccgggcccagcagctgcagatcttcaacctgatgaagtttgacagctatgccaggtttgtgaagagccccctgtaccgggagtgcctgctggccgaggccgagggccggcccctgcgggagcccggcagcagccggctgggcagcccagatgccaccaggaagaagcccaagctgaagccaggcaagagcctgcccctgggcgtggaggagctgggccagctgccccctgtggagggccctgggggccggcccctgaggaagagcttcagaagagagctgggcggcacagccaatgctgccctgcggcgggagagccagggcagcctgaacagcagcgccagcctggacctgggcttcctggcctttgtgagcagcaagtctgagagccacaggaagagcctgggcagcacagaaggagagagcgagagcaggcctgggaagtactgctgcgtgtacctgcctgatggaacagccagcctggccctggcccggcccggcctgaccatccgggacatgctggccggcatctgtgagaagaggggcctgagcctgcctgacatcaaggtgtacctggtgggcaatgagcaggccctggtgctggaccaggactgcaccgtgctggccgaccaggaggtgcggctggagaaccgcatcacctttgagctggagctgacagccctggagcgggtggtgcgcatcagcgccaagcccaccaagaggctgcaggaggccctgcagcccatcctggagaagcacggcctgagccccctggaggtggtgctgcacaggcctggagagaagcagcccctggacctgggcaagctggtgtcctctgtggccgcccagaggctggtgctggacaccctgcccggggtgaagatcagcaaggcccgggacaagagcccctgccgcagccagggctgcccccccaggacccaggacaaggccacccaccccccaccagccagccccagcagcctggtgaaggtgcccagcagcgccaccgggaagaggcagacctgtgacatcgagggcctggtggagctgctgaacagagtgcagagcagcggggcccatgaccagaggggcctgctgaggaaagaagacctggtgctgcctgagttcctgcagctgcctgcccagggccccagcagcgaggagaccccaccccagaccaagtctgctgcccagcccatcggcggcagcctgaacagcaccacagacagcgccctgtag

SEQ ID NO: 167461 - DNA, 1314 bp, synthetic construct
  misc_feature 1..1314: note = Description of Artificial Sequence: Synthetic coding sequence
  source 1..1314: mol_type = other DNA
tgaagccctgtgaacatcgaccggcaggcctggctgggggaggaggtgctggccgagcccaggccagacatgttccgggcccagcagctgcagatcttcaacctgatgaagtttgacagctatgccaggtttgtgaagagccccctgtaccgggagtgcctgctggccgaggccgagggccggcccctgcgggagcccggcagcagccggctgggcagcccagatgccaccaggaagaagcccaagctgaagccaggcaagagcctgcccctgggcgtggaggagctgggccagctgccccctgtggagggccctgggggccggcccctgaggaagagcttcagaagagagctgggcggcacagccaatgctgccctgcggcgggagagccagggcagcctgaacagcagcgccagcctggacctgggcttcctggcctttgtgagcagcaagtctgagagccacaggaagagcctgggcagcacagaaggagagagcgagagcaggcctgggaagtactgctgcgtgtacctgcctgatggaacagccagcctggccctggcccggcccggcctgaccatccgggacatgctggccggcatctgtgagaagaggggcctgagcctgcctgacatcaaggtgtacctggtgggcaatgagcagaaggccctggtgctggaccaggactgcaccgtgctggccgaccaggaggtgcggctggagaaccgcatcacctttgagctggagctgacagccctggagcgggtggtgcgcatcagcgccaagcccaccaagaggctgcaggaggccctgcagcccatcctggagaagcacggcctgagccccctggaggtggtgctgcacaggcctggagagaagcagcccctggacctgggcaagctggtgtcctctgtggccgcccagaggctggtgctggacaccctgcccggggtgaagatcagcaaggcccgggacaagagcccctgccgcagccagggctgcccccccaggacccaggacaaggccacccaccccccaccagccagccccagcagcctggtgaaggtgcccagcagcgccaccgggaagaggcagacctgtgacatcgagggcctggtggagctgctgaacagagtgcagagcagcggggcccatgaccagaggggcctgctgaggaaggaggacctggtgctgcctgagttcctgcagctgcctgcccagggccccagcagcgaggagaccccaccccagaccaagtctgctgcccagcccatcggcggcagcctgaacagcaccacagattctgccctgtag

SEQ ID NO: 167462 - DNA, 609 bp, synthetic construct
  misc_feature 1..609: note = Description of Artificial Sequence: Synthetic coding sequence
  source 1..609: mol_type = other DNA
atgtgcaggaccctggccgccttccccaccacctgcctggagcgggccaaggagttcaagacccggctgggcatcttcctgcacaagtctgagctgggctgtgacaccggcagcacaggcaagtttgagtggggcagcaagcacagcaaagaaaatagaaacttctctgaagatgtgctgggctggagggagagctttgacctgctgctgagcagcaagaatggagtggccgccttccacgccttcctgaagacagagttcagcgaggagaacctggagttctggctggcctgtgaggagttcaagaagatccgcagcgccaccaagctggccagccgggcccaccagatctttgaggagttcatctgcagcgaggcccccaaggaggtgaacatcgaccacgagacccatgagctgaccaggatgaacctgcagacagccacagccacctgctttgatgctgcccagggcaagaccaggaccctgatggagaaggacagctacccccgcttcctgaagagccctgcctacagagacctggccgcccaggccagcgctgccagcgccaccctgagcagctgcagcctggatgagcccagccacacctag

SEQ ID NO: 167463 - DNA, 459 bp, synthetic construct
  misc_feature 1..459: note = Description of Artificial Sequence: Synthetic coding sequence
  source 1..459: mol_type = other DNA
atgcctgtgaagtgctgcttctaccgcagccccacagctgagaccatgacctggagcgagaacatggacaccctgctggccaaccaggccggcctggatgccttccgcatcttcctgaagtctgagttcagcgaggagaatgtggagttctggctggcctgtgaggacttcaagaagaccaagaatgctgacaagatcgccagcaaggccaagatgatctacagcgagttcatcgaggctgatgcccccaaggagatcaacatcgactttggcacccgggacctgatcagcaagaacattgctgagcccaccctgaagtgctttgatgaggcccagaagctgatctactgcctgatggccaaggacagcttcccccgcttcctgaagtctgagatctacaagaagctggtgaacagccagcaggtgcccaaccacaagaagtggctgcccttcctgtag

SEQ ID NO: 167464 - DNA, 1809 bp, synthetic construct
  misc_feature 1..1809: note = Description of Artificial Sequence: Synthetic coding sequence
  source 1..1809: mol_type = other DNA
atggagaggagcctgcaccgggtgtccctgggcagcagaagagcccacccagacctgtccttctacctgaccaccttcggccagctgcggctgagcattgatgcccaggacagagtgctgctgctgcacatcatcgagggcaagggcctcatcagcaagcagcccggcacctgtgacccctacgtgaagatcagcctcatccctgaggacagccggctgcggcaccagaagacccagacagtgcctgactgccgggaccctgccttccacgagcacttcttcttccctgtgcaggaggaggatgaccagaagaggctgctggtgacagtgtggaacagagccagccagagccggcagagcggcctgattggctgcatgagctttggagtgaagagcctgctgaccccagacaaggagatcagcggctggtactacctgctgggggagcacctgggccgcaccaagcacctgaaggtggcccggcggcggctgcggcccctgcgggaccccctgctgaggatgcctgggggcggggacacagaaaatggcaagaagctgaagatcaccatcccccggggcaaggatggcttcggcttcaccatctgctgtgacagccctgtgcgggtgcaggccgtggacagcggcggccctgctgagagagctggcctgcagcagctggacacagtgctgcagctgaatgaaagacctgtggagcactggaagtgtgtggagctggcccacgagatccgcagctgccccagcgagatcatcctgctggtgtggaggatggtgccccaggtgaagccaggcccagatggcggcgtgctgcggcgggccagctgcaagagcacccatgacctgcagagcccccccaacaagcgggagaagaactgcacccacggcgtgcaggcccggcctgagcagaggcacagctgccacctggtgtgtgacagcagtgatggcctgctgctgggcggctgggagcgctacacagaggtggccaagagaggaggccagcacaccctgcctgccctgagccgggccacagcccccacagaccccaactacatcatcctggcccccctgaaccctggcagccagctgctgcggcctgtgtaccaggaggacaccatccctgaggagagcggcagccccagcaagggcaagagctacacaggcctgggcaagaagagccggctgatgaagacagtgcagaccatgaagggccacggcaactaccagaactgccctgtggtgcggccccacgccacccacagcagctatggcacctacgtgaccctggcccccaaggtgctggtgtttcctgtgtttgtgcagcccctggacctgtgcaacccagcccggaccctgctgctgtctgaggagctgctgctgtatgagggcaggaacaaggctgctgaggtgaccctgtttgcctacagcgacctgctgctcttcaccaaggaggatgagcccggccgctgtgatgtgctgaggaaccccctgtacctgcagagcgtgaagctgcaggagggcagcagcgaggacctgaagttctgtgtgctgtacctggccgagaaggcagaatgtctcttcaccctggaggcccacagccaggagcagaagaagagggtgtgctggtgcctgtctgaaaatattgccaagcagcagcagctggccgccagccccccagacagcaagaagctgcaccccttcggcagcctgcagcaggagatgggccctgtgaacagcaccaatgccacccaggacaggagcttcaccagccctggccagaccctgattggatag

SEQ ID NO: 167465 - DNA, 507 bp, synthetic construct
  misc_feature 1..507: note = Description of Artificial Sequence: Synthetic coding sequence
  source 1..507: mol_type = other DNA
atgaagaacaagctgggcatcttcagaagaagaaatgaaagccctggggcccccccagctgggaaggctgacaagatgatgaagagcttcaagcccaccagcgaggaggccctgaagtggggcgagagcctggagaagctgctggtgcacaagtatggcctggccgtgttccaggccttcctgaggacagagttcagcgaggagaacctggagttctggctggcctgtgaggacttcaagaaggtgaagagccagagcaagatggccagcaaggccaagaagatctttgctgagtacatcgccatccaggcctgcaaggaggtgaacctggacagctacacccgggagcacaccaaggacaacctgcagagcgtgacccggggctgctttgacctggcccagaagaggatcttcggcctgatggagaaggacagctacccccgcttcctgcggagtgacctgtacctggacctgatcaaccagaagaagatgagcccccccctgtag

SEQ ID NO: 167466 - DNA, 2754 bp, synthetic construct
  misc_feature 1..2754: note = Description of Artificial Sequence: Synthetic coding sequence
  source 1..2754: mol_type = other DNA
atgaaccgcttcaacggcctgtgcaaggtgtgcagcgagcggcgctaccggcagatcaccatcccccggggcaaggatggcttcggcttcaccatctgctgtgacagccctgtgcgggtgcaggccgtggacagcggcggccctgctgagcgggccggcctgcagcagctggacacagtgctgcagctgaatgaaagacctgtggagcactggaagtgtgtggagctggcccacgagatccgcagctgccccagcgagatcatcctgctggtgtggaggatggtgccccaggtgaagccaggcccagatggaggagtgctgcggcgggccagctgcaagagcacccatgacctgcagagcccccccaacaagcgggagaagaactgcacccatggagtgcaggcccggcctgagcagaggcacagctgccacctggtgtgtgacagcagtgatggcctgctgctgggcggctgggagcgctacacagaggtggccaagaggggcggccagcacaccctgcctgccctgagccgggccacagcccccacagaccccaactacatcatcctggcccccctgaaccctggcagccagctgctgcggcctgtgtaccaggaggacaccatccctgaggagagcggcagccccagcaagggcaagagctacacaggcctgggcaagaagagccggctgatgaagacagtgcagaccatgaagggccacggcaactaccagaactgccctgtggtgcggccccacgccacccacagcagctatggcacctacgtgaccctggcccccaaggtgctggtgtttcctgtgtttgtgcagcccctggacctgtgcaacccagcccggaccctgctgctgtctgaggagctgctgctgtatgagggcaggaacaaggctgctgaggtgaccctgtttgcctacagcgacctgctgctcttcaccaaggaggatgagcccggccgctgtgatgtgctgaggaaccccctgtacctgcagagcgtgaagctgcaggagggcagcagcgaggacctgaagttctgtgtgctgtacctggccgagaaggccgagtgcctcttcaccctggaggcccacagccaggagcagaagaagagggtgtgctggtgcctgtctgagaacatcgccaagcagcagcagctggccgccagccccccagacagcaagatgtttgaaacagaagcagatgagaagcgggagatggccctggaggagggcaagggccctggagctgaggacagcccccccagcaaggagcccagccctggccaggagctgcccccaggccaggacctgccccccaacaaggacagccccagcggccaggagcccgcccccagccaggagcccctgagcagcaaggacagcgccaccagcgagggcagccccccaggcccagatgccccacccagcaaggatgtgcccccctgccaggagcccccaccagcccaggacctgagcccctgccaggacctgcctgctggccaggagcccctgccccaccaggaccccctgctgaccaaggacctgcctgccatccaggagagccccacccgggacctgcccccctgccaggacctgccccccagccaggtgtccctgcctgccaaggccctgacagaggacaccatgagcagcggggacctgctggccgccaccggggaccccccagctgcccccaggcctgcctttgtgattcctgaggtgcggctggacagcacctacagccagaaggccggggctgagcagggctgcagcggagatgaagaagatgctgaggaggccgaggaggtggaggagggggaggagggggaggaggatgaagatgaggacaccagtgatgacaactacggggagaggtctgaggccaagaggagctccatgattgagaccggccagggcgctgagggcggcctgagcctgcgggtgcagaacagcctgcggcggaggacccacagcgagggcagcctgctgcaggagccccggggcccctgctttgccagtgacaccaccctgcactgcagtgatggagagggcgccgccagcacctggggcatgcccagccccagcaccctgaagaaggagctgggcagaaatggaggctccatgcaccacctgagcctcttcttcaccggccacaggaagatgtctggagctgacacagtgggagatgatgatgaggccagcaggaagaggaagagcaagaacctggccaaggacatgaagaacaagctgggcatcttcagaagaagaaatgaaagccctggggcccctcctgctgggaaggctgacaagatgatgaagagcttcaagcccaccagcgaggaggccctgaagtggggcgagagcctggagaagctgctggtgcacaagtatggcctggccgtgttccaggccttcctgaggacagagttcagcgaggagaacctggagttctggctggcctgtgaggacttcaagaaggtgaagagccagagcaagatggccagcaaggccaagaagatctttgctgagtacatcgccatccaggcctgcaaggaggtgaacctggacagctacacccgggagcacaccaaggacaacctgcagagcgtgacccggggctgctttgacctggcccagaagaggatcttcggcctgatggagaaggacagctacccccgcttcctgcggagtgacctgtacctggacctgatcaaccagaagaagatgagcccccccctgtag

SEQ ID NO: 167467 - DNA, 3597 bp, synthetic construct
  misc_feature 1..3597: note = Description of Artificial Sequence: Synthetic coding sequence
  source 1..3597: mol_type = other DNA
atgcctgtgatcccagccctgtgggaggtggagatgggccgcagccagggccaggagattgagaccatcctggccaacagaagccacagcgacagcacccccctgcccaacttcctgagcggcagccacaggcctgagtgctgcacctgccgcctgctgacagccagcggggcccaggacagcctgcccttcggccggcggctgtacagcggcccctggaggagctgtgaggaggtgtgccacgtgtctgtgctgtctgtgctgagcaccagctgtggcctgagcctgagcctgcccatcttccctggctggatggagtggctgagcccagacatcgccctgcccaggagagatgagtggacccagaccagccctgccaggaagaggatcacccacgccaaggtgcagggcgccggccagctgcggctgagcattgatgcccaggacagagtgctgctgctgcacatcatcgagggcaagggcctcatcagcaagcagcccggcacctgtgacccctacgtgaagatcagcctcatccctgaggacagccggctgcggcaccagaagacccagacagtgcctgactgccgggaccctgccttccacgagcacttcttcttccctgtgcaggaggaggatgaccagaagaggctgctggtgacagtgtggaacagagccagccagagccggcagagcggcctgattggctgcatgagctttggagtgaagagcctgctgaccccagacaaggagatcagcggctggtactacctgctgggggagcacctgggccgcaccaagcacctgaaggtggcccggcggcggctgcggcccctgcgggaccccctgctgaggatgcctgggggcggggacacagaaaatggcaagaagctgaagatcaccatcccccggggcaaggatggcttcggcttcaccatctgctgtgacagccctgtgcgggtgcaggccgtggacagcggcggccctgctgagagagctggcctgcagcagctggacacagtgctgcagctgaatgaaagacctgtggagcactggaagtgtgtggagctggcccacgagatccgcagctgccccagcgagatcatcctgctggtgtggaggatggtgccccaggtgaagccaggcccagatggcggcgtgctgcggcgggccagctgcaagagcacccatgacctgcagagcccccccaacaagcgggagaagaactgcacccacggcgtgcaggcccggcctgagcagaggcacagctgccacctggtgtgtgacagcagtgatggcctgctgctgggcggctgggagcgctacacagaggtggccaagagaggaggccagcacaccctgcctgccctgagccgggccacagcccccacagaccccaactacatcatcctggcccccctgaaccctggcagccagctgctgcggcctgtgtaccaggaggacaccatccctgaggagagcggcagccccagcaagggcaagagctacacaggcctgggcaagaagagccggctgatgaagacagtgcagaccatgaagggccacggcaactaccagaactgccctgtggtgcggccccacgccacccacagcagctatggcacctacgtgaccctggcccccaaggtgctggtgtttcctgtgtttgtgcagcccctggacctgtgcaacccagcccggaccctgctgctgtctgaggagctgctgctgtatgagggcaggaacaaggctgctgaggtgaccctgtttgcctacagcgacctgctgctcttcaccaaggaggatgagcccggccgctgtgatgtgctgaggaaccccctgtacctgcagagcgtgaagctgcaggagggcagcagcgaggacctgaagttctgtgtgctgtacctggccgagaaggcagaatgtctcttcaccctggaggcccacagccaggagcagaagaagagggtgtgctggtgcctgtctgaaaatattgccaagcagcagcagctggccgccagccccccagacagcaagatgtttgaaacagaagcagatgagaagcgggagatggccctggaggagggcaaaggacctggagctgaggacagcccccccagcaaggagcccagccctggccaggagctgcccccaggccaggacctgccccccaacaaggacagccccagcggccaggagcccgcccccagccaggagcccctgagcagcaaggacagcgccaccagcgagggcagccccccaggcccagatgccccacccagcaaggatgtgcccccctgccaggagcccccaccagcccaggacctgagcccctgccaggacctgcctgctggccaggagcccctgccccaccaggaccccctgctgaccaaggacctgcctgccatccaggagagccccacccgggacctgcccccctgccaggacctgccccccagccaggtgtccctgcctgccaaggccctgacagaggacaccatgagcagcggggacctgctggccgccactggagaccccccagctgcccccaggcctgccttcgtcatccctgaggtgcggctggacagcacctacagccagaaggccggggctgagcagggctgcagcggagatgaggaggatgctgaggaggccgaggaggtggaggagggggaggagggggaggaggatgaagatgaggacaccagtgatgacaactatggagagaggtctgaggccaagaggagctccatgattgaaacaggccagggcgctgagggcggcctgagcctgcgggtgcagaacagcctgcggcggaggacccacagcgagggcagcctgctgcaggagccccggggcccctgctttgccagtgacaccaccctgcactgcagtgatggagagggcgccgccagcacctggggcatgcccagccccagcaccctgaagaaggagctgggcagaaatggaggctccatgcaccacctgagcctcttcttcaccggccacaggaagatgtctggagctgacacagtgggagatgatgatgaggccagcaggaagaggaagagcaagaacctggccaaggacatgaagaacaagctgggcatcttcagaagaagaaatgaaagccctggggcccccccagctgggaaggctgacaagatgatgaagagcttcaagcccaccagcgaggaggccctgaagtggggcgagagcctggagaagctgctggtgcacaagtatggcctggccgtgttccaggccttcctgaggacagagttcagcgaggagaacctggagttctggctggcctgtgaggacttcaagaaggtgaagagccagagcaagatggccagcaaggccaagaagatctttgctgagtacatcgccatccaggcctgcaaggaggtgaacctggacagctacacccgggagcacaccaaggacaacctgcagagcgtgacccggggctgctttgacctggcccagaagaggatcttcggcctgatggagaaggacagctacccccgcttcctgcggagtgacctgtacctggacctgatcaaccagaagaagatgagcccccccctgtag

SEQ ID NO: 167468 - DNA, 1560 bp, synthetic construct
  misc_feature 1..1560: note = Description of Artificial Sequence: Synthetic coding sequence
  source 1..1560: mol_type = other DNA
atgtttgaaacagaagcagatgagaagcgggagatggccctggaggagggcaagggccctggagctgaggacagcccccccagcaaggagcccagccctggccaggagctgcccccaggccaggacctgccccccaacaaggacagccccagcggccaggagcccgcccccagccaggagcccctgagcagcaaggacagcgccaccagcgagggcagccccccaggcccagatgccccacccagcaaggatgtgcccccctgccaggagcccccaccagcccaggacctgagcccctgccaggacctgcctgctggccaggagcccctgccccaccaggaccccctgctgaccaaggacctgcctgccatccaggagagccccacccgggacctgcccccctgccaggacctgccccccagccaggtgtccctgcctgccaaggccctgacagaggacaccatgagcagcggggacctgctggccgccaccggggaccccccagctgcccccaggcctgcctttgtgattcctgaggtgcggctggacagcacctacagccagaaggccggggctgagcagggctgcagcggagatgaagaagatgctgaggaggccgaggaggtggaggagggggaggagggggaggaggatgaagatgaggacaccagtgatgacaactacggggagaggtctgaggccaagaggagctccatgattgagaccggccagggcgctgagggcggcctgagcctgcgggtgcagaacagcctgcggcggaggacccacagcgagggcagcctgctgcaggagccccggggcccctgctttgccagtgacaccaccctgcactgcagtgatggagagggcgccgccagcacctggggcatgcccagccccagcaccctgaagaaggagctgggcagaaatggaggctccatgcaccacctgagcctcttcttcaccggccacaggaagatgtctggagctgacacagtgggagatgatgatgaggccagcaggaagaggaagagcaagaacctggccaaggacatgaagaacaagctgggcatcttcagaagaagaaatgaaagccctggggcccctcctgctgggaaggctgacaagatgatgaagagcttcaagcccaccagcgaggaggccctgaagtggggcgagagcctggagaagctgctggtgcacaagtatggcctggccgtgttccaggccttcctgaggacagagttcagcgaggagaacctggagttctggctggcctgtgaggacttcaagaaggtgaagagccagagcaagatggccagcaaggccaagaagatctttgctgagtacatcgccatccaggcctgcaaggaggtgaacctggacagctacacccgggagcacaccaaggacaacctgcagagcgtgacccggggctgctttgacctggcccagaagaggatcttcggcctgatggagaaggacagctacccccgcttcctgcggagtgacctgtacctggacctgatcaaccagaagaagatgagcccccccctgtag

SEQ ID NO: 167469 - DNA, 3597 bp, synthetic construct; identical to SEQ ID NO: 167467
  misc_feature 1..3597: note = Description of Artificial Sequence: Synthetic coding sequence
  source 1..3597: mol_type = other DNA

SEQ ID NO: 167470 - DNA, 1776 bp, synthetic construct
  misc_feature 1..1776: note = Description of Artificial Sequence: Synthetic coding sequence
  source 1..1776: mol_type = other DNA
atgaaccgcttcaacggcctgtgcaaggtgtgcagcgagcggcgctaccggcagatcaccatcccccggggcaaggatggcttcggcttcaccatctgctgtgacagccctgtgcgggtgcaggccgtggacagcggcggccctgctgagcgggccggcctgcagcagctggacacagtgctgcagctgaatgaaagacctgtggagcactggaagtgtgtggagctggcccacgagatccgcagctgccccagcgagatcatcctgctggtgtggaggatggtgccccaggtgaagccaggcccagatggaggagtgctgcggcgggccagctgcaagagcacccatgacctgcagagcccccccaacaagcgggagaagaactgcacccatggagtgcaggcccggcctgagcagaggcacagctgccacctggtgtgtgacagcagtgatggcctgctgctgggcggctgggagcgctacacagaggtggccaagaggggcggccagcacaccctgcctgccctgagccgggccacagcccccacagaccccaactacatcatcctggcccccctgaaccctggcagccagctgctgcggcctgtgtaccaggaggacaccatccctgaggagagcggcagccccagcaagggcaagagctacacaggcctgggcaagaagagccggctgatgaagacagtgcagaccatgaagggccacggcaactaccagaactgccctgtggtgcggccccacgccacccacagcagctatggcacctacgtgaccctggcccccaaggtgctggtgtttcctgtgtttgtgcagcccctggacctgtgcaacccagcccggaccctgctgctgtctgaggagctgctgctgtatgagggcaggaacaaggctgctgaggtgaccctgtttgcctacagcgacctgctgctcttcaccaaggaggatgagcccggccgctgtgatgtgctgaggaaccccctgtacctgcagagcgtgaagctgcaggagggcagcagcgaggacctgaagttctgtgtgctgtacctggccgagaaggccgagtgcctcttcaccctggaggcccacagccaggagcagaagaagagggtgtgctggtgcctgtctgagaacatcgccaagcagcagcagctggccgccagccccccagacagcaagatgtctggagctgacacagtgggagatgatgatgaggccagcaggaagaggaagagcaagaacctggccaaggacatgaagaacaagctgggcatcttcagaagaagaaatgaaagccctggggcccctcctgctgggaaggctgacaagatgatgaagagcttcaagcccaccagcgaggaggccctgaagtggggcgagagcctggagaagctgctggtgcacaagtatggcctggccgtgttccaggccttcctgaggacagagttcagcgaggagaacctggagttctggctggcctgtgaggacttcaagaaggtgaagagccagagcaagatggccagcaaggccaagaagatctttgctgagtacatcgccatccaggcctgcaaggaggtgaacctggacagctacacccgggagcacaccaaggacaacctgcagagcgtgacccggggctgctttgacctggcccagaagaggatcttcggcctgatggagaaggacagctacccccgcttcctgcggagtgacctgtacctggacctgatcaaccagaagaagatgagcccccccctgtag

SEQ ID NO: 167471 - DNA, 1560 bp, synthetic construct; identical to SEQ ID NO: 167468
  misc_feature 1..1560: note = Description of Artificial Sequence: Synthetic coding sequence
  source 1..1560: mol_type = other DNA

SEQ ID NO: 167472 - DNA, 936 bp, synthetic construct
  misc_feature 1..936: note = Description of Artificial Sequence: Synthetic coding sequence
  source 1..936: mol_type = other DNA
atggtgacccggcggcctgtgaccaacagctgggactggctgcctgctggggccgcccctgaggccgtgccctgccgccacatgcccctgagccggctgcccctgcgggtgggccagaaggagttcttcttccccctgcccctgctggtgccccccatctcctggctgctgctgtctgagagccagccccggctggtgcccggcagccctgtgatccggcccggcttccagagggcctgtgtggccgccgcctgcaccgtggccgcccgctgccccggccggggcgtgggggacaggagccagagcggggccagctaccggcccatctgtggccccaaggtgggcggccccacagagatgctgcggggcatgtacctgaccagaaatggaaacctgcagaggaggcacaccatgaaggaggccaaggacatgaagaacaagctgggcatcttcagaagaagaaatgaaagccctggggcccctcctgctgggaaggctgacaagatgatgaagagcttcaagcccaccagcgaggaggccctgaagtggggcgagagcctggagaagctgctggtgcacaagtatggcctggccgtgttccaggccttcctgaggacagagttcagcgaggagaacctggagttctggctggcctgtgaggacttcaagaaggtgaagagccagagcaagatggccagcaaggccaagaagatctttgctgagtacatcgccatccaggcctgcaaggaggtgaacctggacagctacacccgggagcacaccaaggacaacctgcagagcgtgacccggggctgctttgacctggcccagaagaggatcttcggcctgatggagaaggacagctacccccgcttcctgcggagtgacctgtacctggacctgatcaaccagaagaagatgagcccccccctgtag

SEQ ID NO: 167473 - DNA, 564 bp, synthetic construct
  misc_feature 1..564: note = Description of Artificial Sequence: Synthetic coding sequence
  source 1..564: mol_type = other DNA
atgaagcaccggctgggcttcctgctgcagaagagtgacagctgtgagcacaacagcagccacaacaagaaggacaaggtggtgatctgccagagggtgtcccaggaggaggtgaagaagtgggccgagagcctggagaacctgatcagccatgaatgtggcctggccgccttcaaggccttcctgaagtctgagtacagtgaagaaaatattgacttctggatcagctgtgaggagtacaagaagatcaagagccccagcaagctgagccccaaggccaagaagatctacaatgagttcatctctgtgcaggccaccaaggaggtgaacctggacagctgcacccgggaggagaccagcaggaacatgctggagcccaccatcacctgctttgatgaggcccagaagaagatcttcaacctgatggagaaggacagctaccgccgcttcctgaagagccgcttctacctggacctggtgaaccccagcagctgtggggctgagaagcagaagggggccaagagcagcgctgactgtgccagcctggtgccccagtgtgcctag

SEQ ID NO: 167474 - DNA, 282 bp, synthetic construct
  misc_feature 1..282: note = Description of Artificial Sequence: Synthetic coding sequence
  source 1..282: mol_type = other DNA
atgtgcaagggcctggccggcctgcctgccagctgcctgcggagcgccaaggacatgaagcaccggctgggcttcctgctgcagaagagtgacagctgtgagcacaacagcagccacaacaagaaggacaaggtggtgatctgccagagggtgtcccaggaggaggtgaagaagtgggccgagagcctggagaacctgatcagccatgaatgtgagcccggcttcctgcaccagggccgggacaagccagagcacgcccgggcctacaacaacctgctgtag

SEQ ID NO: 167475 - DNA, 618 bp, synthetic construct
  misc_feature 1..618: note = Description of Artificial Sequence: Synthetic coding sequence
  source 1..618: mol_type = other DNA
atgtgcaagggcctggccggcctgcctgccagctgcctgcggagcgccaaggacatgaagcaccggctgggcttcctgctgcagaagagtgacagctgtgagcacaacagcagccacaacaagaaggacaaggtggtgatctgccagagggtgtcccaggaggaggtgaagaagtgggccgagagcctggagaacctgatcagccatgaatgtggcctggccgccttcaaggccttcctgaagtctgagtacagtgaagaaaatattgacttctggatcagctgtgaggagtacaagaagatcaagagccccagcaagctgagccccaaggccaagaagatctacaatgagttcatctctgtgcaggccaccaaggaggtgaacctggacagctgcacccgggaggagaccagcaggaacatgctggagcccaccatcacctgctttgatgaggcccagaagaagatcttcaacctgatggagaaggacagctaccgccgcttcctgaagagccgcttctacctggacctggtgaaccccagcagctgtggggctgagaagcagaagggggccaagagcagcgctgactgtgccagcctggtgccccagtgtgcctag

SEQ ID NO: 167476 - DNA, 909 bp, synthetic construct
  misc_feature 1..909: note = Description of Artificial Sequence: Synthetic coding sequence
  source 1..909: mol_type = other DNA
atgtacaacatgatgctgctgatccagaagaggaagggcatcggcagccagctgctgcgggccggggaggccgagggggacagaggagctggaacagctgagaggagcagtgactggctggatggccgctcctgggccatcaaggagacccccaccggcctggccggcagaagaagtgaggacagcgacaacatcttcaccggggaggaggccaagtatgcccagagccgcagccacagcagcagctgccgcatctccttcctgctggccaacagcaagctgctgaacaagatgtgcaagggcctggccggcctgcctgccagctgcctgcggagcgccaaggacatgaagcaccggctgggcttcctgctgcagaagagtgacagctgtgagcacaacagcagccacaacaagaaggacaaggtggtgatctgccagagggtgtcccaggaggaggtgaagaagtgggccgagagcctggagaacctgatcagccatgaatgtggcctggccgccttcaaggccttcctgaagtctgagtacagcgaggagaacatcgacttctggatcagctgtgaggagtacaagaagatcaagagccccagcaagctgagccccaaggccaagaagatctacaatgagttcatctctgtgcaggccaccaaggaggtgaacctggacagctgcacccgggaggagaccagcaggaacatgctggagcccaccatcacctgctttgatgaggcccagaagaagatcttcaacctgatggagaaggacagctaccgccgcttcctgaagagccgcttctacctggacctggtgaaccccagcagctgtggggctgagaagcagaagggggccaagagcagcgctgactgtgccagcctggtgccccagtgtgcctag

SEQ ID NO: 167477 - DNA, 564 bp, synthetic construct; identical to SEQ ID NO: 167473
  misc_feature 1..564: note = Description of Artificial Sequence: Synthetic coding sequence
  source 1..564: mol_type = other DNA

SEQ ID NO: 167478 - DNA, 432 bp, synthetic construct
  misc_feature 1..432: note = Description of Artificial Sequence: Synthetic coding sequence
  source 1..432: mol_type = other DNA
atgaagcaccggctgggcttcctgctgcagaagagtgacagctgtgagcacaacagcagccacaacaagaaggacaaggtggtgatctgccagagggtgtcccaggaggaggtgaagaagtgggccgagagcctggagaacctgatcagccatgaatgtggcctggccgccttcaaggccttcctgaagtctgagtacagtgaagaaaatattgacttctggatcagctgtgaggagtacaagaagatcaagagccccagcaagctgagccccaaggccaagaagatctacaatgagttcatctctgtgcaggccaccaaggaggtgaacctggacagctgcacccgggaggagaccagcaggaacatgctggagcccaccatcacctgctttgatgaggcccagaagaagatcttcaacctgatggagtag

SEQ ID NO: 167479 - DNA, 546 bp, synthetic construct
  misc_feature 1..546: note = Description of Artificial Sequence: Synthetic coding sequence
  source 1..546: mol_type = other DNA
atgtgcaagggcctggccgccctgccccacagctgcctggagcgggccaaggagatcaagatcaagctgggcatcctgctgcagaagccagacagcgtgggggacctggtgatcccctacaatgagaagccagagaagccagccaagacccagaagaccagcctggatgaggccctgcagtggagggacagcctggacaagctgctgcagaacaactacggcctggccagcttcaagagcttcctgaagtctgagttcagcgaggagaacctggagttctggatcgcctgtgaggactacaagaagatcaagagccctgccaagatggccgagaaggccaagcagatctatgaggagttcatccagacagaggcccccaaggaggtgaacatcgaccacttcaccaaggacatcaccatgaagaacctggtggagcccagcctgagcagctttgacatggcccagaagagaattcatgccctgatggagaaggacagcctgcccaggtttgtgcgctctgagttctaccaggagctgatcaagtag

SEQ ID NO: 167480 - DNA, 606 bp, synthetic construct
  misc_feature 1..606: note = Description of Artificial Sequence: Synthetic coding sequence
  source 1..606: mol_type = other DNA
atgtgtgccaggaacatcagccaggacatcctgatcctgcagatgcacagcgcccactggcacatcaatggcaagtatgaggagaagagcaacctgatgttctgggccaaggagatcaagatcaagctgggcatcctgctgcagaagccagacagcgtgggggacctggtgatcccctacaatgagaagccagagaagccagccaagacccagaagaccagcctggatgaggccctgcagtggagggacagcctggacaagctgctgcagaacaactacggcctggccagcttcaagagcttcctgaagtctgagttcagcgaggagaacctggagttctggatcgcctgtgaggactacaagaagatcaagagccctgccaagatggccgagaaggccaagcagatctatgaggagttcatccagacagaggcccccaaggaggtgaacatcgaccacttcaccaaggacatcaccatgaagaacctggtggagcccagcctgagcagctttgacatggcccagaagagaattcatgccctgatggagaaggacagcctgcccaggtttgtgcgctctgagttctaccaggagctgatcaagtag

SEQ ID NO: 167481 - DNA, 222 bp, synthetic construct
  misc_feature 1..222: note = Description of Artificial Sequence: Synthetic coding sequence
  source 1..222: mol_type = other DNA
atggccgagaaggccaagcagatctatgaggagttcatccagacagaggcccccaaggaggtgaacatcgaccacttcaccaaggacatcaccatgaagaacctggtggagcccagcctgagcagctttgacatggcccagaagagaattcatgccctgatggagaaggacagcctgcccaggtttgtgcgctctgagttctaccaggagctgatcaagtag

SEQ ID NO: 167482 - DNA, 1362 bp, synthetic construct
  misc_feature 1..1362: note = Description of Artificial Sequence: Synthetic coding sequence
  source 1..1362: mol_type = other DNA
atggcccagggcagcggggaccagagagctgtgggcgtggccgaccctgaggagagcagccccaacatgattgtgtactgcaagattgaggacatcatcaccaagatgcaggatgacaagacaggaggagtgcccatcagaacagtgaagagcttcctgagcaagatccccagcgtggtgactggaacagacatcgtgcagtggctgatgaagaacctgagcattgaggaccctgtggaggccatccacctgggcagcctgattgctgcccagggctacatcttccccatcagtgaccacgtgctgaccatgaaggatgatggcaccttctaccgcttccaggccccctacttctggcccagcaactgctgggagccagaaaatacagattatgccatctacctgtgcaagaggaccatgcagaacaaggcccggctggagctggccgactatgaagctgagaacctggcccggctgcagagggcctttgccaggaagtgggagttcatcttcatgcaggccgaggcccaggtgaagattgacaggaagaaggacaagacagagaggaagatcctggacagccaggagcgggccttctgggatgtgcacaggcctgtgcccggctgtgtgaacaccacagagatggacatcagaaaatgtagaaggctgaagaacccccagaaggtgaagaagtctgtgtatggagtgacagaggagagccaggcccagagccctgtgcacgtgctgagccagcccatcaggaagaccaccaaggaggacatcaggaagcagatcaccttcctgaatgcccagattgacagacactgcctgaagatgagcaaggtggccgagagcaaggagcccagccagcagagggtgaagcgctggggcttctcctttgatgagatcctgaaggaccaggtgggccgggaccagttcctgcgcttcctggagagcgagttcagcagcgagaacctgcgcttctggctggccgtgcaggacctgaagaagcagcccctgcaggatgtggccaagagggtggaggagatctggcaggagttcctggcccctggggcccccagcgccatcaacctggacagccacagctatgagatcaccagccagaatgtgaaggatggcggccgctacacctttgaagatgcccaggagcacatctacaagctgatgaagagtgacagctatgcccgcttcctgcggagcaatgcctaccaggacctgctgctggccaagaagaagccagagagcgagcagggccgccgcaccagcctggagaagttcaccaggtctgtgggcaagagcctggccggcaagaggctgaccggcctgatgcagagcagctag

SEQ ID NO: 167483 - DNA, 1383 bp, synthetic construct
  misc_feature 1..1383: note = Description of Artificial Sequence: Synthetic coding sequence
  source 1..1383: mol_type = other DNA
atggcccagggcagcggggaccagagagctgtgggcgtggccgaccctgaggagagcagccccaacatgattgtgtactgcaagattgaggacatcatcaccaagatgcaggatgacaagacaggaggagtgcccatcagaacagtgaagagcttcctgagcaagatccccagcgtggtgactggaacagacatcgtgcagtggctgatgaagaacctgagcattgaggaccctgtggaggccatccacctgggcagcctgattgctgcccagggctacatcttccccatcagtgaccacgtgctgaccatgaaggatgatggcaccttctaccgcttccaggccccctacttctggcccagcaactgctgggagccagaaaatacagattatgccatctacctgtgcaagaggaccatgcagaacaaggcccggctggagctggccgactatgaagctgagaacctggcccggctgcagagggcctttgccaggaagtgggagttcatcttcatgcaggccgaggcccaggtgaagattgacaggaagaaggacaagacagagaggaagatcctggacagccaggagcgggccttctgggatgtgcacaggcctgtgcccggctgtgtgaacaccacagagatggacatcagaaaatgtagaaggctgaagaacccccagaaggtgaagaagtctgtgtatggagtgacagaggagagccaggcccagagccctgtgcacgtgctgagccagcccatcaggaagaccaccaaggaggacatcaggaagcagatcaccttcctgaatgcccagattgacagacactgcctgaagatgagcaaggtggccgagagcctgattgcctacacagagcagtatgtggagtatgaccccctcatcaccccagctgagcccagcaacccctggatcagtgatgatgtggccctgtgggacatcgagatgagcaaggagcccagccagcagagggtgaagcgctggggcttctcctttgatgagatcctgaaggaccaggtgggccgggaccagttcctgcgcttcctggagagcgagttcagcagcgagaacctgcgcttctggctggccgtgcaggacctgaagaagcagcccctgcaggatgtggccaagagggtggaggagatctggcaggagttcctggcccctggggcccccagcgccatcaacctggacagccacagctatgagatcaccagccagaatgtgaaggatggcggccgctacacctttgaagatgcccaggagcacatctacaagctgatgaagagtgacagctatgcccgcttcctgcggagcaatgcctaccaggacctgctgctggccaagaagaaggtgtggctgctgtag

SEQ ID NO: 167484 - DNA, 1419 bp, synthetic construct
  misc_feature 1..1419: note = Description of Artificial Sequence: Synthetic coding sequence
  source 1..1419: mol_type = other DNA
atggcccagggcagcggggaccagagagctgtgggcgtggccgaccctgaggagagcagccccaacatgattgtgtactgcaagattgaggacatcatcaccaagatgcaggatgacaagacaggaggagtgcccatcagaacagtgaagagcttcctgagcaagatccccagcgtggtgactggaacagacatcgtgcagtggctgatgaagaacctgagcattgaggaccctgtggaggccatccacctgggcagcctgattgctgcccagggctacatcttccccatcagtgaccacgtgctgaccatgaaggatgatggcaccttctaccgcttccaggccccctacttctggcccagcaactgctgggagccagaaaatacagattatgccatctacctgtgcaagaggaccatgcagaacaaggcccggctggagctggccgactatgaagctgagaacctggcccggctgcagagggcctttgccaggaagtgggagttcatcttcatgcaggccgaggcccaggtgaagattgacaggaagaaggacaagacagagaggaagatcctggacagccaggagcgggccttctgggatgtgcacaggcctgtgcccggctgtgtgaacaccacagagatggacatcagaaaatgtagaaggctgaagaacccccagaaggtgaagaagtctgtgtatggagtgacagaggagagccaggcccagagccctgtgcacgtgctgagccagcccatcaggaagaccaccaaggaggacatcaggaagcagatcaccttcctgaatgcccagattgacagacactgcctgaagatgagcaaggtggccgagagcctgattgcctacacagagcagtatgtggagtatgaccccctcatcaccccagctgagcccagcaacccctggatcagtgatgatgtggccctgtgggacatcgagatgagcaaggagcccagccagcagagggtgaagcgctggggcttctcctttgatgagatcctgaaggaccaggtgggccgggaccagttcctgcgcttcctggagagcgagttcagcagcgagaacctgcgcttctggctggccgtgcaggacctgaagaagcagcccctgcaggatgtggccaagagggtggaggagatctggcaggagttcctggcccctggggcccccagcgccatcaacctggacagccacagctatgagatcaccagccagaatgtgaaggatggcggccgctacacctttgaagatgcccaggagcacatctacaagctgatgaagagtgacagctatgcccgcttcctgcggagcaatgcctaccaggacctgctgctggccaagaagaagggcaagagcctggccggcaagaggctgaccggcctgatgcagagcagctag

SEQ ID NO: 167485 - DNA, 1443 bp, synthetic construct
  misc_feature 1..1443: note = Description of Artificial Sequence: Synthetic coding sequence
  source 1..1443: mol_type = other DNA
atggcccagggcagcggggaccagagagctgtgggcgtggccgaccctgaggagagcagccccaacatgattgtgtactgcaagattgaggacatcatcaccaagatgcaggatgacaagacaggaggagtgcccatcagaacagtgaagagcttcctgagcaagatccccagcgtggtgactggaacagacatcgtgcagtggctgatgaagaacctgagcattgaggaccctgtggaggccatccacctgggcagcctgattgctgcccagggctacatcttccccatcagtgaccacgtgctgaccatgaaggatgatggcaccttctaccgcttccaggccccctacttctggcccagcaactgctgggagccagaaaatacagattatgccatctacctgtgcaagaggaccatgcagaacaaggcccggctggagctggccgactatgaagctgagaacctggcccggctgcagagggcctttgccaggaagtgggagttcatcttcatgcaggccgaggcccaggtgaagattgacaggaagaaggacaagacagagaggaagatcctggacagccaggagcgggccttctgggatgtgcacaggcctgtgcccggctgtgtgaacaccacagagatggacatcagaaaatgtagaaggctgaagaacccccagaaggtgaagaagtctgtgtatggagtgacagaggagagccaggcccagagccctgtgcacgtgctgagccagcccatcaggaagaccaccaaggaggacatcaggaagcagatcaccttcctgaatgcccagattgacagacactgcctgaagatgagcaaggtggccgagagcctgattgcctacacagagcagtatgtggagtatgaccccctcatcaccccagctgagcccagcaacccctggatcagtgatgatgtggccctgtgggacatcgagatgagcaaggagcccagccagcagagggtgaagcgctggggcttctcctttgatgagatcctgaaggaccaggtgggccgggaccagttcctgcgcttcctggagagcgagttcagcagcgagaacctgcgcttctggctggccgtgcaggacctgaagaagcagcccctgcaggatgtggccaagagggtggaggagatctggcaggagttcctggcccctggggcccccagcgccatcaacctggacagccacagctatgagatcaccagccagaatgtgaaggatggcggccgctacacctttgaagatgcccaggagcacatctacaagctgatgaagagtgacagctatgcccgcttcctgcggagcaatgcctaccaggacctgctgctggccaagaagaagccagagagcgagcagggccgccgcaccagcctggagaagttcaccaggtctgtgtgcctgcagctgctcttctag

SEQ ID NO: 167486 - DNA, 1428 bp, synthetic construct
  misc_feature 1..1428: note = Description of Artificial Sequence: Synthetic coding sequence
  source 1..1428: mol_type = other DNA
atggcccagggcagcggggaccagagagctgtgggcgtggccgaccctgaggagagcagccccaacatgattgtgtactgcaagattgaggacatcatcaccaagatgcaggatgacaagacaggaggagtgcccatcagaacagtgaagagcttcctgagcaagatccccagcgtggtgactggaacagacatcgtgcagtggctgatgaagaacctgagcattgaggaccctgtggaggccatccacctgggcagcctgattgctgcccagggctacatcttccccatcagtgaccacgtgctgaccatgaaggatgatggcaccttctaccgcttccaggccccctacttctggcccagcaactgctgggagccagaaaatacagattatgccatctacctgtgcaagaggaccatgcagaacaaggcccggctggagctggccgactatgaagctgagaacctggcccggctgcagagggcctttgccaggaagtgggagttcatcttcatgcaggccgaggcccaggtgaagattgacaggaagaaggacaagacagagaggaagatcctggacagccaggagcgggccttctgggatgtgcacaggcctgtgcccggctgtgtgaacaccacagagatggacatcagaaaatgtagaaggctgaagaacccccagaaggtgaagaagtctgtgtatggagtgacagaggagagccaggcccagagccctgtgcacgtgctgagccagcccatcaggaagaccaccaaggaggacatcaggaagcagatcaccttcctgaatgcccagattgacagacactgcctgaagatgagcaaggtggccgagagcctgattgcctacacagagcagtatgtggagtatgaccccctcatcaccccagctgagcccagcaacccctggatcagtgatgatgtggccctgtgggacatcgagatgagcaaggagcccagccagcagagggtgaagcgctggggcttctcctttgatgagatcctgaaggaccaggtgggccgggaccagttcctgcgcttcctggagagcgagttcagcagcgagaacctgcgcttctggctggccgtgcaggacctgaagaagcagcccctgcaggatgtggccaagagggtggaggagatctggcaggagttcctggcccctggggcccccagcgccatcaacctggacagccacagctatgagatcaccagccagaatgtgaaggatggcggccgctacacctttgaagatgcccaggagcacatctacaagctgatgaagagtgacagctatgcccgcttcctgcggagcaatgcctaccaggacctgctgctggccaagaagaagccagagagcgagcagggccgccgcaccagcctggagaagttcaccaggtctgtgggctag

SEQ ID NO: 167487 - DNA, 1434 bp, synthetic construct
  misc_feature 1..1434: note = Description of Artificial Sequence: Synthetic coding sequence
  source 1..1434: mol_type = other DNA
atggcccagggcagcggggaccagagagctgtgggcgtggccgaccctgaggagagcagccccaacatgattgtgtactgcaagattgaggacatcatcaccaagatgcaggatgacaagacaggaggagtgcccatcagaacagtgaagagcttcctgagcaagatccccagcgtggtgactggaacagacatcgtgcagtggctgatgaagaacctgagcattgaggaccctgtggaggccatccacctgggcagcctgattgctgcccagggctacatcttccccatcagtgaccacgtgctgaccatgaaggatgatggcaccttctaccgcttccaggccccctacttctggcccagcaactgctgggagccagaaaatacagattatgccatctacctgtgcaagaggaccatgcagaacaaggcccggctggagctggccgactatgaagctgagaacctggcccggctgcagagggcctttgccaggaagtgggagttcatcttcatgcaggccgaggcccaggtgaagattgacaggaagaaggacaagacagagaggaagatcctggacagccaggagcgggccttctgggatgtgcacaggcctgtgcccggctgtgtgaacaccacagagatggacatcagaaaatgtagaaggctgaagaacccccagaaggtgaagaagtctgtgtatggagtgacagaggagagccaggcccagagccctgtgcacgtgctgagccagcccatcaggaagaccaccaaggaggacatcaggaagcagatcaccttcctgaatgcccagattgacagacactgcctgaagatgagcaaggtggccgagagcctgattgcctacacagagcagtatgtggagtatgaccccctcatcaccccagctgagcccagcaacccctggatcagtgatgatgtggccctgtgggacatcgagatgagcaaggagcccagccagcagagggtgaagcgctggggcttctcctttgatgagatcctgaaggaccaggtgggccgggaccagttcctgcgcttcctggagagcgagttcagcagcgagaacctgcgcttctggctggccgtgcaggacctgaagaagcagcccctgcaggatgtggccaagagggtggaggagatctggcaggagttcctggcccctggggcccccagcgccatcaacctggacagccacagctatgagatcaccagccagaatgtgaaggatggcggccgctacacctttgaagatgcccaggagcacatctacaagctgatgaagagtgacagctatgcccgcttcctgcggagcaatgcctaccaggacctgctgctggccaagaagaagccagagagcgagcagggccgccgcaccagcctggagaagttcaccaggtctgtgctgctcttctag

SEQ ID NO: 167488 - DNA, 1620 bp, synthetic construct
  misc_feature 1..1620: note = Description of Artificial Sequence: Synthetic coding sequence
  source 1..1620: mol_type = other DNA
atgaagaacctgagcattgaagatcctgtggaggccatccacctgggcagcctgattgctgcccagggctacatcttccccatcagtgaccacgtgctgaccatgaaggatgatggcaccttctaccgcttccaggccccctacttctggcccagcaactgctgggagcctgagaacacagattatgccatctacctgtgcaagaggaccatgcagaacaaggcccggctggagctggccgactatgaagctgagaacctggcccggctgcagagggcctttgccaggaagtgggagttcatcttcatgcaggccgaggcccaggtgaagattgacaggaagaaggacaagacagagaggaagatcctggacagccaggagcgggccttctgggatgtgcacaggcctgtgcccggctgtgtgaacaccacagagatggacatcaggaagtgccggcggctgaagaacccccagaaggtgaagaagtctgtgtatggagtgacagaggagagccaggcccagagccctgtgcacgtgctgagccagcccatcaggaagaccaccaaggaggacatcaggaagcagatcaccttcctgaatgcccagattgacagacactgcctgaagatgagcaaggtggccgagagcctcatcgcctacacagagcagtatgtggagtatgaccccctcatcaccccagctgagcccagcaacccctggatcagtgatgatgtggccctgtgggacatcgagatgagcaaggagcccagccagcagagggtgaagcgctggggcttctcctttgatgagatcctgaaggaccaggtgggccgggaccagttcctgcgcttcctggagagcgagttcagcagcgagaacctgcgcttctggctggccgtgcaggacctgaagaagcagcccctgcaggatgtggccaagagggtggaggagatctggcaggagttcctggcccctggggcccccagcgccatcaacctggacagccacagctatgagatcaccagccagaatgtgaaggatggcggccgctacacctttgaagatgcccaggagcacatctacaagctgatgaagagtgacagctatgcccgcttcctgcggagcaatgcctaccaggacctgctgctggccaagaagaagccagagagcgagcagggccgccgcaccagcctggagaagttcaccaggtctgtgaatgtgcagaacaccaggcctgctggggcctggagcatcttcatggccgccctgcccatggctgtgtggctgcggacccccaggagctgccacggcctgtctgagagccggctgctgggcctgcccagcctgcatgatggcctgcgggagggccagagcctgccccagagctgccccggcagcagcagcacagctgctgagggcgcccgggagcgggccagcaatggccgcagcctggcccggcggcagcactgccagtgccacggccagggcgaggagacccagctgtgcctgtggagccggctggagagcagcaagaggagccagagggccagcagcctgcggaccagcaaggccaagaagaagaggcagacagtgaagcagggccccaaggcctggccctag

SEQ ID NO: 167489 - DNA, 1299 bp, synthetic construct
  misc_feature 1..1299: note = Description of Artificial Sequence: Synthetic coding sequence
  source 1..1299: mol_type = other DNA
attgaggacatcatcaccaagatgcaggatgacaagacaggaggagtgcccatcagaacagtgaagagcttcctgagcaagatccccagcgtggtgactggaacagacatcgtgcagtggctgatgaagaacctgagcattgaggaccctgtggaggccatccacctgggcagcctgattgctgcccagggctacatcttccccatcagtgaccacgtgctgaccatgaaggatgatggcaccttctaccgcttccaggccccctacttctggcccagcaactgctgggagccagaaaatacagattatgccatctacctgtgcaagaggaccatgcagaacaaggcccggctggagctggccgactatgaagctgagaacctggcccggctgcagagggcctttgccaggaagtgggagttcatcttcatgcaggccgaggcccaggtgaagattgacaggaagaaggacaagacagagaggaagatcctggacagccaggagcgggccttctgggatgtgcacaggcctgtgcccggctgtgtgaacaccacagagatggacatcagaaaatgtagaaggctgaagaacccccagaaggtgaagaagtctgtgtatggagtgacagaggagagccaggcccagagccctgtgcacgtgctgagccagcccatcaggaagaccaccaaggaggacatcaggaagcagatcaccttcctgaatgcccagattgacagacactgcctgaagatgagcaaggtggccgagagcctgattgcctacacagagcagtatgtggagtatgaccccctcatcaccccagctgagcccagcaacccctggatcagtgatgatgtggccctgtgggacatcgagatgagcaaggagcccagccagcagagggtgaagcgctggggcttctcctttgatgagatcctgaaggaccaggtgggccgggaccagttcctgcgcttcctggagagcgagttcagcagcgagaacctgcgcttctggctggccgtgcaggacctgaagaagcagcccctgcaggatgtggccaagagggtggaggagatctggcaggagttcctggcccctggggcccccagcgccatcaacctggacagccacagctatgagatcaccagccagaatgtgaaggatggcggccgctacacctttgaagatgcccaggagcacatctacaagctgatgaagagtgacagctatgcccgcttcctgcggagcaatgcctaccaggacctgctgctggccaagaagaaggtgtggctgctgtag

SEQ ID NO: 167490 - DNA, 1041 bp, synthetic construct
  misc_feature 1..1041: note = Description of Artificial Sequence: Synthetic coding sequence
  source 1..1041: mol_type = other DNA
atgcagaacaaggcccggctggagctggccgactatgaagctgagaacctggcccggctgcagagggcctttgccaggaagtgggagttcatcttcatgcaggccgaggcccaggtgaagattgacaggaagaaggacaagacagagaggaagatcctggacagccaggagcgggccttctgggatgtgcacaggcctgtgcccggctgtgtgaacaccacagagatggacatcaggaagtgccggcggctgaagaacccccagaaggtgaagaagtctgtgtatggagtgacagaggagagccaggcccagagccctgtgcacgtgctgagccagcccatcaggaagaccaccaaggaggacatcaggaagcagatcaccttcctgaatgcccagattgacagacactgcctgaagatgagcaaggtggccgagagcctcatcgcctacacagagcagtatgtggagtatgaccccctcatcaccccagctgagcccagcaacccctggatcagtgatgatgtggccctgtgggacatcgagatgagcaaggagcccagccagcagagggtgaagcgctggggcttctcctttgatgagatcctgaaggaccaggtgggccgggaccagttcctgcgcttcctggagagcgagttcagcagcgagaacctgcgcttctggctggccgtgcaggacctgaagaagcagcccctgcaggatgtggccaagagggtggaggagatctggcaggagttcctggcccctggggcccccagcgccatcaacctggacagccacagctatgagatcaccagccagaatgtgaaggatggcggccgctacacctttgaagatgcccaggagcacatctacaagctgatgaagagtgacagctatgcccgcttcctgcggagcaatgcctaccaggacctgctgctggccaagaagaagccagagagcgagcagggccgccgcaccagcctggagaagttcaccaggtctgtgctgtggctgctcttccccctgggcaagaggccctag

SEQ ID NO: 167491 - DNA, 1473 bp, synthetic construct
  misc_feature 1..1473: note = Description of Artificial Sequence: Synthetic coding sequence
  source 1..1473: mol_type = other DNA
atggcccagggcagcggggaccagagagctgtgggcgtggccgaccctgaggagagcagccccaacatgattgtgtactgcaagattgaggacatcatcaccaagatgcaggatgacaagacaggaggagtgcccatcagaacagtgaagagcttcctgagcaagatccccagcgtggtgactggaacagacatcgtgcagtggctgatgaagaacctgagcattgaggaccctgtggaggccatccacctgggcagcctgattgctgcccagggctacatcttccccatcagtgaccacgtgctgaccatgaaggatgatggcaccttctaccgcttccaggccccctacttctggcccagcaactgctgggagccagaaaatacagattatgccatctacctgtgcaagaggaccatgcagaacaaggcccggctggagctggccgactatgaagctgagaacctggcccggctgcagagggcctttgccaggaagtgggagttcatcttcatgcaggccgaggcccaggtgaagattgacaggaagaaggacaagacagagaggaagatcctggacagccaggagcgggccttctgggatgtgcacaggcctgtgcccggctgtgtgaacaccacagagatggacatcagaaaatgtagaaggctgaagaacccccagaaggtgaagaagtctgtgtatggagtgacagaggagagccaggcccagagccctgtgcacgtgctgagccagcccatcaggaagaccaccaaggaggacatcaggaagcagatcaccttcctgaatgcccagattgacagacactgcctgaagatgagcaaggtggccgagagcctgattgcctacacagagcagtatgtggagtatgaccccctcatcaccccagctgagcccagcaacccctggatcagtgatgatgtggccctgtgggacatcgagatgagcaaggagcccagccagcagagggtgaagcgctggggcttctcctttgatgagatcctgaaggaccaggtgggccgggaccagttcctgcgcttcctggagagcgagttcagcagcgagaacctgcgcttctggctggccgtgcaggacctgaagaagcagcccctgcaggatgtggccaagagggtggaggagatctggcaggagttcctggcccctggggcccccagcgccatcaacctggacagccacagctatgagatcaccagccagaatgtgaaggatggcggccgctacacctttgaagatgcccaggagcacatctacaagctgatgaagagtgacagctatgcccgcttcctgcggagcaatgcctaccaggacctgctgctggccaagaagaagccagagagcgagcagggccgccgcaccagcctggagaagttcaccaggtctgtgggcaagagcctggccggcaagaggctgaccggcctgatgcagagcagctag

SEQ ID NO: 167492 - DNA, 1419 bp, synthetic construct; identical to SEQ ID NO: 167484
  misc_feature 1..1419: note = Description of Artificial Sequence: Synthetic coding sequence
  source 1..1419: mol_type = other DNA

SEQ ID NO: 167493 - DNA, 1041 bp, synthetic construct
  misc_feature 1..1041: note = Description of Artificial Sequence: Synthetic coding sequence
  source 1..1041: mol_type = other DNA
atgcagaacaaggcccggctggagctggccgactatgaagctgagaacctggcccggctgcagagggcctttgccaggaagtgggagttcatcttcatgcaggccgaggcccaggtgaagattgacaggaagaaggacaagacagagaggaagatcctggacagccaggagcgggccttctgggatgtgcacaggcctgtgcccggctgtgtgaacaccacagagatggacatcaggaagtgccggcggctgaagaacccccagaaggtgaagaagtctgtgtatggagtgacagaggagagccaggcccagagccctgtgcacgtgctgagccagcccatcaggaagaccaccaaggaggacatcaggaagcagatcaccttcctgaatgcccagattgacagacactgcctgaagatgagcaaggtggccgagagcctcatcgcctacacagagcagtatgtggagtatgaccccctcatcaccccagctgagcccagcaacccctggatcagtgatgatgtggccctgtgggacatcgagatgagcaaggagcccagccagcagagggtgaagcgctggggcttctcctttgatgagatcctgaaggaccaggtgggccgggaccagttcctgcgcttcctggagagcgagttcagcagcgagaacctgcgcttctggctggccgtgcaggacctgaagaagcagcccctgcaggatgtggccaagagggtggaggagatctggcaggagttcctggcccctggggcccccagcgccatcaacctggacagccacagctatgagatcaccagccagaatgtgaaggatggcggccgctacacctttgaagatgcccaggagcacatctacaagctgatgaagagtgacagctatgcccgcttcctgcggagcaatgcctaccaggacctgctgctggccaagaagaagccagagagcgagcagggccgccgcaccagcctggagaagttcaccaggtctgtgctgtacagcaacacccccctggccaagaggccctag

SEQ ID NO: 167494 - DNA, 1419 bp, synthetic construct; identical to SEQ ID NO: 167484
  misc_feature 1..1419: note = Description of Artificial Sequence: Synthetic coding sequence
  source 1..1419: mol_type = other DNA

SEQ ID NO: 167495 - DNA, 1473 bp, synthetic construct; identical to SEQ ID NO: 167491
  misc_feature 1..1473: note = Description of Artificial Sequence: Synthetic coding sequence
  source 1..1473: mol_type = other DNA

SEQ ID NO: 167496 - DNA, 1398 bp, synthetic construct
  misc_feature 1..1398: note = Description of Artificial Sequence: Synthetic coding sequence
  source 1..1398: mol_type = other DNA
atggcccagggcagcggggaccagagagctgtgggcgtggccgaccctgaggagagcagccccaacatgattgtgtactgcaagattgaggacatcatcaccaagatgcaggatgacaagacaggaggagtgcccatcagaacagtgaagagcttcctgagcaagatccccagcgtggtgactggaacagacatcgtgcagtggctgatgaagaacctgagcattgaggaccctgtggaggccatccacctgggcagcctgattgctgcccagggctacatcttccccatcagtgaccacgtgctgaccatgaaggatgatggcaccttctaccgcttccaggccccctacttctggcccagcaactgctgggagccagaaaatacagattatgccatctacctgtgcaagaggaccatgcagaacaaggcccggctggagctggccgactatgaagctgagaacctggcccggctgcagagggcctttgccaggaagtgggagttcatcttcatgcaggccgaggcccaggtgaagattgacaggaagaaggacaagacagagaggaagatcctggacagccaggagcgggccttctgggatgtgcacaggcctgtgcccggctgtgtgaacaccacagagatggacatcagaaaatgtagaaggctgaagaacccccagaaggtgaagaagtctgtgtatggagtgacagaggagagccaggcccagagccctgtgcacgtgctgagccagcccatcaggaagaccaccaaggaggacatcaggaagcagatcaccttcctgaatgcccagattgacagacactgcctgaagatgagcaaggtggccgagagcctgattgcctacacagagcagtatgtggagtatgaccccctcatcaccccagctgagcccagcaacccctggatcagtgatgatgtggccctgtgggacatcgagatgagcaaggagcccagccagcagagggtgaagcgctggggcttctcctttgatgagatcctgaaggaccaggtgggccgggaccagttcctgcgcttcctggagagcgagttcagcagcgagaacctgcgcttctggctggccgtgcaggacctgaagaagcagcccctgcaggatgtggccaagagggtggaggagatctggcaggagttcctggcccctggggcccccagcgccatcaacctggacagccacagctatgagatcaccagccagaatgtgaaggatggcggccgctacacctttgaagatgcccaggagcacatctacaagctgatgaagagtgacagctatgcccgcttcctgcggagcaatgcctaccaggacctgctgctggccaagaagaagaaggtgtccaaggtggtggagctgccctag

SEQ ID NO: 167497 - DNA, 1356 bp, synthetic construct
  misc_feature 1..1356: note = Description of Artificial Sequence: Synthetic coding sequence
  source 1..1356: mol_type = other DNA
atggaggatgtgattgccaggatgcaggatgagaagaatggcatccccatcagaacagtgaagagcttcctgagcaagatccccagcgtcttcagcggcagtgacatcgtgcagtggctgatcaagaacctgaccattgaagatcctgtggaggccctgcacctgggcaccctgatggccgcccacggctacttcttccccatcagtgaccacgtgctgaccctgaaggatgatggcaccttctaccgcttccagaccccctacttctggcccagcaactgctgggagcctgagaacacagattatgctgtgtacctgtgcaagaggaccatgcagaacaaggcccggctggagctggccgactatgaggccgagagcctggcccggctgcagagggcctttgccaggaagtgggagttcatcttcatgcaggccgaggcccaggccaaggtggacaagaagagggacaagattgaaaggaagatcctggacagccaggagcgggccttctgggatgtgcacaggcctgtgcccggctgtgtgaacaccacagaggtggacatcaagaagagcagcaggatgaggaacccccacaagaccaggaagtctgtgtatggcctgcagaatgacatccgcagccacagccccacccacacccccaccccagagaccaagccacccacagaagatgagctgcagcagcagatcaagtactggcagatccagctggacagacaccggctgaagatgagcaaggtggccgacagcctgctgagctacacagagcagtacctggagtatgaccccttcctgctgcccccagaccccagcaacccctggctgagtgatgacaccaccttctgggagctggaggccagcaaggagcccagccagcagagggtgaagcgctggggcttcggcatggatgaggccctgaaggaccctgtgggccgggagcagttcctgaagttcctggagagcgagttcagcagcgagaacctgcgcttctggctggccgtggaggacctgaagaagaggcccatcaaggaggtgcccagccgggtgcaggagatctggcaggagttcctggcccctggggcccccagcgccatcaacctggacagcaagagctatgacaagaccacccagaatgtgaaggagcccggccgctacacctttgaagatgcccaggagcacatctacaagctgatgaagagtgacagctacccccgcttcatccgcagcagcgcctaccaggagctgctgcaggccaagaagaagggcaggaacatccccatcttcccctgccacaagaactgcacccccaccctgcgggccagcaccaacctgctgtag

SEQ ID NO: 167498 - DNA, 1275 bp, synthetic construct
  misc_feature 1..1275: note = Description of Artificial Sequence: Synthetic coding sequence
  source 1..1275: mol_type = other DNA
atggcccagggcaacaactacggccagaccagcaatggagtggctgatgagagccccaacatgctggtgtacaggaagatggaggatgtgattgccaggatgcaggatgagaagaatggcatccccatcagaacagtgaagagcttcctgagcaagatccccagcgtcttcagcggcagtgacatcgtgcagtggctgatcaagaacctgaccattgaagatcctgctgtgtacctgtgcaagaggaccatgcagaacaaggcccggctggagctggccgactatgaagctgagagcctggcccggctgcagagggcctttgccaggaagtgggagttcatcttcatgcaggccgaggcccaggccaaggtggacaagaagagggacaagattgaaaggaagatcctggacagccaggagcgggccttctgggatgtgcacaggcctgtgcccggctgtgtgaacaccacagaggtggacatcaagaagagcagcaggatgaggaacccccacaagaccaggaagtctgtgtatggcctgcagaatgacatccgcagccacagccccacccacacccccaccccagagaccaagcccccaacagaagatgagctgcagcagcagatcaagtactggcagatccagctggacagacaccggctgaagatgagcaaggtggccgacagcctgctgagctacacagagcagtacctggagtatgaccccttcctgctgcccccagaccccagcaacccctggctgagtgatgacaccaccttctgggagctggaggccagcaaggagcccagccagcagagggtgaagcgctggggcttcggcatggatgaggccctgaaggaccctgtgggccgggagcagttcctgaagttcctggagagcgagttcagcagcgagaacctgcgcttctggctggccgtggaggacctgaagaagaggcccatcaaggaggtgcccagccgggtgcaggagatctggcaggagttcctggcccctggggcccccagcgccatcaacctggacagcaagagctatgacaagaccacccagaatgtgaaggagcccggccgctacacctttgaagatgcccaggagcacatctacaagctgatgaagagtgacagctacccccgcttcatccgcagcagcgcctaccaggagctgctgcaggccaagaagaagggcaggaacatccccatcttcccctgccacaagaactgcacccccaccctgcgggccagcaccaacctgctgtag

SEQ ID NO: 167499 - DNA, 1410 bp, synthetic construct
  misc_feature 1..1410: note = Description of Artificial Sequence: Synthetic coding sequence
  source 1..1410: mol_type = other DNA
atggcccagggcaacaactacggccagaccagcaatggagtggctgatgagagccccaacatgctggtgtacaggaagatggaggatgtgattgccaggatgcaggatgagaagaatggcatccccatcagaacagtgaagagcttcctgagcaagatccccagcgtcttcagcggcagtgacatcgtgcagtggctgatcaagaacctgaccattgaagatcctgtggaggccctgcacctgggcaccctgatggccgcccacggctacttcttccccatcagtgaccacgtgctgaccctgaaggatgatggcaccttctaccgcttccagaccccctacttctggcccagcaactgctgggagcctgagaacacagattatgctgtgtacctgtgcaagaggaccatgcagaacaaggcccggctggagctggccgactatgaggccgagagcctggcccggctgcagagggcctttgccaggaagtgggagttcatcttcatgcaggccgaggcccaggccaaggtggacaagaagagggacaagattgaaaggaagatcctggacagccaggagcgggccttctgggatgtgcacaggcctgtgcccggctgtgtgaacaccacagaggtggacatcaagaagagcagcaggatgaggaacccccacaagaccaggaagtctgtgtatggcctgcagaatgacatccgcagccacagccccacccacacccccaccccagagaccaagccacccacagaagatgagctgcagcagcagatcaagtactggcagatccagctggacagacaccggctgaagatgagcaaggtggccgacagcctgctgagctacacagagcagtacctggagtatgaccccttcctgctgcccccagaccccagcaacccctggctgagtgatgacaccaccttctgggagctggaggccagcaaggagcccagccagcagagggtgaagcgctggggcttcggcatggatgaggccctgaaggaccctgtgggccgggagcagttcctgaagttcctggagagcgagttcagcagcgagaacctgcgcttctggctggccgtggaggacctgaagaagaggcccatcaaggaggtgcccagccgggtgcaggagatctggcaggagttcctggcccctggggcccccagcgccatcaacctggacagcaagagctatgacaagaccacccagaatgtgaaggagcccggccgctacacctttgaagatgcccaggagcacatctacaagctgatgaagagtgacagctacccccgcttcatccgcagcagcgcctaccaggagctgctgcaggccaagaagaagggcaagagcctgaccagcaagaggctgaccagcctggcccagagctactag

SEQ ID NO: 167500 - DNA, 1434 bp, synthetic construct
  misc_feature 1..1434: note = Description of Artificial Sequence: Synthetic coding sequence
  source 1..1434: mol_type = other DNA
atggcccagggcaacaactacggccagaccagcaatggagtggctgatgagagccccaacatgctggtgtacaggaagatggaggatgtgattgccaggatgcaggatgagaagaatggcatccccatcagaacagtgaagagcttcctgagcaagatccccagcgtcttcagcggcagtgacatcgtgcagtggctgatcaagaacctgaccattgaagatcctgtggaggccctgcacctgggcaccctgatggccgcccacggctacttcttccccatcagtgaccacgtgctgaccctgaaggatgatggcaccttctaccgcttccagaccccctacttctggcccagcaactgctgggagcctgagaacacagattatgctgtgtacctgtgcaagaggaccatgcagaacaaggcccggctggagctggccgactatgaggccgagagcctggcccggctgcagagggcctttgccaggaagtgggagttcatcttcatgcaggccgaggcccaggccaaggtggacaagaagagggacaagattgaaaggaagatcctggacagccaggagcgggccttctgggatgtgcacaggcctgtgcccggctgtgtgaacaccacagaggtggacatcaagaagagcagcaggatgaggaacccccacaagaccaggaagtctgtgtatggcctgcagaatgacatccgcagccacagccccacccacacccccaccccagagaccaagccacccacagaagatgagctgcagcagcagatcaagtactggcagatccagctggacagacaccggctgaagatgagcaaggtggccgacagcctgctgagctacacagagcagtacctggagtatgaccccttcctgctgcccccagaccccagcaacccctggctgagtgatgacaccaccttctgggagctggaggccagcaaggagcccagccagcagagggtgaagcgctggggcttcggcatggatgaggccctgaaggaccctgtgggccgggagcagttcctgaagttcctggagagcgagttcagcagcgagaacctgcgcttctggctggccgtggaggacctgaagaagaggcccatcaaggaggtgcccagccgggtgcaggagatctggcaggagttcctggcccctggggcccccagcgccatcaacctggacagcaagagctatgacaagaccacccagaatgtgaaggagcccggccgctacacctttgaagatgcccaggagcacatctacaagctgatgaagagtgacagctacccccgcttcatccgcagcagcgcctaccaggagctgctgcaggccaagaagaagggcaggaacatccccatcttcccctgccacaagaactgcacccccaccctgcgggccagcaccaacctgctgtag

SEQ ID NO: 167501 - DNA, 1410 bp, synthetic construct; identical to SEQ ID NO: 167499
  misc_feature 1..1410: note = Description of Artificial Sequence: Synthetic coding sequence
  source 1..1410: mol_type = other DNA

SEQ ID NO: 167502 - DNA, 1464 bp, synthetic construct
  misc_feature 1..1464: note = Description of Artificial Sequence: Synthetic coding sequence
  source 1..1464: mol_type = other DNA
atggcccagggcaacaactacggccagaccagcaatggagtggctgatgagagccccaacatgctggtgtacaggaagatggaggatgtgattgccaggatgcaggatgagaagaatggcatccccatcagaacagtgaagagcttcctgagcaagatccccagcgtcttcagcggcagtgacatcgtgcagtggctgatcaagaacctgaccattgaagatcctgtggaggccctgcacctgggcaccctgatggccgcccacggctacttcttccccatcagtgaccacgtgctgaccctgaaggatgatggcaccttctaccgcttccagaccccctacttctggcccagcaactgctgggagcctgagaacacagattatgctgtgtacctgtgcaagaggaccatgcagaacaaggcccggctggagctggccgactatgaggccgagagcctggcccggctgcagagggcctttgccaggaagtgggagttcatcttcatgcaggccgaggcccaggccaaggtggacaagaagagggacaagattgaaaggaagatcctggacagccaggagcgggccttctgggatgtgcacaggcctgtgcccggctgtgtgaacaccacagaggtggacatcaagaagagcagcaggatgaggaacccccacaagaccaggaagtctgtgtatggcctgcagaatgacatccgcagccacagccccacccacacccccaccccagagaccaagccacccacagaagatgagctgcagcagcagatcaagtactggcagatccagctggacagacaccggctgaagatgagcaaggtggccgacagcctgctgagctacacagagcagtacctggagtatgaccccttcctgctgcccccagaccccagcaacccctggctgagtgatgacaccaccttctgggagctggaggccagcaaggagcccagccagcagagggtgaagcgctggggcttcggcatggatgaggccctgaaggaccctgtgggccgggagcagttcctgaagttcctggagagcgagttcagcagcgagaacctgcgcttctggctggccgtggaggacctgaagaagaggcccatcaaggaggtgcccagccgggtgcaggagatctggcaggagttcctggcccctggggcccccagcgccatcaacctggacagcaagagctatgacaagaccacccagaatgtgaaggagcccggccgctacacctttgaagatgcccaggagcacatctacaagctgatgaagagtgacagctacccccgcttcatccgcagcagcgcctaccaggagctgctgcaggccaagaagaagagcggcaacagcatggacaggaggaccagctttgagaagtttgcccagaatgtgggcaagagcctgaccagcaagaggctgaccagcctggcccagagctactag

SEQ ID NO: 167503 - DNA, 1275 bp, synthetic construct; identical to SEQ ID NO: 167498
  misc_feature 1..1275: note = Description of Artificial Sequence: Synthetic coding sequence
  source 1..1275: mol_type = other DNA

SEQ ID NO: 167504 - DNA, 1488 bp, synthetic construct
  misc_feature 1..1488: note = Description of Artificial Sequence: Synthetic coding sequence
  source 1..1488: mol_type = other DNA
atggcccagggcaacaactacggccagaccagcaatggagtggctgatgagagccccaacatgctggtgtacaggaagatggaggatgtgattgccaggatgcaggatgagaagaatggcatccccatcagaacagtgaagagcttcctgagcaagatccccagcgtcttcagcggcagtgacatcgtgcagtggctgatcaagaacctgaccattgaagatcctgtggaggccctgcacctgggcaccctgatggccgcccacggctacttcttccccatcagtgaccacgtgctgaccctgaaggatgatggcaccttctaccgcttccagaccccctacttctggcccagcaactgctgggagcctgagaacacagattatgctgtgtacctgtgcaagaggaccatgcagaacaaggcccggctggagctggccgactatgaggccgagagcctggcccggctgcagagggcctttgccaggaagtgggagttcatcttcatgcaggccgaggcccaggccaaggtggacaagaagagggacaagattgaaaggaagatcctggacagccaggagcgggccttctgggatgtgcacaggcctgtgcccggctgtgtgaacaccacagaggtggacatcaagaagagcagcaggatgaggaacccccacaagaccaggaagtctgtgtatggcctgcagaatgacatccgcagccacagccccacccacacccccaccccagagaccaagccacccacagaagatgagctgcagcagcagatcaagtactggcagatccagctggacagacaccggctgaagatgagcaaggtggccgacagcctgctgagctacacagagcagtacctggagtatgaccccttcctgctgcccccagaccccagcaacccctggctgagtgatgacaccaccttctgggagctggaggccagcaaggagcccagccagcagagggtgaagcgctggggcttcggcatggatgaggccctgaaggaccctgtgggccgggagcagttcctgaagttcctggagagcgagttcagcagcgagaacctgcgcttctggctggccgtggaggacctgaagaagaggcccatcaaggaggtgcccagccgggtgcaggagatctggcaggagttcctggcccctggggcccccagcgccatcaacctggacagcaagagctatgacaagaccacccagaatgtgaaggagcccggccgctacacctttgaagatgcccaggagcacatctacaagctgatgaagagtgacagctacccccgcttcatccgcagcagcgcctaccaggagctgctgcaggccaagaagaagagcggcaacagcatggacaggaggaccagctttgagaagtttgcccagaatgtgggcaggaacatccccatcttcccctgccacaagaactgcacccccaccctgcgggccagcaccaacctgctgtag

SEQ ID NO: 167505 - DNA, 981 bp, synthetic construct
  misc_feature 1..981: note = Description of Artificial Sequence: Synthetic coding sequence
  source 1..981: mol_type = other DNA
caggccgaggcccaggccaaggtggacaagaagagggacaagattgaaaggaagatcctggacagccaggagcgggccttctgggatgtgcacaggcctgtgcccggctgtgtgaacaccacagaggtggacatcaagaagagcagcaggatgaggaacccccacaagaccaggaagtctgtgtatggcctgcagaatgacatccgcagccacagccccacccacacccccaccccagagaccaagcccccaacagaagatgagctgcagcagcagatcaagtactggcagatccagctggacagacaccggctgaagatgagcaaggtggccgacagcctgctgagctacacagagcagtacctggagtatgaccccttcctgctgcccccagaccccagcaacccctggctgagtgatgacaccaccttctgggagctggaggccagcaaggagcccagccagcagagggtgaagcgctggggcttcggcatggatgaggccctgaaggaccctgtgggccgggagcagttcctgaagttcctggagagcgagttcagcagcgagaacctgcgcttctggctggccgtggaggacctgaagaagaggcccatcaaggaggtgcccagccgggtgcaggagatctggcaggagttcctggcccctggggcccccagcgccatcaacctggacagcaagagctatgacaagaccacccagaatgtgaaggagcccggccgctacacctttgaagatgcccaggagcacatctacaagctgatgaagagtgacagctacccccgcttcatccgcagcagcgcctaccaggagctgctgcaggccaagaagaagagcggcaacagcatggacaggaggaccagctttgagaagtttgcccagaatgtgggcaggaacatccccatcttcccctgccacaagaactgcacccccaccctgcgggccagcaccaacctgctgtag

SEQ ID NO: 167506 - DNA, 1182 bp, synthetic construct
  misc_feature 1..1182: note = Description of Artificial Sequence: Synthetic coding sequence
  source 1..1182: mol_type = other DNA
atggccgcccacggctacttcttccccatcagtgaccacgtgctgaccctgaaggatgatggcaccttctaccgcttccagaccccctacttctggcccagcaactgctgggagcctgagaacacagattatgctgtgtacctgtgcaagaggaccatgcagaacaaggcccggctggagctggccgactatgaggccgagagcctggcccggctgcagagggcctttgccaggaagtgggagttcatcttcatgcaggccgaggcccaggccaaggtggacaagaagagggacaagattgaaaggaagatcctggacagccaggagcgggccttctgggatgtgcacaggcctgtgcccggctgtgtgaacaccacagaggtggacatcaagaagagcagcaggatgaggaacccccacaagaccaggaagtctgtgtatggcctgcagaatgacatccgcagccacagccccacccacacccccaccccagagaccaagccacccacagaagatgagctgcagcagcagatcaagtactggcagatccagctggacagacaccggctgaagatgagcaaggtggccgacagcctgctgagctacacagagcagtacctggagtatgaccccttcctgctgcccccagaccccagcaacccctggctgagtgatgacaccaccttctgggagctggaggccagcaaggagcccagccagcagagggtgaagcgctggggcttcggcatggatgaggccctgaaggaccctgtgggccgggagcagttcctgaagttcctggagagcgagttcagcagcgagaacctgcgcttctggctggccgtggaggacctgaagaagaggcccatcaaggaggtgcccagccgggtgcaggagatctggcaggagttcctggcccctggggcccccagcgccatcaacctggacagcaagagctatgacaagaccacccagaatgtgaaggagcccggccgctacacctttgaagatgcccaggagcacatctacaagctgatgaagagtgacagctacccccgcttcatccgcagcagcgcctaccaggagctgctgcaggccaagaagaagggcaggaacatccccatcttcccctgccacaagaactgcacccccaccctgcgggccagcaccaacctgctgtag

SEQ ID NO: 167507 - DNA, 774 bp, synthetic construct
  misc_feature 1..774: note = Description of Artificial Sequence: Synthetic coding sequence
  source 1..774: mol_type = other DNA
atgagcagcgcccccaacggcaggaagaagaggcccagccgcagcaccaggagcagcatcttccagatcagcaagccacccctgcagagcggggactgggagcggcggggcagcggcagcgagagcgcccacaagacccagagggccctggatgactgcaagatgctggtgcaggagttcaacacccaggtggccctgtaccgggagctggtgatcagcattggagatgtgtctgtgtcctgccccagcctgcgggcagagatgcacaagaccaggaccaagggctgtgagatggcccggcaggcccaccagaagctggccgccatcagcggcccagaagatggagagatccaccctgagatctgccgcctgtacatccagctgcagtgctgcctggagatgtacaccacagagatgctgaagagcatctgcctgctgggcagcctgcagttccacaggaagggcaaggagcccggcggcggcaccaagagcctggactgcaagattgaggagagcgctgagaccccagccctggaggacagcagcagcagccctgtggacagccagcagcacagctggcaggtgtccacagacatcgagaacacagagcgggacatgagggagatgaagaacctgctgagcaagctgcgggagaccatgcccctgcccctgaagaaccaggatgacagcagcctgctgaacctgaccccctaccccctggtgagaagaaggaagaggcgcttcttcggcctgtgctgcctgatcagcagctag

SEQ ID NO: 167508 - DNA, 2025 bp, synthetic construct
  misc_feature 1..2025: note = Description of Artificial Sequence: Synthetic coding sequence
  source 1..2025: mol_type = other DNA
atgaccatccgccaccagggccagcagtaccggcccaggatggccttcctgcagaagattgaggccctggtgaaggacatgcagaaccctgagaccggggtgaggatgcagaaccagagggtgctggtgacctctgtgccccacgccatgactggaagtgatgtgctgcagtggatcgtgcagaggctgtggatcagcagcctggaggcccagaacctgggcaacttcatcgtgcgctatggctacatctaccccctgcaggaccccaagaacctgatcctgaagccagatggcagcctgtaccgcttccagaccccctacttctggcccacccagcagtggccagctgaggacacagattatgccatctacctggccaagaggaacatcaagaagaagggcatcctggaggagtatgagaaggagaactacaacttcctgaaccagaagatgaactacaagtgggactttgtgatcatgcaggccaaggagcagtaccgggccggcaaggagaggaacaaggctgacagatatgccctggactgccaggagaaggcctactggctggtgcaccgctgccccccaggcatggacaacgtgctggactatggcctggacagagtgaccaaccccaatgaggtgaaggtgaaccagaagcagacagtggtggccgtgaagaaggagatcatgtactaccagcaggccctgatgaggagcacagtgaagagctctgtgtccctgggcggcatcgtgaagtacagcgagcagttcagcagcaatgatgccatcatgagcggctgcctgcccagcaacccctggatcacagatgacacccagttctgggacctgaatgccaagctggtggagatccccaccaagatgagggtggagcgctgggccttcaacttcagcgagctgatccgggaccccaagggccggcagagcttccagtacttcctgaagaaggagttctctggagagaacctgggcttctgggaggcctgtgaggacctgaagtacggggaccagagcaaggtgaaggagaaggccgaggagatctacaagctgttcctggcccctggggcccggcgctggatcaacattgatggcaagaccatggacatcaccgtgaagggcctgaagcacccccaccgctacgtgctggatgctgcccagacccacatctacatgctgatgaagaaggacagctatgcccgctacctgaagagccccatctacaaggacatgctggccaaggccatcgagccccaggagaccaccaagaagagcagcaccctgcccttcatgagaagacacctgcggagcagccccagccctgtgatcctgcggcagctggaggaggaggccaaggcccgggaggccgccaacacagtggacatcacccagcccggccagcacatggcccccagcccccacctgactgtgtacacaggcacctgcatgccacccagccccagcagccccttcagcagcagctgccgcagccccaggaagccctttgccagccccagccgcttcatcagaagacccagcaccaccatctgccccagccccatccgggtggccctggagagcagcagcggcctggagcagaagggagaatgttctggctccatggccccccggggccccagcgtgacagagagcagcgaggccagcctggacacctcctggcccaggagccggccccgggccccacccaaggccaggatggccctgtccttcagccgcttcctgcggcggggctgcctggccagccctgtgtttgcccggctgagccccaagtgcccagctgtgagccacggccgggtgcagcccctgggagatgtgggccagcagctgccccggctgaagagcaagagggtggccaacttcttccagatcaagatggatgtgcccactggaagtggcacctgcctgatggacagtgaagatgctggcactggagagagcggggaccgggccacagagaaggaggtgatctgcccctgggagagcctgtag

SEQ ID NO: 167509 - DNA, 2016 bp, synthetic construct
  misc_feature 1..2016: note = Description of Artificial Sequence: Synthetic coding sequence
  source 1..2016: mol_type = other DNA
atgaccatccgccaccagggccagcagtaccggcccaggatggccttcctgcagaagattgaggccctggtgaaggacatgcagaaccctgagaccggggtgaggatgcagaaccagagggtgctggtgacctctgtgccccacgccatgactggaagtgatgtgctgcagtggatcgtgcagaggctgtggatcagcagcctggaggcccagaacctgggcaacttcatcgtgcgctatggctacatctaccccctgcaggaccccaagaacctgatcctgaagccagatggcagcctgtaccgcttccagaccccctacttctggcccacccagcagtggccagctgaggacacagattatgccatctacctggccaagaggaacatcaagaagaagggcatcctggaggagtatgagaaggagaactacaacttcctgaaccagaagatgaactacaagtgggactttgtgatcatgcaggccaaggagcagtaccgggccggcaaggagaggaacaaggctgacagatatgccctggactgccaggagaaggcctactggctggtgcaccgctgccccccaggcatggacaacgtgctggactatggcctggacagagtgaccaaccccaatgaggtgaagaagcagacagtggtggccgtgaagaaggagatcatgtactaccagcaggccctgatgaggagcacagtgaagagctctgtgtccctgggcggcatcgtgaagtacagcgagcagttcagcagcaatgatgccatcatgagcggctgcctgcccagcaacccctggatcacagatgacacccagttctgggacctgaatgccaagctggtggagatccccaccaagatgagggtggagcgctgggccttcaacttcagcgagctgatccgggaccccaagggccggcagagcttccagtacttcctgaagaaggagttcagcggggagaacctgggcttctgggaggcctgtgaggacctgaagtatggagaccagagcaaggtgaaggagaaggccgaggagatctacaagctgttcctggcccctggggcccggcgctggatcaacattgatggcaagaccatggacatcaccgtgaagggcctgaagcacccccacagatatgtgctggatgctgcccagacccacatctacatgctgatgaagaaggacagctatgcccgctacctgaagagccccatctacaaggacatgctggccaaggccatcgagccccaggagaccaccaagaagagcagcaccctgcccttcatgaggaggcacctgcggagcagccccagccctgtgatcctgcggcagctggaggaggaggccaaggcccgggaggccgccaacacagtggacatcacccagcccggccagcacatggcccccagcccccacctgactgtgtacacaggcacctgcatgccacccagccccagcagccccttcagcagcagctgccgcagccccaggaagccctttgccagccccagccgcttcatccggcggcccagcaccaccatctgccccagccccatccgggtggccctggagagcagcagcggcctggagcagaagggggagtgcagcggctccatggccccccggggccccagcgtgacagagagcagcgaggccagcctggacacctcctggcccaggagccggccccgggccccacccaaggccaggatggccctgtccttcagccgcttcctgcggcggggctgcctggccagccctgtgtttgcccggctgagccccaagtgcccagctgtgagccacggccgggtgcagcccctgggagatgtgggccagcagctgccccggctgaagagcaagagggtggccaacttcttccagatcaagatggatgtgcccaccggcagcggcacctgcctgatggattctgaagatgctggcaccggggagagcggggaccgggccacagagaaggaggtgatctgcccctgggagagcctgtag

SEQ ID NO: 167510 - DNA, 4008 bp, synthetic construct
  misc_feature 1..4008: note = Description of Artificial Sequence: Synthetic coding sequence
  source 1..4008: mol_type = other DNA
atggagagcgagatgctgcagagccccctgctgggcctgggggaggaggatgaagctgacctgacagactggaacctgcccctggccttcatgaagaagaggcactgtgagaagattgagggcagcaagagcctggcccagagctggaggatgaaggacaggatgaagacagtgtctgtggccctggtgctgtgcctgaatgtgggcgtggaccccccagatgtggtgaagaccaccccctgtgcccggctggagtgctggattgaccccctgtccatgggcccccagaaggccctggagaccatcggggccaacctgcagaagcagtatgagaactggcagccccgggcccgctacaagcagagcctggaccccaccgtggatgaggtgaagaagctgtgcaccagcctgcggagaaatgccaaggaggagcgggtgctcttccactacaatggacatggagtgccccggcccaccgtgaatggagaggtgtgggtgttcaacaagaactacacccagtacatccccctgagcatctatgacctgcagacctggatgggcagccccagcatctttgtgtatgactgcagcaatgccggcctcatcgtgaagagcttcaagcagtttgccctgcagcgggagcaggagctggaggtggccgccatcaaccccaaccaccccctggcccagatgcccctgccccccagcatgaagaactgcatccagctggccgcctgtgaggccacagagctgctgcccatgatcccagacctgcctgctgacctcttcaccagctgcctgaccacccccatcaagatcgccctgcgctggttctgcatgcagaagtgtgtgtccctggtgcctggggtgaccctggacctgattgagaagatccctggccgcctgaatgacaggaggacccccctgggggagctgaactggatcttcaccgccatcacagacaccatcgcctggaatgtgctgccccgggacctcttccagaagctgttccggcaggacctgctggtggccagcctcttcaggaacttcctgctggccgagcgcatcatgaggagctacaactgcacccctgtgagcagcccccggctgccccccacctacatgcacgccatgtggcaggcctgggacctggccgtggacatctgcctgagccagctgcccaccatcatcgaggagggcacagccttccgccacagccccttctttgctgagcagctgacagccttccaggtgtggctgaccatgggcgtggagaacagaaatcctcctgagcagctgcccatcgtgctgcaggtgctgctgagccaggtgcaccggctgcgggccctggacctgctgggccgcttcctggacctgggcccctgggccgtgtccctggccctgtctgtgggcatcttcccctacgtgctgaagctgctgcagagcagcgcccgggagctgcggcccctgctggtgttcatctgggccaagatcctggccgtggacagcagctgccaggccgacctggtgaaggacaatggccacaagtacttcctgtctgtgctggccgacccctacatgcctgctgagcacaggaccatgacagccttcatcctggccgtcatcgtgaacagctaccacacaggccaggaggcctgcctgcagggcaacctgattgccatctgcctggagcagctgaatgacccccaccccctgctgcggcagtgggtggccatctgcctgggccgcatctggcagaactttgacagcgcccgctggtgtggggtgcgggacagcgcccacgagaagctgtacagcctgctgagtgaccccatccctgaggtgcgctgtgccgctgtgtttgccctgggcacctttgtgggcaacagcgctgagaggacagaccacagcaccaccatcgaccacaacgtggccatgatgctggcccagctggtgtctgatggcagccccatggtgaggaaggagctggtggtggccctgagccacctggtggtgcagtatgagagcaacttctgcaccgtggccctgcagttcatcgaggaggagaagaactatgccctgcccagccctgccaccacagagggcggcagcctgacccctgtgcgggacagcccctgcaccccccggctgcggtctgtgagcagctatggcaacatccgggctgtggccacagcccggagcctgaacaagagcctgcagaacctgagcctgacagaggagagcggcggcgctgtggccttcagccctggcaacctgagcaccagcagcagcgccagcagcaccctgggcagcccagaaaatgaggagcacatcctgagctttgagaccatcgacaagatgaggcgggccagcagctacagcagcctgaacagcctcatcggcgtgtccttcaacagcgtgtacacccagatctggagggtgctgctgcacctggccgctgacccctacccagaggtgtctgatgtggccatgaaggtgctgaacagcatcgcctacaaggccaccgtgaatgcccggccccagagggtgctggacaccagcagcctgacccagagcgccccagccagccccaccaacaagggcgtgcacatccaccaggccggcggcagccccccagccagcagcaccagcagcagcagcctgaccaatgatgtggccaagcagcctgtgtcccgggacctgcccagcggccggcccggcaccactggacctgctggggcccagtacaccccccacagccaccagttccccaggaccaggaagatgtttgacaagggccctgagcagacagcagatgatgctgatgatgctgctggccacaagagcttcatcagcgccaccgtgcagacaggcttctgtgactggagcgcccgctactttgcccagcctgtgatgaagatccctgaggagcatgacctggagagccagatcaggaaggagcgggagtggaggttcctgaggaacagccgggtgcggcggcaggcccagcaggtgatccagaagggcatcacccggctggatgaccagatcttcctgaacagaaatcctggggtgcccagcgtggtgaagttccaccccttcaccccctgcatcgctgtggccgacaaggacagcatctgcttctgggactgggagaagggggagaagctggactacttccacaacggcaacccccgctacaccagggtgacagccatggagtacctgaatggccaggactgcagcctgctgctgacagccacagatgatggagccatccgggtgtggaagaactttgctgacctggagaagaaccctgagatggtgacagcctggcagggcctgagtgacatgctgcccaccaccagaggagctggcatggtggtggactgggagcaggagaccggcctgctgatgagcagtggagatgtgcgcatcgtgcgcatctgggacacagaccgggagatgaaggtgcaggacatccccactggagctgacagctgtgtgaccagcctgagctgtgacagccacaggagcctgattgtggccggcctgggagatggcagcatccgggtgtatgacaggaggatggccctgtctgaatgtcgggtgatgacctaccgggagcacacagcctgggtggtgaaggccagcctgcagaagaggccagatggccacatcgtgtctgtgtctgtgaatggagatgtgcgcatctttgaccccaggatgcctgagagcgtgaatgtgctgcagatcgtgaagggcctgacagccctggacatccacccccaggccgacctgattgcctgtggctctgtgaaccagttcaccgccatctacaacagcagtggagagctgatcaacaacatcaagtactatgatggcttcatgggccagagggtgggcgccatcagctgcctggccttccacccccactggccccacctggccgtgggcagcaatgactactacatctctgtgtacagcgtggagaagagggtgaggtag

SEQ ID NO: 167511 - DNA, 990 bp, synthetic construct
  misc_feature 1..990: note = Description of Artificial Sequence: Synthetic coding sequence
  source 1..990: mol_type = other DNA
atgggcagccccagcatctttgtgtatgactgcagcaatgccggcctgattgtgaagagcttcaagcagtttgccctgcagcgggagcaggagctggaggtggccgccatcaaccccaaccaccccctggcccagatgcccctgcccccatccatgaagaactgcatccagctggccgcctgtgaggccacagagctgctgcccatgatcccagacctgcctgctgacctcttcaccagctgcctgaccacccccatcaagatcgccctgcgctggttctgcatgcagaagtgtgtgtccctggtgcctggggtgaccctggacctgattgagaagatccctggccgcctgaatgacaggaggacccccctgggggagctgaactggatcttcaccgccatcacagacaccatcgcctggaatgtgctgccccgggacctcttccagaagctgttccggcaggacctgctggtggccagcctcttcaggaacttcctgctggccgagcgcatcatgaggagctacaactgcacccctgtgagcagcccccggctgccccccacctacatgcacgccatgtggcaggcctgggacctggccgtggacatctgcctgagccagctgcccaccatcatcgaggagggcacagccttccgccacagccccttctttgctgagcagctgacagccttccaggtgtggctgaccatgggcgtggagaacagaaaccccccagagcagctgcccatcgtgctgcaggtgctgctgagccaggtgcaccggctgcgggccctggacctgctgggccgcttcctggacctgggcccctgggccgtgtccctggccctgtctgtgggcatcttcccctacgtgctgaagctgctgcagagcagcgcccgggagctgcggcccctgctggtgttcatctgggccaagatcctggccgtggacagcgtgtccatcccagccctgctgccccgggtgatgtag

SEQ ID NO: 167512 - DNA, 3534 bp, synthetic construct
  misc_feature 1..3534: note = Description of Artificial Sequence: Synthetic coding sequence
  source 1..3534: mol_type = other DNA
atggagagcgagatgctgcagagccccctgctgggcctgggggaggaggatgaagctgacctgacagactggaacctgcccctggccttcatgaagaagaggcactgtgagaagattgagggcagcaagagcctggcccagagctggaggatgaaggacaggatgaagacagtgtctgtggccctggtgctgtgcctgaatgtgggcgtggaccccccagatgtggtgaagaccaccccctgtgcccggctggagtgctggattgaccccctgtccatgggcccccagaaggccctggagaccatcggggccaacctgcagaagcagtatgagaactggcagccccgggcccgctacaagcagagcctggaccccaccgtggatgaggtgaagaagctgtgcaccagcctgcggagaaatgccaaggaggagcgggtgctcttccactacaatggacatggagtgccccggcccaccgtgaatggagaggtgtgggtgttcaacaagaactacacccagtacatccccctgagcatctatgacctgcagacctggatgggcagccccagcatctttgtgtatgactgcagcaatgccggcctcatcgtgaagagcttcaagcagtttgccctgcagcgggagcaggagctggaggtggccgccatcaaccccaaccaccccctggcccagatgcccctgccccccagcatgaagaactgcatccagctggccgcctgtgaggccacagagctgctgcccatgatcccagacctgcctgctgacctcttcaccagctgcctgaccacccccatcaagatcgccctgcgctggttctgcatgcagaagtgtgtgtccctggtgcctggggtgaccctggacctgattgagaagatccctggccgcctgaatgacaggaggacccccctgggggagctgaactggatcttcaccgccatcacagacaccatcgcctggaatgtgctgccccgggacctcttccagaagctgttccggcaggacctgctggtggccagcctcttcaggaacttcctgctggccgagcgcatcatgaggagctacaactgcacccctgtgagcagcccccggctgccccccacctacatgcacgccatgtggcaggcctgggacctggccgtggacatctgcctgagccagctgcccaccatcatcgaggagggcacagccttccgccacagccccttctttgctgagcagctgacagccttccaggtgtggctgaccatgggcgtggagaacagaaatcctcctgagcagctgcccatcgtgctgcaggtgctgctgagccaggtgcaccggctgcgggccctggacctgctgggccgcttcctggacctgggcccctgggccgtgtccctggccctgtctgtgggcatcttcccctacgtgctgaagctgctgcagagcagcgcccgggagctgcggcccctgctggtgttcatctgggccaagatcctggccgtggacagcgagctggtggtggccctgagccacctggtggtgcagtatgagagcaacttctgcaccgtggccctgcagttcatcgaggaggagaagaactatgccctgcccagccctgccaccacagagggcggcagcctgacccctgtgcgggacagcccctgcaccccccggctgcggtctgtgagcagctatggcaacatccgggctgtggccacagcccggagcctgaacaagagcctgcagaacctgagcctgacagaggagagcggcggcgctgtggccttcagccctggcaacctgagcaccagcagcagcgccagcagcaccctgggcagcccagaaaatgaggagcacatcctgagctttgagaccatcgacaagatgaggcgggccagcagctacagcagcctgaacagcctcatcggcgtgtccttcaacagcgtgtacacccagatctggagggtgctgctgcacctggccgctgacccctacccagaggtgtctgatgtggccatgaaggtgctgaacagcatcgcctacaaggccaccgtgaatgcccggccccagagggtgctggacaccagcagcctgacccagagcgccccagccagccccaccaacaagggcgtgcacatccaccaggccggcggcagccccccagccagcagcaccagcagcagcagcctgaccaatgatgtggccaagcagcctgtgtcccgggacctgcccagcggccggcccggcaccactggacctgctggggcccagtacaccccccacagccaccagttccccaggaccaggaagatgtttgacaagggccctgagcagacagcagatgatgctgatgatgctgctggccacaagagcttcatcagcgccaccgtgcagacaggcttctgtgactggagcgcccgctactttgcccagcctgtgatgaagatccctgaggagcatgacctggagagccagatcaggaaggagcgggagtggaggttcctgaggaacagccgggtgcggcggcaggcccagcaggtgatccagaagggcatcacccggctggatgaccagatcttcctgaacagaaatcctggggtgcccagcgtggtgaagttccaccccttcaccccctgcatcgctgtggccgacaaggacagcatctgcttctgggactgggagaagggggagaagctggactacttccacaacggcaacccccgctacaccagggtgacagccatggagtacctgaatggccaggactgcagcctgctgctgacagccacagatgatggagccatccgggtgtggaagaactttgctgacctggagaagaaccctgagatggtgacagcctggcagggcctgagtgacatgctgcccaccaccagaggagctggcatggtggtggactgggagcaggagaccggcctgctgatgagcagtggagatgtgcgcatcgtgcgcatctgggacacagaccgggagatgaaggtgcaggacatccccactggagctgacagctgtgtgaccagcctgagctgtgacagccacaggagcctgattgtggccggcctgggagatggcagcatccgggtgtatgacaggaggatggccctgtctgaatgtcgggtgatgacctaccgggagcacacagcctgggtggtgaaggccagcctgcagaagaggccagatggccacatcgtgtctgtgtctgtgaatggagatgtgcgcatctttgaccccaggatgcctgagagcgtgaatgtgctgcagatcgtgaagggcctgacagccctggacatccacccccaggccgacctgattgcctgtggctctgtgaaccagttcaccgccatctacaacagcagtggagagctgatcaacaacatcaagtactatgatggcttcatgggccagagggtgggcgccatcagctgcctggccttccacccccactggccccacctggccgtgggcagcaatgactactacatctctgtgtacagcgtggagaagagggtgaggtag

SEQ ID NO: 167513 - DNA, 2097 bp, synthetic construct
  misc_feature 1..2097: note = Description of Artificial Sequence: Synthetic coding sequence
  source 1..2097: mol_type = other DNA
atgcagaacagcgagggcggcgctgacagccctgcctctgtggccctgcggcccagcgctgctgcccctcctgtgcctgccagcccccagagggtgctggtgcaggccgccagcagcaaccccaagggggcccagatgcagcccatcagcctgccccgggtgcagcaggtgccccagcaggtgcagcctgtgcagcacgtgtacccagcccaggtgcagtatgtggagggcggagatgctgtgtacaccaacggggccatcagaacagcctacacctacaaccctgagccccagatgtatgcccccagcagcacagccagctactttgaggcccctgggggcgcccaggtgacagtggccgccagcagccccccagctgtgcccagccacagcatggtgggcatcaccatggatgtgggcggcagccccatcgtgtcctctgctggggcctacctgatccacggcggcatggacagcaccaggcacagcctggcccacaccagccgcagcagccctgccaccctgcagtggctgctggacaactatgaaacagctgagggcgtgtccctgcccaggagcagcctgtacaaccactacctgcggcactgccaggagcacaagctggaccctgtgaatgctgccagctttgggaagctgatccgcagcgtcttcatgggcctgcggacccggcggctgggcacccggggcaacagcaagtaccactactacggcatccggctgaagccagacagccccctgaaccggctgcaggaggacacccagtacatggccatgaggcagcagcccatgcaccagaagccccgctacagacctgcccagaagacagacagcctgggggacagcggcagccacagcggcctgcacagcaccccagagcagaccatggctgtgcagagccagcaccaccagcagtacattgatgtgagccacgtgtttcctgagttccctgccccagacctgggcagcttcctgctgcaggatggagtgaccctgcatgatgtgaaggccctgcagctggtgtacagaagacactgtgaggccaccgtggatgtggtgatgaacctgcagttccactacatcgagaagctgtggctgtccttctggaacagcaaggccagcagcagtgatggccccaccagcctgcctgccagtgatgaagatcctgagggcgctgtgctgcccaaggacaagctgatcagcctgtgccagtgtgaccccatcctgcgctggatgaggagctgtgaccacatcctgtaccaggccctggtggagatcctgatcccagatgtgctgcggcctgtgcccagcaccctgacccaggccatccggaactttgccaagagcctggagggctggctgaccaatgccatgtctgacttcccccagcaggtgatccagaccaaggtgggcgtggtgtctgcctttgcccagaccctgcggcgctacaccagcctgaaccacctggcccaggccgcccgggctgtgctgcagaacaccagccagatcaaccagatgctgagtgacctgaacagagtggactttgccaacgtgcaggagcaggcctcctgggtgtgccagtgtgaggagagcgtggtgcagaggctggagcaggacttcaagctgaccctgcagcagcagagcagcctggaccagtgggcctcctggctggacagcgtggtgacccaggtgctgaagcagcacgccggcagccccagcttccccaaggccgcccggcagttcctgctgaagtggagcttctacagctccatggtgatccgggacctgaccctgcggtctgctgccagctttggcagcttccacctgatccggctgctgtatgatgagtacatgttctacctggtggagcaccgggtggccgaggccaccggggagacccccatcgctgtgatgggagagttcaatgacctggccagcctgagcctgaccctgctggacaaggatgacatgggagatgagcagaggggcagcgaggccggcccagatgcccggagcctgggggagcccctggtgaagcgggagaggagtgaccccaaccacagcctgcagggcatctag

SEQ ID NO: 167514 - DNA, 2940 bp, synthetic construct
  misc_feature 1..2940: note = Description of Artificial Sequence: Synthetic coding sequence
  source 1..2940: mol_type = other DNA
atggccacccaggcctacacagagctgcaggccgcccccccacccagccagcccccccaggccccaccccaggcccagccccagcccccacctcctcctcctcctgctgccccccagcccccccagcccccaacagctgctgccaccccccagccccagtatgtgacagagctgcagagcccccagccccaggcccagcccccaggcggccagaagcagtatgtgacagagctgcctgctgtgcctgcccccagccagcccaccggggcccccacccccagccctgccccccagcagtacatcgtggtgacagtgtctgagggcgccatgagggccagcgagaccgtgtctgaggccagccctggcagcacagccagccagacaggagtgcccacccaggtggtgcagcaggtgcagggcacccagcagaggctgctggtgcagacctctgtgcaggccaagccaggccacgtgagccccctgcagctgaccaacatccaggtgccccagcaggccctgcccacccagaggctggtggtgcagagcgctgcccctggcagcaagggcggccaggtgtccctgactgtgcacggcacccagcaggtgcacagccccccagagcagagccctgtgcaggccaacagcagcagcagcaagacagctggggcccccactggaacagtgccccagcagctgcaggtgcatggagtgcagcagagcgtgcctgtgacccaggagaggtctgtggtgcaggccaccccccaggcccccaagccaggccctgtgcagcccctgactgtgcagggcctgcagcctgtgcacgtggcccaggaggtgcagcagctgcagcaggtgcctgtgccccacgtgtacagcagccaggtgcagtatgtggagggcggagatgccagctacacagccagcgccatccgcagcagcacctacagctacccagagacccccctgtacacccagacagccagcaccagctactatgaggccgccggcacagccacccaggtgtccaccccagccaccagccaggccgtggccagcagcggctccatgcccatgtatgtgtctggcagccaggtggtggccagcagcaccagcactggagctggggccagcaacagcagcggcggcggcggcagcggcggcggcggcggcggcggcggcggcggcggcggcggcggcagcggcagcactggaggcggcggcagcggggccggcacctacgtgatccagggcggctacatgctgggcagcgccagccagagctacagccacaccacccgggccagccctgccaccgtgcagtggctgctggacaactatgaaacagctgagggcgtgtccctgcccaggagcaccctgtactgccactacctgctgcactgccaggagcagaagctggagcctgtgaatgctgccagctttgggaagctgatccgcagcgtcttcatgggcctgcggacccggcggctgggcacccggggcaacagcaagtaccactactacggcctgcgcatcaaggccagcagccccctgctgcggctgatggaggaccagcagcacatggccatgaggggccagcccttcagccagaagcagaggctgaagcccatccagaagatggagggcatgaccaatggagtggccgtgggccagcagcccagcacaggcctgagtgacatcagcgcccaggtgcagcagtaccagcagttcctggatgccagccgcagcctgcctgacttcacagagctggacctgcagggcaaggtgctgcctgagggcgtgggccctggggacatcaaggccttccaggtgctgtaccgggagcactgtgaggccatcgtggatgtgatggtgaacctgcagttcaccctggtggagaccctgtggaagaccttctggagatacaacctgagccagcccagcgaggccccacccctggccgtgcatgatgaggccgagaagaggctgcccaaggccatcctggtgctgctgagcaagtttgagcctgtgctgcagtggaccaagcactgtgacaacgtgctgtaccagggcctggtggagatcctgatcccagatgtgctgcggcccatccccagcgccctgacccaggccatccggaactttgccaagagcctggagagctggctgacccacgccatggtgaacatccctgaggagatgctgcgggtgaaggtggccgctgctggggcctttgcccagaccctgcggcgctacaccagcctgaaccacctggcccaggccgcccgggctgtgctgcagaacacagcccagatcaaccagatgctgagtgacctgaacagagtggactttgccaacgtgcaggagcaggcctcctgggtgtgccgctgtgaagatagagtggtgcagaggctggagcaggacttcaaggtgaccctgcagcagcagaacagcctggagcagtgggccgcctggctggatggagtggtgtcccaggtgctgaagccctaccagggcagcgctggcttccccaaggccgccaagctgttcctgctgaagtggagcttctacagctccatggtgatccgggacctgaccctgcggtctgctgccagctttggcagcttccacctgatccggctgctgtatgatgagtacatgtactacctgattgagcaccgggtggcccaggccaagggggagacccccatcgctgtgatgggagaatttgccaacctggccaccagcctgaaccccctggaccctgacaaggatgaggaggaggaggaggaggaggagagtgaagatgagctgccccaggacatcagcctggccgccggcggggagagccctgccctgggccctgagaccctggagcccccagccaagctggccaggacagatgcccggggcctgtttgtgcaggccctgcccagcagctag

SEQ ID NO: 167515 - DNA, 2172 bp, synthetic construct
  misc_feature 1..2172: note = Description of Artificial Sequence: Synthetic coding sequence
  source 1..2172: mol_type = other DNA
atgcagaacagcgagggcggcgctgacagccctgcctctgtggccctgcggcccagcgctgctgcccctcctgtgcctgccagcccccagagggtgctggtgcaggccgccagcagcaaccccaagggggcccagatgcagcccatcagcctgccccgggtgcagcaggtgccccagcaggtgcagcctgtgcagcacgtgtacccagcccaggtgcagtatgtggagggcggagatgctgtgtacaccaacggggccatcagaacagcctacacctacaaccctgagccccagatgtatgcccccagcagcacagccagctactttgaggcccctgggggcgcccaggtgacagtggccgccagcagccccccagctgtgcccagccacagcatggtgggcatcaccatggatgtgggcggcagccccatcgtgtcctctgctggggcctacctgatccacggcggcatggacagcaccaggcacagcctggcccacaccagccgcagcagccctgccaccctggagatggccatcgagaacctgcagaagtctgagggcatcaccagccacaagagcggcctgctgaacagccacctgcagtggctgctggacaactatgaaacagctgagggcgtgtccctgcccaggagcagcctgtacaaccactacctgcggcactgccaggagcacaagctggaccctgtgaatgctgccagctttgggaagctgatccgctctgtgttcatgggcctgcggacccggcggctgggcacccggggcaacagcaagtaccactactacggcatccggctgaagccagacagccccctgaaccggctgcaggaggacacccagtacatggccatgaggcagcagcccatgcaccagaagccccgctacagacctgcccagaagacagacagcctgggggacagcggcagccacagcggcctgcacagcaccccagagcagaccatggctgtgcagagccagcaccaccagcagtacattgatgtgagccacgtgtttcctgagttccctgccccagacctgggcagcttcctgctgcaggatggagtgaccctgcatgatgtgaaggccctgcagctggtgtaccgccgccactgtgaggccaccgtggatgtggtgatgaacctgcagttccactacatcgagaagctgtggctgtccttctggaacagcaaggccagcagcagtgatggccccaccagcctgcctgccagtgatgaggaccctgagggcgctgtgctgcccaaggacaagctgatcagcctgtgccagtgtgaccccatcctgcgctggatgaggagctgtgaccacatcctgtaccaggccctggtggagatcctgatcccagatgtgctgcggcctgtgcccagcaccctgacccaggccatccggaactttgccaagagcctggagggctggctgaccaatgccatgtctgacttcccccagcaggtgatccagaccaaggtgggcgtggtgtctgcctttgcccagaccctgcggcgctacaccagcctgaaccacctggcccaggccgcccgggctgtgctgcagaacaccagccagatcaaccagatgctgagtgacctgaacagagtggactttgccaacgtgcaggagcaggcctcctgggtgtgccagtgtgaggagagcgtggtgcagaggctggagcaggacttcaagctgaccctgcagcagcagagcagcctggaccagtgggcctcctggctggacagcgtggtgacccaggtgctgaagcagcacgccggcagccccagcttccccaaggccgcccggcagttcctgctgaagtggagcttctacagctccatggtgatccgggacctgaccctgcggtctgctgccagctttggcagcttccacctgatccggctgctgtatgatgagtacatgttctacctggtggagcaccgggtggccgaggccactggagagacccccatcgctgtgatgggagagttcaatgacctggccagcctgagcctgaccctgctggacaaggatgacatgggagatgagcagaggggcagcgaggccggcccagatgcccggagcctgggggagcccctggtgaagcgggagaggagtgaccccaaccacagcctgcagggcatctag

SEQ ID NO: 167516 - DNA, 2097 bp, synthetic construct; identical to SEQ ID NO: 167513
  misc_feature 1..2097: note = Description of Artificial Sequence: Synthetic coding sequence
  source 1..2097: mol_type = other DNA

SEQ ID NO: 167517 - DNA, 1851 bp, synthetic construct
  misc_feature 1..1851: note = Description of Artificial Sequence: Synthetic coding sequence
  source 1..1851: mol_type = other DNA
atggctgaagatgagccagatgccaagagccccaagacaggaggccgggcccctcctggaggagctgaggccggggagcccaccaccctgctgcagaggctgcggggcaccatcagcaaggctgtgcagaacaaggtggagggcatcctgcaggatgtgcagaagttcagtgacaatgacaagctgtacctgtacctgcagctgcccagcggccccaccaccggggacaagagcagcgagcccagcaccctgagcaatgaggagtacatgtatgcctaccgctggatccggaaccacctggaggagcacacagacacctgcctgcccaagcagagcgtgtatgatgcctacaggaagtactgtgagagcctggcctgctgccggcccctgagcacagccaactttgggaagatcatccgggagatcttcccagacatcaaggcccggcggctgggcggccggggccagagcaagtactgctacagcggcatccggaggaagaccctggtgtccatgccacccctgcccggcctggacctgaagggcagcgagagccctgagatgggccctgaggtgaccccagcccccagagatgagctggtggaggccgcctgtgccctgacctgtgactgggccgagcgcatcctgaagaggagcttcagcagcatcgtggaggtggcccgcttcctgctgcagcagcacctgatcagcgcccggagcgcccacgcccacgtgctgaaggccatgggcctggccgaggaggatgaacatgccccccgggagaggagcagcaagcccaagaatggcctggagaaccctgagggcggggcccacaagaagccagagcggctggcccagccccccaaggacctggaggccaggactggagctggccccctggcccggggggagaggaagaagtctgtggtggagagcagcgcccctggggccaacaacctgcaggtgaatgccctggtggcccggctgcccctgctgctgccccgggcccccaggagcctcatcccccccatccctgtgagcccccccatcctggccccccggctgagcagcggggccctgaaggtggccaccctgcccctgagcagcagagctggggcccccccagctgctgtgcccatcatcaacatgatcctgcccaccgtgcctgccctgcccggccctggccctggccctggccgggcccctcctgggggcctgacccagccccggggcacagaaaatcgggaggtgggcattggaggagaccagggcccccatgacaagggcgtgaagaggacagctgaggtgcctgtgtctgaggccagcggccaggcccccccagccaaggccgccaagcaggacatcgaggacacagccagtgatgccaagaggaagaggggccggcccaggaagaagagcggcggcagcggggagaggaacagcacccccctgaagtctgctgctgccatggagagcgcccagagcagccggctgccctgggagacctggggcagcggcggggagggcaacagcgctgggggcgctgagcggcccggccccatgggagaggccgagaagggagctgtgctggcccagggccagggagatggcaccgtgtccaaaggaggccggggccctggcagccagcacaccaaggaggccgaggacaagatccccctggtgcccagcaaggtgtctgtcatcaagggcagccgcagccagaaggaggccttccccctggccaagggggaggtggacacagccccccagggcaacaaggacctgaaggagcacgtgctgcagagcagcctgagccaggagcacaaggaccccaaggccaccccaccctag

SEQ ID NO: 167518 - DNA, 1851 bp, synthetic construct; identical to SEQ ID NO: 167517
  misc_feature 1..1851: note = Description of Artificial Sequence: Synthetic coding sequence
  source 1..1851: mol_type = other DNA

SEQ ID NO: 167519 - DNA, 1791 bp, synthetic construct
  misc_feature 1..1791: note = Description of Artificial Sequence: Synthetic coding sequence
  source 1..1791: mol_type = other DNA
atggctgaagatgagccagatgccaagagccccaagacaggaggccgggcccctcctggaggagctgaggccggggagcccaccaccctgctgcagaggctgcggggcaccatcagcaaggctgtgcagaacaaggtggagggcatcctgcaggatgtgcagaagttcagtgacaatgacaagctgtacctgtacctgcagctgcccagcggccccaccaccggggacaagagcagcgagcccagcaccctgagcaatgaggagtacatgtatgcctaccgctggatccggaaccacctggaggagcacacagacacctgcctgcccaagcagagcgtgtatgatgcctacaggaagtactgtgagagcctggcctgctgccggcccctgagcacagccaactttgggaagatcatccgggagatcttcccagacatcaaggcccggcggctgggcggccggggccagagcaagtactgctacagcggcatccggaggaagaccctggtgtccatgccacccctgcccggcctggacctgaagggcagcgagagccctgagatgggccctgaggtgaccccagcccccagagatgagctggtggaggccgcctgtgccctgacctgtgactgggccgagcgcatcctgaagaggagcttcagcagcatcgtggaggtggcccgcttcctgctgcagcagcacctgatcagcgcccggagcgcccacgcccacgtgctgaaggccatgggcctggccgaggaggatgaacatgccccccgggagaggagcagcaagcccaagaatggcctggagaaccctgagggcggggcccacaagaagccagagcggctggcccagccccccaaggacctggaggccaggactggagctggccccctggcccggggggagaggaagaagtctgtggtggagagcagcgcccctggggccaacaacctgcaggtgaatgccctggtggcccggctgcccctgctgctgccccgggcccccaggagcctcatcccccccatccctgtgagcccccccatcctggccccccggctgagcagcggggccctgaaggtggccaccctgcccctgagcagcagagctggggcccccccagctgctgtgcccatcatcaacatgatcctgcccaccgtgcctgccctgcccggccctggccctggccctggccgggcccctcctgggggcctgacccagccccggggcacagaaaatcgggaggtgggcattggaggagaccagggcccccatgacaagggcgtgaagaggacagctgaggtgcctgtgtctgaggccagcggccaggcccccccagccaaggccgccaagcaggacatcgaggacacagccagtgatgccaagaggaagaggggccggcccaggaagaagagcggcggcagcggggagaggaacagcacccccctgaagtctgctgctgccatggagagcgcccagagcagccggctgccctgggagacctggggcagcggcggggagggcaacagcgctgggggcgctgagcggcccggccccatgggagaggccgagaagggagctgtgctggcccagggccagggagatggcaccgtgtccaaaggaggccggggccctggcagccagcacaccaaggaggccgaggacaagatccccctggtgcccagcaaggtgtctgtcatcaagggcagccgcagccagaaggaggccttccccctggccaagggggaggtggacacagccccccagggcaacaaggacctgaagtag

SEQ ID NO: 167520 - DNA, 357 bp, synthetic construct
  misc_feature 1..357: note = Description of Artificial Sequence: Synthetic coding sequence
  source 1..357: mol_type = other DNA
atggctgaagatgagccagatgccaagagccccaagacaggaggccgggcccctcctggaggagctgaggccggggagcccaccaccctgctgcagaggctgcggggcaccatcagcaaggctgtgcagaacaaggtggagggcatcctgcaggatgtgcagaagttcagtgacaatgacaagctgtacctgtacctgcagctgcccagcggccccaccaccggggacaagagcagcgagcccagcaccctgagcaatgaggagtacatgtatgcctaccgctggatccggaaccacctggaggagcacacagacacctgcctgcccaagcagagcgtgtatgatgcctacagatag

SEQ ID NO: 167521 - DNA, 693 bp, synthetic construct
  misc_feature 1..693: note = Description of Artificial Sequence: Synthetic coding sequence
  source 1..693: mol_type = other DNA
atggctgaagatgagccagatgccaagagccccaagacaggaggccgggcccctcctggaggagctgaggccggggagcccaccaccctgctgcagaggctgcggggcaccatcagcaaggctgtgcagaacaaggtggagggcatcctgcaggatgtgcagaagttcagtgacaatgacaagctgtacctgtacctgcagctgcccagcggccccaccaccggggacaagagcagcgagcccagcaccctgagcaatgaggagtacatgtatgcctaccgctggatccggaaccacctggaggagcacacagacacctgcctgcccaagcagagcgtgtatgatgcctacaggaagtactgtgagagcctggcctgctgccggcccctgagcacagccaactttgggaagatcatccgggagatcttcccagacatcaaggcccggcggctgggcggccggggccagagcaagtactgctacagcggcatccggaggaagaccctggtgtccatgccacccctgcccggcctggacctgaagggcagcgagagccctgagatgggccctgaggtgaccccagcccccagagatgagctggtggaggccgcctgtgccctgacctgtgactgggccgagcgcatcctgaagaggagcttcagcagcatcgtggaggtggcccgcttcctgtag

SEQ ID NO: 167522 - DNA, 372 bp, synthetic construct
  misc_feature 1..372: note = Description of Artificial Sequence: Synthetic coding sequence
  source 1..372: mol_type = other DNA
atggctgaagatgagccagatgccaagagccccaagacaggaggccgggcccctcctggaggagctgaggccggggagcccaccaccctgctgcagaggctgcggggcaccatcagcaaggctgtgcagaacaaggtggagggcatcctgcaggatgtgcagaagttcagtgacaatgacaagctgtacctgtacctgcagctgcccagcggccccaccaccggggacaagagcagcgagcccagcaccctgagcaatgaggagtacatgtatgcctaccgctggatccggaaccacctggaggagcacacagacacctgcctgcccaagcagagcgtgtatgatgcctacaggaagtactgtgagagctag

SEQ ID NO: 167523 - DNA, 291 bp, synthetic construct
  misc_feature 1..291: note = Description of Artificial Sequence: Synthetic coding sequence
  source 1..291: mol_type = other DNA
atggctgaagatgagccagatgccaagagccccaagacaggaggccgggcccctcctggaggagctgaggccggggagcccaccaccctgctgcagaggctgcggggcaccatcagcaaggctgtgcagaacaaggtggagggcatcctgcaggatgtgcagaagttcagtgacaatgacaagctgtacctgtacctgcagctgcccagcggccccaccaccggggacaagagcagcgagcccagcaccctgagcaatgaggagtacatgtatgcctaccgctggatctag

SEQ ID NO: 167524 - DNA, 321 bp, synthetic construct
  misc_feature 1..321: note = Description of Artificial Sequence: Synthetic coding sequence
  source 1..321: mol_type = other DNA
atggctgaagatgagccagatgccaagagccccaagacaggaggccgggcccctcctggaggagctgaggccggggagcccaccaccctgctgcagaggctgcggggcaccatcagcaaggctgtgcagaacaaggtggagggcatcctgcaggatgtgcagaagttcagtgacaatgacaagctgtacctgtacctgcagctgcccagcggccccaccaccggggacaagagcagcgagcccagcaccctgagcaatgaggagtacatgtatgcctaccgctggatccggaaccacctggaggagcacacagacacctag

SEQ ID NO: 167525 - DNA, 555 bp, synthetic construct
  misc_feature 1..555: note = Description of Artificial Sequence: Synthetic coding sequence
  source 1..555: mol_type = other DNA
atggctgaagatgagccagatgccaagagccccaagacaggaggccgggcccctcctggaggagctgaggccggggagcccaccaccctgctgcagaggctgcggggcaccatcagcaaggctgtgcagaacaaggtggagggcatcctgcaggatgtgcagaagttcagtgacaatgacaagctgtacctgtacctgcagctgcccagcggccccaccaccggggacaagagcagcgagcccagcaccctgagcaatgaggagtacatgtatgcctaccgctggatccggaaccacctggaggagcacacagacacctgcctgcccaagcagagcgtgtatgatgcctacaggaagtactgtgagagcctggcctgctgccggcccctgagcacagccaactttgggaagatcatccgggagatcttcccagacatcaaggcccggcggctgggcggccggggccagagcaagtactgctacagcggcatccggaggaagaccctggtgtccatgccacccctgcccggcctggacctgaagggcagcgagtag

SEQ ID NO: 167526 - DNA, 1731 bp, synthetic construct
  misc_feature 1..1731: note = Description of Artificial Sequence: Synthetic coding sequence
  source 1..1731: mol_type = other DNA
atggctgaagatgagccagatgccaagagccccaagacaggaggccgggcccctcctggaggagctgaggccggggagcccaccaccctgctgcagaggctgcggggcaccatcagcaaggctgtgcagaacaaggtggagggcatcctgcaggatgtgcagaagttcagtgacaatgacaagctgtacctgtacctgcagctgcccagcggccccaccaccggggacaagaggaagtactgtgagagcctggcctgctgccggcccctgagcacagccaactttgggaagatcatccgggagatcttcccagacatcaaggcccggcggctgggcggccggggccagagcaagtactgctacagcggcatccggaggaagaccctggtgtccatgccacccctgcccggcctggacctgaagggcagcgagagccctgagatgggccctgaggtgaccccagcccccagagatgagctggtggaggccgcctgtgccctgacctgtgactgggccgagcgcatcctgaagaggagcttcagcagcatcgtggaggtggcccgcttcctgctgcagcagcacctgatcagcgcccggagcgcccacgcccacgtgctgaaggccatgggcctggccgaggaggatgaacatgccccccgggagaggagcagcaagcccaagaatggcctggagaaccctgagggcggggcccacaagaagccagagcggctggcccagccccccaaggacctggaggccaggactggagctggccccctggcccggggggagaggaagaagtctgtggtggagagcagcgcccctggggccaacaacctgcaggtgaatgccctggtggcccggctgcccctgctgctgccccgggcccccaggagcctcatcccccccatccctgtgagcccccccatcctggccccccggctgagcagcggggccctgaaggtggccaccctgcccctgagcagcagagctggggcccccccagctgctgtgcccatcatcaacatgatcctgcccaccgtgcctgccctgcccggccctggccctggccctggccgggcccctcctgggggcctgacccagccccggggcacagaaaatcgggaggtgggcattggaggagaccagggcccccatgacaagggcgtgaagaggacagctgaggtgcctgtgtctgaggccagcggccaggcccccccagccaaggccgccaagcaggacatcgaggacacagccagtgatgccaagaggaagaggggccggcccaggaagaagagcggcggcagcggggagaggaacagcacccccctgaagtctgctgctgccatggagagcgcccagagcagccggctgccctgggagacctggggcagcggcggggagggcaacagcgctgggggcgctgagcggcccggccccatgggagaggccgagaagggagctgtgctggcccagggccagggagatggcaccgtgtccaaaggaggccggggccctggcagccagcacaccaaggaggccgaggacaagatccccctggtgcccagcaaggtgtctgtcatcaagggcagccgcagccagaaggaggccttccccctggccaagggggaggtggacacagccccccagggcaacaaggacctgaaggagcacgtgctgcagagcagcctgagccaggagcacaaggaccccaaggccaccccaccctag

SEQ ID NO: 167527 - DNA, 1851 bp, synthetic construct; identical to SEQ ID NO: 167517
  misc_feature 1..1851: note = Description of Artificial Sequence: Synthetic coding sequence
  source 1..1851: mol_type = other DNA

SEQ ID NO: 167528 - DNA, 498 bp, synthetic construct
  misc_feature 1..498: note = Description of Artificial Sequence: Synthetic coding sequence
  source 1..498: mol_type = other DNA
atggctgaagatgagccagatgccaagagccccaagacaggaggccgggcccctcctggaggagctgaggccggggagcccaccaccctgctgcagaggctgcggggcaccatcagcaaggctgtgcagaacaaggtggagggcatcctgcaggatgtgcagaagttcagtgacaatgacaagctgtacctgtacctgcagctgcccagcggccccaccaccggggacaagagcagcgagcccagcaccctgagcaatgaggagtacatgtatgcctaccgctggatccggaaccacctggaggagcacacagacacctgcctgcccaagcagagcgtgtatgatgcctacaggaagtactgtgagagcctggcctgctgccggcccctgagcacagccaactttgggaagatcatccgggagatcttcccagacatcaaggcccggcggctgggcggccggggccagagcaagtactgctacagcggcatcagatag

SEQ ID NO: 167529 - DNA, 2787 bp, synthetic construct
  misc_feature 1..2787: note = Description of Artificial Sequence: Synthetic coding sequence
  source 1..2787: mol_type = other DNA
atggccaaggtgcctgagctggaggacaccttcctgcaggcccagcctgccccccagctgagccctggcatccaggaggactgctgcgtgcagctgctgggcaagggcctgctggtgtacccagaggagaccgtgtacctggccgctgagggccagcctggaggagagcagggcggcggggagaagggggaggaccctgagctgcctggagctgtgaagtctgagatgcacctgaacaacggcaacttcagcagcgaggaggaggatgctgacaaccacgacagcaagaccaaggctgctgaccagtacctgagccagaagaagaccatcacccagatcgtgaaggacaagaagaagcagacccagctgaccctgcagtggctggaggagaactacatcgtgtgtgaaggagtgtgcctgccccgctgcatcctgtatgcccactacctggacttctgcaggaaggagaagctggagcccgcctgtgccgccaccttcggcaagaccatccggcagaagttccccctgctgaccacccggcggctgggcacccggggccacagcaagtaccactactatggaattggcatcaaggagagcagcgcctactaccacagcgtgtacagcggcaagggcctgacccgcttcagcggcagcaagctgaagaatgaaggaggcttcaccaggaagtacagcctgagcagcaagacaggcaccctgctgcctgagttccccagcgcccagcacctggtgtaccagggctgcatcagcaaggacaaggtggacaccctcatcatgatgtacaagacccactgccagtgcatcctggacaatgccatcaatggaaactttgaggagatccagcacttcctgctgcacttctggcagggcatgccagaccacctgctgcccctgctggagaaccctgtgatcatcgacatcttctgtgtgtgtgacagcatcctgtacaaggtgctgacagatgtgctgatcccagccaccatgcaggagatgcctgagagcctgctggccgacatccggaactttgccaagaactgggagcagtgggtggtgagcagcctggagaacctgcctgaggccctgacagacaagaagatccccatcgtgagaagatttgtgagcagcctgaagaggcagaccagcttcctgcacctggcccagatcgcccggcctgccctgtttgaccagcacgtggtgaacagcatggtgtctgacatcgagcgggtggacctgaacagcatcggcagccaggccctgctgaccatcagcggcagcacagacacagaaagtggcatctacacagaacatgacagcatcaccgtcttccaggagctgaaggacctgctgaagaagaatgccaccgtggaggccttcatcgagtggctggacacagtggtggagcagagggtcatcaagaccagcaagcagaatggccgcagcctgaagaagagggcccaggacttcctgctgaagtggagcttcttcggggcccgggtgatgcacaacctgaccctgaacaatgccagcagctttggcagcttccacctgatccgcatgctgctggatgagtacatcctgctggccatggagacccagttcaacaatgacaaggagcaggagctgcagaacctgctggacaagtacatgaagaacagtgatgccagcaaggccgccttcaccgccagccccagcagctgcttcctggccaacagaaacaagggctccatggtgtccagtgatgctgtgaagaatgaaagccacgtggagaccacctacctgcccctgcccagcagccagcccggcggcctgggccctgccctgcaccagtttcctgctggcaacacagacaacatgcccctgaccggccagatggagctgagccagattgctggccacctgatgaccccacccatcagccctgccatggccagccggggcagcgtcatcaaccagggccccatggccggccggcccccatctgtgggccctgtgctgagcgcccccagccactgcagcacctacccagagcccatctaccccaccctgccccaggccaaccacgacttctacagcaccagcagcaactaccagacagtgttccgggcccagccccacagcaccagcggcctgtacccccaccacacagagcacggccgctgcatggcctggacagagcagcagctgagccgggacttcttcagcggcagctgtgccggcagcccctacaacagcaggcctcccagcagctatggccccagcctgcaggcccaggacagccacaacatgcagttcctgaacacaggcagcttcaacttcctgagcaacacaggagctgccagctgccagggcgccaccctgccccccaacagccccaacggctactacggcagcaacatcaactacccagagagccaccggctgggctccatggtgaaccagcacgtgtctgtcatcagcagcatccgcagcctgcccccctacagcgacatccatgaccccctgaacatcctggatgattctggcaggaagcagaccagcagcttctacacagacaccagcagccctgtggcctgcaggacccctgtgctggccagcagcctgcagacccccatccccagcagcagcagccagtgcatgtatggcaccagcaaccagtacccagcccaggagaccctggacagccacggcaccagcagccgggagatggtgagcagcctgccccccatcaacacagtgttcatgggcacagctgctgggggcacctag

SEQ ID NO: 167530 - DNA, 4122 bp, synthetic construct
  misc_feature 1..4122: note = Description of Artificial Sequence: Synthetic coding sequence
  source 1..4122: mol_type = other DNA
atggccgaggagcagcagcagcccccaccccagcagccagatgcccaccagcagctgccccccagcgcccccaacagcggcgtggccctgcctgccctggtgcccggcctgcccggcacagaggccagcgccctgcagcacaagatcaagaacagcatctgcaagacagtgcagagcaaggtggactgcatcctgcaggaggtggagaagttcacagacctggagaagctgtacctgtacctgcagctgcccagcggcctgagcaatggagagaagagtgaccagaatgccatgagcagcagccgggcccagcagatgcacgccttctcctggatccggaacaccctggaggagcaccctgagaccagcctgcccaagcaggaggtgtatgatgagtacaagagctactgtgacaacctgggctaccaccccctgtctgctgctgactttgggaagatcatgaagaatgtgttccccaacatgaaggcccggcggctgggcacccggggcaagagcaagtactgctacagcggcctgaggaagaaggcctttgtgcacatgcccaccctgcccaacctggacttccacaagacaggagatggcctggagggcgctgagcccagcggccagctgcagaacattgatgaggaggtgatcagcagcgcctgccgcctggtgtgtgagtgggcccagaaggtgctgagccagccctttgacacagtgctggagctggcccgcttcctggtgaagagccactacatcggcaccaagtccatggccgccctgactgtgatggctgctgccccagctggcatgaagggcatcacccagcccagcgccttcatccccacagctgagagcaacagcttccagccccaggtgaagaccctgcccagccccattgatgccaagcagcagctgcagaggaagatccagaagaagcagcaggagcagaagctgcagagccccctgcctggagagagcgctgccaagaagtctgagagcgccaccagcaatggagtgaccaacctgcccaacggcaaccccagcatcctgagcccccagcccatcggcatcgtggtggccgctgtgcccagccccatccctgtgcagaggacccggcagctggtgaccagccccagccccatgagcagcagtgatggcaaggtgctgcccctgaatgtgcaggtggtgacccagcacatgcagagcgtgaagcaggcccccaagaccccccagaatgtgcctgccagccctggaggagacagaagtgcccggcaccgctacccccagatcctgcccaagccagccaacaccagcgccctgaccatccgcagccccaccaccgtgctcttcaccagcagccccatcaagacagctgtggtgcctgccagccacatgagcagcctgaatgtggtgaagatgaccaccatcagcctgacccccagcaacagcaacacccccctgaagcacagcgcctctgtgtcctctgccaccggcaccacagaggagagccgctctgtgccccagatcaagaatggatctgtggtgtccctgcagagccctggcagccgcagcagcagcgctgggggcaccagcgctgtggaggtgaaggtggagcctgagaccagcagtgatgagcaccctgtgcagtgccaggagaacagtgatgaggccaaggccccccagacccccagcgccctgctgggccagaagagcaacacagatggagccctgcagaagcccagcaatgaaggagtcatcgagatcaaggccaccaaggtgtgtgaccagaggaccaagtgcaagagccgctgcaatgagatgctgcccggcaccagcactggaaacaaccagagcaccatcaccctgtctgtggccagccagaacctgaccttcaccagcagcagcagccccccaaatggagacagcatcaacaaggaccccaagctgtgcaccaagagccccaggaagaggctgagcagcaccctgcaggagacccaggtgccccctgtgaagaagcccatcgtggagcagctgtctgctgccaccatcgagggccagaagcagggctctgtgaagaaggaccagaaggtgccccacagcggcaagacagagggcagcacagctggggcccagatccccagcaaggtgtctgtgaatgtgagcagccacatcggggccaaccagcccctgaacagcagcgccctggtgatcagtgacagcgccctggagcagcagaccacccccagcagcagcccagacatcaaggtgaagctggagggctctgtgttcctgctggacagcgacagcaagtctgtgggcagcttcaaccccaacggctggcagcagatcaccaaggacagcgagttcatcagcgccagctgtgagcagcagcaggacatctctgtgatgaccatccctgagcacagcgacatcaatgacctggagaagtctgtgtgggagctggagggcatgccccaggacacctacagccagcagctgcacagccagatccaggagagcagcctgaaccagatccaggcccacagcagtgaccagctgcccctgcagagcgagctgaaggagtttgagcccagcgtgtcccagaccaatgaaagctacttcccctttgatgatgagctgacccaggacagcatcgtggaggagctggtgctgatggagcagcagatgtccatgaacaacagccacagctatggcaactgcctgggcatgaccctgcagagccagagcgtgacccctggggcccccatgagcagccacaccagcagcacccacttctaccaccccatccacagcaatggcacccccatccacacccccacccccacccccacccccacccccacccccacccccacccccacccccaccagcgagatgattgctggcagccagagcctgagccgggagagcccctgcagccggctggcccagaccacccctgtggacagcgccctgggcagcagccgccacacccccatcggcaccccccacagcaactgcagcagctctgtgccccccagccctgtggagtgcaggaacccctttgccttcacccccatcagcagctccatggcctaccatgatgccagcatcgtgagcagcagccctgtgaagcccatgcagaggcccatggccacccacccagacaagaccaagctggagtggatgaacaacggctacagcggcgtgggcaacagctctgtgtctggccacggcatcctgcccagctaccaggagctggtggaggaccgcttcaggaagccccacgcctttgctgtgcccggccagagctaccagagccagagccgccaccacgacaccaactttggccgcctgacccctgtgtcccctgtgcagcaccagggcgccaccgtgaacaacaccaacaagcaggagggctttgctgtgcctgcccccctggacaacaagggcaccaacagcagcgccagcagcaacttccgctgccgctctgtgtccccagctgtgcaccggcagaggaacctgagcggcagcaccctgtaccctgtgagcaacatccccaggagcaatgtgacccccttcggcagccctgtgaccccagaggtgcacgtgttcaccaacgtgcacacagatgcctgtgccaacaacatcgcccagaggagccagagcgtgcccctgactgtgatgatgcagacagccttccccaatgccctgcagaagcaggccaacagcaagaagatcaccaacgtgctgctgagcaagctggacagcgacaatgatgatgctgtgcggggcctgggcatgaacaacctgcccagcaactacacagccaggatgaacctgacccagatcctggagcccagcacagtgttccccagcgccaacccccagaacatgattgacagcagcacctctgtgtatgagttccagacccccagctacctgaccaagagcaacagcacaggccagatcaacttcagccctggggacaaccaggcccagagcgagattggagagcagcagctggacttcaacagcacagtgaaggacctgctgagcggggacagcctgcagaccaaccagcagctgaagtacccagatgtgctgggggagtag

SEQ ID NO: 167531 - DNA, 3846 bp, synthetic construct
  misc_feature 1..3846: note = Description of Artificial Sequence: Synthetic coding sequence
  source 1..3846: mol_type = other DNA
atgagcagcagccgggcccagcagatgcacgccttctcctggatccggaacaccctggaggagcaccctgagaccagcctgcccaagcaggaggtgtatgatgagtacaagagctactgtgacaacctgggctaccaccccctgtctgctgctgactttgggaagatcatgaagaatgtgttccccaacatgaaggcccggcggctgggcacccggggcaagagcaagtactgctacagcggcctgaggaagaaggcctttgtgcacatgcccaccctgcccaacctggacttccacaagacaggagatggcctggagggcgctgagcccagcggccagctgcagaacattgatgaggaggtgatcagcagcgcctgccgcctggtgtgtgagtgggcccagaaggtgctgagccagccctttgacacagtgctggagctggcccgcttcctggtgaagagccactacatcggcaccaagtccatggccgccctgactgtgatggccgccgccccagctggcatgaagggcatcacccagcccagcgccttcatccccacagctgagagcaacagcttccagccccaggtgaagaccctgcccagccccattgatgccaagcagcagctgcagaggaagatccagaagaagcagcaggagcagaagctgcagagccccctgcccggggagagcgctgccaagaagtctgagagcgccaccagcaatggagtgaccaacctgcccaatggaaaccccagcatcctgagcccccagcccatcggcatcgtggtggccgctgtgcccagccccatccctgtgcagaggacccggcagctggtgaccagccccagccccatgagcagcagtgatggcaaggtgctgcccctgaatgtgcaggtggtgacccagcacatgcagagcgtgaagcaggcccccaagaccccccagaatgtgcctgccagccctggaggagacagaagtgcccggcaccgctacccccagatcctgcccaagccagccaacaccagcgccctgaccatccgcagccccaccaccgtgctcttcaccagcagccccatcaagacagctgtggtgcctgccagccacatgagcagcctgaatgtggtgaagatgaccaccatcagcctgacccccagcaacagcaacacccccctgaagcacagcgcctctgtgagcagcgccaccggcaccacagaggagagccgctctgtgccccagatcaagaatggatctgtggtgtccctgcagagccctggcagccgcagcagcagcgctgggggcaccagcgctgtggaggtgaaggtggagcctgagaccagcagtgatgagcaccctgtgcagtgccaggagaacagtgatgaggccaaggccccccagaccccatctgccctgctgggccagaagagcaacacagatggagccctgcagaagcccagcaatgaaggagtgattgagatcaaggccaccaaggtgtgtgaccagaggaccaagtgcaagagccgctgcaatgagatgctgcccggcaccagcacaggcaacaaccagagcaccatcaccctgtctgtggccagccagaacctgaccttcaccagcagcagcagcccccccaacggggacagcatcaacaaggaccccaagctgtgcaccaagagccccaggaagaggctgagcagcaccctgcaggagacccaggtgccccctgtgaagaagcccatcgtggagcagctgtctgctgccaccatcgagggccagaagcagggctctgtgaagaaggaccagaaggtgccccacagcggcaagacagagggcagcacagctggggcccagatccccagcaaggtgtctgtgaatgtgagcagccacatcggggccaaccagcccctgaacagcagcgccctggtgatcagtgacagcgccctggagcagcagaccacccccagcagcagcccagacatcaaggtgaagctggagggcagcgtcttcctgctggacagcgacagcaagtctgtgggcagcttcaaccccaacggctggcagcagatcaccaaggacagcgagttcatcagcgccagctgtgagcagcagcaggacatctctgtgatgaccatccctgagcacagcgacatcaatgacctggagaagtctgtgtgggagctggagggcatgccccaggacacctacagccagcagctgcacagccagatccaggagagcagcctgaaccagatccaggcccacagcagtgaccagctgcccctgcagagcgagctgaaggagtttgagcccagcgtgtcccagaccaatgaaagctacttcccctttgatgatgagctgacccaggacagcatcgtggaggagctggtgctgatggagcagcagatgtccatgaacaacagccacagctatggcaactgcctgggcatgaccctgcagagccagagcgtgacccctggggcccccatgagcagccacaccagcagcacccacttctaccaccccatccacagcaatggcacccccatccacacccccacccccacccccacccccacccccacccccacccccacccccacccccaccagcgagatgattgctggcagccagagcctgagccgggagagcccctgcagccggctggcccagaccacccctgtggacagcgccctgggcagcagccgccacacccccatcggcaccccccacagcaactgcagcagctctgtgccccccagccctgtggagtgcaggaacccctttgccttcacccccatcagcagctccatggcctaccatgatgccagcatcgtgagcagcagccctgtgaagcccatgcagaggcccatggccacccacccagacaagaccaagctggagtggatgaacaacggctacagcggcgtgggcaacagctctgtgtctggccacggcatcctgcccagctaccaggagctggtggaggaccgcttcaggaagccccacgcctttgctgtgcccggccagagctaccagagccagagccgccaccacgacaccaactttggccgcctgacccctgtgtcccctgtgcagcaccagggcgccaccgtgaacaacaccaacaagcaggagggctttgctgtgcctgcccccctggacaacaagggcaccaacagcagcgccagcagcaacttccgctgccgctctgtgtccccagctgtgcaccggcagaggaacctgagcggcagcaccctgtaccctgtgagcaacatccccaggagcaatgtgaccccatttggcagccctgtgaccccagaggtgcacgtgttcaccaacgtgcacacagatgcctgtgccaacaacatcgcccagaggagccagagcgtgcccctgactgtgatgatgcagacagccttccccaatgccctgcagaagcaggccaacagcaagaagatcaccaacgtgctgctgagcaagctggacagcgacaatgatgatgctgtgcggggcctgggcatgaacaacctgcccagcaactacacagccaggatgaacctgacccagatcctggagcccagcaccgtcttccccagcgccaacccccagaacatgattgacagcagcacctctgtgtatgagttccagacccccagctacctgaccaagagcaacagcacaggccagatcaacttcagccctggggacaaccaggcccagagcgagatcggggagcagcagctggacttcaacagcacagtgaaggacctgctgagcggggacagcctgcagaccaaccagcagctgtgcagctgccccagcagcctgctggccggcatgcagatgtag

SEQ ID NO: 167532 - DNA, 4383 bp, synthetic construct
  misc_feature 1..4383: note = Description of Artificial Sequence: Synthetic coding sequence
  source 1..4383: mol_type = other DNA
atggccgaggagcagcagcagcccccaccccagcagccagatgcccaccagcagctgccccccagcgcccccaacagcggcgtggccctgcctgccctggtgcccggcctgcccggcacagaggccagcgccctgcagcacaagatcaagaacagcatctgcaagacagtgcagagcaaggtggactgcatcctgcaggaggtggagaagttcacagacctggagaagctgtacctgtacctgcagctgcccagcggcctgagcaatggagagaagagtgaccagaatgccatgagcagcagccgggcccagcagatgcacgccttctcctggatccggaacaccctggaggagcaccctgagaccagcctgcccaagcaggaggtgtatgatgagtacaagagctactgtgacaacctgggctaccaccccctgtctgctgctgactttgggaagatcatgaagaatgtgttccccaacatgaaggcccggcggctgggcacccggggcaagagcaagtactgctacagcggcctgaggaagaaggcctttgtgcacatgcccaccctgcccaacctggacttccacaagacaggagatggcctggagggcgctgagcccagcggccagctgcagaacattgatgaggaggtgatcagcagcgcctgccgcctggtgtgtgagtgggcccagaaggtgctgagccagccctttgacacagtgctggagctggcccgcttcctggtgaagagccactacatcggcaccaagtccatggccgccctgactgtgatggctgctgccccagctggcatgaagggcatcacccagcccagcgccttcatccccacagctgagagcaacagcttccagccccaggtgaagaccctgcccagccccattgatgccaagcagcagctgcagaggaagatccagaagaagcagcaggagcagaagctgcagagccccctgcctggagagagcgctgccaagaagtctgagagcgccaccagcaatggagtgaccaacctgcccaacggcaaccccagcatcctgagcccccagcccatcggcatcgtggtggccgctgtgcccagccccatccctgtgcagaggacccggcagctggtgaccagccccagccccatgagcagcagtgatggcaaggtgctgcccctgaatgtgcaggtggtgacccagcacatgcagagcgtgaagcaggcccccaagaccccccagaatgtgcctgccagccctggaggagacagaagtgcccggcaccgctacccccagatcctgcccaagccagccaacaccagcgccctgaccatccgcagccccaccaccgtgctcttcaccagcagccccatcaagacagctgtggtgcctgccagccacatgagcagcctgaatgtggtgaagatgaccaccatcagcctgacccccagcaacagcaacacccccctgaagcacagcgcctctgtgtcctctgccaccggcaccacagaggagagccgctctgtgccccagatcaagaatggatctgtggtgtccctgcagagccctggcagccgcagcagcagcgctgggggcaccagcgctgtggaggtgaaggtggagcctgagaccagcagtgatgagcaccctgtgcagtgccaggagaacagtgatgaggccaaggccccccagacccccagcgccctgctgggccagaagagcaacacagatggagccctgcagaagcccagcaatgaaggagtcatcgagatcaaggccaccaaggtgtgtgaccagaggaccaagtgcaagagccgctgcaatgagatgctgcccggcaccagcactggaaacaaccagagcaccatcaccctgtctgtggccagccagaacctgaccttcaccagcagcagcagccccccaaatggagacagcatcaacaaggaccccaagctgtgcaccaagagccccaggaagaggctgagcagcaccctgcaggagacccaggtgccccctgtgaagaagcccatcgtggagcagctgtctgctgccaccatcgagggccagaagcagggctctgtgaagaaggaccagaaggtgccccacagcggcaagacagagggcagcacagctggggcccagatccccagcaaggtgtctgtgaatgtgagcagccacatcggggccaaccagcccctgaacagcagcgccctggtgatcagtgacagcgccctggagcagcagaccacccccagcagcagcccagacatcaaggtgaagctggagggctctgtgttcctgctggacagcgacagcaagtctgtgggcagcttcaaccccaacggctggcagcagatcaccaaggacagcgagttcatcagcgccagctgtgagcagcagcaggacatctctgtgatgaccatccctgagcacagcgacatcaatgacctggagaagtctgtgtgggagctggagggcatgccccaggacacctacagccagcagctgcacagccagatccaggagagcagcctgaaccagatccaggcccacagcagtgaccagctgcccctgcagagcgagctgaaggagtttgagcccagcgtgtcccagaccaatgaaagctacttcccctttgatgatgagctgacccaggacagcatcgtggaggagctggtgctgatggagcagcagatgtccatgaacaacagccacagctatggcaactgcctgggcatgaccctgcagagccagagcgtgacccctggggcccccatgagcagccacaccagcagcacccacttctaccaccccatccacagcaatggcacccccatccacacccccacccccacccccacccccacccccacccccacccccacccccacccccaccagcgagatgattgctggcagccagagcctgagccgggagagcccctgcagccggctggcccagaccacccctgtggacagcgccctgggcagcagccgccacacccccatcggcaccccccacagcaactgcagcagctctgtgccccccagccctgtggagtgcaggaacccctttgccttcacccccatcagcagctccatggcctaccatgatgccagcatcgtgagcagcagccctgtgaagcccatgcagaggcccatggccacccacccagacaagaccaagctggagtggatgaacaacggctacagcggcgtgggcaacagctctgtgtctggccacggcatcctgcccagctaccaggagctggtggaggaccgcttcaggaagccccacgcctttgctgtgcccggccagagctaccagagccagagccgccaccacgacaccaactttggccgcctgacccctgtgtcccctgtgcagcaccagggcgccaccgtgaacaacaccaacaagcaggagggctttgctgtgcctgcccccctggacaacaagggcaccaacagcagcgccagcagcaacttccgctgccgctctgtgtccccagctgtgcaccggcagaggaacctgagcggcagcaccctgtaccctgtgagcaacatccccaggagcaatgtgacccccttcggcagccctgtgaccccagaggtgcacgtgttcaccaacgtgcacacagatgcctgtgccaacaacatcgcccagaggagccagagcgtgcccctgactgtgatgatgcagacagccttccccaatgccctgcagaagcaggccaacagcaagaagatcaccaacgtgctgctgagcaagctggacagcgacaatgatgatgctgtgcggggcctgggcatgaacaacctgcccagcaactacacagccaggatgaacctgacccagatcctggagcccagcacagtgttccccagcgccaacccccagaacatgattgacagcagcacctctgtgtatgagttccagacccccagctacctgaccaagagcaacagcacaggccagatcaacttcagccctggggacaaccaggcccagagcgagattggagagcagcagctggacttcaacagcacagtgaaggacctgctgagcggggacagcctgcagaccaaccagcagctggtgggccagggcgccagtgacctgaccaacacagccagtgacttcagcagtgacatccggctgagcagcgagctgagcggcagcatcaatgacctgaacaccctggaccccaacctgctgtttgaccccggccggcagcagggccaggatgatgaggccaccctggaggagctgaagaatgaccccctcttccagcagatctgcagcgagagcatgaacagcatgaccagcagcggctttgagtggattgagagcaaggaccaccccaccgtggagatgctgggctag

SEQ ID NO: 167533 - DNA, 4092 bp, synthetic construct
  misc_feature 1..4092: note = Description of Artificial Sequence: Synthetic coding sequence
  source 1..4092: mol_type = other DNA
atgagcagcagccgggcccagcagatgcacgccttctcctggatccggaacaccctggaggagcaccctgagaccagcctgcccaagcaggaggtgtatgatgagtacaagagctactgtgacaacctgggctaccaccccctgtctgctgctgactttgggaagatcatgaagaatgtgttccccaacatgaaggcccggcggctgggcacccggggcaagagcaagtactgctacagcggcctgaggaagaaggcctttgtgcacatgcccaccctgcccaacctggacttccacaagacaggagatggcctggagggcgctgagcccagcggccagctgcagaacattgatgaggaggtgatcagcagcgcctgccgcctggtgtgtgagtgggcccagaaggtgctgagccagccctttgacacagtgctggagctggcccgcttcctggtgaagagccactacatcggcaccaagtccatggccgccctgactgtgatggccgccgccccagctggcatgaagggcatcacccagcccagcgccttcatccccacagctgagagcaacagcttccagccccaggtgaagaccctgcccagccccattgatgccaagcagcagctgcagaggaagatccagaagaagcagcaggagcagaagctgcagagccccctgcccggggagagcgctgccaagaagtctgagagcgccaccagcaatggagtgaccaacctgcccaatggaaaccccagcatcctgagcccccagcccatcggcatcgtggtggccgctgtgcccagccccatccctgtgcagaggacccggcagctggtgaccagccccagccccatgagcagcagtgatggcaaggtgctgcccctgaatgtgcaggtggtgacccagcacatgcagagcgtgaagcaggcccccaagaccccccagaatgtgcctgccagccctggaggagacagaagtgcccggcaccgctacccccagatcctgcccaagccagccaacaccagcgccctgaccatccgcagccccaccaccgtgctcttcaccagcagccccatcaagacagctgtggtgcctgccagccacatgagcagcctgaatgtggtgaagatgaccaccatcagcctgacccccagcaacagcaacacccccctgaagcacagcgcctctgtgagcagcgccaccggcaccacagaggagagccgctctgtgccccagatcaagaatggatctgtggtgtccctgcagagccctggcagccgcagcagcagcgctgggggcaccagcgctgtggaggtgaaggtggagcctgagaccagcagtgatgagcaccctgtgcagtgccaggagaacagtgatgaggccaaggccccccagaccccatctgccctgctgggccagaagagcaacacagatggagccctgcagaagcccagcaatgaaggagtgattgagatcaaggccaccaaggtgtgtgaccagaggaccaagtgcaagagccgctgcaatgagatgctgcccggcaccagcacaggcaacaaccagagcaccatcaccctgtctgtggccagccagaacctgaccttcaccagcagcagcagcccccccaacggggacagcatcaacaaggaccccaagctgtgcaccaagagccccaggaagaggctgagcagcaccctgcaggagacccaggtgccccctgtgaagaagcccatcgtggagcagctgtctgctgccaccatcgagggccagaagcagggctctgtgaagaaggaccagaaggtgccccacagcggcaagacagagggcagcacagctggggcccagatccccagcaaggtgtctgtgaatgtgagcagccacatcggggccaaccagcccctgaacagcagcgccctggtgatcagtgacagcgccctggagcagcagaccacccccagcagcagcccagacatcaaggtgaagctggagggcagcgtcttcctgctggacagcgacagcaagtctgtgggcagcttcaaccccaacggctggcagcagatcaccaaggacagcgagttcatcagcgccagctgtgagcagcagcaggacatctctgtgatgaccatccctgagcacagcgacatcaatgacctggagaagtctgtgtgggagctggagggcatgccccaggacacctacagccagcagctgcacagccagatccaggagagcagcctgaaccagatccaggcccacagcagtgaccagctgcccctgcagagcgagctgaaggagtttgagcccagcgtgtcccagaccaatgaaagctacttcccctttgatgatgagctgacccaggacagcatcgtggaggagctggtgctgatggagcagcagatgtccatgaacaacagccacagctatggcaactgcctgggcatgaccctgcagagccagagcgtgacccctggggcccccatgagcagccacaccagcagcacccacttctaccaccccatccacagcaatggcacccccatccacacccccacccccacccccacccccacccccacccccacccccacccccacccccaccagcgagatgattgctggcagccagagcctgagccgggagagcccctgcagccggctggcccagaccacccctgtggacagcgccctgggcagcagccgccacacccccatcggcaccccccacagcaactgcagcagctctgtgccccccagccctgtggagtgcaggaacccctttgccttcacccccatcagcagctccatggcctaccatgatgccagcatcgtgagcagcagccctgtgaagcccatgcagaggcccatggccacccacccagacaagaccaagctggagtggatgaacaacggctacagcggcgtgggcaacagctctgtgtctggccacggcatcctgcccagctaccaggagctggtggaggaccgcttcaggaagccccacgcctttgctgtgcccggccagagctaccagagccagagccgccaccacgacaccaactttggccgcctgacccctgtgtcccctgtgcagcaccagggcgccaccgtgaacaacaccaacaagcaggagggctttgctgtgcctgcccccctggacaacaagggcaccaacagcagcgccagcagcaacttccgctgccgctctgtgtccccagctgtgcaccggcagaggaacctgagcggcagcaccctgtaccctgtgagcaacatccccaggagcaatgtgaccccatttggcagccctgtgaccccagaggtgcacgtgttcaccaacgtgcacacagatgcctgtgccaacaacatcgcccagaggagccagagcgtgcccctgactgtgatgatgcagacagccttccccaatgccctgcagaagcaggccaacagcaagaagatcaccaacgtgctgctgagcaagctggacagcgacaatgatgatgctgtgcggggcctgggcatgaacaacctgcccagcaactacacagccaggatgaacctgacccagatcctggagcccagcaccgtcttccccagcgccaacccccagaacatgattgacagcagcacctctgtgtatgagttccagacccccagctacctgaccaagagcaacagcacaggccagatcaacttcagccctggggacaaccaggcccagagcgagatcggggagcagcagctggacttcaacagcacagtgaaggacctgctgagcggggacagcctgcagaccaaccagcagctggtgggccagggcgccagtgacctgaccaacacagccagtgacttcagcagtgacatccggctgagcagcgagctgagcggcagcatcaatgacctgaacaccctggaccccaacctgctgtttgatcctggccggcagcagggccaggatgatgaggccaccctggaggagctgaagaatgaccccctcttccagcagatctgcagcgagagcatgaacagcatgaccagcagcggctttgagtggattgagagcaaggaccaccccaccgtggagatgctgggctag

SEQ ID NO: 167534 - DNA, 783 bp, synthetic construct
  misc_feature 1..783: note = Description of Artificial Sequence: Synthetic coding sequence
  source 1..783: mol_type = other DNA
atggagctgacccagcctgctgaggacctgatccagacccagcagaccccagccagcgagctgggggaccctgaagatcctggagaggaggccgcagatggcagtgacacagtggtgctgagcctcttcccctgcaccccagagcctgtgaaccctgagccagatgcctctgtgagcagcccccaggccggcagcagcctgaagcacagcaccaccctgaccaaccggcagagaggaaatgaggtgtctgccctgcctgccaccctggacagcctgagcatccaccagctggccgcccagggcgagctggaccagctgaaggagcacctgaggaagggggacaacctggtgaacaagccagatgagcggggcttcacccccctcatctgggccagcgccttcggggagattgaaacagtgcgcttcctgctggagtggggcgctgacccccacatcctggccaaggagcgggagagcgccctgagcctggccagcactggaggctacacagacatcgtgggcctgctgctggagagagatgtggacatcaacatctatgactggaatggaggcacccccctgctgtatgctgtgcggggcaaccacgtgaagtgtgtggaggccctgctggcccggggagctgacctgaccacagaggccgacagcggctacacccccatggacctggccgtggccctgggctacaggaaggtgcagcaggtgattgagaaccacatcctgaagctgttccagagcaacctggtgcctgctgaccctgagtag

SEQ ID NO: 167535 - DNA, 714 bp, synthetic construct
  misc_feature 1..714: note = Description of Artificial Sequence: Synthetic coding sequence
  source 1..714: mol_type = other DNA
atggagctgacccagcctgctgaggacctgatccagacccagcagaccccagccagcgagctgggggaccctgaagatcctggagaggaggccgcagatggcagtgacacagtggtgctgagcctcttcccctgcaccccagagcctgtgaaccctgagccagatgcctctgtgagcagcccccagggcagcagcctgaagcacagcaccaccctgaccaaccggcagagaggaaatgaggtgtctgccctgcctgccaccctggactgtgacaacctggtgaacaagccagatgagcggggcttcacccccctcatctgggccagcgcctttggagaaattgagaccgtgcgcttcctgctggagtggggcgctgacccccacatcctggccaaggagcgggagagcgccctgagcctggccagcactggaggctacacagacatcgtgggcctgctgctggagagagatgtggacatcaacatctatgactggaatggaggcacccccctgctgtatgctgtgcggggcaaccacgtgaagtgtgtggaggccctgctggcccggggagctgacctgaccacagaagctgacagcggctacacccccatggacctggccgtggccctgggctacaggaaggtgcagcaggtgattgagaaccacatcctgaagctgttccagagcaacctggtgcctgctgaccctgagtag

SEQ ID NO: 167536 - DNA, 192 bp, synthetic construct
  misc_feature 1..192: note = Description of Artificial Sequence: Synthetic coding sequence
  source 1..192: mol_type = other DNA
atggagctgacccagcctgctgaggacctgatccagacccagcagaccccagccagcgagctgggggaccctgaagatcctggagaggaggccgcagatggcagtgacacagtggtgctgagcctcttcccctgcaccccagagcctgtgaaccctgagccagatgcctctgtgagcagcccccaggcctag

SEQ ID NO: 167537 - DNA, 717 bp, synthetic construct
  misc_feature 1..717: note = Description of Artificial Sequence: Synthetic coding sequence
  source 1..717: mol_type = other DNA
atggagctgacccagcctgctgaggacctgatccagacccagcagaccccagccagcgagctgggggaccctgaagatcctggagaggaggccgcagatggcagtgacacagtggtgctgagcctcttcccctgcaccccagagcctgtgaaccctgagccagatgcctctgtgagcagcccccaggccggcagcagcctgaagcacagcaccaccctgaccaaccggcagagaggaaatgaggtgtctgccctgcctgccaccctggactgtgacaacctggtgaacaagccagatgagcggggcttcacccccctcatctgggccagcgccttcggggagattgaaacagtgcgcttcctgctggagtggggcgctgacccccacatcctggccaaggagcgggagagcgccctgagcctggccagcactggaggctacacagacatcgtgggcctgctgctggagagagatgtggacatcaacatctatgactggaatggaggcacccccctgctgtatgctgtgcggggcaaccacgtgaagtgtgtggaggccctgctggcccggggagctgacctgaccacagaggccgacagcggctacacccccatggacctggccgtggccctgggctacaggaaggtgcagcaggtgattgagaaccacatcctgaagctgttccagagcaacctggtgcctgctgaccctgagtag

SEQ ID NO: 167538 - DNA, 819 bp, synthetic construct
  misc_feature 1..819: note = Description of Artificial Sequence: Synthetic coding sequence
  source 1..819: mol_type = other DNA
atggaggcccagggcgtggccgagggcgccggccctggggccgccagcggcgtgccccaccctgctgccctggccccagctgctgcccccaccctggccccagcctctgtggccgccgccgccagccagttcaccctgctggtgatgcagccctgtgccggccaggatgaggccgccgcccctgggggctctgtgggcgccggcaagcctgtgcgctacctgtgtgagggcgctggagatggagaggaggaggccggagaagatgaggccgacctgctggacaccagtgaccccccaggcggcggggagagcgctgccagcctggaggacctggaggatgaggagacccacagcggcggggagggcagcagcggcggggccaggagaagaggcagcggcggcggctccatgagcaagacctgcacctatgagggctgcagcgagaccaccagccaggtggccaagcagaggaagccctggatgtgcaagaagcacaggaacaagatgtacaaggacaagtacaagaagaagaagagtgaccaggccctgaactgtggcggcacagccagcactggatctgctggaaatgtgaagctggaggagagcgctgacaacatcctgagcatcgtgaagcagaggacaggcagctttggagacaggcctgcccggcccaccctgctggagcaggtgctgaaccagaagaggctgagcctgctgcggagccctgaggtggtgcagttcctgcagaagcagcagcagctgctgaaccagcaggtgctggagcagaggcagcagcagtttcctggcacctccatgtag

SEQ ID NO: 167539 - DNA, 1854 bp, synthetic construct
  misc_feature 1..1854: note = Description of Artificial Sequence: Synthetic coding sequence
  source 1..1854: mol_type = other DNA
atgagcagcctgcccaccagtgatggcttcaaccacccagcccggagcagcggccagagcccagatgtgggcaaccccatgagcctggcccggtctgtgtctgcctctgtgtgccccatcaagcccagcgacagcgaccgcatcgagcccaaggctgtgaaggccctgaaggccagcgctgagttccagctgaacagcgagaagaaggagcacctgagcctgcaggacctgagtgaccacgccagcagcgctgaccacgcccccacagaccagagccctgccatgcccatgcagaacagcagcgaggagatcaccgtggccggcaacctggagaagtctgctgagaggagcacccagggcctgaagttccacctgcacacccggcaggaggccagcctgtctgtgaccagcaccaggatgcatgagccccagatgttcctgggggagaaggactggcaccctgagaaccagaacctgagccaggtgtctgacccccagcagcacgaggagcctggaaatgagcagtatgaggtggcccagcagaaggccagccatgaccaggagtacctgtgcaacattggagacctggagctgcctgaggagcggcagcagaaccagcacaagatcgtggacctggaggccaccatgaagggaaatggcctgccccagaatgtggaccccccatctgccaagaagagcatccccagcagcgagtgcagcggctgcagcaacagcgagaccttcatggagattgacacagcccagcagagcctggtgaccctgctgaacagcacaggccggcagaatgccaacgtgaagaacattggagccctggacctgaccctggacaaccccctgatggaggtggagaccagcaagtgcaaccccagcagcgagatcctgaatgacagcatcagcacccaggacctgcagcccccagagaccaacgtggagatccctggcaccaacaaggagtatggccactacagcagccccagcctgtgtggcagctgccagcccagcgtggagagcgctgaggagagctgccccagcatcacagctgccctgaaggagctgcacgagctgctggtggtgagcagcaagccagccagcgagaacaccagcgaggaggtgatctgccagagcgagaccatcgccgagggccagaccagcatcaaggacctgtctgagcgctggacccagaatgagcacctgacccagaatgagcagtgcccccaggtgtccttccaccaggccatctctgtgtctgtggagacagagaagctgaccggcaccagcagtgacaccggccgggaggccgtggagaatgtgaacttccgcagcctgggagatggcctgagcacagacaaggagggcgtgcccaagagccgggagagcatcaacaagaacagatctgtgacagtgaccagcgccaagaccagcaaccagctgcactgcaccctgggcgtggagatcagccccaagctgctggccggggaggaggatgccctgaaccagaccagcgagcagaccaagagcctgagcagcaacttcatcctggtgaaggacctgggccagggcatccagaacagcgtgacagacaggcctgagacccgggagaatgtgtgcccagatgccagccggcccctgctggagtatgagccccccaccagccaccccagcagcagccctgccatcctgcccccactcatcttccctgccacagacatcgaccgcatcctgcgggccggcttcaccctgcaggaggccctgggcgccctgcaccgggtgggcggcaatgctgacctggccctgctggtgctgctggccaagaacatcgtggtgcccacctag

SEQ ID NO: 167540 - DNA, 657 bp, synthetic construct
  misc_feature 1..657: note = Description of Artificial Sequence: Synthetic coding sequence
  source 1..657: mol_type = other DNA
atgagcagtggagctgccagcggcaccggccggggccggccccggggcggcggccctggccctggggaccccccaccttctgagacccacaagctggtggtggtgggcggcggcggcgtgggcaagagcgccctgaccatccagttcatccagagctactttgtgtctgactatgaccccaccattgaagattcctacaccaagatctgcagcgtggatggcatcccagcccggctggacatcctggacacagctggccaggaggagtttggagccatgagggagcagtacatgagagctggccacggcttcctgctggtgtttgccatcaatgaccggcagagcttcaatgaggtgggcaagctgttcacccagatcctgcgggtgaaggacagagatgacttccctgtggtgctggtgggcaacaaggctgacctggagagccagaggcaggtgcccaggtctgaggccagcgccttcggggccagccaccacgtggcctactttgaggccagcgccaagctgcggctgaatgtggatgaggcctttgagcagctggtgcgggctgtgaggaagtaccaggagcaggagctgccccccagcccccccagcgcccccaggaagaagggcggcggctgcccctgtgtgctgctgtag

SEQ ID NO: 167541 - DNA, 615 bp, synthetic construct
  misc_feature 1..615: note = Description of Artificial Sequence: Synthetic coding sequence
  source 1..615: mol_type = other DNA
atggctgctgctggctggagagatggcagcggccaggagaagtaccgcctggtggtggtgggcggcggcggcgtgggcaagagcgccctgaccatccagttcatccagagctactttgtgacagattatgaccccaccatcgaggacagctacaccaagcagtgtgtgattgatgacagagctgcccggctggacatcctggacacagctggccaggaggagtttggagccatgagggagcagtacatgaggactggagagggcttcctgctggtgttttctgtgacagaccggggcagctttgaggagatctacaagttccagaggcagatcctgcgggtgaaggacagagatgagttccccatgatcctgattggcaacaaggctgacctggaccaccagaggcaggtgacccaggaggagggccagcagctggcccggcagctgaaggtgacctacatggaggccagcgccaagatccgcatgaatgtggaccaggccttccacgagctggtgcgggtcatcaggaagttccaggagcaggagtgcccccccagccctgagcccaccaggaaggagaaggacaagaagggctgccactgtgtgatcttctag

SEQ ID NO: 167542 - DNA, 384 bp, synthetic construct
  misc_feature 1..384: note = Description of Artificial Sequence: Synthetic coding sequence
  source 1..384: mol_type = other DNA
atgagggagcagtacatgaggactggagagggcttcctgctggtgttttctgtgacagaccggggcagctttgaggagatctacaagttccagaggcagatcctgcgggtgaaggacagagatgagttccccatgatcctgattggcaacaaggctgacctggaccaccagaggcaggtgacccaggaggagggccagcagctggcccggcagctgaaggtgacctacatggaggccagcgccaagatccgcatgaatgtggaccaggccttccacgagctggtgcgggtcatcaggaagttccaggagcaggagtgcccccccagccctgagcccaccaggaaggagaaggacaagaagggctgccactgcgtcatcttctag

SEQ ID NO: 167543 - DNA, 384 bp, synthetic construct; identical to SEQ ID NO: 167542
  misc_feature 1..384: note = Description of Artificial Sequence: Synthetic coding sequence
  source 1..384: mol_type = other DNA

SEQ ID NO: 167544 - DNA, 384 bp, synthetic construct; identical to SEQ ID NO: 167542
  misc_feature 1..384: note = Description of Artificial Sequence: Synthetic coding sequence
  source 1..384: mol_type = other DNA

SEQ ID NO: 167545 - DNA, 210 bp, synthetic construct
  misc_feature 1..210: note = Description of Artificial Sequence: Synthetic coding sequence
  source 1..210: mol_type = other DNA
atgagggagcagtacatgaggactggagagggcttcctgctggtgttttctgtgacagaccggggcagctttgaggagatctacaagttccagaggcagatcctgcgggtgaaggacagagatgagttccccatgatcctgattggcaacaaggctgacctggaccaccagaggcaggtgacccaggaggagggccagcagctggcctag

SEQ ID NO: 167546 - DNA, 384 bp, synthetic construct; identical to SEQ ID NO: 167542
  misc_feature 1..384: note = Description of Artificial Sequence: Synthetic coding sequence
  source 1..384: mol_type = other DNA

SEQ ID NO: 167547 - DNA, 384 bp, synthetic construct; identical to SEQ ID NO: 167542
  misc_feature 1..384: note = Description of Artificial Sequence: Synthetic coding sequence
  source 1..384: mol_type = other DNA

SEQ ID NO: 167548 - DNA, 510 bp, synthetic construct
  misc_feature 1..510: note = Description of Artificial Sequence: Synthetic coding sequence
  source 1..510: mol_type = other DNA
atgagctactttgtgacagattatgaccccaccattgaagattcctacaccaagcagtgtgtgattgatgaccgggccgcccggctggacatcctggacacagctggccaggaggagtttggagccatgagggagcagtacatgaggactggagagggcttcctgctggtgttttctgtgacagaccggggcagctttgaggagatctacaagttccagaggcagatcctgcgggtgaaggacagagatgagttccccatgatcctgattggcaacaaggctgacctggaccaccagaggcaggtgacccaggaggagggccagcagctggcccggcagctgaaggtgacctacatggaggccagcgccaagatccgcatgaatgtggaccaggccttccacgagctggtgcgggtcatcaggaagttccaggagcaggagtgcccccccagccctgagcccaccaggaaggagaaggacaagaagggctgccactgcgtcatcttctag

SEQ ID NO: 167549 - DNA, 633 bp, synthetic construct
  misc_feature 1..633: note = Description of Artificial Sequence: Synthetic coding sequence
  source 1..633: mol_type = other DNA
atggctgctgctggctggagagatggcagcggccaggagaagtaccgcctggtggtggtgggcggcggcggcgtgggcaagagcgccctgaccatccagttcatccagttcttcctgttcctgcagagctactttgtgacagattatgaccccaccatcgaggacagctacaccaagcagtgtgtgattgatgacagagctgcccggctggacatcctggacacagctggccaggaggagtttggagccatgagggagcagtacatgaggactggagagggcttcctgctggtgttttctgtgacagaccggggcagctttgaggagatctacaagttccagaggcagatcctgcgggtgaaggacagagatgagttccccatgatcctgattggcaacaaggctgacctggaccaccagaggcaggtgacccaggaggagggccagcagctggcccggcagctgaaggtgacctacatggaggccagcgccaagatccgcatgaatgtggaccaggccttccacgagctggtgcgggtcatcaggaagttccaggagcaggagtgcccccccagccctgagcccaccaggaaggagaaggacaagaagggctgccactgtgtgatcttctag

SEQ ID NO: 167550 - DNA, 633 bp, synthetic construct
  misc_feature 1..633: note = Description of Artificial Sequence: Synthetic coding sequence
  source 1..633: mol_type = other DNA
atgggctgctgcagcagcagtgacccccggcgggaggatgacctgcgggcccgggagaagctgaagaagaccaagatcatctttgtggtgggcggccctggcagcggcaagggcacccagtgtgagaagatcgtgcagaagtatggctacacccacctgagcactggagacctgctgcggtctgaggtgagcagcggcagcgcccggggcaagaagctgtctgagatcatggagaagggccagctggtgcccctggagaccgtgctggacatgctgagagatgccatggtggccaaggtgaacaccagcaagggcttcctgattgatggctacccccgggaggtgcagcagggcgaggagtttgaaagaagaattggccagcccaccctgctgctgtatgtggatgctggccctgagaccatgacccagaggctgctgaagagaggagagaccagcggccgggtggatgacaatgaggagaccatcaagaagaggctggagacctactacaaggccacagagcctgtgattgccttctatgagaagaggggcatcgtgaggaaggtgaatgctgagggctctgtggacagcgtcttcagccaggtgtgcacccacctggatgccctgaagtag

SEQ ID NO: 167551 - DNA, 354 bp, synthetic construct
  misc_feature 1..354: note = Description of Artificial Sequence: Synthetic coding sequence
  source 1..354: mol_type = other DNA
atgcccaggctcttcctgttccacctgctggagttctgcctgctgctgaaccagttcagcagagctgtggccgccaagtggaaggatgatgtgatcaagctgtgtggccgggagctggtgcgggcccagatcgccatctgtggcatgagcacctggagcaagaggagcctgagccaggaggatgccccccagacccccaggcctgtggccggggacttcatccagacagtgtccctgggcatcagcccagatggcggcaaggccctgaggacaggcagctgcttcacccgggagttcctgggcgccctgagcaagctgtaccaccccagcagcaccaagatccagaagctgtag

SEQ ID NO: 167552 - DNA, 429 bp, synthetic construct
  misc_feature 1..429: note = Description of Artificial Sequence: Synthetic coding sequence
  source 1..429: mol_type = other DNA
atggcccgctacatgctgctgctgctgctggccgtgtgggtgctgaccggggagctgtggccaggagctgaggcccgggccgccccctacggcgtgcggctgtgtggccgggagttcatccgggccgtcatcttcacctgtggcggcagccgctggaggagaagtgacatcctggcccacgaggccatgggagacaccttcccagatgctgatgctgatgaggacagcctggccggggagctggatgaggccatgggcagcagcgagtggctggccctgaccaagagcccccaggccttctaccggggccggcccagctggcagggcaccccaggagtgctgcggggcagcagagatgtgctggccggcctgagcagcagctgctgcaagtggggctgcagcaagtctgagatcagcagcctgtgctag

SEQ ID NO: 167553 - DNA, 1293 bp, synthetic construct
  misc_feature 1..1293: note = Description of Artificial Sequence: Synthetic coding sequence
  source 1..1293: mol_type = other DNA
atgaagcccagcctgctgtgccggcccctgagctgcttcctgatgctgctgccctggcccctggccaccctgaccagcaccaccctgtggcagtgccccccaggagaggagccagacctggaccccggccagggcaccctgtgccggccctgccccccaggcaccttctctgctgcctggggcagcagcccctgccagccccacgcccgctgcagcctgtggaggcggctggaggcccaggtgggcatggccacccgggacaccctgtgtggggactgctggccaggctggtttggcccctggggcgtgccccgggtgccctgccagccctgctcctgggcccccctgggcacccacggctgtgatgagtggggccggcgggccaggagaggagtggaggtggccgccggggccagcagcggcggggagacccggcagcctggaaatggcaccagggctgggggccctgaggagacagctgcccagtatgctgtgattgccatcgtgcctgtgttctgcctgatgggcctgctgggcatcctggtgtgcaacctgctgaagaggaagggctaccactgcacagcccacaaggaggtgggccctggccctgggggcggcggcagcggcatcaacccagcctacagaacagaagatgccaatgaagacaccatcggcgtgctggtgcggctcatcacagagaagaaggaaaatgctgctgccctggaggagctgctgaaggagtaccacagcaagcagctggtgcagaccagccacaggcctgtgtccaagctgcccccagccccacccaacgtgccccacatctgcccccaccgccaccacctgcacacagtgcagggcctggccagcctgagcggcccctgctgcagccgctgcagccagaagaagtggccagaggtgctgctgagccctgaggccgtggccgccaccacccctgtgcccagcctgctgcccaaccccaccagggtgcccaaggccggggccaaggccggccggcagggcgagatcaccatcctgtctgtgggccgcttccgggtggcccgcatccctgagcagaggaccagctccatggtgtctgaggtgaagaccatcacagaagctggccccagctggggagacctgcctgacagcccccagcccggcctgcccccagagcagcaggccctgctgggcagcggcggcagcaggaccaagtggctgaagcccccagctgagaacaaggccgaggagaacagatatgtggtgcggctgtctgagagcaacctggtgatctag

SEQ ID NO: 167554 - DNA, 1293 bp, synthetic construct; identical to SEQ ID NO: 167553
  misc_feature 1..1293: note = Description of Artificial Sequence: Synthetic coding sequence
  source 1..1293: mol_type = other DNA

SEQ ID NO: 167555 - DNA, 897 bp, synthetic construct
  misc_feature 1..897: note = Description of Artificial Sequence: Synthetic coding sequence
  source 1..897: mol_type = other DNA
atgcaccctggctgctgggtgcaggaggccctggtgctgaaccatgaaggagacatgggcttcagcgagcccggcagccacatctgccgggccctgggcggcctgagccccaagtgcacctgcagcggccccctgcggcggcccggcctgcccagcgctggccgctcctggttcagcagcggcgtgcggctgccccccagccctggcagcggccccttcagcagccctggcatcaacccagcctacagaacagaagatgccaatgaagacaccatcggcgtgctggtgcggctcatcacagagaagaaggaaaatgctgctgccctggaggagctgctgaaggagtaccacagcaagcagctggtgcagaccagccacaggcctgtgtccaagctgcccccagccccacccaacgtgccccacatctgcccccaccgccaccacctgcacacagtgcagggcctggccagcctgagcggcccctgctgcagccgctgcagccagaagaagtggccagaggtgctgctgagccctgaggccgtggccgccaccacccctgtgcccagcctgctgcccaaccccaccagggtgcccaaggccggggccaaggccggccggcagggcgagatcaccatcctgtctgtgggccgcttccgggtggcccgcatccctgagcagaggaccagctccatggtgtctgaggtgaagaccatcacagaagctggccccagctggggagacctgcctgacagcccccagcccggcctgcccccagagcagcaggccctgctgggcagcggcggcagcaggaccaagtggctgaagcccccagctgagaacaaggccgaggagaacagatatgtggtgcggctgtctgagagcaacctggtgatctag

SEQ ID NO: 167556 - DNA, 306 bp, synthetic construct
  misc_feature 1..306: note = Description of Artificial Sequence: Synthetic coding sequence
  source 1..306: mol_type = other DNA
atgaagcccagcctgctgtgccggcccctgagctgcttcctgatgctgctgccctggcccctggccaccctgaccagcaccaccctgtggcagtgccccccaggagaggagccagacctggaccccggccagggcaccctgtgccggccctgccccccaggcaccttctctgctgcctggggcagcagcccctgccagccccacgcccgctgcagcctgtggaggcggctggaggcccaggtgggcatggccacccgggacaccctgtgtggggactgctggccaggctggtttggcccctggtag

SEQ ID NO: 167557 - DNA, 4326 bp, synthetic construct
  misc_feature 1..4326: note = Description of Artificial Sequence: Synthetic coding sequence
  source 1..4326: mol_type = other DNA
atggccacagctgctgctgctgctgctgtgatggcccctcctggctgccccggcagctgccccaactttgctgtggtgtgcagcttcctggagagatatggccccctgctggacctgcctgagctgcccttccctgagctggagcgggtgctgcaggcccctcctccagatgtgggcaatggagaggtgcccaaggagctggtggagctgcacctgaagctgatgaggaagattggcaagtctgtgacagctgaccgctgggagaagtacctgatcaagatctgccaggagttcaacagcacctgggcctgggagatggagaagaagggctacctggagatgtctgtggagtgcaagctggccctgctgaagtacctgtgtgagtgccagtttgatgacaacctgaagttcaagaacatcatcaatgaggaggatgctgacaccatgaggctgcagcccatcggccgggacaaggatggcctgatgtactggtaccagctggaccaggaccacaacgtgaggatgtacatcgaggagcaggatgaccaggacggcagctcctggaagtgcatcgtgaggaacagaaatgagctggccgagaccctggccctgctgaaggcccagattgatcctgtgctgctgaagaacagcagccagcaggacaacagcagccgggagagccccagcctggaggatgaggagaccaagaaggaggaggagacccccaagcaggaggagcagaaggagagcgagaagatgaagtctgaggagcagcccatggacctggagaacagaagcacagccaacgtgctggaggagaccaccgtgaagaaggagaaggaggatgagaaggagctggtgaagctgcccgtcatcgtgaagctggagaagcccctgcctgaaaatgaggagaagaagatcatcaaggaggagagtgacagcttcaaggaaaatgtgaagcccatcaaggtggaggtgaaggagtgcagagctgaccccaaggacaccaagagctccatggagaagcctgtggcccaggagcctgagagaattgaatttggaggcaacatcaagagcagccatgagatcacagagaagagcacagaggagacagagaagctgaagaatgaccagcaggccaagatccccctgaagaagcgggagatcaagctgagtgatgactttgacagccctgtgaagggccccctgtgcaagtctgtgacccccaccaaggagttcctgaaggatgagatcaagcaggaggaggagacctgcaagaggatcagcaccatcacagccctgggccacgagggcaagcagctggtgaatggagaggtgtctgatgagcgggtggcccccaacttcaagacagagcccatcgagaccaagttctatgagaccaaggaggagagctacagccccagcaaggacaggaacatcatcacagagggcaatggaacagagagcctgaacagcgtcatcacctccatgaagacaggagagctggagaaggagacagcccccctgaggaaggatgctgacagcagcatctctgtgctggagatccacagccagaaggcccagatcgaggagccagaccccccagagatggagaccagcctggacagcagcgagatggccaaggacctgagcagcaagacagccctgagcagcacagagagctgcaccatgaagggggaggagaagagccccaagaccaagaaggacaagaggcctcccatcctggagtgcctggagaagctggagaagagcaagaagaccttcctggacaaggatgcccagaggctgagccccatccctgaggaggtgcccaagagcaccctggagagcgagaagccaggcagccctgaggccgctgagaccagcccccccagcaacatcatcgaccactgtgagaagctggccagcgagaaggaggtggtggagtgccagagcaccagcacagtgggcggccagagcgtgaagaaggtggacctggagaccctgaaggaggacagcgagttcaccaaggtggagatggacaacctggacaatgcccagaccagcggcatcgaggagcccagcgagaccaagggctccatgcagaagagcaagttcaagtacaagctggtgcctgaggaggagaccacagccagcgagaacacagagatcaccagcgagcggcagaaggagggcatcaagctgaccatccgcatcagcagcaggaagaagaagccagacagcccccccaaggtgctggagcctgagaacaagcaggagaagacagagaaggaggaggagaagaccaacgtgggccgcaccctgcggcgcagcccccgcatcagccggcccacagccaaggtggccgagatccgggaccagaaggctgacaagaagagaggagagggggaggatgaggtggaggaggagagcacagccctgcagaagacagacaagaaggagatcctgaagaagtctgagaaggacaccaacagcaaggtgtccaaggtgaagcccaagggcaaggtgcgctggacaggcagcaggacccggggccgctggaagtacagcagcaatgatgagagcgagggcagcggcagcgagaagagcagcgctgccagcgaggaggaggaggagaaggagagcgaggaggccatcctggctgatgatgatgagccctgcaagaagtgtggcctgcccaaccaccctgagctgatcctgctgtgtgacagctgtgacagcggctaccacacagcctgcctgcggccccccctgatgatcatcccagatggagagtggttctgccccccctgccagcacaagctgctgtgtgagaagctggaggagcagctgcaggacctggatgtggccctgaagaagaaggagcgggcagagaggaggaaggagcggctggtgtatgtgggcatcagcattgagaacatcatccccccccaggagccagacttcagcgaggaccaggaggagaagaagaaggacagcaagaagagcaaggccaacctgctggagcggcgcagcaccaggaccaggaagtgcatctcctacagatttgatgaatttgatgaggccattgatgaggccattgaagatgacatcaaggaggctgatggcggcggcgtgggccggggcaaggacatcagcaccatcaccggccaccggggcaaggacatcagcaccatcctggatgaggagaggaaagaaaacaagaggccccagagagctgctgctgcccggaggaagaagagaagaaggctgaatgacctggacagcgacagcaacctggatgaggaggagagtgaagatgagttcaagatcagtgatggcagccaggatgaatttgtggtgtctgatgagaacccagatgaaagtgaagaagatcctcccagcaatgatgacagcgacacagacttctgcagccggcggctgcggcggcaccccagccggcccatgaggcagagccggcggctgcggaggaagacccccaagaagaagtacagtgatgatgatgaggaggaggagagcgaggagaacagccgggacagcgagagtgacttcagtgatgacttcagtgatgactttgtggagaccaggagaagaagaagcagaagaaaccagaagaggcagatcaactacaaggaggacagcgagagtgatggcagccagaagagcctgcggcggggcaaggagatcagaagagtgcacaagaggcggctgagcagcagcgagagcgaggagagctacctgagcaagaacagtgaagatgatgagctggccaaggagagcaagaggtctgtgaggaagaggggccgcagcacagatgagtacagcgaggctgatgaggaggaggaggaggaggagggcaagcccagcaggaagaggctgcacagaattgaaacagatgaggaggagagctgtgacaatgcccatggagatgccaaccagcctgcccgggacagccagccccgggtgctgcccagcgagcaggagagcaccaagaagccctacagaattgaaagtgatgaggaggaggactttgaaaatgtgggcaaggtgggcagccccctggactacagcctggtggacctgcccagcaccaacggccagagccctgggaaggccattgaaaatctcatcggcaagcccacagagaagagccagacccccaaggacaacagcacagccagcgccagcctggccagcaatggcaccagcggcggccaggaggccggggcccctgaggaggaggaggatgagctgctgcgggtgacagacctggtggactatgtgtgcaacagcgagcagctgtag

SEQ ID NO: 167558 - DNA, 4233 bp, synthetic construct
  misc_feature 1..4233: note = Description of Artificial Sequence: Synthetic coding sequence
  source 1..4233: mol_type = other DNA
atggccacagctgctgctgctgctgctgtgatggcccctcctggctgccccggcagctgccccaactttgctgtggtgtgcagcttcctggagagatatggccccctgctggacctgcctgagctgcccttccctgagctggagcgggtgctgcaggcccctcctccagatgtgggcaatggagaggtgcccaaggagctggtggagctgcacctgaagctgatgaggaagattggcaagtctgtgacagctgaccgctgggagaagtacctgatcaagtacctgtgtgagtgccagtttgatgacaacctgaagttcaagaacatcatcaatgaagaagatgctgacaccatgaggctgcagcccatcggccgggacaaggatggcctgatgtactggtaccagctggaccaggaccacaacgtgaggatgtacatcgaggagcaggatgaccaggacggcagctcctggaagtgcatcgtgaggaacagaaatgagctggccgagaccctggccctgctgaaggcccagattgatcctgtgctgctgaagaacagcagccagcaggacaacagcagccgggagagccccagcctggaggatgaggagaccaagaaggaggaggagacccccaagcaggaggagcagaaggagagcgagaagatgaagtctgaggagcagcccatggacctggagaacagaagcacagccaacgtgctggaggagaccaccgtgaagaaggagaaggaggatgagaaggagctggtgaagctgcctgtgattgtgaagctggagaagcccctgcctgaaaatgaggagaagaagatcatcaaggaggagagtgacagcttcaaggaaaatgtgaagcccatcaaggtggaggtgaaggaatgtagagctgaccccaaggacaccaagagctccatggagaagcctgtggcccaggagcctgagcgcatcgagtttggaggcaacatcaagagcagccatgagatcacagagaagagcacagaggagacagagaagctgaagaatgaccagcaggccaagatccccctgaagaagcgggagatcaagctgagtgatgactttgacagccctgtgaagggccccctgtgcaagtctgtgacccccaccaaggagttcctgaaggatgagatcaagcaggaggaggagacctgcaagaggatcagcaccatcacagccctgggccacgagggcaagcagctggtgaatggagaggtgtctgatgagcgggtggcccccaacttcaagacagagcccatcgagaccaagttctatgagaccaaggaggagagctacagccccagcaaggacaggaacatcatcacagagggcaatggaacagagagcctgaacagcgtcatcacctccatgaagacaggagagctggagaaggagacagcccccctgaggaaggatgctgacagcagcatctctgtgctggagatccacagccagaaggcccagatcgaggagccagaccccccagagatggagaccagcctggacagcagcgagatggccaaggacctgagcagcaagacagccctgagcagcacagagagctgcaccatgaagggggaggagaagagccccaagaccaagaaggacaagaggcctcccatcctggagtgcctggagaagctggagaagagcaagaagaccttcctggacaaggatgcccagaggctgagccccatccctgaggaggtgcccaagagcaccctggagagcgagaagccaggcagccctgaggccgctgagaccagcccccccagcaacatcatcgaccactgtgagaagctggccagcgagaaggaggtggtggagtgccagagcaccagcacagtgggcggccagagcgtgaagaaggtggacctggagaccctgaaggaggacagcgagttcaccaaggtggagatggacaacctggacaatgcccagaccagcggcatcgaggagcccagcgagaccaagggctccatgcagaagagcaagttcaagtacaagctggtgcctgaggaggagaccacagcctctgaaaatacagagatcaccagcgagcggcagaaggagggcatcaagctgaccatccgcatcagcagcaggaagaagaagccagacagcccccccaaggtgctggagcctgagaacaagcaggagaagacagagaaggaggaggagaagaccaacgtgggccgcaccctgcggcgcagcccccgcatcagccggcccacagccaaggtggccgagatccgggaccagaaggctgacaagaagagaggagaaggagaagatgaggtggaggaggagagcacagccctgcagaagacagacaagaaggagatcctgaagaagtctgagaaggacaccaacagcaaggtgtccaaggtgaagcccaagggcaaggtgcgctggacaggcagcaggacccggggccgctggaagtacagcagcaatgatgaaagtgagggcagcggcagcgagaagagcagcgctgccagcgaggaggaggaggagaaggagagcgaggaggccatcctggctgatgatgatgagccctgcaagaagtgtggcctgcccaaccaccctgagctgatcctgctgtgtgacagctgtgacagcggctaccacacagcctgcctgcggccccccctgatgatcatcccagatggagagtggttctgccccccctgccagcacaagctgctgtgtgagaagctggaggagcagctgcaggacctggatgtggccctgaagaagaaggagagagctgagaggaggaaggagcggctggtgtatgtgggcatcagcattgagaacatcatccccccccaggagccagacttcagcgaggaccaggaggagaagaagaaggacagcaagaagagcaaggccaacctgctggagaggaggagcaccaggaccaggaagtgcatctcctacagatttgatgaatttgatgaggccattgatgaggccattgaagatgacatcaaggaggctgatggcggcggcgtgggccggggcaaggacatcagcaccatcaccggccaccggggcaaggacatcagcaccatcctggatgaggagaggaaggagaacaagaggccccagagagctgctgctgcccggaggaagaagagaagaaggctgaatgacctggacagcgacagcaacctggatgaggaggagagtgaagatgagttcaagatcagtgatggcagccaggatgaatttgtggtgtctgatgaaaatccagatgagagcgaggaggacccccccagcaatgatgacagcgacacagacttctgcagccggcggctgcggcggcaccccagccggcccatgaggcagagccggcggctgcggaggaagacccccaagaagaagtacagtgatgatgatgaggaggaggagagcgaggagaacagccgggacagcgagagtgacttcagtgatgacttcagtgatgactttgtggagaccaggagaagaagaagcagaagaaaccagaagaggcagatcaactacaaggaggacagcgagagtgatggcagccagaagagcctgcggcggggcaaggagatccggcgggtgcacaagaggcggctgagcagcagcgagagcgaggagagctacctgagcaagaacagtgaagatgatgagctggccaaggagagcaagaggtctgtgaggaagaggggccgcagcacagatgagtacagcgaggctgatgaggaggaggaggaggaggagggcaagcccagcaggaagaggctgcaccgcatcgagacagatgaggaggagagctgtgacaatgcccatggagatgccaaccagcctgcccgggacagccagccccgggtgctgcccagcgagcaggagagcaccaagaagccctaccgcatcgagagtgatgaggaggaggactttgaaaatgtgggcaaggtgggcagccccctggactacagcctggtggacctgcccagcaccaacggccagagccctgggaaggccatcgagaacctgattggcaagcccacagagaagagccagacccccaaggacaacagcacagccagcgccagcctggccagcaatggcaccagcggcggccaggaggccggggcccctgaggaggaggaggatgagctgctgcgggtgacagacctggtggactatgtgtgcaacagcgagcagctgtag

SEQ ID NO: 167559 - DNA, 3570 bp, synthetic construct
  misc_feature 1..3570: note = Description of Artificial Sequence: Synthetic coding sequence
  source 1..3570: mol_type = other DNA
atgaagtctgaggagcagcccatggacctggagaacagaagcacagccaacgtgctggaggagaccaccgtgaagaaggagaaggaggatgagaaggagctggtgaagctgcccgtcatcgtgaagctggagaagcccctgcctgaaaatgaggagaagaagatcatcaaggaggagagtgacagcttcaaggaaaatgtgaagcccatcaaggtggaggtgaaggagtgcagagctgaccccaaggacaccaagagctccatggagaagcctgtggcccaggagcctgagagaattgaatttggaggcaacatcaagagcagccatgagatcacagagaagagcacagaggagacagagaagctgaagaatgaccagcaggccaagatccccctgaagaagcgggagatcaagctgagtgatgactttgacagccctgtgaagggccccctgtgcaagtctgtgacccccaccaaggagttcctgaaggatgagatcaagcaggaggaggagacctgcaagaggatcagcaccatcacagccctgggccacgagggcaagcagctggtgaatggagaggtgtctgatgagcgggtggcccccaacttcaagacagagcccatcgagaccaagttctatgagaccaaggaggagagctacagccccagcaaggacaggaacatcatcacagagggcaatggaacagagagcctgaacagcgtcatcacctccatgaagacaggagagctggagaaggagacagcccccctgaggaaggatgctgacagcagcatctctgtgctggagatccacagccagaaggcccagatcgaggagccagaccccccagagatggagaccagcctggacagcagcgagatggccaaggacctgagcagcaagacagccctgagcagcacagagagctgcaccatgaagggggaggagaagagccccaagaccaagaaggacaagaggcctcccatcctggagtgcctggagaagctggagaagagcaagaagaccttcctggacaaggatgcccagaggctgagccccatccctgaggaggtgcccaagagcaccctggagagcgagaagccaggcagccctgaggccgctgagaccagcccccccagcaacatcatcgaccactgtgagaagctggccagcgagaaggaggtggtggagtgccagagcaccagcacagtgggcggccagagcgtgaagaaggtggacctggagaccctgaaggaggacagcgagttcaccaaggtggagatggacaacctggacaatgcccagaccagcggcatcgaggagcccagcgagaccaagggctccatgcagaagagcaagttcaagtacaagctggtgcctgaggaggagaccacagccagcgagaacacagagatcaccagcgagcggcagaaggagggcatcaagctgaccatccgcatcagcagcaggaagaagaagccagacagcccccccaaggtgctggagcctgagaacaagcaggagaagacagagaaggaggaggagaagaccaacgtgggccgcaccctgcggcgcagcccccgcatcagccggcccacagccaaggtggccgagatccgggaccagaaggctgacaagaagagaggagagggggaggatgaggtggaggaggagagcacagccctgcagaagacagacaagaaggagatcctgaagaagtctgagaaggacaccaacagcaaggtgtccaaggtgaagcccaagggcaaggtgcgctggacaggcagcaggacccggggccgctggaagtacagcagcaatgatgagagcgagggcagcggcagcgagaagagcagcgctgccagcgaggaggaggaggagaaggagagcgaggaggccatcctggctgatgatgatgagccctgcaagaagtgtggcctgcccaaccaccctgagctgatcctgctgtgtgacagctgtgacagcggctaccacacagcctgcctgcggccccccctgatgatcatcccagatggagagtggttctgccccccctgccagcacaagctgctgtgtgagaagctggaggagcagctgcaggacctggatgtggccctgaagaagaaggagcgggcagagaggaggaaggagcggctggtgtatgtgggcatcagcattgagaacatcatccccccccaggagccagacttcagcgaggaccaggaggagaagaagaaggacagcaagaagagcaaggccaacctgctggagcggcgcagcaccaggaccaggaagtgcatctcctacagatttgatgaatttgatgaggccattgatgaggccattgaagatgacatcaaggaggctgatggcggcggcgtgggccggggcaaggacatcagcaccatcaccggccaccggggcaaggacatcagcaccatcctggatgaggagaggaaagaaaacaagaggccccagagagctgctgctgcccggaggaagaagagaagaaggctgaatgacctggacagcgacagcaacctggatgaggaggagagtgaagatgagttcaagatcagtgatggcagccaggatgaatttgtggtgtctgatgagaacccagatgaaagtgaagaagatcctcccagcaatgatgacagcgacacagacttctgcagccggcggctgcggcggcaccccagccggcccatgaggcagagccggcggctgcggaggaagacccccaagaagaagtacagtgatgatgatgaggaggaggagagcgaggagaacagccgggacagcgagagtgacttcagtgatgacttcagtgatgactttgtggagaccaggagaagaagaagcagaagaaaccagaagaggcagatcaactacaaggaggacagcgagagtgatggcagccagaagagcctgcggcggggcaaggagatcagaagagtgcacaagaggcggctgagcagcagcgagagcgaggagagctacctgagcaagaacagtgaagatgatgagctggccaaggagagcaagaggtctgtgaggaagaggggccgcagcacagatgagtacagcgaggctgatgaggaggaggaggaggaggagggcaagcccagcaggaagaggctgcacagaattgaaacagatgaggaggagagctgtgacaatgcccatggagatgccaaccagcctgcccgggacagccagccccgggtgctgcccagcgagcaggagagcaccaagaagccctacagaattgaaagtgatgaggaggaggactttgaaaatgtgggcaaggtgggcagccccctggactacagcctggtggacctgcccagcaccaacggccagagccctgggaaggccattgaaaatctcatcggcaagcccacagagaagagccagacccccaaggacaacagcacagccagcgccagcctggccagcaatggcaccagcggcggccaggaggccggggcccctgaggaggaggaggatgagctgctgcgggtgacagacctggtggactatgtgtgcaacagcgagcagctgtag

SEQ ID NO: 167560 - DNA, 2412 bp, synthetic construct
  misc_feature 1..2412: note = Description of Artificial Sequence: Synthetic coding sequence
  source 1..2412: mol_type = other DNA
gagaccctggccctgctgaaggcccagattgatcctgtgctgctgaagaacagcagccagcaggacaacagcagccgggagagccccagcctggaggatgaggagaccaagaaggaggaggagacccccaagcaggaggagcagaaggagagcgagaagatgaagtctgaggagcagcccatggacctggagaacagaagcacagccaacgtgctggaggagaccaccgtgaagaaggagaaggaggatgagaaggagctggtgaagctgcctgtgattgtgaagctggagaagcccctgcctgaaaatgaggagaagaagatcatcaaggaggagagtgacagcttcaaggaaaatgtgaagcccatcaaggtggaggtgaaggaatgtagagctgaccccaaggacaccaagagctccatggagaagcctgtggcccaggagcctgagcgcatcgagtttggaggcaacatcaagagcagccatgagatcacagagaagagcacagaggagacagagaagctgaagaatgaccagcaggccaagatccccctgaagaagcgggagatcaagctgagtgatgactttgacagccctgtgaagggccccctgtgcaagtctgtgacccccaccaaggagttcctgaaggatgagatcaagcaggaggaggagacctgcaagaggatcagcaccatcacagccctgggccacgagggcaagcagctggtgaatggagaggtgtctgatgagcgggtggcccccaacttcaagacagagcccatcgagaccaagttctatgagaccaaggaggagagctacagccccagcaaggacaggaacatcatcacagagggcaatggaacagagagcctgaacagcgtcatcacctccatgaagacaggagagctggagaaggagacagcccccctgaggaaggatgctgacagcagcatctctgtgctggagatccacagccagaaggcccagatcgaggagccagaccccccagagatggagaccagcctggacagcagcgagatggccaaggacctgagcagcaagacagccctgagcagcacagagagctgcaccatgaagggggaggagaagagccccaagaccaagaaggacaagaggcctcccatcctggagtgcctggagaagctggagaagagcaagaagaccttcctggacaaggatgcccagaggctgagccccatccctgaggaggtgcccaagagcaccctggagagcgagaagccaggcagccctgaggccgctgagaccagcccccccagcaacatcatcgaccactgtgagaagctggccagcgagaaggaggtggtggagtgccagagcaccagcacagtgggcggccagagcgtgaagaaggtggacctggagaccctgaaggaggacagcgagttcaccaaggtggagatggacaacctggacaatgcccagaccagcggcatcgaggagcccagcgagaccaagggctccatgcagaagagcaagttcaagtacaagctggtgcctgaggaggagaccacagcctctgaaaatacagagatcaccagcgagcggcagaaggagggcatcaagctgaccatccgcatcagcagcaggaagaagaagccagacagcccccccaaggtgctggagcctgagaacaagcaggagaagacagagaaggaggaggagaagaccaacgtgggccgcaccctgcggcgcagcccccgcatcagccggcccacagccaaggtggccgagatccgggaccagaaggctgacaagaagagaggagaaggagaagatgaggtggaggaggagagcacagccctgcagaagacagacaagaaggagatcctgaagaagtctgagaaggacaccaacagcaaggtgtccaaggtgaagcccaagggcaaggtgcgctggacaggcagcaggacccggggccgctggaagtacagcagcaatgatgaaagtgagggcagcggcagcgagaagagcagcgctgccagcgaggaggaggaggagaaggagagcgaggaggccatcctggctgatgatgatgagccctgcaagaagtgtggcctgcccaaccaccctgagctgatcctgctgtgtgacagctgtgacagcggctaccacacagcctgcctgcggccccccctgatgatcatcccagatggagagtggttctgccccccctgccagcacaagctgctgtgtgagaagctggaggagcagctgcaggacctggatgtggccctgaagaagaaggagagagctgagaggaggaaggagcggctggtgtatgtgggcatcagcattgagaacatcatccccccccaggagccagacttcagcgaggaccaggaggagaagaagaaggacagcaagaagtag

SEQ ID NO: 167561 - DNA, 2109 bp, synthetic construct
  misc_feature 1..2109: note = Description of Artificial Sequence: Synthetic coding sequence
  source 1..2109: mol_type = other DNA
gccacagctgctgctgctgctgctgtgatggcccctcctggctgccccggcagctgccccaactttgctgtggtgtgcagcttcctggagagatatggccccctgctggacctgcctgagctgcccttccctgagctggagcgggtgctgcaggcccctcctccagatgtgggcaatggagaggtgcccaaggagctggtggagctgcacctgaagctgatgaggaagattggcaagtctgtgacagctgaccgctgggagaagtacctgatcaagatctgccaggagttcaacagcacctgggcctgggagatggagaagaagggctacctggagatgtctgtggagtgcaagctggccctgctgaagtacctgtgtgagtgccagtttgatgacaacctgaagttcaagaacatcatcaatgaagaagatgctgacaccatgaggctgcagcccatcggccgggacaaggatggcctgatgtactggtaccagctggaccaggaccacaacgtgaggatgtacatcgaggagcaggatgaccaggacggcagctcctggaagtgcatcgtgaggaacagaaatgagctggccgagaccctggccctgctgaaggcccagattgatcctgtgctgctgaagaacagcagccagcaggacaacagcagccgggagagccccagcctggaggatgaggagaccaagaaggaggaggagacccccaagcaggaggagcagaaggagagcgagaagatgaagtctgaggagcagcccatggacctggagaacagaagcacagccaacgtgctggaggagaccaccgtgaagaaggagaaggaggatgagaaggagctggtgaagctgcctgtgattgtgaagctggagaagcccctgcctgaaaatgaggagaagaagatcatcaaggaggagagtgacagcttcaaggaaaatgtgaagcccatcaaggtggaggtgaaggaatgtagagctgaccccaaggacaccaagagctccatggagaagcctgtggcccaggagcctgagcgcatcgagtttggaggcaacatcaagagcagccatgagatcacagagaagagcacagaggagacagagaagctgaagaatgaccagcaggccaagatccccctgaagaagcgggagatcaagctgagtgatgactttgacagccctgtgaagggccccctgtgcaagtctgtgacccccaccaaggagttcctgaaggatgagatcaagcaggaggaggagacctgcaagaggatcagcaccatcacagccctgggccacgagggcaagcagctggtgaatggagaggtgtctgatgagcgggtggcccccaacttcaagacagagcccatcgagaccaagttctatgagaccaaggaggagagctacagccccagcaaggacaggaacatcatcacagagggcaatggaacagagagcctgaacagcgtcatcacctccatgaagacaggagagctggagaaggagacagcccccctgaggaaggatgctgacagcagcatctctgtgctggagatccacagccagaaggcccagatcgaggagccagaccccccagagatggagaccagcctggacagcagcgagatggccaaggacctgagcagcaagacagccctgagcagcacagagagctgcaccatgaagggggaggagaagagccccaagaccaagaaggacaagaggcctcccatcctggagtgcctggagaagctggagaagagcaagaagaccttcctggacaaggatgcccagaggctgagccccatccctgaggaggtgcccaagagcaccctggagagcgagaagccaggcagccctgaggccgctgagaccagcccccccagcaacatcatcgaccactgtgagaagctggccagcgagaaggaggtggtggagtgccagagcaccagcacagtgggcggccagagcgtgaagaaggtggacctggagaccctgaaggaggacagcgagttcaccaaggtggagatggacaacctggacaatgcccagaccagcggcatcgaggagcccagcgagaccaagggctccatgcagaagtag

SEQ ID NO: 167562 - DNA, 831 bp, synthetic construct
  misc_feature 1..831: note = Description of Artificial Sequence: Synthetic coding sequence
  source 1..831: mol_type = other DNA
gagccctgcaagaagtgtggcctgcccaaccaccctgagctgatcctgctgtgtgacagctgtgacagcggctaccacacagcctgcctgcggccccccctgatgatcatcccagatggagagtggttctgccccccctgccagcacaagctgctgtgtgagaagctggaggagcagctgcaggacctggatgtggccctgaagaagaaggagagagctgagaggaggaaggagcggctggtgtatgtgggcatcagcattgagaacatcatccccccccaggagccagacttcagcgaggaccaggaggagaagaagaaggacagcaagaagagcaaggccaacctgctggagaggaggagcaccaggaccaggaagtgcatctcctacagatttgatgaatttgatgaggccattgatgaggccattgaagatgacatcaaggaggctgatggcggcggcgtgggccggggcaaggacatcagcaccatcaccggccaccggggcaaggacatcagcaccatcctggatgaggagaggaaggagaacaagaggccccagagagctgctgctgcccggaggaagaagagaagaaggctgaatgacctggacagcgacagcaacctggatgaggaggagagtgaagatgagttcaagatcagtgatggcagccaggatgaatttgtggtgtctgatgaaaatccagatgagagcgaggaggacccccccagcaatgatgacagcgacacagacttctgcagccggcggctgcggcggcaccccagccggcccatgaggcagagccggcggctgcggaggaagaccccctag

SEQ ID NO: 167563 - DNA, 1029 bp, synthetic construct
  misc_feature 1..1029: note = Description of Artificial Sequence: Synthetic coding sequence
  source 1..1029: mol_type = other DNA
atggcccaggtgctgattgtgggcgccggcatgacaggcagcctgtgtgccgccctgctgcggcggcagaccagcggccccctgtacctggccgtgtgggacaaggcagaagattctgggggccgcatgaccacagcctgcagcccccacaacccccagtgcacagctgacctgggcgcccagtacatcacctgcaccccccactacgccaagaagcaccagcgcttctatgatgagctgctggcctatggagtgctgcggcccctgagcagccccatcgagggcatggtgatgaaggagggggactgcaactttgtggccccccagggcatcagcagcatcatcaagcactacctgaaggagagcggggctgaggtgtacttccgccaccgggtgacccagatcaacctgagagatgacaagtgggaggtgtccaagcagacaggcagccctgagcagtttgacctgattgtgctgaccatgcctgtgcctgagatcctgcagctgcagggcgacatcaccaccctcatcagcgagtgccagaggcagcagctggaggccgtgtcctacagcagccgctatgccctgggcctcttctatgaggccggcaccaagattgatgtgccctgggccggccagtacatcaccagcaacccctgcatccgctttgtgtccattgacaacaagaagagaaatattgagagcagcgagatcggccccagcctggtgatccacaccaccgtgcccttcggcgtgacctacctggagcacagcattgaagatgtgcaggagctggtgttccagcagctggagaacatcctgcccggcctgccccagcccatcgccaccaagtgccagaagtggaggcacagccaggtgaccaatgctgctgccaactgccccggccagatgaccctgcaccacaagcccttcctggcctgtggaggagatggcttcacccagagcaactttgatggctgcatcaccagcgccctgtgtgtgctggaggccctgaagaactacatctag

SEQ ID NO: 167564 - DNA, 948 bp, synthetic construct
  misc_feature 1..948: note = Description of Artificial Sequence: Synthetic coding sequence
  source 1..948: mol_type = other DNA
atggcccaggtgctgattgtgggcgccggcatgacaggcagcctgtgtgccgccctgctgcggcggcagaccagcggccccctgtacctggccgtgtgggacaaggcagaagattctgggggccgcatgaccacagcctgcagcccccacaacccccagtgcacagctgacctgggcgcccagtacatcacctgcaccccccactacgccaagaagcaccagcgcttctatgatgagctgctggcctatggagtgctgcggcccctgagcagccccatcgagggcatggtgatgaaggagggggactgcaactttgtggccccccagggcatcagcagcatcatcaagcactacctgaaggagagcggggctgaggtgtacttccgccaccgggtgacccagatcaacctgagagatgacaagtgggaggtgtccaagcagacaggcagccctgagcagtttgacctgattgtgctgaccatgcctgtgcctgagatcctgcagctgcagggcgacatcaccaccctcatcagcgagtgccagaggcagcagctggaggccgtgtcctacagcagccgctatgccctgggcctcttctatgaggccggcaccaagattgatgtgccctgggccggccagtacatcaccagcaacccctgcatccgctttgtgtccattgacaacaagaagagaaatattgagagcagcgagatcggccccagcctggtgatccacaccaccgtgcccttcggcgtgacctacctggagcacagcattgaagatgtgcaggagctggtgttccagcagctggagaacatcctgcccggcctgccccagcccatcgccaccaagtgccagaagtggaggcacagccaggtgcccagcgctggggtcatcctgggctgtgccaagagcccctggatgatggccatcggcttccccatctag

SEQ ID NO: 167565 - DNA, 699 bp, synthetic construct
  misc_feature 1..699: note = Description of Artificial Sequence: Synthetic coding sequence
  source 1..699: mol_type = other DNA
atggcccaggtgctgattgtgggcgccggcatgacaggcagcctgtgtgccgccctgctgcggcggcagaccagcggccccctgtacctggccgtgtgggacaaggcagaagattctggagctgaggtgtacttccgccaccgggtgacccagatcaacctgagagatgacaagtgggaggtgtccaagcagacaggcagccctgagcagtttgacctgattgtgctgaccatgcctgtgcctgagatcctgcagctgcagggcgacatcaccaccctcatcagcgagtgccagaggcagcagctggaggccgtgtcctacagcagccgctatgccctgggcctcttctatgaagctggcaccaagattgatgtgccctgggccggccagtacatcaccagcaacccctgcatccgctttgtgtccattgacaacaagaagaggaacatcgagagcagcgagatcggccccagcctggtgatccacaccaccgtgccctttggagtgacctacctggagcacagcattgaagatgtgcaggagctggtgttccagcagctggagaacatcctgcccggcctgccccagcccatcgccaccaagtgccagaagtggaggcacagccaggtgcccagcgctggggtcatcctgggctgtgccaagagcccctggatgatggccatcggcttccccatctag

SEQ ID NO: 167566 - DNA, 1221 bp, synthetic construct
  misc_feature 1..1221: note = Description of Artificial Sequence: Synthetic coding sequence
  source 1..1221: mol_type = other DNA
atggatggctggaggaggatgccccgctggggcctgctgctgctgctgtggggcagctgcaccttcggcctgcccacagacaccaccaccttcaagaggatcttcctgaagaggatgcccagcatccgggagagcctgaaggagcggggcgtggacatggcccggctgggccctgagtggagccagcccatgaagaggctgaccctgggcaacaccaccagcagcgtcatcctgaccaactacatggacacccagtactatggagagatcggcatcggcaccccaccccagaccttcaaggtggtgtttgacaccggcagcagcaatgtgtgggtgcccagcagcaagtgcagccggctgtacacagcctgtgtgtaccacaagctgtttgatgccagtgacagcagcagctacaagcacaatggaacagagctgaccctgcgctacagcactggaacagtgtctggcttcctgagccaggacatcatcaccgtgggcggcatcaccgtgacccagatgtttggagaggtgacagagatgcctgccctgcccttcatgctggccgagtttgatggagtggtgggcatgggcttcatcgagcaggccatcggccgggtgacccccatctttgacaacatcatcagccagggcgtgctgaaggaggatgtgttctccttctactacaacagagacagcgagaacagccagagcctgggcggccagatcgtgctgggcggcagtgacccccagcactatgagggcaacttccactacatcaacctgatcaagacaggagtgtggcagatccagatgaagggcgtgtctgtgggcagcagcaccctgctgtgtgaagatggctgcctggccctggtggacacaggagccagctacatcagcggcagcaccagcagcattgagaagctgatggaggccctgggcgccaagaagaggctgtttgattatgtggtgaagtgcaatgaaggccccaccctgcctgacatctccttccacctgggcggcaaggagtacaccctgaccagcgctgactatgtgttccaggagagctacagcagcaagaagctgtgcaccctggccatccacgccatggacatccccccacccaccggccccacctgggccctgggcgccaccttcatcaggaagttctacacagaatttgacagaagaaacaaccgcatcggctttgccctggccaggtag

SEQ ID NO: 167567 - DNA, 1212 bp, synthetic construct
  misc_feature 1..1212: note = Description of Artificial Sequence: Synthetic coding sequence
  source 1..1212: mol_type = other DNA
atggatggctggaggaggatgccccgctggggcctgctgctgctgctgtggggcagctgcaccttcggcctgcccacagacaccaccaccttcaagaggatcttcctgaagaggatgcccagcatccgggagagcctgaaggagcggggcgtggacatggcccggctgggccctgagtggagccagcccatgaagaggctgaccctgggcaacaccaccagcagcgtcatcctgaccaactacatggacacccagtactatggagagatcggcatcggcaccccaccccagaccttcaaggtggtgtttgacaccggcagcagcaatgtgtgggtgcccagcagcaagtgcagccggctgtacacagcctgtgtgtaccacaagctgtttgatgccagtgacagcagcagctacaagcacaatggaacagagctgaccctgcgctacagcactggaacagtgtctggcttcctgagccaggacatcatcaccgtgggcggcatcaccgtgacccagatgtttggagaggtgacagagatgcctgccctgcccttcatgctggccgagtttgatggagtggtgggcatgggcttcatcgagcaggccatcggccgggtgacccccatctttgacaacatcatcagccagggcgtgctgaaggaggatgtgttctccttctactacaacagaaacagccagagcctgggcggccagatcgtgctgggcggcagtgacccccagcactatgagggcaacttccactacatcaacctgatcaagacaggagtgtggcagatccagatgaagggcgtgtctgtgggcagcagcaccctgctgtgtgaagatggctgcctggccctggtggacaccggggccagctacatcagcggcagcaccagcagcattgagaagctgatggaggccctgggcgccaagaagaggctgtttgattatgtggtgaagtgcaatgaaggccccaccctgcctgacatctccttccacctgggcggcaaggagtacaccctgaccagcgctgactatgtgttccaggagagctacagcagcaagaagctgtgcaccctggccatccacgccatggacatccccccacccaccggccccacctgggccctgggcgccaccttcatcaggaagttctacacagaatttgacagaagaaacaacagaattggatttgccctggccaggtag

SEQ ID NO: 167568 - DNA, 978 bp, synthetic construct
  misc_feature 1..978: note = Description of Artificial Sequence: Synthetic coding sequence
  source 1..978: mol_type = other DNA
atggacacccagtactacggggagattggaattggcaccccaccccagaccttcaaggtggtgtttgacaccggcagcagcaatgtgtgggtgcccagcagcaagtgcagccggctgtacacagcctgtgtgtaccacaagctgtttgatgccagtgacagcagcagctacaagcacaacggcacagagctgaccctgcgctacagcacaggcaccgtgtctggcttcctgagccaggacatcatcaccgtgggcggcatcaccgtgacccagatgtttggagaggtgacagagatgcctgccctgcccttcatgctggccgagtttgatggagtggtgggcatgggcttcatcgagcaggccatcggccgggtgacccccatctttgacaacatcatcagccagggcgtgctgaaggaggatgtgttctccttctactacaacagagatggagagaacagccagagcctgggcggccagatcgtgctgggcggcagtgacccccagcactatgagggcaacttccactacatcaacctgatcaagacaggagtgtggcagatccagatgaagggcgtgtctgtgggcagcagcaccctgctgtgtgaagatggctgcctggccctggtggacaccggggccagctacatcagcggcagcaccagcagcattgagaagctgatggaggccctgggcgccaagaagaggctgtttgattatgtggtgaagtgcaatgaaggccccaccctgcctgacatctccttccacctgggcggcaaggagtacaccctgaccagcgctgactatgtgttccaggagagctacagcagcaagaagctgtgcaccctggccatccacgccatggacatccccccacccaccggccccacctgggccctgggcgccaccttcatcaggaagttctacacagaatttgacagaagaaacaacagaattggatttgccctggccaggtag

SEQ ID NO: 167569 - DNA, 1284 bp, synthetic construct
  misc_feature 1..1284: note = Description of Artificial Sequence: Synthetic coding sequence
  source 1..1284: mol_type = other DNA
atgagcaagggcctgcctgcccggcaggacatggagaaggagcgggagaccctgcaggcctggaaggagcgggtgggccaggagctggacagagtggtggccttctggatggagcacagccatgaccaggagcacggcggcttcttcacctgcctgggccgggagggccgggtgtatgatgacctgaagtatgtgtggctgcagggccggcaggtgtggatgtactgccgcctgtaccgcacctttgagcgcttcagacatgcccagctgctggatgctgccaaggccggcggggagttcctgctgcgctatgcccgggtggcccctcctgggaagaagtgtgcctttgtgctgaccagagatggccggcctgtgaaggtgcagaggaccatcttcagcgagtgcttctacaccatggccatgaatgagctgtggagggccaccggggaggtgcgctaccagacagaagctgtggagatgatggaccagatcgtgcactgggtgcaggaggatgccagcggcctgggccggccccagctgcagggcgccccagctgctgagcccatggctgtgcccatgatgctgctgaacctggtggagcagctgggggaggctgatgaggagctggccggcaagtatgcagagctgggggactggtgtgcccggcgcatcctgcagcacgtgcagagagatggccaggccgtgctggagaatgtgtctgagggcggcaaggagctgcccggctgcctgggccggcagcagaaccctggccacaccctggaggccggctggttcctgctgcggcactgcatcagaaaaggagaccctgagctgcgggcccacgtgattgacaagttcctgctgctgcccttccacagcggctgggaccctgaccatggaggcctcttctacttccaggatgctgacaacttctgccccacccagctggagtgggccatgaagctgtggtggccccacagcgaggccatgattgccttcctgatgggctacagcgacagcggggaccctgtgctgctgcggctcttctaccaggtggccgagtacaccttccggcagttccgggaccctgaatatggagagtggtttggctacctgagccgggagggcaaggtggccctgagcatcaagggcggccccttcaagggctgcttccacgtgccccgctgcctggccatgtgtgaggagatgctgggcgccctgctgagcaggcctgccccagcccccagccctgcccccaccccagcctgccgcggggctgagtag

SEQ ID NO: 167570 - DNA, 765 bp, synthetic construct
  misc_feature 1..765: note = Description of Artificial Sequence: Synthetic coding sequence
  source 1..765: mol_type = other DNA
atgagcaagggcctgcctgcccggcaggacatggagaaggagcgggagaccctgcaggcctggaaggagcgggtgggccaggagctggacagagtggtggccttctggatggagcacagccatgaccaggagcacggcggcttcttcacctgcctgggccgggagggccgggtgtatgatgacctgaagtatgtgtggctgcagggccggcaggtgtggatgtactgccgcctgtaccgcacctttgagcgcttcagacatgcccagctgctggatgctgccaaggccggcggggagttcctgctgcgctatgcccgggtggcccctcctgggaagaagtgtgcctttgtgctgaccagagatggccggcctgtgaaggtgcagaggaccatcttcagcgagtgcttctacaccatggccatgaatgagctgtggagggccaccggggaggtgcgctaccagacagaagctgtggagatgatggaccagatcgtgcactgggtgcaggaggatgccagcggcctgggccggccccagctgcagggcgccccagctgctgagcccatggctgtgcccatgatgctgctgaacctggtggagcagctgggggaggctgatgaggagctggccggcaagtatgcagagctgggggactggtgtgcccggcgcatcctgcagcacgtgcaggccacccgctggaagccagctggcttctgcagcgtcatcgccttcggcaaggccacccccaactttgagcccacctag

SEQ ID NO: 167571 - DNA, 2355 bp, synthetic construct
  misc_feature 1..2355: note = Description of Artificial Sequence: Synthetic coding sequence
  source 1..2355: mol_type = other DNA
atggcccagctgctgaacagcatcctgtctgtgattgatgtgttccacaagtatgccaagggaaatggagactgtgccctgctgtgcaaggaggagctgaagcagctgctgctggccgagtttggagacatcctgcagaggcccaatgaccctgagaccgtggagaccatcctgaacctgctggaccaggacagagatggccacatcgacttccacgagtacctgctgctggtgttccagctggtgcaggcctgctaccacaagctggacaacaagagccacggcggccgcaccagccagcaggagcggggccaggagggcgcccaggactgcaagtttcctggcaacacaggccggcagcaccggcagagacatgaggaggagcggcagaacagccaccacagccagcctgagcggcaggatggagacagccaccacggccagcctgagcggcaggaccgggacagccaccacggccagagcgagaagcaggaccgggacagccaccacagccagcctgagcggcaggaccgggacagccaccacaaccagagcgagcggcaggacaaggacttctcctttgaccagagcgagcggcagagccaggacagcagcagcggcaagaaggtgagccacaagagcaccagcggccaggccaagtggcagggccacatctttgccctgaacagatgtgagaagcccatccaggacagccactacggccagagcgagcggcacacccagcagagcgagaccctgggccaggccagccacttcaaccagaccaaccagcagaagagcggcagctactgcggccagagcgagcggctgggccaggagctgggctgcggccagacagaccggcagggccagagcagccactacggccagacagaccggcaggaccagagctaccactacggccagacagaccggcagggccagagcagccactacagccagacagaccggcagggccagagcagccactacagccagcctgaccggcagggccagagcagccactacggccagatggacaggaagggccagtgctaccactatgaccagaccaaccggcagggccagggcagccactacagccagcccaaccggcagggccagagcagccactacggccagcctgacacccaggaccagagcagccactacggccagacagaccggcaggaccagagcagccactacggccagacagagcggcagggccagagcagccactacagccagatggaccggcagggccagggcagccactacggccagacagaccggcagggccagagcagccactacggccagcctgaccggcagggccagaacagccactacggccagacagaccggcagggccagagcagccactacggccagacagaccggcagggccagagcagccactacagccagcctgacaagcagggccagagcagccactacggcaagattgaccggcaggaccagagctaccactacggccagccagatggccagggccagagcagccactacggccagacagaccggcagggccagagcttccactacggccagcctgaccggcagggccagagcagccactacagccagatggaccggcagggccagagcagccactacggccagacagaccggcagggccagagcagccactacggccagacagaccggcagggccagagctaccactacggccagacagaccggcagggccagagcagccactacatccagagccagacaggagagatccagggccagaacaagtacttccagggcacagagggcaccaggaaggccagctatgtggagcagagcggccgcagcggccgcctgagccagcagaccccaggccaggagggctaccagaaccagggccagggcttccagagccgggacagccagcagaatggccaccaggtgtgggagcctgaggaggacagccagcaccaccagcacaagctgctggcccagatccagcaggagcggcccctgtgccacaagggccgggactggcagagctgcagcagcgagcagggccaccggcaggcccagacccggcagagccatggagagggcctgagccactgggccgaggaggagcagggccaccagacctgggacagacacagccatgagagccaggagggcccctgtggcacccaggacaggaggacccacaaggatgagcagaaccaccagaggcgggaccggcagacccatgagcacgagcagagccaccagaggcgggaccggcagacccatgaggacaagcagaaccggcagaggcgggaccggcagacccatgaagatgagcagaaccaccagaggtag

SEQ ID NO: 167572 - DNA, 1320 bp, synthetic construct
  misc_feature 1..1320: note = Description of Artificial Sequence: Synthetic coding sequence
  source 1..1320: mol_type = other DNA
atggacaggaagggccagtgctaccactatgaccagaccaaccggcagggccagggcagccactacagccagcccaaccggcagggccagagcagccactacggccagcctgacacccaggaccagagcagccactacggccagacagaccggcaggaccagagcagccactacggccagacagagcggcagggccagagcagccactacagccagatggaccggcagggccagggcagccactacggccagacagaccggcagggccagagcagccactacggccagcctgaccggcagggccagaacagccactacggccagacagaccggcagggccagagcagccactacggccagacagaccggcagggccagagcagccactacagccagcctgacaagcagggccagagcagccactacggcaagattgaccggcaggaccagagctaccactacggccagccagatggccagggccagagcagccactacggccagacagaccggcagggccagagcttccactacggccagcctgaccggcagggccagagcagccactacagccagatggaccggcagggccagagcagccactacggccagacagaccggcagggccagagcagccactacggccagacagaccggcagggccagagctaccactacggccagacagaccggcagggccagagcagccactacatccagagccagacaggagagatccagggccagaacaagtacttccagggcacagagggcaccaggaaggccagctatgtggagcagagcggccgcagcggccgcctgagccagcagaccccaggccaggagggctaccagaaccagggccagggcttccagagccgggacagccagcagaatggccaccaggtgtgggagcctgaggaggacagccagcaccaccagcacaagctgctggcccagatccagcaggagcggcccctgtgccacaagggccgggactggcagagctgcagcagcgagcagggccaccggcaggcccagacccggcagagccacggggagggcctgagccactgggccgaggaggagcagggccaccagacctgggacagacacagccatgagagccaggagggcccctgtggcacccaggacaggaggacccacaaggatgagcagaaccaccagaggcgggaccggcagacccatgaacatgagcagagccaccagaggcgggaccggcagacccatgaggacaagcagaaccggcagaggcgggaccggcagacccatgaagatgagcagaaccaccagaggtag

SEQ ID NO: 167573 - DNA, 1065 bp, synthetic construct
  misc_feature 1..1065: note = Description of Artificial Sequence: Synthetic coding sequence
  source 1..1065: mol_type = other DNA
atggaggtggaggccgtgtgtggcggggccggggaggtggaggcccaggacagcgaccctgccccagccttcagcaaggcccctggcagcgctggccactatgagctgccctgggtggagaagtacagacctgtgaagctgaatgagatcgtgggcaatgaagacacagtgtcccggctggaggtgtttgcccgggagggcaatgtgcccaacatcatcatcgccggccccccaggcaccgggaagaccaccagcatcctgtgcctggcccgggccctgctgggccctgccctgaaggatgccatgctggagctgaatgccagcaatgaccggggcattgatgtggtgaggaacaagatcaagatgtttgcccagcagaaggtgaccctgcccaagggccgccacaagatcatcatcctggatgaagctgacagcatgacagatggagcccagcaggccctgcggaggaccatggagatctacagcaagaccaccaggtttgccctggcctgcaatgccagtgacaagatcatcgagcccatccagagccgctgtgctgtgctgcgctacaccaagctgacagatgcccagatcctgacccggctgatgaatgtcatcgagaaggagcgggtgccctacacagatgatggcctggaggccatcatcttcaccgcccagggcgacatgaggcaggccctgaacaacctgcagagcaccttcagcggcttcggcttcatcaacagtgaaaatgtgttcaaggtgtgtgatgagccccaccccctgctggtgaaggagatgatccagcactgtgtgaatgccaacattgatgaggcctacaagatcctggcccacctgtggcacctgggctacagccctgaggacatcatcggcaacatcttccgggtgtgcaagaccttccagatggccgagtacctgaagctggagttcatcaaggagatcggctacacccacatgaagattgctgagggcgtgaacagcctgctgcagatggccggcctgctggcccggctgtgccagaagaccatggcccctgtggccagctag

SEQ ID NO: 167574 - DNA, 963 bp, synthetic construct
  misc_feature 1..963: note = Description of Artificial Sequence: Synthetic coding sequence
  source 1..963: mol_type = other DNA
atggaggtggaggccgtgtgtggcggggccggggaggtggaggcccaggacagcgaccctgccccagccttcagcaaggcccctggcagcgctggccactatgagctgccctgggtggagaagtacagacctgtgaagctgaatgagatcgtgggcaatgaagacacagtgtcccggctggaggtgtttgcccgggagggcaatgtgcccaacatcatcatcgccggccccccaggcaccgggaagaccaccagcatcctgtgcctggcccgggccctgctgggccctgccctgaaggatgccatgctggagctgaatgccagcaatgacagcatgacagatggagcccagcaggccctgcggaggaccatggagatctacagcaagaccaccaggtttgccctggcctgcaatgccagtgacaagatcatcgagcccatccagagccgctgtgctgtgctgcgctacaccaagctgacagatgcccagatcctgacccggctgatgaatgtcatcgagaaggagcgggtgccctacacagatgatggcctggaggccatcatcttcaccgcccagggcgacatgaggcaggccctgaacaacctgcagagcaccttcagcggcttcggcttcatcaacagtgaaaatgtgttcaaggtgtgtgatgagccccaccccctgctggtgaaggagatgatccagcactgtgtgaatgccaacattgatgaggcctacaagatcctggcccacctgtggcacctgggctacagccctgaggacatcatcggcaacatcttccgggtgtgcaagaccttccagatggccgagtacctgaagctggagttcatcaaggagatcggctacacccacatgaagattgctgagggcgtgaacagcctgctgcagatggccggcctgctggcccggctgtgccagaagaccatggcccctgtggccagctag

SEQ ID NO: 167575 - DNA, 1071 bp, synthetic construct
  misc_feature 1..1071: note = Description of Artificial Sequence: Synthetic coding sequence
  source 1..1071: mol_type = other DNA
atgagcctgtgggtggacaagtaccggccctgcagcctgggccgcctggactaccacaaggagcaggccgcccagctgaggaacctggtgcagtgtggggacttcccccacctgctggtgtatggccccagcggggccggcaagaagacccgcatcatgtgcatcctgcgggagctgtatggagtgggcgtggagaagctgagaattgagcaccagaccatcaccacccccagcaagaagaagattgagatcagcaccatcgccagcaactaccacctggaggtgaaccccagtgatgctggcaacagcgacagagtggtgatccaggagatgctgaagacagtggcccagagccagcagctggagaccaacagccagagggacttcaaggtggtgctgctgacagaggtggacaagctgaccaaggatgcccagcacgccctgcggaggaccatggagaagtacatgagcacctgccgcctcatcctgtgctgcaacagcaccagcaaggtgattcctcccatccgcagccgctgcctggccgtgcgggtgcctgcccccagcattgaggacatctgccacgtgctgagcacagtgtgcaagaaggagggcctgaacctgcccagccagctggcccaccggctggccgagaagagctgcaggaacctgaggaaggccctgctgatgtgtgaggcctgccgggtgcagcagtaccccttcaccgctgaccaggagatccctgagacagactgggaggtgtacctgcgggagacagccaatgccatcgtgtcccagcagaccccccagaggctgctggaggtgcggggccgcctgtatgagctgctgacccactgcatccccccagagatcatcatgaagggcctgctgtctgagctgctgcacaactgtgatggccagctgaagggggaggtggcccagatggccgcctactatgagcaccggctgcagctgggcagcaaggccatctaccacctggaggcctttgtggccaagttcatggccctgtacaagaagttcatggaggatggcctggagggcatgatgttttag

SEQ ID NO: 167576 - DNA, 918 bp, synthetic construct
  misc_feature 1..918: note = Description of Artificial Sequence: Synthetic coding sequence
  source 1..918: mol_type = other DNA
atgagcctgtgggtggacaagtaccggccctgcagcctgggccgcctggactaccacaaggagcaggccgcccagctgaggaacctggtgcagtgtggggacttcccccacctgctggtgtatggccccagcggggccggcaagaagacccgcatcatgtgcatcctgcgggagctgtatggagtgggcgtggagaagctgagaattgagcaccagaccatcaccacccccagcaagaagaagattgagatcagcaccatcgccagcaactaccacctggaggtgaaccccagtgatgctggcaacagcgacagagtggtgatccaggagatgctgaagacagtggcccagagccagcagctggagaccaacagccagagggacttcaaggtggtgctgctgacagaggtggacaagctgaccaaggatgcccagcacgccctgcggaggaccatggagaagtacatgagcacctgccgcctcatcctgtgctgcaacagcaccagcaaggtgattcctcccatccgcagccgctgcctggccgtgcgggtgcctgcccccagcattgaggacatctgccacgtgctgagcacagtgtgcaagaaggagggcctgaacctgcccagccagctggcccaccggctggccgagaagagctgcaggaacctgaggaaggccctgctgatgtgtgaggcctgccgggtgcagcagtaccccttcaccgctgaccaggagatccctgagacagactgggaggtgtacctgcgggagacagccaatgccatcgtgtcccagcagaccccccagaggctgctggaggtgcggggccgcctgtatgagctgctgacccactgcatccccccagagatcatcatgaaggcctgcaaggaggagagccgcagctgtgacatcttctag

SEQ ID NO: 167577 - DNA, 1092 bp, synthetic construct
  misc_feature 1..1092: note = Description of Artificial Sequence: Synthetic coding sequence
  source 1..1092: mol_type = other DNA
atgcaggccttcctgaagggcaccagcatcagcaccaagccacccctgaccaaggacagaggagtggccgccagcgctggcagcagtggagagaacaagaaggccaagcctgtgccctgggtggagaagtaccggcccaagtgtgtggatgaggtggccttccaggaggaggtggtggccgtgctgaagaagagcctggagggcgctgacctgcccaacctgctcttctacggccccccaggcaccgggaagaccagcaccatcctggccgccgcccgggagctgtttggacctgagctgttccggctgcgggtgctggagctgaatgccagtgatgagcggggcatccaggtggtgcgggagaaggtgaagaactttgcccagctgactgtgtctggcagcagaagtgatggcaagccctgcccccccttcaagatcgtcatcctggatgaggccgacagcatgaccagcgctgcccaggccgccctgcggaggaccatggagaaggagagcaagaccacccgcttctgcctgatctgcaactacgtgagccgcatcatcgagcccctgaccagccgctgcagcaagttccgcttcaagcccctgagtgacaagatccagcagcagaggctgctggacatcgccaagaaggaaaatgtgaagatcagtgatgagggcatcgcctacctggtgaaggtgtctgagggggacctgaggaaggccatcaccttcctgcagagcgccacccggctgaccggcggcaaggagatcacagagaaggtgatcacagacattgctggggtcatcccagctgagaagattgatggagtgtttgctgcctgccagagcggcagctttgacaagctggaggccgtggtgaaggacctgattgatgagggccacgccgccacccagctggtgaaccagctgcatgatgtggtggtggagaacaacctgagtgacaagcagaagagcatcatcacagagaagctggccgaggtggacaagtgcctggctgatggagcagatgagcacctgcagctgatcagcctgtgtgccaccgtgatgcagcagctgagccagaactgctag

SEQ ID NO: 167578 - DNA, 1092 bp, synthetic construct; identical to SEQ ID NO: 167577
  misc_feature 1..1092: note = Description of Artificial Sequence: Synthetic coding sequence
  source 1..1092: mol_type = other DNA

SEQ ID NO: 167579 - DNA, 132 bp, synthetic construct
  misc_feature 1..132: note = Description of Artificial Sequence: Synthetic coding sequence
  source 1..132: mol_type = other DNA
atgcaggccttcctgaagggcaccagcatcagcaccaagccacccctgaccaaggacagaggagtggccgccagcgctggcagcagtggagagaacaagaaggccaagcctgtgccctgggtggagaagtag

SEQ ID NO: 167580 - DNA, 645 bp, synthetic construct
  misc_feature 1..645: note = Description of Artificial Sequence: Synthetic coding sequence
  source 1..645: mol_type = other DNA
atgcaggccttcctgaagggcaccagcatcagcaccaagccacccctgaccaaggacagaggagtggccgccagcgctggcagcagtggagagaacaagaaggccaagcctgtgccctgggtggagaagtaccggcccaagtgtgtggatgaggtggccttccaggaggaggtggtggccgtgctgaagaagagcctggagggcgctgacctgcccaacctgctcttctacggccccccaggcaccgggaagaccagcaccatcctggccgccgcccgggagctgtttggacctgagctgttccggctgcgggtgctggagctgaatgccagtgatgagcggggcatccaggtggtgcgggagaaggtgaagaactttgcccagctgactgtgtctggcagcagaagtgatggcaagccctgcccccccttcaagatcgtcatcctggatgaggccgacagcatgaccagcgctgcccaggccgccctgcggaggaccatggagaaggagagcaagaccacccgcttctgcctgatctgcaactacgtgagccgcatcatcgagcccctgaccagccgctgcagcaagttccgcttcaagcccctgagtgacaagatccagcagcagaggctgctggacatctag

SEQ ID NO: 167581 - DNA, 372 bp, synthetic construct
  misc_feature 1..372: note = Description of Artificial Sequence: Synthetic coding sequence
  source 1..372: mol_type = other DNA
atgcaggccttcctgaagggcaccagcatcagcaccaagccacccctgaccaaggacagaggagtggccgccagcgctggcagcagtggagagaacaagaaggccaagcctgtgccctgggtggagaagtaccggcccaagtgtgtggatgaggtggccttccaggaggaggtggtggccgtgctgaagaagagcctggagggcgctgacctgcccaacctgctcttctacggccccccaggcaccgggaagaccagcaccatcctggccgccgcccgggagctgtttggacctgagctgttccggctgcgggtgctggagctgaatgccagtgatgagcggggcatccaggtggtgcgggagaaggtgtag

SEQ ID NO: 167582 - DNA, 504 bp, synthetic construct
  misc_feature 1..504: note = Description of Artificial Sequence: Synthetic coding sequence
  source 1..504: mol_type = other DNA
atgcaggccttcctgaagggcaccagcatcagcaccaagccacccctgaccaaggacagaggagtggccgccagcgctggcagcagtggagagaacaagaaggccaagcctgtgccctgggtggagaagtaccggcccaagtgtgtggatgaggtggccttccaggaggaggtggtggccgtgctgaagaagagcctggagggcgctgacctgcccaacctgctcttctacggccccccaggcaccgggaagaccagcaccatcctggccgccgcccgggagctgtttggacctgagctgttccggctgcgggtgctggagctgaatgccagtgatgagcggggcatccaggtggtgcgggagaaggtgaagaactttgcccagctgactgtgtctggcagcagaagtgatggcaagccctgcccccccttcaagatcgtcatcctggatgaggccgacagcatgaccagcgctgcccaggccgccctgcggaggaccatgtag

SEQ ID NO: 167583 - DNA, 288 bp, synthetic construct
  misc_feature 1..288: note = Description of Artificial Sequence: Synthetic coding sequence
  source 1..288: mol_type = other DNA
atgcaggccttcctgaagggcaccagcatcagcaccaagccacccctgaccaaggacagaggagtggccgccagcgctggcagcagtggagagaacaagaaggccaagcctgtgccctgggtggagaagtaccggcccaagtgtgtggatgaggtggccttccaggaggaggtggtggccgtgctgaagaagagcctggagggcgctgacctgcccaacctgctcttctacggccccccaggcaccgggaagaccagcaccatcctggccgccgcccgggagctgtag

SEQ ID NO: 167584 - DNA, 1746 bp, synthetic construct
  misc_feature 1..1746: note = Description of Artificial Sequence: Synthetic coding sequence
  source 1..1746: mol_type = other DNA
atgcagaggcctggcccccggctgtggctggtgctgcaggtgatgggcagctgtgccgccatcagctccatggacatggagaggcctggagatggcaagtgccagcccatcgagatccccatgtgcaaggacatcggctacaacatgaccaggatgcccaacctgatgggccacgagaaccagcgggaggccgccatccagctgcatgaatttgcccccctggtggagtatggctgccacggccacctgcgcttcttcctgtgcagcctgtatgcccccatgtgcacagagcaggtgtccacccccatcccagcctgccgggtgatgtgtgagcaggcccggctgaagtgcagccccatcatggagcagttcaacttcaagtggccagacagcctggactgcaggaagctgcccaacaagaatgaccccaactacctgtgcatggaggcccccaacaatggaagtgatgagcccacccggggcagcggcctcttccccccactcttccggccccagaggccccacagcgcccaggagcaccccctgaaggatggcggccctggccggggcggctgtgacaaccctgggaagttccaccacgtggagaagagcgccagctgtgcccccctgtgcaccccaggagtggatgtgtactggagccgggaggacaagagatttgctgtggtgtggctggccatctgggccgtgctgtgcttcttcagcagcgccttcaccgtgctgaccttcctgattgatcctgcccgcttccgctacccagagcggcccatcatcttcctgtccatgtgctactgtgtgtacagcgtgggctacctgatccggctgtttgctggagctgagagcatcgcctgtgaccgggacagcggccagctgtatgtgatccaggagggcctggagagcacaggctgcaccctggtgttcctggtgctgtactacttcggcatggccagcagcctgtggtgggtggtgctgaccctgacctggttcctggccgccggcaagaagtggggccacgaggccatcgaggccaacagcagctacttccacctggccgcctgggccatcccagctgtgaagaccatcctgatcctggtgatgagaagagtggccggagatgagctgactggagtgtgctacgtgggctccatggatgtgaatgccctgactggatttgtgctgatccccctggcctgctacctggtgattggcaccagcttcatcctgagcggctttgtggccctcttccacatccggcgggtgatgaagacaggaggagagaacacagacaagctggagaagctgatggtgcgcatcggcctcttctctgtgctgtacacagtgcctgccacctgtgtgattgcctgctacttctatgaaaggctgaacatggactactggaagatcctggccgcccagcacaagtgcaagatgaacaaccagaccaagaccctggactgcctgatggccgccagcatcccagctgtggagatcttcatggtgaagatcttcatgctgctggtggtgggcatcaccagcggcatgtggatctggaccagcaagaccctgcagagctggcagcaggtgtgcagccggcggctgaagaagaagagcaggaggaagccagccagcgtcatcaccagcggcggcatctacaagaaggcccagcacccccagaagacccaccacggcaagtatgagatcccagcccagagccccacctgtgtgtag

SEQ ID NO: 167585 - DNA, 960 bp, synthetic construct
  misc_feature 1..960: note = Description of Artificial Sequence: Synthetic coding sequence
  source 1..960: mol_type = other DNA
atggtggagaagtaccggccccagaccctgaatgacctgatcagccaccaggacatcctgagcaccatccagaagttcatcaatgaagatcggctgccccacctgctgctgtatggccccccaggcaccgggaagaccagcaccatcctggcctgtgccaagcagctgtacaaggacaaggagtttggctccatggtgctggagctgaatgccagtgatgaccggggcatcgacatcatccggggccccatcctgagctttgccagcaccaggaccatcttcaagaagggcttcaagctggtgatcctggatgaagcagatgccatgacccaggatgcccagaatgccctgcggcgggtgattgagaagttcacagagaacacccgcttctgcctgatctgcaactacctgagcaagatcatcccagccctgcagagccgctgcacccgcttccgcttcggccccctgaccccagagctgatggtgccccggctggagcacgtggtggaggaggagaaggtggacatcagtgaagatggcatgaaggccctggtgaccctgagcagcggggacatgagaagagccctgaacatcctgcagagcaccaacatggccttcggcaaggtgacagaggagaccgtgtacacctgcaccggccaccccctgaagagtgacatcgccaacatcctggactggatgctgaaccaggacttcaccacagcctacagaaacatcacagagctgaagaccctgaagggcctggccctgcatgacatcctgacagagatccacctgtttgtgcaccgggtggacttccccagctctgtgcgcatccacctgctgaccaagatggctgacatcgagtaccgcctgtctgtgggcaccaatgagaagatccagctgagcagcctgattgctgccttccaggtgacccgggacctgattgtggccgaggcctag

SEQ ID NO: 167586 - DNA, 315 bp, synthetic construct
  misc_feature 1..315: note = Description of Artificial Sequence: Synthetic coding sequence
  source 1..315: mol_type = other DNA
atggtggagaagtaccggccccagaccctgaatgacctgatcagccaccaggacatcctgagcaccatccagaagttcatcaatgaagatcggctgccccacctgctgctgtatggccccccaggcaccgggaagaccagcaccatcctggcctgtgccaagcagctgtacaaggacaaggagtttggctccatggtgctggagctgaatgccagtgatgaccggggcatcgacatcatccggggccccatcctgagctttgccagcaccaggaccatcttcaagaagggcttcaagctggtgatcctggactag

SEQ ID NO: 167587 - DNA, 1023 bp, synthetic construct
  misc_feature 1..1023: note = Description of Artificial Sequence: Synthetic coding sequence
  source 1..1023: mol_type = other DNA
atggagaccagcgccctgaagcagcaggagcagcctgctgccaccaagatccggaacctgccctgggtggagaagtaccggccccagaccctgaatgacctgatcagccaccaggacatcctgagcaccatccagaagttcatcaatgaagatcggctgccccacctgctgctgtatggccccccaggcaccgggaagaccagcaccatcctggcctgtgccaagcagctgtacaaggacaaggagtttggctccatggtgctggagctgaatgccagtgatgaccggggcatcgacatcatccggggccccatcctgagctttgccagcaccaggaccatcttcaagaagggcttcaagctggtgatcctggatgaagcagatgccatgacccaggatgcccagaatgccctgcggcgggtcatcgagaagttcacagagaacacccgcttctgcctgatctgcaactacctgagcaagatcatcccagccctgcagagccgctgcacccgcttccgcttcggccccctgaccccagagctgatggtgccccggctggagcacgtggtggaggaggagaaggtggacatcagtgaagatggcatgaaggccctggtgaccctgagcagcggggacatgaggcgggccctgaacatcctgcagagcaccaacatggccttcggcaaggtgacagaggagaccgtgtacacctgcaccggccaccccctgaagagtgacatcgccaacatcctggactggatgctgaaccaggacttcaccacagcctacagaaacatcacagagctgaagaccctgaagggcctggccctgcatgacatcctgacagagatccacctgtttgtgcaccgggtggacttccccagctctgtgcgcatccacctgctgaccaagatggctgacatcgagtaccgcctgtctgtgggcaccaatgagaagatccagctgagcagcctgattgctgccttccaggtgacccgggacctgattgtggccgaggcctag

SEQ ID NO: 167588 - DNA, 192 bp, synthetic construct
  misc_feature 1..192: note = Description of Artificial Sequence: Synthetic coding sequence
  source 1..192: mol_type = other DNA
atggtggagaagtaccggccccagaccctgaatgacctgatcagccaccaggacatcctgagcaccatccagaagttcatcaatgaagatcggctgccccacctgctgctgtatggccccccaggcaccgggaagaccagcaccatcctggcctgtgccaagcagctgtacaaggacaaggagtttggatag

SEQ ID NO: 167589 - DNA, 1077 bp, synthetic construct
  misc_feature 1..1077: note = Description of Artificial Sequence: Synthetic coding sequence
  source 1..1077: mol_type = other DNA
atgtggaacagcaatgatggaggagctggctggaggaggaagagaattgctgggggcttcagcaagagggccagcctgggcagcgagcggcgggtggtggccggggaggagggccgggagaggtcctggggcgtgtggggcagccctgctggaagaagaagaggccgcctgggccgcctgggccagtgcctgaagggccgcagcctgcgggagcctgctggcttcagcgaggcctgggatgtggcccaggccctgatcctgctcttcaagacaggaggctttgagagctatggcagcagcagctatggaggagctgggggctacacccagagccctgggggcttcggcagccctgcccccagccaggccgagaagaagagccgggcccgggcccagcacatcgtgccctgcaccatcagccagctgctgagcgccaccctggtggatgaggtgttcagaattggaaatgtggagatcagccaggtgaccatcgtgggcatcatcagacatgctgagaaggcccccaccaacatcgtgtacaagattgatgacatgacagctgcccccatggatgtgcggcagtgggtggacacagatgacaccagcagcgagaacacagtggtgcccccagagacctacgtgaaggtggccggccacctgcggagcttccagaacaagaagagcctggtggccttcaagatcatgcccctggaggacatgaatgagttcaccacccacatcctggaggtgatcaatgcccacatggtgctgagcaaggccaacagccagcccagcgctggccgggcccccatcagcaaccctggcatgtctgaggccggcaactttggaggcaacagcttcatgcctgccaacggcctgactgtggcccagaaccaggtgctgaacctgatcaaggcctgccccaggcctgagggcctgaacttccaggacctgaagaaccagctgaagcacatgtctgtgagcagcatcaagcaggccgtggacttcctgagcaatgaaggccacatctacagcacagtggatgatgaccacttcaagagcacagatgctgagtag

SEQ ID NO: 167590 - DNA, 837 bp, synthetic construct
  misc_feature 1..837: note = Description of Artificial Sequence: Synthetic coding sequence
  source 1..837: mol_type = other DNA
atgggccgcggggacaggaacaagaggagcatccggggctttgagagctatggcagcagcagctatggaggagctgggggctacacccagagccctgggggcttcggcagccctgcccccagccaggccgagaagaagagccgggcccgggcccagcacatcgtgccctgcaccatcagccagctgctgagcgccaccctggtggatgaggtgttcagaattggaaatgtggagatcagccaggtgaccatcgtgggcatcatcagacatgctgagaaggcccccaccaacatcgtgtacaagattgatgacatgacagctgcccccatggatgtgcggcagtgggtggacacagatgacaccagcagcgagaacacagtggtgcccccagagacctacgtgaaggtggccggccacctgcggagcttccagaacaagaagagcctggtggccttcaagatcatgcccctggaggacatgaatgagttcaccacccacatcctggaggtgatcaatgcccacatggtgctgagcaaggccaacagccagcccagcgctggccgggcccccatcagcaaccctggcatgtctgaggccggcaactttggaggcaacagcttcatgcctgccaacggcctgactgtggcccagaaccaggtgctgaacctgatcaaggcctgccccaggcctgagggcctgaacttccaggacctgaagaaccagctgaagcacatgtctgtgagcagcatcaagcaggccgtggacttcctgagcaatgaaggccacatctacagcacagtggatgatgaccacttcaagagcacagatgctgagtag

SEQ ID NO: 167591 - DNA, 813 bp, synthetic construct
  misc_feature 1..813: note = Description of Artificial Sequence: Synthetic coding sequence
  source 1..813: mol_type = other DNA
atgtggaacagcggctttgagagctatggcagcagcagctatggaggagctgggggctacacccagagccctgggggcttcggcagccctgcccccagccaggccgagaagaagagccgggcccgggcccagcacatcgtgccctgcaccatcagccagctgctgagcgccaccctggtggatgaggtgttcagaattggaaatgtggagatcagccaggtgaccatcgtgggcatcatcagacatgctgagaaggcccccaccaacatcgtgtacaagattgatgacatgacagctgcccccatggatgtgcggcagtgggtggacacagatgacaccagcagcgagaacacagtggtgcccccagagacctacgtgaaggtggccggccacctgcggagcttccagaacaagaagagcctggtggccttcaagatcatgcccctggaggacatgaatgagttcaccacccacatcctggaggtgatcaatgcccacatggtgctgagcaaggccaacagccagcccagcgctggccgggcccccatcagcaaccctggcatgtctgaggccggcaactttggaggcaacagcttcatgcctgccaacggcctgactgtggcccagaaccaggtgctgaacctgatcaaggcctgccccaggcctgagggcctgaacttccaggacctgaagaaccagctgaagcacatgtctgtgagcagcatcaagcaggccgtggacttcctgagcaatgaaggccacatctacagcacagtggatgatgaccacttcaagagcacagatgctgagtag

SEQ ID NO: 167592 - DNA, 369 bp, synthetic construct
  misc_feature 1..369: note = Description of Artificial Sequence: Synthetic coding sequence
  source 1..369: mol_type = other DNA
ctggaggacatgaatgagttcaccacccacatcctggaggtgatcaatgcccacatggtgctgagcaaggccaacagccagcccagcgctggccgggcccccatcagcaaccctggcatgtctgaggccggcaactttggaggcaacagcttcatgcctgccaacggcctgactgtggcccagaaccaggtgctgaacctgatcaaggcctgccccaggcctgagggcctgaacttccaggacctgaagaaccagctgaagcacatgtctgtgagcagcatcaagcaggccgtggacttcctgagcaatgaaggccacatctacagcacagtggatgatgaccacttcaagagcacagatgctgagtag

SEQ ID NO: 167593 - DNA, 540 bp, synthetic construct
  misc_feature 1..540: note = Description of Artificial Sequence: Synthetic coding sequence
  source 1..540: mol_type = other DNA
atgtggaacagcaatgatggcggcggctttgagagctatggcagcagcagctatggaggagctgggggctacacccagagccctgggggcttcggcagccctgcccccagccaggccgagaagaagagccgggcccgggcccagcacatcgtgccctgcaccatcagccagctgctgagcgccaccctggtggatgaggtgttcagaattggaaatgtggagatcagccaggtgaccatcgtgggcatcatcagacatgctgagaaggcccccaccaacatcgtgtacaagattgatgacatgacagctgcccccatggatgtgcggcagtgggtggacacagatgacaccagcagcgagaacacagtggtgcccccagagacctacgtgaaggtggccggccacctgcggagcttccagaacaagaagagcctggtggccttcaagatcatgcccctggaggacatgaatgagttcaccacccacatcctggaggtgatcaatgcccacatggtgctgagcaaggccaacagccagtag

SEQ ID NO: 167594 - DNA, 786 bp, synthetic construct
  misc_feature 1..786: note = Description of Artificial Sequence: Synthetic coding sequence
  source 1..786: mol_type = other DNA
atgagcaagagcggcttcggcagctatggcagcatctctgctgctgatggagccagcggcggcagtgaccagctgtgtgaaagagatgccaccccagccatcaagacccagaggcccaaggtgcgcatccaggatgtggtgccctgcaatgtgaaccagctgctgagcagcacagtgtttgaccccgtcttcaaggtgcggggcatcatcgtgtcccaggtgtccatcgtgggcgtcatcagaggagctgagaaggccagcaaccacatctgctacaagattgatgacatgacagccaagcccatcgaggcccggcagtggtttggccgggagaaggtgaagcaggtgacccccctgtctgtgggcgtgtatgtgaaggtgtttggcatcctgaagtgccccaccggcaccaagagcctggaggtgctgaagatccacgtgctggaggacatgaatgagttcaccgtgcacatcctggagaccgtgaatgcccacatgatgctggacaaggcccggcgggacaccaccgtggagagcgtgcctgtgagccccagcgaggtgaatgatgctggggacaatgatgagagccacaggaacttcatccaggatgaggtgctgcggctcatccatgaatgtccccaccaggagggcaagagcatccacgagctgcgggcccagctgtgtgacctgtctgtgaaggccatcaaggaggccatcgactacctgactgtggagggccacatctaccccaccgtggaccgggagcacttcaagtctgctgactag

SEQ ID NO: 167595 - DNA, 330 bp, synthetic construct
  misc_feature 1..330: note = Description of Artificial Sequence: Synthetic coding sequence
  source 1..330: mol_type = other DNA
atgaacccagccctgggcaaccagacagatgtggccggcctcttcctggccaacagcagcgaggccctggagagagctgtgcgctgctgcacccaggcctctgtggtgacagatgatggctttgctgagggcggcccagatgagaggagcctgtacatcatgagggtggtgcagattgctgtgatgtgtgtgctgagcctgactgtggtgtttggcatcttcttcctgggctgcaacctgctgatcaagtctgagggcatgatcaacttcctggtgaaggacagaagacccagcaaggaggtggaggccgtggtggtgggcccctactag

SEQ ID NO: 167596 - DNA, 1893 bp, synthetic construct
  misc_feature 1..1893: note = Description of Artificial Sequence: Synthetic coding sequence
  source 1..1893: mol_type = other DNA
atgcagggcagcagcctgtggctgagcctgaccttccgcagcgcccgggtgctgagccgggcccgcttctttgagtggcagagccctggcctgcccaacacagctgccatggagaatggaacaggcccctacggggaggagcggccccgggaggtgcaggagaccaccgtgacagagggcgccgccaagatcgccttccccagcgccaatgaggtgttctacaaccctgtgcaggagttcaacagagacctgacctgtgctgtgatcacagaatttgcccgcatccagctgggcgccaagggcatccagatcaaggtgcctggagagaaggacacccagaaggtggtggtggacctgtctgagcaggaggaggagaaggtggagctgaaggagagcgagaacctggccagcggggaccagcccaggacagctgctgtgggggagatctgtgaggagggcctgcacgtgctggagggcctggccgccagcggcctgcggagcatccgctttgccctggaggtgcccggcctgcggtctgtggtggccaatgatgccagcaccagggctgtggacctgatcagaagaaatgtgcagctgaatgatgtggcccacctggtgcagcccagccaggctgatgccaggatgctgatgtaccagcaccagagggtgtctgaaagatttgatgtgattgacctggacccctacggcagccctgccaccttcctggatgctgctgtgcaggccgtgtctgagggcggcctgctgtgtgtgacctgcacagacatggctgtgctggccggcaacagcggggagacctgctacagcaaatatggagccatggccctgaagagccgggcctgccacgagatggccctgcgcatcgtgctgcacagcctggacctgcgggccaactgctaccagagatttgtggtgcccctgctgagcatctctgctgacttctacgtgcgggtgtttgtgcgggtcttcaccggccaggccaaggtgaaggccagcgcccgggccaagttctctgctgcctgtggcccccctgtgaccccagaatgtgagcactgcggccagaggcaccagctgggcggccccatgtgggccgagcccatccatgacctggactttgtgggccgggtgctggaggccgtgtctgccaaccctggccgcttccacaccagcgagcgcatccggggcgtgctgagcgtcatcacagaggagctgcctgatgtgcccctgtactacaccctggaccagctgagcagcaccatccactgcaacacccccagcctgctgcagctgcggagcgccctgctgcatgctgacttccgggtgtccctgagccacgcctgcaagaatgctgtgaagacagatgccccagccagcgccctgtgggacatcatgcgctgctgggagaaggagtgccctgtgaagcgggagcggctgtctgagaccagccctgccttccgcatcctgtctgtggagccccggctgcaggccaacttcaccatccgggaggatgccaaccccagcagccggcagaggggcctgaagcgcttccaggccaaccctgaggccaactggggcccccggccccgggcccggcctgggggcaaggctgctgatgaggccatggaggagcggcggcggctgctgcagaacaagaggaaggagcccccagaagatgtggcccagagagctgcccggctgaagaccttcccctgcaagcgcttcaaggagggcacctgccagagaggagaccagtgctgctacagccacagcccccccaccccccgggtgtctgcagatgctgccccagactgcccagagaccagcaaccagaccccacctggccctggagctgctgctggccctggcattgattag

SEQ ID NO: 167597 - DNA, 249 bp, synthetic construct
  misc_feature 1..249: note = Description of Artificial Sequence: Synthetic coding sequence
  source 1..249: mol_type = other DNA
atgaaggccctgtgcctgctgctgctgcctgtgctgggcctgctggtgagcagcaagaccctgtgcagcatggaggaggccatcaatgaaagaatccaggaggtggccggcagcctgagctttgctgtgacaggctgcacctgtggcagcgcctgtggctcctgggatgtgcgggcagagaccacctgccactgccagtgtgccggcatggactggacaggagcccgctgctgccgggtgcagccctag

SEQ ID NO: 167598 - DNA, 954 bp, synthetic construct
  misc_feature 1..954: note = Description of Artificial Sequence: Synthetic coding sequence
  source 1..954: mol_type = other DNA
atgaagaggctgagcctggtgaccaccaaccggctgagcccccacggcaacttcctgcccctgtgcaccttccccctggccgtggacatggccgccctcttccaggaggccagcagctgccctgtgtgcagcgactacctggagaagcccatgagcctggagtgtggctgtgctgtgtgcttcaagtgcatcaacagcctgcagaaggagccccacggggaggacctgctgtgctgctgctgcagcatggtgtcccagaagaacaagatccggcccagctggcagctggagcggctggccagccacatcaaggagctggagcccaagctgaagaagatcctgcagatgaaccccaggatgaggaagttccaggtggacatgaccctggatgctgacacagccaacaacttcctgctgatcagtgatgacctgcggtctgtgcgcagcggctgcatcacccagaaccggcaggacctggccgagagatttgatgtgtccatctgcatcctgggcagcccccgcttcacctgtggccgccactactgggaggtggatgtgggcaccagcacagagtgggacctgggcgtgtgccgggagagcgtgcacaggaagggccgcatccacctgaccacagagcggggcttctggacagtgtccctgagagatggcagccggctgagcgccagcacagtgcccctgaccttcctgtttgtggacaggaagctgcagagggtgggcatcttcctggacatgggcatgcagaatgtgtccttctttgatgctgagggcggcagccacgtgtacaccttccgctctgtgtctgctgaggagcccctgcacctgttctttgccccacccagcccccccaacggggacaagtctgtgctgagcatctgccctgtgatcaaccctggcaccacagatgcccctgtgcaccctggagaggccaagtag

SEQ ID NO: 167599 - DNA, 954 bp, synthetic construct
  misc_feature 1..954: note = Description of Artificial Sequence: Synthetic coding sequence
  source 1..954: mol_type = other DNA
atgaagaggctgagcctggtgaccaccaaccggctgagcccccacggcaacttcttcaccctgtgcaccttccccctggccgtggacatggccgccctcttccaggaggccagcagctgccctgtgtgcagcgactacctggagaagcccatgagcctggagtgtggctgtgctgtgtgcctgaagtgcatcaacagcctgcagaaggagccccacggggaggacctgctgtgctgctgcagctccatggtgtccaggaagaacaagatcagaagaaaccggcagctggagcggctggccagccacatcaaggagctggagcccaagctgaagaagatcctgcagatgaaccccaggatgaggaagttccaggtggacatgaccctggatgccaacacagccaacaacttcctgctgatcagtgatgacctgcggtctgtgcgcagcggccgcatccggcagaaccggcaggacctggccgagagatttgatgtgtctgtgtgcatcctgggcagcccccgcttcacctgtggccgccactgctgggaggtggatgtgggcaccagcacagagtgggacctgggcgtgtgccgggagagcgtgcacaggaagggccgcatccagctgaccacagagctgggcttctggacagtgtccctgagagatggcggccgcctgagcgccaccaccgtgcccctgaccttcctgtttgtggacaggaagctgcagagggtgggcatcttcctggacatgggcatgcagaatgtgtccttctttgatgctgagagcggcagccacgtgtacaccttccgctctgtgtctgctgaggagcccctgcggcccttcctggcccccagcgtgccccccaacggggaccagggcgtgctgagcatctgccccctgatgaacagcggcaccacagatgcccctgtgcggcctggagaggccaagtag

SEQ ID NO: 167600 - DNA, 867 bp, synthetic construct
  misc_feature 1..867: note = Description of Artificial Sequence: Synthetic coding sequence
  source 1..867: mol_type = other DNA
atggccgccctcttccaggaggccagcagctgccctgtgtgcagcgactacctggagaagcccatgagcctggagtgtggctgtgctgtgtgcctgaagtgcatcaacagcctgcagaaggagccccatggagaggacctgctgtgctgctgcagctccatggtgtccaggaagaacaagatcagaagaaaccggcagctggagcggctggccagccacatcaaggagctggagcccaagctgaagaagatcctgcagatgaaccccaggatgaggaagttccaggtggacatgaccctggatgccaacacagccaacaacttcctgctgatcagtgatgacctgcggtctgtgcgcagcggccgcatccggcagaaccggcaggacctggccgagagatttgatgtgtctgtgtgcatcctgggcagcccccgcttcacctgtggccgccactgctgggaggtggatgtgggcaccagcacagagtgggacctgggcgtgtgccgggagagcgtgcacaggaagggccgcatccagctgaccacagagctgggcttctggacagtgtccctgagagatggcggccgcctgagcgccaccaccgtgcccctgaccttcctgtttgtggacaggaagctgcagagggtgggcatcttcctggacatgggcatgcagaatgtgtccttctttgatgctgagagcggcagccacgtgtacaccttccgctctgtgtctgctgaggagcccctgcggcccttcctggcccccagcgtgcccccaaatggagaccagggcgtgctgagcatctgccccctgatgaacagcggcaccacagatgcccctgtgcggcctggagaggccaagtag

SEQ ID NO: 167601 - DNA, 867 bp, synthetic construct; identical to SEQ ID NO: 167600
  misc_feature 1..867: note = Description of Artificial Sequence: Synthetic coding sequence
  source 1..867: mol_type = other DNA

SEQ ID NO: 167602 - DNA, 1137 bp, synthetic construct
  misc_feature 1..1137: note = Description of Artificial Sequence: Synthetic coding sequence
  source 1..1137: mol_type = other DNA
atggaggtggccgagctgggcttccctgagacagctgtgtcccagagccgcatctgcctgtgtgctgtgctgtgtggccactgggactttgctgacatgatggtgatccgcagcctgagcctcatccggctggagggcgtggagggccgggaccctgtgggcggcggcaacctgaccaacaagaggcccagctgtgcccccagcccccaggacctgagcgcccagtggaagcagctggaggacagaggagccagcagcagaagagtggacatggccgccctcttccaggaggccagcagctgccctgtgtgcagcgactacctggagaagcccatgagcctggagtgtggctgtgctgtgtgcctgaagtgcatcaacagcctgcagaaggagccccatggagaggacctgctgtgctgctgcagctccatggtgtccaggaagaacaagatcagaagaaaccggcagctggagcggctggccagccacatcaaggagctggagcccaagctgaagaagatcctgcagatgaaccccaggatgaggaagttccaggtggacatgaccctggatgccaacacagccaacaacttcctgctgatcagtgatgacctgcggtctgtgcgcagcggccgcatccggcagaaccggcaggacctggccgagagatttgatgtgtctgtgtgcatcctgggcagcccccgcttcacctgtggccgccactgctgggaggtggatgtgggcaccagcacagagtgggacctgggcgtgtgccgggagagcgtgcacaggaagggccgcatccagctgaccacagagctgggcttctggacagtgtccctgagagatggcggccgcctgagcgccaccaccgtgcccctgaccttcctgtttgtggacaggaagctgcagagggtgggcatcttcctggacatgggcatgcagaatgtgtccttctttgatgctgagagcggcagccacgtgtacaccttccgctctgtgtctgctgaggagcccctgcggcccttcctggcccccagcgtgcccccaaatggagaccagggcgtgctgagcatctgccccctgatgaacagcggcaccacagatgcccctgtgcggcctggagaggccaagtag

SEQ ID NO: 167603 - DNA, 954 bp, synthetic construct
  misc_feature 1..954: note = Description of Artificial Sequence: Synthetic coding sequence
  source 1..954: mol_type = other DNA
atgaagaggctgagcctggtgaccaccaaccggctgagcccccagggcaacttcctgcccctgtgcaccttccccctggccgtggacatggccgccctcttccaggaggccagcagctgccctgtgtgcagcgactacctggagaagcccatgagcctggagtgtggctgcaccgtgtgcctgaagtgcatcaacagcctgcagaaggagccccacggggaggacctgctgtgctgctgctgcagcatggtgtcccagaggaacaagatccggcccaaccggcagctggagcggctggtgagccacatcaaggagctggagcccaagctgaagaagatcctgcagatgaaccccaggatgaggaagttccaggtggacatgaccctggatgctgacacagccaacaacttcctgctgatcagtgatgacctgcggtctgtgcgcagcggcctcatcacccagaaccggcaggacctggccgagagatttgatgtgtctgtgtgcatcctgggcagcccccgcttcacctgtggccgccactactgggaggtggatgtgggcaccagcacagagtgggacctgggcgtgtgccgggagagcgtgcactgcaagggcaagatccagctgaccacagagctgggcttctggacagtgtccctgagagatggcagccggctgagcgccagcacagtgcccctgaccttcctgctggtggacaggaagctgcagagggtgggcatcttcctggacatgggcatgcagaatgtgtccttctttgatgctgagagcggcagccacgtgtacaccttccgctctgtgtctgctgaggagcccctgcggcccttcctggcccccagcatcccccccaacggggaccagggcgtgctgagcatctgccccctgatgaacagcggcaccacagatgcccctgtgcggcctggagaggccaagtag

SEQ ID NO: 167604 - DNA, 867 bp, synthetic construct
  misc_feature 1..867: note = Description of Artificial Sequence: Synthetic coding sequence
  source 1..867: mol_type = other DNA
atggccgccctcttccaggaggccagcagctgccctgtgtgcagcgactacctggagaagcccatgagcctggagtgtggctgcaccgtgtgcctgaagtgcatcaacagcctgcagaaggagccccatggagaggacctgctgtgctgctgctgcagcatggtgtcccagaggaacaagatccggcccaaccggcagctggagcggctggtgagccacatcaaggagctggagcccaagctgaagaagatcctgcagatgaaccccaggatgaggaagttccaggtggacatgaccctggatgctgacacagccaacaacttcctgctgatcagtgatgacctgcggtctgtgcgcagcggcctcatcacccagaaccggcaggacctggccgagagatttgatgtgtctgtgtgcatcctgggcagcccccgcttcacctgtggccgccactactgggaggtggatgtgggcaccagcacagagtgggacctgggcgtgtgccgggagagcgtgcactgcaagggcaagatccagctgaccacagagctgggcttctggacagtgtccctgagagatggcagccggctgagcgccagcacagtgcccctgaccttcctgctggtggacaggaagctgcagagggtgggcatcttcctggacatgggcatgcagaatgtgtccttctttgatgctgagagcggcagccacgtgtacaccttccgctctgtgtctgctgaggagcccctgcggcccttcctggcccccagcatccccccaaatggagaccagggcgtgctgagcatctgccccctgatgaacagcggcaccacagatgcccctgtgcggcctggagaggccaagtag

SEQ ID NO: 167605 - DNA, 867 bp, synthetic construct; identical to SEQ ID NO: 167604
  misc_feature 1..867: note = Description of Artificial Sequence: Synthetic coding sequence
  source 1..867: mol_type = other DNA

SEQ ID NO: 167606 - DNA, 3219 bp, synthetic construct
  misc_feature 1..3219: note = Description of Artificial Sequence: Synthetic coding sequence
  source 1..3219: mol_type = other DNA
atggccaaggccaccagcggggctgctggcctgcggctgctgctgctgctgctgctgcccctgctgggcaaggtggccctgggcctgtacttcagcagagatgcctactgggagaagctgtatgtggaccaggccgccggcacccccctgctgtatgtgcacgccctgagagatgcccctgaggaggtgcccagcttccggctgggccagcacctgtatggcacctaccgcacccggctgcacgagaacaactggatctgcatccaggaggacaccggcctgctgtacctgaacagaagcctggaccacagctcctgggagaagctgtctgtgaggaacagaggcttccccctgctgactgtgtacctgaaggtgttcctgagccccaccagcctgcgggagggggagtgccagtggccaggctgtgcccgggtgtacttctccttcttcaacaccagcttccctgcctgcagcagcctgaagccccgggagctgtgcttccctgagacccggcccagcttccgcatccgggagaacagacctcctggcaccttccaccagttccggctgctgcctgtgcagttcctgtgccccaacatctctgtggcctaccgcctgctggagggggagggcctgcccttccgctgtgccccagacagcctggaggtgtccacccgctgggccctggaccgggagcagcgggagaagtatgagctggtggccgtgtgcaccgtgcatgctggggcccgggaggaggtggtgatggtgcccttccctgtgacagtgtatgatgaagatgacagcgcccccaccttccctgctggggtggacacagccagcgctgtggtggagttcaagaggaaagaagatactgtggtggccaccctgcgggtgtttgatgctgatgtggtgcctgccagcggggagctggtgcggcgctacaccagcaccctgctgcccggggacacctgggcccagcagaccttccgggtggagcactggcccaatgagacctctgtgcaggccaacggcagctttgtgcgggccaccgtgcatgactaccgcctggtgctgaacagaaacctgagcatcagcgagaacagaaccatgcagctggccgtgctggtgaatgacagcgacttccagggccctggggccggcgtgctgctgctgcacttcaacgtgtctgtgctgcctgtgtccctgcacctgcccagcacctacagcctgtctgtgtcccggcgggccaggagatttgcccagatcggcaaggtgtgtgtggagaactgccaggccttcagcggcatcaacgtgcagtacaagctgcacagcagcggggccaactgcagcaccctgggcgtggtgaccagcgctgaggacaccagcggcatcctgtttgtgaatgacaccaaggccctgcggcggcccaagtgtgccgagctgcactacatggtggtggccacagaccagcagaccagccggcaggcccaggcccagctgctggtgacagtggagggcagctatgtggccgaggaggccggctgccccctgagctgtgctgtgtccaagaggcggctggagtgtgaggagtgtggcggcctgggcagccccaccggccgctgtgagtggaggcagggagatggcaagggcatcaccaggaacttcagcacctgcagccccagcaccaagacctgcccagatggccactgtgatgtggtggagacccaggacatcaacatctgcccccaggactgcctgcggggcagcatcgtgggcggccacgagcccggggagccccggggcatcaaggccggctacggcacctgcaactgcttccctgaggaggagaagtgcttctgtgagcctgaggacatccaggaccccctgtgtgatgagctgtgcaggacagtgattgctgctgctgtgctcttctccttcatcgtgtctgtgctgctgagcgccttctgcatccactgctaccacaagtttgcccacaagccacccatcagcagcgctgagatgaccttcagaagacctgcccaggccttccctgtgtcctacagcagcagcggggcccggcggcccagcctggacagcatggagaaccaggtgtctgtggatgccttcaagatcctggaggaccccaagtgggagttccccaggaagaacctggtgctgggcaagaccctgggggagggggagtttgggaaggtggtgaaggccacagccttccacctgaagggccgggccggctacaccaccgtggccgtgaagatgctgaaggaaaatgccagccccagcgagctgcgggacctgctgtctgagttcaacgtgctgaagcaggtgaaccacccccacgtgatcaagctgtatggagcctgcagccaggacggccccctgctgctgattgtggagtatgccaagtatggcagcctgcggggcttcctgcgggagagcaggaaggtgggccctggctacctgggcagcggcggcagcaggaacagcagcagcctggaccacccagatgagcgggccctgaccatgggagacctgatcagctttgcctggcagatcagccagggcatgcagtacctggccgagatgaagctggtgcaccgggacctggccgccaggaacatcctggtggccgagggcaggaagatgaagatcagtgactttggcctgagcagagatgtgtatgaggaggacagctatgtgaagaggagccagggccgcatccctgtgaagtggatggccatcgagagcctgtttgaccacatctacaccacccagagtgatgtgtggagctttggagtgctgctgtgggagatcgtgaccctgggcggcaacccctacccaggcatccccccagagcggctcttcaacctgctgaagacaggccacaggatggagaggccagacaactgcagcgaggagatgtaccgcctgatgctgcagtgctggaagcaggagccagacaagaggcctgtgtttgctgacatcagcaaggacctggagaagatgatggtgaagaggcgggactacctggacctggccgccagcacccccagcgacagcctcatctatgatgatggcctgtctgaggaggagacccccctggtggactgcaacaatgcccccctgccccgggccctgcccagcacctggattgagaacaagctgtatggccgcatcagccacgccttcacccgcttctag

SEQ ID NO: 167607 - DNA, 3345 bp, synthetic construct
  misc_feature 1..3345: note = Description of Artificial Sequence: Synthetic coding sequence
  source 1..3345: mol_type = other DNA
atggccaaggccaccagcggggctgctggcctgcggctgctgctgctgctgctgctgcccctgctgggcaaggtggccctgggcctgtacttcagcagagatgcctactgggagaagctgtatgtggaccaggccgccggcacccccctgctgtatgtgcacgccctgagagatgcccctgaggaggtgcccagcttccggctgggccagcacctgtatggcacctaccgcacccggctgcacgagaacaactggatctgcatccaggaggacaccggcctgctgtacctgaacagaagcctggaccacagctcctgggagaagctgtctgtgaggaacagaggcttccccctgctgactgtgtacctgaaggtgttcctgagccccaccagcctgcgggagggggagtgccagtggccaggctgtgcccgggtgtacttctccttcttcaacaccagcttccctgcctgcagcagcctgaagccccgggagctgtgcttccctgagacccggcccagcttccgcatccgggagaacagacctcctggcaccttccaccagttccggctgctgcctgtgcagttcctgtgccccaacatctctgtggcctaccgcctgctggagggggagggcctgcccttccgctgtgccccagacagcctggaggtgtccacccgctgggccctggaccgggagcagcgggagaagtatgagctggtggccgtgtgcaccgtgcatgctggggcccgggaggaggtggtgatggtgcccttccctgtgacagtgtatgatgaagatgacagcgcccccaccttccctgctggggtggacacagccagcgctgtggtggagttcaagaggaaagaagatactgtggtggccaccctgcgggtgtttgatgctgatgtggtgcctgccagcggggagctggtgcggcgctacaccagcaccctgctgcccggggacacctgggcccagcagaccttccgggtggagcactggcccaatgagacctctgtgcaggccaacggcagctttgtgcgggccaccgtgcatgactaccgcctggtgctgaacagaaacctgagcatcagcgagaacagaaccatgcagctggccgtgctggtgaatgacagcgacttccagggccctggggccggcgtgctgctgctgcacttcaacgtgtctgtgctgcctgtgtccctgcacctgcccagcacctacagcctgtctgtgtcccggcgggccaggagatttgcccagatcggcaaggtgtgtgtggagaactgccaggccttcagcggcatcaacgtgcagtacaagctgcacagcagcggggccaactgcagcaccctgggcgtggtgaccagcgctgaggacaccagcggcatcctgtttgtgaatgacaccaaggccctgcggcggcccaagtgtgccgagctgcactacatggtggtggccacagaccagcagaccagccggcaggcccaggcccagctgctggtgacagtggagggcagctatgtggccgaggaggccggctgccccctgagctgtgctgtgtccaagaggcggctggagtgtgaggagtgtggcggcctgggcagccccaccggccgctgtgagtggaggcagggagatggcaagggcatcaccaggaacttcagcacctgcagccccagcaccaagacctgcccagatggccactgtgatgtggtggagacccaggacatcaacatctgcccccaggactgcctgcggggcagcatcgtgggcggccacgagcccggggagccccggggcatcaaggccggctacggcacctgcaactgcttccctgaggaggagaagtgcttctgtgagcctgaggacatccaggaccccctgtgtgatgagctgtgcaggacagtgattgctgctgctgtgctcttctccttcatcgtgtctgtgctgctgagcgccttctgcatccactgctaccacaagtttgcccacaagccacccatcagcagcgctgagatgaccttcagaagacctgcccaggccttccctgtgtcctacagcagcagcggggcccggcggcccagcctggacagcatggagaaccaggtgtctgtggatgccttcaagatcctggaggaccccaagtgggagttccccaggaagaacctggtgctgggcaagaccctgggggagggggagtttgggaaggtggtgaaggccacagccttccacctgaagggccgggccggctacaccaccgtggccgtgaagatgctgaaggaaaatgccagccccagcgagctgcgggacctgctgtctgagttcaacgtgctgaagcaggtgaaccacccccacgtgatcaagctgtatggagcctgcagccaggacggccccctgctgctgattgtggagtatgccaagtatggcagcctgcggggcttcctgcgggagagcaggaaggtgggccctggctacctgggcagcggcggcagcaggaacagcagcagcctggaccacccagatgagcgggccctgaccatgggagacctgatcagctttgcctggcagatcagccagggcatgcagtacctggccgagatgaagctggtgcaccgggacctggccgccaggaacatcctggtggccgagggcaggaagatgaagatcagtgactttggcctgagcagagatgtgtatgaggaggacagctatgtgaagaggagccagggccgcatccctgtgaagtggatggccatcgagagcctgtttgaccacatctacaccacccagagtgatgtgtggagctttggagtgctgctgtgggagatcgtgaccctgggcggcaacccctacccaggcatccccccagagcggctcttcaacctgctgaagacaggccacaggatggagaggccagacaactgcagcgaggagatgtaccgcctgatgctgcagtgctggaagcaggagccagacaagaggcctgtgtttgctgacatcagcaaggacctggagaagatgatggtgaagaggcgggactacctggacctggccgccagcacccccagcgacagcctcatctatgatgatggcctgtctgaggaggagacccccctggtggactgcaacaatgcccccctgccccgggccctgcccagcacctggattgagaacaagctgtatggcatgtctgaccccaactggccaggagagagccctgtgcccctgaccagggcagatggcaccaacacaggcttcccccgctacccaaatgacagcgtgtatgccaactggatgctgagccccagcgctgccaagctgatggacacctttgacagctag

SEQ ID NO: 167608 - DNA, 1377 bp, synthetic construct
  misc_feature 1..1377: note = Description of Artificial Sequence: Synthetic coding sequence
  source 1..1377: mol_type = other DNA
atggccaaggccaccagcggggctgctggcctgcggctgctgctgctgctgctgctgcccctgctgggcaaggtggccctgggcctgtacttcagcagagatgcctactgggagaagctgtatgtggaccaggccgccggcacccccctgctgtatgtgcacgccctgagagatgcccctgaggaggtgcccagcttccggctgggccagcacctgtatggcacctaccgcacccggctgcacgagaacaactggatctgcatccaggaggacaccggcctgctgtacctgaacagaagcctggaccacagctcctgggagaagctgtctgtgaggaacagaggcttccccctgctgactgtgtacctgaaggtgttcctgagccccaccagcctgcgggagggggagtgccagtggccaggctgtgcccgggtgtacttctccttcttcaacaccagcttccctgcctgcagcagcctgaagccccgggagctgtgcttccctgagacccggcccagcttccgcatccgggagaacagacctcctggcaccttccaccagttccggctgctgcctgtgcagttcctgtgccccaacatctctgtggcctaccgcctgctggagggggagggcctgcccttccgctgtgccccagacagcctggaggtgtccacccgctgggccctggaccgggagcagcgggagaagtatgagctggtggccgtgtgcaccgtgcatgctggggcccgggaggaggtggtgatggtgcccttccctgtgacagtgtatgatgaagatgacagcgcccccaccttccctgctggggtggacacagccagcgctgtggtggagttcaagaggaaagaagatactgtggtggccaccctgcgggtgtttgatgctgatgtggtgcctgccagcggggagctggtgcggcgctacaccagcaccctgctgcccggggacacctgggcccagcagaccttccgggtggagcactggcccaatgagacctctgtgcaggccaacggcagctttgtgcgggccaccgtgcatgactaccgcctggtgctgaacagaaacctgagcatcagcgagaacagaaccatgcagctggccgtgctggtgaatgacagcgacttccagggccctggggccggcgtgctgctgctgcacttcaacgtgtctgtgctgcctgtgtccctgcacctgcccagcacctacagcctgtctgtgtcccggcgggccaggagatttgcccagatcggcaaggtgtgtgtggagaactgcctggccgacctgactggagatgctgtgtctggaagagatgaggcccggagcagcggcctgggcagccagaagcaccctggcagctag

SEQ ID NO: 167609 - DNA, 786 bp, synthetic construct
  misc_feature 1..786: note = Description of Artificial Sequence: Synthetic coding sequence
  source 1..786: mol_type = other DNA
atggatgaggccctggagacccagctgaagaccagccggggccgcttcagcgccacagagagcctgcccaccctggagctgctgagccaggtggacatggactgccgggtgcacatgaggcccatcggcctgacctgggtgctgcagctgaccctggcctggatcctgctggaggcctgtggcggcagccggcccctgcaggcccggagccagcagcaccacggcctggccgctgacctgggcaagggcaagctgcacctggccggcccctgctgccccagcgagatggacaccacagagaccagcggccctggcaaccaccctgagcgctgtggggtgcccagcccagaatgtgagagcttcctggagcacctgcagagggccctgcggagccgcttccggctgcggctgctgggcgtgcggcaggcccagcccctgtgtgaggagctgtgccaggcctggtttgccaactgtgaagatgacatcacctgtggccccacctggctgcccctgtctgagaagaggggctgtgagcccagctgcctgacctacggccagacctttgctgatggaacagacctgtgccgcagcgccctgggccacgccctgcctgtggccgcccctggggcccggcactgcttcaacatcagcatctctgctgtgccccggccccggcccggccggcggggccgggaggcccccagccgccgcagccgcagccccaggaccagcatcctggatgctgctggcagcggcagcggcagcggcagcggcagcggcccctag

SEQ ID NO: 167610 - DNA, 675 bp, synthetic construct
  misc_feature 1..675: note = Description of Artificial Sequence: Synthetic coding sequence
  source 1..675: mol_type = other DNA
atgggctggcagctgatctgggccaaggccagctgcacctggcaggacctggtggtgccccagcgctggacccagcagaggcaccgggccctggagaccatccagaatgctgtggagtgccgggccctgaatgccaaccccagctggaacaccagcaatgtgccctttgctgtggccagcgcctgtggctactggggctacgcccggcacagccgcagcgcccggagcagcgcccggcccggcagccccacagccaagatgatcagccctgctgcccggctgggcagccacagccagaagaagggagctgtgtccccagctgccctgcccatggaccggctggagtgcagcggggccatcagcgcccgctgcaacctgcggctgcggggcagcagtgacagccctgctgccaccagcagaattgctggcatcagcggggcctgccaccacgcccagctgatctttgtgttcctggtggagagcgccttccaccacgtgggccaggccggctttgagctgctgaccagcggggacccccccaccagcgccagccagagcgtgggcatcaccggggtgagccaccggccccggcccccacccagcagcttcctgccctgcctggacccccgggacagaattggcaccccccaggtgcctgcccccaccctgccctag

SEQ ID NO: 167611 - DNA, 690 bp, synthetic construct
  misc_feature 1..690: note = Description of Artificial Sequence: Synthetic coding sequence
  source 1..690: mol_type = other DNA
atggactgccgggtgcacatgaggcccatcggcctgacctgggtgctgcagctgaccctggcctggatcctgctggaggcctgtggcggcagccggcccctgcaggcccggagccagcagcaccacggcctggccgctgacctgggcaagggcaagctgcacctggccggcccctgctgccccagcgagatggacaccacagagaccagcggccctggcaaccaccctgagcgctgtggggtgcccagcccagaatgtgagagcttcctggagcacctgcagagggccctgcggagccgcttccggctgcggctgctgggcgtgcggcaggcccagcccctgtgtgaggagctgtgccaggcctggtttgccaactgtgaagatgacatcacctgtggccccacctggctgcccctgtctgagaagaggggctgtgagcccagctgcctgacctacggccagacctttgctgatggaacagacctgtgccgcagcgccctgggccacgccctgcctgtggccgcccctggggcccggcactgcttcaacatcagcatctctgctgtgccccggccccggcccggccggcggggccgggaggcccccagccgccgcagccgcagccccaggaccagcatcctggatgctgctggcagcggcagcggcagcggcagcggcagcggcccctag

SEQ ID NO: 167612 - DNA, 618 bp, synthetic construct
  misc_feature 1..618: note = Description of Artificial Sequence: Synthetic coding sequence
  source 1..618: mol_type = other DNA
atggatgaggccctggagacccagctgaagaccagccggggccgcttcagcgccacagagagcctgcccaccctggagctgctgagccaggtggacatggactgccgggtgcacatgaggcccatcggcctgacctgggtgctgcagctgaccctggcctggatcctgctggaggcctgtggcggcagccggcccctgcaggcccggagccagcagcaccacggcctggccgctgacctgggcaagggcaagctgcacctggccggcccctgctgccccagcgagatggacaccacagagaccagcggccctggcaaccaccctgagcgctgtggggtgcccagcccagaatgtgagagcttcctggagcacctgcagagggccctgcggagccgcttccggctgcggctgctgggcgtgcggcaggcccagcccctgtgtgaggagctgtgccaggcctggtttgccaactgtgaagatgacatcacctgtggccccacctggctgcccctgtctgagaagaggggctgtgagcccagctgcctgacctacggccaggccggcgtgcagtggagggacctgagctccatgcagcccccacctcctggcttcaagtag

SEQ ID NO: 167613 - DNA, 720 bp, synthetic construct
  misc_feature 1..720: note = Description of Artificial Sequence: Synthetic coding sequence
  source 1..720: mol_type = other DNA
atggcccggcagctgctgagccaggtggacatggactgccgggtgcacatgaggcccatcggcctgacctgggtgctgcagctgaccctggcctggatcctgctggaggcctgtggcggcagccggcccctgcaggcccggagccagcagcaccacggcctggccgctgacctgggcaagggcaagctgcacctggccggcccctgctgccccagcgagatggacaccacagagaccagcggccctggcaaccaccctgagcgctgtggggtgcccagcccagaatgtgagagcttcctggagcacctgcagagggccctgcggagccgcttccggctgcggctgctgggcgtgcggcaggcccagcccctgtgtgaggagctgtgccaggcctggtttgccaactgtgaagatgacatcacctgtggccccacctggctgcccctgtctgagaagaggggctgtgagcccagctgcctgacctacggccagacctttgctgatggaacagacctgtgccgcagcgccctgggccacgccctgcctgtggccgcccctggggcccggcactgcttcaacatcagcatctctgctgtgccccggccccggcccggccggcggggccgggaggcccccagccgccgcagccgcagccccaggaccagcatcctggatgctgctggcagcggcagcggcagcggcagcggcagcggcccctag

SEQ ID NO: 167614 - DNA, 996 bp, synthetic construct
  misc_feature 1..996: note = Description of Artificial Sequence: Synthetic coding sequence
  source 1..996: mol_type = other DNA
atggcccggggcggccggggccggcggctgggcctggccctgggcctgctgctggccctggtgctggccccccgggtgctgcgggccaagcccaccgtgaggaaggagcgggtggtgcggccagattctgagctgggggagcggcccccagaggacaaccagagcttccagtatgaccacgaggccttcctgggcaaggaggacagcaagacctttgaccagctgaccccagatgagagcaaggagcggctgggcaagatcgtggacagaattgacaatgatggagatggctttgtgaccacagaggagctgaagacctggatcaagagggtgcagaagcgctacatctttgacaacgtggccaaggtgtggaaggactatgaccgggacaaggatgacaagatctcctgggaggagtacaagcaggccacctacggctactacctgggcaacccagctgagttccatgacagcagtgaccaccacaccttcaagaagatgctgcccagagatgaaagacgcttcaaggctgctgacctgaatggagacctgacagccacccgggaggagttcaccgccttcctgcaccctgaggagtttgagcacatgaaggagatcgtggtgctggagaccctggaggacatcgacaagaatggagatggctttgtggaccaggatgagtacatcgctgacatgttcagccatgaagaaaatggacctgagccagactgggtgctgtctgagcgggagcagttcaatgagttccgggacctgaacaaggatggcaagctggacaaggatgagatccgccactggatcctgccccaggactatgaccacgcccaggccgaggcccggcacctggtgtatgaaagtgacaagaacaaggatgagaagctgaccaaggaggagatcctggagaactggaacatgtttgtgggcagccaggccaccaactacggggaggacctgaccaagaaccatgatgagctgtag

SEQ ID NO: 167615 - DNA, 87 bp, synthetic construct
  misc_feature 1..87: note = Description of Artificial Sequence: Synthetic coding sequence
  source 1..87: mol_type = other DNA
gagatcctggagaactggaacatgtttgtgggcagccaggccaccaactatggagaggacctgaccaagaaccatgatgagctgtag

SEQ ID NO: 167616 - DNA, 954 bp, synthetic construct
  misc_feature 1..954: note = Description of Artificial Sequence: Synthetic coding sequence
  source 1..954: mol_type = other DNA
atgaggctgggccccaggacagctgccctgggcctgctgctgctgtgtgccgctgctgctggggccggcaaggccgaggagctgcactaccccctgggggagaggagaagtgactatgaccgggaggccctgctgggcgtgcaggaggatgtggatgaatatgtgaagctgggccacgaggagcagcagaagaggctgcaggccatcatcaagaagattgacctggacagtgatggcttcctgacagagagcgagctgagctcctggatccagatgtccttcaagcactacgccatgcaggaggccaagcagcagtttgtggagtatgacaagaacagtgatgacacagtgacctgggatgagtacaacatccagatgtatgacagagtgattgactttgatgaaaatacagccctggatgatgctgaggaggagagcttcaggaagctgcacctgaaggacaagaagagatttgagaaggccaaccaggacagcggccctggcctgagcctggaggagttcatcgcctttgagcaccctgaggaggtggactacatgacagaatttgtgatccaggaggccctggaggagcatgacaagaatggagatggctttgtgtccctggaggagttcctgggggactaccgctgggaccccacagccaatgaagatcctgagtggatcctggtggagaaggacagatttgtgaatgactatgacaaggacaatgatggccgcctggacccccaggagctgctgccctgggtggtgcccaacaaccagggcatcgcccaggaggaggccctgcacctgattgatgagatggacctgaatggagacaagaagctgtctgaggaggagatcctggagaacccagacctcttcctgaccagcgaggccacagattatggccggcagctgcatgatgactacttctaccatgatgagctgtag

SEQ ID NO: 167617 - DNA, 2331 bp, synthetic construct
  misc_feature 1..2331: note = Description of Artificial Sequence: Synthetic coding sequence
  source 1..2331: mol_type = other DNA
atggccgcccctggggacccccaggatgagctgctgcccctggccggccctggcagccagtggctgcggcacagaggagaaggagaaaatgaggccgtgacccccaagggggccaccccagccccccaggccggggagcccagccctggcctgggcgcccgggcccgggaggccgccagccgggaggccggcagcggccctgcccggcagagccctgtggccatggagacagccagcactggagtggccggcgtgtcctctgccatggaccacaccttcagcaccaccagcaaggatggagagggcagctgctacaccagcctcatcagtgacatctgctacccaccccaggaggacagcacctacttcaccggcatcctgcagaaggaaaatggacatgtgaccatcagcgagagccctgaggagctgggcaccccaggccccagcctgcctgatgtgcccggcatcgagagccggggcctcttcagcagtgacagcggcatcgagatgaccccagctgagagcacagaggtgaacaagatcctggccgaccccctggaccagatgaaggccgaggcctacaagtacatcgacatcaccaggcctgaggaggtgaagcaccaggagcagcaccaccctgagctggaggacaaggacctggacttcaagaacaaggacacagacatcagcatcaagccagagggcgtgcgggagccagacaagccagcccctgtggagggcaagatcatcaaggaccacctgctggaggagagcacctttgccccctacattgatgacctgtctgaggagcagaggcgggccccccagatcaccacccctgtgaagatcaccctgacagaaattgagcccagcgtggagaccaccacccaggagaagaccccagagaagcaggacatctgcctgaagcccagcccagacacagtgcccaccgtgacagtgtctgagccagaagatgacagccctggcagcatcaccccacccagcagcggcacagagcccagcgctgctgagagccagggcaagggcagcatcagtgaagatgagctgatcacagccatcaaggaggccaagggcctgtcctatgaaacagctgagaaccccaggcctgtgggccagctggccgacaggcctgaggtgaaggcccggagcggcccccccaccatccccagccccctggaccacgaggccagcagcgctgagagcggggacagcgagattgagctggtgtctgaggaccccatggctgctgaagatgccctgcccagcggctacgtgtcctttggccacgtgggcggccccccacccagccctgccagccccagcatccagtacagcatcctgcgggaggagcgggaggccgagctggacagcgagctgatcatcgagagctgtgatgccagcagcgccagcgaggagagccccaagcgggagcaggacagcccccccatgaagcccagcgccctggatgccatccgggaggagaccggggtgcgggcagaggagcgggcccccagcagaagaggcctggccgagcccggcagcttcctggactaccccagcacagagccccagcccggccctgagctgcccccaggagatggagccctggagcctgagacccccatgctgcccaggaagccagaggaggacagcagcagcaaccagagccctgctgccaccaagggccctggccccctgggccctggggcccccccacccctgctcttcctgaacaagcagaaggccatcgacctgctgtactggagggacatcaagcagacaggaattgtgtttggcagcttcctgctgctgctcttcagcctgacccagttctctgtggtgtctgtggtggcctacctggccctggccgccctgagcgccaccatctccttccgcatctacaagtctgtgctgcaggccgtgcagaagacagatgagggccaccccttcaaggcctacctggagctggagatcaccctgagccaggagcagatccagaagtacacagactgcctgcagttctacgtgaacagcaccctgaaggagctgcggcggctcttcctggtgcaggacctggtggacagcctgaagtttgctgtgctgatgtggctgctgacctacgtgggcgccctcttcaacggcctgaccctgctgctgatggctgtggtgtccatgttcaccctgcctgtggtgtatgtgaagcaccaggcccagattgaccagtacctgggcctggtgaggacccacatcaatgctgtggtggccaagatccaggccaagatccctggggccaagagacatgctgagtag

SEQ ID NO: 167618 - DNA, 627 bp, synthetic construct
  misc_feature 1..627: note = Description of Artificial Sequence: Synthetic coding sequence
  source 1..627: mol_type = other DNA
atgcaggccacagctgacagcaccaagatggactgtgtgtggagcaactggaagagccaggccatcgacctgctgtactggagggacatcaagcagacaggaattgtgtttggcagcttcctgctgctgctcttcagcctgacccagttctctgtggtgtctgtggtggcctacctggccctggccgccctgagcgccaccatctccttccgcatctacaagtctgtgctgcaggccgtgcagaagacagatgagggccaccccttcaaggcctacctggagctggagatcaccctgagccaggagcagatccagaagtacacagactgcctgcagttctacgtgaacagcaccctgaaggagctgcggcggctcttcctggtgcaggacctggtggacagcctgaagtttgctgtgctgatgtggctgctgacctacgtgggcgccctcttcaacggcctgaccctgctgctgatggctgtggtgtccatgttcaccctgcctgtggtgtatgtgaagcaccaggcccagattgaccagtacctgggcctggtgaggacccacatcaatgctgtggtggccaagatccaggccaagatccctggggccaagagacatgctgagtag

SEQ ID NO: 167619 - DNA, 1071 bp, synthetic construct
  misc_feature 1..1071: note = Description of Artificial Sequence: Synthetic coding sequence
  source 1..1071: mol_type = other DNA
atggctgctgaagatgccctgcccagcggctacgtgtcctttggccacgtgggcggccccccacccagccctgccagccccagcatccagtacagcatcctgcgggaggagcgggaggccgagctggacagcgagctgatcatcgagagctgtgatgccagcagcgccagcgaggagagccccaagcgggagcaggacagcccccccatgaagcccagcgccctggatgccatccgggaggagaccggggtgcgggcagaggagcgggcccccagcagaagaggcctggccgagcccggcagcttcctggactaccccagcacagagccccagcccggccctgagctgcccccaggagatggagccctggagcctgagacccccatgctgcccaggaagccagaggaggacagcagcagcaaccagagccctgctgccaccaagggccctggccccctgggccctggggcccccccacccctgctcttcctgaacaagcagaaggccatcgacctgctgtactggagggacatcaagcagacaggaattgtgtttggcagcttcctgctgctgctcttcagcctgacccagttctctgtggtgtctgtggtggcctacctggccctggccgccctgagcgccaccatctccttccgcatctacaagtctgtgctgcaggccgtgcagaagacagatgagggccaccccttcaaggcctacctggagctggagatcaccctgagccaggagcagatccagaagtacacagactgcctgcagttctacgtgaacagcaccctgaaggagctgcggcggctcttcctggtgcaggacctggtggacagcctgaagtttgctgtgctgatgtggctgctgacctacgtgggcgccctcttcaacggcctgaccctgctgctgatggctgtggtgtccatgttcaccctgcctgtggtgtatgtgaagcaccaggcccagattgaccagtacctgggcctggtgaggacccacatcaatgctgtggtggccaagatccaggccaagatccctggggccaagagacatgctgagtag

SEQ ID NO: 167620 - DNA, 2109 bp, synthetic construct
  misc_feature 1..2109: note = Description of Artificial Sequence: Synthetic coding sequence
  source 1..2109: mol_type = other DNA
atggagacagccagcactggagtggccggcgtgtcctctgccatggaccacaccttcagcaccaccagcaaggatggagagggcagctgctacaccagcctcatcagtgacatctgctacccaccccaggaggacagcacctacttcaccggcatcctgcagaaggaaaatggacatgtgaccatcagcgagagccctgaggagctgggcaccccaggccccagcctgcctgatgtgcccggcatcgagagccggggcctcttcagcagtgacagcggcatcgagatgaccccagctgagagcacagaggtgaacaagatcctggccgaccccctggaccagatgaaggccgaggcctacaagtacatcgacatcaccaggcctgaggaggtgaagcaccaggagcagcaccaccctgagctggaggacaaggacctggacttcaagaacaaggacacagacatcagcatcaagccagagggcgtgcgggagccagacaagccagcccctgtggagggcaagatcatcaaggaccacctgctggaggagagcacctttgccccctacattgatgacctgtctgaggagcagaggcgggccccccagatcaccacccctgtgaagatcaccctgacagaaattgagcccagcgtggagaccaccacccaggagaagaccccagagaagcaggacatctgcctgaagcccagcccagacacagtgcccaccgtgacagtgtctgagccagaagatgacagccctggcagcatcaccccacccagcagcggcacagagcccagcgctgctgagagccagggcaagggcagcatcagtgaagatgagctgatcacagccatcaaggaggccaagggcctgtcctatgaaacagctgagaaccccaggcctgtgggccagctggccgacaggcctgaggtgaaggcccggagcggcccccccaccatccccagccccctggaccacgaggccagcagcgctgagagcggggacagcgagattgagctggtgtctgaggaccccatggctgctgaagatgccctgcccagcggctacgtgtcctttggccacgtgggcggccccccacccagccctgccagccccagcatccagtacagcatcctgcgggaggagcgggaggccgagctggacagcgagctgatcatcgagagctgtgatgccagcagcgccagcgaggagagccccaagcgggagcaggacagcccccccatgaagcccagcgccctggatgccatccgggaggagaccggggtgcgggcagaggagcgggcccccagcagaagaggcctggccgagcccggcagcttcctggactaccccagcacagagccccagcccggccctgagctgcccccaggagatggagccctggagcctgagacccccatgctgcccaggaagccagaggaggacagcagcagcaaccagagccctgctgccaccaagggccctggccccctgggccctggggcccccccacccctgctcttcctgaacaagcagaaggccatcgacctgctgtactggagggacatcaagcagacaggaattgtgtttggcagcttcctgctgctgctcttcagcctgacccagttctctgtggtgtctgtggtggcctacctggccctggccgccctgagcgccaccatctccttccgcatctacaagtctgtgctgcaggccgtgcagaagacagatgagggccaccccttcaaggcctacctggagctggagatcaccctgagccaggagcagatccagaagtacacagactgcctgcagttctacgtgaacagcaccctgaaggagctgcggcggctcttcctggtgcaggacctggtggacagcctgaagtttgctgtgctgatgtggctgctgacctacgtgggcgccctcttcaacggcctgaccctgctgctgatggctgtggtgtccatgttcaccctgcctgtggtgtatgtgaagcaccaggcccagattgaccagtacctgggcctggtgaggacccacatcaatgctgtggtggccaagatccaggccaagatccctggggccaagagacatgctgagtag

SEQ ID NO: 167621 - DNA, 1638 bp, synthetic construct
  misc_feature 1..1638: note = Description of Artificial Sequence: Synthetic coding sequence
  source 1..1638: mol_type = other DNA
atgggccaggtgctgcctgtgtttgcccactgcaaggaggcccccagcacagccagcagcaccccagacagcacagaaggaggaaatgatgacagcgacttccgggagctgcacacagcccgggagttcagcgaggaggatgaggaggagaccaccagccaggactggggcaccccccgggagctgaccttctcctacatcgcctttgatggagtggtgggcagcggcggccggcgggacagcacagcccggcggccccggccccagggccgctctgtgtctgagccccgggaccagcacccccagcccagcctgggggacagcctggagagcatccccagcctgagccagagccctgagcctggaagaagaggagaccctgacacagcccctccttctgagcggcccctggaggacctgcggctgcggctggaccacctgggctgggtggcccggggcaccggcagcggggaggacagcagcaccagcagcagcacccccctggaggatgaggagccccaggagcccaaccggctggagactggagaggccggggaggagctggacctgcggctgcggctggcccagcccagcagccctgaggtgctgaccccccagctgagccctggcagcggcaccccccaggccggcacccccagccccagccgcagccgggacagcaacagcggccctgaggagcccctgctggaggaggaggagaagcagtggggccccctggagcgggagcctgtgcggggccagtgcctggacagcacagaccagctggagttcaccgtggagccccggctgctgggcacagccatggagtggctgaagaccagcctgctgctggccgtgtacaagacagtgcccatcctggagctgagcccccccctgtggacagccatcggctgggtgcagaggggccccaccccacccacccctgtgctgcgggtgctgctgaagtgggccaagagccccaggagcagcggcgtgcccagcctgagcctgggcgctgacatgggcagcaaggtggccgacctgctgtactggaaggacaccaggaccagcggcgtggtgttcaccggcctgatggtgtccctgctgtgcctgctgcacttcagcatcgtgtctgtggccgcccacctggccctgctgctgctgtgtggcaccatcagcctgcgggtgtacaggaaggtgctgcaggccgtgcacagaggagatggagccaaccccttccaggcctacctggatgtggacctgaccctgacccgggagcagacagagcggctgagccaccagatcaccagccgggtggtgtctgctgccacccagctgcggcacttcttcctggtggaggacctggtggacagcctgaagctggccctgctcttctacatcctgacctttgtgggcgccatcttcaacggcctgaccctgctgatcctgggcgtcatcggcctcttcaccatccccctgctgtaccggcagcaccaggcccagattgaccagtatgtgggcctggtgaccaaccagctgagccacatcaaggccaagatccgggccaagatccctggcactggagccctggccagcgctgctgctgctgtgtctggcagcaaggccaaggccgagtag

SEQ ID NO: 167622 - DNA, 1419 bp, synthetic construct
  misc_feature 1..1419: note = Description of Artificial Sequence: Synthetic coding sequence
  source 1..1419: mol_type = other DNA
atgggccaggtgctgcctgtgtttgcccactgcaaggaggcccccagcacagccagcagcaccccagacagcacagaaggaggaaatgatgacagcgacttccgggagctgcacacagcccgggagttcagcgaggaggatgaggaggagaccaccagccaggactggggcaccccccgggagctgaccttctcctacatcgcctttgatggagtggtgggcagcggcggccggcgggacagcacagcccggcggccccggccccagggccgctctgtgtctgagccccgggaccagcacccccagcccagcctgggggacagcctggagagcatccccagcctgagccagagccctgagcctggaagaagaggagaccctgacacagcccctccttctgagcggcccctggaggacctgcggctgcggctggaccacctgggctgggtggcccggggcaccggcagcggggaggacagcagcaccagcagcagcacccccctggaggatgaggagccccaggagcccaaccggctggagactggagaggccggggaggagctggacctgcggctgcggctggcccagcccagcagccctgaggtgctgaccccccagctgagccctggcagcggcaccccccaggccggcacccccagccccagccgcagccgggacagcaacagcggccctgaggagcccctgctggaggaggaggagaagcagtggggccccctggagcgggagcctgtgcggggccagtgcctggacagcacagaccagctggagttcaccgtggagccccggctgctggtggccgacctgctgtactggaaggacaccaggaccagcggcgtggtgttcaccggcctgatggtgtccctgctgtgcctgctgcacttcagcatcgtgtctgtggccgcccacctggccctgctgctgctgtgtggcaccatcagcctgcgggtgtacaggaaggtgctgcaggccgtgcacagaggagatggagccaaccccttccaggcctacctggatgtggacctgaccctgacccgggagcagacagagcggctgagccaccagatcaccagccgggtggtgtctgctgccacccagctgcggcacttcttcctggtggaggacctggtggacagcctgaagctggccctgctcttctacatcctgacctttgtgggcgccatcttcaacggcctgaccctgctgatcctgggcgtgattggcctcttcaccatccccctgctgtaccggcagcaccaggcccagattgaccagtatgtgggcctggtgaccaaccagctgagccacatcaaggccaagatccgggccaagatccctggcaccggggccctggccagcgctgctgctgctgtgtctggcagcaaggccaaggccgagtag

SEQ ID NO: 167623 - DNA, 618 bp, synthetic construct
  misc_feature 1..618: note = Description of Artificial Sequence: Synthetic coding sequence
  source 1..618: mol_type = other DNA
atgggcagcaaggtggccgacctgctgtactggaaggacaccaggaccagcggcgtggtgttcaccggcctgatggtgtccctgctgtgcctgctgcacttcagcatcgtgtctgtggccgcccacctggccctgctgctgctgtgtggcaccatcagcctgcgggtgtacaggaaggtgctgcaggccgtgcacagaggagatggagccaaccccttccaggcctacctggatgtggacctgaccctgacccgggagcagacagagcggctgagccaccagatcaccagccgggtggtgtctgctgccacccagctgcggcacttcttcctggtggaggacctggtggacagcctgaagctggccctgctcttctacatcctgacctttgtgggcgccatcttcaacggcctgaccctgctgatcctgggcgtcatcggcctcttcaccatccccctgctgtaccggcagcaccaggcccagattgaccagtatgtgggcctggtgaccaaccagctgagccacatcaaggccaagatccgggccaagatccctggcactggagccctggccagcgctgctgctgctgtgtctggcagcaaggccaaggccgagtag

SEQ ID NO: 167624 - DNA, 3042 bp, synthetic construct
  misc_feature 1..3042: note = Description of Artificial Sequence: Synthetic coding sequence
  source 1..3042: mol_type = other DNA
atggccgagcccagcgctgccacccagagccacagcatcagcagcagcagctttggagctgagcccagcgcccctgggggcggcggcagccctggggcctgcccagccctgggcaccaagagctgcagcagcagctgtgccgagggcctgagcagcctgtgcagtgatgagcccagcagcgagatcatgaccagcagcttcctgagcagcagcgagatccacaacacaggcctgaccatcctgcacggggagaagagccacgtgctgggcagccagcccatcctggccaaggagggcaaggaccacctggacctgctggacatgaagaagatggagaagccccagggcaccagcaacaacgtgtctgacagctctgtgtccctggccgccggcgtgcactgtgaccggcccagcatcccagccagcttccctgagcacccagccttcctgagcaagaagattggccaggtggaggagcagattgacaaggagaccaagaaccccaatggagtgagcagccgggaggccaagacagccctggatgctgatgaccgcttcaccctgctgacagcccagaagccacccacagagtacagcaaggtggagggcatctacacctacagcctgagccccagcaaggtgtctggagatgatgtgattgagaaggacagccctgagagcccctttgaagtcatcatcgacaaggccgcctttgacaaggagttcaaggacagctacaaggagagcacagatgactttggctcctggagcgtgcacacagacaaggagagcagcgaggacatcagcgagaccaatgacaagctgttccccctgaggaacaaggaggccggccgctaccccatgtctgccctgctgagccggcagttcagccacaccaatgctgccctggaggaggtgagccgctgtgtgaatgacatgcacaacttcaccaatgagatcctgacctgggacctggtgccccaggtgaagcagcagacagacaagagcagtgactgcatcaccaagaccaccggcctggacatgtctgagtacaacagcgagatccctgtggtgaacctgaagaccagcacccaccagaagacccctgtgtgcagcattgatggcagcacccccatcaccaagagcactggagactgggccgaggccagcctgcagcaggagaatgccatcaccgggaagcctgtgcctgacagcctgaacagcaccaaggagttcagcatcaagggcgtgcagggcaacatgcagaagcaggatgacaccctggccgagctgcccggcagccccccagagaagtgtgacagcctgggcagcggcgtggccaccgtgaaggtggtgctgcctgatgaccacctgaaggatgagatggactggcagagcagcgccctgggggagatcacagaagctgacagcagcggggagagtgatgacacagtgattgaggacatcacagctgacaccagctttgagaacaacaagatccaggccgagaagcctgtgtccatccccagcgctgtggtgaagacaggagagcgggagatcaaggagatccccagctgtgagcgggaggagaagaccagcaagaactttgaggagctggtgtctgattctgagctgcaccaggaccagcctgacatcctgggccgcagccctgccagcgaggccgcctgcagcaaggtgcctgacaccaacgtgtccctggaggatgtgtctgaggtggcccctgagaagcccatcaccacagagaaccccaagctgcccagcacagtgagccccaacgtgttcaatgaaacagagttcagcctgaatgtgaccaccagcgcctacctggagagcctgcacggcaagaatgtgaagcacattgatgacagcagccctgaggacctgattgctgccttcacagagacccgggacaagggcatcgtggacagcgagagaaatgccttcaaggccatcagcgagaagatgacagacttcaagaccaccccacctgtggaggtgctgcatgaaaatgaaagtggcggcagcgagatcaaggacatcggcagcaagtacagcgagcagagcaaggagaccaatggaagtgagcccctgggcgtcttccccacccagggcacccctgtggccagcctggacctggagcaggagcagctgaccatcaaggccctgaaggagctgggggagcggcaggtggagaagagcaccagcgcccagagagatgctgagctgcccagcgaggaggtgctgaagcagaccttcacctttgcccctgagagctggccccagaggagctatgacatcctggagagaaatgtgaagaatggaagtgacctgggcatcagccagaagcccatcaccatccgggagaccaccagggtggatgctgtgagcagcctgagcaagacagagctggtgaagaagcacgtgctggcccggctgctgacagacttctctgtgcatgacctgatcttctggagagatgtgaagaagacaggctttgtgtttggcaccaccctcatcatgctgctgagcctggccgccttcagcgtcatctctgtggtgtcctacctgatcctggccctgctgtctgtgaccatctccttccgcatctacaagagcgtcatccaggccgtgcagaagtctgaggagggccaccccttcaaggcctacctggatgtggacatcaccctgagcagcgaggccttccacaactacatgaatgctgccatggtgcacatcaacagagccctgaagctgatcatccgcctcttcctggtggaggacctggtggacagcctgaagctggccgtgttcatgtggctgatgacctacgtgggcgctgtgttcaacggcatcaccctgctgatcctggccgagctgctgatcttctctgtgcccatcgtgtatgagaagtacaagacccagattgaccactacgtgggcatcgcccgggaccagaccaagagcatcgtggagaagatccaggccaagctgcccggcatcgccaagaagaaggccgagtag

SEQ ID NO: 167625 - DNA, 726 bp, synthetic construct
  misc_feature 1..726: note = Description of Artificial Sequence: Synthetic coding sequence
  source 1..726: mol_type = other DNA
atggccgagcccagcgctgccacccagagccacagcatcagcagcagcagctttggagctgagcccagcgcccctgggggcggcggcagccctggggcctgcccagccctgggcaccaagagctgcagcagcagctgtgctgtgcatgacctgatcttctggagagatgtgaagaagacaggctttgtgtttggcaccaccctcatcatgctgctgagcctggccgccttcagcgtcatctctgtggtgtcctacctgatcctggccctgctgtctgtgaccatctccttccgcatctacaagagcgtcatccaggccgtgcagaagtctgaggagggccaccccttcaaggcctacctggatgtggacatcaccctgagcagcgaggccttccacaactacatgaatgctgccatggtgcacatcaacagagccctgaagctgatcatccgcctcttcctggtggaggacctggtggacagcctgaagctggccgtgttcatgtggctgatgacctacgtgggcgctgtgttcaacggcatcaccctgctgatcctggccgagctgctgatcttctctgtgcccatcgtgtatgagaagtacaaggaccccagcaagaccccctggaaccggcagaagaagggccgcatcagcacctggaagccagagatgcagcagctgctgaagcaccacctgattgtcatcaccagcctgctggtgctgtag

SEQ ID NO: 167626 - DNA, 645 bp, synthetic construct
  misc_feature 1..645: note = Description of Artificial Sequence: Synthetic coding sequence
  source 1..645: mol_type = other DNA
atggccgagcccagcgctgccacccagagccacagcatcagcagcagcagctttggagctgagcccagcgcccctgggggcggcggcagccctggggcctgcccagccctgggcaccaagagctgcagcagcagctgtgctgtgcatgacctgatcttctggagagatgtgaagaagacaggctttgtgtttggcaccaccctcatcatgctgctgagcctggccgccttcagcgtcatctctgtggtgtcctacctgatcctggccctgctgtctgtgaccatctccttccgcatctacaagagcgtcatccaggccgtgcagaagtctgaggagggccaccccttcaagcccaggctcatcaccatgctggccagccctgagatccggcccagccagctgctgaagaggagcaagcagaacagcctggagagccccaagaagaggcagaacaagtacatggagaccagaaatgccaccgtgaccaagacccccttcaacagctacaacgtggtgacctgcaccatgaaggagaacacccagtgccagctggagcccgccttccaggccttcttcctgatctggtgcttcctgcccagcttccccttcaacccccagtaccaggcccagaagctgatggactag

SEQ ID NO: 167627 - DNA, 768 bp, synthetic construct
  misc_feature 1..768: note = Description of Artificial Sequence: Synthetic coding sequence
  source 1..768: mol_type = other DNA
atggccgagcccagcgctgccacccagagccacagcatcagcagcagcagctttggagctgagcccagcgcccctgggggcggcggcagccctggggcctgcccagccctgggcaccaagagctgcagcagcagctgtgccgacagctttgtgagcagcagcagcagccagcctgtgtccctcttcagcaccagccaggtgcatgacctgatcttctggagagatgtgaagaagacaggctttgtgtttggcaccaccctcatcatgctgctgagcctggccgccttcagcgtcatctctgtggtgtcctacctgatcctggccctgctgtctgtgaccatctccttccgcatctacaagagcgtcatccaggccgtgcagaagtctgaggagggccaccccttcaaggcctacctggatgtggacatcaccctgagcagcgaggccttccacaactacatgaatgctgccatggtgcacatcaacagagccctgaagctgatcatccgcctcttcctggtggaggacctggtggacagcctgaagctggccgtgttcatgtggctgatgacctacgtgggcgctgtgttcaacggcatcaccctgctgatcctggccgagctgctgatcttctctgtgcccatcgtgtatgagaagtacaagacccagattgaccactacgtgggcatcgcccgggaccagaccaagagcatcgtggagaagatccaggccaagctgcccggcatcgccaagaagaaggccgagtag

SEQ ID NO: 167628 - DNA, 3099 bp, synthetic construct
  misc_feature 1..3099: note = Description of Artificial Sequence: Synthetic coding sequence
  source 1..3099: mol_type = other DNA
atggccgagcccagcgctgccacccagagccacagcatcagcagcagcagctttggagctgagcccagcgcccctgggggcggcggcagccctggggcctgcccagccctgggcaccaagagctgcagcagcagctgtgccgacagctttgtgagcagcagcagcagccagcctgtgtccctcttcagcaccagccaggagggcctgagcagcctgtgcagtgatgagcccagcagcgagatcatgaccagcagcttcctgagcagcagcgagatccacaacacaggcctgaccatcctgcatggagagaagagccacgtgctgggcagccagcccatcctggccaaggagggcaaggaccacctggacctgctggacatgaagaagatggagaagccccagggcaccagcaacaacgtgtctgacagctctgtgtccctggccgccggcgtgcactgtgaccggcccagcatcccagccagcttccctgagcacccagccttcctgagcaagaagattggccaggtggaggagcagattgacaaggagaccaagaaccccaacggggtgagcagccgggaggccaagacagccctggatgctgatgaccgcttcaccctgctgacagcccagaagcccccaacagagtacagcaaggtggagggcatctacacctacagcctgagccccagcaaggtgtctggagatgatgtgattgagaaggacagccctgagagcccctttgaggtgatcatcgacaaggccgcctttgacaaggagttcaaggacagctacaaggagagcacagatgactttggctcctggagcgtgcacacagacaaggagagcagcgaggacatcagcgagaccaatgacaagctgttccccctgaggaacaaggaggccggccgctaccccatgtctgccctgctgagccggcagttcagccacaccaatgctgccctggaggaggtgagccgctgtgtgaatgacatgcacaacttcaccaatgagatcctgacctgggacctggtgccccaggtgaagcagcagacagacaagagcagtgactgcatcaccaagaccaccggcctggacatgtctgagtacaacagcgagatccctgtggtgaacctgaagaccagcacccaccagaagacccctgtgtgcagcattgatggcagcacccccatcaccaagagcactggagactgggccgaggccagcctgcagcaggagaatgccatcaccgggaagcctgtgcctgacagcctgaacagcaccaaggagttcagcatcaagggcgtgcagggcaacatgcagaagcaggatgacaccctggccgagctgcccggcagccccccagagaagtgtgacagcctgggcagcggcgtggccaccgtgaaggtggtgctgcctgatgaccacctgaaggatgagatggactggcagagcagcgccctgggggagatcacagaggccgacagcagtggagagagtgatgacacagtgattgaggacatcacagctgacaccagctttgagaacaacaagatccaggccgagaagcctgtgtccatccccagcgctgtggtgaagacaggagagcgggagatcaaggagatccccagctgtgagcgggaggagaagaccagcaagaactttgaggagctggtgtctgacagcgagctgcaccaggaccagcctgacatcctgggccgcagccctgccagcgaggccgcctgcagcaaggtgcctgacaccaacgtgtccctggaggatgtgtctgaggtggcccctgagaagcccatcaccacagagaaccccaagctgcccagcacagtgagccccaacgtgttcaatgaaacagagttcagcctgaatgtgaccaccagcgcctacctggagagcctgcacggcaagaatgtgaagcacattgatgacagcagccctgaggacctgattgctgccttcacagagacccgggacaagggcatcgtggacagcgagagaaatgccttcaaggccatcagcgagaagatgacagacttcaagaccaccccacctgtggaggtgctgcatgaaaatgaaagtggcggcagcgagatcaaggacatcggcagcaagtacagcgagcagagcaaggagaccaacggcagcgagcccctgggcgtcttccccacccagggcacccctgtggccagcctggacctggagcaggagcagctgaccatcaaggccctgaaggagctgggggagcggcaggtggagaagagcaccagcgcccagagagatgctgagctgcccagcgaggaggtgctgaagcagaccttcacctttgcccctgagagctggccccagaggagctatgacatcctggagagaaatgtgaagaatggaagtgacctgggcatcagccagaagcccatcaccatccgggagaccaccagggtggatgctgtgagcagcctgagcaagacagagctggtgaagaagcacgtgctggcccggctgctgacagacttctctgtgcatgacctgatcttctggagagatgtgaagaagacaggctttgtgtttggcaccaccctcatcatgctgctgagcctggccgccttcagcgtcatctctgtggtgtcctacctgatcctggccctgctgtctgtgaccatctccttccgcatctacaagagcgtcatccaggccgtgcagaagtctgaggagggccaccccttcaaggcctacctggatgtggacatcaccctgagcagcgaggccttccacaactacatgaatgctgccatggtgcacatcaacagagccctgaagctgatcatccgcctcttcctggtggaggacctggtggacagcctgaagctggccgtgttcatgtggctgatgacctacgtgggcgctgtgttcaacggcatcaccctgctgatcctggccgagctgctgatcttctctgtgcccatcgtgtatgagaagtacaagacccagattgaccactacgtgggcatcgcccgggaccagaccaagagcatcgtggagaagatccaggccaagctgcccggcatcgccaagaagaaggccgagtag

SEQ ID NO: 167629 - DNA, 372 bp, synthetic construct
  misc_feature 1..372: note = Description of Artificial Sequence: Synthetic coding sequence
  source 1..372: mol_type = other DNA
atggccgagcccagcgctgccacccagagccacagcatcagcagcagcagctttggagctgagcccagcgcccctgggggcggcggcagccctggggcctgcccagccctgggcaccaagagctgcagcagcagctgtgctgtgcatgacctgatcttctggagagatgtgaagaagacaggctttgtgtttggcaccaccctcatcatgctgctgagcctggccgccttcagcgtcatctctgtggtgtcctacctgatcctggccctgctgtctgtgaccatctccttccgcatctacaagagcgtcatccaggccgtgcagaagtctgaggagggccaccccttcaactggctgagcagctgtggctag

SEQ ID NO: 167630 - DNA, 711 bp, synthetic construct
  misc_feature 1..711: note = Description of Artificial Sequence: Synthetic coding sequence
  source 1..711: mol_type = other DNA
atggccgagcccagcgctgccacccagagccacagcatcagcagcagcagctttggagctgagcccagcgcccctgggggcggcggcagccctggggcctgcccagccctgggcaccaagagctgcagcagcagctgtgctgtgcatgacctgatcttctggagagatgtgaagaagacaggctttgtgtttggcaccaccctcatcatgctgctgagcctggccgccttcagcgtcatctctgtggtgtcctacctgatcctggccctgctgtctgtgaccatctccttccgcatctacaagagcgtcatccaggccgtgcagaagtctgaggagggccaccccttcaaggcctacctggatgtggacatcaccctgagcagcgaggccttccacaactacatgaatgctgccatggtgcacatcaacagagccctgaagctgatcatccgcctcttcctggtggaggacctggtggacagcctgaagctggccgtgttcatgtggctgatgacctacgtgggcgctgtgttcaacggcatcaccctgctgatcctggccgagctgctgatcttctctgtgcccatcgtgtatgagaagtacaagacccagattgaccactacgtgggcatcgcccgggaccagaccaagagcatcgtggagaagatccaggccaagctgcccggcatcgccaagaagaaggccgagtag

SEQ ID NO: 167631 - DNA, 1122 bp, synthetic construct
  misc_feature 1..1122: note = Description of Artificial Sequence: Synthetic coding sequence
  source 1..1122: mol_type = other DNA
atggaggacctggaccagagccccctggtgagcagcagtgacagccccccccggccccagcctgccttcaagtaccagtttgtgcgggagccagaagatgaggaggaggaggaggaggaggaggaggaggatgaagatgaggacctggaggagctggaggtgctggagaggaagccagctgctggcctgtctgctgcccctgtgcccacagccccagctgctggggcccccctgatggactttggaaatgactttgtgcccccagccccccggggccccctgcctgctgcccctcctgtggcccctgagcggcagcccagctgggaccccagccctgtgagcagcacagtgcctgcccccagccccctgtctgctgctgctgtgagccccagcaagctgcctgaagatgatgagcccccagcccggcccccacctcctcctccagcctctgtgagcccccaggccgagcctgtgtggaccccaccagccccagccccagctgccccacccagcaccccagctgcccccaagaggcggggcagcagcggctctgtggtggtggacctgctgtactggagggacatcaagaagacaggagtggtgtttggagccagcctcttcctgctgctgagcctgactgtgttcagcatcgtgtctgtgacagcctacatcgccctggccctgctgtctgtgaccatctccttccgcatctacaagggcgtcatccaggccatccagaagagtgatgagggccaccccttccgggcctacctggagagcgaggtggccatcagcgaggagctggtgcagaagtacagcaacagcgccctgggccacgtgaactgcaccatcaaggagctgcggcggctcttcctggtggatgacctggtggacagcctgaagtttgctgtgctgatgtgggtgttcacctacgtgggcgccctcttcaacggcctgaccctgctgatcctggccctgatcagcctcttctctgtgcctgtgatctatgaaagacaccaggcccagattgaccactacctgggcctggccaacaagaatgtgaaggatgccatggccaagatccaggccaagatccctggcctgaagaggaaggccgagtag

SEQ ID NO: 167632 - DNA, 3579 bp, synthetic construct
  misc_feature 1..3579: note = Description of Artificial Sequence: Synthetic coding sequence
  source 1..3579: mol_type = other DNA
atggaggacctggaccagagccccctggtgagcagcagtgacagccccccccggccccagcctgccttcaagtaccagtttgtgcgggagccagaagatgaggaggaggaggaggaggaggaggaggaggatgaagatgaggacctggaggagctggaggtgctggagaggaagccagctgctggcctgtctgctgcccctgtgcccacagccccagctgctggggcccccctgatggactttggaaatgactttgtgcccccagccccccggggccccctgcctgctgcccctcctgtggcccctgagcggcagcccagctgggaccccagccctgtgagcagcacagtgcctgcccccagccccctgtctgctgctgctgtgagccccagcaagctgcctgaagatgatgagcccccagcccggcccccacctcctcctccagcctctgtgagcccccaggccgagcctgtgtggaccccaccagccccagccccagctgccccacccagcaccccagctgcccccaagaggcggggcagcagcggctctgtggatgagaccctgtttgccctgcctgctgccagcgagcccgtcatccgcagcagcgctgagaacatggacctgaaggagcagcccggcaacaccatctctgctggccaggaggacttccccagcgtgctgctggagacagctgccagcctgcccagcctgagccccctgtctgctgccagcttcaaggagcacgagtacctgggcaacctgagcacagtgctgcccacagagggcaccctgcaggagaatgtgtctgaggccagcaaggaggtgtctgagaaggccaagaccctgctgattgaccgggacctgacagagttcagcgagctggagtacagcgagatgggcagcagcttctctgtgagccccaaggccgagagcgctgtgattgtggccaacccccgggaggagatcatcgtgaagaacaaggatgaggaggagaagctggtgagcaacaacatcctgcacaaccagcaggagctgcccacagccctgaccaagctggtgaaggaggatgaggtggtgagcagcgagaaggccaaggacagcttcaatgagaagagggtggccgtggaggcccccatgagggaggagtatgctgacttcaagccctttgagcgggtgtgggaggtgaaggacagcaaagaagattctgacatgctggccgccggcggcaagattgagagcaacctggagagcaaggtggacaagaagtgctttgctgacagcctggagcagaccaaccacgagaaggacagcgagagcagcaatgatgacaccagcttccccagcaccccagagggcatcaaggacagaagtggggcctacatcacctgtgcccccttcaacccagctgccacagagagcatcgccaccaacatcttccccctgctgggggaccccaccagcgagaacaagacagatgagaagaagattgaggagaagaaggcccagatcgtgacagagaagaacaccagcaccaagaccagcaaccccttcctggtggccgcccaggacagcgagacagattatgtgaccacagacaacctgaccaaggtgacagaggaggtggtggccaacatgcctgagggcctgaccccagacctggtgcaggaggcctgtgagagcgagctgaatgaggtgacaggcaccaagatcgcctatgagaccaagatggacctggtgcagaccagcgaggtgatgcaggagagcctgtacccagctgcccagctgtgccccagctttgaggagagcgaggccacccccagccctgtgctgcctgacatcgtgatggaggcccccctgaacagcgctgtgcccagcgctggggccagcgtcatccagcccagcagcagccccctggaggccagctctgtgaactatgagagcatcaagcatgagcctgagaaccccccaccctatgaggaggccatgtctgtgtccctgaagaaggtgtctggcatcaaggaggagatcaaggagcctgagaacatcaatgctgccctgcaggagacagaggccccctacatcagcatcgcctgtgacctgatcaaggagaccaagctgtctgctgagcccgccccagacttcagtgactacagcgagatggccaaggtggagcagcctgtgcctgaccacagcgagctggtggaggacagcagcccagacagcgagcctgtggacctcttcagtgatgacagcatcccagatgtgccccagaagcaggatgaaacagtgatgctggtgaaggagagcctgacagagaccagctttgagagcatgattgaatatgagaacaaggagaagctgagcgccctgcccccagagggcggcaagccctacctggagagcttcaagctgagcctggacaacaccaaggacaccctgctgcctgatgaggtgtccaccctgagcaagaaggagaagatccccctgcagatggaggagctgagcacagctgtgtacagcaatgatgacctcttcatcagcaaggaggcccagatccgggagacagagaccttcagtgacagcagccccatcgagatcattgatgagttccccaccctcatcagcagcaagacagacagcttcagcaagctggcccgggagtacacagacctggaggtgagccacaagtctgagatcgccaatgccccagatggagctggcagcctgccctgcacagagctgccccatgacctgagcctgaagaacatccagcccaaggtggaggagaagatctccttcagtgatgacttcagcaagaatggaagtgccaccagcaaggtgctgctgctgcccccagatgtgtctgccctggccacccaggccgagattgagagcatcgtgaagcccaaggtgctggtgaaggaggccgagaagaagctgcccagcgacacagagaaggaggacaggagccccagcgccatcttctctgctgagctgagcaagacctctgtggtggacctgctgtactggagggacatcaagaagacaggagtggtgtttggagccagcctcttcctgctgctgagcctgaccgtcttcagcatcgtgtctgtgacagcctacatcgccctggccctgctgtctgtgaccatctccttccgcatctacaagggcgtcatccaggccatccagaagagtgatgagggccaccccttccgggcctacctggagagcgaggtggccatcagcgaggagctggtgcagaagtacagcaacagcgccctgggccacgtgaactgcaccatcaaggagctgcggcggctcttcctggtggatgacctggtggacagcctgaagtttgctgtgctgatgtgggtgttcacctacgtgggcgccctcttcaacggcctgaccctgctgatcctggccctgatcagcctcttctctgtgcctgtgatctatgagcggcaccaggcccagattgaccactacctgggcctggccaacaagaatgtgaaggatgccatggccaagatccaggccaagatccctggcctgaagaggaaggccgagtag

SEQ ID NO: 167633 - DNA, 2883 bp, synthetic construct
  misc_feature 1..2883: note = Description of Artificial Sequence: Synthetic coding sequence
  source 1..2883: mol_type = other DNA
atggaggacctggaccagagccccctggtgagcagcagtgacagccccccccggccccagcctgccttcaagtaccagtttgtgcgggagccagaagatgaggaggaggaggaggaggaggaggaggaggatgaagatgaggacctggaggagctggaggtgctggagaggaagcagttcagcgagctggagtacagcgagatgggcagcagcttctctgtgagccccaaggccgagagcgctgtgattgtggccaacccccgggaggagatcatcgtgaagaacaaggatgaggaggagaagctggtgagcaacaacatcctgcacaaccagcaggagctgcccacagccctgaccaagctggtgaaggaggatgaggtggtgagcagcgagaaggccaaggacagcttcaatgagaagagggtggccgtggaggcccccatgagggaggagtatgctgacttcaagccctttgagcgggtgtgggaggtgaaggacagcaaagaagattctgacatgctggccgccggcggcaagattgagagcaacctggagagcaaggtggacaagaagtgctttgctgacagcctggagcagaccaaccacgagaaggacagcgagagcagcaatgatgacaccagcttccccagcaccccagagggcatcaaggacagaagtggggcctacatcacctgtgcccccttcaacccagctgccacagagagcatcgccaccaacatcttccccctgctgggggaccccaccagcgagaacaagacagatgagaagaagattgaggagaagaaggcccagatcgtgacagagaagaacaccagcaccaagaccagcaaccccttcctggtggccgcccaggacagcgagacagattatgtgaccacagacaacctgaccaaggtgacagaggaggtggtggccaacatgcctgagggcctgaccccagacctggtgcaggaggcctgtgagagcgagctgaatgaggtgacaggcaccaagatcgcctatgagaccaagatggacctggtgcagaccagcgaggtgatgcaggagagcctgtacccagctgcccagctgtgccccagctttgaggagagcgaggccacccccagccctgtgctgcctgacatcgtgatggaggcccccctgaacagcgctgtgcccagcgctggggccagcgtcatccagcccagcagcagccccctggaggccagctctgtgaactatgagagcatcaagcatgagcctgagaaccccccaccctatgaggaggccatgtctgtgtccctgaagaaggtgtctggcatcaaggaggagatcaaggagcctgagaacatcaatgctgccctgcaggagacagaggccccctacatcagcatcgcctgtgacctgatcaaggagaccaagctgtctgctgagcccgccccagacttcagtgactacagcgagatggccaaggtggagcagcctgtgcctgaccacagcgagctggtggaggacagcagcccagacagcgagcctgtggacctcttcagtgatgacagcatcccagatgtgccccagaagcaggatgaaacagtgatgctggtgaaggagagcctgacagagaccagctttgagagcatgattgaatatgagaacaaggagaagctgagcgccctgcccccagagggcggcaagccctacctggagagcttcaagctgagcctggacaacaccaaggacaccctgctgcctgatgaggtgtccaccctgagcaagaaggagaagatccccctgcagatggaggagctgagcacagctgtgtacagcaatgatgacctcttcatcagcaaggaggcccagatccgggagacagagaccttcagtgacagcagccccatcgagatcattgatgagttccccaccctcatcagcagcaagacagacagcttcagcaagctggcccgggagtacacagacctggaggtgagccacaagtctgagatcgccaatgccccagatggagctggcagcctgccctgcacagagctgccccatgacctgagcctgaagaacatccagcccaaggtggaggagaagatctccttcagtgatgacttcagcaagaatggaagtgccaccagcaaggtgctgctgctgcccccagatgtgtctgccctggccacccaggccgagattgagagcatcgtgaagcccaaggtgctggtgaaggaggccgagaagaagctgcccagcgacacagagaaggaggacaggagccccagcgccatcttctctgctgagctgagcaagacctctgtggtggacctgctgtactggagggacatcaagaagacaggagtggtgtttggagccagcctcttcctgctgctgagcctgaccgtcttcagcatcgtgtctgtgacagcctacatcgccctggccctgctgtctgtgaccatctccttccgcatctacaagggcgtcatccaggccatccagaagagtgatgagggccaccccttccgggcctacctggagagcgaggtggccatcagcgaggagctggtgcagaagtacagcaacagcgccctgggccacgtgaactgcaccatcaaggagctgcggcggctcttcctggtggatgacctggtggacagcctgaagtttgctgtgctgatgtgggtgttcacctacgtgggcgccctcttcaacggcctgaccctgctgatcctggccctgatcagcctcttctctgtgcctgtgatctatgagcggcaccaggcccagattgaccactacctgggcctggccaacaagaatgtgaaggatgccatggccaagatccaggccaagatccctggcctgaagaggaaggccgagtag

SEQ ID NO: 167634 - DNA, 2961 bp, synthetic construct
  misc_feature 1..2961: note = Description of Artificial Sequence: Synthetic coding sequence
  source 1..2961: mol_type = other DNA
atggacctgaaggagcagcccggcaacaccatctctgctggccaggaggacttccccagcgtgctgctggagacagctgccagcctgcccagcctgagccccctgtctgctgccagcttcaaggagcacgagtacctgggcaacctgagcacagtgctgcccacagagggcaccctgcaggagaatgtgtctgaggccagcaaggaggtgtctgagaaggccaagaccctgctgattgaccgggacctgacagagttcagcgagctggagtacagcgagatgggcagcagcttctctgtgagccccaaggccgagagcgctgtgattgtggccaacccccgggaggagatcatcgtgaagaacaaggatgaggaggagaagctggtgagcaacaacatcctgcacaaccagcaggagctgcccacagccctgaccaagctggtgaaggaggatgaggtggtgagcagcgagaaggccaaggacagcttcaatgagaagagggtggccgtggaggcccccatgagggaggagtatgctgacttcaagccctttgagcgggtgtgggaggtgaaggacagcaaagaagattctgacatgctggccgccggcggcaagattgagagcaacctggagagcaaggtggacaagaagtgctttgctgacagcctggagcagaccaaccacgagaaggacagcgagagcagcaatgatgacaccagcttccccagcaccccagagggcatcaaggacagaagtggggcctacatcacctgtgcccccttcaacccagctgccacagagagcatcgccaccaacatcttccccctgctgggggaccccaccagcgagaacaagacagatgagaagaagattgaggagaagaaggcccagatcgtgacagagaagaacaccagcaccaagaccagcaaccccttcctggtggccgcccaggacagcgagacagattatgtgaccacagacaacctgaccaaggtgacagaggaggtggtggccaacatgcctgagggcctgaccccagacctggtgcaggaggcctgtgagagcgagctgaatgaggtgacaggcaccaagatcgcctatgagaccaagatggacctggtgcagaccagcgaggtgatgcaggagagcctgtacccagctgcccagctgtgccccagctttgaggagagcgaggccacccccagccctgtgctgcctgacatcgtgatggaggcccccctgaacagcgctgtgcccagcgctggggccagcgtcatccagcccagcagcagccccctggaggccagctctgtgaactatgagagcatcaagcatgagcctgagaaccccccaccctatgaggaggccatgtctgtgtccctgaagaaggtgtctggcatcaaggaggagatcaaggagcctgagaacatcaatgctgccctgcaggagacagaggccccctacatcagcatcgcctgtgacctgatcaaggagaccaagctgtctgctgagcccgccccagacttcagtgactacagcgagatggccaaggtggagcagcctgtgcctgaccacagcgagctggtggaggacagcagcccagacagcgagcctgtggacctcttcagtgatgacagcatcccagatgtgccccagaagcaggatgaaacagtgatgctggtgaaggagagcctgacagagaccagctttgagagcatgattgaatatgagaacaaggagaagctgagcgccctgcccccagagggcggcaagccctacctggagagcttcaagctgagcctggacaacaccaaggacaccctgctgcctgatgaggtgtccaccctgagcaagaaggagaagatccccctgcagatggaggagctgagcacagctgtgtacagcaatgatgacctcttcatcagcaaggaggcccagatccgggagacagagaccttcagtgacagcagccccatcgagatcattgatgagttccccaccctcatcagcagcaagacagacagcttcagcaagctggcccgggagtacacagacctggaggtgagccacaagtctgagatcgccaatgccccagatggagctggcagcctgccctgcacagagctgccccatgacctgagcctgaagaacatccagcccaaggtggaggagaagatctccttcagtgatgacttcagcaagaatggaagtgccaccagcaaggtgctgctgctgcccccagatgtgtctgccctggccacccaggccgagattgagagcatcgtgaagcccaaggtgctggtgaaggaggccgagaagaagctgcccagcgacacagagaaggaggacaggagccccagcgccatcttctctgctgagctgagcaagacctctgtggtggacctgctgtactggagggacatcaagaagacaggagtggtgtttggagccagcctcttcctgctgctgagcctgaccgtcttcagcatcgtgtctgtgacagcctacatcgccctggccctgctgtctgtgaccatctccttccgcatctacaagggcgtcatccaggccatccagaagagtgatgagggccaccccttccgggcctacctggagagcgaggtggccatcagcgaggagctggtgcagaagtacagcaacagcgccctgggccacgtgaactgcaccatcaaggagctgcggcggctcttcctggtggatgacctggtggacagcctgaagtttgctgtgctgatgtgggtgttcacctacgtgggcgccctcttcaacggcctgaccctgctgatcctggccctgatcagcctcttctctgtgcctgtgatctatgagcggcaccaggcccagattgaccactacctgggcctggccaacaagaatgtgaaggatgccatggccaagatccaggccaagatccctggcctgaagaggaaggccgagtag

SEQ ID NO: 167635 - DNA, 1179 bp, synthetic construct
  misc_feature 1..1179: note = Description of Artificial Sequence: Synthetic coding sequence
  source 1..1179: mol_type = other DNA
atggaggacctggaccagagccccctggtgagcagcagtgacagccccccccggccccagcctgccttcaagtaccagtttgtgcgggagccagaagatgaggaggaggaggaggaggaggaggaggaggatgaagatgaggacctggaggagctggaggtgctggagaggaagccagctgctggcctgtctgctgcccctgtgcccacagccccagctgctggggcccccctgatggactttggaaatgactttgtgcccccagccccccggggccccctgcctgctgcccctcctgtggcccctgagcggcagcccagctgggaccccagccctgtgagcagcacagtgcctgcccccagccccctgtctgctgctgctgtgagccccagcaagctgcctgaagatgatgagcccccagcccggcccccacctcctcctccagcctctgtgagcccccaggccgagcctgtgtggaccccaccagccccagccccagctgccccacccagcaccccagctgcccccaagaggcggggcagcagcggctctgtggatgagaccctgtttgccctgcctgctgccagcgagcccgtcatccgcagcagcgctgtggtggacctgctgtactggagggacatcaagaagacaggagtggtgtttggagccagcctcttcctgctgctgagcctgaccgtcttcagcatcgtgtctgtgacagcctacatcgccctggccctgctgtctgtgaccatctccttccgcatctacaagggcgtcatccaggccatccagaagagtgatgagggccaccccttccgggcctacctggagagcgaggtggccatcagcgaggagctggtgcagaagtacagcaacagcgccctgggccacgtgaactgcaccatcaaggagctgcggcggctcttcctggtggatgacctggtggacagcctgaagtttgctgtgctgatgtgggtgttcacctacgtgggcgccctcttcaacggcctgaccctgctgatcctggccctgatcagcctcttctctgtgcctgtgatctatgagcggcaccaggcccagattgaccactacctgggcctggccaacaagaatgtgaaggatgccatggccaagatccaggccaagatccctggcctgaagaggaaggccgagtag

SEQ ID NO: 167636 - DNA, 600 bp, synthetic construct
  misc_feature 1..600: note = Description of Artificial Sequence: Synthetic coding sequence
  source 1..600: mol_type = other DNA
atggatggccagaagaagaactggaaggacaaggtggtggacctgctgtactggagggacatcaagaagacaggagtggtgtttggagccagcctcttcctgctgctgagcctgactgtgttcagcatcgtgtctgtgacagcctacatcgccctggccctgctgtctgtgaccatctccttccgcatctacaagggcgtcatccaggccatccagaagagtgatgagggccaccccttccgggcctacctggagagcgaggtggccatcagcgaggagctggtgcagaagtacagcaacagcgccctgggccacgtgaactgcaccatcaaggagctgcggcggctcttcctggtggatgacctggtggacagcctgaagtttgctgtgctgatgtgggtgttcacctacgtgggcgccctcttcaacggcctgaccctgctgatcctggccctgatcagcctcttctctgtgcctgtgatctatgaaagacaccaggcccagattgaccactacctgggcctggccaacaagaatgtgaaggatgccatggccaagatccaggccaagatccctggcctgaagaggaaggccgagtag

SEQ ID NO: 167637 - DNA, 2961 bp, synthetic construct; identical to SEQ ID NO: 167634
  misc_feature 1..2961: note = Description of Artificial Sequence: Synthetic coding sequence
  source 1..2961: mol_type = other DNA

SEQ ID NO: 167638 - DNA, 1038 bp, synthetic construct
  misc_feature 1..1038: note = Description of Artificial Sequence: Synthetic coding sequence
  source 1..1038: mol_type = other DNA
atggagccagaagatgaggaggaggaggaggaggaggaggaggaggatgaagatgaggacctggaggagctggaggtgctggagaggaagccagctgctggcctgtctgctgcccctgtgcccacagccccagctgctggggcccccctgatggactttggaaatgactttgtgcccccagccccccggggccccctgcctgctgcccctcctgtggcccctgagcggcagcccagctgggaccccagccctgtgagcagcacagtgcctgcccccagccccctgtctgctgctgctgtgagccccagcaagctgcctgaagatgatgagcccccagcccggcccccacctcctcctccagcctctgtgagcccccaggccgagcctgtgtggaccccaccagccccagccccagctgccccacccagcaccccagctgcccccaagaggcggggcagcagcggctctgtggtggtggacctgctgtactggagggacatcaagaagacaggagtggtgtttggagccagcctcttcctgctgctgagcctgactgtgttcagcatcgtgtctgtgacagcctacatcgccctggccctgctgtctgtgaccatctccttccgcatctacaagggcgtcatccaggccatccagaagagtgatgagggccaccccttccgggcctacctggagagcgaggtggccatcagcgaggagctggtgcagaagtacagcaacagcgccctgggccacgtgaactgcaccatcaaggagctgcggcggctcttcctggtggatgacctggtggacagcctgaagtttgctgtgctgatgtgggtgttcacctacgtgggcgccctcttcaacggcctgaccctgctgatcctggccctgatcagcctcttctctgtgcctgtgatctatgaaagacaccaggcccagattgaccactacctgggcctggccaacaagaatgtgaaggatgccatggccaagatccaggccaagatccctggcctgaagaggaaggccgagtag

SEQ ID NO: 167639 - DNA, 2961 bp, synthetic construct; identical to SEQ ID NO: 167634
  misc_feature 1..2961: note = Description of Artificial Sequence: Synthetic coding sequence
  source 1..2961: mol_type = other DNA

SEQ ID NO: 167640 - DNA, 2961 bp, synthetic construct; identical to SEQ ID NO: 167634
  misc_feature 1..2961: note = Description of Artificial Sequence: Synthetic coding sequence
  source 1..2961: mol_type = other DNA

SEQ ID NO: 167641 - DNA, 276 bp, synthetic construct
  misc_feature 1..276: note = Description of Artificial Sequence: Synthetic coding sequence
  source 1..276: mol_type = other DNA
atggacctgaaggagcagcccggcaacaccatctctgctggccaggaggacttccccagcgtgctgctggagacagctgccagcctgcccagcctgagccccctgtctgctgccagcttcaaggagcacgagtacctgggcaacctgagcacagtgctgcccacagagggcaccctgcaggagaatgtgtctgaggccagcaaggaggtgtctgagaaggccaagaccctgctgattgaccgggacctgacagagttcagcgagctggagtactag

SEQ ID NO: 167642 - DNA, 1191 bp, synthetic construct
  misc_feature 1..1191: note = Description of Artificial Sequence: Synthetic coding sequence
  source 1..1191: mol_type = other DNA
atggagttcctgaagacctgtgtgctgcggagaaatgcctgcacagctgtgtgcttctggaggagcaaggtggtgcagaagcccagcgtgcggcgcatcagcaccaccagccccaggagcacagtgatgcctgcctgggtgattgacaagtatggcaagaatgaggtgctgcgcttcacccagaacatgatgatgcccatcatccactacccaaatgaggtgattgtgaaggtgcacgccgcctctgtgaaccccattgatgtgaacatgaggagcggctacggggccacagccctgaacatgaagagggaccccctgcacgtgaagatcaagggggaggagttccccctgaccctgggcagagatgtgtctggagtggtgatggagtgtggcctggatgtgaagtacttcaagccaggagatgaggtgtgggccgctgtgcccccctggaagcagggcaccctgtctgaatttgtggtggtgtctggaaatgaggtgagccacaagcccaagagcctgacccacacccaggccgccagcctgccctacgtggccctgacagcctggagcgccatcaacaaggtgggcggcctgaatgacaagaactgcaccgggaagagggtgctgatcctgggcgccagcggcggcgtgggcacctttgccatccaggtgatgaaggcctgggatgcccacgtgacagctgtgtgcagccaggatgccagcgagctggtgaggaagctgggcgcagatgatgtgattgactacaagagcggctctgtggaggagcagctgaagagcctgaagccctttgacttcatcctggacaacgtgggcggcagcacagagacctgggccccagacttcctgaagaagtggagcggggccacctacgtgaccctggtgacccccttcctgctgaacatggaccggctgggcattgctgatggcatgctgcagacaggagtgacagtgggcagcaaggccctgaagcacttctggaagggcgtgcactaccgctgggccttcttcatggccagcggcccctgcctggatgacattgctgagctggtggatgctgggaagatccggcctgtgattgagcagaccttccccttcagcaaggtgcctgaggccttcctgaaggtggagcggggccacgcccggggcaagacagtcatcaacgtggtgtag

SEQ ID NO: 167643 - DNA, 681 bp, synthetic construct
  misc_feature 1..681: note = Description of Artificial Sequence: Synthetic coding sequence
  source 1..681: mol_type = other DNA
atggagttcctgaagacctgtgtgctgcggagaaatgcctgcacagctgtgtgcttctggaggagcaaggtggtgcagaagcccagcgtgcggcgcatcagcaccaccagccccaggagcacagtgatgcctgcctgggtgattgacaagtatggcaagaatgaggtgctgcgcttcacccagaacatgatgatgcccatcatccactacccaaatgaggtgattgtgaaggtgcacgccgcctctgtgaaccccattgatgtgaacatgaggagcggctacggggccacagccctgaacatgaagagggaccccctgcacgtgaagatcaagggggaggagttccccctgaccctgggcagagatgtgtctggagtggtgatggagtgtggcctggatgtgaagtacttcaagccaggagatgaggtgtgggccgctgtgcccccctggaagcagggcaccctgtctgaatttgtggtggtgtctggaaatgaggtgagccacaagcccaagagcctgacccacacccaggccgccagcctgccctacgtggccctgacagcctggagcgccatcaacaaggtgggcggcctgaatgacaagaactgcaccgggaagaggatcagcggcaaggagagcatcatcgccggccacttctcctggcctgtggcccacgtgtag

SEQ ID NO: 167644 - DNA, 1422 bp, synthetic construct
  misc_feature 1..1422: note = Description of Artificial Sequence: Synthetic coding sequence
  source 1..1422: mol_type = other DNA
atgaagagggccagcgctgggggcagccggctgctggcctgggtgctgtggctgcaggcctggcaggtggccgccccctgccctggggcctgtgtgtgctacaatgagcccaaggtgaccaccagctgcccccagcagggcctgcaggccgtgcctgtgggcatcccagctgccagccagaggatcttcctgcacggcaaccgcatcagccacgtgcctgctgccagcttccgggcctgcaggaacctgaccatcctgtggctgcacagcaatgtgctggccagaattgatgctgctgccttcaccggcctggccctgctggagcagctggacctgagtgacaatgcccagctgcggtctgtggaccctgccaccttccacggcctgggccgcctgcacaccctgcacctggacagatgtggcctgcaggagctgggccctggcctcttccggggcctggccgccctgcagtacctgtacctgcaggacaatgccctgcaggccctgcctgatgacaccttccgggacctgggcaacctgacccacctgttcctgcacggcaaccgcatcagctctgtgcctgagcgggccttccggggcctgcacagcctggaccggctgctgctgcaccagaacagagtggcccacgtgcacccccacgccttccgggacctgggccgcctgatgaccctgtacctgtttgccaacaacctgagcgccctgcccacagaggccctggcccccctgcgggccctgcagtacctgcggctgaatgacaacccctgggtgtgtgactgccgggcccggcccctgtgggcctggctgcagaagttccggggcagcagcagcgaggtgccctgcagcctgccccagaggctggccggccgggacctgaagaggctggccgccaatgacctgcagggctgtgctgtggccaccggcccctaccaccccatctggacaggccgggccacagatgaggagcccctgggcctgcccaagtgctgccagccagatgctgctgacaaggcctctgtgctggagcccggccggcctgccagcgctggaaatgccctgaagggccgggtgcccccaggggacagccccccaggaaatggcagcggccccaggcacatcaatgacagccccttcggcaccctgcccggcagcgctgagccccccctgacagctgtgcggcctgagggcagcgagcccccaggcttccccaccagcggccccaggagaagacctggctgcagcaggaagaacagaaccaggagccactgccgcctgggccaggccggcagcggcggcggcggcactggagacagcgagggcagcggggccctgcccagcctgacctgcagcctgacccccctgggcctggccctggtgctgtggacagtgctgggcccctgctag

SEQ ID NO: 167645 - DNA, 1041 bp, synthetic construct
  misc_feature 1..1041: note = Description of Artificial Sequence: Synthetic coding sequence
  source 1..1041: mol_type = other DNA
atgcacctgcccggctgtgccccagccatggctgatggcagcttcagcctggccggccacctgctgcggagccctgggggcagcaccagccggctgcacagcattgaggccatcctgggcttcaccaaggatgatggcatcctgggcaccttccctgctgagcggggggcccggggggccaaggagcgggaccggcggctgggcgcccggcctgcctgccccaaggcccctgaggagggcagcgagcccagccccccaccagccccagccccagccccagaatatgaggccccccggccctactgccccaaggagcccggggaggcccggcccagccctggcctgcctgtgggccctgccactggagaggccaagctgtctgaggaggagcagcccaagaagaagcacagaagaaacagaaccaccttcaccacctaccagctgcacgagctggagcgggcctttgagaagagccactacccagatgtgtacagccgggaggagctggccggcaaggtgaacctgcctgaggtgcgggtgcaggtgtggttccagaacagaagagccaagtggaggcggcaggagaagctggaggtgtcctccatgaagctgcaggacagccccctgctgtccttcagccgcagcccccccagcgccaccctgagccccctgggcgccggccctggcagcggcggcggccctgctggaggagccctgcccctggagagctggctgggcccccccctgcccggcggcggggccacagccctgcagagcctgcccggctttggacctccagcccagagcctgcctgccagctacaccccacctcctcctcctccacccttcctgaacagcccccccctgggccctggcctgcagcccctggcccctcctccacccagctacccctgtggccctggctttggagacaagttccccctggatgaggccgaccccaggaacagcagcattgctgccctgcggctgaaggccaaggagcacatccaggccatcggcaagccctggcaggccctgtag

SEQ ID NO: 167646 - DNA, 225 bp, synthetic construct
  misc_feature 1..225: note = Description of Artificial Sequence: Synthetic coding sequence
  source 1..225: mol_type = other DNA
atgcacctgcccggctgtgccccagccatggctgatggcagcttcagcctggccggccacctgctgcggagccctgggggcagcaccagccggctgcacagcattgaggccatcctgggcttcaccaaggatgatggcatcctgggcaccttccctgctgagcggggggcccggggggccaaggagcgggaccggcggctgggcgcccggcctgcctgcccctag

SEQ ID NO: 167647 - DNA, 588 bp, synthetic construct
  misc_feature 1..588: note = Description of Artificial Sequence: Synthetic coding sequence
  source 1..588: mol_type = other DNA
atgagcctcatctcctggctgcgctggaatgaggcccccagccggctgagcaccaggagccctgctgagatggtgctggagaccctgatgatggagctgaccggccagatgagggaggccgagcggcagcagcgggagaggagcaatgctgtgaggaaggtgtgcaccggggtggactacagctggctggccagcacccccaggagcacctatgacctgagccccatcgagcggctgcagctggaggatgtgtgtgtgaagatccaccccagctactgcggccctgccatcctgcgcttccggcagctgctggccgagcaggagcctgaggtgcaggaggtgtcccagctgttccgctctgtgctgcaggaggtgctggagaggatgaagcaggaggaggaggcccacaagctgacccggcagtggagcctgcggccccggggcagcctggccaccttcaagacccgggcccgcatcagcccctttgccagtgacatccgcaccatcagtgaagatgtggagcgggacaccccaccacccctgcgctcctggagcatgcctgagttccgggcccccaaggctgactag

SEQ ID NO: 167648 - DNA, 762 bp, synthetic construct
  misc_feature 1..762: note = Description of Artificial Sequence: Synthetic coding sequence
  source 1..762: mol_type = other DNA
atggccgagaccagcgccctgcccactggatttggagagctggaggtgctggccgtgggcatggtgctgctggtggaggccctgagcggcctgagcctgaacaccctgaccatcttctccttctgcaagaccccagagctgcggaccccctgccacctgctggtgctgagcctggccctggccgacagcggcatcagcctgaatgccctggtggccgccaccagcagcctgctgcggcgctggccctacggcagtgatggctgccaggcccacggcttccagggctttgtgacagccctggccagcatctgcagcagcgctgccatcgcctggggccgctaccaccactactgcaccaggagccagctggcctggaacagcgctgtgtccctggtgctgtttgtgtggctgagcagcgccttctgggccgccctgcccctgctgggctggggccactatgactatgagcccctgggcacctgctgcaccctggactacagcaagggggacaggaacttcaccagcttcctgttcaccatgtccttcttcaactttgccatgcccctcttcatcaccatcaccagctacagcctgatggagcagaagctgggcaagagcggccacctgcaggtgcctgccctgattgccaagatggtgcccaccatcaatgccatcaactatgccctgggcaatgagatggtgtgccggggcatctggcagtgcctgagcccccagaagcgggagaaggacaggaccaagtag

SEQ ID NO: 167649 - DNA, 888 bp, synthetic construct
  misc_feature 1..888: note = Description of Artificial Sequence: Synthetic coding sequence
  source 1..888: mol_type = other DNA
atggccgagaccagcgccctgcccactggatttggagagctggaggtgctggccgtgggcatggtgctgctggtggaggccctgagcggcctgagcctgaacaccctgaccatcttctccttctgcaagaccccagagctgcggaccccctgccacctgctggtgctgagcctggccctggccgacagcggcatcagcctgaatgccctggtggccgccaccagcagcctgctgcgggtgagccaccggcgctggccctacggcagtgatggctgccaggcccacggcttccagggctttgtgacagccctggccagcatctgcagcagcgctgccatcgcctggggccgctaccaccactactgcaccaggagccagctggcctggaacagcgctgtgtccctggtgctgtttgtgtggctgagcagcgccttctgggccgccctgcccctgctgggctggggccactatgactatgagcccctgggcacctgctgcaccctggactacagcaagggggacaggaacttcaccagcttcctgttcaccatgtccttcttcaactttgccatgcccctcttcatcaccatcaccagctacagcctgatggagcagaagctgggcaagagcggccacctgcaggtgaacaccaccctgcctgcccggaccctgctgctgggctggggcccctatgccatcctgtacctgtatgctgtgattgctgatgtgaccagcatcagccccaagctgcagatggtgcctgccctgattgccaagatggtgcccaccatcaatgccatcaactatgccctgggcaatgagatggtgtgccggggcatctggcagtgcctgagcccccagaagcgggagaaggacaggaccaagtag

SEQ ID NO: 167650 - DNA, 363 bp, synthetic construct
  misc_feature 1..363: note = Description of Artificial Sequence: Synthetic coding sequence
  source 1..363: mol_type = other DNA
atggccgagaccagcgccctgcccactggatttggagagctggaggtgctggccgtgggcatggtgctgctggtggaggaccccggggctgctgacagcctgcccccaactggagctgagctgggcagctgtggccagtgggaccagccagaatgtccccgctgcagccacatccagcccagcccctgcctgccccaggccctggccctgcggctgggccgcctgcccggcagccggctgcccggcctgtgtgacagcgtgggccagcacctgcagcagtgcagccacaggatgggcgccctgagccccctgctgcacccccccaagtgctgccacaggagccaccactttgagtggaggtag

SEQ ID NO: 167651 - DNA, 1056 bp, synthetic construct
  misc_feature 1..1056: note = Description of Artificial Sequence: Synthetic coding sequence
  source 1..1056: mol_type = other DNA
atggcccctgtgctgcccctggtgctgcccctgcagccccgcatccggctggcccagggcctgtggctgctgtcctggctgctggccctggccggcggcgtcatcctgctgtgcagcggccacctgctggtgcagctgcggcacctgggcaccttcctggcccccagctgccagtttcctgtgctgccccaggccgccctggccgccggggctgtggccctgggcaccggcctggtgggcgtgggcgccagccgggccagcctgaatgctgccctgtacccaccctggaggggcgtgctgggccccctgctggtggccggcacagctgggggcggcggcctgctggtggtgggcctgggcctggccctggccctgcccggcagcctggatgaggccctggaggagggcctggtgacagccctggcccactacaaggacacagaggtgcccggccactgccaggccaagaggctggtggatgagctgcagctgcgctaccactgctgcggccgccacggctacaaggactggtttggagtgcagtgggtgagcagccgctacctggaccccggggacagagatgtggccgaccgcatccagagcaatgtggagggcctgtacctgacagatggagtgcccttcagctgctgcaacccccacagcccccggccctgcctgcagaaccggctgagtgacagctatgcccaccccctgtttgacccccggcagcccaaccagaacctgtgggcccagggctgccacgaggtgctgctggagcacctgcaggacctggccggcaccctgggctccatgctggccgtgaccttcctgctgcaggccctggtgctgctgggcctgcgctacctgcagacagccctggagggcctgggcggcgtgattgatgctggaggagagacccagggctacctgttccccagcggcctgaaggacatgctgaagacagcctggctgcagggcggcgtggcctgcaggcctgcccctgaggaggcccctcctggagaggccccacccaaggaggacctgtctgaggcctag

SEQ ID NO: 167652 - DNA, 1602 bp, synthetic construct
  misc_feature 1..1602: note = Description of Artificial Sequence: Synthetic coding sequence
  source 1..1602: mol_type = other DNA
atgagcatccaggtggagcaccctgctgggggctacaagaagctgtttgagaccgtggaggagctgagcagccccctgacagcccacgtgacaggccgcatccccctgtggctgaccggcagcctgctgcgctgtggccctggcctgtttgaggtgggcagcgagcccttctaccacctgtttgatggccaggccctgctgcacaagtttgacttcaaggagggccacgtgacctaccaccggcgcttcatcagaacagatgcctacgtgcgggccatgacagagaagagaattgtcatcacagaatttggcacctgtgccttcccagacccctgcaagaacatcttcagccgcttcttctcctacttccggggcgtggaggtgacagacaatgccctggtgaatgtgtaccctgtgggggaggactactatgcctgcacagagaccaacttcatcaccaagatcaaccctgagaccctggagaccatcaagcaggtggacctgtgcaactacgtgtctgtgaatggagccacagcccacccccacattgaaaatgatggcaccgtgtacaacatcggcaactgcttcggcaagaacttcagcatcgcctacaacatcgtgaagatcccccccctgcaggccgacaaggaggaccccatcagcaagtcagaaattgtggtgcagttcccctgcagcgaccgcttcaagcccagctatgtgcacagctttggcctgacccccaactacatcgtgtttgtggagacccctgtgaagatcaacctcttcaagttcctgagctcctggagcctgtggggcgccaactacatggactgctttgagagcaatgagaccatgggcgtgtggctgcacatcgctgacaagaagaggaagaagtacctgaacaacaagtaccgcaccagccccttcaacctcttccaccacatcaacacctatgaagataatggcttcctgattgtggacctgtgctgctggaagggctttgaatttgtgtacaactacctgtacctggccaacctgcgggagaactgggaggaggtgaagaagaatgccaggaaggccccccagcctgaggtgcggcgctacgtgctgcccctgaacatcgacaaggctgacaccgggaagaacctggtgaccctgcccaacaccacagccacagccatcctgtgcagtgatgagaccatctggctggagcctgaggtgctcttcagcggcccccggcaggcctttgagttcccccagatcaactaccagaagtactgcggcaagccctacacctacgcctacggcctgggcctgaaccactttgtgcctgaccggctgtgcaagctgaatgtgaagaccaaggagacctgggtgtggcaggagccagacagctaccccagcgagcccatctttgtgagccacccagatgccctggaggaggatgatggagtggtgctgtctgtggtggtgtccccaggagctggccagaagccagcctacctgctgatcctgaatgccaaggacctgtctgaggtggcccgggcagaggtggagatcaacatccctgtgaccttccacggcctcttcaagaagagctag

SEQ ID NO: 167653 - DNA, 954 bp, synthetic construct
  misc_feature 1..954: note = Description of Artificial Sequence: Synthetic coding sequence
  source 1..954: mol_type = other DNA
atgtctgagggcgtgggcaccttcaggatggtgcctgaggaggagcaggagctgcgggcccagctggagcagctgaccaccaaggaccacggccctgtgtttggcccctgcagccagctgcccaggcacaccctgcagaaggccaaggatgagctgaatgaaagagaggagacccgggaggaggccgtgcgggagctgcaggagatggtgcaggcccaggccgccagcggggaggagctggccgtggccgtggccgagcgggtgcaggagaaggacagcggcttcttcctgcgcttcatccgggccaggaagttcaacgtgggccgggcctatgagctgctgcggggctacgtgaacttccggctgcagtacccagagctgtttgacagcctgagccctgaggccgtgcgctgcaccatcgaggccggctacccaggagtgctgagcagccgggacaagtatggccgggtggtgatgctgttcaacatcgagaactggcagagccaggagatcacctttgatgagatcctgcaggcctactgcttcatcctggagaagctgctggagaatgaggagacccagatcaatggcttctgcatcatcgagaacttcaagggcttcaccatgcagcaggccgccagcctgcggaccagtgacctgaggaagatggtggacatgctgcaggacagcttccctgcccgcttcaaggccatccacttcatccaccagccctggtacttcaccaccacctacaacgtggtgaagcccttcctgaagagcaagctgctggagcgggtgtttgtgcatggagatgacctgagcggcttctaccaggagattgatgagaacatcctgcccagcgactttggaggcaccctgcccaagtatgatggcaaggctgtggccgagcagctgtttggcccccaggcccaggctgaaaatacagccttctag

SEQ ID NO: 167654 - DNA, 807 bp, synthetic construct
  misc_feature 1..807: note = Description of Artificial Sequence: Synthetic coding sequence
  source 1..807: mol_type = other DNA
atggccgagctggacatcggccagcactgccaggtggagcactgccggcagagggacttcctgccctttgtgtgtgatgactgcagcggcatcttctgcctggagcacaggagccgggagagccacggctgcccagaggtgaccgtcatcaatgaaaggctgaagacagaccagcacaccagctacccctgcagcttcaaggactgtgccgagcgggagctggtggccgtcatctgcccctactgtgagaagaacttctgcctgcggcaccgccaccagagcgaccatgaatgtgagaagctggagatccccaagcccaggatggccgccacccagaagctggtgaaggacatcatcgacagcaagacaggagaaacagccagcaagcgctggaagggggccaagaacagcgagacagctgccaaggtggccctgatgaagctgaagatgcacgcagatggagacaagagcctgccccagacagagcgcatctacttccaggtgttcctgcccaagggcagcaaggagaagagcaagcccatgttcttctgccaccgctggagcatcggcaaggccatcgactttgctgccagcctggcccggctgaagaatgacaacaacaagttcaccgccaagaagctgcggctgtgccacatcaccagcggggaggccctgcccctggaccacaccctggagacctggatcgccaaggaggactgccccctgtacaacggcggcaacatcatcctggagtacctgaatgatgaggagcagttctgcaagaatgtggagagctacctggagtag

SEQ ID NO: 167655 - DNA, 2751 bp, synthetic construct
  misc_feature 1..2751: note = Description of Artificial Sequence: Synthetic coding sequence
  source 1..2751: mol_type = other DNA
atgcagaggcctgtggtgaagctgtatgccacagatggccggcgggtgcccagcctgcaggccgtcatcctgagcagcggggctgtggtggccgccggccgggagcccttcaagccaggcaactatgacatccagaagtacctgctgcctgcccggctgcccggcatcagccagagggtgtaccccaagggaaatgccaagtctgagagcaggaagagcagcaactggaaggtgttcatcatcaccagtgacctgcctgatgctggcaccagcagccagatctacatcatcctgtatggccagcacaggagcagcgcccccatctacctgtatggaacagatggagcccgcttccaggtgggccacgaggacatcttcaccatcaccgtgggggacattggagccctcttcaagatcagaattggccacaccaacagcggcagcagccccagctggcactgcaaggagatccagctgcacaacatgaacagcggcaagcagttctacgtgcctgtgcagcgctggctggcccgggaccaggaggatggagagatctgccgggagttccccctgctgagcaagggccagcctgtgctgcctgtgaccatctatgaggtgaatgtggccaccggggagctgtggaatgccggcaccgtggccaacgtgtacatcagcatccatggagagaagggggacaccggcagccggcagctgttccgcagcaagagcagcttcaacttcctgcggggccagacagacaccttcttcctggaggccgtgcacctgggggacctgtgcaagatcgtcatcggccatgatggcctgggccctggaaatggctggttcctggatgatgtggtgatcaaggaccccaccaccaactatgaatatgccttcttctgccaccgctggctggaccagggagaagatgactgcaagatcgtgcgggagctgtatgcccgggacaacagcatcttcagcgcccggcagaagctggagctgaagaggaaggagacctggacagctgagagctggaagttcaccaagggcaacaccctgcagttctacaacaagctgaccggcggctttgtgcggctgcacccagatggcaccgtggatgccatcggggagaagacagacaagtatggagtgtttgatgtgatcttcaacaagaggaacatctgcatcttccagagccatgagatgaggcacctgagcctggccctggacaatggaattgtgacaggcatggtgtctggagaggccaccacagagctgcgggtgctgtaccagcccaacagatgtgccctgctggagagcgccctggtgcccggccacacagtggtgtttgacagacatggcaagattgctgatgccagcagcgctggctacgccaacctgagcaaggagtttgtgatctttgtgaagggcgtcttcctgaacagcgctgtggtgctgctggccaccagcctgtgccaggccctgtgcctgcagccagatggcagctgcaccggggtgggcagccagagcgagaagagctactggaaggtgcacaagatcagcagcggcatctgcatgtttgaatctgtgaagaatgcccagatgtacctgcgcatcaaggatggccgctgtgatggcactggaactggagatgtggactgccacttcaagatcaagaagaacctgaagaatgccagcatcagcctggagagcaccaagagccctggcctgtttgtgggcctgcagagtgatggccaggccaagcccatgatctacaccaaggatgaaaatgtgtgcttctacccccaggtgatccagtttggccgggagaaccccatgggcatgtctgccacccccagccaggaggaggagaagatccacgagagcaagaagcagaagaagatccccccagagagcgaggcccggagccccctgcccagcagcacagccaaggagatccgccacttccagagcagcgagaccctgctgtctgaagatgagtggaaggtgctggtgctgaccggcaacacaggcacccaggccaacgtgaccctgtgggtgtatggagacaagggcgtgacaggccccatcagcctgaggaaggacagcagcgagcagctgttcctgcccggccatgaagatgagttccaggtggagatcagaaatactggaaacatctacaagatcagaattggacatgatggcaccagcgagcagcctgagtggaacctgcagagggtgaccatgcagcacatgaagagcaagaagatcctggactttgctgccaacgtgtggctgagccgcatccaggctgatggagatgtggtgtgtgagctgcctgtggtgaagggcggccaggccatcttccccctggtgcgctaccaggtggatgtgtacacaggccagctgaagcacgccgagacagagagcgaggtgttcctgtgcctgtttggagagcggggggacagcggcctgcggcagctgtacaagagcaacatgcaggtgaagttccagaggggccagattgacaagttccaggtggccgctgtgtccctgggcaagctgcagaaggtgctgctgcgctgtgaggccagtgacaagagccagtactggtactgtgagcaggtgattgtgcgggagcccggcaccaccagcgagagcatcttcacctgccagcgctggctgcccttcatgagccagggcatcatccacagcgagattgagctgtacctgcagggcgaggactactag

SEQ ID NO: 167656 - DNA, 7203 bp, synthetic construct
  misc_feature 1..7203: note = Description of Artificial Sequence: Synthetic coding sequence
  source 1..7203: mol_type = other DNA
atgaacagcaccccaagaaatgcccaggcccccagccaccgggagtgcttcctgcccagcgtggcccggacccccagcgtgaccaaggtgaccccagccaagaagatcaccttcctgaagagaggagaccccaggtttgctggggtgcggctggccgtgcaccagagggccttcaagaccttcagcgccctgatggatgagctgagccagagggtgcccctgagctttggagtgcgctctgtgaccaccccccggggcctgcacagcctgagcgccctggagcagctggaggatggcggctgctacctgtgcagcgacaagaagccacccaagacccccagcggccctggccggccccaggagaggaaccccacagcccagcagctgagagatgtggagggccagcgggaggcccctggcaccagcagcagcaggaagagcctgaagaccccccggcgcatcctgctgatcaagaacatggacccccggctgcagcagacagtggtgctgagccacaggaacaccaggaacctggccgccttcctgggcaaggccagtgacctgctgcgcttccctgtgaagcagctgtacaccaccagcggcaagaaggtggacagcctgcaggccctgctgcacagccccagcgtgctggtgtgtgccggccacgaggccttccgcaccccagccatgaagaatgcccggcgctctgaggccgagaccctgagcggcctgaccagcaggaacaagaatggctcctggggccccaagaccaagcccagcgtcatccacagccgcagccccccaggcagcaccccccggctgcctgagcggcccggccccagcaacccccctgtgggccctgcccctggccgccacccccaggacaccccagcccagagcggccccctggtggccggagatgacatgaagaagaaggtgaggatgaatgaagatggcagcctgtctgtggagatgaaggtgcgcttccacctggtgggggaggacaccctgctgtggagcaggaggatgggccgggccagcgccctgacagctgccagcggagaagatcctgtgctgggggaggtggaccccctgtgctgcgtgtgggagggctacccctggggcttcagcgagcccggggtgtggggcccccggccctgccgggtgggctgccgggaggtgtttggccggggcggccagcccggccccaagtatgagatctggaccaaccccctgcacgccagccagggcgagcgggtggccgccaggaagcgctggggcctggcccagcacgtgcgctgcagcggcctgtggggccacggcacagctggccgggagcgctgcagccaggacagcgccagccctgccagcagcacaggcctgcctgagggcagcgagcctgagagcagctgctgccccaggaccccagaagatggagtggacagcgccagccccagcgcccagattggagctgagaggaaggccggcggcagcctgggagaagatcctggcctgtgcattgatggagctggcctgggcggccctgagcagggcggccgcctgaccccccgggcccggtctgaggagggcgccagcagtgacagcagcgccagcacaggcagccatgagggcagcagcgagtggggcggccggccccagggctgccctgggaaggcccgggcagagaccagccagcaggaggccagcgagggcggggaccctgccagccctgccctgagcctgagcagcctgcggagtgatgacctgcaggccgagacccagggccagggcacagagcaggccaccggggctgctgtgacccgggagcccctggtgctgggcctgagctgctcctgggacagcgagggcgccagcagcacccccagcacctgcaccagcagccagcagggccagaggaggcacaggagccgggccagcgccatgagcagccccagcagccctggcctgggccgggtggccccccggggccaccccaggcacagccactacaggaaggacacccacagccccctggacagctctgtgaccaagcaggtgcccaggcctcctgagaggagaagagcctgccaggacggctctgtgccccgctacagcggcagcagcagcagcaccaggacccaggccagcggcaacctgcggccccccagcagcggcagcctgcccagccaggacctgctgggcaccagcagcgccaccgtgaccccagctgtgcacagcgactttgtgtctggagtgagcccccacaatgcccccagcgctggctgggccggagatgctggcagcaggacctgcagccctgcccccatccccccccacaccagtgacagctgcagcaagtctggagctgccagcctgggggaggaggcccgggacaccccccagcccagcagccccctggtgctgcaggtgggccggcctgagcagggcgctgtgggcccccacaggagccactgctgcagccagcccggcacccagcctgcccaggaggcccagaggggccccagccctgaggcctcctggctgtgtggccgctactgccccaccccaccccggggccggccctgcccccagaggaggagcagcagctgtggcagcacaggcagcagccaccagagcacagcccggggccctgggggcagcccccaggagggcacccggcagcccggccccacccccagccctggccccaacagcggggccagcagaagaagcagcgccagccagggcgccggcagccggggcctgtctgaggagaagaccctgcggagcggcggcggcccccagggccaggaggaggccagcggcgtgagccccagcagcctgcccaggagcagccctgaggccgtggtgcgggagtggctggacaacatccctgaggagcccatcctgatgacctatgagctggctgatgagaccaccggggctgctgggggcggcctgcggggccctgaggtggaccctggagatgaccacagcctggagggcctgggggagcccgcccaggccggccagcagagcctggagggggaccccggccaggaccctgagcctgagggcgccctgctgggcagcagtgacaccggcccccagagcggggagggcgtgccccagggcgccgcccctgagggcgtgtctgaggccccagctgaggccggggctgaccgggaggccccagctggctgccgggtgtccctgcgggccctgcccggccgggtgtctgccagcacccagatcatgagggccctgatgggcagcaagcagggccggcccagctctgtgcctgaggtgtcccggcccatggcccggcggctgagctgcagcgctggggccctgatcacctgcctggccagcctgcagctgtttgaggaggacctgggcagccctgccagcaaggtgcgcttcaaggacagcccccgctaccaggagctgctgagcatcagcaaggacctgtggccaggctgtgatgtgggggaggaccagctggacagcggcctgtgggagctgacctggagccaggccctgcctgacctgggcagccacgccatgacagagaacttcacccccaccagcagcagtggagtggacatcagcagcggcagcggcggcagcggggagagctctgtgccctgtgccatggatggcaccctggtgacccagggcacagagctgcccctgaagaccagcaaccagaggccagacagcaggacctatgagagccctggggacctggagaaccagcagcagtgctgcttccccaccttcctgaatgcccgggcctgtgcctgtgccaccaatgaagatgaggccgagcgggacagcgaggagcagagggccagcagcaacctggagcagctggccgagaacacagtgcaggaggaggtgcagctggaggagaccaaggagggcacagaaggagagggcctgcaggaggaggccgtgcagctggaggagaccaagacagaggagggcctgcaggaggagggcgtgcagctggaggagaccaaggagacagaaggagagggccagcaggaggaggaggcccagctggaggagattgaggagaccggcggggagggcctgcaggaggagggcgtgcagctggaggaggtgaaggagggccctgagggcggcctgcagggcgaggccctggaggagggcctgaaggaggagggcctgcctgaggagggctctgtgcacggccaggagctgtctgaggccagcagcccagatggcaagggcagccaggaggatgatcctgtgcaggaggaggaggccggccgggccagcgccagcgctgagccctgcccagctgagggcacagaggagcccacagagccccccagccacctgtctgaaacagaccccagcgccagcgagcggcagagcggcagccagctggagcccggcctggagaagcccccaggggccaccatgatgggccaggagcacacccaggcccagcccacccagggcgctgctgagaggagcagctctgtggcctgcagcgctgccctggactgtgaccccatctgggtgtctgtgctgctgaagaagacagagaaggccttcctggcccacctggccagcgctgtggccgagctgcgggcccgctggggcctgcaggacaatgacctgctggaccagatggctgctgagctgcagcaggatgtggcccagaggctgcaggacagcaccaagcgggagctgcagaagctgcagggccgggccggccgcatggtgctggagcccccccgggaggccctgaccggggagctgctgctgcagacccagcagaggaggcaccggctgcggggcctgaggaacctgagcgccttcagcgagaggaccctgggcctgggccccctgtccttcaccctggaggatgagcccgccctgagcacagccctgggcagccagctgggggaggaggccgagggggaggagttctgcccctgtgaggcctgtgtgaggaagaaggtgagccccatgagccccaaggccaccatgggcgccacccggggccccatcaaggaggcctttgacctgcagcagatcctgcagaggaagagaggagagcacacagatggagaggccgctgaggtggcccctgggaagacccacacagaccccaccagcaccaggacagtgcagggcgctgagggcggcctgggccctggcctgagccagggccctggggtggatgaaggagaagatggagagggcagccagaggctgaacagagacaaggaccccaagctgggggaggccgagggagatgccatggcccaggagcgggagggcaagacccacaacagcgagaccagcgctggcagcgagctgggggaggccgagcaggagggggagggcatcagcgagcggggggagactggaggccagggcagcggccacgaggacaacctgcagggcgaggccgccgccggcggggaccaggaccccggccagagtgatggagctgagggcatcgaggcccctgaggccgagggggaggcccagcctgagagcgagggcgtggaggcccctgaggccgagggagatgcccaggaggccgagggggaggcccagcctgagagtgaagatgtggaggcccctgaggccgagggggaggcccagcctgagagtgaagatgtggagaccccagaggccgagtgggaggtgcagcctgagagcgagggcgctgaggcccctgaggccgagaaggaggcccagcctgagacagaatctgtggaggccctggagacagaaggagaagatgagcctgagagcgagggcgctgaggcccaggaggccgaggaggccgcccaggaggccgagggccagacccagcctgagagcgaggtgattgagagccaggaggccgaggaggaggcccagcctgagagtgaagatgtggaggccctggaggtggaggtggagacccaggaggccgagggggaggcccagcctgagagtgaagatgtggaggcccctgaggccgagggggagatgcaggaggccgaggaggaggcccagcctgagagtgatggagtggaggcccagcccaagtctgagggggaggaggcccaggaggtggagggggagacccagaagacagaaggagatgcccagcctgagagtgatggagtggaggcccctgaggccgaggaggaggcccaggaggccgagggggaggtgcaggaggccgagggggaggcccaccctgagagtgaagatgtggatgcccaggaggccgagggggaggcccagcctgagagcgagggcgtggaggcccctgaggccgagggggaggcccagaaggccgagggcatcgaggcccctgagacagaaggagaggcccagcctgagagcgagggcatcgaggcccctgaggccgagggggaggcccagcctgagagcgagggcgtggaggcccaggatgctgagggggaggcccagcctgagagcgagggcatcgaggcccaggaggccgaggaggaggcccagcctgagctggagggcgtggaggcccctgaggccgagggggaggcccagcctgagagcgagggcatcgaggcccctgaggccgagggggaggcccagcctgagctggagggcgtggaggcccctgaggccgaggaggaggcccagcctgagcctgagggcgtggagaccccagaggccgagggggaggcccagcctgagagcgagggggagacccagggcgagaagaagggcagcccccaggtgtccctgggagatggccagagcgaggaggccagcgagagcagcagccctgtgcctgaggaccggcccaccccaccacccagccctggaggagacaccccccaccagaggcctggcagccagacaggccccagcagcagccgggccagctcctggggcaactgctggcagaaggacagtgaaaatgaccacgtgctgggggacaccaggagcccagatgccaagagcacaggcacccctcatgctgagaggaaggccaccaggatgtacccagagagcagcaccagcgagcaggaggaggcccccctgggcagcaggaccccagagcagggcgccagcgagggctatgacctgcaggaggaccaggccctgggcagcctggcccccacagaggccgtgggccgggcagatggcttcggccaggatgacctggacttctag

SEQ ID NO: 167657 - DNA, 5019 bp, synthetic construct
  misc_feature 1..5019: note = Description of Artificial Sequence: Synthetic coding sequence
  source 1..5019: mol_type = other DNA
atgaaggtggacaggaccaagctgaagaagacccccacagaggccccagctgactgccgggccctgattgacaagctgaaggtgtgcaatgatgagcagctgctgctggagctgcagcagatcaagacctggaacatcggcaaatgtgagctgtaccactgggtggacctgctggacagatttgatggcatcctggctgatgctggccagacagtggagaacatgtcctggatgctggtgtgtgacaggcctgagcgggagcagctgaagatgctgctgctggccgtgctgaacttcaccgccctgctgattgagtacagcttcagccgccacctgtacagcagcattgagcacctgaccaccctgctggccagcagtgacatgcaggtggtgctggccgtgctgaacctgctgtatgtgttcagcaagaggagcaactacatcacccggctgggcagtgacaagaggacccccctgctgacccggctgcagcacctggccgagagctggggcggcaaggaaaatggatttggcctggccgagtgctgccgggacctgcacatgatgaagtacccacccagcgccaccaccctgcactttgagttctacgccgaccccggggctgaggtgaagattgagaagaggaccaccagcaacaccctgcactacatccacatcgagcagctggacaagatcagcgagagccccagcgagatcatggagagcctgaccaagatgtacagcatccccaaggacaagcagatgctgctcttcacccacatccggctggcccacggcttcagcaaccacaggaagaggctgcaggccgtgcaggcccggctgcacgccatcagcatcctggtgtacagcaatgccctgcaggagagcgccaacagcatcctgtacaacggcctcatcgaggagctggtggatgtgctgcagatcacagacaagcagctgatggagatcaaggccgccagcctgcggaccctgaccagcatcgtgcacctggagaggacccccaagctgagcagcatcatcgactgcaccggcacagccagctaccacggcttcctgcctgtgctggtgaggaactgcatccaggccatgattgaccccagcatggacccctacccccaccagtttgccacagccctcttctccttcctgtaccacctggccagctatgatgctggaggagaggccctggtgtcctgtggcatgatggaggccctgctgaaggtgatcaagttcctgggagatgagcaggaccagatcacctttgtgaccagggctgtgcgggtggtggacctgatcaccaacctggacatggccgccttccagagccacagcggcctgagcatcttcatctaccgcctggagcacgaggtggacctgtgcaggaaggagtgcccctttgtgatcaagcccaagatccagaggcccaacaccacccaggagggggaggagatggagacagacatggatggagtgcagtgcatcccccagagagctgccctgctgaagtccatgctgaacttcctgaagaaggccatccaggaccctgccttcagtgatggcatccgccacgtgatggatggcagcctgcccaccagcctgaagcacatcatcagcaatgctgagtactacggccccagcctcttcctgctggccacagaggtggtgacagtgtttgtgttccaggagcccagcctgctgagcagcctgcaggacaatggcctgacagatgtgatgctgcacgccctgctgatcaaggatgtgcctgccacccgggaggtgctgggcagcctgcccaacgtgttttctgccctgtgcctgaatgcccggggcctgcagagctttgtgcagtgccagccctttgagcggctcttcaaggtgctgctgagcccagactacctgcctgccatgagaagaagaagaagcagtgaccccctgggggacacagccagcaacctgggcagcgctgtggatgagctgatgaggcaccagcccaccctgaagacagatgccaccacagccatcatcaagctgctggaggagatctgcaacctgggccgggaccccaagtacatctgccagaagcccagcatccagaaggcagatggaacagccacagcccccccacccaggagcaaccacgccgctgaggaggccagcagtgaagatgaggaggaggaggaggtgcaggccatgcagagcttcaacagcacccagcagaatgaaacagagcccaaccagcaggtggtgggcacagaggagcgcatccccatccccctgatggactacatcctgaatgtgatgaagtttgtggagagcatcctgagcaacaacaccacagatgaccactgccaggagtttgtgaaccagaagggcctgctgcccctggtgaccatcctgggcctgcccaacctgcccatcgacttccccaccagcgctgcctgccaggccgtggccggcgtgtgcaagagcatcctgaccctgagccatgagcccaaggtgctgcaggagggcctgctgcagctggacagcatcctgagcagcctggagcccctgcaccggcccatcgagagccctgggggctctgtgctgctgcgggagctggcctgtgctggaaatgtggctgatgccaccctgagcgcccaggccacccccctgctgcacgccctgacagctgcccacgcctacatcatgatgtttgtgcacacctgccgggtgggccagagcgagatccgcagcatctctgtgaaccagtggggcagccagctgggcctgtctgtgctgagcaagctgagccagctgtactgcagcctggtgtgggagagcacagtgctgctgagcctgtgcacccccaacagcctgcccagcggctgtgaatttggccaggccgacatgcagaagctggtgcccaaggatgagaaggccggcaccacccagggcggcaagagaagtgatggagagcaggatggagctgctggctccatggatgccagcacccagggcctgctggagggcatcggcctggatggagacaccctggcccccatggagacagatgagcccacagccagtgacagcaagggcaagagcaagatcaccccagccatggccgcccgcatcaagcagatcaagcccctgctgagcgccagcagccggctgggccgggccctggccgagctgtttggcctgctggtgaagctgtgtgtgggcagccctgtgcggcagaggaggagccaccacgccgccagcaccaccacagcccccaccccagctgcccggagcacagccagcgccctgaccaagctgctgaccaagggcctgtcctggcagcccccaccctacacccccaccccccgcttccggctgaccttcttcatctgcagcgtgggcttcaccagccccatgctgtttgatgagaggaagtacccctaccacctgatgctgcagaagttcctgtgcagcggcggccacaatgccctgtttgagaccttcaactgggccctgtccatgggcggcaaggtgcctgtgtctgagggcctggagcacagcgacctgcctgatggcactggagagttcctggatgcctggctgatgctggtggagaagatggtgaaccccaccaccgtgctggagagcccccacagcctgcctgccaagctgcctggaggagtgcagaacttcccccagttcagcgccctgcgcttcctggtggtgacccagaaggccgccttcacctgcatcaagaacctgtggaacaggaagcccctgaaggtgtatggaggccgcatggccgagagcatgctggccatcctgtgccacatcctgcggggggagcctgtgatccgggagcggctgagcaaggagaaggagggcagcagaggagaggaggacaccggccaggaggagggcggcagccggcgggagccccaggtgaaccagcagcagctgcagcagctgatggacatgggcttcacccgggagcacgccatggaggccctgctgaacaccagcaccatggagcaggccacagagtacctgctgacccaccccccacccatcatgggcggcgtggtgcgggacctgtccatgtctgaggaggaccagatgatgagggccatcgccatgagcctgggccaggacatccccatggaccagagagctgagagccctgaggaggtggcctgcaggaaggaggaggaggagaggaaggcccgggagaagcaggaggaggaggaggccaagtgcctggagaagttccaggatgctgaccccctggagcaggatgagctgcacaccttcacagacaccatgctgcccggctgcttccacctgctggatgagctgcctgacacagtgtacagagtgtgtgacctgatcatgacagccatcaagagaaatggagctgactacagagacatgatcctgaagcaggtggtgaaccaggtgtgggaggccgcagatgtgctgatcaaggccgccctgcccctgaccaccagtgacaccaagacagtgtctgagtggatcagccagatggccaccctgccccaggccagcaacctggccacccgcatcctgctgctgaccctgctgtttgaggagctgaagctgccctgtgcctgggtggtggagagcagcggcatcctgaatgtgctgatcaagctgctggaggtggtgcagccctgcctgcaggccgccaaggagcagaaggaggtgcagacccccaagtggatcacccctgtgctgctgctgattgacttctatgagaagacagccatcagcagcaagaggcgggcccagatgaccaagtacctgcagagcaacagcaacaactggcgctggtttgatgacaggagcggccgctggtgcagctacagcgccagcaacaacagcaccatcgacagcgcctggaagagcggggagacctctgtgcgcttcaccgctggaagaagacgctacacagtgcagttcaccaccatggtgcagggcaccagcgctgagtag

SEQ ID NO: 167658 - DNA, 666 bp, synthetic construct
  misc_feature 1..666: note = Description of Artificial Sequence: Synthetic coding sequence
  source 1..666: mol_type = other DNA
atgagcagcaggcctggccgggaggatgtgggcgctgctggggcccggcggccccgggagcccccagagcaggagctgcagaggagaagagagcagaagagaagaagacatgatgcccagcagctgcagcagctgaagcacctggagagcttctatgagaagcccccacctggcctcatcaaggaggatgagaccaagccagaggactgcatcccagatgtgcctggaaatgaacatgcccgggagttcctggcccacgcccccaccaagggcctgtggatgcccctgggcaaggaggtgaaggtgatgcagtgctggcgctgcaagagatatggccacaggactggagacaaggaatgtcccttcttcatcaagggcaaccagaagctggagcagttccgggtggcccacgaggaccccatgtatgacatcatccgggacaacaagagacatgagaaggatgtgcgcatccagcagctgaagcagctgctggaggacagcaccagtgatgaagatagaagcagcagcagcagcagcgagggcaaggagaagcacaagaagaagaagaagaaggagaagcacaagaagaggaagaaggagaagaagaagaagaagaagaggaagcacaagagcagcaagagcaatgaaggaagtgacagcgagtag

SEQ ID NO: 167659 - DNA, 2262 bp, synthetic construct
  misc_feature 1..2262: note = Description of Artificial Sequence: Synthetic coding sequence
  source 1..2262: mol_type = other DNA
atgagggagcctgaggagctgatgccagattctggagctgtgttcaccttcggcaagagcaagtttgctgagaacaaccctgggaagttctggttcaagaatgatgtgcctgtgcacctgagctgtggagatgagcacagcgctgtggtgactggaaacaacaagctgtacatgtttggcagcaacaactggggccagctgggcctgggcagcaagagcgccatcagcaagcccacctgtgtgaaggccctgaagccagagaaggtgaagctggccgcctgtggcaggaaccacaccctggtgtccacagaaggaggaaatgtgtatgccactggaggcaacaatgaaggccagctgggcctgggggacacagaggagaggaacaccttccacgtgatctccttcttcaccagcgagcacaagatcaagcagctgtctgctggcagcaacaccagcgctgccctgacagaagatggccgcctcttcatgtggggagacaacagcgagggccagatcggcctgaagaatgtgtccaatgtgtgtgtgccccagcaggtgaccatcggcaagcctgtgtcctggatcagctgtggctactaccacagcgcctttgtgaccacagatggagagctgtatgtgtttggagagccagaaaatggcaagctgggcctgcccaaccagctgctgggcaaccacaggaccccccagctggtgtctgagatccctgagaaggtgatccaggtggcctgtggcggggagcacacagtggtgctgacagaaaatgctgtgtacaccttcggcctgggccagtttggccagctgggcctgggcaccttcctgtttgagaccagcgagcccaaggtgattgagaacatccgggaccagaccatctcctacatcagctgtggggagaaccacacagccctgatcacagacatcggcctgatgtacacctttggagatggccgccacggcaagctgggcctgggcctggagaacttcaccaaccacttcatccccaccctgtgcagcaacttcctgcgcttcatcgtgaagctggagaggagcccagacagcttctccatgaggaggaccctgccccccatcgagggcaccctgggcctgagcgcctgcttcctgcccaacagcgtcttcccccgctgcagcgagaggaacctgcaggagagcgtgctgtctgagcaggacctgatgcagcctgaggagccagactacctgctggatgagatgaccaaggaggccgagattgacaacagcagcacagtggagagcctgggggagaccacagacatcctgaacatgacccacatcatgagcctgaacagcaatgagaagagcctgaagctgagccctgtgcagaagcagaagaagcagcagaccatcggggagctgacccaggacacagccctgacagaaaatgatgacagtgatgaatatgaggagatgtctgagatgaaggagggcaaggcctgcaagcagcacgtgtcccagggcatcttcatgacccagcctgccaccaccatcgaggccttcagtgatgaggaggtggagatccctgaggagaaggagggcgctgaggacagcaaaggaaatggaattgaggagcaggaggtggaggccaatgaagaaaatgtgaaggtgcacggcggcaggaaggagaagacagagatcctgagtgatgacctgacagacaaggcagaagatcatgagttcagcaagacagaggagctgaagctggaggatgtggatgaggagatcaatgcagaaaatgtggagagcaagaagaagacagtgggagatgatgaatctgtgcccaccggctaccacagcaagacagagggcgctgagaggaccaatgatgacagcagcgctgagaccatcgagaagaaggagaaggccaacctggaggagcgggccatctgtgagtacaatgaaaaccccaagggctacatgctggatgatgctgacagcagcagcctggagatcctggagaacagcgagaccacccccagcaaggacatgaagaagaccaagaagatcttcctgttcaagagggtgcccagcatcaaccagaagatcgtgaagaacaacaatgagcccctgcctgagatcaagagcattggagaccagatcatcctgaagagtgacaacaaggatgctgaccagaaccacatgagccagaaccaccagaacatcccccccaccaacacagaaagaagaagcaagagctgcaccatcctgtag

SEQ ID NO: 167660 - DNA, 2448 bp, synthetic construct
  misc_feature 1..2448: note = Description of Artificial Sequence: Synthetic coding sequence
  source 1..2448: mol_type = other DNA
atgagggagcctgaggagctgatgccagattctggagctgtgttcaccttcggcaagagcaagtttgctgagaacaaccctgggaagttctggttcaagaatgatgtgcctgtgcacctgagctgtggagatgagcacagcgctgtggtgactggaaacaacaagctgtacatgtttggcagcaacaactggggccagctgggcctgggcagcaagagcgccatcagcaagcccacctgtgtgaaggccctgaagccagagaaggtgaagctggccgcctgtggcaggaaccacaccctggtgtccacagaaggaggaaatgtgtatgccactggaggcaacaatgaaggccagctgggcctgggggacacagaggagaggaacaccttccacgtgatctccttcttcaccagcgagcacaagatcaagcagctgtctgctggcagcaacaccagcgctgccctgacagaagatggccgcctcttcatgtggggagacaacagcgagggccagatcggcctgaagaatgtgtccaatgtgtgtgtgccccagcaggtgaccatcggcaagcctgtgtcctggatcagctgtggctactaccacagcgcctttgtgaccacagatggagagctgtatgtgtttggagagccagaaaatggcaagctgggcctgcccaaccagctgctgggcaaccacaggaccccccagctggtgtctgagatccctgagaaggtgatccaggtggcctgtggcggggagcacacagtggtgctgacagaaaatgctgtgtacaccttcggcctgggccagtttggccagctgggcctgggcaccttcctgtttgagaccagcgagcccaaggtgattgagaacatccgggaccagaccatctcctacatcagctgtggggagaaccacacagccctgatcacagacatcggcctgatgtacacctttggagatggccgccacggcaagctgggcctgggcctggagaacttcaccaaccacttcatccccaccctgtgcagcaacttcctgcgcttcatcgtgaagctggtggcctgtggcggctgccacatggtggtgtttgctgccccccaccggggcgtggccaaggagattgaatttgatgagatcaatgacacctgcctgtctgtggccaccttcctgccctacagcagcctgaccagcggaaatgtgctgcagaggaccctgagcgccaggatgagaagaagagagcgggagaggagcccagacagcttctccatgaggaggaccctgccccccatcgagggcaccctgggcctgagcgcctgcttcctgcccaacagcgtcttcccccgctgcagcgagaggaacctgcaggagagcgtgctgtctgagcaggacctgatgcagcctgaggagccagactacctgctggatgagatgaccaaggaggccgagattgacaacagcagcacagtggagagcctgggggagaccacagacatcctgaacatgacccacatcatgagcctgaacagcaatgagaagagcctgaagctgagccctgtgcagaagcagaagaagcagcagaccatcggggagctgacccaggacacagccctgacagaaaatgatgacagtgatgaatatgaggagatgtctgagatgaaggagggcaaggcctgcaagcagcacgtgtcccagggcatcttcatgacccagcctgccaccaccatcgaggccttcagtgatgaggaggtggagatccctgaggagaaggagggcgctgaggacagcaaaggaaatggaattgaggagcaggaggtggaggccaatgaagaaaatgtgaaggtgcacggcggcaggaaggagaagacagagatcctgagtgatgacctgacagacaaggcagaagatcatgagttcagcaagacagaggagctgaagctggaggatgtggatgaggagatcaatgcagaaaatgtggagagcaagaagaagacagtgggagatgatgaatctgtgcccaccggctaccacagcaagacagagggcgctgagaggaccaatgatgacagcagcgctgagaccatcgagaagaaggagaaggccaacctggaggagcgggccatctgtgagtacaatgaaaaccccaagggctacatgctggatgatgctgacagcagcagcctggagatcctggagaacagcgagaccacccccagcaaggacatgaagaagaccaagaagatcttcctgttcaagagggtgcccagcatcaaccagaagatcgtgaagaacaacaatgagcccctgcctgagatcaagagcattggagaccagatcatcctgaagagtgacaacaaggatgctgaccagaaccacatgagccagaaccaccagaacatcccccccaccaacacagaaagaagaagcaagagctgcaccatcctgtag

SEQ ID NO: 167661 - DNA, 1443 bp, synthetic construct
  misc_feature 1..1443: note = Description of Artificial Sequence: Synthetic coding sequence
  source 1..1443: mol_type = other DNA
atgagggagcctgaggagctgatgccagattctggagctgtgttcaccttcggcaagagcaagtttgctgagaacaaccctgggaagttctggttcaagaatgatgtgcctgtgcacctgagctgtggagatgagcacagcgctgtggtgactggaaacaacaagctgtacatgtttggcagcaacaactggggccagctgggcctgggcagcaagagcgccatcagcaagcccacctgtgtgaaggccctgaagccagagaaggtgaagctggccgcctgtggcaggaaccacaccctggtgtccacagaaggaggaaatgtgtatgccactggaggcaacaatgaaggccagctgggcctgggggacacagaggagaggaacaccttccacgtgatctccttcttcaccagcgagcacaagatcaagcagctgtctgctggcagcaacaccagcgctgccctgacagaagatggccgcctcttcatgtggggagacaacagcgagggccagatcggcctgaagaatgtgtccaatgtgtgtgtgccccagcaggtgaccatcggcaagcctgtgtcctggatcagctgtggctactaccacagcgcctttgtgaccacagatggagagctgtatgtgtttggagagccagaaaatggcaagctgggcctgcccaaccagctgctgggcaaccacaggaccccccagctggtgtctgagatccctgagaaggtgatccaggtggcctgtggcggggagcacacagtggtgctgacagaaaatgctgtgtacaccttcggcctgggccagtttggccagctgggcctgggcaccttcctgtttgagaccagcgagcccaaggtgattgagaacatccgggaccagaccatctcctacatcagctgtggggagaaccacacagccctgatcacagacatcggcctgatgtacacctttggagatggccgccacggcaagctgggcctgggcctggagaacttcaccaaccacttcatccccaccctgtgcagcaacttcctgcgcttcatcgtgaagctggtggcctgtggcggctgccacatggtggtgtttgctgccccccaccggggcgtggccaaggagattgaatttgatgagatcaatgacacctgcctgtctgtggccaccttcctgccctacagcagcctgaccagcggaaatgtgctgcagaggaccctgagcgccaggatgagaagaagagagcgggagaggagcccagacagcttctccatgaggaggaccctgccccccatcgagggcaccctgggcctgagcgcctgcttcctgcccaacagcgtcttcccccgctgcagcgagaggaacctgcaggagagcgtgctgtctgagcaggacctgatgcagcctgaggagccagacacccaccacgagcctgagttccagtag

SEQ ID NO: 167662 - DNA, 3063 bp, synthetic construct
  misc_feature 1..3063: note = Description of Artificial Sequence: Synthetic coding sequence
  source 1..3063: mol_type = other DNA
atgagggagcctgaggagctgatgccagattctggagctgtgttcaccttcggcaagagcaagtttgctgagaacaaccctgggaagttctggttcaagaatgatgtgcctgtgcacctgagctgtggagatgagcacagcgctgtggtgactggaaacaacaagctgtacatgtttggcagcaacaactggggccagctgggcctgggcagcaagagcgccatcagcaagcccacctgtgtgaaggccctgaagccagagaaggtgaagctggccgcctgtggcaggaaccacaccctggtgtccacagaaggaggaaatgtgtatgccactggaggcaacaatgaaggccagctgggcctgggggacacagaggagaggaacaccttccacgtgatctccttcttcaccagcgagcacaagatcaagcagctgtctgctggcagcaacaccagcgctgccctgacagaagatggccgcctcttcatgtggggagacaacagcgagggccagatcggcctgaagaatgtgtccaatgtgtgtgtgccccagcaggtgaccatcggcaagcctgtgtcctggatcagctgtggctactaccacagcgcctttgtgaccacagatggagagctgtatgtgtttggagagccagaaaatggcaagctgggcctgcccaaccagctgctgggcaaccacaggaccccccagctggtgtctgagatccctgagaaggtgatccaggtggcctgtggcggggagcacacagtggtgctgacagaaaatgctgtgtacaccttcggcctgggccagtttggccagctgggcctgggcaccttcctgtttgagaccagcgagcccaaggtgattgagaacatccgggaccagaccatctcctacatcagctgtggggagaaccacacagccctgatcacagacatcggcctgatgtacacctttggagatggccgccacggcaagctgggcctgggcctggagaacttcaccaaccacttcatccccaccctgtgcagcaacttcctgcgcttcatcgtgaagctggtggcctgtggcggctgccacatggtggtgtttgctgccccccaccggggcgtggccaaggagattgaatttgatgagatcaatgacacctgcctgtctgtggccaccttcctgccctacagcagcctgaccagcggaaatgtgctgcagaggaccctgagcgccaggatgagaagaagagagcgggagaggagcccagacagcttctccatgaggaggaccctgccccccatcgagggcaccctgggcctgagcgcctgcttcctgcccaacagcgtcttcccccgctgcagcgagaggaacctgcaggagagcgtgctgtctgagcaggacctgatgcagcctgaggagccagactacctgctggatgagatgaccaaggaggccgagattgacaacagcagcacagtggagagcctgggggagaccacagacatcctgaacatgacccacatcatgagcctgaacagcaatgagaagagcctgaagctgagccctgtgcagaagcagaagaagcagcagaccatcggggagctgacccaggacacagccctgacagaaaatgatgacagtgatgaatatgaggagatgtctgagatgaaggagggcaaggcctgcaagcagcacgtgtcccagggcatcttcatgacccagcctgccaccaccatcgaggccttcagtgatgaggaggtgggcaatgacaccggccaggtgggcccccaggccgacacagatggagagggcctgcagaaggaggtgtacagacatgagaacaacaatggagtggaccagctggatgccaaggagattgagaaggagagtgatggcggccacagccagaaggagagcgaggccgaggagattgattctgagaaggagaccaagctggccgagattgctggcatgaaggacctgcgggagcgggagaagagcaccaagaagatgagccccttcttcggcaacctgcctgaccggggcatgaacacagagagcgaggagaacaaggactttgtgaagaagcgggagagctgcaagcaggacgtcatctttgattctgagcgggagagcgtggagaagccagacagctacatggagggcgccagcgagagccagcagggcattgctgatggcttccagcagcctgaggccatcgagttcagcagtggagagaaggaggatgatgaggtggagacagaccagaacatccgctatggcaggaagctgattgagcagggcaatgagaaggagaccaagcccatcatcagcaagtccatggccaagtatgacttcaagtgtgaccggctgtctgagatccctgaggagaaggagggcgctgaggacagcaaaggaaatggcatcgaggagcaggaggtggaggccaatgaggagaatgtgaaggtgcatggaggcaggaaggagaagacagagatcctgagtgatgacctgacagacaaggccgaggaccacgagttcagcaagacagaggagctgaagctggaggatgtggatgaggagatcaatgcagaaaatgtggagagcaagaagaagacagtgggagatgatgagagcgtgcccaccggctaccacagcaagacagaaggagctgagaggaccaatgatgacagcagcgctgagaccatcgagaagaaggagaaggccaacctggaggagcgggccatctgtgagtacaatgaaaaccccaagggctacatgctggatgatgctgacagcagcagcctggagatcctggagaacagcgagaccacccccagcaaggacatgaagaagaccaagaagatcttcctgttcaagagggtgcccagcatcaaccagaagatcgtgaagaacaacaatgagcccctgcctgagatcaagagcatcggggaccagatcatcctgaagagtgacaacaaggatgctgaccagaaccacatgagccagaaccaccagaacatcccccccaccaacacagagcggcgcagcaagagctgcaccatcctgtag

SEQ ID NO: 167663 - DNA, 1941 bp, synthetic construct
  misc_feature 1..1941: note = Description of Artificial Sequence: Synthetic coding sequence
  source 1..1941: mol_type = other DNA
atgagggagcctgaggagctgatgccagattctggagctgtgttcaccttcggcaagagcaagtttgctgagaacaaccctgggaagttctggttcaagaatgatgtgcctgtgcacctgagctgtggagatgagcacagcgctgtggtgactggaaacaacaagctgtacatgtttggcagcaacaactggggccagctgggcctgggcagcaagagcgccatcagcaagcccacctgtgtgaaggccctgaagccagagaaggtgaagctggccgcctgtggcaggaaccacaccctggtgtccacagaaggaggaaatgtgtatgccactggaggcaacaatgaaggccagctgggcctgggggacacagaggagaggaacaccttccacgtgatctccttcttcaccagcgagcacaagatcaagcagctgtctgctggcagcaacaccagcgctgccctgacagaagatggccgcctcttcatgtggggagacaacagcgagggccagatcggcctgaagaatgtgtccaatgtgtgtgtgccccagcaggtgaccatcggcaagcctgtgtcctggatcagctgtggctactaccacagcgcctttgtgaccacagatggagagctgtatgtgtttggagagccagaaaatggcaagctgggcctgcccaaccagctgctgggcaaccacaggaccccccagctggtgtctgagatccctgagaaggtgatccaggtggcctgtggcggggagcacacagtggtgctgacagaaaatgctgtgtacaccttcggcctgggccagtttggccagctgggcctgggcaccttcctgtttgagaccagcgagcccaaggtgattgagaacatccgggaccagaccatctcctacatcagctgtggggagaaccacacagccctgatcacagacatcggcctgatgtacacctttggagatggccgccacggcaagctgggcctgggcctggagaacttcaccaaccacttcatccccaccctgtgcagcaacttcctgcgcttcatcgtgaagctggtggcctgtggcggctgccacatggtggtgtttgctgccccccaccggggcgtggccaaggagattgaatttgatgagatcaatgacacctgcctgtctgtggccaccttcctgccctacagcagcctgaccagcggaaatgtgctgcagaggaccctgagcgccaggatgagaagaagagagcgggagaggagcccagacagcttctccatgaggaggaccctgccccccatcgagggcaccctgggcctgagcgcctgcttcctgcccaacagcgtcttcccccgctgcagcgagaggaacctgcaggagagcgtgctgtctgagcaggacctgatgcagcctgaggagccagactacctgctggatgagatgaccaaggaggccgagattgacaacagcagcacagtggagagcctgggggagaccacagacatcctgaacatgacccacatcatgagcctgaacagcaatgagaagagcctgaagctgagccctgtgcagaagcagaagaagcagcagaccatcggggagctgacccaggacacagccctgacagaaaatgatgacagtgatgaatatgaggagatgtctgagatgaaggagggcaaggcctgcaagcagcacgtgtcccagggcatcttcatgacccagcctgccaccaccatcgaggccttcagtgatgaggaggtggagatccctgaggagaaggagggcgctgaggacagcaaaggaaatggaattgaggagcaggaggtggaggccaatgaagaaaatgtgaaggtgcacggcggcaggaaggagaagacagagatcctgagtgatgacctgacagacaaggccgagtacagcgccagccacagccagatcgtgtctgtgtag

SEQ ID NO: 167664 - DNA, 3459 bp, synthetic construct
  misc_feature 1..3459: note = Description of Artificial Sequence: Synthetic coding sequence
  source 1..3459: mol_type = other DNA
atgagggagcctgaggagctgatgccagattctggagctgtgttcaccttcggcaagagcaagtttgctgagaacaaccctgggaagttctggttcaagaatgatgtgcctgtgcacctgagctgtggagatgagcacagcgctgtggtgactggaaacaacaagctgtacatgtttggcagcaacaactggggccagctgggcctgggcagcaagagcgccatcagcaagcccacctgtgtgaaggccctgaagccagagaaggtgaagctggccgcctgtggcaggaaccacaccctggtgtccacagaaggaggaaatgtgtatgccactggaggcaacaatgaaggccagctgggcctgggggacacagaggagaggaacaccttccacgtgatctccttcttcaccagcgagcacaagatcaagcagctgtctgctggcagcaacaccagcgctgccctgacagaagatggccgcctcttcatgtggggagacaacagcgagggccagatcggcctgaagaatgtgtccaatgtgtgtgtgccccagcaggtgaccatcggcaagcctgtgtcctggatcagctgtggctactaccacagcgcctttgtgaccacagatggagagctgtatgtgtttggagagccagaaaatggcaagctgggcctgcccaaccagctgctgggcaaccacaggaccccccagctggtgtctgagatccctgagaaggtgatccaggtggcctgtggcggggagcacacagtggtgctgacagaaaatgctgtgtacaccttcggcctgggccagtttggccagctgggcctgggcaccttcctgtttgagaccagcgagcccaaggtgattgagaacatccgggaccagaccatctcctacatcagctgtggggagaaccacacagccctgatcacagacatcggcctgatgtacacctttggagatggccgccacggcaagctgggcctgggcctggagaacttcaccaaccacttcatccccaccctgtgcagcaacttcctgcgcttcatcgtgaagctggtggcctgtggcggctgccacatggtggtgtttgctgccccccaccggggcgtggccaaggagattgaatttgatgagatcaatgacacctgcctgtctgtggccaccttcctgccctacagcagcctgaccagcggaaatgtgctgcagaggaccctgagcgccaggatgagaagaagagagcgggagaggagcccagacagcttctccatgaggaggaccctgccccccatcgagggcaccctgggcctgagcgcctgcttcctgcccaacagcgtcttcccccgctgcagcgagaggaacctgcaggagagcgtgctgtctgagcaggacctgatgcagcctgaggagccagactacctgctggatgagatgaccaaggaggccgagattgacaacagcagcacagtggagagcctgggggagaccacagacatcctgaacatgacccacatcatgagcctgaacagcaatgagaagagcctgaagctgagccctgtgcagaagcagaagaagcagcagaccatcggggagctgacccaggacacagccctgacagaaaatgatgacagtgatgaatatgaggagatgtctgagatgaaggagggcaaggcctgcaagcagcacgtgtcccagggcatcttcatgacccagcctgccaccaccatcgaggccttcagtgatgaggaggtggagatccctgaggagaaggagggcgctgaggacagcaaaggaaatggaattgaggagcaggaggtggaggccaatgaagaaaatgtgaaggtgcacggcggcaggaaggagaagacagagatcctgagtgatgacctgacagacaaggccgaggtgtctgagggcaaggccaagtctgtgggggaggccgaggatggccctgagggcagaggagatggcacctgtgaggagggcagcagcggggctgagcactggcaggatgaggagcgggagaagggggagaaggacaagggccgcggggagatggagaggcctggagagggggagaaggagctggccgagaaggaggagtggaagaagagagatggagaggagcaggagcagaaggagcgggagcagggccaccagaaggagaggaaccaggagatggaggagggcggggaggaggagcacggggagggggaggaggaggagggggaccgggaggaggaggaggagaaggagggggagggcaaggaggagggggagggggaggaggtggagggggagcgggagaaggaggagggggagaggaagaaggaggagagagctgggaaggaggagaagggggaggaggagggggaccagggcgagggggaggaggaggagacagagggccgcggggaggagaaggaggagggcggggaggtggagggcggggaggtggaggagggcaaaggagagcgggaggaggaggaggaggagggggagggggaggaggaggagggggagggggaggaggaggagggggagggggaggaggaggagggggagggcaaaggagaggaggagggggaggagggggagggggaggaggagggggaggagggggagggggagggggaggaggaggagggggagggggagggggaggaggagggggagggggagggggaggaggaggagggggagggggagggggaggaggagggggagggggagggggaggaggaggagggggagggcaagggggaggaggagggggaggagggggagggggagggggaggaggaggagggggagggggagggggaggatggagagggggagggggaggaggaggagggggagtgggagggggaggaggaggagggggagggggagggggaggaggagggggagggggagggggaggagggggagggggagggggaggaggaggagggggagggggagggggaggaggaggagggggaggaggagggggaggaggagggggagggggaggaggagggggagggggagggggaggaggaggaggagggggaggtggagggggaggtggagggggaggagggggagggggagggggaggaggaggagggggaggaggagggggaggagcgggagaaggagggggagggggaggagaacagaagaaaccgggaggaggaggaggaggaggagggcaagtaccaggagaccggggaggaggagaatgaaaggcaggatggagaggagtacaagaaggtgtccaagatcaagggctctgtgaagtatggcaagcacaagacctaccagaagaagtctgtgaccaacacccagggcaatggcaaggagcagaggagcaagatgcctgtgcagagcaagaggctgctgaagaatggccccagcggcagcaagaagttctggaacaacgtgctgccccactacctggagctgaagtag

SEQ ID NO: 167665 - DNA, 2121 bp, synthetic construct
  misc_feature 1..2121: note = Description of Artificial Sequence: Synthetic coding sequence
  source 1..2121: mol_type = other DNA
atgaatgaaagcaagccaggggacagccagaacctggcctgtgtgttctgcaggaagcatgatgactgccccaacaagtatggagagaagaagaccaaggagaagtggaacctgactgtgcactactactgcctgctgatgagcagcggcatctggcagaggggcaaggaggaggagggcgtgtatggcttcctgattgaggacatcaggaaggaggtgaacagagccagcaagctgaagtgctgcgtgtgcaagaagaatggagccagcatcggctgtgtggccccccgctgcaagaggagctaccacttcccctgtggcctgcagcgggagtgcatcttccagttcaccggcaactttgccagcttctgctgggaccacaggcctgtgcagatcatcaccagcaacaactaccgggagagcctgccctgcaccatctgcctggagttcatcgagcccatccccagctacaacatcctgcggagcccctgctgcaagaatgcctggttccaccgggactgcctgcaggtgcaggccatcaatgctggggtcttcttcttccgctgcaccatctgcaacaacagcgacatcttccagaaggagatgctgaggatgggcatccacatccctgagaaggatgcctcctgggagctggaggagaatgcctaccaggagctgctgcagcactatgaaagatgtgatgtgcggcgctgccgctgcaaggagggccgggactacaatgccccagacagcaagtgggagatcaagcgctgccagtgctgcggcagcagcggcacccacctggcctgcagcagcctgcgctcctgggagcagaactgggagtgcctggagtgccggggcatcatctacaacagcggggagttccagaaggccaagaagcacgtgctgcccaacagcaacaacgtgggcatcacagactgcctgctggaggagagcagccccaagctgccccggcagagccctggcagccagagcaaggacctgctgcggcagggcagcaagttcagaagaaatgtgtccaccctgctgattgagctgggcttccagatcaagaagaagaccaagaggctgtacatcaacaaggccaacatctggaacagcgccctggatgccttcaggaacagaaacttcaaccccagctatgccatcgaggtggcctacgtgattgaaaatgacaactttggaagtgagcaccctggcagcaagcaggagttcctgagcctgctgatgcagcacctggagaacagcagcctgtttgagggcagcctgagcaagaacctgagcctgaacagccaggccctgaaggaaaatctctactatgaagctgggaagatgctggccatcagcctggtgcatggaggccccagccctggcttcttcagcaagaccctcttcaactgcctggtgtatggccctgagaacacccagcccatcctggatgatgtgtctgactttgatgtggcccagatcatcatccgcatcaacacagccaccaccgtggccgacctgaagagcatcatcaatgaatgctacaactacctggagctgattggctgcctgcggctcatcaccaccctgagtgacaagtacatgctggtgaaggacatcctgggctaccacgtgatccagagggtgcacaccccatttgagagcttcaagcagggcctgaagaccctgggcgtgctggagaagatccaggcctacccagaggccttctgcagcatcctgtgccacaagccagagagcctgagcgccaagatcctgtctgagctgttcaccgtgcacaccctgcctgatgtgaaggccctgggcttctggaacagctacctgcaggccgtggaggatggcaagagcaccaccaccatggaggacatcctgatctttgccaccggctgcagcagcatccccccagctggcttcaagcccacccccagcattgagtgcctgcacgtggacttccctgtgggcaacaagtgcaacaactgcctggccatccccatcaccaacacctacaaggagttccaggagaacatggacttcaccatccggaacaccctgcggctggagaaggaggagagcagccactacatcggccactag

SEQ ID NO: 167666 - DNA, 1938 bp, synthetic construct
  misc_feature 1..1938: note = Description of Artificial Sequence: Synthetic coding sequence
  source 1..1938: mol_type = other DNA
atgctgctgatggccccagaccgctgccgctacgtgtggaagcactgccagcccatggagatgaggatcaagtggatcttcctgtgctgcatccggcccctgtatgacttcaccagccagtatgtgatggagacagacagcctcttcctgcactacctgcaggaggccagcgcccggctggacatccaccaggccatggccagcgagcacagcaccctggccgccggctggatctgctttgacagagtgctggagaccgtggagaaggtgcacggcctggccaccctgattggagctggaggagaggagtttggagtgctggagtactggatgaggctgcgcttccccatcaagcccagcctgcaggcctgcaacaagaggaagaaggcccaggtgtacctgagcacagatgtgctgggcggcaggaaggcccaggaggaggagttccgctctgagagctgggagccccagaatgagctgtggattgagatcaccaagtgctgcggcctgcggagccgctggctgggcacccagcccagcccctatgctgtgtaccgcttcttcaccttcagtgaccatgacacagccatcatcccagccagcaacaacccctacttccgggaccaggcccgcttccctgtgctggtgaccagtgacctggaccactacctgcggcgggaggccctgagcatccacgtgtttgatgatgaggacctggagcccggcagctacctgggccgggcccgggtgcccctgctgcccctggccaagaatgaaagcatcaagggggacttcaacctgacagatcctgctgagaagcccaacggcagcatccaggtgcagctggactggaagttcccctacatccccccagagagcttcctgaagccagaggcccagaccaagggcaaggacaccaaggacagcagcaagatcagcagcgaggaggagaaggccagcttccccagccaggaccagatggccagccctgaggtgcccatcgaggccggccagtaccgcagcaagaggaagccccctcatggaggagagaggaaggagaaggagcaccaggtggtgtcctacagcaggaggaagcacggcaagagaattggagtgcagggcaagaacaggatggagtacctgagcctgaacatcctgaatggaaacaccccagagcaggtgaactacacagagtggaagttcagcgagaccaacagcttcatcggagatggcttcaagaaccagcacgaggaggaggagatgaccctgagccacagcgccctgaagcagaaggagcccctgcaccctgtgaatgacaaggagagcagcgagcagggcagcgaggtgtctgaggcccagaccacagacagtgatgatgtgattgtgccccccatgagccagaagtaccccaaggctgacagcgagaagatgtgcattgaaattgtgtccctggccttctacccagaggccgaggtgatgtctgatgagaacatcaagcaggtgtatgtggagtacaagttctatgacctgcccctgtctgaaacagagacccctgtgtccctgaggaagccccgggccggggaggagatccacttccacttcagcaaggtgattgacctggacccccaggagcagcagggcagaagacgcttcctgtttgacatgctgaatggccaggaccctgaccagggccacctgaagttcaccgtggtgtctgaccccctggatgaggagaagaaggaatgtgaggaggtgggctacgcctacctgcagctgtggcagatcctggagagcggccgggacatcctggagcaggagctggacatcgtgtccccagaggacctggccacccccatcggccgcctgaaggtgtccctgcaggccgctgctgtgctgcacgccatctacaaggagatgacagaagatctcttctcctag

SEQ ID NO: 167667 - DNA, 1839 bp, synthetic construct
  misc_feature 1..1839: note = Description of Artificial Sequence: Synthetic coding sequence
  source 1..1839: mol_type = other DNA
atgctgaagctggacaacaaggatgtgatcagccaccccctgggctaccccagcgagagcctgctgagcatcgcctccatgctggacagcagtgacagcagcagccagccccactggagcaatgagctgattgctgagcagctgcagcagcaggtgtcccagctgcaggaccagctggatgctgagctggaggacaagaggaaggtgctgctggagctgagccgggagaaggcccagaatgaagacctgaagctggaggtgaccaacatcctgcagaagcacaagcaggaggtggagctgctgcagaatgctgccaccatcagccagcccccagaccggcagagcgagcccgccacccaccctgctgtgctgcaggagaacacccagatcgagcccagcgagcccaagaaccaggaggagaagaagctgagccaggtgctgaatgagctgcaggtgtcccatgctgagaccaccctggagctggagaagacccgggacatgctgatcctgcagaggaagatcaacgtgtgctaccaggaggagctggaggccatgatgaccaaggctgacaatgacaacagagaccacaaggagaagctggagcggctgacccggctgctggacctgaagaacaaccgcatcaagcagctggagggcatcctgcggagccatgacctgcccaccagcggggacttcaacctgacagatcctgctgagaagcccaacggcagcatccaggtgcagctggactggaagttcccctacatccccccagagagcttcctgaagccagaggcccagaccaagggcaaggacaccaaggacagcagcaagatcagcagcgaggaggagaaggccagcttccccagccaggaccagatggccagccctgaggtgcccattgaagctggccagtaccgcagcaagaggaagccaccccacggcggggagaggaaggagaaggagcaccaggtggtgtcctacagcaggaggaagcacggcaagagaattggagtgcagggcaagaacaggatggagtacctgagcctgaacatcctgaatggaaacaccccagagcaggtgaactacacagagtggaagttcagcgagaccaacagcttcatcggagatggcttcaagaaccagcacgaggaggaggagatgaccctgagccacagcgccctgaagcagaaggagcccctgcaccctgtgaatgacaaggagagcagcgagcagggcagcgaggtgtctgaggcccagaccacagacagtgatgatgtgattgtgccccccatgagccagaagtaccccaaggctgacagcgagaagatgtgcatcgagatcgtgtccctggccttctacccagaggccgaggtgatgtctgatgagaacatcaagcaggtgtatgtggagtacaagttctatgacctgcccctgtctgaaacagagacccctgtgtccctgaggaagcccagggctggggaggagatccacttccacttcagcaaggtgattgacctggacccccaggagcagcagggcagaagacgcttcctgtttgacatgctgaatggccaggaccctgaccagggccacctgaagttcaccgtggtgtctgaccccctggatgaggagaagaaggaatgtgaggaggtgggctacgcctacctgcagctgtggcagatcctggagagcggccgggacatcctggagcaggagctggacatcgtgtccccagaggacctggccacccccatcggccgcctgaaggtgtccctgcaggccgctgctgtgctgcacgccatctacaaggagatgacagaggacctcttctcctag

SEQ ID NO: 167668 - DNA, 3861 bp, synthetic construct
  misc_feature 1..3861: note = Description of Artificial Sequence: Synthetic coding sequence
  source 1..3861: mol_type = other DNA
atgagccacctggtggaccccaccagcggggacctgcctgtgcgggacattgatgccatccccctggtgctgcctgccagcaagggcaagaacatgaagacccagccccccctgagcaggatgaaccgggaggagctggaggacagcttcttccggctgcgggaggaccacatgctggtgaaggagctgtcctggaagcagcaggatgagatcaagaggctgcggaccaccctgctgcggctgacagctgctggccgggacctgcgggtggccgaggaggccgcccccctgtctgaaacagcccggcggggccagaaggccggctggaggcagaggctgtccatgcaccagaggccccagatgcaccggctgcagggccacttccactgtgtgggccctgccagcccccggcgggcccagccccgggtgcaggtgggccaccggcagctgcacacagctggggcccctgtgcctgagaagcccaagaggggcccccgggaccggctgagctacacagccccacccagcttcaaggagcacgccaccaatgaaaatagaggagaggtggccagcaagcccagcgagctggtgtctggcagcaacagcatcatctccttcagcagcgtcatctccatggccaagcccatcggcctgtgcatgcccaacagcgcccacatcatggccagcaacaccatgcaggtggaggagccccccaagagccctgagaagatgtggcccaaggatgaaaattttgagcagaggagcagcctggagtgtgcccagaaggctgctgagctgcgggccagcatcaaggagaaggtggagctgatccggctgaagaagctgctgcacgagagaaatgccagcctggtgatgaccaaggcccagctgacagaggtgcaggaggcctatgagaccctgctgcagaagaaccagggcatcctgtctgctgcccacgaggccctgctgaagcaggtgaatgagctgcgggcagagctgaaggaggagagcaagaaggctgtgtccctgaagagccagctggaggatgtgtccatcctgcagatgaccctgaaggagttccaggagcgggtggaggacctggagaaggagaggaagctgctgaatgacaactatgacaagctgctggagagcatgctggacagcagtgacagcagcagccagccccactggagcaatgagctgattgctgagcagctgcagcagcaggtgtcccagctgcaggaccagctggatgctgagctggaggacaagaggaaggtgctgctggagctgagccgggagaaggcccagaatgaagacctgaagctggaggtgaccaacatcctgcagaagcacaagcaggaggtggagctgctgcagaatgctgccaccatcagccagcccccagaccggcagagcgagcccgccacccaccctgctgtgctgcaggagaacacccagatcgagcccagcgagcccaagaaccaggaggagaagaagctgagccaggtgctgaatgagctgcaggtgtcccatgctgagaccaccctggagctggagaagacccgggacatgctgatcctgcagaggaagatcaacgtgtgctaccaggaggagctggaggccatgatgaccaaggctgacaatgacaacagagaccacaaggagaagctggagcggctgacccggctgctggacctgaagaacaaccgcatcaagcagctggagggcatcctgcggagccatgacctgcccaccagcgagcagctgaaggatgtggcctacggcacccggcccctgagcctgtgcctggagaccctgcctgcccatggagatgaggacaaggtggacatcagcctgctgcaccagggcgagaacctgtttgagctgcacatccaccaggccttcctgaccagcgctgccctggcccaggccggggacacccagcccaccaccttctgcacctacagcttctatgactttgagacccactgcacccccctgtctgtgggcccccagcccctgtatgacttcaccagccagtatgtgatggagacagacagcctcttcctgcactacctgcaggaggccagcgcccggctggacatccaccaggccatggccagcgagcacagcaccctggccgccggctggatctgctttgacagagtgctggagaccgtggagaaggtgcacggcctggccaccctcatcggggccggcggggaggagtttggagtgctggagtactggatgaggctgcgcttccccatcaagcccagcctgcaggcctgcaacaagaggaagaaggcccaggtgtacctgagcacagatgtgctgggcggcaggaaggcccaggaggaggagttccgctctgagagctgggagccccagaatgagctgtggattgagatcaccaagtgctgcggcctgcggagccgctggctgggcacccagcccagcccctatgctgtgtaccgcttcttcaccttcagtgaccatgacacagccatcatcccagccagcaacaacccctacttccgggaccaggcccgcttccctgtgctggtgaccagtgacctggaccactacctgcggcgggaggccctgagcatccacgtgtttgatgatgaggacctggagcccggcagctacctgggccgggcccgggtgcccctgctgcccctggccaagaatgaaagcatcaagggggacttcaacctgacagatcctgctgagaagcccaacggcagcatccaggtgcagctggactggaagttcccctacatccccccagagagcttcctgaagccagaggcccagaccaagggcaaggacaccaaggacagcagcaagatcagcagcgaggaggagaaggccagcttccccagccaggaccagatggccagccctgaggtgcccattgaagctggccagtaccgcagcaagaggaagccaccccacggcggggagaggaaggagaaggagcaccaggtggtgtcctacagcaggaggaagcacggcaagagaattggagtgcagggcaagaacaggatggagtacctgagcctgaacatcctgaatggaaacaccccagagcaggtgaactacacagagtggaagttcagcgagaccaacagcttcatcggagatggcttcaagaaccagcacgaggaggaggagatgaccctgagccacagcgccctgaagcagaaggagcccctgcaccctgtgaatgacaaggagagcagcgagcagggcagcgaggtgtctgaggcccagaccacagacagtgatgatgtgattgtgccccccatgagccagaagtaccccaaggctgacagcgagaagatgtgcatcgagatcgtgtccctggccttctacccagaggccgaggtgatgtctgatgagaacatcaagcaggtgtatgtggagtacaagttctatgacctgcccctgtctgaaacagagacccctgtgtccctgaggaagcccagggctggggaggagatccacttccacttcagcaaggtgattgacctggacccccaggagcagcagggcagaagacgcttcctgtttgacatgctgaatggccaggaccctgaccagggccacctgaagttcaccgtggtgtctgaccccctggatgaggagaagaaggaatgtgaggaggtgggctacgcctacctgcagctgtggcagatcctggagagcggccgggacatcctggagcaggagctggacatcgtgtccccagaggacctggccacccccatcggccgcctgaaggtgtccctgcaggccgctgctgtgctgcacgccatctacaaggagatgacagaggacctcttctcctag

SEQ ID NO: 167669 - DNA, 1617 bp, synthetic construct
  misc_feature 1..1617: note = Description of Artificial Sequence: Synthetic coding sequence
  source 1..1617: mol_type = other DNA
atgaacctggagctgctggagagctttggccagaactacccagaggaggctgatggcaccctggactgcatctccatggccctgacctgcaccttcaaccgctggggcaccctgctggccgtgggctgcaatgatggccgcatcgtcatctgggacttcctgacccggggcatcgccaagatcatcagcgcccacatccaccctgtgtgcagcctgtgctggagcagagatggccacaagctggtgtctgccagcacagacaacatcgtgtcccagtgggatgtgctgagcggggactgtgaccagcgcttccgcttccccagccccatcctgaaggtgcagtaccacccccgggaccagaacaaggtgctggtgtgccccatgaagagcgcccctgtgatgctgaccctgagtgacagcaagcacgtggtgctgcctgtggatgatgacagcgacctgaatgtggtggccagctttgacagaagaggagagtacatctacacaggaaatgccaagggcaagatcctggtgctgaagacagacagccaggacctggtggccagcttccgggtgaccaccggcaccagcaacaccacagccatcaagagcattgaatttgccaggaagggcagctgcttcctgatcaacacagctgaccgcatcatccgggtgtatgatggccgggagatcctgacctgtggcagagatggagagcctgagcccatgcagaagctgcaggacctggtgaacagaacaccctggaagaagtgctgcttctctggagatggagagtacatcgtggccggcagcgcccggcagcacgccctgtacatctgggagaagagcatcggcaacctggtgaagatcctgcacggcaccagaggagagctgctgctggatgtggcctggcaccctgtgcggcccatcatcgccagcatcagcagtggagtggtgtccatctgggcccagaaccaggtggagaactggagcgcctttgccccagacttcaaggagctggatgaaaatgtggagtatgaggagcgggagagcgagtttgatattgaagatgaggacaagtctgagcctgagcagacaggagcagatgctgctgaagatgaggaggtggatgtgacctctgtggaccccatcgccgccttctgcagcagtgatgaggagctggaggacagcaaggccctgctgtacctgcccatcgcccctgaggtggaggaccctgaggagaacccctacggccccccaccagatgctgtgcagaccagcctgatggatgaaggagccagcagcgagaagaagaggcagagcagcgcagatggcagccagccccccaagaagaagcccaagaccaccaacatcgagctgcagggcgtgcccaatgatgaggtgcaccccctgctgggcgtgaagggagatggcaagagcaagaagaagcaggccggccggcccaagggcagcaagggcaaggagaaggacagccccttcaagcccaagctgtacaagggggaccggggcctgcccctggagggcagcgccaagggcaaggtgcaggccgagctgagccagcccctgacagctgggggcgccatcagcgagctgctgtag

SEQ ID NO: 167670 - DNA, 1503 bp, synthetic construct
  misc_feature 1..1503: note = Description of Artificial Sequence: Synthetic coding sequence
  source 1..1503: mol_type = other DNA
atgaacctggagctgctggagagctttggccagaactacccagaggaggctgatggcaccctggactgcatctccatggccctgacctgcaccttcaaccgctggggcaccctgctggccgtgggctgcaatgatggccgcatcgtcatctgggacttcctgacccggggcatcgccaagatcatcagcgcccacatccaccctgtgtgcagcctgtgctggagcagagatggccacaagctggtgtctgccagcacagacaacatcgtgtcccagtgggatgtgctgagcggggactgtgaccagcgcttccgcttccccagccccatcctgaaggtgcagtaccacccccgggaccagaacaaggtgctggtgtgccccatgaagagcgcccctgtgatgctgaccctgagtgacagcaagcacgtggtgctgcctgtggatgatgacagcgacctgaatgtggtggccagctttgacagaagaggagagtacatctacacaggaaatgccaagggcaagatcctggtgctgaagacagacagccaggacctggtggccagcttccgggtgaccaccggcaccagcaacaccacagccatcaagagcattgaatttgccaggaagggcagctgcttcctgatcaacacagctgaccgcatcatccgggtgtatgatggccgggagatcctgacctgtggcagagatggagagcctgagcccatgcagaagctgcaggacctggtgaacagaacaccctggaagaagtgctgcttctctggagatggagagtacatcgtggccggcagcgcccggcagcacgccctgtacatctgggagaagagcatcggcaacctggtgaagatcctgcacggcaccagaggagagctgctgctggatgtggcctggcaccctgtgcggcccatcatcgccagcatcagcagtggagtggtgtccatctgggcccagaaccaggtggagaactggagcgcctttgccccagacttcaaggagctggatgaaaatgtggagtatgaggagcgggagagcgagtttgatattgaagatgaggacaagtctgagcctgagcagacaggagcagatgctgctgaagatgaggaggtggatgtgacctctgtggaccccatcgccgccttctgcagcagtgatgaggagctggaggacagcaaggccctgctgtacctgcccatcgcccctgaggtggaggaccctgaggagaacccctacggccccccaccagatgctgtgcagaccagcctgatggatgaaggagccagcagcgagaagaagaggcagagcagcgcagatggcagccagccccccaagaagaagcccaagaccaccaacatcgagctgcagggcgtgcccaatgatgaggtgcaccccctgctgggcgtgaagggagatggcaagagcaagaagaagcaggccggccggcccaagggcagcaaggccggcggggccatcagcgagctgctgtag

SEQ ID NO: 167671 - DNA, 5379 bp, synthetic construct
  misc_feature 1..5379: note = Description of Artificial Sequence: Synthetic coding sequence
  source 1..5379: mol_type = other DNA
atgagctgtgtgcactacaagttcagcagcaagctgaactatgacacagtgacctttgatggcctgcacatcagcctgtgtgacctgaagaagcagatcatgggccgggagaagctgaaggctgctgactgtgacctgcagatcaccaatgcccagaccaaggaggagtacacagatgacaatgccctgatccccaagaacagctctgtgattgtgcggcgcatccccatcggcggcgtgaagagcaccagcaagacctacgtgatcagcaggacagagcccgccatggccaccaccaaggccattgatgacagcagcgccagcatcagcctggcccagctgaccaagacagccaacctggccgaggccaatgccagcgaggaggacaagatcaaggccatgatgagccagagcggccacgagtatgaccccatcaactacatgaagaagcccctgggccccccaccacccagctacacctgcttccgctgtgggaagccaggccactacatcaagaactgccccaccaatggagacaagaactttgagagcggcccccgcatcaagaagagcacaggcatccccaggagcttcatgatggaggtgaaggaccccaacatgaagggggccatgctgaccaacacaggcaagtatgccatccccaccattgatgctgaggcctatgccatcggcaagaaggagaagccacccttcctgcctgaggagcccagcagcagcagtgaagaagatgaccccatcccagatgagctgctgtgcctgatctgcaaggacatcatgacagatgctgtggtgatcccctgctgcggcaacagctactgtgatgagtgcatcagaacagccctgctggagagtgatgagcacacctgccccacctgccaccagaatgatgtgtccccagatgccctgattgccaacaagttcctgcggcaggccgtgaacaacttcaagaatgagaccggctacaccaagaggctgaggaagcagctgcccccacctcctccacccatccccccaccccggcccctcatccagaggaacctgcagcccctgatgaggagccccatcagccggcagcaggaccccctgatgatccctgtgaccagcagcagcacccacccagcccccagcatcagcagcctgaccagcaaccagagcagcctggcccctcctgtgtctggcaaccccagcagcgccccagcccctgtgcctgacatcacagccaccgtgtccatctctgtgcacagcgagaagagtgatggccccttccgggacagcgacaacaagatcctgcctgctgctgccctggccagcgagcacagcaagggcaccagcagcatcgccatcacagccctgatggaggagaagggctaccaggtgcctgtgctgggcacccccagcctgctgggccagagcctgctgcacggccagctgatccccaccaccggccctgtgcgcatcaacacagcccggcctgggggcggccggcccggctgggagcacagcaacaagctgggctacctggtgtccccaccccagcagatccggcggggggagaggagctgctaccgcagcatcaacagaggccgccaccacagcgagaggagccagaggacccagggccccagcctgcctgccacccctgtgtttgtgcctgtgcccccaccacccctgtacccacctccaccccacaccctgcccctgcccccaggagtgcccccaccccagttcagcccccagttccccccaggccagcccccacctgctggctacagcgtgcccccacctggcttccccccagccccagccaacctgagcaccccctgggtgagcagcggcgtgcagacagcccacagcaacaccatccccaccacccaggccccacccctgagccgggaggagttctaccgggagcagaggcggctgaaggaggaggagaagaagaagagcaagctggatgagttcaccaatgactttgccaaggagctgatggagtacaagaagatccagaaggagcggcggcgctccttcagccgcagcaagagcccctacagcggcagcagctacagccgcagcagctacacctacagcaagagccgcagcggcagcaccaggagccgcagctacagccgctccttcagccgcagccacagccgcagctacagccgcagccccccctacccccggcggggccggggcaagagcaggaactaccgcagccgcagccgcagccacggctaccacaggagccgcagccgcagccccccctaccgccgctaccacagccgcagccgcagcccccaggccttccggggccagagccccaacaagagaaatgtgccccagggcgagacagagcgggagtacttcaaccgctaccgggaggtgcccccaccctatgacatgaaggcctactacggccgctctgtggacttccgggacccctttgagaaggagcgctaccgggagtgggagaggaagtaccgggagtggtatgagaagtactacaagggctacgccgccggggcccagccccggcccagcgccaaccgggagaacttcagccctgagcgcttcctgcccctgaacatccggaacagccccttcacccggggcagaagagaagattatgtgggcggccagagccacaggagcaggaacatcggcagcaactacccagagaagctgagcgccagagatggccacaaccagaaggacaacaccaagagcaaggagaaggagagtgaaaatgcccctggagatggaaaaggaaacaagcacaagaagcacaggaagagaagaaaaggagaggagagcgagggcttcctgaaccctgagctgctggagaccagcaggaagagccgggagcccaccggggtggaggagaacaagacagacagcctgtttgtgctgcccagcagagatgatgccacccctgtgagagatgagcccatggatgctgagagcatcaccttcaagtctgtgtctgagaaggacaagcgggagcgggacaagcccaaggccaagggggacaagaccaagaggaagaatgatggcagcgctgtgtccaagaaggagaacatcgtgaagccagccaagggcccccaggagaaggtggatggagagcgggagaggagccccaggtctgagccccccatcaagaaggccaaggaggagacccccaagacagacaacaccaagagcagcagcagcagccagaaggatgagaagatcaccggcacccccaggaaggcccacagcaagagcgccaaggagcaccaggagaccaagcctgtgaaggaggagaaggtgaagaaggactacagcaaggatgtgaagtctgagaagctgaccaccaaggaggagaaggccaagaagcccaatgagaagaacaagcccctggacaacaagggggagaagaggaagaggaagacagaggagaagggcgtggacaaggactttgagagcagctccatgaagatcagcaagctggaggtgacagaaattgtgaagcccagccccaagaggaagatggagccagacacagagaagatggacaggaccccagagaaggacaagatcagcctgagcgccccagccaagaagatcaagctgaaccgggagaccgggaagaagattggcagcacagagaacatcagcaacaccaaggagcccagcgagaagctggagagcaccagcagcaaggtgaagcaggagaaggtgaagggcaaggtgcggaggaaggtgactggaacagagggcagcagcagcaccctggtggactacaccagcaccagcagcactggaggcagccctgtgaggaagtctgaggagaagacagacaccaagaggacagtcatcaagaccatggaggagtacaacaatgacaacacagccccagcagaagatgtgatcatcatgatccaggtgccccagagcaagtgggacaaggatgactttgagagcgaggaggaggatgtgaagagcacccagcccatcagctctgtgggcaagccagccagcgtcatcaagaatgtgtccaccaagcccagcaacatcgtgaagtacccagagaaggagagcgagcccagcgagaagatccagaagttcaccaaggatgtgtcccatgagatcatccagcacgaggtgaagagcagcaagaacagcgccagcagcgagaagggcaagaccaaggaccgggactacagcgtgctggagaaggagaaccctgagaagaggaagaacagcacccagcctgagaaggagagcaacctggaccggctgaatgagcagggcaacttcaagagcctgagccagagcagcaaggaggcccggaccagtgacaagcatgacagcacccgggccagcagcaacaaggacttcacccccaacagagacaagaagacagattatgacacccgggagtacagcagcagcaagagaagagatgagaagaatgagctgaccaggaggaaggacagccccagcaggaacaaggacagcgccagcggccagaagaacaagccccgggaggagcgggacctgcccaagaagggcaccggggacagcaagaagagcaacagcagccccagccgggacaggaagccccatgaccacaaggccacctatgacaccaagaggcccaatgaggagaccaagtctgtggacaagaacccctgcaaggaccgggagaagcacgtgctggaggccaggaacaacaaggagagcagcggcaacaagctgctgtacatcctgaaccccccagagacccaggtggagaaggagcagatcaccggccagattgacaagagcacagtgaagcccaagccccagctgagccacagcagccggctgagcagtgacctgacccgggagacagatgaagctgcctttgagccagactacaatgaaagtgacagcgagagcaatgtgtctgtgaaggaggaggagagcagcggcaacatcagcaaggacctgaaggacaagatcgtggagaaggccaaggagagcctggacacagctgctgtggtgcaggtgggcatcagcaggaaccagagccacagcagccccagcgtgagccccagccgcagccacagccccagcggcagccagaccaggagccacagcagcagcgccagcagcgctgagagccaggacagcaagaagaagaagaagaagaaggagaagaagaagcacaagaagcacaagaagcacaagaagcacaagaagcatgctggaacagaggtggagctggagaagagccagaagcacaagcacaagaagaagaagagcaagaagaacaaggacaaggagaaggagaaggagaaggatgaccagaaggtgaagtctgtgacagtgtag

SEQ ID NO: 167672 - DNA, 5277 bp, synthetic construct
  misc_feature 1..5277: note = Description of Artificial Sequence: Synthetic coding sequence
  source 1..5277: mol_type = other DNA
atgagctgtgtgcactacaagttcagcagcaagctgaactatgacacagtgacctttgatggcctgcacatcagcctgtgtgacctgaagaagcagatcatgggccgggagaagctgaaggctgctgactgtgacctgcagatcaccaatgcccagaccaaggaggagtacacagatgacaatgccctgatccccaagaacagctctgtgattgtgcggcgcatccccatcggcggcgtgaagagcaccagcaagacctacgtgatcagcaggacagagcccgccatggccaccaccaaggccattgatgacagcagcgccagcatcagcctggcccagctgaccaagacagccaacctggccgaggccaatgccagcgaggaggacaagatcaaggccatgatgagccagagcggccacgagtatgaccccatcaactacatgaagaagcccctgggccccccaccacccagctacacctgcttccgctgtgggaagccaggccactacatcaagaactgccccaccaatggagacaagaactttgagagcggcccccgcatcaagaagagcacaggcatccccaggagcttcatgatggaggtgaaggaccccaacatgaagggggccatgctgaccaacacaggcaagtatgccatccccaccattgatgctgaggcctatgccatcggcaagaaggagaagccacccttcctgcctgaggagcccagcagcagcagtgaagaagatgaccccatcccagatgagctgctgtgcctgatctgcaaggacatcatgacagatgctgtggtgatcccctgctgcggcaacagctactgtgatgagtgcatcagaacagccctgctggagagtgatgagcacacctgccccacctgccaccagaatgatgtgtccccagatgccctgattgccaacaagttcctgcggcaggccgtgaacaacttcaagaatgagaccggctacaccaagaggctgaggaagcagctgcccccacctcctccacccatccccccaccccggcccctcatccagaggaacctgcagcccctgatgaggagccccatcagccggcagcaggaccccctgatgatccctgtgaccagcagcagcacccacccagcccccagcatcagcagcctgaccagcaaccagagcagcctggcccctcctgtgtctggcaaccccagcagcgccccagcccctgtgcctgacatcacagccaccgtgtccatctctgtgcacagcgagaagagtgatggccccttccgggacagcgacaacaagatcctgcctgctgctgccctggccagcgagcacagcaagggcaccagcagcatcgccatcacagccctgatggaggagaagggctaccaggtgcctgtgctgggcacccccagcctgctgggccagagcctgctgcacggccagctgatccccaccaccggccctgtgcgcatcaacacagcccggcctgggggcggccggcccggctgggagcacagcaacaagctgggctacctggtgtccccaccccagcagatccggcggggggagaggagctgctaccgcagcatcaacagaggccgccaccacagcgagaggagccagaggacccagggccccagcctgcctgccacccctgtgtttgtgcctgtgcccccaccacccctgtacccacctccaccccacaccctgcccctgcccccaggagtgcccccaccccagttcagcccccagttccccccaggccagcccccacctgctggctacagcgtgcccccacctggcttccccccagccccagccaacctgagcaccccctgggtgagcagcggcgtgcagacagcccacagcaacaccatccccaccacccaggccccacccctgagccgggaggagttctaccgggagcagaggcggctgaaggaggagagcaagagcccctacagcggcagcagctacagccgcagcagctacacctacagcaagagccgcagcggcagcaccaggagccgcagctacagccgctccttcagccgcagccacagccgcagctacagccgcagccccccctacccccggcggggccggggcaagagcaggaactaccgcagccgcagccgcagccacggctaccacaggagccgcagccgcagccccccctaccgccgctaccacagccgcagccgcagcccccaggccttccggggccagagccccaacaagagaaatgtgccccagggcgagacagagcgggagtacttcaaccgctaccgggaggtgcccccaccctatgacatgaaggcctactacggccgctctgtggacttccgggacccctttgagaaggagcgctaccgggagtgggagaggaagtaccgggagtggtatgagaagtactacaagggctacgccgccggggcccagccccggcccagcgccaaccgggagaacttcagccctgagcgcttcctgcccctgaacatccggaacagccccttcacccggggcagaagagaagattatgtgggcggccagagccacaggagcaggaacatcggcagcaactacccagagaagctgagcgccagagatggccacaaccagaaggacaacaccaagagcaaggagaaggagagtgaaaatgcccctggagatggaaaaggaaacaagcacaagaagcacaggaagagaagaaaaggagaggagagcgagggcttcctgaaccctgagctgctggagaccagcaggaagagccgggagcccaccggggtggaggagaacaagacagacagcctgtttgtgctgcccagcagagatgatgccacccctgtgagagatgagcccatggatgctgagagcatcaccttcaagtctgtgtctgagaaggacaagcgggagcgggacaagcccaaggccaagggggacaagaccaagaggaagaatgatggcagcgctgtgtccaagaaggagaacatcgtgaagccagccaagggcccccaggagaaggtggatggagagcgggagaggagccccaggtctgagccccccatcaagaaggccaaggaggagacccccaagacagacaacaccaagagcagcagcagcagccagaaggatgagaagatcaccggcacccccaggaaggcccacagcaagagcgccaaggagcaccaggagaccaagcctgtgaaggaggagaaggtgaagaaggactacagcaaggatgtgaagtctgagaagctgaccaccaaggaggagaaggccaagaagcccaatgagaagaacaagcccctggacaacaagggggagaagaggaagaggaagacagaggagaagggcgtggacaaggactttgagagcagctccatgaagatcagcaagctggaggtgacagaaattgtgaagcccagccccaagaggaagatggagccagacacagagaagatggacaggaccccagagaaggacaagatcagcctgagcgccccagccaagaagatcaagctgaaccgggagaccgggaagaagattggcagcacagagaacatcagcaacaccaaggagcccagcgagaagctggagagcaccagcagcaaggtgaagcaggagaaggtgaagggcaaggtgcggaggaaggtgactggaacagagggcagcagcagcaccctggtggactacaccagcaccagcagcactggaggcagccctgtgaggaagtctgaggagaagacagacaccaagaggacagtcatcaagaccatggaggagtacaacaatgacaacacagccccagcagaagatgtgatcatcatgatccaggtgccccagagcaagtgggacaaggatgactttgagagcgaggaggaggatgtgaagagcacccagcccatcagctctgtgggcaagccagccagcgtcatcaagaatgtgtccaccaagcccagcaacatcgtgaagtacccagagaaggagagcgagcccagcgagaagatccagaagttcaccaaggatgtgtcccatgagatcatccagcacgaggtgaagagcagcaagaacagcgccagcagcgagaagggcaagaccaaggaccgggactacagcgtgctggagaaggagaaccctgagaagaggaagaacagcacccagcctgagaaggagagcaacctggaccggctgaatgagcagggcaacttcaagagcctgagccagagcagcaaggaggcccggaccagtgacaagcatgacagcacccgggccagcagcaacaaggacttcacccccaacagagacaagaagacagattatgacacccgggagtacagcagcagcaagagaagagatgagaagaatgagctgaccaggaggaaggacagccccagcaggaacaaggacagcgccagcggccagaagaacaagccccgggaggagcgggacctgcccaagaagggcaccggggacagcaagaagagcaacagcagccccagccgggacaggaagccccatgaccacaaggccacctatgacaccaagaggcccaatgaggagaccaagtctgtggacaagaacccctgcaaggaccgggagaagcacgtgctggaggccaggaacaacaaggagagcagcggcaacaagctgctgtacatcctgaaccccccagagacccaggtggagaaggagcagatcaccggccagattgacaagagcacagtgaagcccaagccccagctgagccacagcagccggctgagcagtgacctgacccgggagacagatgaagctgcctttgagccagactacaatgaaagtgacagcgagagcaatgtgtctgtgaaggaggaggagagcagcggcaacatcagcaaggacctgaaggacaagatcgtggagaaggccaaggagagcctggacacagctgctgtggtgcaggtgggcatcagcaggaaccagagccacagcagccccagcgtgagccccagccgcagccacagccccagcggcagccagaccaggagccacagcagcagcgccagcagcgctgagagccaggacagcaagaagaagaagaagaagaaggagaagaagaagcacaagaagcacaagaagcacaagaagcacaagaagcatgctggaacagaggtggagctggagaagagccagaagcacaagcacaagaagaagaagagcaagaagaacaaggacaaggagaaggagaaggagaaggatgaccagaaggtgaagtctgtgacagtgtag

SEQ ID NO: 167673 - DNA, 2859 bp, synthetic construct
  misc_feature 1..2859: note = Description of Artificial Sequence: Synthetic coding sequence
  source 1..2859: mol_type = other DNA
atgagctgtgtgcactacaagttcagcagcaagctgaactatgacacagtgacctttgatggcctgcacatcagcctgtgtgacctgaagaagcagatcatgggccgggagaagctgaaggctgctgactgtgacctgcagatcaccaatgcccagaccaaggaggagtacacagatgacaatgccctgatccccaagaacagctctgtgattgtgcggcgcatccccatcggcggcgtgaagagcaccagcaagacctacgtgatcagcaggacagagcccgccatggccaccaccaaggccattgatgacagcagcgccagcatcagcctggcccagctgaccaagacagccaacctggccgaggccaatgccagcgaggaggacaagatcaaggccatgatgagccagagcggccacgagtatgaccccatcaactacatgaagaagcccctgggccccccaccacccagctacacctgcttccgctgtgggaagccaggccactacatcaagaactgccccaccaatggagacaagaactttgagagcggcccccgcatcaagaagagcacaggcatccccaggagcttcatgatggaggtgaaggaccccaacatgaagggggccatgctgaccaacacaggcaagtatgccatccccaccattgatgctgaggcctatgccatcggcaagaaggagaagccacccttcctgcctgaggagcccagcagcagcagtgaagaagatgaccccatcccagatgagctgctgtgcctgatctgcaaggacatcatgacagatgctgtggtgatcccctgctgcggcaacagctactgtgatgagtgcatcagaacagccctgctggagagtgatgagcacacctgccccacctgccaccagaatgatgtgtccccagatgccctgattgccaacaagttcctgcggcaggccgtgaacaacttcaagaatgagaccggctacaccaagaggctgaggaagcagctgcccccacctcctccacccatccccccaccccggcccctcatccagaggaacctgcagcccctgatgaggagccccatcagccggcagcaggaccccctgatgatccctgtgaccagcagcagcacccacccagcccccagcatcagcagcctgaccagcaaccagagcagcctggcccctcctgtgtctggcaaccccagcagcgccccagcccctgtgcctgacatcacagccaccgtgtccatctctgtgcacagcgagaagagtgatggccccttccgcaccagcagcactggaggcagccctgtgaggaagtctgaggagaagacagacaccaagaggacagtcatcaagaccatggaggagtacaacaatgacaacacagccccagcagaagatgtgatcatcatgatccaggtgccccagagcaagtgggacaaggatgactttgagagcgaggaggaggatgtgaagagcacccagcccatcagctctgtgggcaagccagccagcgtcatcaagaatgtgtccaccaagcccagcaacatcgtgaagtacccagagaaggagagcgagcccagcgagaagatccagaagttcaccaaggatgtgtcccatgagatcatccagcacgaggtgaagagcagcaagaacagcgccagcagcgagaagggcaagaccaaggaccgggactacagcgtgctggagaaggagaaccctgagaagaggaagaacagcacccagcctgagaaggagagcaacctggaccggctgaatgagcagggcaacttcaagagcctgagccagagcagcaaggaggcccggaccagtgacaagcatgacagcacccgggccagcagcaacaaggacttcacccccaacagagacaagaagacagattatgacacccgggagtacagcagcagcaagagaagagatgagaagaatgagctgaccaggaggaaggacagccccagcaggaacaaggacagcgccagcggccagaagaacaagccccgggaggagcgggacctgcccaagaagggcaccggggacagcaagaagagcaacagcagccccagccgggacaggaagccccatgaccacaaggccacctatgacaccaagaggcccaatgaggagaccaagtctgtggacaagaacccctgcaaggaccgggagaagcacgtgctggaggccaggaacaacaaggagagcagcggcaacaagctgctgtacatcctgaaccccccagagacccaggtggagaaggagcagatcaccggccagattgacaagagcacagtgaagcccaagccccagctgagccacagcagccggctgagcagtgacctgacccgggagacagatgaagctgcctttgagccagactacaatgaaagtgacagcgagagcaatgtgtctgtgaaggaggaggagagcagcggcaacatcagcaaggacctgaaggacaagatcgtggagaaggccaaggagagcctggacacagctgctgtggtgcaggtgggcatcagcaggaaccagagccacagcagccccagcgtgagccccagccgcagccacagccccagcggcagccagaccaggagccacagcagcagcgccagcagcgctgagagccaggacagcaagaagaagaagaagaagaaggagaagaagaagcacaagaagcacaagaagcacaagaagcacaagaagcatgctggaacagaggtggagctggagaagagccagaagcacaagcacaagaagaagaagagcaagaagaacaaggacaaggagaaggagaaggagaaggatgaccagaaggtgaagtctgtgacagtgtag

SEQ ID NO: 167674 - DNA, 357 bp, synthetic construct
  misc_feature 1..357: note = Description of Artificial Sequence: Synthetic coding sequence
  source 1..357: mol_type = other DNA
atgagctgtgtgcactacaagttcagcagcaagctgaactatgacacagtgacctttgatggcctgcacatcagcctgtgtgacctgaagaagcagatcatgggccgggagaagctgaaggctgctgactgtgacctgcagatcaccaatgcccagaccaaggaggagtacacagatgacaatgccctgatccccaagaacagctctgtgattgtgcggcgcatccccatcggcggcgtgaagagcaccagcaagacctacgtgatcagcaggacagagcccgccatggccaccaccaaggctgtgtgcaagaacaccatcagccacttcttctacaccctgctgctgcccctgtag

SEQ ID NO: 167675 - DNA, 1410 bp, synthetic construct
  misc_feature 1..1410: note = Description of Artificial Sequence: Synthetic coding sequence
  source 1..1410: mol_type = other DNA
atggctgctgaggccggcgtggtgggcgctggggccagcccagatggagactggagggaccaggcctgtggcctgctgctgcacgtgcacctgagcagccggctgggccgggccgcccctgtgaggacaggccgccacctgaggacagtgtttgaggacacagtggaggagagggtcatcaatgaggagtacaagatctggaagaagaacacccccttcctgtatgacctggtgatgacccacgccctgcagtggcccagcctgactgtgcagtggctgcctgaggtgaccaagccagagggcaaggactatgccctgcactggctggtgctgggcacccacaccagtgatgagcagaaccacctggtggtggcccgggtgcacatccccaatgatgatgcccagtttgatgccagccactgtgacagcgacaagggggagtttggaggctttggatctgtgacaggcaagattgaatgtgagatcaagatcaaccacgagggggaggtgaacagagcccgctacatgccccagaacccccacatcatcgccaccaagacccccagcagtgatgtgctggtgtttgactacaccaagcacccagccaagccagaccccagcggggagtgcaacccagacctgcggctgcggggccaccagaaggagggctacggcctgtcctggaacagcaacctgagcggccacctgctgagcgccagtgatgaccacacagtgtgcctgtgggacatcaatgccggccccaaggagggcaagatcgtggatgccaaggccatcttcaccggccacagcgctgtggtggaggatgtggcctggcacctgctgcacgagagcctgtttggatctgtggctgatgaccagaagctgatgatctgggacaccaggagcaacaccaccagcaagcccagccacctggtggatgcccacacagctgaggtgaactgcctgtccttcaacccctacagcgagttcatcctggccaccggcagcgctgacaagacagtggccctgtgggacctgaggaacctgaagctgaagctgcacacctttgagagccacaaggatgagatcttccaggtgcactggagcccccacaatgagaccatcctggccagcagcggcacagaccggcggctgaatgtgtgggacctgagcaagattggagaggagcagagcgcagaagatgctgaagatggccccccagagctgctcttcatccatggaggccacacagccaagatcagtgacttctcctggaaccccaatgagccctgggtgatctgcagcgtgtctgaggacaacatcatgcagatctggcagatggccgagaacatctacaatgatgaggagagtgatgtgaccaccagcgagctggagggccagggcagctag

SEQ ID NO: 167676 - DNA, 1278 bp, synthetic construct
  misc_feature 1..1278: note = Description of Artificial Sequence: Synthetic coding sequence
  source 1..1278: mol_type = other DNA
atggccagcaaggagatgtttgaggacacagtggaggagagggtcatcaatgaggagtacaagatctggaagaagaacacccccttcctgtatgacctggtgatgacccacgccctgcagtggcccagcctgactgtgcagtggctgcctgaggtgaccaagccagagggcaaggactatgccctgcactggctggtgctgggcacccacaccagtgatgagcagaaccacctggtggtggcccgggtgcacatccccaatgatgatgcccagtttgatgccagccactgtgacagcgacaagggggagtttggaggctttggatctgtgacaggcaagattgaatgtgagatcaagatcaaccacgagggggaggtgaacagagcccgctacatgccccagaacccccacatcatcgccaccaagacccccagcagtgatgtgctggtgtttgactacaccaagcacccagccaagccagaccccagcggggagtgcaacccagacctgcggctgcggggccaccagaaggagggctacggcctgtcctggaacagcaacctgagcggccacctgctgagcgccagtgatgaccacacagtgtgcctgtgggacatcaatgccggccccaaggagggcaagatcgtggatgccaaggccatcttcaccggccacagcgctgtggtggaggatgtggcctggcacctgctgcacgagagcctgtttggatctgtggctgatgaccagaagctgatgatctgggacaccaggagcaacaccaccagcaagcccagccacctggtggatgcccacacagctgaggtgaactgcctgtccttcaacccctacagcgagttcatcctggccaccggcagcgctgacaagacagtggccctgtgggacctgaggaacctgaagctgaagctgcacacctttgagagccacaaggatgagatcttccaggtgcactggagcccccacaatgagaccatcctggccagcagcggcacagaccggcggctgaatgtgtgggacctgagcaagattggagaggagcagagcgcagaagatgctgaagatggccccccagagctgctcttcatccatggaggccacacagccaagatcagtgacttctcctggaaccccaatgagccctgggtgatctgcagcgtgtctgaggacaacatcatgcagatctggcagatggccgagaacatctacaatgatgaggagagtgatgtgaccaccagcgagctggagggccagggcagctag

SEQ ID NO: 167677 - DNA, 1251 bp, synthetic construct
  misc_feature 1..1251: note = Description of Artificial Sequence: Synthetic coding sequence
  source 1..1251: mol_type = other DNA
atggccagcaaggagatgtttgaggacacagtggaggagagggtcatcaatgaggagtacaagatctggaagaagaacacccccttcctgtatgacctggtgatgacccacgccctgcagtggcccagcctgactgtgcagtggctgcctgaggtgaccaagccagagggcaaggactatgccctgcactggctggtgctgggcacccacaccagtgatgagcagaaccacctggtggtggcccgggtgcacatccccaatgatgatgcccagtttgatgccagccactgtgacagcgacaagggcggcaagattgaatgtgagatcaagatcaaccatgaaggagaggtgaacagagcccgctacatgccccagaacccccacatcatcgccaccaagacccccagcagtgatgtgctggtgtttgactacaccaagcacccagccaagccagaccccagcggggagtgcaacccagacctgcggctgcggggccaccagaaggagggctacggcctgtcctggaacagcaacctgagcggccacctgctgagcgccagtgatgaccacacagtgtgcctgtgggacatcaatgccggccccaaggagggcaagatcgtggatgccaaggccatcttcaccggccacagcgctgtggtggaggatgtggcctggcacctgctgcacgagagcctgtttggatctgtggctgatgaccagaagctgatgatctgggacaccaggagcaacaccaccagcaagcccagccacctggtggatgcccacacagctgaggtgaactgcctgtccttcaacccctacagcgagttcatcctggccactggatctgctgacaagacagtggccctgtgggacctgaggaacctgaagctgaagctgcacacctttgagagccacaaggatgagatcttccaggtgcactggagcccccacaatgagaccatcctggccagcagcggcacagaccggcggctgaatgtgtgggacctgagcaagatcggggaggagcagagcgcagaagatgctgaagatggccccccagagctgctcttcatccacggcggccacacagccaagatcagtgacttctcctggaaccccaatgagccctgggtgatctgcagcgtgtctgaggacaacatcatgcagatctggcagatggccgagaacatctacaatgatgaggagagtgatgtgaccaccagcgagctggagggccagggcagctag

SEQ ID NO: 167678 - DNA, 561 bp, synthetic construct
  misc_feature 1..561: note = Description of Artificial Sequence: Synthetic coding sequence
  source 1..561: mol_type = other DNA
atggccagccccagcaaggctgtgattgtgcctggaaatggaggaggagatgtgaccacccacggctggtacggctgggtgaagaaggagctggagaagatccctggcttccagtgcctggccaagaacatgccagaccccatcacagcccgggagagcatctggctgcccttcatggagacagagctgcactgtgatgagaagaccatcatcatcggccacagcagcggggccatcgccgccatgagatatgcagagacccaccgggtgtatgccatcgtgctggtgtctgcctacaccagtgacctgggagatgaaaatgaaagagccagcggctacttcacccggccctggcagtgggagaagatcaaggccaactgcccctacatcgtgcagtttggcagcacagatgaccccttcctgccctggaaggagcagcaggaggtggccgaccggctggagaccaagctgcacaagttcacagactgtggccacttccagaacacagagttccacgagctgatcaccgtggtgaagagcctgctgaaggtgcctgcctag

SEQ ID NO: 167679 - DNA, 519 bp, synthetic construct
  misc_feature 1..519: note = Description of Artificial Sequence: Synthetic coding sequence
  source 1..519: mol_type = other DNA
atggccagccccagcaaggctgtgattgtgcctggaaatggaggaggagatgtgaccacccacggctggtacggctgggtgaagaaggagctggagaagatccctggcttccagtgcctggccaagaacatgccagaccccatcacagcccgggagagcatctggctgcccttcatggagacagagctgcactgtgatgagaagaccatcatcatcggccacagcagcggggccatcgccgccatgagatatgcagagacccaccgggtgtatgccatcgtgctggtgtctgcctacaccagtgacctgggagatgaaaatgaaagagccagcggctacttcacccggccctggcagtgggagaagatcaaggccaactgcccctacatcgtgcagtttggcagcacagatgaccccttcctgccctggaaggagcagcaggaggtggccgactggaagcccaactgcaccaacagcctgactgtggccaccttccgcacccagagcttcatgaactag

SEQ ID NO: 167680 - DNA, 741 bp, synthetic construct
  misc_feature 1..741: note = Description of Artificial Sequence: Synthetic coding sequence
  source 1..741: mol_type = other DNA
atggctgctgctgccatcccagccctgctgctgtgcctgcccctgctcttcctgctgtttggctggagccgggccaggagagatgacccccacagcctgtgctatgacatcaccgtcatccccaagttccggcccggcccccgctggtgtgctgtgcagggccaggtggatgagaagaccttcctgcactatgactgtggcaacaagacagtgacccctgtgagccccctgggcaagaagctgaatgtgaccatggcctggaaggcccagaaccctgtgctgcgggaggtggtggacatcctgacagagcagctgctggacatccagctggagaactacacccccaaggagcccctgaccctgcaggccaggatgagctgtgagcagaaggccgagggccacagcagcggctcctggcagttcagcattgatggccagaccttcctgctgtttgattctgagaagaggatgtggaccaccgtgcaccctggggccaggaagatgaaggagaagtgggagaatgacaaggatgtggccatgtccttccactacatctccatgggagactgcatcggctggctggaggacttcctgatgggcatggacagcaccctggagcccagcgctggggcccccctggccatgagcagcggcaccacccagctgcgggccacagccaccaccctcatcctgtgctgcctgctgatcatcctgccctgcttcatcctgcccggcatctag

SEQ ID NO: 167681 - DNA, 741 bp, synthetic construct; identical to SEQ ID NO: 167680
  misc_feature 1..741: note = Description of Artificial Sequence: Synthetic coding sequence
  source 1..741: mol_type = other DNA

SEQ ID NO: 167682 - DNA, 4923 bp, synthetic construct
  misc_feature 1..4923: note = Description of Artificial Sequence: Synthetic coding sequence
  source 1..4923: mol_type = other DNA
atgcagagcttccgggagcgctgtggcttccacggcaagcagcagaactaccagcagaccagccaggagaccagccggctggagaactaccggcagcccagccaggccggcctgagctgtgaccggcagaggctgctggccaaggactactacaacccccagccctaccccagctatgaaggaggagctggcaccccatctggaacagctgctgctgtggccgctgacaagtaccaccggggcagcaaggccctgcccacccagcagggcctgcagggccgcccagccttccctggctacggcgtgcaggacagcagcccctacccaggccgctatgctggggaggagagcctgcaggcctggggcgccccccagcccccaccaccccagccccagcccctgcctgctggggtggccaagtatgatgagaacctgatgaagaagacagctgtgccccccagccggcagtatgcagagcagggcgcccaggtgcccttccgcacccacagcctgcacgtgcagcagcccccaccaccccagcagcccctggcctaccccaagctgcagaggcagaagctgcagaatgacatcgccagccccctgcccttcccccagggcacccacttcccccagcacagccagagcttccccaccagcagcacctacagcagctctgtgcagggcggcggccagggcgcccacagctacaagagctgcacagcccccacagcccagccccatgaccggcccctgacagccagcagcagcctggcccctggccagagggtgcagaacctgcacgcctaccagagcggccgcctgtcctatgaccagcagcagcagcagcagcagcagcagcagcagcagcagcaggccctgcagagccgccaccacgcccaggagaccctgcactaccagaacctggccaagtaccagcactacggccagcagggccagggctactgccagccagatgctgctgtgaggaccccagagcagtactaccagaccttcagccccagcagcagccacagccctgcccggtctgtgggccgcagccccagctacagcagcacccccagccccctgatgcccaacctggagaacttcccctacagccagcagcccctgagcactggagccttccctgctggcatcacagaccacagccacttcatgcccctgctgaaccccagccccacagatgccaccagctctgtggacacccaggccggcaactgcaagcccctgcagaaggacaagctgcctgagaacctgctgagtgacctgagcctgcagagcctgacagccctgaccagccaggtggagaacatcagcaacacagtgcagcagctgctgctgagcaaggctgctgtgccccagaagaagggcgtgaagaacctggtgtccaggaccccagagcagcacaagagccagcactgcagccctgagggcagcggctacagcgctgagcctgctggcacccccctgtctgagccccccagcagcaccccccagagcacccacgccgagccccaggaggccgactacctgagcggcagcgaggaccccctggagaggagcttcctgtactgcaaccaggcccggggcagccctgcccgggtgaacagcaacagcaaggccaagccagagagcgtgtccacctgcagcgtgaccagcccagatgacatgagcaccaagagtgatgacagcttccagagcctgcacggcagcctgcccctggacagcttcagcaagtttgtggccggggagcgggactgcccccggctgctgctgagcgccctggcccaggaggacctggccagcgagatcctgggcctgcaggaggccatcggggagaaggctgacaaggcctgggccgaggcccccagcctggtgaaggacagcagcaagccacccttcagcctggagaaccacagcgcctgcctggacagcgtggccaagagcgcctggcccaggcctggagagcctgaggccctgcctgacagcctgcagctggacaagggcggcaatgccaaggacttcagccctggcctgtttgaggaccccagcgtggcctttgccaccccagaccccaagaagaccaccggccccctgagctttggcaccaagcccaccctgggcgtgcctgccccagaccccaccacagctgcctttgactgcttcccagacaccacagctgccagcagcgctgacagcgccaacccctttgcctggccagaggagaacctgggagatgcctgcccccgctggggcctgcaccctggagagctgaccaagggcctggagcagggcggcaaggccagtgatggcatcagcaaaggagacacccatgaggccagcgcctgcctgggcttccaggaggaggaccccccaggagagaaggtggccagcctgcccggggacttcaagcaggaggaggtgggcggcgtgaaggaggaggccggcggcctgctgcagtgcccagaggtggccaaggctgaccgctggctggaggacagccgccactgctgcagcacagctgactttggagacctgcccctgctgccccccaccagcaggaaagaagacctggaggccgaggaggagtacagcagcctgtgtgagctgctgggcagccctgagcagaggcctggcatgcaggaccccctgagccccaaggcccccctcatctgcaccaaggaggaggtggaggaggtgctggacagcaaggccggctggggcagcccctgccacctgtctggagagagcgtcatcctgctgggccccaccgtgggcacagagagcaaggtgcagagctggtttgagagcagcctgagccacatgaagccaggagaggagggcccagatggagagcgggcccctggggacagcaccaccagtgatgccagcctggcccagaagcccaacaagccagctgtgcctgaggcccccatcgccaagaaggagcctgtgccccggggcaagagcctgcggagcagaagagtgcaccggggcctgcctgaggccgaggacagcccctgccgggcccctgtgctgcccaaggacctgctgctgcctgagagctgcaccggccccccccagggccagatggagggcgctggggcccctggccgcggggccagcgagggcctgcccaggatgtgcaccaggagcctgacagccctgtctgagcccaggaccccaggccccccaggcctgaccaccaccccagcccccccagacaagctgggcggcaagcagagagctgccttcaagagcggcaagagggtgggcaagcccagccccaaggccgccagcagccccagcaacccagctgccctgcctgtggccagtgacagcagccccatgggcagcaagaccaaggagacagacagccccagcaccccaggcaaggaccagaggtccatgatcctgcggagcaggaccaagacccaggagatcttccacagcaagagaagaagacccagcgagggccgcctgcccaactgccgggccaccaagaagctgctggacaacagccacctgcctgccaccttcaaggtgagcagcagcccccagaaggagggccgggtgtcccagagggcccgggtgcccaagccaggggccggcagcaagctgagtgaccggcccctgcacgccctgaagaggaagagcgccttcatggcccctgtgcccaccaagaagaggaacctggtgctgcggagccgcagcagcagcagcagcaatgccagcggaaatggaggagatggcaaggaggagaggcctgagggcagccccaccctcttcaagaggatgagcagccccaagaaggccaagcccaccaagggaaatggagagcccgccaccaagctgcccccacctgagaccccagatgcctgcctgaagctggccagccgggccgccttccagggcgccatgaagaccaaggtgctgccccccaggaagggccggggcctgaagctggaggccatcgtgcagaagatcaccagccccagcctgaagaagtttgcctgcaaggcccctggggccagccctggcaaccccctgagccccagcctgagtgacaaggaccggggcctgaagggagctgggggcagccctgtgggcgtggaggagggcctggtgaatgtgggcaccggccagaagctgcccaccagcggggctgaccccctgtgcaggaaccccaccaacagaagcctgaagggcaagctgatgaacagcaagaagctgagcagcacagactgcttcaagacagaggccttcaccagccctgaggccctgcagcccggcggcacagccctggcccccaagaagaggagcaggaagggccgggccggggcccacggcctgagcaagggccccctggagaagaggccctacctgggccctgccctgctgctgaccccccgggaccgggccagcggcacccagggcgccagcgaggacaacagcggcggcggcggcaagaagcccaagatggaggagctgggcctggccagccagcccccagagggccggccctgccagccccagacccgggcccagaagcagcccggccacaccaactacagcagctacagcaagaggaagaggctgacccggggccgggccaagaacaccaccagcagcccctgcaagggccgggccaagagaagacggcagcagcaggtgctgcccctggaccctgctgagcctgagatccggctgaagtacatcagcagctgcaagaggctgcggagtgacagcaggaccccagccttcagcccctttgagcccagcctgggcgcccagaaccccaggagcggccagaatgcccccccagccccagcagatgcccggcccctgtgcaccacccgggacagaagagcctacagcgcccgggagcagggccagaggtag

SEQ ID NO: 167683 - DNA, 5589 bp, synthetic construct
  misc_feature 1..5589: note = Description of Artificial Sequence: Synthetic coding sequence
  source 1..5589: mol_type = other DNA
atgcagagcttccgggagcgctgtggcttccacggcaagcagcagaactaccagcagaccagccaggagaccagccggctggagaactaccggcagcccagccaggccggcctgagctgtgaccggcagaggctgctggccaaggactactacaacccccagccctaccccagctatgaaggaggagctggcaccccatctggaacagctgctgctgtggccgctgacaagtaccaccggggcagcaaggccctgcccacccagcagggcctgcagggccgcccagccttccctggctacggcgtgcaggacagcagcccctacccaggccgctatgctggggaggagagcctgcaggcctggggcgccccccagcccccaccaccccagccccagcccctgcctgctggggtggccaagtatgatgagaacctgatgaagaagacagctgtgccccccagccggcagtatgcagagcagggcgcccaggtgcccttccgcacccacagcctgcacgtgcagcagcccccaccaccccagcagcccctggcctaccccaagctgcagaggcagaagctgcagaatgacatcgccagccccctgcccttcccccagggctggtgggccggccacagctacaagagctgcacagcccccacagcccagccccatgaccggcccctgacagccagcagcagcctggcccctggccagagggtgcagaacctgcacgcctaccagagcggccgcctgtcctatgaccagcagcagcagcagcagcagcagcagcagcagcagcagcaggccctgcagagccgccaccacgcccaggagaccctgcactaccagaacctggccaagtaccagcactacggccagcagggccagggctactgccagccagatgctgctgtgaggaccccagagcagtactaccagaccttcagccccagcagcagccacagccctgcccggtctgtgggccgcagccccagctacagcagcacccccagccccctgatgcccaacctggagaacttcccctacagccagcagcccctgagcactggagccttccctgctggcatcacagaccacagccacttcatgcccctgctgaaccccagccccacagatgccaccagctctgtggacagcctgacagccctgaccagccaggtggagaacatcagcaacacagtgcagcagctgctgctgagcaaggctgctgtgccccagaagaagggcgtgaagaacctggtgtccaggaccccagagcagcacaagagccagcactgcagccctgagggcagcggctacagcgctgagcctgctggcacccccctgtctgagccccccagcagcaccccccagagcacccacgccgagccccaggaggccgactacctgagcggcagcgaggaccccctggagaggagcttcctgtactgcaaccaggcccggggcagccctgcccgggtgaacagcaacagcaaggccaagccagagagcgtgtccacctgcagcgtgaccagcccagatgacatgagcaccaagagtgatgacagcttccagagcctgcacggcagcctgcccctggacagcttcagcaagtttgtggccggggagcgggactgcccccggctgctgctgagcgccctggcccaggaggacctggccagcgagatcctgggcctgcaggaggccatcggggagaaggctgacaaggcctgggccgaggcccccagcctggtgaaggacagcagcaagccacccttcagcctggagaaccacagcgcctgcctggacagcgtggccaagagcgcctggcccaggcctggagagcctgaggccctgcctgacagcctgcagctggacaagggcggcaatgccaaggacttcagccctggcctgtttgaggaccccagcgtggcctttgccaccccagaccccaagaagaccaccggccccctgagctttggcaccaagcccaccctgggcgtgcctgccccagaccccaccacagctgcctttgactgcttcccagacaccacagctgccagcagcgctgacagcgccaacccctttgcctggccagaggagaacctgggagatgcctgcccccgctggggcctgcaccctggagagctgaccaagggcctggagcagggcggcaaggccagtgatggcatcagcaaaggagacacccatgaggccagcgcctgcctgggcttccaggaggaggaccccccaggagagaaggtggccagcctgcccggggacttcaagcaggaggaggtgggcggcgtgaaggaggaggccggcggcctgctgcagtgcccagaggtggccaaggctgaccgctggctggaggacagccgccactgctgcagcacagctgactttggagacctgcccctgctgccccccaccagcaggaaagaagacctggaggccgaggaggagtacagcagcctgtgtgagctgctgggcagccctgagcagaggcctggcatgcaggaccccctgagccccaaggcccccctcatctgcaccaaggaggaggtggaggaggtgctggacagcaaggccggctggggcagcccctgccacctgtctggagagagcgtcatcctgctgggccccaccgtgggcacagagagcaaggtgcagagctggtttgagagcagcctgagccacatgaagccaggagaggagggcccagatggagagcgggcccctggggacagcaccaccagtgatgccagcctggcccagaagcccaacaagccagctgtgcctgaggcccccatcgccaagaaggagcctgtgccccggggcaagagcctgcggagcagaagagtgcaccggggcctgcctgaggccgaggacagcccctgccgggcccctgtgctgcccaaggacctgctgctgcctgagagctgcaccggccccccccagggccagatggagggcgctggggcccctggccgcggggccagcgagggcctgcccaggatgtgcaccaggagcctgacagccctgtctgagcccaggaccccaggccccccaggcctgaccaccaccccagcccccccagacaagctgggcggcaagcagagagctgccttcaagagcggcaagagggtgggcaagcccagccccaaggccgccagcagccccagcaacccagctgccctgcctgtggccagtgacagcagccccatgggcagcaagaccaaggagacagacagccccagcaccccaggcaaggaccagaggtccatgatcctgcggagcaggaccaagacccaggagatcttccacagcaagagaagaagacccagcgagggccgcctgcccaactgccgggccaccaagaagctgctggacaacagccacctgcctgccaccttcaaggtgagcagcagcccccagaaggagggccgggtgtcccagagggcccgggtgcccaagccaggggccggcagcaagctgagtgaccggcccctgcacgccctgaagaggaagagcgccttcatggcccctgtgcccaccaagaagaggaacctggtgctgcggagccgcagcagcagcagcagcaatgccagcggaaatggaggagatggcaaggaggagaggcctgagggcagccccaccctcttcaagaggatgagcagccccaagaaggccaagcccaccaagggaaatggagagcccgccaccaagctgcccccacctgagaccccagatgcctgcctgaagctggccagccgggccgccttccagggcgccatgaagaccaaggtgctgccccccaggaagggccggggcctgaagctggaggccatcgtgcagaagatcaccagccccagcctgaagaagtttgcctgcaaggcccctggggccagccctggcaaccccctgagccccagcctgagtgacaaggaccggggcctgaagggagctgggggcagccctgtgggcgtggaggagggcctggtgaatgtgggcaccggccagaagctgcccaccagcggggctgaccccctgtgcaggaaccccaccaacagaagcctgaagggcaagctgatgaacaacagagccagcggcacccagggcgccagcgaggacaacagcggcggcggcggcaagaagcccaagatggaggagctgggcctggccagccagcccccagagggccggccctgccagccccagacccgggcccagaagcagcccggccacaccaactacagcagctacagcaagaggaagaggctgacccggggccgggccaagaacaccaccagcagcccctgcaagggccgggccaagagaagacggcagcagcaggtgctgcccctggaccctgctgagcctgagatccggctgaagtacatcagcagctgcaagaggctgcggagtgacagcaggaccccagccttcagcccctttgtgcgggtggagaagagagatgccttcaccaccatctgcaccgtggtgaacagccctggagatgcccccaagccccacaggaagcccagcagcagcgccagcagcagcagcagcagcagcagcttcagcctggatgctgctggggccagcctggccaccctgcccggcggcagcatcctgcagccccggcccagcctgcccctgagcagcaccatgcacctgggccctgtggtgtccaaggccctgagcaccagctgcctggtgtgctgcctgtgccagaacccagccaacttcaaggacctgggggacctgtgtggcccctactacccagagcactgcctgcccaagaagaagcccaagctgaaggagaaggtgcggcctgagggcacctgtgaggaggccagcctgcccctggagaggaccctgaagggcccagaatgtgccgccgccgccacagctgggaagccacccaggccagatggccctgctgaccctgccaagcagggccccctgcggaccagcgcccggggcctgagccggcggctgcagagctgctactgctgtgatggccgggaggatggaggagaggaggccgccccagctgacaagggccactgggtgcatgaggcctgtgctgtgtggacaggaggagtgtacctggtggccggcaagctgtttggcctgcaggaggccatgaaggtggccgtggacatgcatggaggcaccgtggccctggcccctggggacttcagcctgcccggcctgcgctttgccagcctcttccagggccccagctggtgtgactgccctgtgctggccaccagcacccccagctcctggagccgctgtgtgcctgctgccaagaagccaggcccccccctgggcgccgccaccaaggatgccagcacccccaccaccaccagggtgcctgccatgcaggtgcgggcccggcccggcaccggcggccactggagccccagcaagcagagccggggcaccctgcccggccacagcagccccaaccctggccccatcagcctcttctccttcccccccctgctgccccagcagttcttctaccccagcgtgtgcctggacctgtgctgggccatgcctggcacctggaagtag

SEQ ID NO: 167684 - DNA, 5721 bp, synthetic construct
  misc_feature 1..5721: note = Description of Artificial Sequence: Synthetic coding sequence
  source 1..5721: mol_type = other DNA
atgcagagcttccgggagcgctgtggcttccacggcaagcagcagaactaccagcagaccagccaggagaccagccggctggagaactaccggcagcccagccaggccggcctgagctgtgaccggcagaggctgctggccaaggactactacaacccccagccctaccccagctatgaaggaggagctggcaccccatctggaacagctgctgctgtggccgctgacaagtaccaccggggcagcaaggccctgcccacccagcagggcctgcagggccgcccagccttccctggctacggcgtgcaggacagcagcccctacccaggccgctatgctggggaggagagcctgcaggcctggggcgccccccagcccccaccaccccagccccagcccctgcctgctggggtggccaagtatgatgagaacctgatgaagaagacagctgtgccccccagccggcagtatgcagagcagggcgcccaggtgcccttccgcacccacagcctgcacgtgcagcagcccccaccaccccagcagcccctggcctaccccaagctgcagaggcagaagctgcagaatgacatcgccagccccctgcccttcccccagggcacccacttcccccagcacagccagagcttccccaccagcagcacctacagcagctctgtgcagggcggcggccagggcgcccacagctacaagagctgcacagcccccacagcccagccccatgaccggcccctgacagccagcagcagcctggcccctggccagagggtgcagaacctgcacgcctaccagagcggccgcctgtcctatgaccagcagcagcagcagcagcagcagcagcagcagcagcagcaggccctgcagagccgccaccacgcccaggagaccctgcactaccagaacctggccaagtaccagcactacggccagcagggccagggctactgccagccagatgctgctgtgaggaccccagagcagtactaccagaccttcagccccagcagcagccacagccctgcccggtctgtgggccgcagccccagctacagcagcacccccagccccctgatgcccaacctggagaacttcccctacagccagcagcccctgagcactggagccttccctgctggcatcacagaccacagccacttcatgcccctgctgaaccccagccccacagatgccaccagctctgtggacacccaggccggcaactgcaagcccctgcagaaggacaagctgcctgagaacctgctgagtgacctgagcctgcagagcctgacagccctgaccagccaggtggagaacatcagcaacacagtgcagcagctgctgctgagcaaggctgctgtgccccagaagaagggcgtgaagaacctggtgtccaggaccccagagcagcacaagagccagcactgcagccctgagggcagcggctacagcgctgagcctgctggcacccccctgtctgagccccccagcagcaccccccagagcacccacgccgagccccaggaggccgactacctgagcggcagcgaggaccccctggagaggagcttcctgtactgcaaccaggcccggggcagccctgcccgggtgaacagcaacagcaaggccaagccagagagcgtgtccacctgcagcgtgaccagcccagatgacatgagcaccaagagtgatgacagcttccagagcctgcacggcagcctgcccctggacagcttcagcaagtttgtggccggggagcgggactgcccccggctgctgctgagcgccctggcccaggaggacctggccagcgagatcctgggcctgcaggaggccatcggggagaaggctgacaaggcctgggccgaggcccccagcctggtgaaggacagcagcaagccacccttcagcctggagaaccacagcgcctgcctggacagcgtggccaagagcgcctggcccaggcctggagagcctgaggccctgcctgacagcctgcagctggacaagggcggcaatgccaaggacttcagccctggcctgtttgaggaccccagcgtggcctttgccaccccagaccccaagaagaccaccggccccctgagctttggcaccaagcccaccctgggcgtgcctgccccagaccccaccacagctgcctttgactgcttcccagacaccacagctgccagcagcgctgacagcgccaacccctttgcctggccagaggagaacctgggagatgcctgcccccgctggggcctgcaccctggagagctgaccaagggcctggagcagggcggcaaggccagtgatggcatcagcaaaggagacacccatgaggccagcgcctgcctgggcttccaggaggaggaccccccaggagagaaggtggccagcctgcccggggacttcaagcaggaggaggtgggcggcgtgaaggaggaggccggcggcctgctgcagtgcccagaggtggccaaggctgaccgctggctggaggacagccgccactgctgcagcacagctgactttggagacctgcccctgctgccccccaccagcaggaaagaagacctggaggccgaggaggagtacagcagcctgtgtgagctgctgggcagccctgagcagaggcctggcatgcaggaccccctgagccccaaggcccccctcatctgcaccaaggaggaggtggaggaggtgctggacagcaaggccggctggggcagcccctgccacctgtctggagagagcgtcatcctgctgggccccaccgtgggcacagagagcaaggtgcagagctggtttgagagcagcctgagccacatgaagccaggagaggagggcccagatggagagcgggcccctggggacagcaccaccagtgatgccagcctggcccagaagcccaacaagccagctgtgcctgaggcccccatcgccaagaaggagcctgtgccccggggcaagagcctgcggagcagaagagtgcaccggggcctgcctgaggccgaggacagcccctgccgggcccctgtgctgcccaaggacctgctgctgcctgagagctgcaccggccccccccagggccagatggagggcgctggggcccctggccgcggggccagcgagggcctgcccaggatgtgcaccaggagcctgacagccctgtctgagcccaggaccccaggccccccaggcctgaccaccaccccagcccccccagacaagctgggcggcaagcagagagctgccttcaagagcggcaagagggtgggcaagcccagccccaaggccgccagcagccccagcaacccagctgccctgcctgtggccagtgacagcagccccatgggcagcaagaccaaggagacagacagccccagcaccccaggcaaggaccagaggtccatgatcctgcggagcaggaccaagacccaggagatcttccacagcaagagaagaagacccagcgagggccgcctgcccaactgccgggccaccaagaagctgctggacaacagccacctgcctgccaccttcaaggtgagcagcagcccccagaaggagggccgggtgtcccagagggcccgggtgcccaagccaggggccggcagcaagctgagtgaccggcccctgcacgccctgaagaggaagagcgccttcatggcccctgtgcccaccaagaagaggaacctggtgctgcggagccgcagcagcagcagcagcaatgccagcggaaatggaggagatggcaaggaggagaggcctgagggcagccccaccctcttcaagaggatgagcagccccaagaaggccaagcccaccaagggaaatggagagcccgccaccaagctgcccccacctgagaccccagatgcctgcctgaagctggccagccgggccgccttccagggcgccatgaagaccaaggtgctgccccccaggaagggccggggcctgaagctggaggccatcgtgcagaagatcaccagccccagcctgaagaagtttgcctgcaaggcccctggggccagccctggcaaccccctgagccccagcctgagtgacaaggaccggggcctgaagggagctgggggcagccctgtgggcgtggaggagggcctggtgaatgtgggcaccggccagaagctgcccaccagcggggctgaccccctgtgcaggaaccccaccaacagaagcctgaagggcaagctgatgaacagcaagaagctgagcagcacagactgcttcaagacagaggccttcaccagccctgaggccctgcagcccggcggcacagccctggcccccaagaagaggagcaggaagggccgggccggggcccacggcctgagcaagggccccctggagaagaggccctacctgggccctgccctgctgctgaccccccgggaccgggccagcggcacccagggcgccagcgaggacaacagcggcggcggcggcaagaagcccaagatggaggagctgggcctggccagccagcccccagagggccggccctgccagccccagacccgggcccagaagcagcccggccacaccaactacagcagctacagcaagaggaagaggctgacccggggccgggccaagaacaccaccagcagcccctgcaagggccgggccaagagaagacggcagcagcaggtgctgcccctggaccctgctgagcctgagatccggctgaagtacatcagcagctgcaagaggctgcggagtgacagcaggaccccagccttcagcccctttgtgcgggtggagaagagagatgccttcaccaccatctgcaccgtggtgaacagccctggagatgcccccaagccccacaggaagcccagcagcagcgccagcagcagcagcagcagcagcagcttcagcctggatgctgctggggccagcctggccaccctgcccggcggcagcatcctgcagccccggcccagcctgcccctgagcagcaccatgcacctgggccctgtggtgtccaaggccctgagcaccagctgcctggtgtgctgcctgtgccagaacccagccaacttcaaggacctgggggacctgtgtggcccctactacccagagcactgcctgcccaagaagaagcccaagctgaaggagaaggtgcggcctgagggcacctgtgaggaggccagcctgcccctggagaggaccctgaagggcccagaatgtgccgccgccgccacagctgggaagccacccaggccagatggccctgctgaccctgccaagcagggccccctgcggaccagcgcccggggcctgagccggcggctgcagagctgctactgctgtgatggccgggaggatggaggagaggaggccgccccagctgacaagggcaggaagcatgagtgcagcaaggaggccccagctgagcctggaggagaggcccaggagcactgggtgcatgaggcctgtgctgtgtggacaggaggagtgtacctggtggccggcaagctgtttggcctgcaggaggccatgaaggtggccgtggacatgatgtgcagcagctgccaggaggccggggccaccatcggctgctgccacaagggctgcctgcacacctaccactacccctgtgccagtgatgctggctgcatcttcatcgaggagaacttcagcctgaagtgccccaagcacaagaggctgccctag

SEQ ID NO: 167685 - DNA, 2901 bp, synthetic construct
  misc_feature 1..2901: note = Description of Artificial Sequence: Synthetic coding sequence
  source 1..2901: mol_type = other DNA
atgcagagcttccgggagcgctgtggcttccacggcaagcagcagaactaccagcagaccagccaggagaccagccggctggagaactaccggcagcccagccaggccggcctgagctgtgaccggcagaggctgctggccaaggactactacaacccccagccctaccccagctatgaaggaggagctggcaccccatctggaacagctgctgctgtggccgctgacaagtaccaccggggcagcaaggccctgcccacccagcagggcctgcagggccgcccagccttccctggctacggcgtgcaggacagcagcccctacccaggccgctatgctggggaggagagcctgcaggcctggggcgccccccagcccccaccaccccagccccagcccctgcctgctggggtggccaagtatgatgagaacctgatgaagaagacagctgtgccccccagccggcagtatgcagagcagggcgcccaggtgcccttccgcacccacagcctgcacgtgcagcagcccccaccaccccagcagcccctggcctaccccaagctgcagaggcagaagctgcagaatgacatcgccagccccctgcccttcccccagggcacccacttcccccagcacagccagagcttccccaccagcagcacctacagcagctctgtgcagggcggcggccagggcgcccacagctacaagagctgcacagcccccacagcccagccccatgaccggcccctgacagccagcagcagcctggcccctggccagagggtgcagaacctgcacgcctaccagagcggccgcctgtcctatgaccagcagcagcagcagcagcagcagcagcagcagcagcagcaggccctgcagagccgccaccacgcccaggagaccctgcactaccagaacctggccaagtaccagcactacggccagcagggccagggctactgccagccagatgctgctgtgaggaccccagagcagtactaccagaccttcagccccagcagcagccacagccctgcccggtctgtgggccgcagccccagctacagcagcacccccagccccctgatgcccaacctggagaacttcccctacagccagcagcccctgagcactggagccttccctgctggcatcacagaccacagccacttcatgcccctgctgaaccccagccccacagatgccaccagctctgtggacacccaggccggcaactgcaagcccctgcagaaggacaagctgcctgagaacctgctgagtgacctgagcctgcagagcctgacagccctgaccagccaggtggagaacatcagcaacacagtgcagcagctgctgctgagcaaggctgctgtgccccagaagaagggcgtgaagaacctggtgtccaggaccccagagcagcacaagagccagcactgcagccctgagggcagcggctacagcgctgagcctgctggcacccccctgtctgagccccccagcagcaccccccagagcacccacgccgagccccaggaggccgactacctgagcggcagcgaggaccccctggagaggagcttcctgtactgcaaccaggcccggggcagccctgcccgggtgaacagcaacagcaaggccaagccagagagcgtgtccacctgcagcgtgaccagcccagatgacatgagcaccaagagtgatgacagcttccagagcctgcacggcagcctgcccctggacagcttcagcaagtttgtggccggggagcgggactgcccccggctgctgctgagcgccctggcccaggaggacctggccagcgagatcctgggcctgcaggaggccatcggggagaaggctgacaaggcctgggccgaggcccccagcctggtgaaggacagcagcaagccacccttcagcctggagaaccacagcgcctgcctggacagcgtggccaagagcgcctggcccaggcctggagagcctgaggccctgcctgacagcctgcagctggacaagggcggcaatgccaaggacttcagccctggcctgtttgaggaccccagcgtggcctttgccaccccagaccccaagaagaccaccggccccctgagctttggcaccaagcccaccctgggcgtgcctgccccagaccccaccacagctgcctttgactgcttcccagacaccacagctgccagcagcgctgacagcgccaacccctttgcctggccagaggagaacctgggagatgcctgcccccgctggggcctgcaccctggagagctgaccaagggcctggagcagggcggcaaggccagtgatggcatcagcaaaggagacacccatgaggccagcgcctgcctgggcttccaggaggaggaccccccaggagagaaggtggccagcctgcccggggacttcaagcaggaggaggtgggcggcgtgaaggaggaggccggcggcctgctgcagtgcccagaggtggccaaggctgaccgctggctggaggacagccgccactgctgcagcacagctgactttggagacctgcccctgctgccccccaccagcaggaaagaagacctggaggccgaggaggagtacagcagcctgtgtgagctgctgggcagccctgagcagaggcctggcatgcaggaccccctgagccccaaggcccccctcatctgcaccaaggaggaggtggaggaggtgctggacagcaaggccggctggggcagcccctgccacctgtctggagagagcgtcatcctgctgggccccaccgtgggcacagagagcaaggtgcagagctggtttgaggccagcctgtacagcgtgtacatctgcatccacatccacatctacaacatctatgaggactgcaagtgctag

SEQ ID NO: 167686 - DNA, 2829 bp, synthetic construct
  misc_feature 1..2829: note = Description of Artificial Sequence: Synthetic coding sequence
  source 1..2829: mol_type = other DNA
atgcagagcttccgggagcgctgtggcttccacggcaagcagcagaactaccagcagaccagccaggagaccagccggctggagaactaccggcagcccagccaggccggcctgagctgtgaccggcagaggctgctggccaaggactactacaacccccagccctaccccagctatgaaggaggagctggcaccccatctggaacagctgctgctgtggccgctgacaagtaccaccggggcagcaaggccctgcccacccagcagggcctgcagggccgcccagccttccctggctacggcgtgcaggacagcagcccctacccaggccgctatgctggggaggagagcctgcaggcctggggcgccccccagcccccaccaccccagccccagcccctgcctgctggggtggccaagtatgatgagaacctgatgaagaagacagctgtgccccccagccggcagtatgcagagcagggcgcccaggtgcccttccgcacccacagcctgcacgtgcagcagcccccaccaccccagcagcccctggcctaccccaagctgcagaggcagaagctgcagaatgacatcgccagccccctgcccttcccccagggcacccacttcccccagcacagccagagcttccccaccagcagcacctacagcagctctgtgcagggcggcggccagggcgcccacagctacaagagctgcacagcccccacagcccagccccatgaccggcccctgacagccagcagcagcctggcccctggccagagggtgcagaacctgcacgcctaccagagcggccgcctgtcctatgaccagcagcagcagcagcagcagcagcagcagcagcagcagcaggccctgcagagccgccaccacgcccaggagaccctgcactaccagaacctggccaagtaccagcactacggccagcagggccagggctactgccagccagatgctgctgtgaggaccccagagcagtactaccagaccttcagccccagcagcagccacagccctgcccggtctgtgggccgcagccccagctacagcagcacccccagccccctgatgcccaacctggagaacttcccctacagccagcagcccctgagcactggagccttccctgctggcatcacagaccacagccacttcatgcccctgctgaaccccagccccacagatgccaccagctctgtggacacccaggccggcaactgcaagcccctgcagaaggacaagctgcctgagaacctgctgagtgacctgagcctgcagagcctgacagccctgaccagccaggtggagaacatcagcaacacagtgcagcagctgctgctgagcaaggctgctgtgccccagaagaagggcgtgaagaacctggtgtccaggaccccagagcagcacaagagccagcactgcagccctgagggcagcggctacagcgctgagcctgctggcacccccctgtctgagccccccagcagcaccccccagagcacccacgccgagccccaggaggccgactacctgagcggcagcgaggaccccctggagaggagcttcctgtactgcaaccaggcccggggcagccctgcccgggtgaacagcaacagcaaggccaagccagagagcgtgtccacctgcagcgtgaccagcccagatgacatgagcaccaagagtgatgacagcttccagagcctgcacggcagcctgcccctggacagcttcagcaagtttgtggccggggagcgggactgcccccggctgctgctgagcgccctggcccaggaggacctggccagcgagatcctgggcctgcaggaggccatcggggagaaggctgacaaggcctgggccgaggcccccagcctggtgaaggacagcagcaagccacccttcagcctggagaaccacagcgcctgcctggacagcgtggccaagagcgcctggcccaggcctggagagcctgaggccctgcctgacagcctgcagctggacaagggcggcaatgccaaggacttcagccctggcctgtttgaggaccccagcgtggcctttgccaccccagaccccaagaagaccaccggccccctgagctttggcaccaagcccaccctgggcgtgcctgccccagaccccaccacagctgcctttgactgcttcccagacaccacagctgccagcagcgctgacagcgccaacccctttgcctggccagaggagaacctgggagatgcctgcccccgctggggcctgcaccctggagagctgaccaagggcctggagcagggcggcaaggccagtgatggcatcagcaaaggagacacccatgaggccagcgcctgcctgggcttccaggaggaggaccccccaggagagaaggtggccagcctgcccggggacttcaagcaggaggaggtgggcggcgtgaaggaggaggccggcggcctgctgcagtgcccagaggtggccaaggctgaccgctggctggaggacagccgccactgctgcagcacagctgactttggagacctgcccctgctgccccccaccagcaggaaagaagacctggaggccgaggaggagtacagcagcctgtgtgagctgctgggcagccctgagcagaggcctggcatgcaggaccccctgagccccaaggcccccctcatctgcaccaaggaggaggtggaggaggtgctggacagcaaggccggctggggcagcccctgccacctgtctggagagagcgtcatcctgctgggccccaccgtgggcacagagagcaaggtgcagagctggttctag

SEQ ID NO: 167687 - DNA, 5982 bp, synthetic construct
  misc_feature 1..5982: note = Description of Artificial Sequence: Synthetic coding sequence
  source 1..5982: mol_type = other DNA
atgcagagcttccgggagcgctgtggcttccacggcaagcagcagaactaccagcagaccagccaggagaccagccggctggagaactaccggcagcccagccaggccggcctgagctgtgaccggcagaggctgctggccaaggactactacaacccccagccctaccccagctatgaaggaggagctggcaccccatctggaacagctgctgctgtggccgctgacaagtaccaccggggcagcaaggccctgcccacccagcagggcctgcagggccgcccagccttccctggctacggcgtgcaggacagcagcccctacccaggccgctatgctggggaggagagcctgcaggcctggggcgccccccagcccccaccaccccagccccagcccctgcctgctggggtggccaagtatgatgagaacctgatgaagaagacagctgtgccccccagccggcagtatgcagagcagggcgcccaggtgcccttccgcacccacagcctgcacgtgcagcagcccccaccaccccagcagcccctggcctaccccaagctgcagaggcagaagctgcagaatgacatcgccagccccctgcccttcccccagggcacccacttcccccagcacagccagagcttccccaccagcagcacctacagcagctctgtgcagggcggcggccagggcgcccacagctacaagagctgcacagcccccacagcccagccccatgaccggcccctgacagccagcagcagcctggcccctggccagagggtgcagaacctgcacgcctaccagagcggccgcctgtcctatgaccagcagcagcagcagcagcagcagcagcagcagcagcagcaggccctgcagagccgccaccacgcccaggagaccctgcactaccagaacctggccaagtaccagcactacggccagcagggccagggctactgccagccagatgctgctgtgaggaccccagagcagtactaccagaccttcagccccagcagcagccacagccctgcccggtctgtgggccgcagccccagctacagcagcacccccagccccctgatgcccaacctggagaacttcccctacagccagcagcccctgagcactggagccttccctgctggcatcacagaccacagccacttcatgcccctgctgaaccccagccccacagatgccaccagctctgtggacacccaggccggcaactgcaagcccctgcagaaggacaagctgcctgagaacctgctgagtgacctgagcctgcagagcctgacagccctgaccagccaggtggagaacatcagcaacacagtgcagcagctgctgctgagcaaggctgctgtgccccagaagaagggcgtgaagaacctggtgtccaggaccccagagcagcacaagagccagcactgcagccctgagggcagcggctacagcgctgagcctgctggcacccccctgtctgagccccccagcagcaccccccagagcacccacgccgagccccaggaggccgactacctgagcggcagcgaggaccccctggagaggagcttcctgtactgcaaccaggcccggggcagccctgcccgggtgaacagcaacagcaaggccaagccagagagcgtgtccacctgcagcgtgaccagcccagatgacatgagcaccaagagtgatgacagcttccagagcctgcacggcagcctgcccctggacagcttcagcaagtttgtggccggggagcgggactgcccccggctgctgctgagcgccctggcccaggaggacctggccagcgagatcctgggcctgcaggaggccatcggggagaaggctgacaaggcctgggccgaggcccccagcctggtgaaggacagcagcaagccacccttcagcctggagaaccacagcgcctgcctggacagcgtggccaagagcgcctggcccaggcctggagagcctgaggccctgcctgacagcctgcagctggacaagggcggcaatgccaaggacttcagccctggcctgtttgaggaccccagcgtggcctttgccaccccagaccccaagaagaccaccggccccctgagctttggcaccaagcccaccctgggcgtgcctgccccagaccccaccacagctgcctttgactgcttcccagacaccacagctgccagcagcgctgacagcgccaacccctttgcctggccagaggagaacctgggagatgcctgcccccgctggggcctgcaccctggagagctgaccaagggcctggagcagggcggcaaggccagtgatggcatcagcaaaggagacacccatgaggccagcgcctgcctgggcttccaggaggaggaccccccaggagagaaggtggccagcctgcccggggacttcaagcaggaggaggtgggcggcgtgaaggaggaggccggcggcctgctgcagtgcccagaggtggccaaggctgaccgctggctggaggacagccgccactgctgcagcacagctgactttggagacctgcccctgctgccccccaccagcaggaaagaagacctggaggccgaggaggagtacagcagcctgtgtgagctgctgggcagccctgagcagaggcctggcatgcaggaccccctgagccccaaggcccccctcatctgcaccaaggaggaggtggaggaggtgctggacagcaaggccggctggggcagcccctgccacctgtctggagagagcgtcatcctgctgggccccaccgtgggcacagagagcaaggtgcagagctggtttgagagcagcctgagccacatgaagccaggagaggagggcccagatggagagcgggcccctggggacagcaccaccagtgatgccagcctggcccagaagcccaacaagccagctgtgcctgaggcccccatcgccaagaaggagcctgtgccccggggcaagagcctgcggagcagaagagtgcaccggggcctgcctgaggccgaggacagcccctgccgggcccctgtgctgcccaaggacctgctgctgcctgagagctgcaccggccccccccagggccagatggagggcgctggggcccctggccgcggggccagcgagggcctgcccaggatgtgcaccaggagcctgacagccctgtctgagcccaggaccccaggccccccaggcctgaccaccaccccagcccccccagacaagctgggcggcaagcagagagctgccttcaagagcggcaagagggtgggcaagcccagccccaaggccgccagcagccccagcaacccagctgccctgcctgtggccagtgacagcagccccatgggcagcaagaccaaggagacagacagccccagcaccccaggcaaggaccagaggtccatgatcctgcggagcaggaccaagacccaggagatcttccacagcaagagaagaagacccagcgagggccgcctgcccaactgccgggccaccaagaagctgctggacaacagccacctgcctgccaccttcaaggtgagcagcagcccccagaaggagggccgggtgtcccagagggcccgggtgcccaagccaggggccggcagcaagctgagtgaccggcccctgcacgccctgaagaggaagagcgccttcatggcccctgtgcccaccaagaagaggaacctggtgctgcggagccgcagcagcagcagcagcaatgccagcggaaatggaggagatggcaaggaggagaggcctgagggcagccccaccctcttcaagaggatgagcagccccaagaaggccaagcccaccaagggaaatggagagcccgccaccaagctgcccccacctgagaccccagatgcctgcctgaagctggccagccgggccgccttccagggcgccatgaagaccaaggtgctgccccccaggaagggccggggcctgaagctggaggccatcgtgcagaagatcaccagccccagcctgaagaagtttgcctgcaaggcccctggggccagccctggcaaccccctgagccccagcctgagtgacaaggaccggggcctgaagggagctgggggcagccctgtgggcgtggaggagggcctggtgaatgtgggcaccggccagaagctgcccaccagcggggctgaccccctgtgcaggaaccccaccaacagaagcctgaagggcaagctgatgaacagcaagaagctgagcagcacagactgcttcaagacagaggccttcaccagccctgaggccctgcagcccggcggcacagccctggcccccaagaagaggagcaggaagggccgggccggggcccacggcctgagcaagggccccctggagaagaggccctacctgggccctgccctgctgctgaccccccgggaccgggccagcggcacccagggcgccagcgaggacaacagcggcggcggcggcaagaagcccaagatggaggagctgggcctggccagccagcccccagagggccggccctgccagccccagacccgggcccagaagcagcccggccacaccaactacagcagctacagcaagaggaagaggctgacccggggccgggccaagaacaccaccagcagcccctgcaagggccgggccaagagaagacggcagcagcaggtgctgcccctggaccctgctgagcctgagatccggctgaagtacatcagcagctgcaagaggctgcggagtgacagcaggaccccagccttcagcccctttgtgcgggtggagaagagagatgccttcaccaccatctgcaccgtggtgaacagccctggagatgcccccaagccccacaggaagcccagcagcagcgccagcagcagcagcagcagcagcagcttcagcctggatgctgctggggccagcctggccaccctgcccggcggcagcatcctgcagccccggcccagcctgcccctgagcagcaccatgcacctgggccctgtggtgtccaaggccctgagcaccagctgcctggtgtgctgcctgtgccagaacccagccaacttcaaggacctgggggacctgtgtggcccctactacccagagcactgcctgcccaagaagaagcccaagctgaaggagaaggtgcggcctgagggcacctgtgaggaggccagcctgcccctggagaggaccctgaagggcccagaatgtgccgccgccgccacagctgggaagccacccaggccagatggccctgctgaccctgccaagcagggccccctgcggaccagcgcccggggcctgagccggcggctgcagagctgctactgctgtgatggccgggaggatggaggagaggaggccgccccagctgacaagggcaggaagcatgagtgcagcaaggaggccccagctgagcctggaggagaggcccaggagcactgggtgcatgaggcctgtgctgtgtggacaggaggagtgtacctggtggccggcaagctgtttggcctgcaggaggccatgaaggtggccgtggacatgcacggcggcaccgtggccctggcccctggggacttcagcctgcccggcctgcgctttgccagcctcttccagggccccagctggtgtgactgccctgtgctggccaccagcacccccagctcctggagccgctgtgtgcctgctgccaagaagccaggcccccccctgggcgccgccaccaaggatgccagcacccccaccaccaccagggtgcctgccatgcaggtgcgggcccggcccggcactggaggccactggagccccagcaagcagagccggggcaccctgcccggccacagcagccccaaccctggccccatcagcctcttctccttcccccccctgctgccccagcagttcttctaccccagcgtgtgcctggacctgtgctgggccatgcctggcacctggaagtag

SEQ ID NO: 167688 - DNA, 2943 bp, synthetic construct
  misc_feature 1..2943: note = Description of Artificial Sequence: Synthetic coding sequence
  source 1..2943: mol_type = other DNA
atgaagagcctgaaggccaagttcaggaagagtgacaccaatgagtggaacaagaatgatgaccggctgctgcaggccgtggagaatggagatgctgagaaggtggccagcctgctgggcaagaagggggccagcgccaccaagcatgattctgagggcaagacagccttccacctggccgccgccaagggccacgtggagtgcctgcgggtgatgatcacccatggagtggatgtgacagcccaggacaccaccggccacagcgccctgcacctggccgccaagaacagccaccacgagtgcatcaggaagctgctgcagagcaaatgtcctgctgagagcgtggacagcagcggcaagacagccctgcactacgccgccgcccagggctgcctgcaggccgtgcagatcctgtgtgagcacaagagccccatcaacctgaaggacctggatggcaacatccccctgctgctggccgtgcagaatggccacagcgagatctgccacttcctgctggaccacggggctgatgtgaacagcaggaacaagagcggccgcacagccctgatgctggcctgtgaaattggcagcagcaatgctgtggaggccctgatcaagaagggagctgacctgaacctggtggacagcctgggctacaatgccctgcactacagcaagctgtctgaaaatgccggcatccagagcctgctgctgagcaagatcagccaggatgctgacctgaagacccccaccaagcccaagcagcacgaccaggtgtccaagatcagcagcgagaggagcggcacccccaagaagaggaaggcccctcctccacccatcagccccacccagctgagtgatgtgagcagccccaggagcatcaccagcacccccctgagcggcaaggagagcgtcttctttgctgagccccccttcaaggccgagatcagcagcatccgggagaacaaggaccggctgagtgacagcaccactggagctgacagcctgctggacatcagcagcgaggccgaccagcaggacctgctgagcctgctgcaggccaaggtggccagcctgaccctgcacaacaaggagctgcaggacaagctgcaggccaagagccccaaggaggccgaggccgacctgagctttgacagctaccacagcacccagacagacctgggccccagcctgggcaagccaggagagaccagccccccagacagcaagagcagccccagcgtgctgatccacagcctgggcaagagcaccacagacaatgatgtgcgcatccagcagctgcaggagatcctgcaggacctgcagaagaggctggagagcagcgaggccgagaggaagcagctgcaggtggagctgcagagccggcgggcagagctggtgtgcctgaacaacacagagatcagcgagaacagcagtgacctgagccagaagctgaaggagacccagagcaaatatgaggaggccatgaaggaggtgctgtctgtgcagaagcagatgaagctgggcctggtgtccccagagagcatggacaactacagccacttccacgagctgcgggtgacagaggaggagatcaacgtgctgaagcaggacctgcagaatgccctggaggagagcgagaggaacaaggagaaggtgcgggagctggaggagaagctggtggagcgggagaagggcaccgtcatcaagccccctgtggaggagtatgaggagatgaagagcagctactgcagcgtgattgagaacatgaacaaggagaaggccttcctgtttgagaagtaccaggaggcccaggaggagatcatgaagctgaaggacaccctgaagagccagatgacccaggaggccagtgatgaagctgaggacatgaaggaggccatgaacaggatgattgatgagctgaacaagcaggtgtctgagctgagccagctgtacaaggaggcccaggccgagctggaggactacaggaagaggaagagcctggaggatgtgacagctgagtacatccacaaggccgagcacgagaagctgatgcagctgaccaacgtgtcccgggccaaggccgaggatgccctgtctgagatgaagagccagtacagcaaggtgctgaatgagctgacccagctgaagcagctggtggatgcccagaaggaaaattctgtgtccatcacagagcacctgcaggtgatcaccaccctgaggacagctgccaaggagatggaggagaagatcagcaacctgaaggagcacctggccagcaaggaggtggaggtggccaagctggagaagcagctgctggaggagaaggccgccatgacagatgccatggtgcccaggagcagctatgagaagctgcagagcagcctggagagcgaggtgtctgtgctggccagcaagctgaaggagagcgtgaaggagaaggagaaggtgcacagcgaggtggtgcagatccgctctgaggtgtcccaggtgaagcgggagaaggagaacatccagaccctgctgaagagcaaggagcaggaggtgaatgagctgctgcagaagttccagcaggcccaggaggagctggccgagatgaagagatatgcagagagcagcagcaagctggaggaggacaaggacaagaagatcaatgagatgagcaaggaggtgaccaagctgaaggaggccctgaacagcctgagccagctgagctacagcaccagcagcagcaagaggcagagccagcagctggaggccctgcagcagcaggtgaagcagctgcagaaccagctggccgagtgcaagaagcagcaccaggaggtgatctctgtgtacaggatgcacctgctgtatgctgtgcagggccagatggatgaagatgtgcagaaggtgctgaagcagatcctgaccatgtgcaagaaccagagccagaagaagtag

SEQ ID NO: 167689 - DNA, 2922 bp, synthetic construct
  misc_feature 1..2922: note = Description of Artificial Sequence: Synthetic coding sequence
  source 1..2922: mol_type = other DNA
atggtgaagggcaagaccaatgagtggaacaagaatgatgaccggctgctgcaggccgtggagaatggagatgctgagaaggtggccagcctgctgggcaagaagggggccagcgccaccaagcatgacagcgagggcaagacagccttccacctggccgccgccaagggccacgtggagtgcctgcgggtgatgatcacccacggcgtggatgtgacagcccaggacaccaccggccacagcgccctgcacctggccgccaagaacagccaccacgagtgcatcaggaagctgctgcagagcaagtgcccagctgagagcgtggacagcagcggcaagacagccctgcactatgctgctgcccagggctgcctgcaggccgtgcagatcctgtgtgagcacaagagccccatcaacctgaaggacctggatggcaacatccccctgctgctggccgtgcagaatggccacagcgagatctgccacttcctgctggaccatggagcagatgtgaacagcaggaacaagagcggccgcacagccctgatgctggcctgtgagatcggcagcagcaatgctgtggaggccctgatcaagaagggagctgacctgaacctggtggacagcctgggctacaatgccctgcactacagcaagctgtctgaaaatgccggcatccagagcctgctgctgagcaagatcagccaggatgctgacctgaagacccccaccaagcccaagcagcacgaccaggtgtccaagatcagcagcgagaggagcggcacccccaagaagaggaaggcccctcctccacccatcagccccacccagctgagtgatgtgagcagccccaggagcatcaccagcacccccctgagcggcaaggagagcgtcttctttgctgagccccccttcaaggccgagatcagcagcatccgggagaacaaggaccggctgagtgacagcaccaccggggctgacagcctgctggacatcagcagcgaggccgaccagcaggacctgctgagcctgctgcaggccaaggtggccagcctgaccctgcacaacaaggagctgcaggacaagctgcaggccaagagccccaaggaggccgaggccgacctgagctttgacagctaccacagcacccagacagacctgggccccagcctgggcaagccaggagagaccagccccccagacagcaagagcagccccagcgtgctgatccacagcctgggcaagagcaccacagacaatgatgtgcgcatccagcagctgcaggagatcctgcaggacctgcagaagaggctggagagcagcgaggccgagaggaagcagctgcaggtggagctgcagagcagaagagctgagctggtgtgcctgaacaacacagagatcagcgagaacagcagtgacctgagccagaagctgaaggagacccagagcaaatatgaggaggccatgaaggaggtgctgtctgtgcagaagcagatgaagctgggcctggtgtccccagagagcatggacaactacagccacttccacgagctgcgggtgacagaggaggagatcaacgtgctgaagcaggacctgcagaatgccctggaggagagcgagaggaacaaggagaaggtgcgggagctggaggagaagctggtggagcgggagaagggcaccgtcatcaagccccctgtggaggagtatgaggagatgaagagcagctactgcagcgtgattgagaacatgaacaaggagaaggccttcctgtttgagaagtaccaggaggcccaggaggagatcatgaagctgaaggacaccctgaagagccagatgacccaggaggccagtgatgaagctgaggacatgaaggaggccatgaacaggatgattgatgagctgaacaagcaggtgtctgagctgagccagctgtacaaggaggcccaggccgagctggaggactacaggaagaggaagagcctggaggatgtgacagctgagtacatccacaaggccgagcacgagaagctgatgcagctgaccaacgtgtcccgggccaaggcagaagatgccctgtctgagatgaagagccagtacagcaaggtgctgaatgagctgacccagctgaagcagctggtggatgcccagaaggagaacagcgtgtccatcacagagcacctgcaggtgatcaccaccctgaggacagctgccaaggagatggaggagaagatcagcaacctgaaggagcacctggccagcaaggaggtggaggtggccaagctggagaagcagctgctggaggagaaggccgccatgacagatgccatggtgcccaggagcagctatgagaagctgcagagcagcctggagagcgaggtgtctgtgctggccagcaagctgaaggagagcgtgaaggagaaggagaaggtgcacagcgaggtggtgcagatccgctctgaggtgtcccaggtgaagcgggagaaggagaacatccagaccctgctgaagagcaaggagcaggaggtgaatgagctgctgcagaagttccagcaggcccaggaggagctggccgagatgaagagatatgcagagagcagcagcaagctggaggaggacaaggacaagaagatcaatgagatgagcaaggaggtgaccaagctgaaggaggccctgaacagcctgagccagctgagctacagcaccagcagcagcaagaggcagagccagcagctggaggccctgcagcagcaggtgaagcagctgcagaaccagctggccgagtgcaagaagcagcaccaggaggtgatctctgtgtacaggatgcacctgctgtatgctgtgcagggccagatggatgaagatgtgcagaaggtgctgaagcagatcctgaccatgtgcaagaaccagagccagaagaagtag

SEQ ID NO: 167690 - DNA, 2943 bp, synthetic construct; identical to SEQ ID NO: 167688
  misc_feature 1..2943: note = Description of Artificial Sequence: Synthetic coding sequence
  source 1..2943: mol_type = other DNA

SEQ ID NO: 167691 - DNA, 2943 bp, synthetic construct; identical to SEQ ID NO: 167688
  misc_feature 1..2943: note = Description of Artificial Sequence: Synthetic coding sequence
  source 1..2943: mol_type = other DNA

SEQ ID NO: 167692 - DNA, 345 bp, synthetic construct
  misc_feature 1..345: note = Description of Artificial Sequence: Synthetic coding sequence
  source 1..345: mol_type = other DNA
atgaagagcctgaaggccaagttcaggaagagtgacaccaatgagtggaacaagaatgatgaccggctgctgcaggccgtggagaatggagatgctgagaaggtggccagcctgctgggcaagaagggggccagcgccaccaagcatgattctgagggcaagacagccttccacctggccgccgccaagggccacgtggagtgcctgcgggtgatgatcacccatggagtggatgtgacagcccaggacaccaccggccacagcgccctgcacctggccgccaagaacagccaccacgagtgcatcaggaagctgctgcagagcaaatgtcctgctgagagctag

SEQ ID NO: 167693 - DNA, 2919 bp, synthetic construct
  misc_feature 1..2919: note = Description of Artificial Sequence: Synthetic coding sequence
  source 1..2919: mol_type = other DNA
atggaggccaagaccaatgagtggaacaagaatgatgaccggctgctgcaggccgtggagaatggagatgctgagaaggtggccagcctgctgggcaagaagggggccagcgccaccaagcatgattctgagggcaagacagccttccacctggccgccgccaagggccacgtggagtgcctgcgggtgatgatcacccatggagtggatgtgacagcccaggacaccaccggccacagcgccctgcacctggccgccaagaacagccaccacgagtgcatcaggaagctgctgcagagcaaatgtcctgctgagagcgtggacagcagcggcaagacagccctgcactacgccgccgcccagggctgcctgcaggccgtgcagatcctgtgtgagcacaagagccccatcaacctgaaggacctggatggcaacatccccctgctgctggccgtgcagaatggccacagcgagatctgccacttcctgctggaccacggggctgatgtgaacagcaggaacaagagcggccgcacagccctgatgctggcctgtgaaattggcagcagcaatgctgtggaggccctgatcaagaagggagctgacctgaacctggtggacagcctgggctacaatgccctgcactacagcaagctgtctgaaaatgccggcatccagagcctgctgctgagcaagatcagccaggatgctgacctgaagacccccaccaagcccaagcagcacgaccaggtgtccaagatcagcagcgagaggagcggcacccccaagaagaggaaggcccctcctccacccatcagccccacccagctgagtgatgtgagcagccccaggagcatcaccagcacccccctgagcggcaaggagagcgtcttctttgctgagccccccttcaaggccgagatcagcagcatccgggagaacaaggaccggctgagtgacagcaccactggagctgacagcctgctggacatcagcagcgaggccgaccagcaggacctgctgagcctgctgcaggccaaggtggccagcctgaccctgcacaacaaggagctgcaggacaagctgcaggccaagagccccaaggaggccgaggccgacctgagctttgacagctaccacagcacccagacagacctgggccccagcctgggcaagccaggagagaccagccccccagacagcaagagcagccccagcgtgctgatccacagcctgggcaagagcaccacagacaatgatgtgcgcatccagcagctgcaggagatcctgcaggacctgcagaagaggctggagagcagcgaggccgagaggaagcagctgcaggtggagctgcagagccggcgggcagagctggtgtgcctgaacaacacagagatcagcgagaacagcagtgacctgagccagaagctgaaggagacccagagcaaatatgaggaggccatgaaggaggtgctgtctgtgcagaagcagatgaagctgggcctggtgtccccagagagcatggacaactacagccacttccacgagctgcgggtgacagaggaggagatcaacgtgctgaagcaggacctgcagaatgccctggaggagagcgagaggaacaaggagaaggtgcgggagctggaggagaagctggtggagcgggagaagggcaccgtcatcaagccccctgtggaggagtatgaggagatgaagagcagctactgcagcgtgattgagaacatgaacaaggagaaggccttcctgtttgagaagtaccaggaggcccaggaggagatcatgaagctgaaggacaccctgaagagccagatgacccaggaggccagtgatgaagctgaggacatgaaggaggccatgaacaggatgattgatgagctgaacaagcaggtgtctgagctgagccagctgtacaaggaggcccaggccgagctggaggactacaggaagaggaagagcctggaggatgtgacagctgagtacatccacaaggccgagcacgagaagctgatgcagctgaccaacgtgtcccgggccaaggccgaggatgccctgtctgagatgaagagccagtacagcaaggtgctgaatgagctgacccagctgaagcagctggtggatgcccagaaggaaaattctgtgtccatcacagagcacctgcaggtgatcaccaccctgaggacagctgccaaggagatggaggagaagatcagcaacctgaaggagcacctggccagcaaggaggtggaggtggccaagctggagaagcagctgctggaggagaaggccgccatgacagatgccatggtgcccaggagcagctatgagaagctgcagagcagcctggagagcgaggtgtctgtgctggccagcaagctgaaggagagcgtgaaggagaaggagaaggtgcacagcgaggtggtgcagatccgctctgaggtgtcccaggtgaagcgggagaaggagaacatccagaccctgctgaagagcaaggagcaggaggtgaatgagctgctgcagaagttccagcaggcccaggaggagctggccgagatgaagagatatgcagagagcagcagcaagctggaggaggacaaggacaagaagatcaatgagatgagcaaggaggtgaccaagctgaaggaggccctgaacagcctgagccagctgagctacagcaccagcagcagcaagaggcagagccagcagctggaggccctgcagcagcaggtgaagcagctgcagaaccagctggccgagtgcaagaagcagcaccaggaggtgatctctgtgtacaggatgcacctgctgtatgctgtgcagggccagatggatgaagatgtgcagaaggtgctgaagcagatcctgaccatgtgcaagaaccagagccagaagaagtag

SEQ ID NO: 167694 - DNA, 378 bp, synthetic construct
  misc_feature 1..378: note = Description of Artificial Sequence: Synthetic coding sequence
  source 1..378: mol_type = other DNA
atgaagagcctgaaggccaagttcaggaagagtgacaccaatgagtggaacaagaatgatgaccggctgctgcaggccgtggagaatggagatgctgagaaggtggccagcctgctgggcaagaagggggccagcgccaccaagcatgattctgagggcaagacagccttccacctggccgccgccaagggccacgtggagtgcctgcgggtgatgatcacccatggagtggatgtgacagcccaggacaccaccggccacagcgccctgcacctggccgccaagaacagccaccacgagtgcatcaggaagctgctgcagagcaaatgtcctgctgagagcgtggacagcagcggcaagacagccctgcactactag

SEQ ID NO: 167695 - DNA, 324 bp, synthetic construct
  misc_feature 1..324: note = Description of Artificial Sequence: Synthetic coding sequence
  source 1..324: mol_type = other DNA
atgaagagcctgaaggccaagttcaggaagagtgacaccaatgagtggaacaagaatgatgaccggctgctgcaggccgtggagaatggagatgctgagaaggtggccagcctgctgggcaagaagggggccagcgccaccaagcatgattctgagggcaagacagccttccacctggccgccgccaagggccacgtggagtgcctgcgggtgatgatcacccatggagtggatgtgacagcccaggacaccaccggccacagcgccctgcacctggccgccaagaacagccaccacgagtgcatcaggaagctgctgcagtag

SEQ ID NO: 167696 - DNA, 453 bp, synthetic construct
  misc_feature 1..453: note = Description of Artificial Sequence: Synthetic coding sequence
  source 1..453: mol_type = other DNA
atgaagagcctgaaggccaagttcaggaagagtgacaccaatgagtggaacaagaatgatgaccggctgctgcaggccgtggagaatggagatgctgagaaggtggccagcctgctgggcaagaagggggccagcgccaccaagcatgattctgagggcaagacagccttccacctggccgccgccaagggccacgtggagtgcctgcgggtgatgatcacccatggagtggatgtgacagcccaggacaccaccggccacagcgccctgcacctggccgccaagaacagccaccacgagtgcatcaggaagctgctgcagagcaaatgtcctgctgagagcgtggacagcagcggcaagacagccctgcactacgccgccgcccagggctgcctgcaggccgtgcagatcctgtgtgagcacaagagccccatcaacctgaaggacctgtag

SEQ ID NO: 167697 - DNA, 381 bp, synthetic construct
  misc_feature 1..381: note = Description of Artificial Sequence: Synthetic coding sequence
  source 1..381: mol_type = other DNA
atgaagagcctgaaggccaagttcaggaagagtgacaccaatgagtggaacaagaatgatgaccggctgctgcaggccgtggagaatggagatgctgagaaggtggccagcctgctgggcaagaagggggccagcgccaccaagcatgattctgagggcaagacagccttccacctggccgccgccaagggccacgtggagtgcctgcgggtgatgatcacccatggagtggatgtgacagcccaggacaccaccggccacagcgccctgcacctggccgccaagaacagccaccacgagtgcatcaggaagctgctgcagagcaaatgtcctgctgagagcgtggacagcagcggcaagacagccctgcactacgcctag

SEQ ID NO: 167698 - DNA, 315 bp, synthetic construct
  misc_feature 1..315: note = Description of Artificial Sequence: Synthetic coding sequence
  source 1..315: mol_type = other DNA
atgaagagcctgaaggccaagttcaggaagagtgacaccaatgagtggaacaagaatgatgaccggctgctgcaggccgtggagaatggagatgctgagaaggtggccagcctgctgggcaagaagggggccagcgccaccaagcatgattctgagggcaagacagccttccacctggccgccgccaagggccacgtggagtgcctgcgggtgatgatcacccatggagtggatgtgacagcccaggacaccaccggccacagcgccctgcacctggccgccaagaacagccaccacgagtgcatcaggaagtag

SEQ ID NO: 167699 - DNA, 420 bp, synthetic construct
  misc_feature 1..420: note = Description of Artificial Sequence: Synthetic coding sequence
  source 1..420: mol_type = other DNA
atgaagagcctgaaggccaagttcaggaagagtgacaccaatgagtggaacaagaatgatgaccggctgctgcaggccgtggagaatggagatgctgagaaggtggccagcctgctgggcaagaagggggccagcgccaccaagcatgattctgagggcaagacagccttccacctggccgccgccaagggccacgtggagtgcctgcgggtgatgatcacccatggagtggatgtgacagcccaggacaccaccggccacagcgccctgcacctggccgccaagaacagccaccacgagtgcatcaggaagctgctgcagagcaaatgtcctgctgagagcgtggacagcagcggcaagacagccctgcactacgccgccgcccagggctgcctgcaggccgtgcagatcctgtgctag

SEQ ID NO: 167700 - DNA, 381 bp, synthetic construct; identical to SEQ ID NO: 167697
  misc_feature 1..381: note = Description of Artificial Sequence: Synthetic coding sequence
  source 1..381: mol_type = other DNA

SEQ ID NO: 167701 - DNA, 2952 bp, synthetic construct
  misc_feature 1..2952: note = Description of Artificial Sequence: Synthetic coding sequence
  source 1..2952: mol_type = other DNA
atgcagcccacctacctgccctggctgagcgccaaggagaagaagaccaatgagtggaacaagaatgatgaccggctgctgcaggccgtggagaatggagatgctgagaaggtggccagcctgctgggcaagaagggggccagcgccaccaagcatgacagcgagggcaagacagccttccacctggccgccgccaagggccacgtggagtgcctgcgggtgatgatcacccacggcgtggatgtgacagcccaggacaccaccggccacagcgccctgcacctggccgccaagaacagccaccacgagtgcatcaggaagctgctgcagagcaagtgcccagctgagagcgtggacagcagcggcaagacagccctgcactatgctgctgcccagggctgcctgcaggccgtgcagatcctgtgtgagcacaagagccccatcaacctgaaggacctggatggcaacatccccctgctgctggccgtgcagaatggccacagcgagatctgccacttcctgctggaccatggagcagatgtgaacagcaggaacaagagcggccgcacagccctgatgctggcctgtgagatcggcagcagcaatgctgtggaggccctgatcaagaagggagctgacctgaacctggtggacagcctgggctacaatgccctgcactacagcaagctgtctgaaaatgccggcatccagagcctgctgctgagcaagatcagccaggatgctgacctgaagacccccaccaagcccaagcagcacgaccaggtgtccaagatcagcagcgagaggagcggcacccccaagaagaggaaggcccctcctccacccatcagccccacccagctgagtgatgtgagcagccccaggagcatcaccagcacccccctgagcggcaaggagagcgtcttctttgctgagccccccttcaaggccgagatcagcagcatccgggagaacaaggaccggctgagtgacagcaccaccggggctgacagcctgctggacatcagcagcgaggccgaccagcaggacctgctgagcctgctgcaggccaaggtggccagcctgaccctgcacaacaaggagctgcaggacaagctgcaggccaagagccccaaggaggccgaggccgacctgagctttgacagctaccacagcacccagacagacctgggccccagcctgggcaagccaggagagaccagccccccagacagcaagagcagccccagcgtgctgatccacagcctgggcaagagcaccacagacaatgatgtgcgcatccagcagctgcaggagatcctgcaggacctgcagaagaggctggagagcagcgaggccgagaggaagcagctgcaggtggagctgcagagcagaagagctgagctggtgtgcctgaacaacacagagatcagcgagaacagcagtgacctgagccagaagctgaaggagacccagagcaaatatgaggaggccatgaaggaggtgctgtctgtgcagaagcagatgaagctgggcctggtgtccccagagagcatggacaactacagccacttccacgagctgcgggtgacagaggaggagatcaacgtgctgaagcaggacctgcagaatgccctggaggagagcgagaggaacaaggagaaggtgcgggagctggaggagaagctggtggagcgggagaagggcaccgtcatcaagccccctgtggaggagtatgaggagatgaagagcagctactgcagcgtgattgagaacatgaacaaggagaaggccttcctgtttgagaagtaccaggaggcccaggaggagatcatgaagctgaaggacaccctgaagagccagatgacccaggaggccagtgatgaagctgaggacatgaaggaggccatgaacaggatgattgatgagctgaacaagcaggtgtctgagctgagccagctgtacaaggaggcccaggccgagctggaggactacaggaagaggaagagcctggaggatgtgacagctgagtacatccacaaggccgagcacgagaagctgatgcagctgaccaacgtgtcccgggccaaggcagaagatgccctgtctgagatgaagagccagtacagcaaggtgctgaatgagctgacccagctgaagcagctggtggatgcccagaaggagaacagcgtgtccatcacagagcacctgcaggtgatcaccaccctgaggacagctgccaaggagatggaggagaagatcagcaacctgaaggagcacctggccagcaaggaggtggaggtggccaagctggagaagcagctgctggaggagaaggccgccatgacagatgccatggtgcccaggagcagctatgagaagctgcagagcagcctggagagcgaggtgtctgtgctggccagcaagctgaaggagagcgtgaaggagaaggagaaggtgcacagcgaggtggtgcagatccgctctgaggtgtcccaggtgaagcgggagaaggagaacatccagaccctgctgaagagcaaggagcaggaggtgaatgagctgctgcagaagttccagcaggcccaggaggagctggccgagatgaagagatatgcagagagcagcagcaagctggaggaggacaaggacaagaagatcaatgagatgagcaaggaggtgaccaagctgaaggaggccctgaacagcctgagccagctgagctacagcaccagcagcagcaagaggcagagccagcagctggaggccctgcagcagcaggtgaagcagctgcagaaccagctggccgagtgcaagaagcagcaccaggaggtgatctctgtgtacaggatgcacctgctgtatgctgtgcagggccagatggatgaagatgtgcagaaggtgctgaagcagatcctgaccatgtgcaagaaccagagccagaagaagtag

SEQ ID NO: 167702 - DNA, 2856 bp, synthetic construct
  misc_feature 1..2856: note = Description of Artificial Sequence: Synthetic coding sequence
  source 1..2856: mol_type = other DNA
atgaagagcctgaaggccaagttcaggaagagtgacaccaatgagtggaacaagaatgatgaccggctgctgcaggccgtggagaatggagatgctgagaaggtggccagcctgctgggcaagaagggggccagcgccaccaagcatgattctgagggcaagacagccttccacctggccgccgccaagggccacgtggagtgcctgcgggtgatgatcacccatggagtggatgtgacagcccaggacaccaccggccacagcgccctgcacctggccgccaagaacagccaccacgagtgcatcaggaagctgctgcagagcaaatgtcctgctgagagcgtggacagcagcggcaagacagccctgcactacgccgccgcccagggctgcctgcaggccgtgcagatcctgtgtgagcacaagagccccatcaacctgaaggacctggatggcaacatccccctgctgctggccgtgcagaatggccacagcgagatctgccacttcctgctggaccacggggctgatgtgaacagcaggaacaagagcggccgcacagccctgatgctggcctgtgaaattggcagcagcaatgctgtggaggccctgatcaagaagggagctgacctgaacctggtggacagcctgggctacaatgccctgcactacagcaagctgtctgaaaatgccggcatccagagcctgctgctgagcaagatcagccaggatgctgacctgaagacccccaccaagcccaagcagctgagtgatgtgagcagccccaggagcatcaccagcacccccctgagcggcaaggagagcgtcttctttgctgagccccccttcaaggccgagatcagcagcatccgggagaacaaggaccggctgagtgacagcaccaccggggctgacagcctgctggacatcagcagcgaggccgaccagcaggacctgctgagcctgctgcaggccaaggtggccagcctgaccctgcacaacaaggagctgcaggacaagctgcaggccaagagccccaaggaggccgaggccgacctgagctttgacagctaccacagcacccagacagacctgggccccagcctgggcaagccaggagagaccagccccccagacagcaagagcagccccagcgtgctgatccacagcctgggcaagagcaccacagacaatgatgtgcgcatccagcagctgcaggagatcctgcaggacctgcagaagaggctggagagcagcgaggccgagaggaagcagctgcaggtggagctgcagagcagaagagctgagctggtgtgcctgaacaacacagagatcagcgagaacagcagtgacctgagccagaagctgaaggagacccagagcaaatatgaggaggccatgaaggaggtgctgtctgtgcagaagcagatgaagctgggcctggtgtccccagagagcatggacaactacagccacttccacgagctgcgggtgacagaggaggagatcaacgtgctgaagcaggacctgcagaatgccctggaggagagcgagaggaacaaggagaaggtgcgggagctggaggagaagctggtggagcgggagaagggcaccgtcatcaagccccctgtggaggagtatgaggagatgaagagcagctactgcagcgtgattgagaacatgaacaaggagaaggccttcctgtttgagaagtaccaggaggcccaggaggagatcatgaagctgaaggacaccctgaagagccagatgacccaggaggccagtgatgaagctgaggacatgaaggaggccatgaacaggatgattgatgagctgaacaagcaggtgtctgagctgagccagctgtacaaggaggcccaggccgagctggaggactacaggaagaggaagagcctggaggatgtgacagctgagtacatccacaaggccgagcacgagaagctgatgcagctgaccaacgtgtcccgggccaaggcagaagatgccctgtctgagatgaagagccagtacagcaaggtgctgaatgagctgacccagctgaagcagctggtggatgcccagaaggagaacagcgtgtccatcacagagcacctgcaggtgatcaccaccctgaggacagctgccaaggagatggaggagaagatcagcaacctgaaggagcacctggccagcaaggaggtggaggtggccaagctggagaagcagctgctggaggagaaggccgccatgacagatgccatggtgcccaggagcagctatgagaagctgcagagcagcctggagagcgaggtgtctgtgctggccagcaagctgaaggagagcgtgaaggagaaggagaaggtgcacagcgaggtggtgcagatccgctctgaggtgtcccaggtgaagcgggagaaggagaacatccagaccctgctgaagagcaaggagcaggaggtgaatgagctgctgcagaagttccagcaggcccaggaggagctggccgagatgaagagatatgcagagagcagcagcaagctggaggaggacaaggacaagaagatcaatgagatgagcaaggaggtgaccaagctgaaggaggccctgaacagcctgagccagctgagctacagcaccagcagcagcaagaggcagagccagcagctggaggccctgcagcagcaggtgaagcagctgcagaaccagctggccgagtgcaagaagcagcaccaggaggtgatctctgtgtacaggatgcacctgctgtatgctgtgcagggccagatggatgaagatgtgcagaaggtgctgaagcagatcctgaccatgtgcaagaaccagagccagaagaagtag

SEQ ID NO: 167703 - DNA, 1593 bp, synthetic construct
  misc_feature 1..1593: note = Description of Artificial Sequence: Synthetic coding sequence
  source 1..1593: mol_type = other DNA
atggatgacctgcagagccagaacctgtccatggacatgacagacagccccccagccctggccaacaaccggctggagaatggcatggcccagctgatcaccacagaggcctggaacatcaacagcacagacctggtgaagaaggccctggtgacagtgcctgcccccagcatcctgaaccccccagctgagagccagagcggcatggccctgaaggtggccgccaccgtgctgcagcccctgtgcctgggggagagccctgtggtgatgcccatccacatgcaggtggagggcagcagcgcccctgagctgaaccccaatggaaatgccacctacgtgatgaccacccagggccctgtgcagctgcctgtggtgctggagcagcacgtgttccagcacctgaacagccccctggtgctgccccaggaggccccctgcagcagcagcaccatccacaacaacctcttccagggcgctgaggaccctgaggcccagccccagctgctggacctgcgcatccccagccagccccaggagcccaccctgccctttgaggccgtgctgcagaacctcttccccagccagggcaccctgggccccccaccctgccagcccccacctggctacgcccctgtgcccccccagcccttcagcagccccctgagccccctggtgcccccagccaccctgctggtgccctaccctgtgattgtgcccctgcctgtgcctgtgcccatccccatccccatccccatgccccagagcagcgagagcaagttcagcagcagcttccccaagccacccagcagctttggcctgcaccccttcaagggcacccagacccccctggagaaggatgagctgaagccctttgacatcctgcagcccaaggagtacttccagctgagccgccacacagtcatcaagatgggctctgaaaatgaggccctggacctgtccatgaagtctgtgccctggctgaaggccggggaggtgagcccccccatcttccaggaggatgctgccctggacctgtctgtggccgcccacaggaagtctgagcccccacctgagaccctgtatgattctggggcctctgtggacagcagcggccacacagtgatggagaagctgcccagcggcatggagatcagctttgccccagccaccagccatgaggccccagccatgatggacagccacatcagcagcagtgatgctgccacagagatgctgagccagcccaaccaccccagcggggaggtgaaggccgagaacaacatcgagatggtgggggagagccaggccgccaaggtgattgtgtctgtggaggatgctgtgcccaccatcttctgtgggaagatcaagggcctgtctggagtgtccaccaagaacttctccttcaagagagaagattctgtgctgcagggctatgacatcaacagccagggcgaggagagcatgggaaatgctgagcccctgaggaagcccatcaagaacagaagcatcaagctgaagaaggtgaacagccaggagatccacatgctgcccatcaagaagcagaggctggccaccttcttccccaggaagtag

SEQ ID NO: 167704 - DNA, 1593 bp, synthetic construct; identical to SEQ ID NO: 167703
  misc_feature 1..1593: note = Description of Artificial Sequence: Synthetic coding sequence
  source 1..1593: mol_type = other DNA

SEQ ID NO: 167705 - DNA, 1443 bp, synthetic construct
  misc_feature 1..1443: note = Description of Artificial Sequence: Synthetic coding sequence
  source 1..1443: mol_type = other DNA
atggatgacctgcagagccagaacctgtccatggacatgacagacagccccccagccctggccaacaaccggctggagaatggcatggcccagctgatcaccacagaggcctggaacatcaacagcacagacctggtggagggcagcagcgcccctgagctgaaccccaatggaaatgccacctacgtgatgaccacccagggccctgtgcagctgcctgtggtgctggagcagcacgtgttccagcacctgaacagccccctggtgctgccccaggaggccccctgcagcagcagcaccatccacaacaacctcttccagggcgctgaggaccctgaggcccagccccagctgctggacctgcgcatccccagccagccccaggagcccaccctgccctttgaggccgtgctgcagaacctcttccccagccagggcaccctgggccccccaccctgccagcccccacctggctacgcccctgtgcccccccagcccttcagcagccccctgagccccctggtgcccccagccaccctgctggtgccctaccctgtgattgtgcccctgcctgtgcctgtgcccatccccatccccatccccatgccccagagcagcgagagcaagttcagcagcagcttccccaagccacccagcagctttggcctgcaccccttcaagggcacccagacccccctggagaaggatgagctgaagccctttgacatcctgcagcccaaggagtacttccagctgagccgccacacagtcatcaagatgggctctgaaaatgaggccctggacctgtccatgaagtctgtgccctggctgaaggccggggaggtgagcccccccatcttccaggaggatgctgccctggacctgtctgtggccgcccacaggaagtctgagcccccacctgagaccctgtatgattctggggcctctgtggacagcagcggccacacagtgatggagaagctgcccagcggcatggagatcagctttgccccagccaccagccatgaggccccagccatgatggacagccacatcagcagcagtgatgctgccacagagatgctgagccagcccaaccaccccagcggggaggtgaaggccgagaacaacatcgagatggtgggggagagccaggccgccaaggtgattgtgtctgtggaggatgctgtgcccaccatcttctgtgggaagatcaagggcctgtctggagtgtccaccaagaacttctccttcaagagagaagattctgtgctgcagggctatgacatcaacagccagggcgaggagagcatgggaaatgctgagcccctgaggaagcccatcaagaacagaagcatcaagctgaagaaggtgaacagccaggagatccacatgctgcccatcaagaagcagaggctggccaccttcttccccaggaagtag

SEQ ID NO: 167706 - DNA, 1593 bp, synthetic construct; identical to SEQ ID NO: 167703
  misc_feature 1..1593: note = Description of Artificial Sequence: Synthetic coding sequence
  source 1..1593: mol_type = other DNA

SEQ ID NO: 167707 - DNA, 1593 bp, synthetic construct; identical to SEQ ID NO: 167703
  misc_feature 1..1593: note = Description of Artificial Sequence: Synthetic coding sequence
  source 1..1593: mol_type = other DNA

SEQ ID NO: 167708 - DNA, 885 bp, synthetic construct
  misc_feature 1..885: note = Description of Artificial Sequence: Synthetic coding sequence
  source 1..885: mol_type = other DNA
atgcagccccggcggcagaggctgcctgccccctggagcggcccccggggcccccggcccacagcccccctgctggccctgctgctgctgctggcccctgtggccgccccagctggcagcggggaccctgatgaccccggccagccccaggatgctggggtgccccggcggctgctgcagcaggccgcccgggccgccctgcacttcttcaacttccgcagcggcagccccagcgccctgcgggtgctggccgaggtgcaggagggccgggcctggatcaaccccaaggagggctgcaaggtgcacgtggtgttcagcacagagcgctacaaccctgagagcctgctgcaggagggggagggccgcctgggcaaatgttctgcccgggtcttcttcaagaaccagaagccccggcccaccatcaacgtgacctgcacccggctgattgagaagaagaagaggcagcaggaggactacctgctgtacaagcagatgaagcagctgaagaaccccctggagatcgtgtccatcccagacaaccacggccacatcgaccccagcctgcggctcatctgggacctggccttcctgggcagcagctatgtgatgtgggagatgaccacccaggtgagccactactacctggcccagctgacctctgtgcggcagtggaagaccaatgatgacaccatcgactttgactacacagtgctgctgcacgagctgagcacccaggagatcatcccctgccgcatccacctggtgtggtacccaggcaagcccctgaaggtgaagtaccactgccaggagctgcagaccccagaggaggccagcggcacagaggagggcagcgctgtggtgcccacagagctgagcaacttctag

SEQ ID NO: 167709 - DNA, 687 bp, synthetic construct
  misc_feature 1..687: note = Description of Artificial Sequence: Synthetic coding sequence
  source 1..687: mol_type = other DNA
atgcagccccggcggcagaggctgcctgccccctggagcggcccccggggcccccggcccacagcccccctgctggccctgctgctgctgctggcccctgtggccgccccagctggcagcggggaccctgatgaccccggccagccccaggatgctggggtgccccggcggctgctgcagcaggccgcccgggccgccctgcacttcttcaacttccgcagcggcagccccagcgccctgcgggtgctggccgaggtgcaggagggccgggcctggatcaaccccaaggagggctgcaaggtgcacgtggtgttcagcacagagcgctacaaccctgagagcctgctgcaggagggggagggccgcctgggcaaatgttctgcccgggtcttcttcaagaaccagaagccccggcccaccatcaacgtgacctgcacccggctgattgagaagaagaagaggcagcaggaggactacctgctgtacaagcagatgaagcagctgaagaaccccctggagatcgtgtccatcccagacaaccacggccacatcgaccccagcctgcggctcatctgggacctggccttcctgggcagcagctatgtgatgtgggagatgaccacccaggtgagccactactacctggcccagctgacctctgtgcggcagtgggtgaggaagacctag

SEQ ID NO: 167710 - DNA, 1008 bp, synthetic construct
  misc_feature 1..1008: note = Description of Artificial Sequence: Synthetic coding sequence
  source 1..1008: mol_type = other DNA
atggtgagaagagaccggctgcggaggatgagggagtggtgggtgcaggtgggcctgctggccgtgcccctgctggccgcctacctgcacatccccccaccccagctgagccctgccctgcacagctggaagagcagcggcaagttcttcacctacaagggcctgcgcatcttctaccaggacagcgtgggcgtggtgggcagccctgagatcgtggtgctgctgcacggcttccccaccagcagctatgactggtacaagatctgggagggcctgaccctgcgcttccacagggtcatcgccctggacttcctgggcttcggcttcagtgacaagccccggccccaccactacagcatctttgagcaggccagcatcgtggaggccctgctgcggcacctgggcctgcagaacagacgcatcaacctgctgagccatgactatggagacatcgtggcccaggagctgctgtaccgctacaagcagaacagaagtggccgcctgaccatcaagagcctgtgcctgagcaatggaggcatcttccctgagacccaccggcccctgctgctgcagaagctgctgaaggatggcggcgtgctgagccccatcctgacccggctgatgaacttctttgtgttcagccggggcctgacccctgtgtttggcccctacacccggcccagcgagagcgagctgtgggacatgtgggccggcatccggaacaatgatggcaacctggtgattgacagcctgctgcagtacatcaaccagaggaagaagttcagaagacgctgggtgggcgccctggcctctgtgaccatccccatccacttcatctacggccccctggaccctgtgaacccctacccagagttcctggagctgtacaggaagaccctgcccaggagcacagtgtccatcctggatgaccacatcagccactacccccagctggaggaccccatgggcttcctgaatgcctacatgggcttcatcaacagcttctag

SEQ ID NO: 167711 - DNA, 492 bp, synthetic construct
  misc_feature 1..492: note = Description of Artificial Sequence: Synthetic coding sequence
  source 1..492: mol_type = other DNA
atgaggcggctgctgatccccctggccctgtggctgggcgctgtgggcgtgggcgtggccgagctgacagaggcccagaggcggggcctgcaggtggccctggaggagttccacaagcacccccctgtgcagtgggccttccaggagacctctgtggagagcgctgtggacacccccttccctgctggcatctttgtgcggctggagttcaagctgcagcagaccagctgcaggaagagggactggaagaagccagagtgcaaggtgcggcccaacggcaggaagaggaagtgcctggcctgcatcaagctgggcagcgaggacaaggtgctgggccgcctggtgcactgccccatcgagacccaggtgctgcgggaggccgaggagcaccaggagacccagtgcctgcgggtgcagagagctggggaggacccccacagcttctacttccctggccagtttgccttcagcaaggccctgcccaggagctag

SEQ ID NO: 167712 - DNA, 492 bp, synthetic construct; identical to SEQ ID NO: 167711
  misc_feature 1..492: note = Description of Artificial Sequence: Synthetic coding sequence
  source 1..492: mol_type = other DNA

SEQ ID NO: 167713 - DNA, 495 bp, synthetic construct
  misc_feature 1..495: note = Description of Artificial Sequence: Synthetic coding sequence
  source 1..495: mol_type = other DNA
atggccagcccccaccaggagcccaagccaggggacctgattgagatcttccggctgggctatgagcactgggccctgtacatcggagatggctacgtgatccacctggccccacccagcgagtacccaggagctggcagcagctctgtgttttctgtgctgagcaacagcgctgaggtgaagcgggagcggctggaggatgtggtgggcggctgctgctacagagtgaacaacagcctggaccacgagtaccagcccaggcctgtggaggtgatcatcagcagcgccaaggagatggtgggccagaagatgaagtacagcatcgtgtccaggaactgtgagcactttgtgacccagctgcgctatggcaagagccgctgcaagcaggtggagaaggccaaggtggaggtgggcgtggccacagccctgggcatcctggtggtggccggctgcagctttgccatccgccgctaccagaagaaggccacagcctag

SEQ ID NO: 167714 - DNA, 495 bp, synthetic construct
  misc_feature 1..495: note = Description of Artificial Sequence: Synthetic coding sequence
  source 1..495: mol_type = other DNA
atgggcctgcctgagcccaagcccaagccaggggacctgattgagatcttccggctgggctatgagcactgggccctgtacatcggagatggctacgtgatccacctggccccacccagcgagtacccaggagctggcagcagctctgtgttttctgtgctgagcaacagcgctgaggtgaagcgggagcggctggaggatgtggtgggcggctgctgctacagagtgaacaacagcctggaccacgagtaccagcccaggcctgtggaggtgatcatcagcagcgccaaggagatggtgggccagaagatgaagtacagcatcgtgtccaggaactgtgagcactttgtgacccagctgcgctatggcaagagccgctgcaagcaggtggagaaggccaaggtggaggtgggcgtggccacagccctgggcatcctggtggtggccggctgcagctttgccatccgccgctaccagaagaaggccacagcctag

SEQ ID NO: 167715 - DNA, 1389 bp, synthetic construct
  misc_feature 1..1389: note = Description of Artificial Sequence: Synthetic coding sequence
  source 1..1389: mol_type = other DNA
atggccagcaacagcagcagctgccccaccccaggcggcggccacctgaatggctaccctgtgcccccctatgccttcttcttcccccccatgctgggcggcctgagccccccaggggccctgaccaccctgcagcaccagctgcctgtgtctggctacagcacccccagccctgccaccatcgagacccagagcagcagcagcgaggagatcgtgcccagcccccccagccccccacccctgccccgcatctacaagccctgctttgtgtgccaggacaagagcagcggctaccactacggcgtgtctgcctgtgagggctgcaagggcttcttcagaagaagcatccagaagaacatggtgtacacctgccaccgggacaagaactgcatcatcaacaaggtgaccaggaaccgctgccagtactgccgcctgcagaagtgctttgaggtgggcatgagcaaggagagcgtgagaaatgacaggaacaagaagaagaaggaggtgcccaagccagaatgttctgagagctacaccctgaccccagaggtgggggagctgattgagaaggtgaggaaggcccaccaggagaccttccctgccctgtgccagctgggcaagtacaccaccaacaacagcagcgagcagagggtgtccctggacatcgacctgtgggacaagttcagcgagctgagcaccaagtgcatcatcaagacagtggagtttgccaagcagctgcccggcttcaccaccctgaccatcgctgaccagatcaccctgctgaaggccgcctgcctggacatcctgatcctgcgcatctgcacccgctacaccccagagcaggacaccatgaccttcagtgatggcctgaccctgaacagaacccagatgcacaatgccggcttcggccccctgacagacctggtgtttgcctttgccaaccagctgctgcccctggagatggatgatgctgagaccggcctgctgagcgccatctgcctgatctgtggggaccggcaggacctggagcagcctgacagagtggacatgctgcaggagcccctgctggaggccctgaaggtgtatgtgaggaagaggcggcccagccggccccacatgttccccaagatgctgatgaagatcacagacctgcggagcatcagcgccaagggagctgagagggtcatcaccctgaagatggagatccctggctccatgcctcctctcatccaggagatgctggagaacagcgagggcctggacaccctgagcggccagcccggcggcggcggcagagatggcggcggcctggcccctcctcctggcagctgcagccccagcctgagccccagcagcaacagaagcagccctgccacccacagcccctag

SEQ ID NO: 167716 - DNA, 1902 bp, synthetic construct
  misc_feature 1..1902: note = Description of Artificial Sequence: Synthetic coding sequence
  source 1..1902: mol_type = other DNA
atgtatgagagcgtggaggtgggcggccccacccccaaccccttcctggtggtggacttctacaaccagaacagagcctgcctgctgcctgagaagggcctgcctgcccctggcccctacagcacccccctgcggacccccctgtggaatggcagcaaccacagcattgagacccagagcagcagcagcgaggagatcgtgcccagcccccccagccccccacccctgccccgcatctacaagccctgctttgtgtgccaggacaagagcagcggctaccactatggagtgtctgcctgtgagggctgcaagggcttcttccgccgcagcatccagaagaacatggtgtacacctgccaccgggacaagaactgcatcatcaacaaggtgaccaggaaccgctgccagtactgccgcctgcagaagtgctttgaggtgggcatgagcaaggagagcgtgagaaatgacaggaacaagaagaagaaggaggtgcccaagccagagtgcagcgagagctacaccctgaccccagaggtgggggagctgattgaatgtgccaagaggaccaggaagcccagcctgcccagcgcctcctgggccaacaccctgcggaccacagcccagaacaacgtgtccctgtggaccctgaccagcggcaccagctctgtgaacagccccaagtgcatcatcaagacagtggagtttgccaagcagctgcccggcttcaccaccctgaccatcgctgaccagatcaccctgctgaaggccgcctgcctggacatcctgatcctgcgcatctgcacccgctacaccccagagcaggacaccatgaccttcagtgatggcctgaccctgaacagaacccagatgcacaatgccggcttcggccccctgacagacctggtgtttgcctttgccaaccagctgctgcccctggagatggatgatgctgagaccggcctgctgagcgccatctgcctgatctgtggggaccggcaggacctggagcagcctgacagagtggacatgctgcaggagcccctgctggaggccctgaaggtgtatgtgaggaagagaagacccagccggccccacatgttccccaagatgctgatgaagatcacagacctgcggagcatcagcgccaagggagctgagagggtcatcaccctgaagatggagatccctggctccatgccacccctcatccaggagatgctggagaacagcgagggcctggacaccctgagcggccagcccggcggcggcggcagagatggcggcggcctgccccggcaggccgctgtggccccagccagcgccccagcccccacagaagctgcccggccccccaccccccgggaccggcccaggcacatggacacagccctggccctgcggcccggcttcagcctgcccttctaccggccctgtgaccctgccccagccctgcccccaccagccctgcccggcagcactggagacctgccctggggcaccggccgggaggaggccgccaccccctggacagaggcctgggccctgagcggcctgcctgcccccacagcctgggcagatgtgcggggccggggccaggagctgtctgaggcccctggccctggcagccaggacggctcctggggcccccgggtgcaccaggacacccccctgcccagcagcccccacctgcaccaccagcagaccccaggcctgggcagccccatcctgcggacccacaagcccctgctgcccagctggggcaccagcaccagccccctgccccggctggtgacagagggcgtgggccagggccggggcgtgccccctgtgcacaccctgccctaccagccccaggtgctgatcctggccggctttgtgttcatcctgatcttcctgttctag

SEQ ID NO: 167717 - DNA, 1374 bp, synthetic construct
  misc_feature 1..1374: note = Description of Artificial Sequence: Synthetic coding sequence
  source 1..1374: mol_type = other DNA
atgtatgagagcgtggaggtgggcggccccacccccaaccccttcctggtggtggacttctacaaccagaacagagcctgcctgctgcctgagaagggcctgcctgcccctggcccctacagcacccccctgcggacccccctgtggaatggcagcaaccacagcattgagacccagagcagcagcagcgaggagatcgtgcccagcccccccagccccccacccctgccccgcatctacaagccctgctttgtgtgccaggacaagagcagcggctaccactatggagtgtctgcctgtgagggctgcaagggcttcttccgccgcagcatccagaagaacatggtgtacacctgccaccgggacaagaactgcatcatcaacaaggtgaccaggaaccgctgccagtactgccgcctgcagaagtgctttgaggtgggcatgagcaaggagagcgtgagaaatgacaggaacaagaagaagaaggaggtgcccaagccagagtgcagcgagagctacaccctgaccccagaggtgggggagctgattgagaaggtgaggaaggcccaccaggagaccttccctgccctgtgccagctgggcaagtacaccaccaacaacagcagcgagcagagggtgtccctggacatcgacctgtgggacaagttcagcgagctgagcaccaagtgcatcatcaagacagtggagtttgccaagcagctgcccggcttcaccaccctgaccatcgctgaccagatcaccctgctgaaggccgcctgcctggacatcctgatcctgcgcatctgcacccgctacaccccagagcaggacaccatgaccttcagtgatggcctgaccctgaacagaacccagatgcacaatgccggcttcggccccctgacagacctggtgtttgcctttgccaaccagctgctgcccctggagatggatgatgctgagaccggcctgctgagcgccatctgcctgatctgtggggaccggcaggacctggagcagcctgacagagtggacatgctgcaggagcccctgctggaggccctgaaggtgtatgtgaggaagagaagacccagccggccccacatgttccccaagatgctgatgaagatcacagacctgcggagcatcagcgccaagggagctgagagggtcatcaccctgaagatggagatccctggctccatgccacccctcatccaggagatgctggagaacagcgagggcctggacaccctgagcggccagcccggcggcggcggcagagatggcggcggcctggcccctcctcctggcagctgcagccccagcctgagccccagcagcaacagaagcagccctgccacccacagcccctag

SEQ ID NO: 167718 - DNA, 1437 bp, synthetic construct
  misc_feature 1..1437: note = Description of Artificial Sequence: Synthetic coding sequence
  source 1..1437: mol_type = other DNA
atgatgagccagaccatgacccaggccggcgtgtccttccgccacagcgtgcgggccgcccagtgccacaccagggtgcccaacacctggccccgggccacccggccctatgccagctgcagaagaagcccccggctgcggggccgctggccaggcagcgctggccagggcgctgggggccgggcccccagggctggctggagggctggagatgtgactggaagtgccatcgagacccagagcagcagcagcgaggagatcgtgcccagcccccccagccccccacccctgccccgcatctacaagccctgctttgtgtgccaggacaagagcagcggctaccactacggcgtgtctgcctgtgagggctgcaagggcttcttcagaagaagcatccagaagaacatggtgtacacctgccaccgggacaagaactgcatcatcaacaaggtgaccaggaaccgctgccagtactgccgcctgcagaagtgctttgaggtgggcatgagcaaggagagcgtgagaaatgacaggaacaagaagaagaaggaggtgcccaagccagaatgttctgagagctacaccctgaccccagaggtgggggagctgattgagaaggtgaggaaggcccaccaggagaccttccctgccctgtgccagctgggcaagtacaccaccaacaacagcagcgagcagagggtgtccctggacatcgacctgtgggacaagttcagcgagctgagcaccaagtgcatcatcaagacagtggagtttgccaagcagctgcccggcttcaccaccctgaccatcgctgaccagatcaccctgctgaaggccgcctgcctggacatcctgatcctgcgcatctgcacccgctacaccccagagcaggacaccatgaccttcagtgatggcctgaccctgaacagaacccagatgcacaatgccggcttcggccccctgacagacctggtgtttgcctttgccaaccagctgctgcccctggagatggatgatgctgagaccggcctgctgagcgccatctgcctgatctgtggggaccggcaggacctggagcagcctgacagagtggacatgctgcaggagcccctgctggaggccctgaaggtgtatgtgaggaagaggcggcccagccggccccacatgttccccaagatgctgatgaagatcacagacctgcggagcatcagcgccaagggagctgagagggtcatcaccctgaagatggagatccctggctccatgcctcctctcatccaggagatgctggagaacagcgagggcctggacaccctgagcggccagcccggcggcggcggcagagatggcggcggcctggcccctcctcctggcagctgcagccccagcctgagccccagcagcaacagaagcagccctgccacccacagcccctag

SEQ ID NO: 167719 - DNA, 1389 bp, synthetic construct; identical to SEQ ID NO: 167715
  misc_feature 1..1389: note = Description of Artificial Sequence: Synthetic coding sequence
  source 1..1389: mol_type = other DNA

SEQ ID NO: 167720 - DNA, 1041 bp, synthetic construct
  misc_feature 1..1041: note = Description of Artificial Sequence: Synthetic coding sequence
  source 1..1041: mol_type = other DNA
atgggccaggagatcctgcctgcccggagccccaccctgcggctgggcagccccaccccccacctgccccaggagctgctgcgggccagccccaagggccccccaggccgcctgcagctgggcggcctggccgtgagaaatgacaggaacaagaagaagaaggaggtgcccaagccagagtgcagcgagagctacaccctgaccccagaggtgggggagctgattgagaaggtgaggaaggcccaccaggagaccttccctgccctgtgccagctgggcaagtacaccaccaacaacagcagcgagcagagggtgtccctggacatcgacctgtgggacaagttcagcgagctgagcaccaagtgcatcatcaagacagtggagtttgccaagcagctgcccggcttcaccaccctgaccatcgctgaccagatcaccctgctgaaggccgcctgcctggacatcctgatcctgcgcatctgcacccgctacaccccagagcaggacaccatgaccttcagtgatggcctgaccctgaacagaacccagatgcacaatgccggcttcggccccctgacagacctggtgtttgcctttgccaaccagctgctgcccctggagatggatgatgctgagaccggcctgctgagcgccatctgcctgatctgtggggaccggcaggacctggagcagcctgacagagtggacatgctgcaggagcccctgctggaggccctgaaggtgtatgtgaggaagagaagacccagccggccccacatgttccccaagatgctgatgaagatcacagacctgcggagcatcagcgccaagggagctgagagggtcatcaccctgaagatggagatccctggctccatgccacccctcatccaggagatgctggagaacagcgagggcctggacaccctgagcggccagcccggcggcggcggcagagatggcggcggcctggcccctcctcctggcagctgcagccccagcctgagccccagcagcaacagaagcagccctgccacctag

SEQ ID NO: 167721 - DNA, 1098 bp, synthetic construct
  misc_feature 1..1098: note = Description of Artificial Sequence: Synthetic coding sequence
  source 1..1098: mol_type = other DNA
atggccagcaacagcagcagctgccccaccccaggcggcggccacctgaatggctaccctgtgcccccctatgccttcttcttcccccccatgctgggcggcctgagccccccaggggccctgaccaccctgcagcaccagctgcctgtgtctggctacagcacccccagccctgccaccgtgagaaatgacaggaacaagaagaagaaggaggtgcccaagccagagtgcagcgagagctacaccctgaccccagaggtgggggagctgattgagaaggtgaggaaggcccaccaggagaccttccctgccctgtgccagctgggcaagtacaccaccaacaacagcagcgagcagagggtgtccctggacatcgacctgtgggacaagttcagcgagctgagcaccaagtgcatcatcaagacagtggagtttgccaagcagctgcccggcttcaccaccctgaccatcgctgaccagatcaccctgctgaaggccgcctgcctggacatcctgatcctgcgcatctgcacccgctacaccccagagcaggacaccatgaccttcagtgatggcctgaccctgaacagaacccagatgcacaatgccggcttcggccccctgacagacctggtgtttgcctttgccaaccagctgctgcccctggagatggatgatgctgagaccggcctgctgagcgccatctgcctgatctgtggggaccggcaggacctggagcagcctgacagagtggacatgctgcaggagcccctgctggaggccctgaaggtgtatgtgaggaagagaagacccagccggccccacatgttccccaagatgctgatgaagatcacagacctgcggagcatcagcgccaagggagctgagagggtcatcaccctgaagatggagatccctggctccatgccacccctcatccaggagatgctggagaacagcgagggcctggacaccctgagcggccagcccggcggcggcggcagagatggcggcggcctggcccctcctcctggcagctgcagccccagcctgagccccagcagcaacagaagcagccctgccacccacagcccctag

SEQ ID NO: 167722 - DNA, 1149 bp, synthetic construct
  misc_feature 1..1149: note = Description of Artificial Sequence: Synthetic coding sequence
  source 1..1149: mol_type = other DNA
atggtgcccagcagccccagccccccacctccaccccgggtgtacaagccctgctttgtgtgcaatgacaagagcagcggctaccactacggcgtgagcagctgtgagggctgcaagggcttcttcagaagaagcatccagaagaacatggtgtacacctgccaccgggacaagaactgcatcatcaacaaggtgaccaggaaccgctgccagtactgccgcctgcagaagtgctttgaggtgggcatgagcaaggaggccgtgagaaatgacaggaacaagaagaagaaggaggtgaaggaggagggcagcccagacagctatgagctgagcccccagctggaggagctgatcaccaaggtgtccaaggcccaccaggagaccttccccagcctgtgccagctgggcaagtacaccaccaacagcagcgctgaccaccgggtgcagctggacctgggcctgtgggacaagttcagcgagctggccaccaagtgcatcatcaagatcgtggagtttgccaagaggctgcccggcttcaccggcctgagcattgctgaccagatcaccctgctgaaggccgcctgcctggacatcctgatgctgcgcatctgcacccgctacaccccagagcaggacaccatgaccttcagtgatggcctgaccctgaacagaacccagatgcacaatgccggcttcggccccctgacagacctggtgtttgcctttgctggccagctgctgcccctggagatggatgacacagagaccggcctgctgagcgccatctgcctgatctgtggggacaggatggacctggaggagcctgagaaggtggacaagctgcaggagcccctgctggaggccctgcggctgtatgccaggagaagaagacccagccagccctacatgttccccaggatgctgatgaagatcacagacctgcggggcatcagcaccaagggagctgagcgggccatcaccctgaagatggagatccctggccccatgcctcctctcatccgggagatgctggagaaccctgagatgtttgaagatgacagcagccagcccggcccccaccccaatgccagcagtgaagatgaggtgcctgggggccagggcaaaggaggcctgaagagccctgcctag

SEQ ID NO: 167723 - DNA, 1332 bp, synthetic construct
  misc_feature 1..1332: note = Description of Artificial Sequence: Synthetic coding sequence
  source 1..1332: mol_type = other DNA
atgtatgactgcatggagacctttgcccctggcccccggcggctgtatggagctgctggccctggagctggcctgctgcggcgggccaccggcggcagctgctttgctggcctggagagctttgcctggccccagcctgccagcctgcagagcgtggagacccagagcaccagcagcgaggagatggtgcccagcagccccagccccccacctccaccccgggtgtacaagccctgctttgtgtgcaatgacaagagcagcggctaccactatggagtgagcagctgtgagggctgcaagggcttcttccgccgcagcatccagaagaacatggtgtacacctgccaccgggacaagaactgcatcatcaacaaggtgaccaggaaccgctgccagtactgccgcctgcagaagtgctttgaggtgggcatgagcaaggaggccgtgagaaatgacaggaacaagaagaagaaggaggtgaaggaggagggcagcccagacagctatgagctgagcccccagctggaggagctgatcaccaaggtgtccaaggcccaccaggagaccttccccagcctgtgccagctgggcaagtacaccaccaacagcagcgctgaccaccgggtgcagctggacctgggcctgtgggacaagttcagcgagctggccaccaagtgcatcatcaagatcgtggagtttgccaagaggctgcccggcttcaccggcctgagcattgctgaccagatcaccctgctgaaggccgcctgcctggacatcctgatgctgcgcatctgcacccgctacaccccagagcaggacaccatgaccttcagtgatggcctgaccctgaacagaacccagatgcacaatgccggcttcggccccctgacagacctggtgtttgcctttgctggccagctgctgcccctggagatggatgacacagaaacaggcctgctgagcgccatctgcctgatctgtggggacaggatggacctggaggagcctgagaaggtggacaagctgcaggagcccctgctggaggccctgcggctgtatgccaggagaagaagacccagccagccctacatgttccccaggatgctgatgaagatcacagacctgcggggcatcagcaccaagggagctgagcgggccatcaccctgaagatggagatccctggccccatgccacccctcatccgggagatgctggagaaccctgagatgtttgaagatgacagcagccagcccggcccccaccccaatgccagcagtgaagatgaggtgcctgggggccagggcaagggcggcctgaagagccctgcctag

SEQ ID NO: 167724 - DNA, 1365 bp, synthetic construct
  misc_feature 1..1365: note = Description of Artificial Sequence: Synthetic coding sequence
  source 1..1365: mol_type = other DNA
atggccaccaacaaggagcggctgtttgctgctggggccctgggccctggcagcggctacccaggagctggcttcccctttgccttccctggggccctgcggggcagccccccatttgagatgctgagccccagcttccggggcctgggccagcctgacctgcccaaggagatggccagcctgtctgtggagacccagagcaccagcagcgaggagatggtgcccagcagccccagccccccacctccaccccgggtgtacaagccctgctttgtgtgcaatgacaagagcagcggctaccactacggcgtgagcagctgtgagggctgcaagggcttcttcagaagaagcatccagaagaacatggtgtacacctgccaccgggacaagaactgcatcatcaacaaggtgaccaggaaccgctgccagtactgccgcctgcagaagtgctttgaggtgggcatgagcaaggaggccgtgagaaatgacaggaacaagaagaagaaggaggtgaaggaggagggcagcccagacagctatgagctgagcccccagctggaggagctgatcaccaaggtgtccaaggcccaccaggagaccttccccagcctgtgccagctgggcaagtacaccaccaacagcagcgctgaccaccgggtgcagctggacctgggcctgtgggacaagttcagcgagctggccaccaagtgcatcatcaagatcgtggagtttgccaagaggctgcccggcttcaccggcctgagcattgctgaccagatcaccctgctgaaggccgcctgcctggacatcctgatgctgcgcatctgcacccgctacaccccagagcaggacaccatgaccttcagtgatggcctgaccctgaacagaacccagatgcacaatgccggcttcggccccctgacagacctggtgtttgcctttgctggccagctgctgcccctggagatggatgacacagagaccggcctgctgagcgccatctgcctgatctgtggggacaggatggacctggaggagcctgagaaggtggacaagctgcaggagcccctgctggaggccctgcggctgtatgccaggagaagaagacccagccagccctacatgttccccaggatgctgatgaagatcacagacctgcggggcatcagcaccaagggagctgagcgggccatcaccctgaagatggagatccctggccccatgcctcctctcatccgggagatgctggagaaccctgagatgtttgaagatgacagcagccagcccggcccccaccccaatgccagcagtgaagatgaggtgcctgggggccagggcaaaggaggcctgaagagccctgcctag

SEQ ID NO: 167725 - DNA, 1365 bp, synthetic construct; identical to SEQ ID NO: 167724
  misc_feature 1..1365: note = Description of Artificial Sequence: Synthetic coding sequence
  source 1..1365: mol_type = other DNA

SEQ ID NO: 167726 - DNA, 306 bp, synthetic construct
  misc_feature 1..306: note = Description of Artificial Sequence: Synthetic coding sequence
  source 1..306: mol_type = other DNA
caccaccaggatgaatttgccaagaggctgcccggcttcaccggcctgagcattgctgaccagatcaccctgctgaaggccgcctgcctggacatcctgatgctgcgcatctgcacccgctacaccccagagcaggacaccatgaccttcagtgatggcctgaccctgaacagaacccagatgcacaatgccggcttcggccccctgacagacctggtgtttgcctttgctggccagctgctgcccctggagatggatgacacagagaccggcctgctgagcgccatctgcctgatctgtggctag

SEQ ID NO: 167727 - DNA, 1299 bp, synthetic construct
  misc_feature 1..1299: note = Description of Artificial Sequence: Synthetic coding sequence
  source 1..1299: mol_type = other DNA
atgctggccctgcccctgcccccctgctggagcggggcccctcctggagaggagggggagagcgctgctggcccctggtgcttccagcaccctgtgtccctgcaggccggcagccgctgcaccaccgtgtggaagaggctgccccgggtgagagatggctgcaccggccggcccggccctggccctgcctgctgtgccgagcccccagctgcccctgtgtccccagacctgaacctgctgcctggaagaaatcctccagcctgcaatggcttcttcagaagaagcatccagaagaacatggtgtacacctgccaccgggacaagaactgcatcatcaacaaggtgaccaggaaccgctgccagtactgccgcctgcagaagtgctttgaggtgggcatgagcaaggaggccgtgagaaatgacaggaacaagaagaagaaggaggtgaaggaggagggcagcccagacagctatgagctgagcccccagctggaggagctgatcaccaaggtgtccaaggcccaccaggagaccttccccagcctgtgccagctgggcaagtacaccaccaacagcagcgctgaccaccgggtgcagctggacctgggcctgtgggacaagttcagcgagctggccaccaagtgcatcatcaagatcgtggagtttgccaagaggctgcccggcttcaccggcctgagcattgctgaccagatcaccctgctgaaggccgcctgcctggacatcctgatgctgcgcatctgcacccgctacaccccagagcaggacaccatgaccttcagtgatggcctgaccctgaacagaacccagatgcacaatgccggcttcggccccctgacagacctggtgtttgcctttgctggccagctgctgcccctggagatggatgacacagagaccggcctgctgagcgccatctgcctgatctgtggggacaggatggacctggaggagcctgagaaggtggacaagctgcaggagcccctgctggaggccctgcggctgtatgccaggagaagaagacccagccagccctacatgttccccaggatgctgatgaagatcacagacctgcggggcatcagcaccaagggagctgagcgggccatcaccctgaagatggagatccctggccccatgcctcctctcatccgggagatgctggagaaccctgagatgtttgaagatgacagcagccagcccggcccccaccccaatgccagcagtgaagatgaggtgcctgggggccagggcaaaggaggcctgaagagccctgcctag

SEQ ID NO: 167728 - DNA, 1389 bp, synthetic construct
  misc_feature 1..1389: note = Description of Artificial Sequence: Synthetic coding sequence
  source 1..1389: mol_type = other DNA
atggacaccaagcacttcctgcccctggacttcagcacccaggtgaacagcagcctgaccagccccaccggccggggctccatggccgcccccagcctgcaccccagcctgggccctggcatcggcagccctggccagctgcacagccccatcagcaccctgagcagccccatcaatggcatgggcccccccttcagcgtcatcagcagccccatgggcccccacagcatgtctgtgcccaccacccccaccctgggcttcagcacaggcagcccccagctgagcagccccatgaaccctgtgagcagcagcgaggacatcaagccacccctgggcctgaatggagtgctgaaggtgcctgcccaccccagcggcaacatggccagcttcaccaagcacatctgtgccatctgtggggacaggagcagcggcaagcactatggagtgtacagctgtgagggctgcaagggcttcttcaagaggacagtgaggaaggacctgacctacacctgccgggacaacaaggactgcctgattgacaagaggcagaggaaccgctgccagtactgccgctaccagaagtgcctggccatgggcatgaagcgggaggccgtgcaggaggagcggcagaggggcaaggacagaaatgaaaatgaggtggagagcaccagcagcgccaatgaagacatgcctgtggagcgcatcctggaggccgagctggccgtggagcccaagacagagacctacgtggaggccaacatgggcctgaaccccagcagccccaatgaccctgtgaccaacatctgccaggccgctgacaagcagctgttcaccctggtggagtgggccaagaggatcccccacttcagcgagctgcccctggatgaccaggtgatcctgctgcgggccggctggaatgagctgctgattgccagcttcagccacaggagcattgctgtgaaggatggcatcctgctggccaccggcctgcacgtgcacaggaacagcgcccacagcgctggggtgggcgccatctttgacagagtgctgacagagctggtgtccaagatgagggacatgcagatggacaagacagagctgggctgcctgcgggccatcgtgctcttcaacccagacagcaagggcctgagcaacccagctgaggtggaggccctgcgggagaaggtgtatgccagcctggaggcctactgcaagcacaagtacccagagcagcccggccgctttgccaagctgctgctgcggctgcctgccctgcggagcatcggcctgaagtgcctggagcacctgttcttcttcaagctgattggagacacccccatcgacaccttcctgatggagatgctggaggccccccaccagatgacctag

SEQ ID NO: 167729 - DNA, 1098 bp, synthetic construct
  misc_feature 1..1098: note = Description of Artificial Sequence: Synthetic coding sequence
  source 1..1098: mol_type = other DNA
atgaaccctgtgagcagcagcgaggacatcaagccacccctgggcctgaatggagtgctgaaggtgcctgcccaccccagcggcaacatggccagcttcaccaagcacatctgtgccatctgtggggacaggagcagcggcaagcactacggcgtgtacagctgtgagggctgcaagggcttcttcaagaggacagtgaggaaggacctgacctacacctgccgggacaacaaggactgcctgattgacaagaggcagaggaaccgctgccagtactgccgctaccagaagtgcctggccatgggcatgaagcgggaggccgtgcaggaggagcggcagaggggcaaggacagaaatgaaaatgaggtggagagcaccagcagcgccaatgaagacatgcctgtggagcgcatcctggaggccgagctggccgtggagcccaagacagagacctacgtggaggccaacatgggcctgaaccccagcagccccaatgaccctgtgaccaacatctgccaggccgctgacaagcagctgttcaccctggtggagtgggccaagaggatcccccacttcagcgagctgcccctggatgaccaggtgatcctgctgcgggccggctggaatgagctgctgattgccagcttcagccacaggagcattgctgtgaaggatggcatcctgctggccaccggcctgcacgtgcacagaaattctgcccacagcgctggggtgggcgccatctttgacagagtgctgacagagctggtgtccaagatgagggacatgcagatggacaagacagagctgggctgcctgcgggccatcgtgctcttcaacccagacagcaagggcctgagcaacccagctgaggtggaggccctgcgggagaaggtgtatgccagcctggaggcctactgcaagcacaagtacccagagcagcccggccgctttgccaagctgctgctgcggctgcctgccctgcggagcatcggcctgaagtgcctggagcacctgttcttcttcaagctgattggagacacccccatcgacaccttcctgatggagatgctggaggccccccaccagatgacctag

SEQ ID NO: 167730 - DNA, 1602 bp, synthetic construct
  misc_feature 1..1602: note = Description of Artificial Sequence: Synthetic coding sequence
  source 1..1602: mol_type = other DNA
atgtcctgggccgcccggccccccttcctgccccagagacatgctgctggccagtgtggccctgtgggcgtgaggaaggagatgcactgcggcgtggccagccgctggaggagaagaagaccctggctggaccctgctgctgctgctgctgctgctgtggccggcggggagcagcagaccccagagcctgagcctggagaggccggcagagatggcatgggagacagcggccgggacagccgcagcccagacagcagcagccccaaccccctgccccagggcgtgcccccacccagccccccaggcccccccctgccccccagcacagcccccagcctgggcggcagcggggcccctcctcctccacccatgcctcctccacccctgggcagccccttccctgtgatcagcagctccatgggcagccctggcctgcccccaccagcccctcctggcttcagcggccctgtgagcagcccccagatcaacagcacagtgtccctgcccggcggcggcagcggccccccagaagatgtgaagccccctgtgctgggcgtgcggggcctgcactgccccccacctcctgggggccctggggccggcaagaggctgtgtgccatctgtggggacaggagcagcggcaagcactatggagtgtacagctgtgagggctgcaagggcttcttcaagaggaccatcaggaaggacctgacctacagctgccgggacaacaaggactgcaccgtggacaagaggcagaggaaccgctgccagtactgccgctaccagaagtgcctggccaccggcatgaagcgggaggccgtgcaggaggagcggcagaggggcaaggacaaggatggagatggagagggcgctgggggcgcccctgaggagatgcctgtggaccgcatcctggaggccgagctggccgtggagcagaagagtgaccagggcgtggagggccctgggggcactggaggcagcggcagcagccccaatgaccctgtgaccaacatctgccaggccgctgacaagcagctgttcaccctggtggagtgggccaagaggatcccccacttcagcagcctgcccctggatgaccaggtgatcctgctgcgggccggctggaatgagctgctgattgccagcttcagccacaggagcattgatgtgagagatggcatcctgctggccaccggcctgcacgtgcacagaaattctgcccacagcgctggggtgggcgccatctttgacagagtgctgacagagctggtgtccaagatgagggacatgaggatggacaagacagagctgggctgcctgcgggccatcatcctcttcaacccagatgccaagggcctgagcaaccccagcgaggtggaggtgctgcgggagaaggtgtatgccagcctggagacctactgcaagcagaagtacccagagcagcagggccgctttgccaagctgctgctgcggctgcctgccctgcggagcatcggcctgaagtgcctggagcacctgttcttcttcaagctgattggagacacccccatcgacaccttcctgatggagatgctggaggccccccaccagctggcctag

SEQ ID NO: 167731 - DNA, 1614 bp, synthetic construct
  misc_feature 1..1614: note = Description of Artificial Sequence: Synthetic coding sequence
  source 1..1614: mol_type = other DNA
atgtcctgggccgcccggccccccttcctgccccagagacatgctgctggccagtgtggccctgtgggcgtgaggaaggagatgcactgcggcgtggccagccgctggaggagaagaagaccctggctggaccctgctgctgctgctgctgctgctgtggccggcggggagcagcagaccccagagcctgagcctggagaggccggcagagatggcatgggagacagcggccgggacagccgcagcccagacagcagcagccccaaccccctgccccagggcgtgcccccacccagccccccaggcccccccctgccccccagcacagcccccagcctgggcggcagcggggcccctcctcctccacccatgcctcctccacccctgggcagccccttccctgtgatcagcagctccatgggcagccctggcctgcccccaccagcccctcctggcttcagcggccctgtgagcagcccccagatcaacagcacagtgtccctgcccggcggcggcagcggccccccagaagatgtgaagccccctgtgctgggcgtgcggggcctgcactgccccccacctcctgggggccctggggccggcaagaggctgtgtgccatctgtggggacaggagcagcggcaagcactatggagtgtacagctgtgagggctgcaagggcttcttcaagaggaccatcaggaaggacctgacctacagctgccgggacaacaaggactgcaccgtggacaagaggcagaggaaccgctgccagtactgccgctaccagaagtgcctggccaccggcatgaagcgggaggccgtgcaggaggagcggcagaggggcaaggacaaggatggagatggagagggcgctgggggcgcccctgaggagatgcctgtggaccgcatcctggaggccgagctggccgtggagcagaagagtgaccagggcgtggagggccctgggggcactggaggcagcggcagcagccccaatgaccctgtgaccaacatctgccaggccgctgacaagcagctgttcaccctggtggagtgggccaagaggatcccccacttcagcagcctgcccctggatgaccaggtgatcctgctgcgggccggctggaatgagctgctgattgccagcttcagccacaggagcattgatgtgagagatggcatcctgctggccaccggcctgcacgtgcacagaaattctgcccacagcgctggggtgggcgccatctttgacaggagcctgagccgggtgctgacagagctggtgtccaagatgagggacatgaggatggacaagacagagctgggctgcctgcgggccatcatcctcttcaacccagatgccaagggcctgagcaaccccagcgaggtggaggtgctgcgggagaaggtgtatgccagcctggagacctactgcaagcagaagtacccagagcagcagggccgctttgccaagctgctgctgcggctgcctgccctgcggagcatcggcctgaagtgcctggagcacctgttcttcttcaagctgattggagacacccccatcgacaccttcctgatggagatgctggaggccccccaccagctggcctag

SEQ ID NO: 167732 - DNA, 1614 bp, synthetic construct; identical to SEQ ID NO: 167731
  misc_feature 1..1614: note = Description of Artificial Sequence: Synthetic coding sequence
  source 1..1614: mol_type = other DNA

SEQ ID NO: 167733 - DNA, 1602 bp, synthetic construct; identical to SEQ ID NO: 167730
  misc_feature 1..1602: note = Description of Artificial Sequence: Synthetic coding sequence
  source 1..1602: mol_type = other DNA

SEQ ID NO: 167734 - DNA, 861 bp, synthetic construct
  misc_feature 1..861: note = Description of Artificial Sequence: Synthetic coding sequence
  source 1..861: mol_type = other DNA
atgccccagggctctgtgggccgctggggctgtgagaagaagtgcatcgtgggcagcaggcctgggggcggcggagatggccctggctggatcccccagaggagaagaagaagacgctggcaggccgagaacaacaagcccaggagccgcagccagggccgcctggatggcaccggctgggccacagctgggggcatcaacagcacagtgtccctgcccggcggcggcagcggccccccagaagatgtgaagccccctgtgctgggcgtgcggggcctgcactgccccccacctcctgggggccctggggccggcaagaggctgtgtgccatctgtggggacaggagcagcggcaagcactatggagtgtacagctgtgagggctgcaagggcttcttcaagaggaccatcaggaaggacctgacctacagctgccgggacaacaaggactgcaccgtggacaagaggcagaggaaccgctgccagtactgccgctaccagaagtgcctggccaccggcatgaagcgggaggccgtgcaggaggagcggcagaggggcaaggacaaggatggagatggagagggcgctgggggcgcccctgaggagatgcctgtggaccgcatcctggaggccgagctggccgtggagcagaagagtgaccagggcgtggagggccctgggggcactggaggcagcggcagctctgtgtctgtgggcgtgaaccccctgagctttgtgatgggcgtgggcggcggcagcctgggcctcttctacatccccagccccagcttccccctcatcaccttcctgaccctgctgggcactggaggagctgccaagcagggcctgagcaacatctag

SEQ ID NO: 167735 - DNA, 1602 bp, synthetic construct; identical to SEQ ID NO: 167730
  misc_feature 1..1602: note = Description of Artificial Sequence: Synthetic coding sequence
  source 1..1602: mol_type = other DNA

SEQ ID NO: 167736 - DNA, 291 bp, synthetic construct
  misc_feature 1..291: note = Description of Artificial Sequence: Synthetic coding sequence
  source 1..291: mol_type = other DNA
tgaagccccaatgaccctgtgaccaacatctgccaggccgctgacaagcagctgttcaccctggtggagtgggccaagaggatcccccacttcagcagcctgcccctggatgaccaggtgatcctgctgcgggccggcctgcacgtgcacagaaattctgcccacagcgctggggtgggcgccatctttgacagagtgctgacagagctggtgtccaagatgagggacatgaggatggacaagacagagctgggctgcctgcgggccatcatcctcttcaacccagactag

SEQ ID NO: 167737 - DNA, 1602 bp, synthetic construct; identical to SEQ ID NO: 167730
  misc_feature 1..1602: note = Description of Artificial Sequence: Synthetic coding sequence
  source 1..1602: mol_type = other DNA

SEQ ID NO: 167738 - DNA, 291 bp, synthetic construct; identical to SEQ ID NO: 167736
  misc_feature 1..291: note = Description of Artificial Sequence: Synthetic coding sequence
  source 1..291: mol_type = other DNA

SEQ ID NO: 167739 - DNA, 1614 bp, synthetic construct; identical to SEQ ID NO: 167731
  misc_feature 1..1614: note = Description of Artificial Sequence: Synthetic coding sequence
  source 1..1614: mol_type = other DNA

SEQ ID NO: 167740 - DNA, 1602 bp, synthetic construct; identical to SEQ ID NO: 167730
  misc_feature 1..1602: note = Description of Artificial Sequence: Synthetic coding sequence
  source 1..1602: mol_type = other DNA

SEQ ID NO: 167741 - DNA, 1602 bp, synthetic construct; identical to SEQ ID NO: 167730
  misc_feature 1..1602: note = Description of Artificial Sequence: Synthetic coding sequence
  source 1..1602: mol_type = other DNA

SEQ ID NO: 167742 - DNA, 291 bp, synthetic construct; identical to SEQ ID NO: 167736
  misc_feature 1..291: note = Description of Artificial Sequence: Synthetic coding sequence
  source 1..291: mol_type = other DNA

SEQ ID NO: 167743 - DNA, 291 bp, synthetic construct; identical to SEQ ID NO: 167736
  misc_feature 1..291: note = Description of Artificial Sequence: Synthetic coding sequence
  source 1..291: mol_type = other DNA

SEQ ID NO: 167744 - DNA, 1614 bp, synthetic construct; identical to SEQ ID NO: 167731
  misc_feature 1..1614: note = Description of Artificial Sequence: Synthetic coding sequence
  source 1..1614: mol_type = other DNA

SEQ ID NO: 167745 - DNA, 291 bp, synthetic construct; identical to SEQ ID NO: 167736
  misc_feature 1..291: note = Description of Artificial Sequence: Synthetic coding sequence
  source 1..291: mol_type = other DNA

SEQ ID NO: 167746 - DNA, 1614 bp, synthetic construct; identical to SEQ ID NO: 167731
  misc_feature 1..1614: note = Description of Artificial Sequence: Synthetic coding sequence
  source 1..1614: mol_type = other DNA

SEQ ID NO: 167747 - DNA, 1614 bp, synthetic construct; identical to SEQ ID NO: 167731
  misc_feature 1..1614: note = Description of Artificial Sequence: Synthetic coding sequence
  source 1..1614: mol_type = other DNA

SEQ ID NO: 167748 - DNA, 1044 bp, synthetic construct
  misc_feature 1..1044: note = Description of Artificial Sequence: Synthetic coding sequence
  source 1..1044: mol_type = other DNA
atgagagaatgtggcggcggccctggggccggcaagaggctgtgtgccatctgtggggacaggagcagcggcaagcactatggagtgtacagctgtgagggctgcaagggcttcttcaagaggaccatcaggaaggacctgacctacagctgccgggacaacaaggactgcaccgtggacaagaggcagaggaaccgctgccagtactgccgctaccagaagtgcctggccaccggcatgaagcgggaggccgtgcaggaggagcggcagaggggcaaggacaaggatggagatggagagggcgctgggggcgcccctgaggagatgcctgtggaccgcatcctggaggccgagctggccgtggagcagaagagtgaccagggcgtggagggccctgggggcactggaggcagcggcagcagccccaatgaccctgtgaccaacatctgccaggccgctgacaagcagctgttcaccctggtggagtgggccaagaggatcccccacttcagcagcctgcccctggatgaccaggtgatcctgctgcgggccggctggaatgagctgctgattgccagcttcagccacaggagcattgatgtgagagatggcatcctgctggccaccggcctgcacgtgcacagaaattctgcccacagcgctggggtgggcgccatctttgacaggagcctgagccgggtgctgacagagctggtgtccaagatgagggacatgaggatggacaagacagagctgggctgcctgcgggccatcatcctcttcaacccagatgccaagggcctgagcaaccccagcgaggtggaggtgctgcgggagaaggtgtatgccagcctggagacctactgcaagcagaagtacccagagcagcagggccgctttgccaagctgctgctgcggctgcctgccctgcggagcatcggcctgaagtgcctggagcacctgttcttcttcaagctgattggagacacccccatcgacaccttcctgatggagatgctggaggccccccaccagctggcctag

SEQ ID NO: 167749 - DNA, 1179 bp, synthetic construct
  misc_feature 1..1179: note = Description of Artificial Sequence: Synthetic coding sequence
  source 1..1179: mol_type = other DNA
atgggcagccctggcctgcccccaccagcccctcctggcttcagcggccctgtgagcagcccccagatcaacagcacagtgtccctgcccggcggcggcagcggccccccagaagatgtgaagccccctgtgctgggcgtgcggggcctgcactgccccccacctcctgggggccctggagctgggaagaggctgtgtgccatctgtggggacaggagcagcggcaagcactacggcgtgtacagctgtgagggctgcaagggcttcttcaagaggaccatcaggaaggacctgacctacagctgccgggacaacaaggactgcaccgtggacaagaggcagaggaaccgctgccagtactgccgctaccagaagtgcctggccaccggcatgaagcgggaggccgtgcaggaggagcggcagaggggcaaggacaaggatggagatggagagggcgccggcggggcccctgaggagatgcctgtggaccgcatcctggaggccgagctggccgtggagcagaagagtgaccagggcgtggagggccctgggggcaccggggcccccagccccaatgaccctgtgaccaacatctgccaggccgctgacaagcagctgttcaccctggtggagtgggccaagaggatcccccacttcagcagcctgcccctggatgaccaggtgatcctgctgcgggccggctggaatgagctgctgattgccagcttcagccacaggagcattgatgtgagagatggcatcctgctggccaccggcctgcacgtgcacaggaacagcgcccacagcgctggggtgggcgccatctttgacagagtgctgacagagctggtgtccaagatgagggacatgaggatggacaagacagagctgggctgcctgcgggccatcatcctcttcaacccagatgccaagggcctgagcaaccccagcgaggtggaggtgctgcgggagaaggtgtatgccagcctggagacctactgcaagcagaagtacccagagcagcagggccgctttgccaagctgctgctgcggctgcctgccctgcggagcatcggcctgaagtgcctggagcacctgttcttcttcaagctgattggagacacccccatcgacaccttcctgatggagatgctggaggccccccaccagctggcctag

SEQ ID NO: 167750 - DNA, 1170 bp, synthetic construct
  misc_feature 1..1170: note = Description of Artificial Sequence: Synthetic coding sequence
  source 1..1170: mol_type = other DNA
atgggcagccctggcctgcccccaccagcccctcctggcttcagcggccctgtgagcagcccccagatcaacagcacagtgtccctgcccggcggcggcagcggccccccagaagatgtgaagccccctgtgctgggcgtgcggggcctgcactgccccccacctcctgggggccctggagctgggaagaggctgtgtgccatctgtggggacaggagcagcggcaagcactacggcgtgtacagctgtgagggctgcaagggcttcttcaagaggaccatcaggaaggacctgacctacagctgccgggacaacaaggactgcaccgtggacaagaggcagaggaaccgctgccagtactgccgctaccagaagtgcctggccaccggcatgaagcgggaggccgtgcaggaggagcggcagaggggcaaggacaaggatggagatggagagggcgccggcggggcccctgaggagatgcctgtggaccgcatcctggaggccgagctggccgtggagcagaagagtgaccagggcggcagccagcacatcagcaagagccccaatgaccctgtgaccaacatctgccaggccgctgacaagcagctgttcaccctggtggagtgggccaagaggatcccccacttcagcagcctgcccctggatgaccaggtgatcctgctgcgggccggctggaatgagctgctgattgccagcttcagccacaggagcattgatgtgagagatggcatcctgctggccaccggcctgcacgtgcacagaaattctgcccacagcgctggggtgggcgccatctttgacagagtgctgacagagctggtgtccaagatgagggacatgaggatggacaagacagagctgggctgcctgcgggccatcatcctcttcaacccagatgccaagggcctgagcaaccccagcgaggtggaggtgctgcgggagaaggtgtatgccagcctggagacctactgcaagcagaagtacccagagcagcagggccgctttgccaagctgctgctgcggctgcctgccctgcggagcatcggcctgaagtgcctggagcacctgttcttcttcaagctgattggagacacccccatcgacaccttcctgatggagatgctggaggccccccaccagctggcctag

SEQ ID NO: 167751 - DNA, 1044 bp, synthetic construct; identical to SEQ ID NO: 167748
  misc_feature 1..1044: note = Description of Artificial Sequence: Synthetic coding sequence
  source 1..1044: mol_type = other DNA

SEQ ID NO: 167752 - DNA, 1179 bp, synthetic construct; identical to SEQ ID NO: 167749
  misc_feature 1..1179: note = Description of Artificial Sequence: Synthetic coding sequence
  source 1..1179: mol_type = other DNA

SEQ ID NO: 167753 - DNA, 1170 bp, synthetic construct; identical to SEQ ID NO: 167750
  misc_feature 1..1170: note = Description of Artificial Sequence: Synthetic coding sequence
  source 1..1170: mol_type = other DNA

SEQ ID NO: 167754 - DNA, 861 bp, synthetic construct; identical to SEQ ID NO: 167734
  misc_feature 1..861: note = Description of Artificial Sequence: Synthetic coding sequence
  source 1..861: mol_type = other DNA

SEQ ID NO: 167755 - DNA, 1170 bp, synthetic construct; identical to SEQ ID NO: 167750
  misc_feature 1..1170: note = Description of Artificial Sequence: Synthetic coding sequence
  source 1..1170: mol_type = other DNA

SEQ ID NO: 167756 - DNA, 861 bp, synthetic construct; identical to SEQ ID NO: 167734
  misc_feature 1..861: note = Description of Artificial Sequence: Synthetic coding sequence
  source 1..861: mol_type = other DNA

SEQ ID NO: 167757 - DNA, 1179 bp, synthetic construct; identical to SEQ ID NO: 167749
  misc_feature 1..1179: note = Description of Artificial Sequence: Synthetic coding sequence
  source 1..1179: mol_type = other DNA

SEQ ID NO: 167758 - DNA, 1044 bp, synthetic construct; identical to SEQ ID NO: 167748
  misc_feature 1..1044: note = Description of Artificial Sequence: Synthetic coding sequence
  source 1..1044: mol_type = other DNA

SEQ ID NO: 167759 - DNA, 1179 bp, synthetic construct; identical to SEQ ID NO: 167749
  misc_feature 1..1179: note = Description of Artificial Sequence: Synthetic coding sequence
  source 1..1179: mol_type = other DNA

SEQ ID NO: 167760 - DNA, 1179 bp, synthetic construct; identical to SEQ ID NO: 167749
  misc_feature 1..1179: note = Description of Artificial Sequence: Synthetic coding sequence
  source 1..1179: mol_type = other DNA

SEQ ID NO: 167761 - DNA, 861 bp, synthetic construct; identical to SEQ ID NO: 167734
  misc_feature 1..861: note = Description of Artificial Sequence: Synthetic coding sequence
  source 1..861: mol_type = other DNA

SEQ ID NO: 167762 - DNA, 1170 bp, synthetic construct; identical to SEQ ID NO: 167750
  misc_feature 1..1170: note = Description of Artificial Sequence: Synthetic coding sequence
  source 1..1170: mol_type = other DNA

SEQ ID NO: 167763 - DNA, 1044 bp, synthetic construct; identical to SEQ ID NO: 167748
  misc_feature 1..1044: note = Description of Artificial Sequence: Synthetic coding sequence
  source 1..1044: mol_type = other DNA

SEQ ID NO: 167764 - DNA, 1170 bp, synthetic construct; identical to SEQ ID NO: 167750
  misc_feature 1..1170: note = Description of Artificial Sequence: Synthetic coding sequence
  source 1..1170: mol_type = other DNA

SEQ ID NO: 167765 - DNA, 1044 bp, synthetic construct; identical to SEQ ID NO: 167748
  misc_feature 1..1044: note = Description of Artificial Sequence: Synthetic coding sequence
  source 1..1044: mol_type = other DNA

SEQ ID NO: 167766 - DNA, 861 bp, synthetic construct; identical to SEQ ID NO: 167734
  misc_feature 1..861: note = Description of Artificial Sequence: Synthetic coding sequence
  source 1..861: mol_type = other DNA

SEQ ID NO: 167767 - DNA, 1392 bp, synthetic construct
  misc_feature 1..1392: note = Description of Artificial Sequence: Synthetic coding sequence
  source 1..1392: mol_type = other DNA
atgtatggcaactacagccacttcatgaagtttcctgctggctatggaggcagccctggccacacaggcagcacctccatgagccccagcgctgccctgagcacaggcaagcccatggacagccaccccagctacacagacacccctgtgtctgcccccaggaccctgtctgctgtgggcacccccctgaatgccctgggcagcccctacagagtcatcaccagcgccatgggccccccatctggggccctggccgcccctcctggcatcaacctggtggccccacccagcagccagctgaatgtggtgaacagcgtgagcagcagcgaggacatcaagcccctgcccggcctgcccggcatcggcaacatgaactaccccagcaccagccctggcagcctggtgaagcacatctgtgccatctgtggggacaggagcagcggcaagcactatggagtgtacagctgtgagggctgcaagggcttcttcaagaggaccatcaggaaggacctgatctacacctgccgggacaacaaggactgcctgattgacaagaggcagaggaaccgctgccagtactgccgctaccagaagtgcctggtgatgggcatgaagcgggaggccgtgcaggaggagcggcagaggagccgggagcgggcagagagcgaggctgaatgtgccaccagcggccacgaggacatgcctgtggagcgcatcctggaggccgagctggccgtggagcccaagacagagagctatggagacatgaacatggagaacagcaccaatgaccctgtgaccaacatctgccacgccgctgacaagcagctgttcaccctggtggagtgggccaagaggatcccccacttcagtgacctgaccctggaggaccaggtgatcctgctgcgggccggctggaatgagctgctgattgccagcttcagccacaggtctgtgtctgtgcaggacggcatcctgctggccaccggcctgcacgtgcacaggagcagcgcccacagcgctggggtgggcagcatctttgacagagtgctgacagagctggtgtccaagatgaaggacatgcagatggacaagtctgagctgggctgcctgcgggccatcgtgctcttcaacccagatgccaagggcctgagcaaccccagcgaggtggagaccctgcgggagaaggtgtatgccaccctggaggcctacaccaagcagaagtacccagagcagcccggccgctttgccaagctgctgctgcggctgcctgccctgcggagcatcggcctgaagtgcctggagcacctgttcttcttcaagctgattggagacacccccatcgacaccttcctgatggagatgctggagacccccctgcagatcacctag

SEQ ID NO: 167768 - DNA, 2619 bp, synthetic construct
  misc_feature 1..2619: note = Description of Artificial Sequence: Synthetic coding sequence
  source 1..2619: mol_type = other DNA
atggccacagcctgcaagaggtctggagagccccagagtgatgacatcgaggccagcaggatgaagagagctgctgccaagcacctgattgaaagatactaccaccagctgacagagggctgtggaaatgaggcctgcaccaatgagttctgtgccagctgccccaccttcctgaggatggacaacaatgctgctgccatcaaggccctggagctgtacaagatcaatgccaagctgtgtgacccccaccccagcaagaagggggccagcagcgcctacctggagaacagcaagggggcccccaacaacagctgcagcgagatcaagatgaacaagaagggggccagaattgacttcaaggatgtgacctacctgacagaggagaaggtgtatgagatcctggagctgtgccgggagcgggaggactacagccccctcatccgggtcatcggccgggtcttcagcagcgctgaggccctggtgcagagcttcaggaaggtgaagcagcacaccaaggaggagctgaagagcctgcaggccaaggatgaggacaaggatgaagatgagaaggagaaggccgcctgcagcgctgctgccatggaggaggacagcgaggccagcagcagcagaattggagacagcagccagggcgacaacaacctgcagaagctgggcccagatgatgtgtctgtggacattgatgccatcagaagagtgtacacccggctgctgagcaatgagaagattgaaacagccttcctgaatgccctggtgtacctgagccccaacgtggagtgtgacctgacctaccacaacgtgtacagccgggaccccaactacctgaacctcttcatcatcgtgatggagaacagaaacctgcacagccctgagtacctggagatggccctgcccctcttctgcaaggccatgagcaagctgcccctggccgcccagggcaagctgatccggctgtggagcaagtacaatgctgaccagatccggaggatgatggagaccttccagcagctgatcacctacaaggtgatcagcaatgagttcaacagcaggaacctggtgaatgatgatgatgccatcgtggccgccagcaagtgcctgaagatggtgtactatgccaacgtggtgggcggggaggtggacaccaaccacaatgaggaggatgatgaggagcccatccctgagagcagcgagctgaccctgcaggagctgctgggggaggagaggaggaacaagaagggcccccgggtggaccccctggagacagagctgggcgtgaagaccctggactgcaggaagcccctcatcccctttgaggagttcatcaatgagcccctgaatgaggtgctggagatggacaaggactacaccttcttcaaggtggagacagagaacaagttctccttcatgacctgccccttcatcctgaatgctgtgaccaagaacctgggcctgtactatgacaaccgcatccgcatgtacagcgagcggcgcatcaccgtgctgtacagcctggtgcagggccagcagctgaacccctacctgcggctgaaggtgagaagagaccacatcattgatgatgccctggtgcggctggagatgattgccatggagaacccagctgacctgaagaagcagctgtatgtggagtttgaaggagagcagggcgtggatgaaggaggagtgtccaaggagttcttccagctggtggtggaggagatcttcaacccagacatcggcatgttcacctatgatgagagcaccaagctgttctggttcaaccccagcagctttgaaacagagggccagttcaccctcatcggcatcgtgctgggcctggccatctacaacaactgcatcctggatgtgcacttccccatggtggtgtacaggaagctgatgggcaagaagggcaccttccgggacctgggggacagccaccctgtgctgtaccagagcctgaaggacctgctggagtatgagggcaatgtggaggatgacatgatgatcaccttccagatcagccagacagacctgtttggaaaccccatgatgtatgacctgaaggaaaatggagacaagatccccatcaccaatgaaaataggaaggagtttgtgaacctgtacagcgactacatcctgaacaagtctgtggagaagcagttcaaggccttcagaagaggcttccacatggtgaccaatgaaagccccctgaagtacctgttccggcctgaggagattgagctgctgatctgtggcagcaggaacctggacttccaggccctggaggagaccacagaatatgatggcggctacacccgggacagcgtgctgatccgggagttctgggagatcgtgcacagcttcacagatgagcagaagaggctcttcctgcagttcaccactggaacagaccgggcccctgtgggcggcctgggcaagctgaagatgatcatcgccaagaatggaccagacacagagcggctgcccaccagccacacctgcttcaacgtgctgctgctgcctgagtacagcagcaaggagaagctgaaggagcggctgctgaaggccatcacctacgccaagggcttcggcatgctgtag

SEQ ID NO: 167769 - DNA, 75 bp, synthetic construct
  misc_feature 1..75: note = Description of Artificial Sequence: Synthetic coding sequence
  source 1..75: mol_type = other DNA
atgacccgggaccagaatggcacctgggagatggagagcaatgaaaattttgagggctacatgaaggccctgtag

SEQ ID NO: 167770 - DNA, 312 bp, synthetic construct
  misc_feature 1..312: note = Description of Artificial Sequence: Synthetic coding sequence
  source 1..312: mol_type = other DNA
atgacccgggaccagaatggcacctgggagatggagagcaatgaaaattttgagggctacatgaaggccctggacatcgactttgccaccaggaagattgctgtgcggctgacccagaccaaggtgattgaccaggatggagacaacttcaagaccaagaccaccagcaccttcagaaattatgatgtggacttcaccgtgggcgtggagtttgatgagtacaccaagagcctggacaacagacatgtgaaggccctggtgacctgggagggagatgtgctggtgtgtgtgcagaagggggagaaggagtag

SEQ ID NO: 167771 - DNA, 1494 bp, synthetic construct
  misc_feature 1..1494: note = Description of Artificial Sequence: Synthetic coding sequence
  source 1..1494: mol_type = other DNA
atgggcctgcctgccctgctggccagcgccctgtgcacctttgtgctgcccctgctgctcttcctggccgccatcaagctgtgggacctgtactgtgtgtctggccgggacaggagctgtgccctgcccctgcccccaggcaccatgggcttccccttcttcggggagaccctgcagatggtgctgcagaggaggaagttcctgcagatgaagaggaggaaatatggcttcatctacaagacccacctgtttggccggcccaccgtgcgggtgatgggcgctgacaacgtgcggcgcatcctgctgggggagcaccggctggtgtctgtgcactggccagcctctgtgaggaccatcctgggcagcggctgcctgagcaacctgcatgacagcagccacaagcagaggaagaaggtgatcatgagggccttcagccgggaggccctggagtgctacgtgcctgtgatcacagaggaggtgggcagcagcctggagcagtggctgagctgtggggagcggggcctgctggtgtacccagaggtgaagaggctgatgttccgcatcgccatgaggatcctgctgggctgtgagccccagctggccggagatggagacagcgagcagcagctggtggaggcctttgaggagatgaccaggaacctcttcagcctgcccattgatgtgcccttcagcggcctgtaccggggcatgaaggccaggaacctgatccacgccagaattgagcagaacatccgggccaagatctgtggcctgcgggccagcgaggccggccagggctgcaaggatgccctgcagctgctgattgagcacagctgggagcggggggagcggctggacatgcaggccctgaagcagagcagcacagagctgctgtttggaggccacgagaccacagccagcgctgccaccagcctcatcacctacctgggcctgtacccccacgtgctgcagaaggtgcgggaggagctgaagagcaagggcctgctgtgcaagagcaaccaggacaacaagctggacatggagatcctggagcagctgaagtacatcggctgcgtcatcaaggagaccctgcggctgaacccccctgtgcctgggggcttccgggtggccctgaagacctttgagctgaatggctaccagatccccaagggctggaatgtcatctacagcatctgtgacacccatgatgtggccgagatcttcaccaacaaggaggagttcaacccagaccgcttcatgctgccccacccagaagatgccagccgcttctccttcatcccctttggaggcggcctgcggagctgtgtgggcaaggagtttgccaagatcctgctgaagatcttcaccgtggagctggcccggcactgtgactggcagctgctgaatggaccacccaccatgaagaccagccccaccgtgtaccctgtggacaacctgcctgcccgcttcacccacttccacggggagatctag

SEQ ID NO: 167772 - DNA, 600 bp, synthetic construct
  misc_feature 1..600: note = Description of Artificial Sequence: Synthetic coding sequence
  source 1..600: mol_type = other DNA
atgaactacagcaagatcccagcccaggtggacctgcggcggcagacagagcgggactgccgggtgagcagcttccgggtgaaggaaaattttgacaaggcccgcttcagcggcacctggtacgccatggccaagaaggaccctgagggcctcttcctgcaggacaacatcgtggccgagttctctgtggatgagaccggccagatgtctgccacagccaagggccgggtgcggctgctgaacaactgggatgtgtgtgccgacatggtgggcaccttcacagacacagaagatcctgccaagttcaagatgaagtactggggcgtggccagcttcctgcagaagggaaatgatgaccactggatcgtggacacagattatgacacctatgctgtgcagtacagctgccgcctgctgaacctggatggcacctgtgccgacagctacagctttgtgttcagccgggaccccaacggcctgcccccagaggcccagaagatcgtgcggcagaggcaggaggagctgtgcctggcccggcagtaccgcctcatcgtgcacaacggctactgtgatggccgctctgagaggaacctgctgtag

SEQ ID NO: 167773 - DNA, 606 bp, synthetic construct
  misc_feature 1..606: note = Description of Artificial Sequence: Synthetic coding sequence
  source 1..606: mol_type = other DNA
atgaagtgggtgtgggccctgctgctgctggccgccctgggcagcggccgggcagagcgggactgccgggtgagcagcttccgggtgaaggaaaattttgacaaggcccgcttcagcggcacctggtacgccatggccaagaaggaccctgagggcctcttcctgcaggacaacatcgtggccgagttctctgtggatgagaccggccagatgtctgccacagccaagggccgggtgcggctgctgaacaactgggatgtgtgtgccgacatggtgggcaccttcacagacacagaagatcctgccaagttcaagatgaagtactggggcgtggccagcttcctgcagaagggaaatgatgaccactggatcgtggacacagattatgacacctatgctgtgcagtacagctgccgcctgctgaacctggatggcacctgtgccgacagctacagctttgtgttcagccgggaccccaacggcctgcccccagaggcccagaagatcgtgcggcagaggcaggaggagctgtgcctggcccggcagtaccgcctcatcgtgcacaacggctactgtgatggccgctctgagaggaacctgctgtag

SEQ ID NO: 167774 - DNA, 606 bp, synthetic construct; identical to SEQ ID NO: 167773
  misc_feature 1..606: note = Description of Artificial Sequence: Synthetic coding sequence
  source 1..606: mol_type = other DNA

SEQ ID NO: 167775 - DNA, 600 bp, synthetic construct
  misc_feature 1..600: note = Description of Artificial Sequence: Synthetic coding sequence
  source 1..600: mol_type = other DNA
atgaactacagcaagatcccagcccaggtggacctgcggcggcaggccgagcgggactgccgggtgagcagcttccgggtgaaggaaaattttgacaaggcccgcttcagcggcacctggtacgccatggccaagaaggaccctgagggcctcttcctgcaggacaacatcgtggccgagttctctgtggatgagaccggccagatgtctgccacagccaagggccgggtgcggctgctgaacaactgggatgtgtgtgccgacatggtgggcaccttcacagacacagaagatcctgccaagttcaagatgaagtactggggcgtggccagcttcctgcagaagggaaatgatgaccactggatcgtggacacagattatgacacctatgctgtgcagtacagctgccgcctgctgaacctggatggcacctgtgccgacagctacagctttgtgttcagccgggaccccaacggcctgcccccagaggcccagaagatcgtgcggcagaggcaggaggagctgtgcctggcccggcagtaccgcctcatcgtgcacaacggctactgtgatggccgctctgagaggaacctgctgtag

SEQ ID NO: 167776 - DNA, 408 bp, synthetic construct
  misc_feature 1..408: note = Description of Artificial Sequence: Synthetic coding sequence
  source 1..408: mol_type = other DNA
atgccacccaacctgaccggctactacagatttgtgtcccagaagaacatggaggactacctgcaggccctgaacatcagcctggccgtgaggaagatcgccctgctgctgaagccagacaaggagattgagcaccagggcaaccacatgacagtgaggaccctgagcaccttcaggaactacacagtgcagtttgatgtgggcgtggagtttgaggaggacctgcggtctgtggatggcaggaagtgccagaccatcgtgacctgggaggaggagcacctggtgtgtgtgcagaagggggaggtgcccaacagaggctggaggcactggctggagggggagatgctgtacctggagctgacagccagagatgctgtgtgtgagcaggtgttcaggaaggtgaggtag

SEQ ID NO: 167777 - DNA, 1026 bp, synthetic construct
  misc_feature 1..1026: note = Description of Artificial Sequence: Synthetic coding sequence
  source 1..1026: mol_type = other DNA
atgaacatcgtggtggagttctttgtggtgaccttcaaggtgctgtgggcctttgtgctggccgccgcccgctggctggtgcggcccaaggagaagtctgtggccggccaggtgtgcctgatcaccggggccggcagcggcctgggccgcctgtttgccctggagtttgccaggagaagagccctgctggtgctgtgggacatcaacacccagagcaatgaggagacagctggcatggtgcgccacatctacagagacctggaggccgcagatgctgctgccctgcaggccggaaatggagaggaggagatcctgccccactgcaacctgcaggtgttcacctacacctgtgatgtgggcaagagagaaaatgtgtacctgacagctgagcgggtgaggaaggaggtgggggaggtgtctgtgctggtgaacaatgctggggtggtgtctggccaccacctgctggagtgcccagatgagctgattgaaagaaccatgatggtgaactgccacgcccacttctggaccaccaaggccttcctgcccaccatgctggagatcaaccacggccacatcgtgacagtggccagcagcctgggcctcttcagcacagctggggtggaggactactgtgccagcaagtttggagtggtgggcttccacgagagcctgagccatgagctgaaggctgctgagaaggatggcatcaagaccaccctggtgtgcccctacctggtggacaccggcatgttccggggctgccgcatcaggaaggagattgagcccttcctgccccccctgaagccagactactgtgtgaagcaggccatgaaggccatcctgacagaccagcccatgatctgcaccccccggctgatgtacatcgtgaccttcatgaagagcatcctgccctttgaagctgtggtgtgcatgtaccgcttcctgggcgctgacaagtgcatgtaccccttcatcgcccagaggaagcaggccaccaacaacaatgaggccaagaatggcatctag

SEQ ID NO: 167778 - DNA, 957 bp, synthetic construct
  misc_feature 1..957: note = Description of Artificial Sequence: Synthetic coding sequence
  source 1..957: mol_type = other DNA
atggtggagctgatgttccccctgctgctgctgctgctgcccttcctgctgtacatggccgccccccagatcaggaagatgctgagcagcggcgtgtgcaccagcacagtgcagctgcccgggaaggtggtggtggtgactggagccaacacaggaattggcaaggagacagccaaggagctggcccagagaggagcccgggtgtacctggcctgcagagatgtggagaagggggagctggtggccaaggagatccagaccaccactggaaaccagcaggtgctggtgaggaagctggacctgagtgacaccaagagcatccgggcctttgccaagggcttcctggccgaggagaagcacctgcacgtgctgatcaacaatgctggggtgatgatgtgcccctacagcaagacagcagatggctttgagatgcacatcggcgtgaaccacctgggccacttcctgctgacccacctgctgctggagaagctgaaggagagcgcccccagccgcatcgtgaatgtgagcagcctggcccaccacctgggccgcatccacttccacaacctgcagggcgagaagttctacaatgccggcctggcctactgccacagcaagctggccaacatcctcttcacccaggagctggcccggcggctgaagggcagcggcgtgaccacctacagcgtgcaccctggcaccgtgcagagcgagctggtgcgccacagcagcttcatgcgctggatgtggtggctgttctccttcttcatcaagaccccccagcagggcgcccagaccagcctgcactgtgccctgacagagggcctggagatcctgagcggcaaccacttcagtgactgccacgtggcctgggtgtctgcccaggccagaaatgagaccatcgcccggcggctgtgggatgtgtcctgtgacctgctgggcctgcccattgattag

SEQ ID NO: 167779 - DNA, 918 bp, synthetic construct
  misc_feature 1..918: note = Description of Artificial Sequence: Synthetic coding sequence
  source 1..918: mol_type = other DNA
atggtggagctgatgttccccctgctgctgctgctgctgcccttcctgctgtacatggccgccccccagatcaggaagatgctgagcagcggcgtgtgcaccagcacagtgcagctgcccgggaaggtggtggtggtgactggagccaacacaggagcccgggtgtacctggcctgcagagatgtggagaagggggagctggtggccaaggagatccagaccaccaccggcaaccagcaggtgctggtgaggaagctggacctgagtgacaccaagagcatccgggcctttgccaagggcttcctggccgaggagaagcacctgcacgtgctgatcaacaatgccggcgtgatgatgtgcccctacagcaagacagcagatggctttgagatgcacatcggcgtgaaccacctgggccacttcctgctgacccacctgctgctggagaagctgaaggagagcgcccccagcagaattgtgaatgtgagcagcctggcccaccacctgggccgcatccacttccacaacctgcagggcgagaagttctacaatgccggcctggcctactgccacagcaagctggccaacatcctcttcacccaggagctggcccggcggctgaagggcagcggcgtgaccacctacagcgtgcaccctggcaccgtgcagagcgagctggtgcgccacagcagcttcatgcgctggatgtggtggctgttctccttcttcatcaagaccccccagcagggcgcccagaccagcctgcactgtgccctgacagagggcctggagatcctgagcggcaaccacttcagtgactgccacgtggcctgggtgtctgcccaggccagaaatgagaccatcgcccggcggctgtgggatgtgtcctgtgacctgctgggcctgcccatcgactag

SEQ ID NO: 167780 - DNA, 951 bp, synthetic construct
  misc_feature 1..951: note = Description of Artificial Sequence: Synthetic coding sequence
  source 1..951: mol_type = other DNA
atgctggtgaccctgggcctgctgaccagcttcttctccttcctgtacatggtggcccccagcatcaggaagttctttgctggaggagtgtgcaggaccaacgtgcagctgcccgggaaggtggtggtgatcactggagccaacacaggaattggcaaggagacagcccgggagctggccagcagaggagcccgggtgtacatcgcctgcagagatgtgctgaagggggagagcgctgccagcgagatccgggtggacaccaagaacagccaggtgctggtgaggaagctggacctgagtgacaccaagagcatccgggcctttgctgagggcttcctggccgaggagaagcagctgcacatcctgatcaacaatgctggggtgatgatgtgcccctacagcaagacagcagatggctttgagacccacctgggcgtgaaccacctgggccacttcctgctgacctacctgctgctggagcggctgaaggtgtctgccccagcccgggtggtgaatgtgtcctctgtggcccaccacatcggcaagatccccttccatgacctgcagagcgagaagcgctacagccggggctttgcctactgccacagcaagctggccaacgtgctcttcacccgggagctggccaagaggctgcagggcactggagtgaccacctatgctgtgcaccctggggtggtgcgctctgagctggtgcgccacagcagcctgctgtgcctgctgtggaggctcttcagcccctttgtgaagacagcccgggagggcgcccagaccagcctgcactgtgccctggccgagggcctggagcccctgagcggcaagtacttcagtgactgcaagaggacctgggtgagcccccgggccaggaacaacaagacagctgagcggctgtggaatgtgtcctgtgagctgctgggcatccgctgggagtag

SEQ ID NO: 167781 - DNA, 951 bp, synthetic construct; identical to SEQ ID NO: 167780
  misc_feature 1..951: note = Description of Artificial Sequence: Synthetic coding sequence
  source 1..951: mol_type = other DNA

SEQ ID NO: 167782 - DNA, 951 bp, synthetic construct; identical to SEQ ID NO: 167780
  misc_feature 1..951: note = Description of Artificial Sequence: Synthetic coding sequence
  source 1..951: mol_type = other DNA

SEQ ID NO: 167783 - DNA, 957 bp, synthetic construct
  misc_feature 1..957: note = Description of Artificial Sequence: Synthetic coding sequence
  source 1..957: mol_type = other DNA
atgtggctgcccctgctgctgggcgccctgctgtgggccgtgctgtggctgctgcgggaccggcagagcctgcctgccagcaatgcctttgtgttcatcaccggctgtgacagcggcttcggccgcctgctggccctgcagctggaccagaggggcttccgggtgctggccagctgcctgaccccatctggagctgaggacctgcagagggtggccagcagccggctgcacaccaccctgctggacatcacagacccccagagcgtgcagcaggccgccaagtgggtggagatgcacgtgaaggaggccggcctgtttggcctggtgaacaatgctggggtggccggcatcatcggccccaccccctggctgaccagagatgacttccagagggtgctgaatgtgaacaccatgggccccatcggcgtgaccctggccctgctgcccctgctgcagcaggcccggggccgggtcatcaacatcacctctgtgctgggccgcctggccgccaatggaggcggctactgtgtgtccaagtttggcctggaggccttcagtgacagcctgcggagagatgtggcccacttcggcatccgggtgtccatcgtggagcccggcttcttccgcacccctgtgaccaacctggagagcctggagaagaccctgcaggcctgctgggcccggctgcccccagccacccaggcccactatggaggagccttcctgaccaagtacctgaagatgcagcagaggatcatgaacctgatctgtgaccctgacctgaccaaggtgagccgctgcctggagcacgccctgacagcccggcaccccaggacccgctacagccctggctgggatgccaagctgctgtggctgcctgccagctacctgcctgccagcctggtggatgctgtgctgacctgggtgctgcccaagccagcccaggccgtgtactag

SEQ ID NO: 167784 - DNA, 957 bp, synthetic construct; identical to SEQ ID NO: 167783
  misc_feature 1..957: note = Description of Artificial Sequence: Synthetic coding sequence
  source 1..957: mol_type = other DNA

SEQ ID NO: 167785 - DNA, 936 bp, synthetic construct
  misc_feature 1..936: note = Description of Artificial Sequence: Synthetic coding sequence
  source 1..936: mol_type = other DNA
atggctgctgcccccaggacagtgctgatcagcggctgcagcagcggcatcggcctggagctggccgtgcagctggcccatgaccccaagaagcgctaccaggtggtggccaccatgagggacctgggcaagaaggagaccctggaggccgccgccggggaggccctgggccagaccctgactgtggcccagctggatgtgtgcagtgatgagagcgtggcccagtgcctgagctgcatccagggcgaggtggatgtgctggtgaacaatgccggcatgggcctggtgggccccctggagggcctgagcctggccgccatgcagaatgtgtttgacaccaacttcttcggggctgtgcggctggtgaaggctgtgctgcccggcatgaagagaagacggcagggccacatcgtggtgatcagctctgtgatgggcctgcagggcgtcatcttcaatgatgtgtatgctgccagcaagtttgccctggagggcttctttgagagcctggccatccagctgctgcagttcaacatcttcatcagcctggtggagcccggccctgtggtgacagaatttgagggcaagctgctggcccaggtgtccatggccgagttccctggaacagatcctgagaccctgcactacttccgggacctgtacctgcctgccagcaggaagctgttctgcagcgtgggccagaacccccaggatgtggtgcaggccatcgtgaatgtcatcagcagcaccaggcctcccctgcggcggcagaccaacatccgctacagccccctgaccaccctgaagacagtggacagcagcggcagcctgtatgtgaggaccacccaccggctgctcttccgctgcccccggctgctgaacctgggcctgcagtgcctgagctgtggctgcctgcccaccagggtgcggcccaggtag

SEQ ID NO: 167786 - DNA, 675 bp, synthetic construct
  misc_feature 1..675: note = Description of Artificial Sequence: Synthetic coding sequence
  source 1..675: mol_type = other DNA
atgagcaggaagattgagggcttcctgctgctgctgctgtttggctatgaggccaccctgggcctgagcagcacagaagatgaaggagaggacccctggtaccagaaggcctgcaagtgtgactgccagggcggccccaatgccctgtggagcgctggggccaccagcctggactgcatccctgagtgcccctaccacaagcccctgggctttgaaagtggagaggtgaccccagaccagatcacctgcagcaaccctgagcagtatgtgggctggtacagctcctggacagccaacaaggcccggctgaacagccagggcttcggctgtgcctggctgagcaagttccaggacagcagccagtggctgcagattgacctgaaggagatcaaggtgatcagcggcatcctgacccagggccgctgtgacattgatgagtggatgaccaagtacagcgtgcagtacagaacagatgagcggctgaactggatctactacaaggaccagacaggcaacaacagagtcttctacggcaacagcgacaggaccagcacagtgcagaacctgctgcggccccccatcatcagccgcttcatccgcctcatccccctgggctggcacgtgcgcatcgccatccgcatggagctgctggagtgtgtgtccaaatgtgcctag

SEQ ID NO: 167787 - DNA, 4077 bp, synthetic construct
  misc_feature 1..4077: note = Description of Artificial Sequence: Synthetic coding sequence
  source 1..4077: mol_type = other DNA
atgattgagcccagcgaggacagctttgagaccatgatggagcacaagaaccccagcagcaagcagatggagagcagcgagggcagcagcaacaccacagaggccaccagcggcagcggcgtgcggggggaggccggccctgccagcggccctgcccaggagaagaaggagccccccagcggccccctgcaggagatggaggagctgcccacagacctgctgcaggacatggaggagcccagcagcggccccaggaaggagattgaagatcctccaaatgacctgctgcaggacctggaggagagctgcaatggcagccaccaggcccggggggaccccctgagcggggccagtgacaggatgaaggaggcctctgtgaaccccagcggggcccgggaggagcaggaggcccacacagacctgaaggagagcggccgggaggagaccccccaggagcagaaccagacagagcacagcacagctgagctgatggccatggtgcgcagcatcatcagcctgtacttcaggatgcaggacctgaaggagcagcagagggtggccgaggagatcctgatcaagggcatcaatgccggccagctgcctgcccccaagcacttcagcggggaccggcgggagttccacgagttcatcgtgctgtgccagctgaccctgcagagctaccccaggatgttctacaatgaccggctgcgggtgggctacgtgatcaaccacctgagcggcctggccctggagtgggccaaggccctgctgcaggagaacagccccctcatcggggacttccctgccttcctggaggccatgtctgaggtgtttgagtaccggcaggccctgcgggtggccgaggaggccatgttcaccatccggcagggcggccgcagcgccacagagtacattgatgagttccagagcctggtgcccatcctgggctggccagatgaggtgctgcaggcccacctgtgccagggcctgaatgaggagatccgccactacctgttccgggtgccccagcctgacagcctggacagcctgattgtgctgatcctgcagatcgaggagaagctggccgagcggcgggccatgctgcggctgcccccagaggcccggcccaggaacctgacctggattgacagccctgcccctgagcgctggatggtgtcctcctggctgcccagcgaggtgcacccagacatcaacagagcccacctgttcctgctgctgatggtgcgggtgaacccctaccacagcgtggccgtgcaggccctggtggacagcggggctgatggcaacttcatggatgagaagtttgcccaggagcactacgtggagctgtatgagaagccctacccccagcctgtgcagagcgtggatggcagcctgattggaaatgaacctgtgtggctgtacacagagcccctggtgtgcatccaccagaaccaccaggagagcattgaatttgacatcgtgcccagccccaacttctctgtggtgctgggcatccgctggctgcgggtgcacgcccctgaggtggactggatcaagggccgctgcaccttccacagcccctactgcctgaagaactgcttccggcccccaccaccctgcatcgccctggagagacatggcatgagcctgctgcccggcctgccccacccctacagcgacctggctgatgtgttcaaccccaaggaggctgatgatgagaccagtgaccagcccagcagtgatggcagtgatgacctgtctgagagcgagcccagcgagctgcagcaggccggggacagcgaccacagcgagaccttctatgaatgtcccagcacagccccctgggagcctgtgggcgccaggatgcaggagcgggcccggctgcaggaggagtactgggacctgcaggacatgctgaccaaccggcaggactacatccagatgatccctgagctgtttgaccagctgcacggggctgagtggttcaccaagctggagctgcggggcaccatcgtggaggagagcgtgaatggccacaggacagaagatgtgtggaaggccgccttcggcctggagctggaggagatgaagagctaccagccctttgccctgagcccagaccccatcatcccccagaatgtcatccacttcatcctgaaggacatgctgggcttctttgtgctgtcctatggccaggaggtgctgatctacagcatgagccaggaggagcacctgcaccacgtgcggcaggtgctggtgcgcttccgccaccacaacgtgtactgcagcctggacaagagccagttccaccggcagacagtggagttcctgggctttgtggtgacccccaagggcgtgaagctgaacaagaatgtgatgaccatcatcaccggctaccccaccccaggcagcaagctgagcctgaggaacttcattgaatttgtgttcccctaccgccactttgtggagcgcttcagcatcatcgccgagcccctggtgcggcagctgctgagcagctaccagttctactggggcgtggaggagcaggaggcctttgagtgcctgaagagggccttcaggaaggcccccctgctgcaccaccccaagccccagaaccccttctacctggagactggagtgactggaacagccctgcacgccagcctcatccagattgatgaccagacaggcaagagggcctgctgtgccttctacagcaggaacatcagccccatcgaggtggagtacagccaggccgagatgaagatcctgcccatccgggccgccttcatggtgtggtgccgctacctggagaacacagaggagcccatcatgatcctgctgaacacagaggacctggccagcctgaacaatgaccggctgactgtgctgctgcccggccactgggtgttcttcttcagccacttcaactttgatgtgatggagctgcctgagcaggacggcggccgggccctgccccctgtgaggaacctgcgctggaggcgggccttccagaggaacacagctgcccggcagaccctgctgctggccagccggggcttcccccgggaccccagcacagagagcggggaggaggagaatgaggagcaggatgagctgaatgagcagatcctgcggcaggagctgctggccatgatccccatcgaccagatcctgaacagcttcctggcccacttctccatggcccagatccgggccgtcatcctgcacttcttccggggcctgctgtactggaagaacaccctggccctggccgccatcctggtgctgctgcgggtgcggcagtgcctgagcctgcggcctgccccagccatgagggtggcccggccccagccccagaggagcctgcggctcatcctggacagcagcctgattgctggcagcagcatcaccacagccatcacccagctgctgacccagatgcctgccctggtgggcgccaacaccatcccagcccaggagctggccgagctgttcctgggccctggccgctggcagagaaatgccctgcacagccaggcccaccggggcctgcagttcaccccaggcttctggctgaccctgtgtgagttcttcggcgtgcgggtgaccccccaggagggccacctgcctgccctgcggcagaaccgctacctggagctgcacgtggtgggagatgaagatgtggtgctgcgggaggccctgcaggatgacctgcagcgctaccggcagtgtggcctgcatgatggcctgcaggacaccagccaggacaagcaggacaatgatgtgcaggaggccccacccagccacacagctgccacccaccccccccggcccaggcacctgatggacccccaggtgctggagttcctgggcagccggctgctgcacatccacagcgcagatggccagctgcacctgctgagccgggagcaggccgcccgggccctgagccagttcctgaccctcatctacagaagagccctgcccatcccagcctgggagagccagccccgggagcaggcccggctggaggagctgcctgatgaagatgaagatgccaacctggactag

SEQ ID NO: 167788 - DNA, 9393 bp, synthetic construct
  misc_feature 1..9393: note = Description of Artificial Sequence: Synthetic coding sequence
  source 1..9393: mol_type = other DNA
atgttttctgtgcgcatcgtgacagctgactactacatggccagccccctgcagggcctggacacctgccagagccccctgacccaggcccctgtgaagaaggtgcctgtggtgcgggtgtttggagccaccccagctggccagaagacctgcctgcacctgcacggcatcttcccctacctgtatgtgccctatgatggctacggccagcagcctgagagctacctgagccagatggccttcagcattgaccgggccctgaatgtggccctgggcaaccccagcagcacagcccagcacgtgttcaaggtgtccctggtgtctggcatgcccttctacggctaccacgagaaggagcggcacttcatgaagatctacctgtacaaccccaccatggtgaagaggatctgtgagctgctgcagagcggggccatcatgaacaagttctaccagccccatgaggcccacatcccctacctgctgcagctgttcatcgactacaacctgtatggcatgaacctgatcaacctggccgctgtgaagttcaggaaggcccggaggaagagcaacaccctgcacgccaccggcagctgcaagaaccacctgagcggcaacagcctggccgacaccctcttccgctgggagcaggatgagatccccagcagcctcatcctggagggcgtggagccccagagcacctgtgagctggaggtggatgctgtggccgctgacatcctgaaccggctggacatcgaggcccagattggaggcaaccctggcctgcaggccatctgggaggatgagaagcagaggagaagaaacagaaatgagaccagccagatgagccagcctgagagccaggaccacagatttgtgcctgccacagaaagtgagaagaagttccagaagaggctgcaggagatcctgaagcagaatgacttctctgtgaccctgagcggctctgtggactacagtgatggcagccaggagttctctgctgagctgaccctgcacagcgaggtgctgagccctgagatgctgcagtgcaccccagccaacatggtggaggtgcacaaggacaaggagagcagcaagggccacaccaggcacaaggtggaggaggccctgatcaatgaggaggccatcctgaacctgatggagaacagccagaccttccagcccctgacccagaggctgtctgagagccctgtgttcatggacagcagcccagatgaggccctggtgcacctgctggccggcctggagagtgatggctacagaggagagaggaacaggatgcccagcccctgccgcagctttggaaacaacaagtacccccagaacagtgatgatgaagaaaatgagccccagatcgagaaggaggagatggagctgagcctggtgatgagccagcgctgggacagcaacatcgaggagcactgtgccaagaagaggagcctgtgcaggaacacccacaggagcagcacagaagatgatgacagcagcagtggagaggagatggagtggagcgacaacagcctgctgctggccagcctgagcatcccccagctggatggaacagcagatgagaacagcgacaaccccctgaacaatgaaaacagcaggacccacagcagcgtcatcgccaccagcaagctgtctgtgaagcccagcatcttccacaaggatgctgccaccctggagcccagcagcagcgccaagatcaccttccagtgcaagcacaccagcgccctgagcagccacgtgctgaacaaggaggacctgattgaggacctgagccagaccaacaagaacacagagaagggcctggacaacagcgtgaccagcttcaccaatgaaagcacctacagcatgaagtacccaggcagcctgagcagcacagtgcacagcgagaacagccacaaggagaacagcaagaaggagatcctgcctgtgagcagctgtgagagcagcatctttgattatgaggaggacatccccagcgtgacccggcaggtgcccagcaggaagtacaccaacatcaggaagattgagaaggacagccccttcatccacatgcaccgccaccccaatgaaaacaccctgggcaagaacagcttcaacttcagtgacctgaaccacagcaagaacaaggtgtcctctgagggcaatgagaagggcaacagcacagccctgagcagcctcttccccagcagcttcacagagaactgtgagctgctgagctgcagcggggagaacagaaccatggtgcacagcctgaacagcacagcagatgaaagtggcctgaacaagctgaagatccgctatgaggagttccaggagcacaagacagagaagcccagcctgagccagcaggccgcccactacatgttcttccccagcgtggtgctgagcaactgcctgacccggccccagaagctgagccctgtgacctacaagctgcagcccggcaacaagcccagccggctgaagctgaacaagaggaagctggccggccaccaggagaccagcaccaagagcagcgagaccggcagcaccaaggacaacttcatccagaacaacccctgcaacagcaaccctgagaaggacaatgccctggccagtgacctgaccaagaccaccaggggggcctttgagaacaagacccccacagatggcttcatcgactgccactttggagatggcaccctggagacagagcagagctttggcctgtatggcaacaagtacaccctgcgggccaagaggaaggtgaactatgaaacagaggacagcgagagcagctttgtgacccacaacagcaagatcagcctgccccaccccatggagattggagagagcctggatggcaccctgaagagcaggaagaggaggaagatgagcaagaagctgccccctgtgatcatcaagtacatcatcatcaaccgcttccggggcaggaagaacatgctggtgaagctgggcaagattgacagcaaggagaagcaggtgatcctgacagaggagaagatggagctgtacaagaagctggcccccctgaaggacttctggcccaaggtgcctgacagccctgccaccaagtaccccatctaccccctgacccccaagaagagccacaggaggaagagcaagcacaagagcgccaagaagaagacaggcaagcagcagaggaccaacaatgaaaacatcaagaggaccctgtccttcaggaagaagaggagccacgccatcctgagcccccccagccccagctacaatgctgagacagaggactgtgacctgaactacagtgatgtgatgagcaagctgggcttcctgtctgagaggagcaccagccccatcaacagcagccccccacgctgctggagccccacagaccccagggctgaggagatcatggctgctgctgagaaggaggccatgctgttcaagggccccaacgtgtacaagaagacagtgaacagccgcatcggcaagaccagccgggcccgggcccagatcaagaagagcaaggccaagctggccaaccccagcatcgtgaccaagaagaggaacaagaggaaccagaccaacaagctggtggatgatggcaagaagaagccccgggccaagcagaagaccaatgagaagggcaccagcaggaagcacaccaccctgaaggatgagaagatcaagagccagagcggggctgaggtgaagtttgtgctgaagcaccagaatgtgtctgaatttgccagcagcagcggcggcagccagctgctcttcaagcagaaggacatgcccctgatgggcagcgctgtggaccaccccctgagcgccagcctgcccaccggcatcaatgcccagcagaagctgagcggctgcttcagcagcttcctggagagcaagaagtctgtggacctgcagaccttccccagcagcagagatgacctgcaccccagcgtggtgtgcaacagcatcggccctggggtgtccaagatcaacgtgcagaggccccacaaccagagcgccatgttcaccctgaaggagagcaccctcatccagaagaacatctttgacctgagcaaccacctgagccaggtggcccagaacacccagatcagcagcggcatgagcagcaagattgaagataatgccaacaacatccagaggaactacctgagcagcatcggcaagctgtctgagtacagaaacagcctggagagcaagctggaccaggcctacacccccaacttcctgcactgcaaggacagccagcagcagatcgtgtgcatcgccgagcagagcaagcacagcgagacctgcagccctggcaacacagccagcgaggagagccagatgcccaacaactgctttgtgaccagcctgcggagccccatcaagcagatcgcctgggagcagaagcagaggggcttcatcctggacatgagcaacttcaagccagagcgggtgaagcccaggagcctgtctgaggccatcagccagaccaaggccctgagccagtgcaagaacagaaatgtgtccacccccagcgccttcggggagggccagagcggcctggccgtgctgaaggagctgctgcagaagaggcagcagaaggcccagaatgccaacaccacccaggaccccctgagcaacaagcaccagcccaacaagaacatcagcggcagcctggagcacaacaaggccaacaagaggaccaggtctgtgaccagccccaggaagcccaggacccccaggagcaccaagcagaaggagaagatccccaagctgctgaaggtggacagcctgaacctgcagaacagcagccagctggacaacagcgtgtctgatgacagccccatcttcttcagtgaccccggctttgagagctgctacagcctggaggacagcctgagccctgagcacaactacaactttgacatcaacaccatcggccagacaggcttctgcagcttctacagcggcagccagtttgtgcctgctgaccagaacctgccccagaagttcctgagtgatgctgtgcaggacctcttccctggccaggccatcgagaagaatgagttcctgagccatgacaaccagaagtgtgatgaggacaagcaccacaccacagacagcgcctcctggatccgcagcggcaccctgagccctgagatctttgagaagagcaccatcgacagcaatgaaaatagaagacacaaccagtggaagaacagcttccaccccctgaccaccaggagcaacagcatcatggacagcttctgtgtgcagcaggccgaggactgcctgtctgagaagagccggctgaacagaagctctgtgtccaaggaggtgttcctgagcctgccccagcccaacaacagcgactggatccagggccacaccaggaaggagatgggccagagcctggacagcgccaacaccagcttcaccgccatcctgagcagcccagatggagagctggtggatgtggcctgtgaggacctggagctgtatgtgtccagaaataatgacatgctgacccccaccccagacagcagccccaggagcaccagcagccccagccagagcaagaatggcagcttcacccccaggacagccaacatcctgaagcccctgatgagcccccccagccgggaggagatcatggccaccctgctggaccatgacctgtctgagaccatctaccaggagcccttctgcagcaaccccagtgatgtgcctgagaagccccgggagatcggcggccgcctgctgatggtggagacccggctggccaatgacctggccgagtttgaaggagacttcagcctggagggcctgcggctgtggaagacagccttcagcgccatgacccagaaccccaggcctggcagccccctgcggagcggccagggcgtggtgaacaagggcagcagcaacagccccaagatggtggaggacaagaagatcgtcatcatgccctgcaagtgtgcccccagccggcagctggtgcaggtgtggctgcaggccaaggaggagtatgaaagaagcaagaagctgcccaagaccaagcccaccggggtggtgaagtctgctgagaacttcagcagctctgtgaacccagatgacaagcctgtggtgccccccaagatggatgtgagcccctgcatcctgcccaccacagcccacaccaaggaggatgtggacaacagccagatcgccctgcaggcccccaccaccggctgcagccagacagccagcgagagccagatgctgccccctgtggccagcgccagtgaccctgagaaggatgaagatgatgatgacaactactacatctcctacagcagcccagacagccctgtgatccccccctggcagcagcccatcagcccagacagcaaggccctgaatggagatgaccggcccagcagccctgtggaggagctgcccagcctggcctttgagaacttcctgaagcccatcaaggatggcatccagaagagcccctgcagcgagccccaggagcccctggtgatcagccccatcaacacccgggccaggactggaaaatgtgagagcctgtgcttccacagcacccccatcatccagaggaagctgctggagcggctgcctgaggcccctggcctgagccccctgagcacagagcccaagacccagaagctgagcaacaagaagggcagcaacacagacaccctgcggcgggtgctgctgacccaggccaagaaccagtttgctgctgtgaacaccccccagaaggagaccagccagattgatggccccagcctgaacaacacctacggcttcaaggtgtccatccagaacctgcaggaggccaaggccctgcacgagatccagaacctgaccctcatctctgtggagctgcacgcccggacccggcgggacctggagccagaccctgagtttgaccccatctgtgccctcttctactgcatcagcagtgacacccccctgcctgacacagagaagacagagctgactggagtcatcgtcatcgacaaggacaagacagtgttcagccaggacatccgctaccagacccccctgctgatccgcagcggcatcaccggcctggaggtgacctatgctgctgatgagaaggccctcttccatgaaattgccaacatcatcaagagatatgaccctgacatcctgctgggctatgagatccagatgcacagctggggctacctgctgcagagagctgctgccctgagcattgacctgtgcaggatgatcagccgggtgcctgatgacaagattgagaacagatttgctgctgagagagatgaatatggcagctacaccatgtctgagatcaacatcgtgggccgcatcaccctgaacctgtggaggatcatgagaaatgaggtggccctgaccaactacacctttgaaaatgtgtccttccacgtgctgcaccagcgcttccccctcttcaccttccgggtgctgagtgactggtttgacaacaagacagacctgtaccgctggaagatggtggaccactacgtgtcccgggtgcggggcaacctgcagatgctggagcagctggacctgattggcaagaccagcgagatggcccggctgtttggcatccagttcctgcacgtgctgacccggggcagccagtacagagtggagagcatgatgctgcgcatcgccaagcccatgaactacatccctgtgacccccagcgtgcagcagaggagccagatgagggccccccagtgtgtgcccctcatcatggagcctgagagccgcttctacagcaacagcgtgctggtgctggacttccagagcctgtaccccagcatcgtcatcgcctacaactactgcttcagcacctgcctgggccacgtggagaacctgggcaagtatgatgagttcaagtttggctgcaccagcctgcgggtgcccccagacctgctgtaccaggtgagacatgacatcaccgtgagccccaacggggtggcctttgtgaagcccagcgtgaggaaaggagtgctgcccaggatgctggaggagatcctgaagacccgcttcatggtgaagcagagcatgaaggcctacaagcaggaccgggccctgagcaggatgctggatgcccggcagctgggcctgaagctgattgccaacgtgaccttcggctacaccagcgccaacttcagcggccgcatgccctgcatcgaggtgggggacagcatcgtgcacaaggcccgggagaccctggagcgggccatcaagctggtgaatgacaccaagaagtggggcgcccgggtggtgtatggagacacagacagcatgtttgtgctgctgaagggggccaccaaggagcagagcttcaagattggccaggagattgctgaggccgtgacagccaccaaccccaagcctgtgaagctgaagtttgagaaggtgtacctgccctgtgtgctgcagaccaagaagagatatgtgggctacatgtatgagaccctggaccagaaggaccctgtgtttgatgccaagggcattgaaacagtgagaagagacagctgcccagctgtgtccaagatcctggagaggagcctgaagctgctgtttgagacccgggacatcagcctcatcaagcagtatgtgcagaggcagtgcatgaagctgctggagggcaaggccagcatccaggacttcatctttgccaaggagtaccggggcagcttctcctacaagccaggggcctgtgtgcctgccctggagctgaccaggaagatgctgacctatgacagaagaagtgagccccaggtgggggagcgggtgccctacgtgatcatctacggcaccccaggagtgcccctcatccagctggtgagaagacctgtggaggtgctgcaggaccccaccctgcggctgaatgccacctactacatcaccaagcagatcctgccccccctggcccgcatcttcagcctgattggaattgatgtgttctcctggtaccacgagctgccccgcatccacaaggccaccagcagcagccgctctgagcctgagggcaggaagggcaccatcagccagtacttcaccaccctgcactgccctgtgtgtgatgacctgacccagcacggcatctgcagcaagtgccgcagccagccccagcacgtggccgtcatcctgaaccaggagatccgggagctggagcggcagcaggagcagctggtgaagatctgcaagaactgcaccggctgctttgacagacacatcccctgtgtgtccctgaactgccctgtgctcttcaagctgagccgggtgaaccgggagctgagcaaggccccctacctgcggcagctgctggaccagttctag

SEQ ID NO: 167789 - DNA, 9393 bp, synthetic construct; identical to SEQ ID NO: 167788
  misc_feature 1..9393: note = Description of Artificial Sequence: Synthetic coding sequence
  source 1..9393: mol_type = other DNA

SEQ ID NO: 167790 - DNA, 9393 bp, synthetic construct; identical to SEQ ID NO: 167788
  misc_feature 1..9393: note = Description of Artificial Sequence: Synthetic coding sequence
  source 1..9393: mol_type = other DNA

SEQ ID NO: 167791 - DNA, 9159 bp, synthetic construct
  misc_feature 1..9159: note = Description of Artificial Sequence: Synthetic coding sequence
  source 1..9159: mol_type = other DNA
atggccttcagcattgaccgggccctgaatgtggccctgggcaaccccagcagcacagcccagcacgtgttcaaggtgtccctggtgtctggcatgcccttctacggctaccacgagaaggagcggcacttcatgaagatctacctgtacaaccccaccatggtgaagaggatctgtgagctgctgcagagcggggccatcatgaacaagttctaccagccccatgaggcccacatcccctacctgctgcagctgttcatcgactacaacctgtatggcatgaacctgatcaacctggccgctgtgaagttcaggaaggcccggaggaagagcaacaccctgcacgccaccggcagctgcaagaaccacctgagcggcaacagcctggccgacaccctcttccgctgggagcaggatgagatccccagcagcctcatcctggagggcgtggagccccagagcacctgtgagctggaggtggatgctgtggccgctgacatcctgaaccggctggacatcgaggcccagattggaggcaaccctggcctgcaggccatctgggaggatgagaagcagaggagaagaaacagaaatgagaccagccagatgagccagcctgagagccaggaccacagatttgtgcctgccacagaaagtgagaagaagttccagaagaggctgcaggagatcctgaagcagaatgacttctctgtgaccctgagcggctctgtggactacagtgatggcagccaggagttctctgctgagctgaccctgcacagcgaggtgctgagccctgagatgctgcagtgcaccccagccaacatggtggaggtgcacaaggacaaggagagcagcaagggccacaccaggcacaaggtggaggaggccctgatcaatgaggaggccatcctgaacctgatggagaacagccagaccttccagcccctgacccagaggctgtctgagagccctgtgttcatggacagcagcccagatgaggccctggtgcacctgctggccggcctggagagtgatggctacagaggagagaggaacaggatgcccagcccctgccgcagctttggaaacaacaagtacccccagaacagtgatgatgaagaaaatgagccccagatcgagaaggaggagatggagctgagcctggtgatgagccagcgctgggacagcaacatcgaggagcactgtgccaagaagaggagcctgtgcaggaacacccacaggagcagcacagaagatgatgacagcagcagtggagaggagatggagtggagcgacaacagcctgctgctggccagcctgagcatcccccagctggatggaacagcagatgagaacagcgacaaccccctgaacaatgaaaacagcaggacccacagcagcgtcatcgccaccagcaagctgtctgtgaagcccagcatcttccacaaggatgctgccaccctggagcccagcagcagcgccaagatcaccttccagtgcaagcacaccagcgccctgagcagccacgtgctgaacaaggaggacctgattgaggacctgagccagaccaacaagaacacagagaagggcctggacaacagcgtgaccagcttcaccaatgaaagcacctacagcatgaagtacccaggcagcctgagcagcacagtgcacagcgagaacagccacaaggagaacagcaagaaggagatcctgcctgtgagcagctgtgagagcagcatctttgattatgaggaggacatccccagcgtgacccggcaggtgcccagcaggaagtacaccaacatcaggaagattgagaaggacagccccttcatccacatgcaccgccaccccaatgaaaacaccctgggcaagaacagcttcaacttcagtgacctgaaccacagcaagaacaaggtgtcctctgagggcaatgagaagggcaacagcacagccctgagcagcctcttccccagcagcttcacagagaactgtgagctgctgagctgcagcggggagaacagaaccatggtgcacagcctgaacagcacagcagatgaaagtggcctgaacaagctgaagatccgctatgaggagttccaggagcacaagacagagaagcccagcctgagccagcaggccgcccactacatgttcttccccagcgtggtgctgagcaactgcctgacccggccccagaagctgagccctgtgacctacaagctgcagcccggcaacaagcccagccggctgaagctgaacaagaggaagctggccggccaccaggagaccagcaccaagagcagcgagaccggcagcaccaaggacaacttcatccagaacaacccctgcaacagcaaccctgagaaggacaatgccctggccagtgacctgaccaagaccaccaggggggcctttgagaacaagacccccacagatggcttcatcgactgccactttggagatggcaccctggagacagagcagagctttggcctgtatggcaacaagtacaccctgcgggccaagaggaaggtgaactatgaaacagaggacagcgagagcagctttgtgacccacaacagcaagatcagcctgccccaccccatggagattggagagagcctggatggcaccctgaagagcaggaagaggaggaagatgagcaagaagctgccccctgtgatcatcaagtacatcatcatcaaccgcttccggggcaggaagaacatgctggtgaagctgggcaagattgacagcaaggagaagcaggtgatcctgacagaggagaagatggagctgtacaagaagctggcccccctgaaggacttctggcccaaggtgcctgacagccctgccaccaagtaccccatctaccccctgacccccaagaagagccacaggaggaagagcaagcacaagagcgccaagaagaagacaggcaagcagcagaggaccaacaatgaaaacatcaagaggaccctgtccttcaggaagaagaggagccacgccatcctgagcccccccagccccagctacaatgctgagacagaggactgtgacctgaactacagtgatgtgatgagcaagctgggcttcctgtctgagaggagcaccagccccatcaacagcagccccccacgctgctggagccccacagaccccagggctgaggagatcatggctgctgctgagaaggaggccatgctgttcaagggccccaacgtgtacaagaagacagtgaacagccgcatcggcaagaccagccgggcccgggcccagatcaagaagagcaaggccaagctggccaaccccagcatcgtgaccaagaagaggaacaagaggaaccagaccaacaagctggtggatgatggcaagaagaagccccgggccaagcagaagaccaatgagaagggcaccagcaggaagcacaccaccctgaaggatgagaagatcaagagccagagcggggctgaggtgaagtttgtgctgaagcaccagaatgtgtctgaatttgccagcagcagcggcggcagccagctgctcttcaagcagaaggacatgcccctgatgggcagcgctgtggaccaccccctgagcgccagcctgcccaccggcatcaatgcccagcagaagctgagcggctgcttcagcagcttcctggagagcaagaagtctgtggacctgcagaccttccccagcagcagagatgacctgcaccccagcgtggtgtgcaacagcatcggccctggggtgtccaagatcaacgtgcagaggccccacaaccagagcgccatgttcaccctgaaggagagcaccctcatccagaagaacatctttgacctgagcaaccacctgagccaggtggcccagaacacccagatcagcagcggcatgagcagcaagattgaagataatgccaacaacatccagaggaactacctgagcagcatcggcaagctgtctgagtacagaaacagcctggagagcaagctggaccaggcctacacccccaacttcctgcactgcaaggacagccagcagcagatcgtgtgcatcgccgagcagagcaagcacagcgagacctgcagccctggcaacacagccagcgaggagagccagatgcccaacaactgctttgtgaccagcctgcggagccccatcaagcagatcgcctgggagcagaagcagaggggcttcatcctggacatgagcaacttcaagccagagcgggtgaagcccaggagcctgtctgaggccatcagccagaccaaggccctgagccagtgcaagaacagaaatgtgtccacccccagcgccttcggggagggccagagcggcctggccgtgctgaaggagctgctgcagaagaggcagcagaaggcccagaatgccaacaccacccaggaccccctgagcaacaagcaccagcccaacaagaacatcagcggcagcctggagcacaacaaggccaacaagaggaccaggtctgtgaccagccccaggaagcccaggacccccaggagcaccaagcagaaggagaagatccccaagctgctgaaggtggacagcctgaacctgcagaacagcagccagctggacaacagcgtgtctgatgacagccccatcttcttcagtgaccccggctttgagagctgctacagcctggaggacagcctgagccctgagcacaactacaactttgacatcaacaccatcggccagacaggcttctgcagcttctacagcggcagccagtttgtgcctgctgaccagaacctgccccagaagttcctgagtgatgctgtgcaggacctcttccctggccaggccatcgagaagaatgagttcctgagccatgacaaccagaagtgtgatgaggacaagcaccacaccacagacagcgcctcctggatccgcagcggcaccctgagccctgagatctttgagaagagcaccatcgacagcaatgaaaatagaagacacaaccagtggaagaacagcttccaccccctgaccaccaggagcaacagcatcatggacagcttctgtgtgcagcaggccgaggactgcctgtctgagaagagccggctgaacagaagctctgtgtccaaggaggtgttcctgagcctgccccagcccaacaacagcgactggatccagggccacaccaggaaggagatgggccagagcctggacagcgccaacaccagcttcaccgccatcctgagcagcccagatggagagctggtggatgtggcctgtgaggacctggagctgtatgtgtccagaaataatgacatgctgacccccaccccagacagcagccccaggagcaccagcagccccagccagagcaagaatggcagcttcacccccaggacagccaacatcctgaagcccctgatgagcccccccagccgggaggagatcatggccaccctgctggaccatgacctgtctgagaccatctaccaggagcccttctgcagcaaccccagtgatgtgcctgagaagccccgggagatcggcggccgcctgctgatggtggagacccggctggccaatgacctggccgagtttgaaggagacttcagcctggagggcctgcggctgtggaagacagccttcagcgccatgacccagaaccccaggcctggcagccccctgcggagcggccagggcgtggtgaacaagggcagcagcaacagccccaagatggtggaggacaagaagatcgtcatcatgccctgcaagtgtgcccccagccggcagctggtgcaggtgtggctgcaggccaaggaggagtatgaaagaagcaagaagctgcccaagaccaagcccaccggggtggtgaagtctgctgagaacttcagcagctctgtgaacccagatgacaagcctgtggtgccccccaagatggatgtgagcccctgcatcctgcccaccacagcccacaccaaggaggatgtggacaacagccagatcgccctgcaggcccccaccaccggctgcagccagacagccagcgagagccagatgctgccccctgtggccagcgccagtgaccctgagaaggatgaagatgatgatgacaactactacatctcctacagcagcccagacagccctgtgatccccccctggcagcagcccatcagcccagacagcaaggccctgaatggagatgaccggcccagcagccctgtggaggagctgcccagcctggcctttgagaacttcctgaagcccatcaaggatggcatccagaagagcccctgcagcgagccccaggagcccctggtgatcagccccatcaacacccgggccaggactggaaaatgtgagagcctgtgcttccacagcacccccatcatccagaggaagctgctggagcggctgcctgaggcccctggcctgagccccctgagcacagagcccaagacccagaagctgagcaacaagaagggcagcaacacagacaccctgcggcgggtgctgctgacccaggccaagaaccagtttgctgctgtgaacaccccccagaaggagaccagccagattgatggccccagcctgaacaacacctacggcttcaaggtgtccatccagaacctgcaggaggccaaggccctgcacgagatccagaacctgaccctcatctctgtggagctgcacgcccggacccggcgggacctggagccagaccctgagtttgaccccatctgtgccctcttctactgcatcagcagtgacacccccctgcctgacacagagaagacagagctgactggagtcatcgtcatcgacaaggacaagacagtgttcagccaggacatccgctaccagacccccctgctgatccgcagcggcatcaccggcctggaggtgacctatgctgctgatgagaaggccctcttccatgaaattgccaacatcatcaagagatatgaccctgacatcctgctgggctatgagatccagatgcacagctggggctacctgctgcagagagctgctgccctgagcattgacctgtgcaggatgatcagccgggtgcctgatgacaagattgagaacagatttgctgctgagagagatgaatatggcagctacaccatgtctgagatcaacatcgtgggccgcatcaccctgaacctgtggaggatcatgagaaatgaggtggccctgaccaactacacctttgaaaatgtgtccttccacgtgctgcaccagcgcttccccctcttcaccttccgggtgctgagtgactggtttgacaacaagacagacctgtaccgctggaagatggtggaccactacgtgtcccgggtgcggggcaacctgcagatgctggagcagctggacctgattggcaagaccagcgagatggcccggctgtttggcatccagttcctgcacgtgctgacccggggcagccagtacagagtggagagcatgatgctgcgcatcgccaagcccatgaactacatccctgtgacccccagcgtgcagcagaggagccagatgagggccccccagtgtgtgcccctcatcatggagcctgagagccgcttctacagcaacagcgtgctggtgctggacttccagagcctgtaccccagcatcgtcatcgcctacaactactgcttcagcacctgcctgggccacgtggagaacctgggcaagtatgatgagttcaagtttggctgcaccagcctgcgggtgcccccagacctgctgtaccaggtgagacatgacatcaccgtgagccccaacggggtggcctttgtgaagcccagcgtgaggaaaggagtgctgcccaggatgctggaggagatcctgaagacccgcttcatggtgaagcagagcatgaaggcctacaagcaggaccgggccctgagcaggatgctggatgcccggcagctgggcctgaagctgattgccaacgtgaccttcggctacaccagcgccaacttcagcggccgcatgccctgcatcgaggtgggggacagcatcgtgcacaaggcccgggagaccctggagcgggccatcaagctggtgaatgacaccaagaagtggggcgcccgggtggtgtatggagacacagacagcatgtttgtgctgctgaagggggccaccaaggagcagagcttcaagattggccaggagattgctgaggccgtgacagccaccaaccccaagcctgtgaagctgaagtttgagaaggtgtacctgccctgtgtgctgcagaccaagaagagatatgtgggctacatgtatgagaccctggaccagaaggaccctgtgtttgatgccaagggcattgaaacagtgagaagagacagctgcccagctgtgtccaagatcctggagaggagcctgaagctgctgtttgagacccgggacatcagcctcatcaagcagtatgtgcagaggcagtgcatgaagctgctggagggcaaggccagcatccaggacttcatctttgccaaggagtaccggggcagcttctcctacaagccaggggcctgtgtgcctgccctggagctgaccaggaagatgctgacctatgacagaagaagtgagccccaggtgggggagcgggtgccctacgtgatcatctacggcaccccaggagtgcccctcatccagctggtgagaagacctgtggaggtgctgcaggaccccaccctgcggctgaatgccacctactacatcaccaagcagatcctgccccccctggcccgcatcttcagcctgattggaattgatgtgttctcctggtaccacgagctgccccgcatccacaaggccaccagcagcagccgctctgagcctgagggcaggaagggcaccatcagccagtacttcaccaccctgcactgccctgtgtgtgatgacctgacccagcacggcatctgcagcaagtgccgcagccagccccagcacgtggccgtcatcctgaaccaggagatccgggagctggagcggcagcaggagcagctggtgaagatctgcaagaactgcaccggctgctttgacagacacatcccctgtgtgtccctgaactgccctgtgctcttcaagctgagccgggtgaaccgggagctgagcaaggccccctacctgcggcagctgctggaccagttctag

SEQ ID NO: 167792 - DNA, 2289 bp, synthetic construct
  misc_feature 1..2289: note = Description of Artificial Sequence: Synthetic coding sequence
  source 1..2289: mol_type = other DNA
atggtggagacccggctggccaatgacctggccgagtttgaaggagacttcagcctggagggcctgcggctgtggaagacagccttcagcgccatgacccagaacccccggcccggcagccccctgcggagcggccagggcgtggtgaacaagggcagcagcaacagccccaagatggtggaggacaagaagatcgtcatcatgccctgcaagtgtgcccccagccggcagctggtgcaggtgtggctgcaggccaaggaggagtatgaaagaagcaagaagctgcccaagaccaagcccactggagtggtgaagtctgctgagaacttcagcagctctgtgaacccagatgacaagcctgtggtgccccccaagatggatgtgagcccctgcatcctgcccaccacagcccacaccaaggaggatgtggacaacagccagatcgccctgcaggcccccaccaccggctgcagccagacagccagcgagagccagatgctgccccctgtggccagcgccagtgaccctgagaaggatgaagatgatgatgacaactactacatctcctacagcagcccagacagccctgtgattcctccctggcagcagcccatcagcccagacagcaaggccctgaatggagatgaccggcccagcagccctgtggaggagctgcccagcctggcctttgagaacttcctgaagcccatcaaggatggcatccagaagagcccctgcagcgagccccaggagcccctggtgatcagccccatcaacacccgggccaggactggaaaatgtgagagcctgtgcttccacagcacccccatcatccagaggaagctgctggagcggctgcctgaggcccctggcctgagccccctgagcacagagcccaagacccagaagctgagcaacaagaagggcagcaacacagacaccctgcggcgggtgctgctgacccaggccaagaaccagtttgctgctgtgaacaccccccagaaggagaccagccagattgatggccccagcctgaacaacacctacggcttcaaggtgtccatccagaacctgcaggaggccaaggccctgcacgagatccagaacctgaccctcatctctgtggagctgcacgcccggacccggcgggacctggagccagaccctgagtttgaccccatctgtgccctcttctactgcatcagcagtgacacccccctgcctgacacagagaagacagagctgactggagtgattgtgattgacaaggacaagacagtgttcagccaggacatccgctaccagacccccctgctgatccgcagcggcatcaccggcctggaggtgacctacgccgcagatgagaaggccctcttccacgagatcgccaacatcatcaagagatatgaccctgacatcctgctgggctatgagatccagatgcacagctggggctacctgctgcagagagctgctgccctgagcattgacctgtgcaggatgatcagccgggtgcctgatgacaagattgaaaatagatttgctgctgagagagatgaatatggcagctacaccatgtctgagatcaacatcgtgggccgcatcaccctgaacctgtggaggatcatgagaaatgaggtggccctgaccaactacacctttgaaaatgtgtccttccacgtgctgcaccagcgcttccccctcttcaccttccgggtgctgagtgactggtttgacaacaagacagacctgtaccgctggaagatggtggaccactacgtgtcccgggtgcggggcaacctgcagatgctggagcagctggacctgattggcaagaccagcgagatggcccggctgtttggcatccagttcctgcacgtgctgacccggggcagccagtacagagtggagagcatgatgctgagaattgccaagcccatgaactacatccctgtgaccccatctgtgcagcagaggagccagatgagggccccccagtgtgtgcccctcatcatggagcctgagagccgcttctacagcaacagcgtgctggtgctggacttccagagcctgtaccccagcatcgtgattgcctacaactactgcttcagcacctgcctgggccacgtggagaacctgggcaagtatgatgagttcaagtttggctgcaccagcctgcgggtgcccccagacctgctgtaccaggtgagacatgacatcaccgtgagccccaatggagtggcctttgtgaagatcgccaacaagtgcaggcctgagggcatggcctag

SEQ ID NO: 167793 - DNA, 3666 bp, synthetic construct
  misc_feature 1..3666: note = Description of Artificial Sequence: Synthetic coding sequence
  source 1..3666: mol_type = other DNA
atgctgcggagcacaggcttcttccgggccatcgactgcccctactggagcggggcccctgggggcccctgcagaagaccctactgccacttccgccacagaggagcccggggcagcggggcccctggagatggaggagaggcccctcctgctgctggcctgggctatgacccctacaaccctgagctgcccaagcccccagcccagagagaaaatggcaccctgggcctgggggaggagcccaggccagatgtgctggagctggagctggtgaaccaggccattgaagctgtgcgctctgaggtggagctggagcagaggcgctaccgggagctgctggagaccacccgggagcacaggtctgctgaggccccagccctggccccccggggccccaatgccagccccaccgtgggcccagatgaagatgccttccccctggcctttgactacagccctggcagccacggcctgctgagcccagatgctggctaccagcccacccccctggccgccccagctgagcccggcagcaagtacagcctggccagcctggaccggggccagggccggggcggcggcggcggcggggccctggagtatgtgcccaaggctgtgtcccagccccggcggcacagcaggcctgtgcccagcggcaagtatgtggtggacaacagccggcccccaacagacctggagtatgaccccctgagcaactacagcgcccggcacctgagccgggccagcagcagagatgaaagagctgccaagaggccccggggcagccggggcagcgagccctacaccccagcccccaagaagctgtgtgaccccttcggcagctgtgatgcccgcttcagtgacagtgaagatgaagctgccaccgtgcctggaaatgagcccaccacagccagcacccccaaggcccgggctgaccctgagatcaaggccaccggccagccccccagcaaggagggcctggaggccgagggcggcggcctgcgggagaccaaggagacagctgtgcagtgtgatgtgggggacctgcagcccccaccagccaagccagccagccctgcccaggtgcagagcagccaggacggcggctgccccaaggagggcaagcccaagaagaagaagacaggagcccccccagcccccagctgcaaggatggagcccagggcaaggacaagaccaaggacaagggccggggccggcctgtggagaagcccagggctgacaagaagggcccccaggccagcagccccaggaggaaggccgagaggcctgagggcaccaagaagaagcccagcagcgccacccctgtggccaccagcggcaagggccgcccagacaggcctgcccggcggcccagccccaccagcggggacagcaggcctgctgctggccggggccccccccggcccctgcagctgcctgacaggaagagcaccaaggcccccagcggcaagctggtggagaggaaggcccggagcctggatgaaggagccagccaggatgcccccaagctgaagaagagggccctgagccatgctgacctgtttggagatgaaagtgaagatgaggccgccggccctggggtgcccagcgtgtggcccagcgccctgcccagcctgagcagtgacagcgacagcgacagcgacagcagcctgggcttccctgaggcccagggcccccccaagaggctgaaggccagccccccacccagccctgcccccagcagcagcagcagcagcagcagcagcaccagcagcgctggagcagatgtggactacagcgccctggagaaggaggtggactttgacagcgaccccatggaggagtgcctgcgcatcttcaatgaaagcacctctgtgaagacagaagatcggggccgcctggcccggcagccccccaaggaggagaagtctgaggagaagggcctgagcggcctgaccaccctcttccctggccagaagaggcgcatcagccacctgagcaagcagggccaggaggtggagcccccaagaagaggccctgctgtgcccccagcccggcccccaacagcccaggaggtgtgctacctgcgggcccagcaggcccagagggccagcgccagcctgctgcaggccccagcccggctggccgagaagagccccagcgtgcacatcagcgcccctggagagaagagaagaattgcccacatccccaacccccggctggccgccgcccccaccggggccaagaggaccctggccgccagcggcagccagagcagcaatggacctgagcccggcggccagcagctgaagaccaggaccctgagcggcatggccagcaagaccaccaccaccatcatccccaagagaattgcccacagccccagcctgcagagcctgaagaagcccatcatccccaaggagtttggaggcaaggtgcccaccgtcatccggcagcgctacctgaacctcttcatcgaggagtgcctgaagttctgcaccagcaaccaggaggccatcgagaaggccctgaatgaggagaaggtggcctatgacaggagccccagcaagaacatctacctgaatgtggccgtgaacaccctgaagaagctgcggggcctggcccccagcgctgtgcccggcctgagcaagaccagcggccggcgggtggtgtcccatgaggtggtgctgggcggccgcctggccgccaagaccagcttcagcctgagccggcccagcagcccccgggtggaggacctgaagggagctgccctgtacagccggctgcgggagtacctgctgacccaggaccagctgaaggaaaatggctaccccttcccccaccctgagaggcctgggggcgccatcatcttcaccgctgaggagaagaggcccaaggacagcagctgcaggacctgctgccgctgtggcacagagtacctggtgagcagcagcggccgctgcatcagagatgaggagtgctactaccactggggccgcctgcggaggaacagagtggccggcggctgggagacccagtacatgtgctgcagcgctgctgctggctctgtgggctgccaggtggccaagcagcacgtgcaggacggcaggaaggagcggctggagggctttgtgaagacctttgagaaggagctgagcggggacacccaccctggcatctatgccctggactgtgagatgagctacaccacctacggcctggagctgaccagggtgacagtggtggacacagatgtgcacgtggtgtatgacacctttgtgaagccagacaatgagatcgtggactacaacacccgcttcagcggcgtgacagaagctgacctggccgacacctctgtgaccctgagagatgtgcaggccgtgctgctgtccatgttttctgctgacaccatcctgattggccacagcctggagagtgacctgctggccctgaaggtgatccacagcacagtggtggacacctctgtgctcttcccccaccggctgggcctgccctacaagaggagcctgaggaacctgatggctgactacctgcggcagatcatccaggacaacgtggatggccacagcagcagtgaagatgctggggcctgcatgcacctggtgatctggaaggtgagagaagatgccaagaccaagaggtag

SEQ ID NO: 167794 - DNA, 1014 bp, synthetic construct
  misc_feature 1..1014: note = Description of Artificial Sequence: Synthetic coding sequence
  source 1..1014: mol_type = other DNA
atgctgcccagcagcacccggctgggctatgacccctacaaccctgagctgcccaagcccccagcccagagagaaaatggcaccctgggcctgggggaggagcccaggccagatgtgctggagctggagctggtgaaccaggccattgaagctgtgcgctctgaggtggagctggagcagaggcgctaccgggagctgctggagaccacccgggagcacaggtctgctgaggccccagccctggccccccggggccccaatgccagccccaccgtgggcccagatgaagatgccttccccctggcctttgactacagccctggcagccacggcctgctgagcccagatgctggctaccagcccacccccctggccgccccagctgagcccggcagcaagtacagcctggccagcctggaccggggccagggccggggcggcggcggcggcggggccctggagtatgtgcccaaggctgtgtcccagccccggcggcacagcaggcctgtgcccagcggcaagtatgtggtggacaacagccggcccccaacagacctggagtatgaccccctgagcaactacagcgcccggcacctgagccgggccagcagcagagatgaaagagctgccaagaggccccggggcagccggggcagcgagccctacaccccagcccccaagaagctgtgtgaccccttcggcagctgtgatgcccgcttcagtgacagtgaagatgaagctgccaccgtgcctggaaatgagcccaccacagccagcacccccaaggcccgggctgaccctgagatcaaggccaccggccagccccccagcaaggagggcctggaggccgagggcggcggcctgcgggagaccaaggagacagctgtgcagtgtgatgtgggggacctgcagcccccaccagccaagccagccagccctgcccaggtgcagagcagccaggacggcggctgccccaaggagggcaagcccaagaagaagaagacaggagcctag

SEQ ID NO: 167795 - DNA, 1482 bp, synthetic construct
  misc_feature 1..1482: note = Description of Artificial Sequence: Synthetic coding sequence
  source 1..1482: mol_type = other DNA
atgggcagccacagcccctgtgcccacaccccctgtgcccccccagcccccaccggggccaagaggaccctggccgccagcggcagccagagcagcaatggacctgagcccggcggccagcagctgaagaccaggaccctgagcggcatggccagcaagaccaccaccaccatcatccccaagagaattgcccacagccccagcctgcagagcctgaagaagcccatcatccccaaggagtttggaggcaaggtgcccaccgtcatccggcagcgctacctgaacctcttcatcgaggagtgcctgaagttctgcaccagcaaccaggaggccatcgagaaggccctgaatgaggagaaggtggcctatgacaggagccccagcaagaacatctacctgaatgtggccgtgaacaccctgaagaagctgcggggcctggcccccagcgctgtgcccggcctgagcaagaccagcggccggcgggtggtgtcccatgaggtggtgctgggcggccgcctggccgccaagaccagcttcagcctgagccggcccagcagcccccgggtggaggacctgaagggagctgccctgtacagccggctgcgggagtacctgctgacccaggaccagctgaaggaaaatggctaccccttcccccaccctgagaggcctgggggcgccatcatcttcaccgctgaggagaagaggcccaaggacagcagctgcaggacctgctgccgctgtggcacagagtacctggtgagcagcagcggccgctgcatcagagatgaggagtgctactaccactggggccgcctgcggaggaacagagtggccggcggctgggagacccagtacatgtgctgcagcgctgctgctggctctgtgggctgccaggtggccaagcagcacgtgcaggacggcaggaaggagcggctggagggctttgtgaagacctttgagaaggagctgagcggggacacccaccctggcatctatgccctggactgtgagatgagctacaccacctacggcctggagctgaccagggtgacagtggtggacacagatgtgcacgtggtgtatgacacctttgtgaagccagacaatgagatcgtggactacaacacccgcttcagcggcgtgacagaagctgacctggccgacacctctgtgaccctgagagatgtgcaggccgtgctgctgtccatgttttctgctgacaccatcctgattggccacagcctggagagtgacctgctggccctgaaggtgatccacagcacagtggtggacacctctgtgctcttcccccaccggctgggcctgccctacaagaggagcctgaggaacctgatggctgactacctgcggcagatcatccaggacaacgtggatggccacagcagcagtgaagatgctggggcctgcatgcacctggtgatctggaaggtgagagaagatgccaagaccaagaggtag

SEQ ID NO: 167796 - DNA, 714 bp, synthetic construct
  misc_feature 1..714: note = Description of Artificial Sequence: Synthetic coding sequence
  source 1..714: mol_type = other DNA
atgctgggcggcagcctgggcagccggctgctgcggggcgtgggcggcagccacggccgctttggagcccggggcgtgcgggagggcggggccgccatggctgctggggagagcatggcccagaggatggtgtgggtggacctggagatgacaggcctggacatcgagaaggaccagatcatcgagatggcctgcctgatcacagacagcgacctgaacatcctggccgagggccccaacctgatcatcaagcagccagatgagctgctggacagcatgtctgactggtgcaaggagcaccacggcaagagcggcctgaccaaggctgtgaaggagagcaccatcaccctgcagcaggccgagtatgagttcctgagctttgtgcggcagcagaccccacctggcctgtgccccctggccggcaacagcgtgcatgaggacaagaagttcctggacaagtacatgccccagttcatgaagcacctgcactaccgcatcattgatgtgtccacagtgaaggagctgtgccgccgctggtacccagaggagtatgaatttgcccccaagaaggccgccagccaccgggccctggatgacatcagcgagagcatcaaggagctgcagttctacagaaacaacatcttcaagaagaagattgatgagaagaagaggaagatcattgaaaatggagaaaatgagaagacagtgtcctag

SEQ ID NO: 167797 - DNA, 753 bp, synthetic construct
  misc_feature 1..753: note = Description of Artificial Sequence: Synthetic coding sequence
  source 1..753: mol_type = other DNA
atgggcaaggccaaggtgcctgccagcaagagggcccccagcagccctgtggccaagccaggccctgtgaagaccctgaccaggaagaagaacaagaagaagaagcgcttctggaagagcaaggcccgggaggtgtccaagaagccagccagcggccctggagctgtggtgcggccccccaaggcccctgaggacttcagccagaactggaaggccctgcaggaggtgccccgctggacaggaggccggcagtacctggcccccaggcctgtggagcagagcaccatcaggaaggagcccaggaagggccagatggtgatcctcttccagaatgaaggcaccagcagcatccgcagcggcaagctgcggcggcagccccagccccaccccccccgggaggagctggaggtggtgcagaaggaggtggccgagatgctgaagggccgcatcctggtgggccacgccctgcacaatgacctgaaggtgctcttcctggaccaccccaagaagaagatccgggacacccagaagtacaagcccttcaagagccaggtgaagagcggccggcccagcctgcggctgctgtctgagaagatcctgggcctgcaggtgcagcaggccgagcactgcagcatccaggatgcccaggccgccatgaggctgtatgtgatggtgaagaaggagtgggagagcatggcccgggaccggcggcccctgctgacagccccagaccactgcagtgatgatgcctag

SEQ ID NO: 167798 - DNA, 1269 bp, synthetic construct
  misc_feature 1..1269: note = Description of Artificial Sequence: Synthetic coding sequence
  source 1..1269: mol_type = other DNA
atgggcaaggccaaggtgcctgccagcaagagggcccccagcagccctgtggccaagccaggccctgtgaagaccctgaccaggaagaagaacaagaagaagaagcgcttctggaagagcaaggcccgggaggtgtccaagaagccagccagcggccctggagctgtggtgcggccccccaaggcccctgaggacttcagccagaactggaaggccctgcaggagtggctgctgaagcagaagagccaggcccctgagaagcccctggtgatcagccagatgggcagcaagaagaagcccaagatcatccagcagaacaagaaggagaccagcccccaggtgaagggggaggagatgcctgctgggaaggaccaggaggccagccggggctctgtgcccagcggcagcaagatggaccggcgggcccctgtgcccaggaccaaggccagcggcacagagcacaacaagaagggcaccaaggagaggaccaacggggacatcgtgcctgagcggggggacatcgagcacaagaagaggaaggccaaggaggccgccccagccccacccacagaggaggacatctggtttgatgatgtggaccctgctgacatcgaggccgccatcggccctgaggccgccaagatcgccaggaagcagctgggccagagcgagggctctgtgtccctgagcctggtgaaggagcaggcctttggaggcctgacccgggccctggccctggactgtgagatggtgggcgtgggccccaagggggaggagagcatggccgcccgggtgtccatcgtgaaccagtatggaaaatgtgtgtatgacaagtatgtgaagcccacagagcctgtgacagactacagaacagctgtgtctggcatccggcctgagaacctgaagcagggcgaggagctggaggtggtgcagaaggaggtggccgagatgctgaagggccgcatcctggtgggccacgccctgcacaatgacctgaaggtgctcttcctggaccaccccaagaagaagatccgggacacccagaagtacaagcccttcaagagccaggtgaagagcggccggcccagcctgcggctgctgtctgagaagatcctgggcctgcaggtgcagcaggccgagcactgcagcatccaggatgcccaggccgccatgaggctgtatgtgatggtgaagaaggagtgggagagcatggcccgggaccggcggcccctgctgacagccccagaccactgcagtgatgatgcctag

SEQ ID NO: 167799 - DNA, 570 bp, synthetic construct
  misc_feature 1..570: note = Description of Artificial Sequence: Synthetic coding sequence
  source 1..570: mol_type = other DNA
atgggcagcaagaagaagcccaagatcatccagcagaacaagaaggagaccagcccccaggtgaagggggaggagatgcctgctgggaaggaccaggaggccagccggggctctgtgcccagcggcagcaagatggacagaagagcccctgtgcccaggaccaaggccagcggcacagagcacaacaagaagggcaccaaggagaggaccaatggagacatcgtgcctgagcggggggacatcgagcacaagaagaggaaggccaaggaggccgccccagccccacccacagaggaggacatctggtttgatgatgtggaccctgctgacattgaagctgccatcggccctgaggccgccaagatcgccaggaagcagctgggccagagcgagggctctgtgtccctgagcctggtgaaggagcaggccttcggcggcctgacccgggccctggccctggactgtgagatggtgggcgtgggccccaagggggaggagagcatggccgcccgggtgtccatcgtgaaccagtatggaaaatgtgtgtatgacaagtatgtgaagccctag

SEQ ID NO: 167800 - DNA, 1125 bp, synthetic construct
  misc_feature 1..1125: note = Description of Artificial Sequence: Synthetic coding sequence
  source 1..1125: mol_type = other DNA
cctgtggccaagccaggccctgtgaagaccctgaccaggaagaagaacaagaagaagaagcgcttctggaagagcaaggcccgggaggtgtccaagaagccagccagcggccctggagctgtggtgcggccccccaaggcccctgaggacttcagccagaactggaaggccctgcaggagtggctgctgaagcagaagagccaggcccctgagaagcccctggtgatcagccagatgggcagcaagaagaagcccaagatcatccagcagaacaagaaggagaccagcccccaggtgaagggggaggagatgcctgctgggaaggaccaggaggccagccggggctctgtgcccagcggcagcaagatggacagaagagcccctgtgcccaggaccaaggccagcggcacagagcacaacaagaagggcaccaaggagaggaccaatggagacatcgtgcctgagcggggggacatcgagcacaagaagaggaaggccaaggaggccgccccagccccacccacagaggaggacatctggtttgatgatgtggaccctgctgacattgaagctgccatcggccctgaggccgccaagatcgccaggaagcagctgggccagagcgagggctctgtgtccctgagcctggtgaaggagcaggccttcggcggcctgacccgggccctggccctggactgtgagatggtgggcgtgggccccaagggggaggagagcatggccgcccgggtgtccatcgtgaaccagtatggaaaatgtgtgtatgacaagtatgtgaagcccacagagcctgtgacagactacagaacagctgtgtctggcatccggcctgagaacctgaagcagggcgaggagctggaggtggtgcagaaggaggtggccgagatgctgaagggccgcatcctggtgggccacgccctgcacaatgacctgaagagcggccggcccagcctgcggctgctgtctgagaagatcctgggcctgcaggtgcagcaggacagcggctgccccggcagcaatgaggccgtgagacatggagaggagggcgtgggggagcacggcccccggcaggcccctcctgctgactgcagccggcccctgcagtag

SEQ ID NO: 167801 - DNA, 702 bp, synthetic construct
  misc_feature 1..702: note = Description of Artificial Sequence: Synthetic coding sequence
  source 1..702: mol_type = other DNA
atgggcaaggccaaggtgcctgccagcaagagggcccccagcagccctgtggccaagccaggccctgtgaagaccctgaccaggaagaagaacaagaagaagaagcgcttctggaagagcaaggcccgggaggtgtccaagaagccagccagcggccctggagctgtggtgcggccccccaaggcccctgaggacttcagccagaactggaaggccctgcaggaggtgccccgctggacaggaggccggcagtacctggcccccaggcctgtggagcagagcaccatcaggaaggagcccaggaagggccagatggtgatcctcttccagaatgaaggcaccagcagcatccgcagcggcaagctgcggcggcagccccagccccaccccccccgggaggagctggaggtggtgcagaaggaggtggccgagatgctgaagggccgcatcctggtgggccacgccctgcacaatgacctgaaggtgctcttcctggaccaccccaagaagaagatccgggacacccagaagtacaagcccttcaagagccaggtgaagagcggccggcccagcctgcggctgctgtctgagaagatcctgggcctgcaggtgcagcaggccgagcactgcagcatccaggatgcccaggccgccatgaggctgtatgtgatggtgaagaaggagtgggagagcatggcctag

SEQ ID NO: 167802 - DNA, 996 bp, synthetic construct
  misc_feature 1..996: note = Description of Artificial Sequence: Synthetic coding sequence
  source 1..996: mol_type = other DNA
atgagccgggcccggggggccctgtgccgggcctgcctggccctggccgccgccctggccgccctgctgctgctgcccctgcccctgccccgggccccagccccagcccggaccccagccccagccccccgggccccacccagcaggcctgctgcccccagcctgcggccagatgatgtgttcatcgctgtgaagaccaccaggaagaaccacggcccccggctgcggctgctgctgcggacctggatcagccgggcccggcagcagaccttcatcttcacagatggagatgatcctgagctggagctgcagggcggggacagagtcatcaacaccaactgcagcgctgtgaggacccggcaggccctgtgctgcaagatgtctgtggagtatgacaagttcattgaaagtggcaggaagtggttctgccacgtggatgatgacaactacgtgaatgcccggagcctgctgcacctgctgagcagcttcagccccagccaggatgtgtacctgggccggcccagcctggaccaccccatcgaggccacagagcgggtgcagggcggccgcacagtgaccaccgtgaagttctggtttgccactggaggagctggcttctgcctgagccggggcctggccctgaagatgagcccctgggccagcctgggcagcttcatgagcacagctgagcaggtgcggctgcctgatgactgcaccgtgggctacatcgtggagggcctgctgggcgcccggctgctgcacagccccctcttccacagccacctggagaacctgcagaggctgcccccagacaccctgctgcagcaggtgaccctgagccatggaggccctgagaacccccacaacgtggtgaatgtggccggcggcttcagcctgcaccaggaccccacccgcttcaagagcatccactgcctgctgtacccagacacagactggtgcccccggcagaagcagggcgcccccaccagcaggtag

SEQ ID NO: 167803 - DNA, 873 bp, synthetic construct
  misc_feature 1..873: note = Description of Artificial Sequence: Synthetic coding sequence
  source 1..873: mol_type = other DNA
atgagccgggccccacccagcaggcctgctgcccccagcctgcggccagatgatgtgttcatcgctgtgaagaccaccaggaagaaccacggcccccggctgcggctgctgctgcggacctggatcagccgggcccggcagcagaccttcatcttcacagatggagatgatcctgagctggagctgcagggcggggacagagtcatcaacaccaactgcagcgctgtgaggacccggcaggccctgtgctgcaagatgtctgtggagtatgacaagttcatcgagagcggcaggaagtggttctgccacgtggatgatgacaactacgtgaatgcccggagcctgctgcacctgctgagcagcttcagccccagccaggatgtgtacctgggccggcccagcctggaccaccccatcgaggccacagagcgggtgcagggcggccgcacagtgaccaccgtgaagttctggtttgccaccggcggggccggcttctgcctgagccggggcctggccctgaagatgagcccctgggccagcctgggcagcttcatgagcacagctgagcaggtgcggctgcctgatgactgcaccgtgggctacatcgtggagggcctgctgggcgcccggctgctgcacagccccctcttccacagccacctggagaacctgcagaggctgcccccagacaccctgctgcagcaggtgaccctgagccacggcggccctgagaacccccacaacgtggtgaatgtggccggcggcttcagcctgcaccaggaccccacccgcttcaagagcatccactgcctgctgtacccagacacagactggtgcccccggcagaagcagggcgcccccaccagcaggtag

SEQ ID NO: 167804 - DNA, 1626 bp, synthetic construct
  misc_feature 1..1626: note = Description of Artificial Sequence: Synthetic coding sequence
  source 1..1626: mol_type = other DNA
atgggcagccaggaggtgctgggccacgccgcccggctggccagcagcggcctgctgctgcaggtgctcttccgcctcatcacctttgtgctgaatgccttcatcctgcgcttcctgagcaaggagatcgtgggcgtggtgaatgtgcggctgaccctgctgtacagcaccaccctcttcctggcccgggaggccttcagaagagcctgcctgagcggcggcacccagagggactggagccagaccctgaacctgctgtggctgactgtgcccctgggcgtcttctggagcctcttcctgggctggatctggctgcagctgctggaggtgcctgaccccaacgtggtgccccactacgccactggagtggtgctgtttggcctgtctgctgtggtggagctgctgggggagcccttctgggtgctggcccaggcccacatgtttgtgaagctgaaggtgattgctgagagcctgagcgtcatcctgaagtctgtgctgacagccttcctggtgctgtggctgccccactggggcctgtacatcttcagcctggcccagctgttctacaccaccgtgctggtgctgtgctacgtgatctacttcaccaagctgctgggcagccctgagagcaccaagctgcagaccctgcctgtgagccgcatcacagacctgctgcccaacatcaccagaaatggagccttcatcaactggaaggaggccaagctgacctggagcttcttcaagcagagcttcctgaagcagatcctgacagaaggagagcgctacgtgatgaccttcctgaatgtgctgaactttggagaccagggcgtgtatgacatcgtgaacaacctgggcagcctggtggcccggctcatcttccagcccatcgaggagagcttctacatcttctttgccaaggtgctggagcggggcaaggatgccaccctgcagaagcaggaggatgtggccgtggccgctgctgtgctggagagcctgctgaagctggccctgctggccggcctgaccatcaccgtgtttggatttgcctacagccagctggccctggacatctacggcggcaccatgctgagcagcggcagcggccctgtgctgctgcggagctactgcctgtatgtgctgctgctggccatcaatggagtgacagagtgcttcacctttgctgccatgagcaaggaggaggtggaccgctacaactttgtgatgctggccctgagcagcagcttcctggtgctgagctacctgctgacccgctggtgtggctctgtgggcttcatcctggccaactgcttcaacatgggcatccgcatcacccagagcctgtgcttcatccaccgctactacagaagaagcccccaccggcccctggccggcctgcacctgagccctgtgctgctgggcacctttgccctgagcggcggcgtgacagctgtgtctgaggtgttcctgtgctgtgagcagggctggccagcccggctggcccacatcgctgtgggcgccttctgcctgggcgccaccctgggcacagccttcctgacagagaccaagctgatccacttcctgcggacccagctgggcgtgcccaggagaacagacaagatgacctag

SEQ ID NO: 167805 - DNA, 1509 bp, synthetic construct
  misc_feature 1..1509: note = Description of Artificial Sequence: Synthetic coding sequence
  source 1..1509: mol_type = other DNA
atgggcagccaggaggtgctgggccacgccgcccggctggccagcagcggcctgctgctgcaggtgctcttccgcctcatcacctttgtgctgaatgccttcatcctgcgcttcctgagcaaggagatcgtgggcgtggtgaatgtgcgggtgcccctgggcgtcttctggagcctcttcctgggctggatctggctgcagctgctggaggtgcctgaccccaacgtggtgccccactacgccaccggggtggtgctgtttggcctgtctgctgtggtggagctgctgggggagcccttctgggtgctggcccaggcccacatgtttgtgaagctgaaggtgattgctgagagcctgagcgtcatcctgaagtctgtgctgacagccttcctggtgctgtggctgccccactggggcctgtacatcttcagcctggcccagctgttctacaccaccgtgctggtgctgtgctacgtgatctacttcaccaagctgctgggcagccctgagagcaccaagctgcagaccctgcctgtgagccgcatcacagacctgctgcccaacatcaccagaaatggagccttcatcaactggaaggaggccaagctgacctggagcttcttcaagcagagcttcctgaagcagatcctgacagaaggagagagatatgtgatgaccttcctgaatgtgctgaactttggagaccagggcgtgtatgacatcgtgaacaacctgggcagcctggtggcccggctcatcttccagcccatcgaggagagcttctacatcttctttgccaaggtgctggagcggggcaaggatgccaccctgcagaagcaggaggatgtggccgtggccgctgctgtgctggagagcctgctgaagctggccctgctggccggcctgaccatcaccgtgtttggatttgcctacagccagctggccctggacatctatggaggcaccatgctgagcagcggcagcggccctgtgctgctgcggagctactgcctgtatgtgctgctgctggccatcaacggggtgacagagtgcttcacctttgctgccatgagcaaggaggaggtggaccgctacaactttgtgatgctggccctgagcagcagcttcctggtgctgagctacctgctgacccgctggtgtggctctgtgggcttcatcctggccaactgcttcaacatgggcatccgcatcacccagagcctgtgcttcatccaccgctactaccgccgcagcccccaccggcccctggccggcctgcacctgagccctgtgctgctgggcacctttgccctgtctggaggagtgacagctgtgtctgaggtgttcctgtgctgtgagcagggctggccagcccggctggcccacatcgctgtgggcgccttctgcctgggcgccaccctgggcacagccttcctgacagagaccaagctgatccacttcctgcggacccagctgggcgtgcccaggagaacagacaagatgacctag

SEQ ID NO: 167806 - DNA, 4308 bp, synthetic construct
  misc_feature 1..4308: note = Description of Artificial Sequence: Synthetic coding sequence
  source 1..4308: mol_type = other DNA
atggcccagaccccagatggcatcagctgtgagctgcggggggagatcacccgcttcctgtggcccaaggaggtggagctgctgctgaagacctggctgcccggggagggcgctgtgcagaaccacgtgctggccctgctgcgctggagggcctacctgctgcacaccacctgcctgcccctgcgggtggactgcaccttctcctacctggaggtgcaggccatggccctgcaggagaccccaccccaggtgacctttgagctggagagcctgcgggagctggtgctggagttccctggggtggccgccctggagcagctggcccagcacgtggccgccgccatcaagaaggtgttccccaggagcaccctgggcaagctgttcagaagacccaccccagcctccatgctggcccggctggagaggagcagccccagcgagagcacagacccctgcagcccctgtggcggcttcctggagacctatgaggccctgtgtgactacaacggcttccccttccgggaggagatccagtgggatgtggacaccatctaccaccggcagggctgccgccacttcagcctgggggacttcagccacctgggcagccgggacctggccctgtctgtggccgccctgagctacaacctgtggttccgctgcctgagctgtgtggacatgaagctgagcctggaggtgtctgagcagatcctgcacatgatgagccagagcagccacctggaggagctggtgctggagacctgcagcctgcggggggactttgtgcggcggctggcccaggccctggccggccacagcagcagcggcctgcgggagctgagcctggccggcaacctgctggatgaccggggcatgacagccctgagccgccacctggagcgctgccctggggccctgcggcggctgagcctggcccagacaggcctgaccccccggggcatgagggccctgggccgggccctggccaccaatgctgcctttgacagcaccctgacccacctggacctgagcggcaaccctggggccctgggcgccagcgaggacagcggcggcctgtacagcttcctgagccggcccaacgtgctgtccttcctgaacctggccggcacagacacagccctggacacagtgcggggctgcagcgtgggcggctggatgacaggccgggctgactggagggctggccggggcggcctgggccccccagctggggtggccaacagcctgcccccccagctgtttgctgctgtgtcccggggctgctgcaccagcctgacccacctggatgccagcagaaatgtgttcagcaggaccaagagcagagctgccccagctgccctgcagctgttcctgagccgggcccggaccctgcggcacctgggcctggccggctgcaagctgcccccagatgccctgcgggccctgctggatggcctggccctgaacacccacctgcgggacctgcacctggacctgagcgcctgtgagctgcggtctgctggggcccaggtgatccaggacctggtgtgtgatgctggagctgtgagcagcctggacctggccgacaatggcttcggcagtgacatggtgaccctggtgctggccatcggccgcagccgcagcctgcggcacgtggccctgggcaggaacttcaacgtgcgctgcaaggagaccctggatgatgtgctgcacagaattgtgcagctgatgcaggatgatgactgccccctgcagagcctgtctgtggccgagagccggctgaagctgggcgcctctgtgctgctgcgggccctggccaccaaccccaacctgacagccctggacatctctggaaatgccatgggagatgctggggccaagctgctggccaaggccctgcgggtgaacagccggctgcggtctgtggtgtgggacaggaaccacaccagcgccctgggcctgctggatgtggcccaggccctggagcagaaccacagcctgaaggccatgcccctgcccctgaatgatgtggcccaggcccagaggagcaggcctgagctgacagcccgggctgtgcaccagatccaggcctgcctgctgaggaacaacagagctgaccctgccagcagtgaccacaccacccggctgcagcccctgggcctggtgtctgaccccagcgagcaggaggtgaatgagctgtgccagagcgtgcaggagcacgtggagctgctgggctgtggggccggcccccagggcgaggccgctgtgcggcaggccgaggatgccatccagaatgccaacttcagcctgagcatcctgcccatcctgtatgaagctggcagcagccccagccaccactggcagctgggccagaagctggagggcctgctgcggcaggtgggggaggtgtgccggcaggacatccaggacttcacccaggccaccctggacacagcccggagcctgtgcccccagatgctgcagggcagctcctggagggagcagctggagggcgtgctggccggcagccggggcctgcctgagctgctgcctgagcagctgctgcaggatgccttcacccggctgcgggacatgaggctgagcatcaccggcaccctggccgagagcatcgtggcccaggccctggccggcctgtctgctgcccgggaccagctggtggagagcctggcccagcaggccaccgtgaccatgcccccagccctgcctgccccagatggaggagagcccagcctgctggagcctggagagctggagggcctcttcttccctgaggagaaggaggaggagaaggagaaggatgacagccccccccagaagtggccagagctgagccacggcctgcacctggtgcccttcatccacagcgctgctgaggaggccgagcctgagcctgagctggccgcccctggagaagatgctgagccccaggccggccccagcgcccggggcagccccagccctgctgcccctggccccccagctggccccctgcccaggatggacctgcccctggccggccagcccctgcggcaccccacccgggcccggccccggccccggcggcagcaccaccaccggcccccacctgggggcccccaggtgcccccagccctgccccaggagggcaatggcctgagcgcccgggtggatgaaggagtggaggagttcttcagcaagaggctcatccagcaggaccggctgtgggccccagaagaagatcctgccacagaaggaggagccacccctgtgcccaggaccctgaggaagaagctgggcaccctgtttgccttcaagaagcccaggagcacccggggccccaggacagacctggagaccagccctggagctgcccccaggaccaggaagaccaccttcggggacctgctgcggccccccacccggcccagcagaggagaggagctgggcggcgctgagggggacaccagcagcccagaccctgctggccgcagccggccccgctacacccgggacagcaaggcctacagcatgatcctgctgcctgctgaggaggaggccaccctgggcgcccggccagacaagagaagacccctggagcggggggagacagagctggcccccagctttgagcagagggtgcaggtgatgctgcagagaattggagtgtcccggggcagcggcggcgctgagggcaagaggaagcagagcaaggatggagagatcaagaaggccggcagtgatggagacatcatggacagcagcacagaggccccacccatcagcatcaagagcaggacccacagcgtgtctgctgaccccagctgcaggcctggccctggcagccagggccctgagagcgccacctggaagaccctgggccagcagctgaatgctgagctgcggagccggggctggggccagcaggacggccctggcccccccagccctggccagagccccagcccctgcaggaccagccccagcccagacagcctgggcctgcctgaggacccctgcctgggccccagaaatgaagatggccagctgcggccccggcccctgtctgctggccggcgggctgtgtctgtgcatgaggaccagctgcaggccccagctgagcggcccctgcggctgcagaggagccctgtgctgaagaggcggcccaagctggaggccccacccagccccagcctgggcagcggcctgggcacagagcccctgcccccccagcccacagagcccagcagccctgagaggagcccccccagccctgccacagaccagaggggcggcggccccaacccctag

SEQ ID NO: 167807 - DNA, 1335 bp, synthetic construct
  misc_feature 1..1335: note = Description of Artificial Sequence: Synthetic coding sequence
  source 1..1335: mol_type = other DNA
atgcccccagccctgcctgccccagatggaggagagcccagcctgctggagcccggggagctggagggcctcttcttccctgaggagaaggaggaggagaaggagaaggatgacagccccccccagaagtggccagagctgagccacggcctgcacctggtgcccttcatccacagcgctgctgaggaggccgagcctgagcctgagctggccgcccctggagaagatgctgagccccaggccggccccagcgcccggggcagccccagccctgctgcccctggccccccagctggccccctgcccaggatggacctgcccctggccggccagcccctgcggcaccccacccgggcccggccccggccccggcggcagcaccaccacaggcctcctcctgggggcccccaggtgcccccagccctgccccaggagggcaatggcctgagcgcccgggtggatgagggcgtggaggagttcttcagcaagaggctcatccagcaggaccggctgtgggcccctgaggaggaccctgccacagagggcggggccacccctgtgcccaggaccctgaggaagaagctgggcaccctgtttgccttcaagaagcccaggagcacccggggccccaggacagacctggagaccagccctggggccgcccccaggaccaggaagaccacctttggagacctgctgcggccccccacccggcccagcagaggagaggagctgggcggcgctgagggggacaccagcagcccagaccctgctggccgcagccggccccgctacacccgggacagcaaggcctacagcatgatcctgctgcctgctgaggaggaggccaccctgggcgcccggccagacaagaggcggcccctggagcggggggagacagagctggcccccagctttgagcagagggtgcaggtgatgctgcagagaattggagtgtcccggggcagcggcggcgctgagggcaagaggaagcagagcaaggatggagagatcaagaaggccggcagtgatggagacatcatggacagcagcacagaggccccacccatcagcatcaagagcaggacccacagcgtgtctgctgaccccagctgccggcccggccctggcagccagggccctgagagcgccacctggaagaccctgggccagcagctgaatgctgagctgcggagccggggctggggccagcaggacggccctggcccccccagccctggccagagccccagcccctgcaggaccccaccccagacagcctgggccagccagaggaccctggcctgggcccctgagatgaagaatggcccctag

SEQ ID NO: 167808 - DNA, 4119 bp, synthetic construct
  misc_feature 1..4119: note = Description of Artificial Sequence: Synthetic coding sequence
  source 1..4119: mol_type = other DNA
atggcccagaccccagatggcatcagctgtgagctgcggggggagatcacccgcttcctgtggcccaaggaggtggagctgctgctgaagacctggctgcccggggagggcgctgtgcagaaccacgtgctggccctgctgcgctggagggcctacctgctgcacaccacctgcctgcccctgcgggtggactgcaccttctcctacctggaggtgcaggccatggccctgcaggagaccccaccccaggtgacctttgagctggagagcctgcgggagctggtgctggagttccctggggtggccgccctggagcagctggcccagcacgtggccgccgccatcaagaaggtgttccccaggagcaccctgggcaagctgttcagaagacccaccccagcctccatgctggcccggctggagaggagcagccccagcgagagcacagacccctgcagcccctgtggcggcttcctggagacctatgaggccctgtgtgactacaacggcttccccttccgggaggagatccagtgggatgtggacaccatctaccaccggcagggctgccgccacttcagcctgggggacttcagccacctgggcagccgggacctggccctgtctgtggccgccctgagctacaacctgtggttccgctgcctgagctgtgtggacatgaagctgagcctggaggtgtctgagcagatcctgcacatgatgagccagagcagccacctggaggagctggtgctggagacctgcagcctgcggggggactttgtgcggcggctggcccaggccctggccggccacagcagcagcggcctgcgggagctgagcctggccggcaacctgctggatgaccggggcatgacagccctgagccgccacctggagcgctgccctggggccctgcggcggctgagcctggcccagacaggcctgaccccccggggcatgagggccctgggccgggccctggccaccaatgctgcctttgacagcaccctgacccacctggacctgagcggcaaccctggggccctgggcgccagcgaggacagcggcggcctgtacagcttcctgagccggcccaacgtgctgtccttcctgaacctggccggcacagacacagccctggacaccctgtttgctgctgtgtcccggggctgctgcaccagcctgacccacctggatgccagcagaaatgtgttcagcaggaccaagagcagagctgccccagctgccctgcagctgttcctgagccgggcccggaccctgcggcacctgggcctggccggctgcaagctgcccccagatgccctgcgggccctgctggatggcctggccctgaacacccacctgcgggacctgcacctggacctgagcgcctgtgagctgcggtctgctggggcccaggtgatccaggacctggtgtgtgatgctggagctgtgagcagcctggacctggccgacaatggcttcggcagtgacatggtgaccctggtgctggccatcggccgcagccgcagcctgcggcacgtggccctgggcaggaacttcaacgtgcgctgcaaggagaccctggatgatgtgctgcacagaattgtgcagctgatgcaggatgatgactgccccctgcagagcctgtctgtggccgagagccggctgaagctgggcgcctctgtgctgctgcgggccctggccaccaaccccaacctgacagccctggacatctctggaaatgccatgggagatgctggggccaagctgctggccaaggccctgcgggtgaacagccggctgcggtctgtggtgtgggacaggaaccacaccagcgccctgggcctgctggatgtggcccaggccctggagcagaaccacagcctgaaggccatgcccctgcccctgaatgatgtggcccaggcccagaggagcaggcctgagctgacagcccgggctgtgcaccagatccaggcctgcctgctgaggaacaacagagctgaccctgccagcagtgaccacaccacccggctgcagcccctgggcctggtgtctgaccccagcgagcaggaggtgaatgagctgtgccagagcgtgcaggagcacgtggagctgctgggctgtggggccggcccccagggcgaggccgctgtgcggcaggccgaggatgccatccagaatgccaacttcagcctgagcatcctgcccatcctgtatgaagctggcagcagccccagccaccactggcagctgggccagaagctggagggcctgctgcggcaggtgggggaggtgtgccggcaggacatccaggacttcacccaggccaccctggacacagcccggagcctgtgcccccagatgctgcagggcagctcctggagggagcagctggagggcgtgctggccggcagccggggcctgcctgagctgctgcctgagcagctgctgcaggatgccttcacccggctgcgggacatgaggctgagcatcaccggcaccctggccgagagcatcgtggcccaggccctggccggcctgtctgctgcccgggaccagctggtggagagcctggcccagcaggccaccgtgaccatgcccccagccctgcctgccccagatggaggagagcccagcctgctggagcctggagagctggagggcctcttcttccctgaggagaaggaggaggagaaggagaaggatgacagccccccccagaagtggccagagctgagccacggcctgcacctggtgcccttcatccacagcgctgctgaggaggccgagcctgagcctgagctggccgcccctggagaagatgctgagccccaggccggccccagcgcccggggcagccccagccctgctgcccctggccccccagctggccccctgcccaggatggacctgcccctggccggccagcccctgcggcaccccacccgggcccggccccggccccggcggcagcaccaccaccggcccccacctgggggcccccaggtgcccccagccctgccccaggagggcaatggcctgagcgcccgggtggatgaaggagtggaggagttcttcagcaagaggctcatccagcaggaccggctgtgggccccagaagaagatcctgccacagaaggaggagccacccctgtgcccaggaccctgaggaagaagctgggcaccctgtttgccttcaagaagcccaggagcacccggggccccaggacagacctggagaccagccctggagctgcccccaggaccaggaagaccaccttcggggacctgctgcggccccccacccggcccagcagaggagaggagctgggcggcgctgagggggacaccagcagcccagaccctgctggccgcagccggccccgctacacccgggacagcaaggcctacagcatgatcctgctgcctgctgaggaggaggccaccctgggcgcccggccagacaagagaagacccctggagcggggggagacagagctggcccccagctttgagcagagggtgcaggtgatgctgcagagaattggagtgtcccggggcagcggcggcgctgagggcaagaggaagcagagcaaggatggagagatcaagaaggccggcagtgatggagacatcatggacagcagcacagaggccccacccatcagcatcaagagcaggacccacagcgtgtctgctgaccccagctgcaggcctggccctggcagccagggccctgagagcgccacctggaagaccctgggccagcagctgaatgctgagctgcggagccggggctggggccagcaggacggccctggcccccccagccctggccagagccccagcccctgcaggaccagccccagcccagacagcctgggcctgcctgaggacccctgcctgggccccagaaatgaggagcggcccctgcggctgcagaggagccctgtgctgaagagaagacccaagctggaggccccacccagccccagcctgggcagcggcctgggcacagagcccctgcccccccagcccacagagcccagcagccctgagaggagcccccccagccctgccacagaccagagaggaggcggccccaacccctag

SEQ ID NO: 167809 - DNA, 1305 bp, synthetic construct
  misc_feature 1..1305: note = Description of Artificial Sequence: Synthetic coding sequence
  source 1..1305: mol_type = other DNA
atgggcatgggcagaggagctggccgcagcgccctgggcttctggcccaccctggccttcctgctgtgcagcttccctgctgccaccagcccctgcaagatcctgaagtgcaacagcgagttctggagcgccaccagcggcagccacgccccagccagtgatgacaccccagagttctgtgccgccctgcggagctatgccctgtgcaccaggagaacagcccggacctgccgcggggacctggcctaccacagcgctgtgcacggcatcgaggacctgatgagccagcacaactgcagcaaggatggccccaccagccagccccggctgcggaccctgcccccagctggggacagccaggagaggagtgacagccctgagatctgccactatgagaagagcttccacaagcacagcgccacccccaactacacccactgcggcctgtttggagacccccacctgcggaccttcacagaccgcttccagacctgcaaggtgcagggcgcctggcccctgattgacaacaactacctgaatgtgcaggtgaccaacacccctgtgctgcccggcagcgctgccacagccaccagcaagctgaccatcatcttcaagaacttccaggagtgtgtggaccagaaggtgtaccaggccgagatggatgagctgcctgctgcctttgtggatggcagcaagaatggaggagacaagcacggggccaacagcctgaagatcacagagaaggtgtctggccagcacgtggagatccaggccaagtacatcggcaccaccatcgtggtgcggcaggtgggccgctacctgacctttgctgtgaggatgcctgaggaggtggtgaatgctgtggaggactgggacagccagggcctgtacctgtgcctgcggggctgccccctgaaccagcagattgacttccaggccttccacaccaatgctgagggcactggagcccggcggctggccgccgccagccctgcccccacagcccctgagaccttcccctatgaaacagctgtggccaagtgcaaggagaagctgcctgtggaggacctgtactaccaggcctgtgtgtttgacctgctgaccactggagatgtgaacttcaccctggccgcctactatgccctggaggatgtgaagatgctgcacagcaacaaggacaagctgcacctgtatgacaggacccgggacctgcccggccgggctgctgctggcctgcccctggccccccggcccctgctgggcgccctggtgcccctgctggccctgctgcctgtgttctgctag

SEQ ID NO: 167810 - DNA, 1353 bp, synthetic construct
  misc_feature 1..1353: note = Description of Artificial Sequence: Synthetic coding sequence
  source 1..1353: mol_type = other DNA
atgcagcccccccgggagcggctggtggtgacaggccgggccggctggatgggcatgggcagaggagctggccgcagcgccctgggcttctggcccaccctggccttcctgctgtgcagcttccctgctgccaccagcccctgcaagatcctgaagtgcaacagcgagttctggagcgccaccagcggcagccacgccccagccagtgatgacaccccagagttctgtgccgccctgcggagctatgccctgtgcaccaggagaacagcccggacctgccgcggggacctggcctaccacagcgctgtgcacggcatcgaggacctgatgagccagcacaactgcagcaaggatggccccaccagccagccccggctgcggaccctgcccccagctggggacagccaggagaggagtgacagccctgagatctgccactatgagaagagcttccacaagcacagcgccacccccaactacacccactgcggcctgtttggagacccccacctgcggaccttcacagaccgcttccagacctgcaaggtgcagggcgcctggcccctgattgacaacaactacctgaatgtgcaggtgaccaacacccctgtgctgcccggcagcgctgccacagccaccagcaagctgaccatcatcttcaagaacttccaggagtgtgtggaccagaaggtgtaccaggccgagatggatgagctgcctgctgcctttgtggatggcagcaagaatggaggagacaagcacggggccaacagcctgaagatcacagagaaggtgtctggccagcacgtggagatccaggccaagtacatcggcaccaccatcgtggtgcggcaggtgggccgctacctgacctttgctgtgaggatgcctgaggaggtggtgaatgctgtggaggactgggacagccagggcctgtacctgtgcctgcggggctgccccctgaaccagcagattgacttccaggccttccacaccaatgctgagggcactggagcccggcggctggccgccgccagccctgcccccacagcccctgagaccttcccctatgaaacagctgtggccaagtgcaaggagaagctgcctgtggaggacctgtactaccaggcctgtgtgtttgacctgctgaccactggagatgtgaacttcaccctggccgcctactatgccctggaggatgtgaagatgctgcacagcaacaaggacaagctgcacctgtatgacaggacccgggacctgcccggccgggctgctgctggcctgcccctggccccccggcccctgctgggcgccctggtgcccctgctggccctgctgcctgtgttctgctag

SEQ ID NO: 167811 - DNA, 1305 bp, synthetic construct; identical to SEQ ID NO: 167809
  misc_feature 1..1305: note = Description of Artificial Sequence: Synthetic coding sequence
  source 1..1305: mol_type = other DNA

SEQ ID NO: 167812 - DNA, 1026 bp, synthetic construct
  misc_feature 1..1026: note = Description of Artificial Sequence: Synthetic coding sequence
  source 1..1026: mol_type = other DNA
atgagccagcacaactgcagcaaggatggccccaccagccagccccggctgcggaccctgcccccagctggggacagccaggagaggagtgacagccctgagatctgccactatgagaagagcttccacaagcacagcgccacccccaactacacccactgcggcctgtttggagacccccacctgcggaccttcacagaccgcttccagacctgcaaggtgcagggcgcctggcccctgattgacaacaactacctgaatgtgcaggtgaccaacacccctgtgctgcccggcagcgctgccacagccaccagcaagctgaccatcatcttcaagaacttccaggagtgtgtggaccagaaggtgtaccaggccgagatggatgagctgcctgctgcctttgtggatggcagcaagaatggaggagacaagcatggagccaacagcctgaagatcacagagaaggtgtctggccagcacgtggagatccaggccaagtacatcggcaccaccatcgtggtgcggcaggtgggccgctacctgacctttgctgtgaggatgcctgaggaggtggtgaatgctgtggaggactgggacagccagggcctgtacctgtgcctgcggggctgccccctgaaccagcagattgacttccaggccttccacaccaatgctgagggcaccggggcccggcggctggccgccgccagccctgcccccacagcccctgagaccttcccctatgaaacagctgtggccaagtgcaaggagaagctgcctgtggaggacctgtactaccaggcctgtgtgtttgacctgctgaccactggagatgtgaacttcaccctggccgcctactatgccctggaggatgtgaagatgctgcacagcaacaaggacaagctgcacctgtatgacaggacccgggacctgcccggccgggctgctgctggcctgcccctggccccccggcccctgctgggcgccctggtgcccctgctggccctgctgcccgtcttctgctag

SEQ ID NO: 167813 - DNA, 1305 bp, synthetic construct; identical to SEQ ID NO: 167809
  misc_feature 1..1305: note = Description of Artificial Sequence: Synthetic coding sequence
  source 1..1305: mol_type = other DNA

SEQ ID NO: 167814 - DNA, 1377 bp, synthetic construct
  misc_feature 1..1377: note = Description of Artificial Sequence: Synthetic coding sequence
  source 1..1377: mol_type = other DNA
atgggcggcctgggccccaggagagctggcaccagccgggagcggctggtggtgacaggccgggccggctggatgggcatgggcagaggagctggccgcagcgccctgggcttctggcccaccctggccttcctgctgtgcagcttccctgctgccaccagcccctgcaagatcctgaagtgcaacagcgagttctggagcgccaccagcggcagccacgccccagccagtgatgacaccccagagttctgtgccgccctgcggagctatgccctgtgcaccaggagaacagcccggacctgccgcggggacctggcctaccacagcgctgtgcacggcatcgaggacctgatgagccagcacaactgcagcaaggatggccccaccagccagccccggctgcggaccctgcccccagctggggacagccaggagaggagtgacagccctgagatctgccactatgagaagagcttccacaagcacagcgccacccccaactacacccactgcggcctgtttggagacccccacctgcggaccttcacagaccgcttccagacctgcaaggtgcagggcgcctggcccctgattgacaacaactacctgaatgtgcaggtgaccaacacccctgtgctgcccggcagcgctgccacagccaccagcaagctgaccatcatcttcaagaacttccaggagtgtgtggaccagaaggtgtaccaggccgagatggatgagctgcctgctgcctttgtggatggcagcaagaatggaggagacaagcacggggccaacagcctgaagatcacagagaaggtgtctggccagcacgtggagatccaggccaagtacatcggcaccaccatcgtggtgcggcaggtgggccgctacctgacctttgctgtgaggatgcctgaggaggtggtgaatgctgtggaggactgggacagccagggcctgtacctgtgcctgcggggctgccccctgaaccagcagattgacttccaggccttccacaccaatgctgagggcactggagcccggcggctggccgccgccagccctgcccccacagcccctgagaccttcccctatgaaacagctgtggccaagtgcaaggagaagctgcctgtggaggacctgtactaccaggcctgtgtgtttgacctgctgaccactggagatgtgaacttcaccctggccgcctactatgccctggaggatgtgaagatgctgcacagcaacaaggacaagctgcacctgtatgacaggacccgggacctgcccggccgggctgctgctggcctgcccctggccccccggcccctgctgggcgccctggtgcccctgctggccctgctgcctgtgttctgctag

SEQ ID NO: 167815 - DNA, 1437 bp, synthetic construct
  misc_feature 1..1437: note = Description of Artificial Sequence: Synthetic coding sequence
  source 1..1437: mol_type = other DNA
atgatcaggaagaagaggaagaggtctgcccctcctggcccctgccgcagccacggccccaggcctgccacagccccagcccccccacccagccctgagcccaccaggcctgcctggacaggcatgggcctgcgggccgcccccagcagcgctgctgctgctgctgctgaggtggagcagaggaggagccctggcctgtgccccccacccctggagctgctgctgctgctgctcttcagcctgggcctgctgcacgccggggactgccagcagcctgcccagtgccgcatccagaagtgcaccacagactttgtgtccctgaccagccacctgaacagcgctgtggatggctttgacagcgagttctgcaaggccctgcgggcctatgccggctgcacccagaggaccagcaaggcctgccggggcaacctggtgtaccacagcgctgtgctgggcatcagtgacctgatgagccagaggaactgcagcaaggatggccccaccagcagcaccaaccctgaggtgacccatgacccctgcaactaccacagccacgccggggcccgggagcaccggcggggggaccagaacccccccagctacctgttctgtggcctgtttggagacccccacctgcggaccttcaaggacaacttccagacctgcaaggtggagggcgcctggcccctgattgacaacaactacctgtctgtgcaggtgaccaacgtgcctgtggtgcccggcagcagcgccacagccaccaacaagatcaccatcatcttcaaggcccaccacgagtgcacagaccagaaggtgtaccaggccgtgacagatgacctgcctgctgcctttgtggatggcaccaccagcggcggggacagtgatgccaagagcctgagaattgtggagcgggagagcggccactacgtggagatgcacgcccgctacatcggcaccaccgtgtttgtgcggcaggtgggccgctacctgaccctggccatccgcatgcctgaggacctggccatgtcctatgaggagagccaggacctgcagctgtgtgtgaatggctgccccctgtctgaaagaattgatgatggccagggccaggtgtctgccatcctgggccacagcctgcccaggaccagcctggtgcaggcctggccaggctacaccctggagacagccaacacccagtgccacgagaagatgcctgtgaaggacatctacttccagagctgtgtgtttgacctgctgaccactggagatgccaacttcaccgctgctgcccacagcgccctggaggatgtggaggccctgcaccccaggaaggagcgctggcacatcttccccagcagtggaaatggcaccccccggggcggcagtgacctgtctgtgtccctgggcctgacctgcctgatcctgattgtgttcctgtag

SEQ ID NO: 167816 - DNA, 1314 bp, synthetic construct
  misc_feature 1..1314: note = Description of Artificial Sequence: Synthetic coding sequence
  source 1..1314: mol_type = other DNA
atgggcctgcgggccgcccccagcagcgctgctgctgctgctgctgaggtggagcagaggaggagccctggcctgtgccccccacccctggagctgctgctgctgctgctcttcagcctgggcctgctgcatgctggggactgccagcagcctgcccagtgccgcatccagaagtgcaccacagactttgtgtccctgaccagccacctgaacagcgctgtggatggctttgattctgagttctgcaaggccctgcgggcctatgccggctgcacccagaggaccagcaaggcctgccggggcaacctggtgtaccacagcgctgtgctgggcatcagtgacctgatgagccagaggaactgcagcaaggatggccccaccagcagcaccaaccctgaggtgacccatgacccctgcaactaccacagccatgctggggcccgggagcacagaagaggagaccagaaccccccatcctacctgttctgtggcctgtttggagacccccacctgcggaccttcaaggacaacttccagacctgcaaggtggagggcgcctggcccctgattgacaacaactacctgtctgtgcaggtgaccaacgtgcctgtggtgcccggcagcagcgccacagccaccaacaagatcaccatcatcttcaaggcccaccatgaatgtacagaccagaaggtgtaccaggccgtgacagatgacctgcctgctgcctttgtggatggcaccaccagcggcggggacagtgatgccaagagcctgcgcatcgtggagcgggagagcggccactacgtggagatgcacgcccgctacatcggcaccaccgtgtttgtgcggcaggtgggccgctacctgaccctggccatccgcatgcctgaggacctggccatgtcctatgaggagagccaggacctgcagctgtgtgtgaatggctgccccctgtctgaaagaattgatgatggccagggccaggtgtctgccatcctgggccacagcctgcccaggaccagcctggtgcaggcctggccaggctacaccctggagacagccaacacccagtgccacgagaagatgcctgtgaaggacatctacttccagagctgtgtgtttgacctgctgaccactggagatgccaacttcaccgctgctgcccacagcgccctggaggatgtggaggccctgcaccccaggaaggagcgctggcacatcttccccagcagtggaaatggcaccccccggggcggcagtgacctgtctgtgtccctgggcctgacctgcctgatcctgattgtgttcctgtag

SEQ ID NO: 167817 - DNA, 1176 bp, synthetic construct
  misc_feature 1..1176: note = Description of Artificial Sequence: Synthetic coding sequence
  source 1..1176: mol_type = other DNA
atgattgaggtggtggccgagctgagccggggccctgtgttcctggccggggaggccctggagtgtgtggtgacagtgaccaaccccctgcccccaacagccaccagcgccagcagcgaggccctggcctgggccagcgcccagatccactgccagttccacgccagcgagagccgggtggccctgcccccaccagacagcagccagccagatgtgcagcctgacagccagaccgtcttcctgccccacagaggagagcggggccagtgcatcctgagcaccccacccaagatcctcttctgtgacctgcggctggaccctggagagagcaagagctacagctacagcgaggtgctgcccatcgagggcccccccagcttccggggccagagcgtgaagtatgtgtacaagctgaccatcggctgccagagggtgaacagccccatcaccctgctgcgggtgcccctgcgggtgctggtgctgaccggcctgcaggatgtgcgcttcccccaggatgaggccgtggcccccagcagccccttcctggaggaggatgaaggaggcaagaaggacagctggctggccgagctggccggggagcggctgatggccgccaccagctgccgcagcctgcacctgtacaacatcagtgatggccggggcaaggtgggcaccttcggcatcttcaagtctgtgtaccgcctgggagaagatgtggtgggcaccctgaacctgggggagggcaccgtggcctgcctgcagttctctgtgtccctgcagacagaggagcgggtgcagcctgagtaccagaggagaagaggagctggaggagtgcccagcgtgagccacgtgacccacgcccggcaccaggagagctgcctgcacaccaccaggaccagcttcagcctgcccatccccctgagcagcaccccaggcttctgcacagccatcgtgtccctgaagtggaggctgcactttgaatttgtgaccagccgggagcccggcctggtgctgctgccccctgtggagcagcctgagcccaccacctggacaggccctgagcaggtgcctgtggacaccttctcctgggacctgcccatcaaggtgctgcccaccagccccaccctggccagctatgctgcccctggccccagcaccagcaccatcaccatctag

SEQ ID NO: 167818 - DNA, 1296 bp, synthetic construct
  misc_feature 1..1296: note = Description of Artificial Sequence: Synthetic coding sequence
  source 1..1296: mol_type = other DNA
atgacccgggccctgagcggcctggcctgccgggccctgcctgctggccgggacagcgctgagggcctgggcgtgcccatccccagcgtggactatgcccggagtgacagcggggccgccatgattgaggtggtggccgagctgagccggggccctgtgttcctggccggggaggccctggagtgtgtggtgacagtgaccaaccccctgcccccaacagccaccagcgccagcagcgaggccctggcctgggccagcgcccagatccactgccagttccacgccagcgagagccgggtggccctgcccccaccagacagcagccagccagatgtgcagcctgacagccagaccgtcttcctgccccacagaggagagcggggccagtgcatcctgagcaccccacccaagatcctcttctgtgacctgcggctggaccctggagagagcaagagctacagctacagcgaggtgctgcccatcgagggcccccccagcttccggggccagagcgtgaagtatgtgtacaagctgaccatcggctgccagagggtgaacagccccatcaccctgctgcgggtgcccctgcgggtgctggtgctgaccggcctgcaggatgtgcgcttcccccaggatgaggccgtggcccccagcagccccttcctggaggaggatgaaggaggcaagaaggacagctggctggccgagctggccggggagcggctgatggccgccaccagctgccgcagcctgcacctgtacaacatcagtgatggccggggcaaggtgggcaccttcggcatcttcaagtctgtgtaccgcctgggagaagatgtggtgggcaccctgaacctgggggagggcaccgtggcctgcctgcagttctctgtgtccctgcagacagaggagcgggtgcagcctgagtaccagaggagaagaggagctggaggagtgcccagcgtgagccacgtgacccacgcccggcaccaggagagctgcctgcacaccaccaggaccagcttcagcctgcccatccccctgagcagcaccccaggcttctgcacagccatcgtgtccctgaagtggaggctgcactttgaatttgtgaccagccgggagcccggcctggtgctgctgccccctgtggagcagcctgagcccaccacctggacaggccctgagcaggtgcctgtggacaccttctcctgggacctgcccatcaaggtgctgcccaccagccccaccctggccagctatgctgcccctggccccagcaccagcaccatcaccatctag

SEQ ID NO: 167819 - DNA, 1119 bp, synthetic construct
  misc_feature 1..1119: note = Description of Artificial Sequence: Synthetic coding sequence
  source 1..1119: mol_type = other DNA
atgagcagcaagtaccccaggtctgtgcggcgctgcctgcccctgtgtgccctgaccctggaggccgccctgatcctgctcttctacttcttcacccactatgatgccagcctggaggaccagaagggcctggtggccagctaccaggtgggccaggacctgactgtgatggccgccctgggcctgggcttcctgaccagcaacttccgccgccacagctggagctctgtggccttcaacctcttcatgctggccctgggcgtgcagtgggccatcctgctggatggcttcctgagccagttccccccaggcaaggtggtgatcaccctcttcagcatccggctggccaccatgtctgccatgtctgtgctgatctctgctggagctgtgctgggcaaggtgaacctggcccagctggtggtgatggtgctggtggaggtgacagccctgggcaccctgaggatggtgatcagcaacatcttcaacacagactaccacatgaacctgcggcacttctacgtgtttgctgcctacttcggcctgactgtggcctggtgcctgcccaagcccctgcccaagggcacagaggacaatgaccagagggccaccatccccagcctgagcgccatgctgggcgccctcttcctgtggatgttctggcccagcgtgaacagcgccctgctgcggagccccatccagaggaagaatgccatgttcaacacctactatgccctggccgtgtctgtggtgacagccatcagcggcagcagcctggcccacccccagaggaagatctccatgacctacgtgcacagcgctgtgctggccggcggcgtggccgtgggcaccagctgccacctgatccccagcccctggctggccatggtgctgggcctggtggccggcctcatcagcatcggcggggccaagtgcctgcctgtgtgctgcaacagagtgctgggcatccaccacatctctgtgatgcacagcatcttcagcctgctgggcctgctgggggagatcacctacatcgtgctgctggtgctgcacacagtgtggaatggaaatggcatgtttgcccccaagagccagaacatggagagcaccagctgtggctag

SEQ ID NO: 167820 - DNA, 1254 bp, synthetic construct
  misc_feature 1..1254: note = Description of Artificial Sequence: Synthetic coding sequence
  source 1..1254: mol_type = other DNA
atgagcagcaagtaccccaggtctgtgcggcgctgcctgcccctgtgtgccctgaccctggaggccgccctgatcctgctcttctacttcttcacccactatgatgccagcctggaggaccagaagggcctggtggccagctaccaggtgggccaggacctgactgtgatggccgccctgggcctgggcttcctgaccagcaacttccgccgccacagctggagctctgtggccttcaacctcttcatgctggccctgggcgtgcagtgggccatcctgctggatggcttcctgagccagttccccccaggcaaggtggtgatcaccctcttcagcatccggctggccaccatgtctgccatgtctgtgctgatctctgctggagctgtgctgggcaaggtgaacctggcccagctggtggtgatggtgctggtggaggtgacagccctgggcaccctgaggatggtgatcagcaacatcttcaacacagactaccacatgaacctgcggcacttctacgtgtttgctgcctacttcggcctgactgtggcctggtgcctgcccaagcccctgcccaagggcacagaggacaatgaccagagggccaccatccccagcctgagcgccatgctgggcgccctcttcctgtggatgttctggcccagcgtgaacagcgccctgctgcggagccccatccagaggaagaatgccatgttcaacacctactatgccctggccgtgtctgtggtgacagccatcagcggcagcagcctggcccacccccagaggaagatctccatgacctacgtgcacagcgctgtgctggccggcggcgtggccgtgggcaccagctgccacctgatccccagcccctggctggccatggtgctgggcctggtggccggcctcatcagcatcggcggggccaagtgcctgcctgtgtgctgcaacagagtgctgggcatccaccacatctctgtgatgcacagcatcttcagcctgctgggcctgctgggggagatcacctacatcgtgctgctggtgctgcacacagtgtggaatggaaatggcatgattggcttccaggtgctgctgagcattggagagctgagcctggccatcgtcatcgccctgaccagcggcctgctgaccggcctgctgctgaacctgaagatctggaaggcccctcatgtggccaagtactttgatgaccaggtgttctggaagttcccccacctggccgtgggcttctag

SEQ ID NO: 167821 - DNA, 804 bp, synthetic construct
  misc_feature 1..804: note = Description of Artificial Sequence: Synthetic coding sequence
  source 1..804: mol_type = other DNA
atgagcagcaagtaccccaggtctgtgcggcgctgcctgcccctgtgtgccctgaccctggaggccgccctgatcctgctcttctacttcttcacccactatgatgccagcctggaggaccagaagggcctggtggccagctaccaggtgggccaggacctgactgtgatggccgccctgggcctgggcttcctgaccagcaacttccgccgccacagctggagctctgtggccttcaacctcttcatgctggccctgggcgtgcagtgggccatcctgctggatggcttcctgagccagttccccccaggcaaggtggtgatcaccctcttcagcatccggctggccaccatgtctgccatgtctgtgctgatctctgctggagctgtgctgggcaaggtgaacctggcccagctggtggtgatggtgctggtggaggtgacagccctgggcaccctgaggatggtgatcagcaacatcttcaacacctacgtgcacagcgctgtgctggccggcggcgtggccgtgggcaccagctgccacctgatccccagcccctggctggccatggtgctgggcctggtggccggcctcatcagcattggaggagccaagtgcctgcctgtgtgctgcaacagagtgctgggcatccaccacatctctgtgatgcacagcatcttcagcctgctgggcctgctgggggagatcacctacatcgtgctgctggtgctgcacacagtgtggaatggaaatggcatgtttgcccccaagagccagaacatggagagcaccagctgtggctag

SEQ ID NO: 167822 - DNA, 801 bp, synthetic construct
  misc_feature 1..801: note = Description of Artificial Sequence: Synthetic coding sequence
  source 1..801: mol_type = other DNA
atgagcagcaagtaccccaggtctgtgcggcgctgcctgcccctgtgtgccctgaccctggaggccgccctgatcctgctcttctacttcttcacccactatgatgccagcctggaggaccagaagggcctggtggccagctaccaggtgggccaggacctgactgtgatggccgccctgggcctgggcttcctgaccagcaacttccgccgccacagctggagctctgtggccttcaacctcttcatgctggccctgggcgtgcagtgggccatcctgctggatggcttcctgagccagttccccccaggcaaggtggtgatcaccctcttcagcatccggctggccaccatgtctgccatgtctgtgctgatctctgctggagctgtgctgggcaaggtgaacctggcccagctggtggtgatggtgctggtggaggtgacagccctgggcaccctgaggatggtgatcagcaacatcttcaacgtgtgctgcaacagagtgctgggcatccaccacatctctgtgatgcacagcatcttcagcctgctgggcctgctgggggagatcacctacatcgtgctgctggtgctgcacacagtgtggaatggaaatggcatgattggcttccaggtgctgctgagcatcggggagctgagcctggccatcgtgattgccctgaccagcggcctgctgaccggcctgctgctgaacctgaagatctggaaggccccccacgtggccaagtactttgatgaccaggtgttctggaagttcccccacctggccgtgggcttctag

SEQ ID NO: 167823 - DNA, 1206 bp, synthetic construct
  misc_feature 1..1206: note = Description of Artificial Sequence: Synthetic coding sequence
  source 1..1206: mol_type = other DNA
atgtacttcatcaaccagaggctcttcctgcggctgtggagggtgcctgtgatgagggccagccactgctaccagagccagggctggaggcctgtggccgtgggccaggacctgactgtgatggccgccctgggcctgggcttcctgaccagcaacttccgccgccacagctggagctctgtggccttcaacctcttcatgctggccctgggcgtgcagtgggccatcctgctggatggcttcctgagccagttccccccaggcaaggtggtgatcaccctcttcagcatccggctggccaccatgtctgccatgtctgtgctgatctctgctggagctgtgctgggcaaggtgaacctggcccagctggtggtgatggtgctggtggaggtgacagccctgggcaccctgaggatggtgatcagcaacatcttcaacacagactaccacatgaacctgcggcacttctacgtgtttgctgcctacttcggcctgactgtggcctggtgcctgcccaagcccctgcccaagggcacagaggacaatgaccagagggccaccatccccagcctgagcgccatgctgggcgccctcttcctgtggatgttctggcccagcgtgaacagcgccctgctgcggagccccatccagaggaagaatgccatgttcaacacctactatgccctggccgtgtctgtggtgacagccatcagcggcagcagcctggcccacccccagaggaagatctccatgacctacgtgcacagcgctgtgctggccggcggcgtggccgtgggcaccagctgccacctgatccccagcccctggctggccatggtgctgggcctggtggccggcctcatcagcatcggcggggccaagtgcctgcctgtgtgctgcaacagagtgctgggcatccaccacatctctgtgatgcacagcatcttcagcctgctgggcctgctgggggagatcacctacatcgtgctgctggtgctgcacacagtgtggaatggaaatggcatgattggcttccaggtgctgctgagcattggagagctgagcctggccatcgtcatcgccctgaccagcggcctgctgaccggcctgctgctgaacctgaagatctggaaggcccctcatgtggccaagtactttgatgaccaggtgttctggaagttcccccacctggccgtgggcttctag

SEQ ID NO: 167824 - DNA, 1065 bp, synthetic construct
  misc_feature 1..1065: note = Description of Artificial Sequence: Synthetic coding sequence
  source 1..1065: mol_type = other DNA
atgagcagcaagtaccccaggtctgtgcggcgctgcctgcccctgtgtgccctgaccctggaggccgccctgatcctgctcttctacttcttcacccactatgatgccagcctggaggaccagaagggcctggtggccagctaccaggtgggccaggacctgactgtgatggccgccctgggcctgggcttcctgaccagcaacttccgccgccacagctggagctctgtggccttcaacctcttcatgctggccctgggcgtgcagtgggccatcctgctggatggcttcctgagccagttccccccaggcaaggtggtgatcaccctcttcagcatccggctggccaccatgtctgccatgtctgtgctgatctctgctggagctgtgctgggcaaggtgaacctggcccagctggtggtgatggtgctggtggaggtgacagccctgggcaccctgaggatggtgatcagcaacatcttcaacacagactaccacatgaacctgcggcacttctacgtgtttgctgcctacttcggcctgactgtggcctggtgcctgcccaagcccctgcccaagggcacagaggacaatgaccagagggccaccatccccagcctgagcgccatgctgggcgccctcttcctgtggatgttctggcccagcgtgaacagcgccctgctgcggagccccatccagaggaagaatgccatgttcaacacctactatgccctggccgtgtctgtggtgacagccatcagcggcagcagcctggcccacccccagaggaagatctccatgacctacgtgcacagcgctgtgctggccggcggcgtggccgtgggcaccagctgccacctgatccccagcccctggctggccatggtgctgggcctggtggccggcctcatcagcatcggcggggccaagtgcctgcctgactggctgcccggccccccccagcactggggcacccagctgggccaccgggacagcagccacgtgtggagcccagacagatttgcccccaagagccagaacatggagagcaccagctgtggctag

SEQ ID NO: 167825 - DNA, 1206 bp, synthetic construct; identical to SEQ ID NO: 167823
  misc_feature 1..1206: note = Description of Artificial Sequence: Synthetic coding sequence
  source 1..1206: mol_type = other DNA

SEQ ID NO: 167826 - DNA, 1191 bp, synthetic construct
  misc_feature 1..1191: note = Description of Artificial Sequence: Synthetic coding sequence
  source 1..1191: mol_type = other DNA
atgagcagcaagtaccccaggtctgtgcggcgctgcctgcccctgtgtgccctgaccctggaggccgccctgatcctgctcttctacttcttcacccactatgatgccagcctggaggaccagaagggcctggtggccagctaccaggtgggccaggacctgactgtgatggccgccctgggcctgggcttcctgaccagcaacttccgccgccacagctggagctctgtggccttcaacctcttcatgctggccctgggcgtgcagtgggccatcctgctggatggcttcctgagccagttccccccaggcaaggtggtgatcaccctcttcagcatccggctggccaccatgtctgccatgtctgtgctgatctctgctggagctgtgctgggcaaggtgaacctggcccagctggtggtgatggtgctggtggaggtgacagccctgggcaccctgaggatggtgatcagcaacatcttcaacacagactaccacatgaacctgcggcacttctacgtgtttgctgcctacttcggcctgactgtggcctggtgcctgcccaagcccctgcccaagggcacagaggacaatgaccagagggccaccatccccagcctgagcgccatgctgggcgccctcttcctgtggatgttctggcccagcgtgaacagcgccctgctgcggagccccatccagaggaagaatgccatgttcaacacctactatgccctggccgtgtctgtggtgacagccatcagcggcagcagcctggcccacccccagaggaagatctccatgacctacgtgcacagcgctgtgctggccggcggcgtggccgtgggcaccagctgccacctgatccccagcccctggctggccatggtgctgggcctggtggccggcctcatcagcatcggcggggccaagtgcctgcctgtgtgctgcaacagagtgctgggcatccaccacatctctgtgatgcacagcatcttcagcctgctgggcctgctgggggagatcacctacatcgtgctgctggtgctgcacacagtgtggaatggaaatggcatcttcctgatctggctgctggacttcaagcagaagcaccccaggaagaccaggcctgtgcagaagcaggacaacttcctgagcctgctgcctgcctttgtgcgggagaagaggagctag

SEQ ID NO: 167827 - DNA, 927 bp, synthetic construct
  misc_feature 1..927: note = Description of Artificial Sequence: Synthetic coding sequence
  source 1..927: mol_type = other DNA
atgagcagcaagtaccccaggtctgtgcggcgctgcctgcccctgtgtgccctgaccctggaggccgccctgatcctgctcttctacttcttcacccactatgatgccagcctggaggaccagaagggcctggtggccagctaccaggtgggccaggacctgactgtgatggccgccctgggcctgggcttcctgaccagcaacttccgccgccacagctggagctctgtggccttcaacctcttcatgctggccctgggcgtgcagtgggccatcctgctggatggcttcctgagccagttccccccaggcaaggtggtgatcaccctcttcagcatccggctggccaccatgtctgccatgtctgtgctgatctctgctggagctgtgctgggcaaggtgaacctggcccagctggtggtgatggtgctggtggaggtgacagccctgggcaccctgaggatggtgatcagcaacatcttcaacacagactaccacatgaacctgcggcacttctacgtgtttgctgcctacttcggcctgactgtggcctggtgcctgcccaagcccctgcccaagggcacagaggacaatgaccagagggccaccatccccagcctgagcgccatgctgggcgccctcttcctgtggatgttctggcccagcgtgaacagcgccctgctgcggagccccatccagaggaagaatgccatgttcaacacctactatgccctggccgtgtctgtggtgacagccatcagcggcagcagcctggcccacccccagaggaagatctccatggactggctgcccggccccccccagcactggggcacccagctgggccaccgggacagcagccacgtgtggagcccagacagatttgcccccaagagccagaacatggagagcaccagctgtggctag

SEQ ID NO: 167828 - DNA, 1197 bp, synthetic construct
  misc_feature 1..1197: note = Description of Artificial Sequence: Synthetic coding sequence
  source 1..1197: mol_type = other DNA
atgagcagcaagtaccccaggtctgtgcggcgctgcctgcccctgtgtgccctgaccctggaggccgccctgatcctgctcttctacttcttcacccactatgatgccagcctggaggaccagaagggcctggtggccagctaccaggtgggccaggacctgactgtgatggccgccctgggcctgggcttcctgaccagcaacttccgccgccacagctggagctctgtggccttcaacctcttcatgctggccctgggcgtgcagtgggccatcctgctggatggcttcctgagccagttccccccaggcaaggtggtgatcaccctcttcagcatccggctggccaccatgtctgccatgtctgtgctgatctctgctggagctgtgctgggcaaggtgaacctggcccagctggtggtgatggtgctggtggaggtgacagccctgggcaccctgaggatggtgatcagcaacatcttcaacacagactaccacatgaacctgcggcacttctacgtgtttgctgcctacttcggcctgactgtggcctggtgcctgcccaagcccctgcccaagggcacagaggacaatgaccagagggccaccatccccagcctgagcgccatgctgggcgccctcttcctgtggatgttctggcccagcgtgaacagcgccctgctgcggagccccatccagaggaagaatgccatgttcaacacctactatgccctggccgtgtctgtggtgacagccatcagcggcagcagcctggcccacccccagaggaagatctccatgacctacgtgcacagcgctgtgctggccggcggcgtggccgtgggcaccagctgccacctgatccccagcccctggctggccatggtgctgggcctggtggccggcctcatcagcatcggcggggccaagtgcctgcctgtgtgctgcaacagagtgctgggcatcccccacctgcggcatgccctgcacctgcagctggccggcagcgcctggagggaccacctgcactgtgccgccggggccagctactgcctggagcggcagtggcatgactggctgcccggccccccccagcactggggcacccagctgggccaccgggacagcagccacgtgtggagcccagacagatttgcccccaagagccagaacatggagagcaccagctgtggctag

SEQ ID NO: 167829 - DNA, 939 bp, synthetic construct
  misc_feature 1..939: note = Description of Artificial Sequence: Synthetic coding sequence
  source 1..939: mol_type = other DNA
atgagcagcaagtaccccaggtctgtgcggcgctgcctgcccctgtgtgccctgaccctggaggccgccctgatcctgctcttctacttcttcacccactatgatgccagcctggaggaccagaagggcctggtggccagctaccaggtgggccaggacctgactgtgatggccgccctgggcctgggcttcctgaccagcaacttccgccgccacagctggagctctgtggccttcaacctcttcatgctggccctgggcgtgcagtgggccatcctgctggatggcttcctgagccagttccccccaggcaaggtggtgatcaccctcttcagcatccggctggccaccatgtctgccatgtctgtgctgatctctgctggagctgtgctgggcaaggtgaacctggcccagctggtggtgatggtgctggtggaggtgacagccctgggcaccctgaggatggtgatcagcaacatcttcaacacctacgtgcacagcgctgtgctggccggcggcgtggccgtgggcaccagctgccacctgatccccagcccctggctggccatggtgctgggcctggtggccggcctcatcagcattggaggagccaagtgcctgcctgtgtgctgcaacagagtgctgggcatccaccacatctctgtgatgcacagcatcttcagcctgctgggcctgctgggggagatcacctacatcgtgctgctggtgctgcacacagtgtggaatggaaatggcatgattggcttccaggtgctgctgagcatcggggagctgagcctggccatcgtgattgccctgaccagcggcctgctgaccggcctgctgctgaacctgaagatctggaaggccccccacgtggccaagtactttgatgaccaggtgttctggaagttcccccacctggccgtgggcttctag

SEQ ID NO: 167830 - DNA, 1041 bp, synthetic construct
  misc_feature 1..1041: note = Description of Artificial Sequence: Synthetic coding sequence
  source 1..1041: mol_type = other DNA
atgagcagcaagtaccccaggtctgtgcggcgctgcctgcccctgtgtgccctgaccctggaggccgccctgatcctgctcttctacttcttcacccactatgatgccagcctggaggaccagaagggcctggtggccagctaccaggtgggccaggacctgactgtgatggccgccctgggcctgggcttcctgaccagcaacttccgccgccacagctggagctctgtggccttcaacctcttcatgctggccctgggcgtgcagtgggccatcctgctggatggcttcctgagccagttccccccaggcaaggtggtgatcaccctcttcagcatccggctggccaccatgtctgccatgtctgtgctgatctctgctggagctgtgctgggcaaggtgaacctggcccagctggtggtgatggtgctggtggaggtgacagccctgggcaccctgaggatggtgatcagcaacatcttcaaccccagcgtgaacagcgccctgctgcggagccccatccagaggaagaatgccatgttcaacacctactatgccctggccgtgtctgtggtgacagccatcagcggcagcagcctggcccacccccagaggaagatctccatgacctacgtgcacagcgctgtgctggccggcggcgtggccgtgggcaccagctgccacctgatccccagcccctggctggccatggtgctgggcctggtggtgtgctgcaacagagtgctgggcatccaccacatctctgtgatgcacagcatcttcagcctgctgggcctgctgggggagatcacctacatcgtgctgctggtgctgcacacagtgtggaatggaaatggcatgattggcttccaggtgctgctgagcatcggggagctgagcctggccatcgtgattgccctgaccagcggcctgctgaccggcctgctgctgaacctgaagatctggaaggccccccacgtggccaagtactttgatgaccaggtgttctggaagttcccccacctggccgtgggcttctag

SEQ ID NO: 167831 - DNA, 1254 bp, synthetic construct
  misc_feature 1..1254: note = Description of Artificial Sequence: Synthetic coding sequence
  source 1..1254: mol_type = other DNA
atgagcagcaagtaccccaggtctgtgcggcgctgcctgcccctgtgggccctgaccctggaggccgccctgatcctgctcttctacttcttcacccactatgatgccagcctggaggaccagaagggcctggtggccagctaccaggtgggccaggacctgactgtgatggccgccatcggcctgggcttcctgaccagcagcttccgccgccacagctggagctctgtggccttcaacctcttcatgctggccctgggcgtgcagtgggccatcctgctggatggcttcctgagccagttccccagcggcaaggtggtgatcaccctcttcagcatccggctggccaccatgtctgccctgtctgtgctgatctctgtggatgctgtgctgggcaaggtgaacctggcccagctggtggtgatggtgctggtggaggtgacagccctgggcaacctgaggatggtgatcagcaacatcttcaacacagactaccacatgaacatgatgcacatctacgtgtttgctgcctacttcggcctgtctgtggcctggtgcctgcccaagcccctgcctgagggcacagaggacaaggaccagacagccaccatccccagcctgagcgccatgctgggcgccctcttcctgtggatgttctggcccagcttcaacagcgccctgctgcggagccccatcgagaggaagaatgctgtgttcaacacctactatgctgtggccgtgtctgtggtgacagccatcagcggcagcagcctggcccacccccagggcaagatcagcaagacctacgtgcacagcgctgtgctggccggcggcgtggccgtgggcaccagctgccacctgatccccagcccctggctggccatggtgctgggcctggtggccggcctcatctctgtgggcggggccaagtacctgcccggctgctgcaacagagtgctgggcatcccccacagcagcatcatgggctacaacttcagcctgctgggcctgctgggggagatcatctacatcgtgctgctggtgctggacacagtgggcgctggaaatggcatgattggcttccaggtgctgctgagcattggagagctgagcctggccatcgtcatcgccctgatgagcggcctgctgaccggcctgctgctgaacctgaagatctggaaggcccctcatgaggccaagtactttgatgaccaggtgttctggaagttcccccacctggccgtgggcttctag

SEQ ID NO: 167832 - DNA, 1482 bp, synthetic construct
  misc_feature 1..1482: note = Description of Artificial Sequence: Synthetic coding sequence
  source 1..1482: mol_type = other DNA
atgagcagcaagtaccccaggtctgtgcggcgctgcctgcccctgtgggccctgaccctggaggccgccctgatcctgctcttctacttcttcacccactatgatgccagcctggaggaccagaagggcctggtggccagctaccaggtgggccaggacctgactgtgatggccgccatcggcctgggcttcctgaccagcagcttccgccgccacagctggagctctgtggccttcaacctcttcatgctggccctgggcgtgcagtgggccatcctgctggatggcttcctgagccagttccccagcggcaaggtggtgatcaccctcttcagcatccggctggccaccatgtctgccctgtctgtgctgatctctgtggatgctgtgctgggcaaggtgaacctggcccagctggtggtgatggtgctggtggaggtgacagccctgggcaacctgaggatggtgatcagcaacatcttcaacacagactaccacatgaacatgatgcacatctacgtgtttgctgcctacttcggcctgtctgtggcctggtgcctgcccaagcccctgcctgagggcacagaggacaaggaccagacagccaccatccccagcctgagcgccatgctgggcgccctcttcctgtggatgttctggcccagcttcaacagcgccctgctgcggagccccatcgagaggaagaatgctgtgttcaacacctactatgctgtggccgtgtctgtggtgacagccatcagcggcagcagcctggcccacccccagggcaagatcagcaagacctacgtgcacagcgctgtgctggccggcggcgtggccgtgggcaccagctgccacctgatccccagcccctggctggccatggtgctgggcctggtggccggcctcatctctgtgggcggggccaagtacctgcccggctgctgcaacagagtgctgggcatcccccacagcagcatcatgggctacaacttcagcctgctgggcctgctgggggagatcatctacatcgtgctgctggtgctggacacagtgggcgctggaaatggcatgagcctgggctggaacctggccgtgaagatggccgaggccggagatgaggagctgatgaggctggatgtgtcccagaggaaccacggcggcgctgctgtgcccaccggctcctggatgcccagcacagagaccaccatcgcccccaactacagagaccacatctctgtggtgtcctcctttggctgctggatcctgagcaagagcatccaggagaagcagggcctcttcaagaacaagaccaccagcagccactgctgcctgcacctgtatgtgagaaatgcccatgacagcaaggtgtccaatgtgcgggccggcaccggggtgcgggagaatggagtggagagcttcctgtgccacagcctgcggcgcatcagccccttcatcatgcactgccgcatccagcagtag

SEQ ID NO: 167833 - DNA, 1191 bp, synthetic construct
  misc_feature 1..1191: note = Description of Artificial Sequence: Synthetic coding sequence
  source 1..1191: mol_type = other DNA
atgagcagcaagtaccccaggtctgtgcggcgctgcctgcccctgtgggccctgaccctggaggccgccctgatcctgctcttctacttcttcacccactatgatgccagcctggaggaccagaagggcctggtggccagctaccaggtgggccaggacctgactgtgatggccgccatcggcctgggcttcctgaccagcagcttccgccgccacagctggagctctgtggccttcaacctcttcatgctggccctgggcgtgcagtgggccatcctgctggatggcttcctgagccagttccccagcggcaaggtggtgatcaccctcttcagcatccggctggccaccatgtctgccctgtctgtgctgatctctgtggatgctgtgctgggcaaggtgaacctggcccagctggtggtgatggtgctggtggaggtgacagccctgggcaacctgaggatggtgatcagcaacatcttcaacacagactaccacatgaacatgatgcacatctacgtgtttgctgcctacttcggcctgtctgtggcctggtgcctgcccaagcccctgcctgagggcacagaggacaaggaccagacagccaccatccccagcctgagcgccatgctgggcgccctcttcctgtggatgttctggcccagcttcaacagcgccctgctgcggagccccatcgagaggaagaatgctgtgttcaacacctactatgctgtggccgtgtctgtggtgacagccatcagcggcagcagcctggcccacccccagggcaagatcagcaagacctacgtgcacagcgctgtgctggccggcggcgtggccgtgggcaccagctgccacctgatccccagcccctggctggccatggtgctgggcctggtggccggcctcatctctgtgggcggggccaagtacctgcccggctgctgcaacagagtgctgggcatcccccacagcagcatcatgggctacaacttcagcctgctgggcctgctgggggagatcatctacatcgtgctgctggtgctggacacagtgggcgctggaaatggcatcttcctgatctggctgctggacttcaagcagaagcaccccaggaagaccaggcctgtgcagaagcaggacaacttcctgagcctgctgcctgcctttgtgcgggagaagaggagctag

SEQ ID NO: 167834 - DNA, 1137 bp, synthetic construct
  misc_feature 1..1137: note = Description of Artificial Sequence: Synthetic coding sequence
  source 1..1137: mol_type = other DNA
atgagcagcaagtaccccaggtctgtgcggcgctgcctgcccctgtgggccctgaccctggaggccgccctgatcctgctcttctacttcttcacccactatgatgccagcctggaggaccagaagggcctggtggccagctaccaggtgggccaggacctgactgtgatggccgccatcggcctgggcttcctgaccagcagcttccgccgccacagctggagctctgtggccttcaacctcttcatgctggccctgggcgtgcagtgggccatcctgctggatggcttcctgagccagttccccagcggcaaggtggtgatcaccctcttcagcatccggctggccaccatgtctgccctgtctgtgctgatctctgtggatgctgtgctgggcaaggtgaacctggcccagctggtggtgatggtgctggtggaggtgacagccctgggcaacctgaggatggtgatcagcaacatcttcaacacagactaccacatgaacatgatgcacatctacgtgtttgctgcctacttcggcctgtctgtggcctggtgcctgcccaagcccctgcctgagggcacagaggacaaggaccagacagccaccatccccagcctgagcgccatgctgggcgccctcttcctgtggatgttctggcccagcttcaacagcgccctgctgcggagccccatcgagaggaagaatgctgtgttcaacacctactatgctgtggccgtgtctgtggtgacagccatcagcggcagcagcctggcccacccccagggcaagatcagcaagacctacgtgcacagcgctgtgctggccggcggcgtggccgtgggcaccagctgccacctgatccccagcccctggctggccatggtgctgggcctggtggccggcctcatctctgtgggcggggccaagtacctgcctgactggctgcccggccccccccagcactggggcacccagctgggccaccgggacagcagccacgtgtggagcccagacagcttcctgatctggctgctggacttcaagcagaagcaccccaggaagaccaggcctgtgcagaagcaggacaacttcctgagcctgctgcctgcctttgtgcgggagaagaggagctag

SEQ ID NO: 167835 - DNA, 1464 bp, synthetic construct
  misc_feature 1..1464: note = Description of Artificial Sequence: Synthetic coding sequence
  source 1..1464: mol_type = other DNA
atgagcagcaagtaccccaggtctgtgcggcgctgcctgcccctgtgggccctgaccctggaggccgccctgatcctgctcttctacttcttcacccactatgatgccagcctggaggaccagaagggcctggtggccagctaccaggtgggccaggacctgactgtgatggccgccatcggcctgggcttcctgaccagcagcttccgccgccacagctggagctctgtggccttcaacctcttcatgctggccctgggcgtgcagtgggccatcctgctggatggcttcctgagccagttccccagcggcaaggtggtgatcaccctcttcagcatccggctggccaccatgtctgccctgtctgtgctgatctctgtggatgctgtgctgggcaaggtgaacctggcccagctggtggtgatggtgctggtggaggtgacagccctgggcaacctgaggatggtgatcagcaacatcttcaacacagactaccacatgaacatgatgcacatctacgtgtttgctgcctacttcggcctgtctgtggcctggtgcctgcccaagcccctgcctgagggcacagaggacaaggaccagacagccaccatccccagcctgagcgccatgctgggcgccctcttcctgtggatgttctggcccagcttcaacagcgccctgctgcggagccccatcgagaggaagaatgctgtgttcaacacctactatgctgtggccgtgtctgtggtgacagccatcagcggcagcagcctggcccacccccagggcaagatcagcaagacctacgtgcacagcgctgtgctggccggcggcgtggccgtgggcaccagctgccacctgatccccagcccctggctggccatggtgctgggcctggtggccggcctcatctctgtgggcggggccaagtacctgcccggctgctgcaacagagtgctgggcatcccccacagcagcatcatgggctacaacttcagcctgctgggcctgctgggggagatcatctacatcgtgctgctggtgctggacacagtgggcgctggaaatggcatgattggcttccaggtgctgctgagcattggagagctgagcctggccatcgtcatcgccctgatgagcggcctgctgaccggcctgctgctgaacctgaagatctggaaggcccctcatgaggccaagtactttgatgaccaggtgttctggaagttcccccacctggccgtgggcttcagcaagagcatccaggagaagcagggcctcttcaagaacaagaccaccagcagccactgctgcctgcacctgtatgtgagaaatgcccatgacagcaaggtgtccaatgtgcgggccggcaccggggtgcgggagaatggagtggagagcttcctgtgccacagcctgcggcgcatcagccccttcatcatgcactgccgcatccagcagtag

SEQ ID NO: 167836 - DNA, 1296 bp, synthetic construct
  misc_feature 1..1296: note = Description of Artificial Sequence: Synthetic coding sequence
  source 1..1296: mol_type = other DNA
atgagcagcaagtaccccaggtctgtgcggcgctgcctgcccctgtgggccctgaccctggaggccgccctgatcctgctcttctacttcttcacccactatgatgccagcctggaggaccagaagggcctggtggccagctaccaggtgggccaggacctgactgtgatggccgccatcggcctgggcttcctgaccagcagcttccgccgccacagctggagctctgtggccttcaacctcttcatgctggccctgggcgtgcagtgggccatcctgctggatggcttcctgagccagttccccagcggcaaggtggtgatcaccctcttcagcatccggctggccaccatgtctgccctgtctgtgctgatctctgtggatgctgtgctgggcaaggtgaacctggcccagctggtggtgatggtgctggtggaggtgacagccctgggcaacctgaggatggtgatcagcaacatcttcaacacagactaccacatgaacatgatgcacatctacgtgtttgctgcctacttcggcctgtctgtggcctggtgcctgcccaagcccctgcctgagggcacagaggacaaggaccagacagccaccatccccagcctgagcgccatgctgggcgccctcttcctgtggatgttctggcccagcttcaacagcgccctgctgcggagccccatcgagaggaagaatgctgtgttcaacacctactatgctgtggccgtgtctgtggtgacagccatcagcggcagcagcctggcccacccccagggcaagatcagcaagacctacgtgcacagcgctgtgctggccggcggcgtggccgtgggcaccagctgccacctgatccccagcccctggctggccatggtgctgggcctggtggccggcctcatctctgtgggcggggccaagtacctgcccggctgctgcaacagagtgctgggcatcccccacagcagcatcatgggctacaacttcagcctgctgggcctgctgggggagatcatctacatcgtgctgctggtgctggacacagtgggcgctggaaatggcatgagcctgggctggaacctggccgtgaagatggccgaggccggagatgaggagctgatgaggctggatgtgtcccagaggaaccacggcggcgctgctgtgcccaccggctcctggatgcccagcacagagaccaccatcgcccccaactacagagaccacatctctgtgggcctggccagccgcagcagcagcgccctgggcaacagcgcctggcccagctag

SEQ ID NO: 167837 - DNA, 966 bp, synthetic construct
  misc_feature 1..966: note = Description of Artificial Sequence: Synthetic coding sequence
  source 1..966: mol_type = other DNA
atgagcagcaagtaccccaggtctgtgcggcgctgcctgcccctgtgggccctgaccctggaggccgccctgatcctgctcttctacttcttcacccactatgatgccagcctggaggaccagaagggcctggtggccagctaccaggtgggccaggacctgactgtgatggccgccatcggcctgggcttcctgaccagcagcttccgccgccacagctggagctctgtggccttcaacctcttcatgctggccctgggcgtgcagtgggccatcctgctggatggcttcctgagccagttccccagcggcaaggtggtgatcaccctcttcagcatccggctggccaccatgtctgccctgtctgtgctgatctctgtggatgctgtgctgggcaaggtgaacctggcccagctggtggtgatggtgctggtggaggtgacagccctgggcaacctgaggatggtgatcagcaacatcttcaacacagactaccacatgaacatgatgcacatctacgtgtttgctgcctacttcggcctgtctgtggcctggtgcctgcccaagcccctgcctgagggcacagaggacaaggaccagacagccaccatccccagcctgagcgccatgctgggcgccctcttcctgtggatgttctggcccagcttcaacagcgccctgctgcggagccccatcgagaggaagaatgctgtgttcaacacctactatgctgtggccgtgtctgtggtgacagccatcagcggcagcagcctggcccacccccagggcaagatcagcaagacctacgtgcacagcgctgtgctggccggcggcgtggccgtgggcaccagctgccacctgatccccagcccctggctggccatggtgctgggcctggtggccggcctcatctctgtgggcggggccaagtacctgcccttcccccacctggccgtgggcttctag

SEQ ID NO: 167838 - DNA, 294 bp, synthetic construct
  misc_feature 1..294: note = Description of Artificial Sequence: Synthetic coding sequence
  source 1..294: mol_type = other DNA
atggccggcagccccagcagagctgctggaagaaggctgcagctgcccctgctgtgcctcttcctgcagggcgccacagctgtgctgtttgctgtgtttgtgcgctacaaccacaagacagatgctgccctgtggcacaggagcaaccacagcaatgctgacaatgagttctacttccgctacccaaatggagtgtccctgctgctgccccggctggagtgcaatggcaccatcagcgcccaccacaacctgtgcctgcccggcagcagtgacagccctgcctctgtgtcctag

SEQ ID NO: 167839 - DNA, 462 bp, synthetic construct
  misc_feature 1..462: note = Description of Artificial Sequence: Synthetic coding sequence
  source 1..462: mol_type = other DNA
atggccggcagccccagcagagctgctggaagaaggctgcagctgcccctgctgtgcctcttcctgcagggcgccacagctgtgctgtttgctgtgtttgtgcgctacaaccacaagacagatgctgccctgtggcacaggagcaaccacagcaatgctgacaatgagttctacttccgctaccccaaggagagccacagcgtggcccaggccggcgtgcagaggaggaacctgggcagcctgcagcccagccccccccggctgcccggccgggcctgccacggcctgcggggcctgtggctgccccacggcctgcctgctgccctgcggctgcagcagaggggcctgcacctgcccccaggccgcctgtgcccagctgtggtgcacacaggccctggcctgagccccctgctgccccgctggccccacccctgctggagaggagaacatgaccagtgctag

SEQ ID NO: 167840 - DNA, 1119 bp, synthetic construct
  misc_feature 1..1119: note = Description of Artificial Sequence: Synthetic coding sequence
  source 1..1119: mol_type = other DNA
atggtgtttgtgggcttcggcttcctgatggtgttcctgcagagatatggcttcagctctgtgggcttcaccttcctgctggccgcctttgccctgcagtggagcaccctggtgcagggcttcctgcacagcttccacggcggccacatccacgtgggcgtggagagcatgatcaatgctgacttctgtgccggggctgtgctgatcagctttggagctgtgctgggcaagacaggccccacccagctgctgctgatggccctgctggaggtggtgctgtttggcatcaatgaatttgtgctgctgcacctgctgggcgtgagagatgctgggggctccatgaccatccacacctttggagcctacttcggcctggtgctgagccgggtgctgtaccggccccagctggagaagagcaagcaccggcagggctctgtgtaccacagcgacctgtttgccatgattggcaccatcttcctgtggatcttctggcccagcttcaatgctgccctgacagccctgggcgccggccagcacaggacagccctgaacacctactacagcctggccgccagcaccctgggcacctttgccctgagcgccctggtgggagaagatggccgcctggacatggtgcacatccagaatgctgccctggccggcggcgtggtggtgggcaccagcagcgagatgatgctgaccccatttggagccctggccgccggcttcctggccggcaccgtgtccaccctgggctacaagttcttcacccccatcctggagagcaagttcaaggtgcaggacacctgtggggtgcacaacctgcacggcatgcctggggtgctgggcgccctgctgggcgtgctggtggccggcctggccacccatgaggcctatggagatggcctggagagcgtcttccccctgattgctgagggccagaggtctgccaccagccaggccatgcaccagctgtttggcctgtttgtgaccctgatgtttgcctctgtgggcggcggcctgggcggcctgctgctgaagctgcccttcctggacagccccccccggctgcctgccctgcggggccccagcagcctggccggggcctggagggcctag

SEQ ID NO: 167841 - DNA, 1374 bp, synthetic construct
  misc_feature 1..1374: note = Description of Artificial Sequence: Synthetic coding sequence
  source 1..1374: mol_type = other DNA
atggccggcagccccagcagagctgctggaagaaggctgcagctgcccctgctgtgcctcttcctgcagggcgccacagctgtgctgtttgctgtgtttgtgcgctacaaccacaagacagatgctgccctgtggcacaggagcaaccacagcaatgctgacaatgagttctacttccgctaccccagcttccaggatgtgcacgccatggtgtttgtgggcttcggcttcctgatggtgttcctgcagagatatggcttcagctctgtgggcttcaccttcctgctggccgcctttgccctgcagtggagcaccctggtgcagggcttcctgcacagcttccatggaggccacatccacgtgggcgtggagagcatgatcaatgctgacttctgtgccggggctgtgctgatcagctttggagctgtgctgggcaagacaggccccacccagctgctgctgatggccctgctggaggtggtgctgtttggcatcaatgaatttgtgctgctgcacctgctgggcgtgagagatgctgggggctccatgaccatccacaccttcggggcctacttcggcctggtgctgagccgggtgctgtaccggccccagctggagaagagcaagcaccggcagggctctgtgtaccacagcgacctgtttgccatgattggcaccatcttcctgtggatcttctggcccagcttcaatgctgccctgacagccctgggcgccggccagcacaggacagccctgaacacctactacagcctggccgccagcaccctgggcacctttgccctgagcgccctggtgggggaggatggccgcctggacatggtgcacatccagaatgctgccctggccggcggcgtggtggtgggcaccagcagcgagatgatgctgaccccatttggagccctggccgccggcttcctggccggcaccgtgtccaccctgggctacaagttcttcacccccatcctggagagcaagttcaaggtgcaggacacctgtggggtgcacaacctgcacggcatgcctggggtgctgggcgccctgctgggcgtgctggtggccggcctggccacccatgaggcctatggagatggcctggagagcgtcttccccctgattgctgagggccagaggtctgccaccagccaggccatgcaccagctgtttggcctgtttgtgaccctgatgtttgcctctgtgggcggcggcctgggcggcctgctgctgaagctgcccttcctggaccccccagacagccagcactatgaggaccaggtgcactggcaggtgcctggagaacatgaggacaaggcccagaggcccctgcgggtggaggaggccgacacccaggcctag

SEQ ID NO: 167842 - DNA, 1326 bp, synthetic construct
  misc_feature 1..1326: note = Description of Artificial Sequence: Synthetic coding sequence
  source 1..1326: mol_type = other DNA
atggccggcagccccagcagagctgctggaagaaggctgcagctgcccctgctgtgcctcttcctgcagggcgccacagctgtgctgtttgctgtgtttgtgcgctacaaccacaagacagatgctgccctgtggcacaggagcaaccacagcaatgctgacaatgagttctacttccgctaccccagcttccaggatgtgcacgccatggtgtttgtgggcttcggcttcctgatggtgttcctgcagagatatggcttcagctctgtgggcttcaccttcctgctggccgcctttgccctgcagtggagcaccctggtgcagggcttcctgcacagcttccatggaggccacatccacgtgggcgtggagagcatgatcaatgctgacttctgtgccggggctgtgctgatcagctttggagctgtgctgggcaagacaggccccacccagctgctgctgatggccctgctggaggtggtgctgtttggcatcaatgaatttgtgctgctgcacctgctgggcgtgagagatgctgggggctccatgaccatccacaccttcggggcctacttcggcctggtgctgagccgggtgctgtaccggccccagctggagaagagcaagcaccggcagggctctgtgtaccacagcgacctgtttgccatgattggcaccatcttcctgtggatcttctggcccagcttcaatgctgccctgacagccctgggcgccggccagcacaggacagccctgaacacctactacagcctggccgccagcaccctgggcacctttgccctgagcgccctggtgggggaggatggccgcctggacatggtgcacatccagaatgctgccctggccggcggcgtggtggtgggcaccagcagcgagatgatgctgaccccatttggagccctggccgccggcttcctggccggcaccgtgtccaccctgggctacaagttcttcacccccatcctggagagcaagttcaaggtgcaggacacctgtggggtgcacaacctgcacggcatgcctggggtgctgggcgccctgctgggcgtgctggtggccggcctggccacccatgaggcctatggagatggcctggagagcgtcttccccctgattgctgagggccagaggtctgccaccagccaggccatgcaccagctgtttggcctgtttgtgaccctgatgtttgcctctgtgggcggcggcctgggcggcctgctgctgaagctgcccttcctggacagccccccccggctgcctgccctgcggggccccagcagcctggccggggcctggagggcctag

SEQ ID NO: 167843 - DNA, 1230 bp, synthetic construct
  misc_feature 1..1230: note = Description of Artificial Sequence: Synthetic coding sequence
  source 1..1230: mol_type = other DNA
atggtgtttgtgggcttcggcttcctgatggtgttcctgcagagatatggcttcagctctgtgggcttcaccttcctgctggccgcctttgccctgcagtggagcaccctggtgcagggcttcctgcacagcttccacggcggccacatccacgtgggcgtggagagcatgatcaatgctgacttctgtgccggggctgtgctgatcagctttggagctgtgctgggcaagacaggccccacccagctgctgctgatggccctgctggaggtggtgctgtttggcatcaatgaatttgtgctgctgcacctgctgggcgtgcgggtgtggggcggcatggagagcggcgtgggcggcggccagggccagcccctgagccaggagcggggcggcggcggcggcgtgctgcccctgaccccaccaccccaggtgagagatgctgggggctccatgaccatccacaccttcggggcctacttcggcctggtgctgagccgggtgctgtaccggccccagctggagaagagcaagcaccggcagggctctgtgtaccacagcgacctgtttgccatgattggcaccatcttcctgtggatcttctggcccagcttcaatgctgccctgacagccctgggcgccggccagcacaggacagccctgaacacctactacagcctggccgccagcaccctgggcacctttgccctgagcgccctggtgggggaggatggccgcctggacatggtgcacatccagaatgctgccctggccggcggcgtggtggtgggcaccagcagcgagatgatgctgaccccatttggagccctggccgccggcttcctggccggcaccgtgtccaccctgggctacaagttcttcacccccatcctggagagcaagttcaaggtgcaggacacctgtggggtgcacaacctgcacggcatgcctggggtgctgggcgccctgctgggcgtgctggtggccggcctggccacccatgaggcctatggagatggcctggagagcgtcttccccctgattgctgagggccagaggtctgccaccagccaggccatgcaccagctgtttggcctgtttgtgaccctgatgtttgcctctgtgggcggcggcctgggcggcctgctgctgaagctgcccttcctggacagccccccccggctgcctgccctgcggggccccagcagcctggccggggcctggagggcctag

SEQ ID NO: 167844 - DNA, 1125 bp, synthetic construct
  misc_feature 1..1125: note = Description of Artificial Sequence: Synthetic coding sequence
  source 1..1125: mol_type = other DNA
atggtgtttgtgggcttcggcttcctgatggtgttcctgcagagatatggcttcagctctgtgggcttcaccttcctgctggccgcctttgccctgcagtggagcaccctggtgcagggcttcctgcacagcttccacggcggccacatccacgtgggcgtggagagcatgatcaatgctgacttctgtgccggggctgtgctgatcagctttggagctgtgctgggcaagacaggccccacccagctgctgctgatggccctgctggaggtggtgctgtttggcatcaatgaatttgtgctgctgcacctgctgggcgtgcgggtgtggggcggcatggagagcggcgtgggcggcggccagggccagcccctgagccaggagcggggcggcggcggcggcgtgctgcccctgaccccaccaccccaggtgagagatgctgggggctccatgaccatccacaccttcggggcctacttcggcctggtgctgagccgggtgctgtaccggccccagctggagaagagcaagcaccggcagggctctgtgtaccacagcgacctgtttgccatgattggcaccatcttcctgtggatcttctggcccagcttcaatgctgccctgacagccctgggcgccggccagcacaggacagccctgaacacctactacagcctggccgccagcaccctgggcacctttgccctgagcgccctggtgggggaggatggccgcctggacatgcccatcctggagagcaagttcaaggtgcaggacacctgtggggtgcacaacctgcacggcatgcctggggtgctgggcgccctgctgggcgtgctggtggccggcctggccacccatgaggcctatggagatggcctggagagcgtcttccccctgattgctgagggccagaggtctgccaccagccaggccatgcaccagctgtttggcctgtttgtgaccctgatgtttgcctctgtgggcggcggcctgggcggcatcatcctggtgctgtgcctgctggacccctgtgccctgtggcactgggtggcccccagctccatggtgggcggccgggaggccagccagatcctgccctaccaccaccagggcagctgctag

SEQ ID NO: 167845 - DNA, 687 bp, synthetic construct
  misc_feature 1..687: note = Description of Artificial Sequence: Synthetic coding sequence
  source 1..687: mol_type = other DNA
atggccggcagccccagcagagctgctggaagaaggctgcagctgcccctgctgtgcctcttcctgcagggcgccacagctgtgctgtttgctgtgtttgtgcgctacaaccacaagacagatgctgccctgtggcacaggagcaaccacagcaatgctgacaatgagttctacttccgctaccccaggaccatcttcctgtggatcttctggcccagcttcaatgctgccctgacagccctgggcgccggccagcacaggacagccctgaacacctactacagcctggccgccagcaccctgggcacctttgccctgagcgccctggtgggggaggatggccgcctggacatggtgcacatccagaatgctgccctggccggcggcgtggtggtgggcaccagcagcgagatgatgctgaccccatttggagccctggccgccggcttcctggccggcaccgtgtccaccctgggccccagcctgaaccagaacagcaagagcaagacccacgtggagagcaccacctccatgggctgccggggctcctggggccccagctggggcagcctgtggctggacctgccccccatgaagctgacagagatgggagagttcccccccaacccctactgcagccgccaccccagcggcatgaccagcgtcatcctcttccactgtgtgtag

SEQ ID NO: 167846 - DNA, 1440 bp, synthetic construct
  misc_feature 1..1440: note = Description of Artificial Sequence: Synthetic coding sequence
  source 1..1440: mol_type = other DNA
atggcctggaacaccaacctgcgctggaggctgcccctgacctgcctgctgctgcaggtgatcatggtgatcctgtttggagtgtttgtgcgctatgactttgaagcagatgcccactggtggagcgagaggacccacaagaacctgagtgacatggagaatgagttctactaccgctaccccagcttccaggatgtgcacgtgatggtgtttgtgggcttcggcttcctgatgaccttcctgcagagatatggcttctctgctgtgggcttcaacttcctgctggccgccttcggcatccagtgggccctgctgatgcagggctggttccacttcctgcaggaccgctacatcgtggtgggcgtggagaacctgatcaatgctgacttctgtgtggcctctgtgtgtgtggcctttggagctgtgctgggcaaggtgagccccatccagctgctgatcatgaccttcttccaggtgaccctgtttgctgtgaatgagttcatcctgctgaacctgctgaaggtgaaggatgctgggggctccatgaccatccacacctttggagcctacttcggcctgactgtgacccgcatcctgtacagaagaaacctggagcagagcaaggagcggcagaacagcgtgtaccagagcgacctgtttgccatgattggcaccctcttcctgtggatgtactggcccagcttcaacagcgccatctcctaccacggggacagccagcacagagctgccatcaacacctactgcagcctggccgcctgtgtgctgacctctgtggccatcagcagcgccctgcacaagaagggcaagctggacatggtgcacatccagaatgccaccctggccggcggcgtggccgtgggcacagctgctgagatgatgctgatgccctacggggccctgatcattggatttgtgtgtggcatcatcagcaccctgggctttgtgtacctgacccccttcctggagagccggctgcacatccaggacacctgtggcatcaacaacctgcacggcatccctggcatcatcggcggcatcgtgggcgctgtgacagctgccagcgccagcctggaggtgtatggcaaggagggcctggtgcacagctttgacttccagggcttcaacggggactggacagcccggacccagggcaagttccagatctacggcctgctggtgaccctggccatggccctgatgggcggcatcatcgtgggcctcatcctgcggctgcccttctggggccagcccagtgatgagaactgctttgaagatgctgtgtactgggagatgcctgagggcaacagcacagtgtacatccctgaggaccccaccttcaagcccagcggccccagcgtgcccagcgtgcccatggtgagccccctgcccatggccagctctgtgcccctggtgccctag

SEQ ID NO: 167847 - DNA, 1413 bp, synthetic construct
  misc_feature 1..1413: note = Description of Artificial Sequence: Synthetic coding sequence
  source 1..1413: mol_type = other DNA
atggcctggaacacctgcctgctgctgcaggtgatcatggtgatcctgtttggagtgtttgtgcgctatgactttgaagcagatgcccactggtggagcgagaggacccacaagaacctgagtgacatggagaatgagttctactaccgctaccccagcttccaggatgtgcacgtgatggtgtttgtgggcttcggcttcctgatgaccttcctgcagagatatggcttctctgctgtgggcttcaacttcctgctggccgccttcggcatccagtgggccctgctgatgcagggctggttccacttcctgcaggaccgctacatcgtggtgggcgtggagaacctgatcaatgctgacttctgtgtggcctctgtgtgtgtggccttcggggctgtgctgggcaaggtgagccccatccagctgctgatcatgaccttcttccaggtgaccctgtttgctgtgaatgagttcatcctgctgaacctgctgaaggtgaaggatgctgggggctccatgaccatccacaccttcggggcctacttcggcctgactgtgacccgcatcctgtacagaagaaacctggagcagagcaaggagcggcagaacagcgtgtaccagagcgacctgtttgccatgattggcaccctcttcctgtggatgtactggcccagcttcaacagcgccatctcctaccatggagacagccagcaccgggccgccatcaacacctactgcagcctggccgcctgtgtgctgacctctgtggccatcagcagcgccctgcacaagaagggcaagctggacatggtgcacatccagaatgccaccctggccggcggcgtggccgtgggcacagctgctgagatgatgctgatgccctatggagccctgatcatcggctttgtgtgtggcatcatcagcaccctgggctttgtgtacctgacccccttcctggagagccggctgcacatccaggacacctgtggcatcaacaacctgcacggcatccctggcatcattggaggcatcgtgggcgctgtgacagctgccagcgccagcctggaggtgtatggcaaggagggcctggtgcacagctttgacttccagggcttcaatggagactggacagcccggacccagggcaagttccagatctacggcctgctggtgaccctggccatggccctgatgggcggcatcatcgtgggcctcatcctgcggctgcccttctggggccagcccagtgatgagaactgctttgaagatgctgtgtactgggagatgcctgagggcaacagcacagtgtacatccctgaggaccccaccttcaagcccagcggccccagcgtgcccagcgtgcccatggtgagccccctgcccatggccagctctgtgcccctggtgccctag

SEQ ID NO: 167848 - DNA, 1338 bp, synthetic construct
  misc_feature 1..1338: note = Description of Artificial Sequence: Synthetic coding sequence
  source 1..1338: mol_type = other DNA
atggcctggaacaccaacctgcgctggaggctgcccctgacctgcctgctgctgcaggtgatcatggtgatcctgtttggagtgtttgtgcgctatgactttgaagcagatgcccactggtggagcgagaggacccacaagaacctgagtgacatggagaatgagttctactaccgctaccccagcttccaggatgtgcacgtgatggtgtttgtgggcttcggcttcctgatgaccttcctgcagagatatggcttctctgctgtgggcttcaacttcctgctggccgccttcggcatccagtgggccctgctgatgcagggctggttccacttcctgcaggaccgctacatcgtggtgggcgtggagaacctgatcaatgctgacttctgtgtggcctctgtgtgtgtggcctttggagctgtgctgggcaaggtgagccccatccagctgctgatcatgaccttcttccaggtgaccctgtttgctgtgaatgagttcatcctgctgaacctgctgaaggtgaaggatgctgggggctccatgaccatccacacctttggagcctacttcggcctgactgtgacccgcatcctgtacagaagaaacctggagcagagcaaggagcggcagaacagcgtgtaccagagcgacctgtttgccatgattggcaccctcttcctgtggatgtactggcccagcttcaacagcgccatctcctaccacggggacagccagcacagagctgccatcaacacctactgcagcctggccgcctgtgtgctgacctctgtggccatcagcagcgccctgcacaagaagggcaagctggacatggtgcacatccagaatgccaccctggccggcggcgtggccgtgggcacagctgctgagatgatgctgatgccctacggggccctgatcattggatttgtgtgtggcatcatcagcaccctgggctttgtgtacctgacccccttcctggagagccggctgcacatccaggacacctgtggcatcaacaacctgcacggcatccctggcatcatcggcggcatcgtgggcgctgtgacagctgccagcgccagcctggaggtgtatggcaaggagggcctggtgcacagctttgacttccagggcttcaacggggactggacagcccggacccagggcaagttccagatctacggcctgctggtgaccctggccatggccctgatgggcggcatcatcgtgggcctcatcctgcggctgcccttctggggccagcccagtgatgagaactgctttgaagatgctgtgtactgggaggacctggagctggcccccaaccagtag

SEQ ID NO: 167849 - DNA, 714 bp, synthetic construct
  misc_feature 1..714: note = Description of Artificial Sequence: Synthetic coding sequence
  source 1..714: mol_type = other DNA
tgagacagccagcacagagctgccatcaacacctactgcagcctggccgcctgtgtgctgacctctgtggccatcagcagcgccctgcacaagaagggcaagctggacatggtgcacatccagaatgccaccctggccggcggcgtggccgtgggcacagctgctgagatgatgctgatgccctacggggccctgatcattggatttgtgtgtggcatcatcagcaccctgggctttgtgtacctgacccccttcctggagagccggctgcacatccaggacacctgtggcatcaacaacctgcacggcatccctggcatcatcggcggcatcgtgggcgctgtgacagctgccagcgccagcctggaggtgtatggcaaggagggcctggtgcacagctttgacttccagggcttcaacggggactggacagcccggacccagggcaagttccagatctacggcctgctggtgaccctggccatggccctgatgggcggcatcatcgtgggcctcatcctgcggctgcccttctggggccagcccagtgatgagaactgctttgaagatgctgtgtactgggagatgcctgagggcaacagcacagtgtacatccctgaggaccccaccttcaagcccagcggccccagcgtgcccagcgtgcccatggtgagccccctgcccatggccagctctgtgcccctggtgccctag

SEQ ID NO: 167850 - DNA, 429 bp, synthetic construct
  misc_feature 1..429: note = Description of Artificial Sequence: Synthetic coding sequence
  source 1..429: mol_type = other DNA
atggctgctgctgtggccgccgccggggccggggagccccagagcccagatgagctgctgcccaagggagatgctgagaagccagaggaggagctggaggaggatgatgatgaggagctggatgagaccctgtctgagcggctgtggggcctgacagagatgtttcctgagcgggtgcgctctgctgctggggccacctttgacctgagcctgtttgtggcccagaagatgtaccgcttcagcagagctgccctgtggattggcaccaccagcttcatgatcctggtgctgcctgtggtgtttgaaacagagaagctgcagatggagcagcagcagcagctgcagcagaggcagatcctgctgggccccaacacaggcctgagcggcggcatgcctggggccctgcccagcctgcccgggaagatctag

SEQ ID NO: 167851 - DNA, 1083 bp, synthetic construct
  misc_feature 1..1083: note = Description of Artificial Sequence: Synthetic coding sequence
  source 1..1083: mol_type = other DNA
atgagccaggagcggcccaccttctaccggcaggagctgaacaagaccatctgggaggtgcctgagcgctaccagaacctgagccctgtgggcagcggggcctacggctctgtgtgtgccgcctttgacaccaagacaggcctgcgggtggccgtgaagaagctgagccggcccttccagagcatcatccacgccaagaggacctaccgggagctgcggctgctgaagcacatgaagcatgaaaatgtcatcggcctgctggatgtgttcaccccagcccggagcctggaggagttcaatgatgtgtacctggtgacccacctgatgggcgctgacctgaacaacatcgtgaagtgccagaagctgacagatgaccacgtgcagttcctgatctaccagatcctgcggggcctgaagtacatccacagcgctgacatcatccaccgggacctgaagcccagcaacctggccgtgaatgaagactgtgagctgaagatcctggactttggcctggcccggcacacagatgatgagatgacaggctacgtggccacccgctggtaccgggcccctgagatcatgctgaactggatgcactacaaccagacagtggacatctggagcgtgggctgcatcatggccgagctgctgaccggccgcaccctcttccctggaacagaccacatcaaccagctgcagcagatcatgaggctgaccggcaccccaccagcctacctgatcaacaggatgcccagccatgaggccaggaactacatccagagcctgacccagatgcccaagatgaactttgccaacgtgttcatcggggccaaccccctggccgtggacctgctggagaagatgctggtgctggacagcgacaagaggatcacagctgcccaggccctggcccacgcctactttgcccagtaccatgaccctgatgatgagcctgtggccgacccctatgaccagagctttgagagccgggacctgctgattgatgagtggaagagcctgacctatgatgaagtcatcagctttgtgcccccacccctggaccaggaggagatggagagctag

SEQ ID NO: 167852 - DNA, 1230 bp, synthetic construct
  misc_feature 1..1230: note = Description of Artificial Sequence: Synthetic coding sequence
  source 1..1230: mol_type = other DNA
atgaggttcaccttccccctgatggccatcgtgctggagatcgccatgattgtgctgtttggcctgtttgtggagtatgaaacagaccagacagtgctggagcagctgaacatcaccaagcccacagacatgggcatcttctttgagctgtaccccctcttccaggatgtgcacgtgatgatctttgtgggcttcggcttcctgatgaccttcctgaagaagtatggcttcagctctgtgggcatcaacctgctggtggccgccctgggcctgcagtggggcaccatcgtgcagggcatcctgcagagccagggccagaagttcaacatcggcatcaagaacatgatcaatgctgacttctctgctgccaccgtgctgatcagctttggagctgtgctgggcaagaccagccccacccagatgctgatcatgaccatcctggagatcgtgttctttgcccacaatgagtacctggtgtctgagatcttcaaggccagtgacatcggggcctccatgaccatccacgcctttggagcctacttcggcctggccgtggccggcatcctgtaccgcagcggcctgaggaagggccatgaaaatgaggagagcgcctactacagcgacctgtttgccatgattggcaccctcttcctgtggatgttctggcccagcttcaacagcgccatcgccgagcccggggacaagcagtgccgggccatcgtgaacacctacttcagcctggccgcctgtgtgctgacagcctttgccttcagcagcctggtggagcaccggggcaagctgaacatggtgcacatccagaatgccaccctggccggcggcgtggccgtgggcacctgtgccgacatggccatccaccccttcggctccatgatcatcggcagcattgctggcatggtgtctgtgctgggctacaagttcctgacccccctcttcaccaccaagctgcgcatccatgacacctgtggggtgcacaacctgcacggcctgcccggggtggtgggcggcctggccggcatcgtggccgtggccatgggcgccagcaacacctccatggccatgcaggccgccgccctgggcagcagcattggaacagctgtggtgggcggcctgatgacaggcctcatcctgaagctgcccctgtggggccagcccagcgaccagaactgctatgatgacagcgtgtactggaaggtgcccaagaccaggtag

SEQ ID NO: 167853 - DNA, 1233 bp, synthetic construct
  misc_feature 1..1233: note = Description of Artificial Sequence: Synthetic coding sequence
  source 1..1233: mol_type = other DNA
atgaggttcaccttccccctgatggccatcgtgctggagatcgccatgattgtgctgtttggcctgtttgtggagtatgaaacagaccagacagtgctggagcagctgaacatcaccaagcccacagacatgggcatcttctttgagctgtaccccctcttccaggatgtgcacgtgatgatctttgtgggcttcggcttcctgatgaccttcctgaagaagtatggcttcagctctgtgggcatcaacctgctggtggccgccctgggcctgcagtggggcaccatcgtgcagggcatcctgcagagccagggccagaagttcaacatcggcatcaagaacatgatcaatgctgacttctctgctgccaccgtgctgatcagctttggagctgtgctgggcaagaccagccccacccagatgctgatcatgaccatcctggagatcgtgttctttgcccacaatgagtacctggtgtctgagatcttcaaggccagtgacatcggggcctccatgaccatccacgcctttggagcctacttcggcctggccgtggccggcatcctgtaccgcagcggcctgaggaagggccatgaaaatgaggagagcgcctactacagcgacctgtttgccatgattggcaccctcttcctgtggatgttctggcccagcttcaacagcgccatcgccgagcccggggacaagcagtgccgggccatcgtgaacacctacttcagcctggccgcctgtgtgctgacagcctttgccttcagcagcctggtggagcaccggggcaagctgaacatggtgcacatccagaatgccaccctggccggcggcgtggccgtgggcacctgtgccgacatggccatccaccccttcggctccatgatcatcggcagcattgctggcatggtgtctgtgctgggctacaagttcctgacccccctcttcaccaccaagctgcgcatccatgacacctgtggggtgcacaacctgcacggcctgcccggggtggtgggcggcctggccggcatcgtggccgtggccatgggcgccagcaacacctccatggccatgcaggccgccgccctgggcagcagcattggaacagctgtggtgggcggcctgatgacaggcctcatcctgaagctgcccctgtggggccagcccagcgaccagaactgctatgatgacagcgtgtactggaaggtgcccaagaccagggtgtag

SEQ ID NO: 167854 - DNA, 1146 bp, synthetic construct
  misc_feature 1..1146: note = Description of Artificial Sequence: Synthetic coding sequence
  source 1..1146: mol_type = other DNA
atgaggttcaccttccccctgatggccatcgtgctggagatcgccatgattgtgctgtttggcctgtttgtggagtatgaaacagaccagacagtgctggagcagctgaacatcaccaagcccacagacatgggcatcttctttgagctgtaccccctcttccaggatgtgcacgtgatgatctttgtgggcttcggcttcctgatgaccttcctgaagaagtatggcttcagctctgtgggcatcaacctgctggtggccgccctgggcctgcagtggggcaccatcgtgcagggcatcctgcagagccagggccagaagttcaacatcggcatcaagaacatgatcaatgctgacttctctgctgccaccgtgctgatcagctttggagctgtgctgggcaagaccagccccacccagatgctgatcatgaccatcctggagatcgtgttctttgcccacaatgagtacctggtgtctgagatcttcaaggccagtgacatcggggcctccatgaccatccacgcctttggagcctacttcggcctggccgtggccggcatcctgtaccgcagcggcctgaggaagggccatgaaaatgaggagagcgcctactacagcgacctgtttgccatgattggcaccctcttcctgtggatgttctggcccagcttcaacagcgccatcgccgagcccggggacaagcagtgccgggccatcgtgaacacctacttcagcctggccgcctgtgtgctgacagcctttgccttcagcagcctggtggagcaccggggcaagctgaacatggtgcacatccagaatgccaccctggccggcggcgtggccgtgggcacctgtgccgacatggccatccaccccttcggctccatgatcatcggcagcattgctggcatggtgtctgtgctgggctacaagttcctgacccccctcttcaccaccaagctgcgcatccatgacacctgtggggtgcacaacctgcacggcctgcccggggtggtgggcggcctggccggcatcgtggccgtggccatgggcgccagcaacacctccatggccatgcaggccgccgccctgggcagcagcattggaacagctgtggtgggcggcctgatgacaggcacctag

SEQ ID NO: 167855 - DNA, 387 bp, synthetic construct
  misc_feature 1..387: note = Description of Artificial Sequence: Synthetic coding sequence
  source 1..387: mol_type = other DNA
atgaagagcctcatcctgctggccatcctggccgccctggccgtggtgaccctgtgctacggggagtggcagaaggaggagaactttggatttgatattgtgtctgtgctgagcctgaactggcaccgggcccaggagagccatgagagcatggagagctatgagctgaaccccttcatcaacagaagaaatgccaacaccttcatcagcccccagcagcgctggagggccaaggtgcaggagcgcatccgggagaggagcaagcctgtgcatgagctgaaccgggaggcctgtgatgactaccgcctgtgtgaaagatatgccatggtgtatggctacaatgctgcctacaaccgctacttcaggaagaggcggggcaccaagtag

SEQ ID NO: 167856 - DNA, 339 bp, synthetic construct
  misc_feature 1..339: note = Description of Artificial Sequence: Synthetic coding sequence
  source 1..339: mol_type = other DNA
atgacagagaaggcccctgagccccacgtggaggaggatgatgatgatgagctggacagcaagctgaactacaagcccccaccccagaagagcctgaaggagctgcaggagatggacaaggatgatgagagcctcatcaagtacaagaagaccctgctgggagatggccctgtggtgacagaccccaaggcccccaacgtggtggtgacccggctgaccctggtgtgtgagagcgcccctggccccatcaccatggacctgaccggggacctggaggccctgaagaaggagaccatcgtgctgaaggagggcagcgagtacagagtgaagatccactag

SEQ ID NO: 167857 - DNA, 606 bp, synthetic construct
  misc_feature 1..606: note = Description of Artificial Sequence: Synthetic coding sequence
  source 1..606: mol_type = other DNA
atgacagagaaggcccctgagccccacgtggaggaggatgatgatgatgagctggacagcaagctgaactacaagcccccaccccagaagagcctgaaggagctgcaggagatggacaaggatgatgagagcctcatcaagtacaagaagaccctgctgggagatggccctgtggtgacagaccccaaggcccccaacgtggtggtgacccggctgaccctggtgtgtgagagcgcccctggccccatcaccatggacctgaccggggacctggaggccctgaagaaggagaccatcgtgctgaaggagggcagcgagtacagagtgaagatccacttcaaggtgaacagagacatcgtgtctggcctgaagtatgtgcagcacacctacagaactggagtgaaggtggacaaggccaccttcatggtgggcagctatggccccaggcctgaggagtatgagttcctgacccctgtggaggaggcccccaagggcatgctggcccggggcacctaccacaacaagagcttcttcacagatgatgacaagcaggaccacctgtcctgggagtggaacctgagcatcaagaaggagtggacagaatag

SEQ ID NO: 167858 - DNA, 606 bp, synthetic construct; identical to SEQ ID NO: 167857
  misc_feature 1..606: note = Description of Artificial Sequence: Synthetic coding sequence
  source 1..606: mol_type = other DNA

SEQ ID NO: 167859 - DNA, 267 bp, synthetic construct
  misc_feature 1..267: note = Description of Artificial Sequence: Synthetic coding sequence
  source 1..267: mol_type = other DNA
atgacagagaaggcccctgagccccacgtggaggaggatgatgatgatgagctggacagcaagctgaactacaagcccccaccccagaagagcctgaaggagctgcaggagatggacaaggatgatgagagcctcatcaagtacaagaagaccctgctgggagatggccctgtggtgacagaccccaaggcccccaacgtggtggtgacccggctgaccctggtgtgtgagagcgcccctggccccatcaccatggacctgacctag

SEQ ID NO: 167860 - DNA, 480 bp, synthetic construct
  misc_feature 1..480: note = Description of Artificial Sequence: Synthetic coding sequence
  source 1..480: mol_type = other DNA
atgacagagaaggcccctgagccccacgtggaggaggatgatgatgatgagctggacagcaagctgaactacaagcccccaccccagaagagcctgaaggagctgcaggagatggacaaggatgatgagagcctcatcaagtacaagaagaccctgctgggagatggccctgtggtgacagaccccaaggcccccaacgtggtggtgacccggctgaccctggtgtgtgagagcgcccctggccccatcaccatggacctgaccggggacctggaggccctgaagaaggagaccatcgtgctgaaggagggcagcgagtacagagtgaagatccacttcaaggtgaacagagacatcgtgtctggcctgaagtatgtgcagcacacctacagaactggagtgaaggtggacaaggccaccttcatggtgggcagctatggccccaggcctgaggagtatgagttcctgacccctgtgtag

SEQ ID NO: 167861 - DNA, 1320 bp, synthetic construct
  misc_feature 1..1320: note = Description of Artificial Sequence: Synthetic coding sequence
  source 1..1320: mol_type = other DNA
atggaccccctgtctgagctgcaggatgacctgaccctggatgacaccagcgaggccctgaaccagctgaagctggccagcattgatgagaagaactggcccagtgatgagatgccagacttccccaagagtgatgacagcaagagcagcagccctgagctggtgacccacctgaagtgggatgacccctactatgacatcgcccggcaccagatcgtggaggtggccggagatgacaagtatggcaggaagatcatcgtgttttctgcctgcaggatgccacccagccaccagctggaccacagcaagctgctgggctacctgaagcacaccctggaccagtatgtggagagtgactacaccctgctgtacctgcaccacggcctgaccagtgacaacaagcccagcctgtcctggctgagagatgcctaccgggagtttgacaggaagtacaagaagaacatcaaggccctgtacatcgtgcaccccaccatgttcatcaagaccctgctgatcctcttcaagcccctcatctccttcaagtttggccagaagatcttctacgtgaactacctgtctgagctgtctgagcacgtgaagctggagcagctgggcatcccccggcaggtgctgaagtatgatgacttcctgaagagcacccagaagagccctgccacagcccccaagcccatgccacccaggcctcccctgcccaaccagcagtttggagtgtccctgcagcacctgcaggagaagaaccctgagcaggagcccatccccatcgtgctgcgggagaccgtggcctacctgcaggcccacgccctgaccacagagggcatcttccgccgcagcgccaacacccaggtggtgcgggaggtgcagcagaagtacaacatgggcctgcctgtggactttgaccagtacaatgagctgcacctgcctgctgtgatcctgaagaccttcctgcgggagctgcctgagcccctgctgacctttgacctgtacccccacgtggtgggcttcctgaacattgatgagagccagagggtgcctgccaccctgcaggtgctgcagaccctgcctgaggagaactaccaggtgctgcgcttcctgacagccttcctggtgcagatcagcgcccacagcgaccagaacaagatgaccaacaccaacctggccgtggtgtttggccccaacctgctgtgggccaaggatgctgccatcaccctgaaggccatcaaccccatcaacaccttcaccaagttcctgctggaccaccagggcgagctgttccccagcccagaccccagcggcctgtag

SEQ ID NO: 167862 - DNA, 1377 bp, synthetic construct
  misc_feature 1..1377: note = Description of Artificial Sequence: Synthetic coding sequence
  source 1..1377: mol_type = other DNA
atggaccccctgtctgagctgcaggatgacctgaccctggatgacaccagcgaggccctgaaccagctgaagctggccagcattgatgagaagaactggcccagtgatgagatgccagacttccccaagagtgatgacagcaagagcagcagccctgagctggtgacccacctgaagtgggatgacccctactatgacatcgcccggcaccagatcgtggaggtggccggagatgacaagtatggcaggaagatcatcgtgttttctgcctgcaggatgccacccagccaccagctggaccacagcaagctgctgggctacctgaagcacaccctggaccagtatgtggagagtgactacaccctgctgtacctgcaccacggcctgaccagtgacaacaagcccagcctgtcctggctgagagatgcctaccgggagtttgacaggaagtacaagaagaacatcaaggccctgtacatcgtgcaccccaccatgttcatcaagaccctgctgatcctcttcaagcccctcatctccttcaagtttggccagaagatcttctacgtgaactacctgtctgagctgtctgagcacgtgaagctggagcagctgggcatcccccggcaggtgctgaagtatgatgacttcctgaagagcacccagaagagccctgccacagcccccaagcccatgccacccaggcctcccctgcccaaccagcagtttggagtgtccctgcagcacctgcaggagaagaaccctgagcaggagcccatccccatcgtgctgcgggagaccgtggcctacctgcaggcccacgccctgaccacagagggcatcttccgccgcagcgccaacacccaggtggtgcgggaggtgcagcagaagtacaacatgggcctgcctgtggactttgaccagtacaatgagctgcacctgcctgctgtgatcctgaagaccttcctgcgggagctgcctgagcccctgctgacctttgacctgtacccccacgtggtgggcttcctgaacattgatgagagccagagggtgcctgccaccctgcaggtgctgcagaccctgcctgaggagaactaccaggtgctgcgcttcctgacagccttcctggtgcagatcagcgcccacagcgaccagaacaagatgaccaacaccaacctggccgtggtgtttggccccaacctgctgtgggccaaggatgctgccatcaccctgaaggccatcaaccccatggccaccttcttcttcttcttcctgcgctggagcctggccctgagccctggctggagcgctgtggcccggagccgccacaccagcgccttctgggtgcaggccatcctgctgccccagcccccagagtag

SEQ ID NO: 167863 - DNA, 579 bp, synthetic construct
  misc_feature 1..579: note = Description of Artificial Sequence: Synthetic coding sequence
  source 1..579: mol_type = other DNA
atggaccccctgtctgagctgcaggatgacctgaccctggatgacaccagcgaggccctgaaccagctgaagctggccagcattgatgagaagaactggcccagtgatgagatgccagacttccccaagagtgatgacagcaagagcagcagccctgagctggtgacccacctgaagtgggatgacccctactatgacatcgcccggcaccagatcgtggaggtggccggagatgacaagtatggcaggaagatcatcgtgttttctgcctgcaggatgccacccagccaccagctggaccacagcaagctgctgggctacctgaagcacaccctggaccagtatgtggagagtgactacaccctgctgtacctgcaccacggcctgaccagtgacaacaagcccagcctgtcctggctgagagatgcctaccgggagtttgacaggaagtacaagaagaacatcaaggccctgtacatcgtgcaccccaccatgttcatcaagaccctgctgatcctcttcaagcccctcatctccttcaagtttggccagaagatcttctacgtgaactacctgtag

SEQ ID NO: 167864 - DNA, 2361 bp, synthetic construct
  misc_feature 1..2361: note = Description of Artificial Sequence: Synthetic coding sequence
  source 1..2361: mol_type = other DNA
atgggcctgcagcccctggagttcagtgactgctacctggacagcccctggttccgggagcgcatccgggcccatgaagctgagctggagaggaccaacaagttcatcaaggagctgatcaaggatggcaagaacctgattgctgccaccaagagcctgtctgtggcccagaggaagtttgcccacagcctgcgggacttcaagtttgagttcatcggagatgctgtgacagatgatgagcgctgcattgatgccagcctgcgggagttcagcaacttcctgaagaacctggaggagcagcgggagatcatggccctgtctgtgacagagaccctcatcaagcccctggagaagttcaggaaggagcagctgggcgctgtgaaggaggagaagaagaagtttgacaaggagacagagaagaactacagcctgattgacaagcacctgaacctgagcgccaagaagaaggacagccacctgcaggaggccgacatccaggtggagcagaaccggcagcacttctatgagctgagcctggagtatgtgtgcaagctgcaggagatccaggagaggaagaagtttgaatttgtggagcccatgctgtccttcttccagggcatgttcaccttctaccaccagggccacgagctggccaaggacttcaaccactacaagatggagctgcagatcaacatccagaacaccaggaacagatttgagggcaccaggtctgaggtggaggagctgatgaacaagatccggcagaaccccaaggaccacaagagggccagccagttcaccgctgagggctacctgtatgtgcaggagaagaggcctgcccccttcggcagctcctgggtgaagcactactgcatgtacaggaaggccgccaagaagttcaacatgatcccctttgagcacaggtctgggggcaagctgggagatggagaggtgttcttcctgaaggaatgtaccaagaggcacacagacagcattgaccggcgcttctgctttgacatcgaggccgctgacaggcctggggtgtccctgaccatgcaggccttcagcgaggaggagaggaagcagtggctggaggccctgggcggcaaggaggccctgagccacagcttcaacacagccatcatccccaggcctgagggcaatgcccagctggacaagatgggcttcaccatcatcaggaagtgcatctctgctgtggagacccggggcatcaatgaccagggcctgtacagagtggtgggcgtgagcagcaaggtgcagaggctgctgtccatgctgatggatgtgaagacctgcaatgaggtggacctggagaacagcgctgactgggaggtgaagaccatcaccagcgccctgaagcagtacctgcggagcctgcctgagcccctgatgacctatgagctgcacggggacttcatcgtgcctgccaagagcggcagccctgagagccgggtgaatgccatccacttcctggtgcacaagctgcctgagaagaacaaggagatgctggacatcctggtgaagcacctgaccaacgtgagcaaccacagcaagcagaacctgatgacagtggccaacctgggcgtggtgtttggccccaccctgatgaggccccaggaggagaccgtggccgccctgatggacctgaagttccagaacatcgtggtggagatcctgattgagaaccacgagaagatcttccgcaccccaccagacaccaccttccctgagcccacctgcctgagcgccagccccccaaatgccccaccccggcagagcaagaggcagggccagaggaccaagaggcctgtggccgtgtacaacctgtgcctggagctggaggatggagacaacccctaccccagcaaagaagacacccccaccagcagcctggacagcctgagcagccccagccctgtgaccacagctgtgcccggccccccaggccctgacaagaaccacctgctggctgatggcggcagctttggagactgggccagcaccatccctggccagaccaggagctccatggtgcagtggctgaacccccagagccccaccaccaccagcagcaacagcgctgtgacccccctgagccctggcagcagccccttccccttcagccccccagccaccgtggccgacaagcccccagagagcatccgcagcaggaaggcccgggctgtgtacccctgtgaggccgagcacagcagcgagctgagctttgaaattggagccatctttgaagatgtgcagaccagccgggagcccggctggctggagggcaccctgaatggcaagaggggcctcatcccccagaactacgtgaagctgctgtag

SEQ ID NO: 167865 - DNA, 1155 bp, synthetic construct
  misc_feature 1..1155: note = Description of Artificial Sequence: Synthetic coding sequence
  source 1..1155: mol_type = other DNA
atgcaggccttcagcgaggaggagaggaagcagtggctggaggccctgggcggcaaggaggccctgagccacagcttcaacacagccatcatccccaggcctgagggcaatgcccagctggacaagatgggcttcaccatcatcaggaagtgcatctctgctgtggagacccggggcatcaatgaccagggcctgtacagagtggtgggcgtgagcagcaaggtgcagaggctgctgtccatgctgatggatgtgaagacctgcaatgaggtggacctggagaacagcgctgactgggaggtgaagaccatcaccagcgccctgaagcagtacctgcggagcctgcctgagcccctgatgacctatgagctgcatggagacttcatcgtgcctgccaagagcggcagccctgagagccgggtgaatgccatccacttcctggtgcacaagctgcctgagaagaacaaggagatgctggacatcctggtgaagcacctgaccaacgtgagcaaccacagcaagcagaacctgatgacagtggccaacctgggcgtggtgtttggccccaccctgatgaggccccaggaggagaccgtggccgccctgatggacctgaagttccagaacatcgtggtggagatcctgattgaaaatcatgagaagatcttccgcaccccaccagacaccaccttccctgagcccacctgcctgagcgccagccccccaaatgccccaccccggcagagcaagaggcagggccagaggaccaagaggcctgtggccgtgtacaacctgtgcctggagctggaggatggagacaacccctaccccagcaaggaggacacccccaccagcagcctggacagcctgagcagccccagccctgtgaccacagctgtgcccggccccccaggccctgacaagaaccacctgctggctgatggcggcagctttggagactgggccagcaccatcatccgcagcaggaaggcccgggctgtgtacccctgtgaggccgagcacagcagcgagctgagctttgaaattggagccatctttgaagatgtgcagaccagccgggagcccggctggctggagggcaccctgaatggcaagaggggcctcatcccccagaactacgtgaagctgctgtag

SEQ ID NO: 167866 - DNA, 3072 bp, synthetic construct
  misc_feature 1..3072: note = Description of Artificial Sequence: Synthetic coding sequence
  source 1..3072: mol_type = other DNA
atgtgggaccagaggctggtgcggctggccctgctgcagcacctgcgggccttctacggcatcaaggtgaagggcgtgcggggccagtgtgacagaagaagacatgaaacagctgccacagagatcggcggcaagatctttggagtgcccttcaatgccctgccccacagcgctgtgcctgaatatggccacatccccagcttcctggtggatgcctgcaccagcctggaggaccacatccacacagagggcctcttcaggaagagcggcagcgtcatccggctgaaggccctgaagaacaaggtggaccacggggagggctgcctgagcagcgccccaccctgtgacattgctggcctgctgaagcagttcttccgggagctgcctgagcccatcctgcctgctgacctgcacgaggccctgctgaaggcccagcagctgggcacagaggagaagaacaaggccaccctgctgctgagctgcctgctggccgaccacacagtgcacgtgctgcgctacttcttcaacttcctgagaaatgtgtccctgcggagcagcgagaacaagatggacagcagcaacctggccgtcatctttgcccccaacctgctgcagaccagcgagggccacgagaagatgagcagcaacacagagaagaagctgcggctgcaggccgctgtggtgcagaccctgattgattatgccagtgacatcggccgggtgcctgacttcatcctggagaagatcccagccatgctgggcattgatggcctgtgtgccacccccagcctggagggctttgaggagggggagtatgagaccccaggagagtacaagaggaagaggcggcagagcgtgggggactttgtgtctggggccctgaacaagttcaagcccaacagaacacccagcatcaccccccaggaggagcgcatcgcccagctgtctgagagccctgtgatcctgaccccaaatgccaagaggaccctgcctgtggacagcagccacggcttcagcagcaagaagaggaagagcatcaagcacaacttcaactttgagctgctgcccagcaacctcttcaacagcagcagcacccctgtgtctgtgcacatcgacaccagcagcgagggcagcagccagagcagcctgagccctgtgctgattggaggcaaccacctgatcacagctggggtgccccggcgcagcaagagaattgctgggaagaaggtgtgccgggtggagagcggcaaggccggctgcttcagccccaagatcagccacaaggagaaggtgcggcgcagcctgcggctgaagttcaacctgggcaagaatggccgggaggtgaatggctgcagcggcgtgaacagatatgaatctgtgggctggaggctggccaaccagcagagcctgaagaaccgcatcgagagcgtgaagacaggcctgctcttctccccagatgtggatgagaagctgcccaagaagggcagcgagaagatcagcaagtctgaggagaccctgctgaccccagagcggctggtgggcaccaactacaggatgtcctggacaggccccaacaacagcagcttccaggaggtggatgccaatgaggccagctccatggtggagaacctggaggtggagaacagcctggagccagacatcatggtggagaagagccctgccaccagctgtgagctgacccccagcaacctgaacaacaagcacaacagcaacatcaccagcagccccctgtctggagatgagaacaacatgaccaaggagaccctggtgaaggtgcagaaggccttcagcgagagcggcagcaacctgcacgccctgatgaaccagaggcagagctctgtgaccaacgtgggcaaggtgaagctgacagagcccagctacctggaggacagccctgaggagaacctgtttgagaccaatgacctgaccatcgtggagagcaaggagaagtatgagcaccacacaggcaagggggagaagtgcttcagcgagcgggacttcagccccctgcagacccagaccttcaaccgggagaccaccatcaagtgctacagcacccagatgaagatggagcacgagaaggacatccacagcaacatgcccaaggactacctgagcaagcaggagttcagcagtgatgaggagatcaagaagcagcagagccccaaggacaagctgaacaacaagctgaaggaaaatgaaaacatgatggagggcaacctgcccaagtgtgccgcccacagcaaggatgaggcccggagcagcttcagccagcagagcacctgtgtggtgaccaacctgagcaagccccggcccatgagaattgccaagcagcagagcctggagacctgtgagaagacagtgtctgagagcagccagatgacagagcacaggaaggtgtctgaccacatccagtggttcaacaagctgagcctgaatgagcccaaccgcatcaaggtgaagagccccctgaagttccagaggacccctgtgcggcagagcgtgcggcgcatcaacagcctgctggagtacagccggcagcccaccggccacaagctggccagcctgggggacacagccagccccctggtgaagtctgtgtcctgtgatggagccctgagcagctgcatcgagagcgccagcaaggacagctctgtgtcctgcatcaagagcggccccaaggagcagaagtccatgagctgtgaggagagcaacattggagccatcagcaagagctccatggagctgcccagcaagagcttcctgaagatgaggaagcacccagattctgtgaatgccagcctgcggagcaccaccgtgtacaagcagaagatcctgagtgatggccaggtgaaggtgcccctggatgacctgaccaaccacgacatcgtgaagcctgtggtgaacaacaacatgggcatcagcagcggcatcaacaacagagtgctgcggcggcccagcgagcggggccgggcctggtacaagggcagccccaagcaccccatcggcaagacccagctgctgcccaccagcaagcctgtggacctgtag

SEQ ID NO: 167867 - DNA, 2505 bp, synthetic construct
  misc_feature 1..2505: note = Description of Artificial Sequence: Synthetic coding sequence
  source 1..2505: mol_type = other DNA
atggacagcagcaacctggccgtcatctttgcccccaacctgctgcagaccagcgagggccacgagaagatgagcagcaacacagagaagaagctgcggctgcaggccgctgtggtgcagaccctgattgattatgccagtgacatcggccgggtgcctgacttcatcctggagaagatcccagccatgctgggcattgatggcctgtgtgccacccccagcctggagggctttgaggagggggagtatgagaccccaggagagtacaagaggaagaggcggcagagcgtgggggactttgtgtctggggccctgaacaagttcaagcccaacagaacacccagcatcaccccccaggaggagagaattgcccagctgtctgagagccctgtgatcctgaccccaaatgccaagaggaccctgcctgtggacagcagccacggcttcagcagcaagaagaggaagagcatcaagcacaacttcaactttgagctgctgcccagcaacctcttcaacagcagcagcacccctgtgtctgtgcacatcgacaccagcagcgagggcagcagccagagcagcctgagccctgtgctgattggaggcaaccacctgatcacagctggggtgcccaggaggagcaagagaattgctgggaagaaggtgtgccgggtggagagcggcaaggccggctgcttcagccccaagatcagccacaaggagaaggtgagaagaagcctgcggctgaagttcaacctgggcaagaatggccgggaggtgaatggctgcagcggcgtgaacagatatgagagcgtgggctggaggctggccaaccagcagagcctgaagaacagaattgaatctgtgaagacaggcctgctcttctccccagatgtggatgagaagctgcccaagaagggcagcgagaagatcagcaagtctgaggagaccctgctgaccccagagcggctggtgggcaccaactacaggatgtcctggacaggccccaacaacagcagcttccaggaggtggatgccaatgaggccagctccatggtggagaacctggaggtggagaacagcctggagccagacatcatggtggagaagagccctgccaccagctgtgagctgacccccagcaacctgaacaacaagcacaacagcaacatcaccagcagccccctgtctggagatgagaacaacatgaccaaggagaccctggtgaaggtgcagaaggccttcagcgagagcggcagcaacctgcacgccctgatgaaccagaggcagagctctgtgaccaacgtgggcaaggtgaagctgacagagcccagctacctggaggacagccctgaggagaacctgtttgagaccaatgacctgaccatcgtggagagcaaggagaagtatgagcaccacactggaaaaggagagaagtgcttcagcgagcgggacttcagccccctgcagacccagaccttcaaccgggagaccaccatcaagtgctacagcacccagatgaagatggagcacgagaaggacatccacagcaacatgcccaaggactacctgagcaagcaggagttcagcagtgatgaggagatcaagaagcagcagagccccaaggacaagctgaacaacaagctgaaggaaaatgaaaacatgatggagggcaacctgcccaagtgtgccgcccacagcaaggatgaggcccggagcagcttcagccagcagagcacctgtgtggtgaccaacctgagcaagccccggcccatgagaattgccaagcagcagagcctggagacctgtgagaagacagtgtctgagagcagccagatgacagagcacaggaaggtgtctgaccacatccagtggttcaacaagctgagcctgaatgagcccaaccgcatcaaggtgaagagccccctgaagttccagaggacccctgtgcggcagagcgtgcggcgcatcaacagcctgctggagtacagccggcagcccaccggccacaagctggccagcctgggggacacagccagccccctggtgaagtctgtgtcctgtgatggagccctgagcagctgcattgaaagtgccagcaaggacagctctgtgtcctgcatcaagagcggccccaaggagcagaagtccatgagctgtgaggagagcaacatcggggccatcagcaagagctccatggagctgcccagcaagagcttcctgaagatgaggaagcacccagacagcgtgaatgccagcctgcggagcaccaccgtgtacaagcagaagatcctgagtgatggccaggtgaaggtgcccctggatgacctgaccaaccacgacatcgtgaagcctgtggtgaacaacaacatgggcatcagcagcggcatcaacaacagagtgctgcggcggcccagcgagcggggccgggcctggtacaagggcagccccaagcaccccatcggcaagacccagctgctgcccaccagcaagcctgtggacctgtag

SEQ ID NO: 167868 - DNA, 1506 bp, synthetic construct
  misc_feature 1..1506: note = Description of Artificial Sequence: Synthetic coding sequence
  source 1..1506: mol_type = other DNA
atgtgggaccagaggctggtgcggctggccctgctgcagcacctgcgggccttctacggcatcaaggtgaagggcgtgcggggccagtgtgacagaagaagacatgaaacagctgccacagagatcggcggcaagatctttggagtgcccttcaatgccctgccccacagcgctgtgcctgaatatggccacatccccagcttcctggtggatgcctgcaccagcctggaggaccacatccacacagagggcctcttcaggaagagcggcagcgtcatccggctgaaggccctgaagaacaaggtggaccacggggagggctgcctgagcagcgccccaccctgtgacattgctggcctgctgaagcagttcttccgggagctgcctgagcccatcctgcctgctgacctgcacgaggccctgctgaaggcccagcagctgggcacagaggagaagaacaaggccaccctgctgctgagctgcctgctggccgaccacacagtgcacgtgctgcgctacttcttcaacttcctgagaaatgtgtccctgcggagcagcgagaacaagatggacagcagcaacctggccgtcatctttgcccccaacctgctgcagaccagcgagggccacgagaagatgagcagcaacacagagaagaagctgcggctgcaggccgctgtggtgcagaccctgattgattatgccagtgacatcggccgggtgcctgacttcatcctggagaagatcccagccatgctgggcattgatggcctgtgtgccacccccagcctggagggctttgaggagggggagtatgagaccccaggagagtacaagaggaagaggcggcagagcgtgggggactttgtgtctggggccctgaacaagttcaagcccaacagaacacccagcatcaccccccaggaggagcgcatcgcccagctgtctgagagccctgtgatcctgaccccaaatgccaagaggaccctgcctgtggacagcagccacggcttcagcagcaagaagaggaagagcatcaagcacaacttcaactttgagctgctgcccagcaacctcttcaacagcagcagcacccctgtgtctgtgcacatcgacaccagcagcgagggcagcagccagagcagcctgagccctgtgctgattggaggcaaccacctgatcacagctggggtgccccggcgcagcaagagaattgctgggaagaaggtgtgccgggtggagagcggcaaggccggctgcttcagccccaagatcagccacaaggagaaggtgcggcgcagcctgcggctgaagttcaacctgggcaagaatggccgggaggtgaatggctgcagcggcgtgaacagatatgaatctgtgggctggaggctggccaaccagcagagcctgaagaaccgcatcgagagcgtgaagacaggcctgctcttctccccagatgtggatgagaagctgcccaagaagggcaccttcacctactactgctag

SEQ ID NO: 167869 - DNA, 2385 bp, synthetic construct
  misc_feature 1..2385: note = Description of Artificial Sequence: Synthetic coding sequence
  source 1..2385: mol_type = other DNA
atgaagatggctgacagaagtggcaagatcatccctggccaggtgtacatcgaggtggagtatgactatgaatatgaggccaaggacaggaagatcgtcatcaagcagggcgagcgctacatcctggtgaagaagaccaatgatgactggtggcaggtgaagccagatgagaacagcaaggccttctacgtgcctgcccagtatgtgaaggaggtgaccaggaaggccctgatgcctcctgtgaagcaggtggccggcctgcccaacaacagcaccaagatcatgcagagcctgcacctgcagaggagcacagaaaatgtgaacaagctgcctgagctgagcagctttgggaagcccagcagctctgtgcagggcaccggcctcatcagagatgccaaccagaactttggccccagctacaaccagggccagacagtgaacctgagcctggacctgacccacaacaacgggaagttcaacaatgacagccacagccccaaggtgagcagccagaacagaaccaggagctttggccacttccctggccctgagttcctggatgtggagaagaccagcttcagccaggagcagagctgtgacagcgctggggagggcagcgagcgcatccaccaggacagcgagagcggagatgagctgagcagcagcagcacagagcagatccgggccaccaccccacccaaccagggccgcccagacagccctgtgtatgccaacctgcaggagctgaagatcagccagagcgccctgccccccctgcccggcagccctgccatccagatcaacggggagtgggagacccacaaggacagcagcggccgctgctactactacaacagaggcacccaggagaggacctggaagcccccacgctggaccagagatgccagcatcagcaagggggacttccagaaccctggggaccaggagtggctgaagcacgtggatgaccagggccggcagtactactacagcgcagatggcagccgctctgagtgggagctgcccaagtacaatgccagcagccagcagcagcgggagatcatcaagagccgcagcctggaccggcggctgcaggagcccatcgtgctgaccaagtggaggcacagcaccatcgtgctggacaccaatgacaaggagagccccacagccagcaagccctgcttcccagaaaatgaaagcagccccagcagccccaagcaccaggacacagaccaggagaagtatggcctgctgaatgtgaccaagattgctgaaaatggcaagaaggtgaggaagaactggctgagctcctgggccgtgctgcagggcagcagcctgctcttcaccaagacccagggcagcagcacctcctggtttggcagcaaccagagcaagccagagttcaccgtggacctgaagggggccaccatcgagatggccagcaaggacaagagcagcaagaagaatgtgtttgagctgaagacccggcagggcacagagctgctgatccagagcgacaatgacaccgtcatcaatgactggttcaaggtgctgagcagcaccatcaacaaccaggccgtggagacagatgagggcatcgaggaggagatcccagacagccctggcatcgagaagcatgacaaggagaaggagcagaaggaccccaagaagctgcggagcttcaaggtgagcagcattgacagcagcgagcagaagaagaccaagaagaacctgaagaagttcctgacccggcggcccaccctgcaggccgtgcgggagaagggctacatcaaggaccaggtgtttggcagcaacctggccaacctgtgccagagagaaaatggcaccgtgcccaagtttgtgaagctgtgcattgaacatgtggaggagcacggcctggacattgatggcatctacagagtgtctggcaacctggccgtcatccagaagctgcgctttgctgtgaaccatgatgagaagctggacctgaatgacagcaagtgggaggacatccacgtgatcactggagccctgaagatgttcttccgggagctgcctgagcccctcttcaccttcaaccacttcaatgactttgtgaatgccatcaagcaggagccccggcagagggtggccgctgtgaaggacctgatccggcagctgcccaagcccaaccaggacaccatgcagatcctcttccgccacctgcggcgggtgattgaaaatggagagaagaacaggatgacctaccagagcatcgccatcgtgtttggccccaccctgctgaagccagagaaggagactggaaatattgctgtgcacacagtgtaccagaaccagatcgtggagctgatcctgctggagctgagcagcatcttcggccgctag

SEQ ID NO: 167870 - DNA, 2541 bp, synthetic construct
  misc_feature 1..2541: note = Description of Artificial Sequence: Synthetic coding sequence
  source 1..2541: mol_type = other DNA
atgaagatggctgacagaagtggcaagatcatccctggccaggtgtacatcgaggtggagtatgactatgaatatgaggccaaggacaggaagatcgtcatcaagcagggcgagcgctacatcctggtgaagaagaccaatgatgactggtggcaggtgaagccagatgagaacagcaaggccttctacgtgcctgcccagtatgtgaaggaggtgaccaggaaggccctgatgcctcctgtgaagcaggtggccggcctgcccaacaacagcaccaagatcatgcagagcctgcacctgcagaggagcacagaaaatgtgaacaagctgcctgagctgagcagctttgggaagcccagcagctctgtgcagggcaccggcctcatcagagatgccaaccagaactttggccccagctacaaccagggccagacagtgaacctgagcctggacctgacccacaacaacgggaagttcaacaatgacagccacagccccaaggtgagcagccagaacagaaccaggagctttggccacttccctggccctgagttcctggatgtggagaagaccagcttcagccaggagcagagctgtgacagcgctggggagggcagcgagcgcatccaccaggacagcgagagcggagatgagctgagcagcagcagcacagagcagatccgggccaccaccccacccaaccagggccgcccagacagccctgtgtatgccaacctgcaggagctgaagatcagccagagcgccctgccccccctgcccggcagccctgccatccagatcaacggggagtgggagacccacaaggacagcagcggccgctgctactactacaacagaggcacccaggagaggacctggaagcccccacgctggaccagagatgccagcatcagcaagggggacttccagaaccctggggaccaggagctgctgagcagcgaggagaactactacagcaccagctacagccagagcgacagccagtgtggcagccccccccggggctggagcgaggagctggatgagcggggccacaccctgtacaccagtgactacaccaatgagaagtggctgaagcacgtggatgaccagggccggcagtactactacagcgcagatggcagccgctctgagtgggagctgcccaagtacaatgccagcagccagcagcagcgggagatcatcaagagccgcagcctggaccggcggctgcaggagcccatcgtgctgaccaagtggaggcacagcaccatcgtgctggacaccaatgacaaggagagccccacagccagcaagccctgcttcccagaaaatgaaagcagccccagcagccccaagcaccaggacacagccagcagccccaaggaccaggagaagtatggcctgctgaatgtgaccaagattgctgaaaatggcaagaaggtgaggaagaactggctgagctcctgggccgtgctgcagggcagcagcctgctcttcaccaagacccagggcagcagcacctcctggtttggcagcaaccagagcaagccagagttcaccgtggacctgaagggggccaccatcgagatggccagcaaggacaagagcagcaagaagaatgtgtttgagctgaagacccggcagggcacagagctgctgatccagagcgacaatgacaccgtcatcaatgactggttcaaggtgctgagcagcaccatcaacaaccaggccgtggagacagatgagggcatcgaggaggagatcccagacagccctggcatcgagaagcatgacaaggagaaggagcagaaggaccccaagaagctgcggagcttcaaggtgagcagcattgacagcagcgagcagaagaagaccaagaagaacctgaagaagttcctgacccggcggcccaccctgcaggccgtgcgggagaagggctacatcaaggaccaggtgtttggcagcaacctggccaacctgtgccagagagaaaatggcaccgtgcccaagtttgtgaagctgtgcattgaacatgtggaggagcacggcctggacattgatggcatctacagagtgtctggcaacctggccgtcatccagaagctgcgctttgctgtgaaccatgatgagaagctggacctgaatgacagcaagtgggaggacatccacgtgatcactggagccctgaagatgttcttccgggagctgcctgagcccctcttcaccttcaaccacttcaatgactttgtgaatgccatcaagcaggagccccggcagagggtggccgctgtgaaggacctgatccggcagctgcccaagcccaaccaggacaccatgcagatcctcttccgccacctgcggcgggtgattgaaaatggagagaagaacaggatgacctaccagagcatcgccatcgtgtttggccccaccctgctgaagccagagaaggagactggaaatattgctgtgcacacagtgtaccagaaccagatcgtggagctgatcctgctggagctgagcagcatcttcggccgctag

SEQ ID NO: 167871 - DNA, 2385 bp, synthetic construct; identical to SEQ ID NO: 167869
  misc_feature 1..2385: note = Description of Artificial Sequence: Synthetic coding sequence
  source 1..2385: mol_type = other DNA

SEQ ID NO: 167872 - DNA, 2451 bp, synthetic construct
  misc_feature 1..2451: note = Description of Artificial Sequence: Synthetic coding sequence
  source 1..2451: mol_type = other DNA
atgaagatggctgacagaagtggcaagatcatccctggccaggtgtacatcgaggtggagtatgactatgaatatgaggccaaggacaggaagatcgtcatcaagcagggcgagcgctacatcctggtgaagaagaccaatgatgactggtggcaggtgaagccagatgagaacagcaaggccttctacgtgcctgcccagtatgtgaaggaggtgaccaggaaggccctgatgcctcctgtgaagcaggtggccggcctgcccaacaacagcaccaagatcatgcagagcctgcacctgcagaggagcacagaaaatgtgaacaagctgcctgagctgagcagctttgggaagcccagcagctctgtgcagggcaccggcctcatcagagatgccaaccagaactttggccccagctacaaccagggccagacagtgaacctgagcctggacctgacccacaacaacgggaagttcaacaatgacagccacagccccaaggtgagcagccagaacagaaccaggagctttggccacttccctggccctgagttcctggatgtggagaagaccagcttcagccaggagcagagctgtgacagcgctggggagggcagcgagcgcatccaccaggacagcgagagcggagatgagctgagcagcagcagcacagagcagatccgggccaccaccccacccaaccagggccgcccagacagccctgtgtatgccaacctgcaggagctgaagatcagccagagcgccctgccccccctgcccggcagccctgccatccagatcaacggggagtgggagacccacaaggacagcagcggccgctgctactactacaacagaggcacccaggagaggacctggaagcccccacgctggaccagagatgccagcatcagcaagggggacttccagaaccctggggaccaggagctgctgagcagcgaggagaactactacagcaccagctacagccagagcgacagccagtgtggcagccccccccggggctggagcgaggagctggatgagcggggccacaccctgtacaccagtgactacaccaatgagaagtggctgaagcacgtggatgaccagggccggcagtactactacagcgcagatggcagccgctctgagtgggagctgcccaagtacaatgccagcagccagcagcagcgggagatcatcaagagccgcagcctggaccggcggctgcaggagcccatcgtgctgaccaagtggaggcacagcaccatcgtgctggacaccaatgacaaggaccaggagaagtatggcctgctgaatgtgaccaagattgctgaaaatggcaagaaggtgaggaagaactggctgagctcctgggccgtgctgcagggcagcagcctgctcttcaccaagacccagggcagcagcacctcctggtttggcagcaaccagagcaagccagagttcaccgtggacctgaagggggccaccatcgagatggccagcaaggacaagagcagcaagaagaatgtgtttgagctgaagacccggcagggcacagagctgctgatccagagcgacaatgacaccgtcatcaatgactggttcaaggtgctgagcagcaccatcaacaaccaggccgtggagacagatgagggcatcgaggaggagatcccagacagccctggcatcgagaagcatgacaaggagaaggagcagaaggaccccaagaagctgcggagcttcaaggtgagcagcattgacagcagcgagcagaagaagaccaagaagaacctgaagaagttcctgacccggcggcccaccctgcaggccgtgcgggagaagggctacatcaaggaccaggtgtttggcagcaacctggccaacctgtgccagagagaaaatggcaccgtgcccaagtttgtgaagctgtgcattgaacatgtggaggagcacggcctggacattgatggcatctacagagtgtctggcaacctggccgtcatccagaagctgcgctttgctgtgaaccatgatgagaagctggacctgaatgacagcaagtgggaggacatccacgtgatcactggagccctgaagatgttcttccgggagctgcctgagcccctcttcaccttcaaccacttcaatgactttgtgaatgccatcaagcaggagccccggcagagggtggccgctgtgaaggacctgatccggcagctgcccaagcccaaccaggacaccatgcagatcctcttccgccacctgcggcgggtgattgaaaatggagagaagaacaggatgacctaccagagcatcgccatcgtgtttggccccaccctgctgaagccagagaaggagactggaaatattgctgtgcacacagtgtaccagaaccagatcgtggagctgatcctgctggagctgagcagcatcttcggccgctag

SEQ ID NO: 167873 - DNA, 2526 bp, synthetic construct
  misc_feature 1..2526: note = Description of Artificial Sequence: Synthetic coding sequence
  source 1..2526: mol_type = other DNA
atgaagatggctgacagaagtggcaagatcatccctggccaggtgtacatcgaggtggagtatgactatgaatatgaggccaaggacaggaagatcgtcatcaagcagggcgagcgctacatcctggtgaagaagaccaatgatgactggtggcaggtgaagccagatgagaacagcaaggccttctacgtgcctgcccagtatgtgaaggaggtgaccaggaaggccctgatgcctcctgtgaagcaggtggccggcctgcccaacaacagcaccaagatcatgcagagcctgcacctgcagaggagcacagaaaatgtgaacaagctgcctgagctgagcagctttgggaagcccagcagctctgtgcagggcaccggcctcatcagagatgccaaccagaactttggccccagctacaaccagggccagacagtgaacctgagcctggacctgacccacaacaacgggaagttcaacaatgacagccacagccccaaggtgagcagccagaacagaaccaggagctttggccacttccctggccctgagttcctggatgtggagaagaccagcttcagccaggagcagagctgtgacagcgctggggagggcagcgagcgcatccaccaggacagcgagagcggagatgagctgagcagcagcagcacagagcagatccgggccaccaccccacccaaccagggccgcccagacagccctgtgtatgccaacctgcaggagctgaagatcagccagagcgccctgccccccctgcccggcagccctgccatccagatcaacggggagtgggagacccacaaggacagcagcggccgctgctactactacaacagaggcacccaggagaggacctggaagcccccacgctggaccagagatgccagcatcagcaagggggacttccagaaccctggggaccaggagctgctgagcagcgaggagaactactacagcaccagctacagccagagcgacagccagtgtggcagccccccccggggctggagcgaggagctggatgagcggggccacaccctgtacaccagtgactacaccaatgagaagtggctgaagcacgtggatgaccagggccggcagtactactacagcgcagatggcagccgctctgagtgggagctgcccaagtacaatgccagcagccagcagcagcgggagatcatcaagagccgcagcctggaccggcggctgcaggagcccatcgtgctgaccaagtggaggcacagcaccatcgtgctggacaccaatgacaaggagagccccacagccagcaagccctgcttcccagaaaatgaaagcagccccagcagccccaagcaccaggacacagaccaggagaagtatggcctgctgaatgtgaccaagattgctgaaaatggcaagaaggtgaggaagaactggctgagctcctgggccgtgctgcagggcagcagcctgctcttcaccaagacccagggcagcagcacctcctggtttggcagcaaccagagcaagccagagttcaccgtggacctgaagggggccaccatcgagatggccagcaaggacaagagcagcaagaagaatgtgtttgagctgaagacccggcagggcacagagctgctgatccagagcgacaatgacaccgtcatcaatgactggttcaaggtgctgagcagcaccatcaacaaccaggccgtggagacagatgagggcatcgaggaggagatcccagacagccctggcatcgagaagcatgacaaggagaaggagcagaaggaccccaagaagctgcgctccttcaaggtgagcagcattgacagcagcgagcagaagaagaccaagaagaacctgaagaagttcctgacccggcggcccaccctgcaggccgtgcgggagaagggctacatcaaggaccaggtgtttggcagcaacctggccaacctgtgccagcgggagaatggaacagtgcccaagtttgtgaagctgtgcatcgagcacgtggaggagcacggcctggacattgatggcatctacagagtgtctggcaacctggccgtcatccagaagctgcgctttgctgtgaaccatgatgagaagctggacctgaatgacagcaagtgggaggacatccacgtgatcaccggggccctgaagatgttcttccgggagctgcctgagcccctcttcaccttcaaccacttcaatgactttgtgaatgccatcaagcaggagccccggcagagggtggccgctgtgaaggacctgatccggcagctgcccaagcccaaccaggacaccatgcagatcctcttccgccacctgcggcgggtgattgaaaatggagagaagaacaggatgacctaccagagcatcgccatcgtgtttggccccaccctgctgaagccagagaaggagaccggcaacattgctgtgcacacagtgtaccagaaccagatcgtggagctgatcctgctggagctgagcagcatctttggaagatag

SEQ ID NO: 167874 - DNA, 591 bp, synthetic construct
  misc_feature 1..591: note = Description of Artificial Sequence: Synthetic coding sequence
  source 1..591: mol_type = other DNA
tgaagcaccagctacagccagagcgacagccagtgtggcagccccccccggggctggagcgaggagctggatgagcggggccacaccctgtacaccagtgactacaccaatgagaagtggctgaagcacgtggatgaccagggccggcagtactactacagcgcagatggcagccgctctgagtgggagctgcccaagtacaatgccagcagccagcagcagcgggagatcatcaagagccgcagcctggaccggcggctgcaggagcccatcgtgctgaccaagtggaggcacagcaccatcgtgctggacaccaatgacaaggagagccccacagccagcaagccctgcttcccagaaaatgaaagcagccccagcagccccaagcaccaggacacagaccaggagaagtatggcctgctgaatgtgaccaagattgctgaaaatggcaagaaggtgaggaagaactggctgagctcctgggccgtgctgcagggcagcagcctgctcttcaccaagacccagggcagcagcacctcctggtttggcagcaaccagagcaagccagagttcaccgtggacctgaagtag

SEQ ID NO: 167875 - DNA, 2646 bp, synthetic construct
  misc_feature 1..2646: note = Description of Artificial Sequence: Synthetic coding sequence
  source 1..2646: mol_type = other DNA
atgaagaagcagttcaacaggatgaagcagctggccaaccagacagtgggccgggcagagaagacagaggtgctgtctgaggacctgctgcagatcgagcggcggctggacacagtgcgcagcatctgccaccacagccacaagaggctggtggcctgcttccagggccagcacggcacagatgctgagcggcggcacaagaagctgcccctgacagccctggcccagaacatgcaggaggccagcacccagctggaggacagcctgctgggcaagatgctggagacctgtggagatgctgagaaccagctggccctggagctgagccagcacgaggtgtttgtggagaaggagatcgtggaccccctgtatggaattgctgaggtggagatccccaacatccagaagcagaggaagcagctggcccggctggtgctggactgggacagcgtgcgggcccgctggaaccaggcccacaagagcagcggcaccaacttccagggcctgcccagcaagattgacaccctgaaggaggagatggatgaagctggcaacaaggtggagcagtgcaaggaccagctggccgctgacatgtacaacttcatggccaaggagggggagtatggcaagttctttgtgaccctgctggaggcccaggccgactaccacaggaaggccctggccgtgctggagaagaccctgcctgagatgagggcccaccaggacaagtgggccgagaagccagccttcggcacccccctggaggagcacctgaagaggagcggccgggagatcgccctgcccatcgaggcctgtgtgatgctgctgctggagaccggcatgaaggaggagggcctcttcagaattggagctggggccagcaagctgaagaagctgaaggccgccctggactgcagcaccagccacctggatgagttctacagcgacccccatgctgtggccggggccctgaagagctacctgcgggagctgcctgagcccctgatgaccttcaacctgtatgaggagtggacccaggtggcctctgtgcaggaccaggacaagaagctgcaggacctgtggaggacctgccagaagctgcccccccagaactttgtgaacttccgctacctgatcaagttcctggccaagctggcccagaccagtgatgtgaacaagatgacccccagcaacatcgccatcgtgctgggccccaacctgctgtgggccagaaatgaaggcaccctggccgagatggctgctgccacctctgtgcacgtggtggccgtgattgagcccatcatccagcacgccgactggttcttccctgaggaggtggagttcaacgtgtctgaggcctttgtgcccctgaccacccccagcagcaaccacagcttccacactggaaatgacagcgacagcggcaccctggagaggaagaggcctgcctccatggctgtgatggagggggacctggtgaagaaggagagctttggagtgaagctgatggacttccaggcccacagaagaggaggcaccctgaacaggaagcacatcagccctgccttccagccccccctgcccccaacagatggcagcacagtggtgcctgctggccctgagcccccaccccagagcagcagagctgagagcagcagcggcggcggcaccgtgcccagcagcgctggcatcctggagcagggccccagccctggagatggcagcccccccaagcccaaggaccctgtgtctgctgctgtgcctgcccctggcaggaacaacagccagatcgccagcggccagaaccagccccaggccgccgccggcagccaccagctgtccatgggccagccccacaatgctgctggccccagcccccacaccctgcggcgggctgtgaagaagccagccccagccccacccaagccaggcaaccccccacctggccaccctgggggccagagcagcagcggcaccagccagcacccccccagcctgagccccaagccacccaccaggagccccagcccccccacccagcacacaggccagcccccaggccagcccagcgcccccagccagctgagcgccccccggcgctacagcagcagcctgagccccatccaggcccccaaccaccccccaccccagccccccacccaggccacccccctgatgcacaccaagcccaacagccagggcccccccaaccccatggccctgcccagcgagcacggcctggagcagcccagccacaccccaccccagacccccaccccacccagcaccccacccctgggcaagcagaaccccagcctgcctgccccccagaccctggccggcggcaaccctgagacagcccagccccatgctggcaccctgccccggcccaggcctgtgcccaagcccaggaaccggcccagcgtgcccccaccaccccagcccccaggagtgcacagcgctggggacagcagcctgaccaacacagcccccacagccagcaagatcgtgacagacagcaacagccgggtgtctgagccccacaggagcatcttccctgagatgcacagcgacagcgccagcaaggatgtgcccggccgcatcctgctggacatcgacaatgacacagagagcacagccctgtag

SEQ ID NO: 167876 - DNA, 2412 bp, synthetic construct
  misc_feature 1..2412: note = Description of Artificial Sequence: Synthetic coding sequence
  source 1..2412: mol_type = other DNA
atgaagaagcagttcaacaggatgaagcagctggccaaccagacagtgggccgggcagagaagacagaggtgctgtctgaggacctgctgcagatcgagcggcggctggacacagtgcgcagcatctgccaccacagccacaagaggctggtggcctgcttccagggccagcacggcacagatgctgagcggcggcacaagaagctgcccctgacagccctggcccagaacatgcaggaggccagcacccagctggaggacagcctgctgggcaagatgctggagacctgtggagatgctgagaaccagctggccctggagctgagccagcacgaggtgtttgtggagaaggagatcgtggaccccctgtatggaattgctgaggtggagatccccaacatccagaagcagaggaagcagctggcccggctggtgctggactgggacagcgtgcgggcccgctggaaccaggcccacaagagcagcggcaccaacttccagggcctgcccagcaagattgacaccctgaaggaggagatggatgaagctggcaacaaggtggagcagtgcaaggaccagctggccgctgacatgtacaacttcatggccaaggagggggagtatggcaagttctttgtgaccctgctggaggcccaggccgactaccacaggaaggccctggccgtgctggagaagaccctgcctgagatgagggcccaccaggacaagtgggccgagaagccagccttcggcacccccctggaggagcacctgaagaggagcggccgggagatcgccctgcccatcgaggcctgtgtgatgctgctgctggagaccggcatgaaggaggagggcctcttcagaattggagctggggccagcaagctgaagaagctgaaggccgccctggactgcagcaccagccacctggatgagttctacagcgacccccatgctgtggccggggccctgaagagctacctgcgggagctgcctgagcccctgatgaccttcaacctgtatgaggagtggacccaggtggcctctgtgcaggaccaggacaagaagctgcaggacctgtggaggacctgccagaagctgcccccccagaactttgtgaacttccgctacctgatcaagttcctggccaagctggcccagaccagtgatgtgaacaagatgacccccagcaacatcgccatcgtgctgggccccaacctgctgtgggccagaaatgaaggcaccctggccgagatggctgctgccacctctgtgcacgtggtggccgtgattgagcccatcatccagcacgccgactggttcttccctgaggaggtggagttcaacgtgtctgaggcctttgtgcccctgaccacccccagcagcaaccacagcttccacactggaaatgacagcgacagcggcaccctggagaggaagaggcctgcctccatggctgtgatggagggggacctggtgaagaaggagagcccccccaagcccaaggaccctgtgtctgctgctgtgcctgcccctggcaggaacaacagccagatcgccagcggccagaaccagccccaggccgccgccggcagccaccagctgtccatgggccagccccacaatgctgctggccccagcccccacaccctgcggcgggctgtgaagaagccagccccagccccacccaagccaggcaaccccccacctggccaccctgggggccagagcagcagcggcaccagccagcacccccccagcctgagccccaagccacccaccaggagccccagcccccccacccagcacacaggccagcccccaggccagcccagcgcccccagccagctgagcgccccccggcgctacagcagcagcctgagccccatccaggcccccaaccaccccccaccccagccccccacccaggccacccccctgatgcacaccaagcccaacagccagggcccccccaaccccatggccctgcccagcgagcacggcctggagcagcccagccacaccccaccccagacccccaccccacccagcaccccacccctgggcaagcagaaccccagcctgcctgccccccagaccctggccggcggcaaccctgagacagcccagccccatgctggcaccctgccccggcccaggcctgtgcccaagcccaggaaccggcccagcgtgcccccaccaccccagcccccaggagtgcacagcgctggggacagcagcctgaccaacacagcccccacagccagcaagatcgtgacagacagcaacagccgggtgtctgagccccacaggagcatcttccctgagatgcacagcgacagcgccagcaaggatgtgcccggccgcatcctgctggacatcgacaatgacacagagagcacagccctgtag

SEQ ID NO: 167877 - DNA, 681 bp, synthetic construct
  misc_feature 1..681: note = Description of Artificial Sequence: Synthetic coding sequence
  source 1..681: mol_type = other DNA
atgaagaagcagttcaacaggatgaagcagctggccaaccagacagtgggccgggcagagaagacagaggtgctgtctgaggacctgctgcagatcgagcggcggctggacacagtgcgcagcatctgccaccacagccacaagaggctggtggcctgcttccagggccagcacggcacagatgctgagcggcggcacaagaagctgcccctgacagccctggcccagaacatgcaggaggccagcacccagctggaggacagcctgctgggcaagatgctggagacctgtggagatgctgagaaccagctggccctggagctgagccagcacgaggtgtttgtggagaaggagatcgtggaccccctgtatggaattgctgaggtggagatccccaacatccagaagcagaggaagcagctggcccggctggtgctggactgggacagcgtgcgggcccgctggaaccaggcccacaagagcagcggcaccaacttccagggcctgcccagcaagattgacaccctgaaggaggagatggatgaagctggcaacaaggtggagcagtgcaaggaccagctggccgctgacatgtacaacttcatggccaaggagggggagtatggcaagttctttgtgaccatcagcggcaggaagaaccagcccctgggcctgccctag

SEQ ID NO: 167878 - DNA, 2523 bp, synthetic construct
  misc_feature 1..2523: note = Description of Artificial Sequence: Synthetic coding sequence
  source 1..2523: mol_type = other DNA
atgaagaagcagttcaacaggatgaagcagctggccaaccagacagtgggccgggcagagaagacagaggtgctgtctgaggacctgctgcagatcgagcggcggctggacacagtgcgcagcatctgccaccacagccacaagaggctggtggcctgcttccagggccagcacggcacagatgctgagcggcggcacaagaagctgcccctgacagccctggcccagaacatgcaggaggccagcacccagctggaggacagcctgctgggcaagatgctggagacctgtggagatgctgagaaccagctggccctggagctgagccagcacgaggtgtttgtggagaaggagatcgtggaccccctgtatggaattgctgaggtggagatccccaacatccagaagcagaggaagcagctggcccggctggtgctggactgggacagcgtgcgggcccgctggaaccaggcccacaagagcagcggcaccaacttccagggcctgcccagcaagattgacaccctgaaggaggagatggatgaagctggcaacaaggtggagcagtgcaaggaccagctggccgctgacatgtacaacttcatggccaaggagggggagtatggcaagttctttgtgaccctgctggaggcccaggccgactaccacaggaaggccctggccgtgctggagaagaccctgcctgagatgagggcccaccaggacaagtgggccgagaagccagccttcggcacccccctggaggagcacctgaagaggagcggccgggagatcgccctgcccatcgaggcctgtgtgatgctgctgctggagaccggcatgaaggaggagggcctcttcagaattggagctggggccagcaagctgaagaagctgaaggccgccctggactgcagcaccagccacctggatgagttctacagcgacccccatgctgtggccggggccctgaagagctacctgcgggagctgcctgagcccctgatgaccttcaacctgtatgaggagtggacccaggtggcctctgtgcaggaccaggacaagaagctgcaggacctgtggaggacctgccagaagctgcccccccagaactttgtgaacttccgctacctgatcaagttcctggccaagctggcccagaccagtgatgtgaacaagatgacccccagcaacatcgccatcgtgctgggccccaacctgctgtgggccagaaatgaaggcaccctggccgagatggctgctgccacctctgtgcacgtggtggccgtgattgagcccatcatccagcacgccgactggttcttccctgaggaggtggagttcaacgtgtctgaggcctttgtgcccctgaccacccccagcagcaaccacagcttccacactggaaatgacagcgacagcggcaccctggagaggaagaggcctgcctccatggctgtgatggagggggacctggtgaagaaggagagctttggagtgaagctgatggacttccaggcccacagaagaggaggcaccctgaacaggaagcacatcagccctgccttccagccccccctgcccccaacagatggcagcacagtggtgcctgctggccctgagcccccaccccagagcagcagagctgagagcagcagcggcggcggcaccgtgcccagcagcgctggcatcctggagcagggccccagccctggagatggcagcccccccaagcccaaggaccctgtgtctgctgctgtgcctgcccctggcaggaacaacagccagatcgccagcggccagaaccagccccaggccgccgccggcagccaccagctgtccatgggccagccccacaatgctgctggccccagcccccacaccctgcggcgggctgtgaagaagccagccccagccccacccaagccaggcaaccccccacctggccaccctgggggccagagcagcagcggcaccagccagcacccccccagcctgagccccaagccacccaccaggagccccagcccccccacccagcacacaggccagcccccaggccagcccagcgcccccagccagctgagcgccccccggcgctacagcagcagcctgagccccatccaggcccccaaccaccccccaccccagccccccacccaggccacccccctgatgcacaccaagcccaacagccagggcccccccaaccccatggccctgcccagcgagcacggcctggagcagcccagccacaccccaccccagacccccaccccacccagcaccccacccctgggcaagcagaaccccagcctgcctgccccccagaccctggccggcggcaaccctgagacagcccagccccatgctggcaccctgccccggcccaggcctgtgcccaagcccaggaaccggcccagcgtgcccccaccaccccagcccccaggagtgcacagcgctggggacagcagcctgaccaacacagcccccacagccagcaagatcgtgactggagtgtag

SEQ ID NO: 167879 - DNA, 1992 bp, synthetic construct
  misc_feature 1..1992: note = Description of Artificial Sequence: Synthetic coding sequence
  source 1..1992: mol_type = other DNA
atgtcctggctgagcagcagccagggcgtggtgctgacagcctaccaccccagcggcaaggaccagacagtgggcaacagccacgccaaggccggggaggaggccaccagcagcagaagatatggccagtacaccatgaaccaggagagcaccaccatcaaggtgatggagaagcccccatttgacaggagcatcagccaggacagcctggatgagctgtccatggaggactactggattgagctggagaacatcaagaagagcagcgagaacagccaggaggaccaggaggtggtggtggtgaaggagccagatgaaggagagctggaggaggagtggctgaaggaggccggcctgagcaacctgtttggagagagcgctggggacccccaggagagcatcgtgttcctgagcaccctgaccaggacccaggccgctgctgtgcagaagagggtggagaccgtgtcccagaccctgaggaagaagaacaagcagtaccagatcccagatgtgcgggacatctttgcccagcagcgggagagcaaggagacagcccctgggggcacagagagccagagcctgcggaccaatgaaaacaagtaccagggcagagatgatgaggccagcaacctggtgggggaggagaagctgatccccccagaggagaccccagcccctgagacagacatcaacctggaggtgtcctttgctgagcaggccctgaaccagaaggagagcagcaaggagaagatccagaagagcaaaggagatgatgccaccctgcccagcttccggctgcccaaggacaagacaggcaccacccgcatcggggacctggccccccaggacatgaagaaggtgtgccacctggccctgattgagctgacagccctgtatgatgtgctgggcatcgagctgaagcagcagaaggctgtgaagatcaagaccaaggacagcggcctcttctgtgtgcccctgacagccctgctggagcaggaccagaggaaggtgcccggcatgaggatccccctcatcttccagaagctgatcagcagaattgaggagcggggcctggagacagagggcctgctgcgcatccctggagctgccatccgcatcaagaacctgtgccaggagctggaggccaagttctatgagggcaccttcaactgggagagcgtgaagcagcatgatgctgccagcctgctgaagctgttcatccgggagctgccccagcccctgctgtctgtggagtacctgaaggccttccaggccgtgcagaacctgcccaccaagaagcagcagctgcaggccctgaacctgctggtgatcctgctgcctgatgccaacagagacaccctgaaggccctgctggagttcctgcagagggtgattgacaacaaggagaagaacaagatgacagtgatgaatgtggccatggtgatggcccccaacctcttcatgtgccacgccctgggcctgaagagcagcgagcagcgggagtttgtgatggccgccggcacagccaacaccatgcacctgctgatcaagtaccagaagctgctgtggaccatccccaagttcatcgtgaaccaggtgaggaagcagaacacagagaaccacaagaaggacaagagggccatgaagaagctgctgaagaagatggcctatgaccgggagaagtatgagaagcaggacaagagcaccaatgatgctgatgtgccccagggcgtcatccgggtgcaggccccccacctgagcaaggtgtccatggccatccagctgacagaggagctgaaggccagtgatgtgctggcccgcttcctgagccaggagagcggcgtggcccagaccctgaagaagggggaggtgttcctgtatgaaattggaggcaacattggagagcgctgcctggatgatgacacctacatgaaggacctgtaccagctgaaccccaatgctgagtgggtgatcaagagcaagcccctgtag

SEQ ID NO: 167880 - DNA, 1857 bp, synthetic construct
  misc_feature 1..1857: note = Description of Artificial Sequence: Synthetic coding sequence
  source 1..1857: mol_type = other DNA
atgaaccaggagagcaccaccatcaaggtgatggagaagcccccatttgacaggagcatcagccaggacagcctggatgagctgtccatggaggactactggattgagctggagaacatcaagaagagcagcgagaacagccaggaggaccaggaggtggtggtggtgaaggagccagatgaaggagagctggaggaggagtggctgaaggaggccggcctgagcaacctgtttggagagagcgctggggacccccaggagagcatcgtgttcctgagcaccctgaccaggacccaggccgctgctgtgcagaagagggtggagaccgtgtcccagaccctgaggaagaagaacaagcagtaccagatcccagatgtgcgggacatctttgcccagcagcgggagagcaaggagacagcccctgggggcacagagagccagagcctgcggaccaatgaaaacaagtaccagggcagagatgatgaggccagcaacctggtgggggaggagaagctgatccccccagaggagaccccagcccctgagacagacatcaacctggaggtgtcctttgctgagcaggccctgaaccagaaggagagcagcaaggagaagatccagaagagcaaaggagatgatgccaccctgcccagcttccggctgcccaaggacaagacaggcaccaccagaattggagacctggccccccaggacatgaagaaggtgtgccacctggccctgattgagctgacagccctgtatgatgtgctgggcatcgagctgaagcagcagaaggctgtgaagatcaagaccaaggacagcggcctcttctgtgtgcccctgacagccctgctggagcaggaccagaggaaggtgcccggcatgaggatccccctcatcttccagaagctgatcagccgcatcgaggagcggggcctggagacagagggcctgctgcgcatccctggggccgccatccgcatcaagaacctgtgccaggagctggaggccaagttctatgagggcaccttcaactgggagagcgtgaagcagcatgatgctgccagcctgctgaagctgttcatccgggagctgccccagcccctgctgtctgtggagtacctgaaggccttccaggccgtgcagaacctgcccaccaagaagcagcagctgcaggccctgaacctgctggtgatcctgctgcctgatgccaacagagacaccctgaaggccctgctggagttcctgcagagggtcatcgacaacaaggagaagaacaagatgacagtgatgaatgtggccatggtgatggcccccaacctcttcatgtgccacgccctgggcctgaagagcagcgagcagcgggagtttgtgatggctgctggaacagccaacaccatgcacctgctgatcaagtaccagaagctgctgtggaccatccccaagttcatcgtgaaccaggtgaggaagcagaacacagagaaccacaagaaggacaagagggccatgaagaagctgctgaagaagatggcctatgaccgggagaagtatgagaagcaggacaagagcaccaatgatgctgatgtgccccagggcgtcatccgggtgcaggccccccacctgagcaaggtgtccatggccatccagctgacagaggagctgaaggccagtgatgtgctggcccgcttcctgagccaggagagcggcgtggcccagaccctgaagaagggggaggtgttcctgtatgagatcggcggcaacatcggggagcgctgcctggatgatgacacctacatgaaggacctgtaccagctgaaccccaatgctgagtgggtgatcaagagcaagcccctgtag

SEQ ID NO: 167881 - DNA, 1485 bp, synthetic construct
  misc_feature 1..1485: note = Description of Artificial Sequence: Synthetic coding sequence
  source 1..1485: mol_type = other DNA
atggccacagaggcccagagcgagggggaggtgcctgcccgggagagcggccgcagtgatgccatctgcagctttgtgatctgcaatgacagcagcctgcggggccagcccatcatcttcaacccagacttctttgtggagaagctgcggcatgagaagccagagatcttcacagagctggtggtgagcaacatcacccggctgattgacctgcccggcacagagctggcccagctgatgggagaggtggacctgaagctgcccggcggggccggccctgccagcggcttcttccgcagcctgatgagcctgaagaggaaggagaagggcgtcatcttcggcagccccctgacagaggagggcatcgcccagatctaccagctgattgagtacctgcacaagaacctgcgggtggagggcctcttccgggtgcccggcaacagcgtgcggcagcagatcctgagagatgccctgaacaacggcacagacatcgacctggagagcggggagttccacagcaatgatgtggccaccctgctgaagatgttcctgggggagctgcctgagcccctgctgacccacaagcacttcaatgcccacctgaagattgctgacctgatgcagtttgatgacaagggcaacaagaccaacatcccagacaaggaccggcagatcgaggccctgcagctgctcttcctgatcctgcccccacccaacagaaacctgctgaagctgctgctggacctgctgtaccagacagccaagaagcaggacaagaacaagatgtctgcctacaacctggccctgatgtttgccccccacgtgctgtggcccaagaatgtgacagccaatgacctgcaggagaacatcaccaagctgaacagcggcatggccttcatgatcaagcacagccagaagctgttcaaggccccagcctacatccgggagtgtgcccggctgcactacctgggcagcaggacccaggccagcaaggatgacctggacctgattgccagctgccacaccaagagcttccagctggccaagagccagaagaggaacagagtggacagctgcccccaccaggaggagacccagcaccacacagaggaggccctgcgggagctgttccagcacgtgcatgacatgcctgagagcgccaagaagaagcagctgatccggcagttcaacaagcagagcctgacccagaccccaggccgggagcccagcaccagccaggtgcagaagagggcccggagccgctccttcagcggcctcatcaagaggaaggtgctgggcaaccagatgatgtctgagaagaagaagaagaaccccaccccagagagcgtggccatcggggagctgaagggcaccagcaaagaaaatagaaacctgctcttcagcggcagccctgctgtgaccatgacccccacccggctgaagtggagcgagggcaagaaggagggcaagaaggtgttcctgtag

SEQ ID NO: 167882 - DNA, 1458 bp, synthetic construct
  misc_feature 1..1458: note = Description of Artificial Sequence: Synthetic coding sequence
  source 1..1458: mol_type = other DNA
atgccccaccagaagctgagcgccctgattgatgccatctgcagctttgtgatctgcaatgacagcagcctgcggggccagcccatcatcttcaacccagacttctttgtggagaagctgcggcatgagaagccagagatcttcacagagctggtggtgagcaacatcacccggctgattgacctgcctggaacagagctggcccagctgatgggagaggtggacctgaagctgcctggaggagctggccctgccagcggcttcttccgcagcctgatgagcctgaagaggaaggagaagggcgtcatcttcggcagccccctgacagaggagggcatcgcccagatctaccagctgattgagtacctgcacaagaacctgcgggtggagggcctcttccgggtgcccggcaacagcgtgcggcagcagatcctgagagatgccctgaacaatggaacagacatcgacctggagagcggggagttccacagcaatgatgtggccaccctgctgaagatgttcctgggggagctgcctgagcccctgctgacccacaagcacttcaatgcccacctgaagattgctgacctgatgcagtttgatgacaagggcaacaagaccaacatcccagacaaggaccggcagatcgaggccctgcagctgctcttcctgatcctgcccccacccaacagaaacctgctgaagctgctgctggacctgctgtaccagacagccaagaagcaggacaagaacaagatgtctgcctacaacctggccctgatgtttgcccctcatgtgctgtggcccaagaatgtgacagccaatgacctgcaggagaacatcaccaagctgaacagcggcatggccttcatgatcaagcacagccagaagctgttcaaggccccagcctacatcagagaatgtgcccggctgcactacctgggcagcaggacccaggccagcaaggatgacctggacctgattgccagctgccacaccaagagcttccagctggccaagagccagaagaggaacagagtggacagctgcccccaccaggaggagacccagcaccacacagaggaggccctgcgggagctgttccagcacgtgcatgacatgcctgagagcgccaagaagaagcagctgatccggcagttcaacaagcagagcctgacccagaccccaggccgggagcccagcaccagccaggtgcagaagagggcccggagccgctccttcagcggcctcatcaagaggaaggtgctgggcaaccagatgatgtctgagaagaagaagaagaaccccaccccagagagcgtggccatcggggagctgaagggcaccagcaaggagaacagaaacctgctcttcagcggcagccctgctgtgaccatgacccccacccggctgaagtggagcgagggcaagaaggagggcaagaaggtgttcctgtag

SEQ ID NO: 167883 - DNA, 1398 bp, synthetic construct
  misc_feature 1..1398: note = Description of Artificial Sequence: Synthetic coding sequence
  source 1..1398: mol_type = other DNA
atggccacagaggcccagagcgagggggaggtgcctgcccgggagagcggccgcagtgatgccatctgcagctttgtgatctgcaatgacagcagcctgcggggccagcccatcatcttcaacccagacttctttgtggagaagctgcggcatgagaagccagagatcttcacagagctggtggtgagcaacatcacccggctgattgacctgcccggcacagagctggcccagctgatgggagaggtggacctgaagctgcccggcggggccggccctgccagcggcttcttccgcagcctgatgagcctgaagaggaaggagaagggcgtcatcttcggcagccccctgacagaggagggcatcgcccagatctaccagctgattgagtacctgcacaagaacctgcgggtggagggcctcttccgggtgcccggcaacagcgtgcggcagcagatcctgagagatgccctgaacaacggcacagacatcgacctggagagcggggagttccacagcaatgatgtggccaccctgctgaagatgttcctgggggagctgcctgagcccctgctgacccacaagcacttcaatgcccacctgaagattgctgacctgatgcagtttgatgacaagggcaacaagaccaacatcccagacaaggaccggcagatcgaggccctgcagctgctcttcctgatcctgcccccacccaacagaaacctgctgaagctgctgctggacctgctgtaccagacagccaagaagcaggacaagaacaagatgtctgcctacaacctggccctgatgtttgccccccacgtgctgtggcccaagaatgccccagcctacatcagagaatgtgcccggctgcactacctgggcagcaggacccaggccagcaaggatgacctggacctgattgccagctgccacaccaagagcttccagctggccaagagccagaagaggaacagagtggacagctgcccccaccaggaggagacccagcaccacacagaggaggccctgcgggagctgttccagcacgtgcatgacatgcctgagagcgccaagaagaagcagctgatccggcagttcaacaagcagagcctgacccagaccccaggccgggagcccagcaccagccaggtgcagaagagggcccggagccgctccttcagcggcctcatcaagaggaaggtgctgggcaaccagatgatgtctgagaagaagaagaagaaccccaccccagagagcgtggccatcggggagctgaagggcaccagcaaggagaacagaaacctgctcttcagcggcagccctgctgtgaccatgacccccacccggctgaagtggagcgagggcaagaaggagggcaagaaggcctttgtgtag

SEQ ID NO: 167884 - DNA, 1485 bp, synthetic construct
  misc_feature 1..1485: note = Description of Artificial Sequence: Synthetic coding sequence
  source 1..1485: mol_type = other DNA
atggccacagaggcccagagcgagggggaggtgcctgcccgggagagcggccgcagtgatgccatctgcagctttgtgatctgcaatgacagcagcctgcggggccagcccatcatcttcaacccagacttctttgtggagaagctgcggcatgagaagccagagatcttcacagagctggtggtgagcaacatcacccggctgattgacctgcccggcacagagctggcccagctgatgggagaggtggacctgaagctgcccggcggggccggccctgccagcggcttcttccgcagcctgatgagcctgaagaggaaggagaagggcgtcatcttcggcagccccctgacagaggagggcatcgcccagatctaccagctgattgagtacctgcacaagaacctgcgggtggagggcctcttccgggtgcccggcaacagcgtgcggcagcagatcctgagagatgccctgaacaacggcacagacatcgacctggagagcggggagttccacagcaatgatgtggccaccctgctgaagatgttcctgggggagctgcctgagcccctgctgacccacaagcacttcaatgcccacctgaagattgctgacctgatgcagtttgatgacaagggcaacaagaccaacatcccagacaaggaccggcagatcgaggccctgcagctgctcttcctgatcctgcccccacccaacagaaacctgctgaagctgctgctggacctgctgtaccagacagccaagaagcaggacaagaacaagatgtctgcctacaacctggccctgatgtttgccccccacgtgctgtggcccaagaatgtgacagccaatgacctgcaggagaacatcaccaagctgaacagcggcatggccttcatgatcaagcacagccagaagctgttcaaggccccagcctacatccgggagtgtgcccggctgcactacctgggcagcaggacccaggccagcaaggatgacctggacctgattgccagctgccacaccaagagcttccagctggccaagagccagaagaggaacagagtggacagctgcccccaccaggaggagacccagcaccacacagaggaggccctgcgggagctgttccagcacgtgcatgacatgcctgagagcgccaagaagaagcagctgatccggcagttcaacaagcagagcctgacccagaccccaggccgggagcccagcaccagccaggtgcagaagagggcccggagccgctccttcagcggcctcatcaagaggaaggtgctgggcaaccagatgatgtctgagaagaagaagaagaaccccaccccagagagcgtggccatcggggagctgaagggcaccagcaaagaaaatagaaacctgctcttcagcggcagccctgctgtgaccatgacccccacccggctgaagtggagcgagggcaagaaggagggcaagaagggcttcctgtag

SEQ ID NO: 167885 - DNA, 1458 bp, synthetic construct
  misc_feature 1..1458: note = Description of Artificial Sequence: Synthetic coding sequence
  source 1..1458: mol_type = other DNA
atgccccaccagaagctgagcgccctgattgatgccatctgcagctttgtgatctgcaatgacagcagcctgcggggccagcccatcatcttcaacccagacttctttgtggagaagctgcggcatgagaagccagagatcttcacagagctggtggtgagcaacatcacccggctgattgacctgcctggaacagagctggcccagctgatgggagaggtggacctgaagctgcctggaggagctggccctgccagcggcttcttccgcagcctgatgagcctgaagaggaaggagaagggcgtcatcttcggcagccccctgacagaggagggcatcgcccagatctaccagctgattgagtacctgcacaagaacctgcgggtggagggcctcttccgggtgcccggcaacagcgtgcggcagcagatcctgagagatgccctgaacaatggaacagacatcgacctggagagcggggagttccacagcaatgatgtggccaccctgctgaagatgttcctgggggagctgcctgagcccctgctgacccacaagcacttcaatgcccacctgaagattgctgacctgatgcagtttgatgacaagggcaacaagaccaacatcccagacaaggaccggcagatcgaggccctgcagctgctcttcctgatcctgcccccacccaacagaaacctgctgaagctgctgctggacctgctgtaccagacagccaagaagcaggacaagaacaagatgtctgcctacaacctggccctgatgtttgcccctcatgtgctgtggcccaagaatgtgacagccaatgacctgcaggagaacatcaccaagctgaacagcggcatggccttcatgatcaagcacagccagaagctgttcaaggccccagcctacatcagagaatgtgcccggctgcactacctgggcagcaggacccaggccagcaaggatgacctggacctgattgccagctgccacaccaagagcttccagctggccaagagccagaagaggaacagagtggacagctgcccccaccaggaggagacccagcaccacacagaggaggccctgcgggagctgttccagcacgtgcatgacatgcctgagagcgccaagaagaagcagctgatccggcagttcaacaagcagagcctgacccagaccccaggccgggagcccagcaccagccaggtgcagaagagggcccggagccgctccttcagcggcctcatcaagaggaaggtgctgggcaaccagatgatgtctgagaagaagaagaagaaccccaccccagagagcgtggccatcggggagctgaagggcaccagcaaggagaacagaaacctgctcttcagcggcagccctgctgtgaccatgacccccacccggctgaagtggagcgagggcaagaaggagggcaagaagggcttcctgtag

SEQ ID NO: 167886 - DNA, 942 bp, synthetic construct
  misc_feature 1..942: note = Description of Artificial Sequence: Synthetic coding sequence
  source 1..942: mol_type = other DNA
atgttcctgggggagctgcctgagcccctgctgacccacaagcacttcaatgcccacctgaagattgctgacctgatgcagtttgatgacaagggcaacaagaccaacatcccagacaaggaccggcagatcgaggccctgcagctgctcttcctgatcctgcccccacccaacagaaacctgctgaagctgctgctggacctgctgtaccagacagccaagaagcaggacaagaacaagatgtctgcctacaacctggccctgatgtttgcccctcatgtgctgtggcccaagaatgtgacagccaatgacctgcaggagaacatcaccaagctgaacagcggcatggccttcatgatcaagcacagccagaagctgttcaaggccccagcctacatcagagaatgtgcccggctgcactacctgggcagcaggacccaggccagcaaggatgacctggacctgattgccagctgccacaccaagagcttccagctggccaagagccagaagaggaacagagtggacagctgcccccaccaggaggagacccagcaccacacagaggaggccctgcgggagctgttccagcacgtgcatgacatgcctgagagcgccaagaagaagcagctgatccggcagttcaacaagcagagcctgacccagaccccaggccgggagcccagcaccagccaggtgcagaagagggcccggagccgctccttcagcggcctcatcaagaggaaggtgctgggcaaccagatgatgtctgagaagaagaagaagaaccccaccccagagagcgtggccatcggggagctgaagggcaccagcaaggagaacagaaacctgctcttcagcggcagccctgctgtgaccatgacccccacccggctgaagtggagcgagggcaagaaggagggcaagaagggcttcctgtag

SEQ ID NO: 167887 - DNA, 1554 bp, synthetic construct
  misc_feature 1..1554: note = Description of Artificial Sequence: Synthetic coding sequence
  source 1..1554: mol_type = other DNA
atggccacagaggcccagagcgagggggaggtgcctgcccgggagagcggccgcagtgatgccatctgcagctttgtgatctgcaatgacagcagcctgcggggccagcccatcatcttcaacccagacttctttgtggagaagctgcggcatgagaagccagagatcttcacagagctggtggtgagcaacatcacccggctgattgacctgcccggcacagagctggcccagctgatgggagaggtggacctgaagctgcccggcggggccggccctgccagcggcttcttccgcagcctgatgagcctgaagaggaaggagaagggcgtcatcttcggcagccccctgacagaggagggcatcgcccagatctaccagctgattgagtacctgcacaagaacctgcgggtggagggcctcttccgggtgcccggcaacagcgtgcggcagcagatcctgagagatgccctgaacaacggcacagacatcgacctggagagcggggagttccacagcaatgatgtggccaccctgctgaagatgttcctgggggagctgcctgagcccctgctgacccacaagcacttcaatgcccacctgaagattgctgacctgatgcagtttgatgacaagggcaacaagaccaacatcccagacaaggaccggcagatcgaggccctgcagctgctcttcctgatcctgcccccacccaacagaaacctgctgaagctgctgctggacctgctgtaccagacagccaagaagcaggacaagaacaagatgtctgcctacaacctggccctgatgtttgccccccacgtgctgtggcccaagaatgtgacagccaatgacctgcaggagaacatcaccaagctgaacagcggcatggccttcatgatcaagcacagccagaagctgttcaaggccccagcctacatccgggagtgtgcccggctgcactacctgggcagcaggacccaggccagcaaggatgacctggacctgattgccagctgccacaccaagagcttccagctggccaagagccagaagaggaacagagtggacagctgcccccaccaggaggagacccagcaccacacagaggaggccctgcgggagctgttccagcacgtgcatgacatgcctgagagcgccaagaagaagcagctgatccggcagttcaacaagcagagcctgacccagaccccaggccgggagcccagcaccagccaggtgcagaagagggcccggagccgctccttcagcggcctcatcaagaggaaggtgctgggcaaccagatgatgtctgagaagaagaagaagaaccccaccccagagagcgtggccatcggggagctgaagggcaccagcaaagaaaatagaaacctgctcttcagcggcagccctgctgtgaccatgacccccacccggctgaagtggagcgagggcaagaaggagggcaagaagggcaacagcatggccaccaccagcctgggcagcatccgcatgaccctgcggggcagcagcagctgtggctgctgcagctag

SEQ ID NO: 167888 - DNA, 3654 bp, synthetic construct
  misc_feature 1..3654: note = Description of Artificial Sequence: Synthetic coding sequence
  source 1..3654: mol_type = other DNA
atggcccagcctgtggagatcagccccccagacagcagcctgagcaagcagcagaccagcacccctgtgctgacccagcccggccgggcctacaggatggagatccaggtgccccccagccccacagatgtggccaagagcaacacagctgtgtgtgtgtgcaatgaatctgtgaggacagtcatcgtgcccagcgagaaggtggtggacctgctgagcaacagaaacaaccacacaggccccagccacaggacagaggaggtgcgctatggagtgtctgagcagaccagcctgaagacagtgtccaggaccaccagcccccccctgagcatccccaccacccacctgatccaccagcctgctggcagccgcagcctggagcccagcggcatcctgctgaagagcggcaactacagcggccacagtgatggcatcagcagcagccgcagccaggccgtggaggcccccagcgtgtctgtgaaccactacagccccaacagccaccagcacatcgactggaagaactacaagacctacaaggagtacatcgacaacagaaggctgcacatcggctgcaggaccatccaggagcggctggacagcctgcgggccgccagccagagcaccacagactacaaccaggtggtgcccaacagaaccaccctgcagggcagaagaagaagcaccagccatgacagagtgccccagagcgtgcagatccggcagaggtctgtgtcccaggagcggctggaggacagcgtgctgatgaagtactgccccaggtctgccagccagggcgccctgaccagccccagcgtgtccttcagcaaccacaggaccaggtcctgggactacatcgagggccaggatgagaccctggagaatgtgaacagcggcacccccatcccagacagcaatggagagaagaagcagacctacaagtggagcggcttcacagagcaggatgaccggcggggcatctgtgagcggccccggcagcaggagatccacaagagcttccggggcagcaacttcaccgtggcccccagcgtggtgaacagcgacaacagaaggatgagcggccggggcgtgggctctgtgtcccagttcaagaagatccccccagacctgaagaccctgcagagcaacagaaacttccagaccacctgtggcatgagcctgccccggggcatcagccaggacaggagccccctggtgaaggtgcgcagcaacagcctgaaggcccccagcacccacgtgaccaagcccagcttcagccagaagagctttgtgtccatcaaggaccagaggcctgtgaaccacctgcaccagaacagcctgctgaaccagcagacctgggtgaggacagacagcgccccagaccagcaggtggagaccgggaagagccccagcctgagcggggccagcgccaagccagccccccagagcagtgaaaatgccggcaccagtgacctggagctgcctgtgtcccagaggaaccaggacctgagcctgcaggaggccgagacagagcagagcgacaccctggacaacaaggaggccgtcatcctgcgggagaagccacccagcggccggcagaccccccagcccctgcggcaccagagctacatcctggccgtgaatgaccaggagaccggcagtgacaccacctgctggctgcccaatgatgcccggcgggaggtgcacatcaagaggatggaggagaggaaggccagcagcaccagccccccaggggacagcctggccagcatccccttcattgatgagcccaccagccccagcattgaccatgacatcgcccacatcccagccagcgctgtgatcagcgccagcaccagccaggtgcccagcatcgccaccgtgcccccctgcctgaccaccagcgcccccctcatccggcggcagctgagccatgaccatgaatctgtgggcccccccagcctggatgcccagcccaacagcaagacagagaggagcaagagctatgatgagggcctggatgactaccgggaggatgccaagctgtccttcaagcacgtgagcagcctgaagggcatcaagattgctgacagccagaagagcagtgaagattctggcagcaggaaggacagcagcagcgaggtgttcagtgatgctgccaaggagggctggctgcacttccggcccctggtgacagacaagggcaagagggtgggcggcagcatccggccctggaagcagatgtatgtggtgctgcggggccacagcctgtacctgtacaaggacaagcgggagcagaccacccccagcgaggaggagcagcccatctctgtgaatgcctgcctgattgacatctcctacagcgagaccaagaggaagaatgtgttccggctgaccaccagtgactgtgagtgcctcttccaggccgaggacagagatgacatgctggcctggatcaagaccatccaggagagcagcaacctgaatgaagaagatactggagtgaccaacagagacctgatcagccgccgcatcaaggagtacaacaacctgatgagcaaggccgagcagctgcccaagaccccccggcagagcctgagcatccggcagaccctgctgggcgccaagtctgagcccaagacccagagcccccacagccccaaggaggagagcgagaggaagctgctgagcaaggatgacaccagcccccccaaggacaagggcacctggaggaagggcatccccagcatcatgaggaagacctttgagaagaagcccacagccaccggcaccttcggcgtgcggctggatgactgccccccagcccacaccaaccgctacatccccctgattgtggacatctgctgcaagctggtggaggagcggggcctggagtacacaggcatctacagagtgcccggcaacaatgctgccatcagctccatgcaggaggagctgaacaagggcatggctgacatcgacatccaggatgacaagtggagggacctgaatgtcatcagcagcctgctgaagagcttcttcaggaagctgcctgagcccctcttcaccaatgacaagtatgctgacttcatcgaggccaacagaaaagaagaccccctggaccggctgaagaccctgaagaggctcatccatgacctgcctgagcaccactatgagaccctgaagttcctgagcgcccacctgaagacagtggctgaaaattctgagaagaacaagatggagcccaggaacctggccatcgtgtttggccccaccctggtgaggaccagcgaggacaacatgacccacatggtgacccacatgccagaccagtacaagatcgtggagaccctcatccagcaccacgactggttcttcacagaggagggcgctgaggagcccctgaccaccgtgcaggaggagagcacagtggacagccagcctgtgcccaacatcgaccacctgctgaccaacattggaagaactggagtgtccccaggagatgtgtctggagaggtgggcggcgtgtaccacacagtgatgagcctggtggacagcgtgatgagcctgatggacagctggaactgcaggaagaaggaggactgctgcccccactgcagctgcctggtgtgcaggaacccccgcttcctgtag

SEQ ID NO: 167889 - DNA, 3498 bp, synthetic construct
  misc_feature 1..3498: note = Description of Artificial Sequence: Synthetic coding sequence
  source 1..3498: mol_type = other DNA
atgatggccaccaggagaacaggcctgtctgaaggagatggagacaagctgaaggcctgtgaggtgtccaagaacaaggatggcaaggagcagagcgagaccgtgtccctgtctgaagatgagaccttctcctggccaggccccaagacagtgaccctgaagaggaccagccagggcttcggcttcaccctgcggcacttcatcgtgtacccacctgagagcgccatccagttctcctacaaggatgaggagaatggaaacagaggaggcaagcagaggaaccggctggagcccatggacaccatctttgtgaagcaggtgaaggagggcggccctgcctttgaggccggcctgtgcaccggggaccgcatcatcaaggtgaatggagagagcgtgattggcaagacctacagccaggtgattgccctgatccagaacagcgacaccaccctggagctgtctgtgatgcccaaggatgaggacatcctgcaggtggcctacagccaggatgcctacctgaagggaaatgaggcctacagcggaaatgccaggaacatccctgagcccccacccatctgctacccctggctgcccagcgcccccagcgccatggcccagcctgtggagatcagccccccagacagcagcctgagcaagcagcagaccagcacccctgtgctgacccagcccggccgggcctacaggatggagatccaggtgccccccagccccacagatgtggccaagagcaacacagctgtgtgtgtgtgcaatgaatctgtgaggacagtgattgtgcccagcgagaaggtggtggacctgctgagcaacagaaacaaccacacaggccccagccacaggacagaggaggtgcgctatggagtgtctgagcagaccagcctgaagacagtgtccaggaccaccagcccccccctgagcatccccaccacccacctgatccaccagcctgctggcagccgcagcctggagcccagcggcatcctgctgaagagcggcaactacagcggccacagtgatggcatcagcagcagccgcagccaggccgtggaggcccccagcgtgtctgtgaaccactacagccccaacagccaccagcacatcgactggaagaactacaagacctacaaggagtacatcgacaacagaaggctgcacatcggctgcaggaccatccaggagcggctggacagcctgcgggccgccagccagagcaccacagactacaaccaggtggtgcccaacagaaccaccctgcagggcagaagaagaagcaccagccatgacagagtgccccagagcgtgcagatccggcagaggtctgtgtcccaggagcggctggaggacagcgtgctgatgaagtactgccccaggtctgccagccagggcgccctgaccagccccagcgtgtccttcagcaaccacaggaccaggtcctgggactacatcgagggccaggatgagaccctggagaatgtgaacagcggcacccccatcccagacagcaatggagagaagaagcagacctacaagtggagcggcttcacagagcaggatgacagaagaggcatctgtgagcggccccggcagcaggagatccacaagagcttccggggcagcaacttcaccgtggcccccagcgtggtgaacagcgacaacagaaggatgagcggccggggcgtgggctctgtgtcccagttcaagaagatccccccagacctgaagaccctgcagagcaacagaaacttccagaccacctgtggcatgagcctgccccggggcatcagccaggacaggagccccctggtgaaggtgcgcagcaacagcctgaaggcccccagcacccacgtgaccaagcccagcttcagccagaagagctttgtgtccatcaaggaccagaggcctgtgaaccacctgcaccagaacagcctgctgaaccagcagacctgggtgaggacagattctgccccagaccagcaggtggagaccgggaagagccccagcctgagcggggccagcgccaagccagccccccagagcagtgaaaatgccggcaccagtgacctggagctgcctgtgtcccagaggaaccaggacctgagcctgcaggaggccgagacagagcagagcgacaccctggacaacaaggaggccgtcatcctgcgggagaagcccccatctggccggcagaccccccagcccctgcggcaccagagctacatcctggccgtgaatgaccaggagactggaagtgacaccacctgctggctgcccaatgatgcccggcgggaggtgcacatcaagaggatggaggagaggaaggccagcagcaccagccccccaggggacagcctggccagcatccccttcattgatgagcccaccagccccagcattgaccatgacatcgcccacatcccagccagcgctgtgatcagcgccagcaccagccaggtgcccagcatcgccaccgtgcccccctgcctgaccaccagcgcccccctcatccggcggcagctgagccatgaccacgagagcgtgggcccccccagcctggatgcccagcccaacagcaagacagagaggagcaagagctatgatgagggcctggatgactacagagaagatgccaagctgtccttcaagcacgtgagcagcctgaagggcatcaagattgctgacagccagaagagcagcgaggacagcggcagcaggaaggacagcagcagcgaggtgttcagtgatgctgccaaggagggctggctgcacttccggcccctggtgacagacaagggcaagagggtgggcggcagcatccggccctggaagcagatgtatgtggtgctgcggggccacagcctgtacctgtacaaggacaagcgggagcagaccaccccatctgaggaggagcagcccatctctgtgaatgcctgcctgattgacatctcctacagcgagaccaagaggaagaatgtgttccggctgaccaccagtgactgtgaatgtctcttccaggctgaagatagagatgacatgctggcctggatcaagaccatccaggagagcagcaacctgaatgaggaggacaccggggtgaccaacagagacctgatcagccgccgcatcaaggagtacaacaacctgatgagcaaggccgagcagctgcccaagaccccccggcagagcctgagcatccggcagaccctgctgggcgccaagtctgagcccaagacccagagcccccacagccccaaggaggagagcgagaggaagctgctgagcaaggatgacaccagcccccccaaggacaagggcacctggaggaagggcatccccagcatcatgaggaagacctttgagaagaagcccacagccaccggcacctttggagtgcggctggatgactgccccccagcccacaccaacagagtgggggacaccagccccccagacttcctgaagagcctcatccagttctag

SEQ ID NO: 167890 - DNA, 5877 bp, synthetic construct
  misc_feature 1..5877: note = Description of Artificial Sequence: Synthetic coding sequence
  source 1..5877: mol_type = other DNA
atgatggccaccaggagaacaggcctgtctgaaggagatggagacaagctgaaggcctgtgaggtgtccaagaacaaggatggcaaggagcagagcgagaccgtgtccctgtctgaagatgagaccttctcctggccaggccccaagacagtgaccctgaagaggaccagccagggcttcggcttcaccctgcggcacttcatcgtgtacccacctgagagcgccatccagttctcctacaaggatgaggagaatggaaacagaggaggcaagcagaggaaccggctggagcccatggacaccatctttgtgaagcaggtgaaggagggcggccctgcctttgaggccggcctgtgcaccggggaccgcatcatcaaggtgaatggagagagcgtgattggcaagacctacagccaggtgattgccctgatccagaacagcgacaccaccctggagctgtctgtgatgcccaaggatgaggacatcctgcaggtgctgcagttcaccaaggatgtgacagccctggcctacagccaggatgcctacctgaagggaaatgaggcctacagcggaaatgccaggaacatccctgagcccccacccatctgctacccctggctgcccagcgcccccagcgccatggcccagcctgtggagatcagccccccagacagcagcctgagcaagcagcagaccagcacccctgtgctgacccagcccggccgggcctacaggatggagatccaggtgccccccagccccacagatgtggccaagagcaacacagctgtgtgtgtgtgcaatgaatctgtgaggacagtgattgtgcccagcgagaaggtggtggacctgctgagcaacagaaacaaccacacaggccccagccacaggacagaggaggtgcgctatggagtgtctgagcagaccagcctgaagacagtgtccaggaccaccagcccccccctgagcatccccaccacccacctgatccaccagcctgctggcagccgcagcctggagcccagcggcatcctgctgaagagcggcaactacagcggccacagtgatggcatcagcagcagccgcagccaggccgtggaggcccccagcgtgtctgtgaaccactacagccccaacagccaccagcacatcgactggaagaactacaagacctacaaggagtacatcgacaacagaaggctgcacatcggctgcaggaccatccaggagcggctggacagcctgcgggccgccagccagagcaccacagactacaaccaggtggtgcccaacagaaccaccctgcagggcagaagaagaagcaccagccatgacagagtgccccagagcgtgcagatccggcagaggtctgtgtcccaggagcggctggaggacagcgtgctgatgaagtactgccccaggtctgccagccagggcgccctgaccagccccagcgtgtccttcagcaaccacaggaccaggtcctgggactacatcgagggccaggatgagaccctggagaatgtgaacagcggcacccccatcccagacagcaatggagagaagaagcagacctacaagtggagcggcttcacagagcaggatgacagaagaggcatctgtgagcggccccggcagcaggagatccacaagagcttccggggcagcaacttcaccgtggcccccagcgtggtgaacagcgacaacagaaggatgagcggccggggcgtgggctctgtgtcccagttcaagaagatccccccagacctgaagaccctgcagagcaacagaaacttccagaccacctgtggcatgagcctgccccggggcatcagccaggacaggagccccctggtgaaggtgcgcagcaacagcctgaaggcccccagcacccacgtgaccaagcccagcttcagccagaagagctttgtgtccatcaaggaccagaggcctgtgaaccacctgcaccagaacagcctgctgaaccagcagacctgggtgaggacagattctgccccagaccagcaggtggagaccgggaagagccccagcctgagcggggccagcgccaagccagccccccagagcagtgaaaatgccggcaccagtgacctggagctgcctgtgtcccagaggaaccaggacctgagcctgcaggaggccgagacagagcagagcgacaccctggacaacaaggaggccgtcatcctgcgggagaagcccccatctggccggcagaccccccagcccctgcggcaccagagctacatcctggccgtgaatgaccaggagactggaagtgacaccacctgctggctgcccaatgatgcccggcgggaggtgcacatcaagaggatggaggagaggaaggccagcagcaccagccccccaggggacagcctggccagcatccccttcattgatgagcccaccagccccagcattgaccatgacatcgcccacatcccagccagcgctgtgatcagcgccagcaccagccaggtgcccagcatcgccaccgtgcccccctgcctgaccaccagcgcccccctcatccggcggcagctgagccatgaccacgagagcgtgggcccccccagcctggatgcccagcccaacagcaagacagagaggagcaagagctatgatgagggcctggatgactacagagaagatgccaagctgtccttcaagcacgtgagcagcctgaagggcatcaagattgctgacagccagaagagcagcgaggacagcggcagcaggaaggacagcagcagcgaggtgttcagtgatgctgccaaggagggctggctgcacttccggcccctggtgacagacaagggcaagagggtgggcggcagcatccggccctggaagcagatgtatgtggtgctgcggggccacagcctgtacctgtacaaggacaagcgggagcagaccaccccatctgaggaggagcagcccatctctgtgaatgcctgcctgattgacatctcctacagcgagaccaagaggaagaatgtgttccggctgaccaccagtgactgtgaatgtctcttccaggctgaagatagagatgacatgctggcctggatcaagaccatccaggagagcagcaacctgaatgaggaggacaccggggtgaccaacagagacctgatcagccgccgcatcaaggagtacaacaacctgatgagcaaggccgagcagctgcccaagaccccccggcagagcctgagcatccggcagaccctgctgggcgccaagtctgagcccaagacccagagcccccacagccccaaggaggagagcgagaggaagctgctgagcaaggatgacaccagcccccccaaggacaagggcacctggaggaagggcatccccagcatcatgaggaagacctttgagaagaagcccacagccaccggcacctttggagtgcggctggatgactgccccccagcccacaccaaccgctacatccccctcatcgtggacatctgctgcaagctggtggaggagcggggcctggagtacacaggcatctacagagtgcccggcaacaatgctgccatcagctccatgcaggaggagctgaacaagggcatggctgacatcgacatccaggatgacaagtggagggacctgaatgtcatcagcagcctgctgaagagcttcttcaggaagctgcctgagcccctcttcaccaatgacaagtatgctgacttcatcgaggccaacaggaaggaggaccccctggaccggctgaagaccctgaagaggctcatccatgacctgcctgagcaccactatgagaccctgaagttcctgagcgcccacctgaagacagtggccgagaacagcgagaagaacaagatggagcccaggaacctggccatcgtgtttggccccaccctggtgaggaccagcgaggacaacatgacccacatggtgacccacatgccagaccagtacaagatcgtggagaccctcatccagcaccacgactggttcttcacagaggagggcgctgaggagcccctgaccaccgtgcaggaggagagcacagtggacagccagcctgtgcccaacatcgaccacctgctgaccaacatcggccgcactggagtgtccccaggagatgtgtctgattctgccaccagtgacagcaccaagagcaagggctcctggggcagcggcaaggaccagtacagccgggagctgctggtgagcagcatctttgctgctgccagcaggaagaggaagaagcccaaggagaaggcccagcccagcagcagtgaagatgagctggacaacgtgttcttcaagaaggaaaatgtggagcagtgccacaatgacaccaaggaggagagcaagaaggagagcgagaccctgggcaggaagcagaagatcatcatcgccaaggagaacagcaccaggaaggaccccagcaccaccaaggatgagaagatcagcctgggcaaggagagcacccccagcgaggagcccagccccccccacaacagcaagcacaacaagagccccaccctgagctgccgctttgccatcctgaaggagagccccaggagcctgctggcccagaagagcagccacctggaggagaccggcagtgacagcggcaccctgctgagcaccagcagccaggccagcctggcccgcttctccatgaagaagagcaccagccctgagaccaagcacagcgagttcctggccaacgtgtccaccatcaccagtgactacagcaccaccagcagcgccacctacctgaccagcctggacagcagccggctgagccctgaggtgcagagcgtggccgagagcaaaggagatgaagcagatgatgagaggtctgagctgatcagcgagggccggcctgtggagacagattctgagagcgagttccctgtgttccccacagccctgaccagcgagcggctcttccggggcaagctgcaggaggtgaccaagagcagcagaagaaattctgagggcagcgagctgagctgcacagagggcagcctgaccagcagcctggacagccggcggcagctgttcagcagccacaagctgattgaatgtgacaccctgagcaggaagaagagcgcccgcttcaagagtgacagcggcagcctgggagatgccaagaatgagaaggaggcccccagcctgaccaaggtgtttgatgtgatgaagaagggcaagagcacaggcagcctgctgacccccaccagaggagagagcgagaagcaggagcccacctggaagaccaagattgctgaccggctgaagctgcggccccgggccccagcagatgacatgtttggagtgggcaaccacaaggtgaatgctgagacagccaagaggaagagcatcagaagaagacacaccctgggcggccacagagatgccacagagatctctgtgctgaacttctggaaggtgcatgagcagagcggggagcgggagagcgagctgtctgctgtgaaccggctgaagcccaagtgcagcgcccaggacctgagcatcagtgactggctggcccgggagcggctgcggaccagcaccagtgacctgagcagaggagagatcggggacccccagacagagaaccccagcacccgggagatcgccaccacagacacccccctgagcctgcactgcaacacaggcagcagcagcagcaccctggccagcaccaaccggcccctgctgagcatccccccccagagcccagaccagatcaacggggagagcttccagaatgtgtccaagaatgccagcagcgctgccaatgcccagccccacaagctgtctgagaccccaggcagcaaggccgagttccacccctgcctgtag

SEQ ID NO: 167891 - DNA, 594 bp, synthetic construct
  misc_feature 1..594: note = Description of Artificial Sequence: Synthetic coding sequence
  source 1..594: mol_type = other DNA
tgaaacaatgctgccatcagctccatgcaggaggagctgaacaagggcatggctgacatcgacatccaggatgacaagtggagggacctgaatgtcatcagcagcctgctgaagagcttcttcaggaagctgcctgagcccctcttcaccaatgacaagtatgctgacttcatcgaggccaacaggaaggaggaccccctggaccggctgaagaccctgaagaggctcatccatgacctgcctgagcaccactatgagaccctgaagttcctgagcgcccacctgaagacagtggccgagaacagcgagaagaacaagatggagcccaggaacctggccatcgtgtttggccccaccctggtgaggaccagcgaggacaacatgacccacatggtgacccacatgccagaccagtacaagatcgtggagaccctcatccagcaccacgactggttcttcacagaggagggcgctgaggagcccctcatccagctgctggtgacccagcagaacctgcgggtgctgggggacctggagcgcatcagcattgctggcaactgcctgtgcccccccagcctgcagctgctggtgtag

SEQ ID NO: 167892 - DNA, 342 bp, synthetic construct
  misc_feature 1..342: note = Description of Artificial Sequence: Synthetic coding sequence
  source 1..342: mol_type = other DNA
tacatccccctgattgtggacatctgctgcaagctggtggaggagcggggcctggagtacacaggcatctacagagtgcccggcaacaatgctgccatcagctccatgcaggaggagctgaacaagggcatggctgacatcgacatccaggatgacaagtggagggacctgaatgtcatcagcagcctgctgaagagcttcttcaggaagctgcctgagcccctcttcaccaatgacaagtatgctgacttcatcgaggccaacagaaaagaagaccccctggaccggctgaagaccctgaagaggctcttcctgagcgcccacctgaagacagtggcctag

SEQ ID NO: 167893 - DNA, 2724 bp, synthetic construct
  misc_feature 1..2724: note = Description of Artificial Sequence: Synthetic coding sequence
  source 1..2724: mol_type = other DNA
atgcccaaggatgaggacatcctgcaggtggcctacagccaggatgcctacctgaagggaaatgaggcctacagcggaaatgccaggaacatccctgagcccccacccatctgctacccctggctgcccagcgcccccagcgccatggcccagcctgtggagatcagccccccagacagcagcctgagcaagcagcagaccagcacccctgtgctgacccagcccggccgggcctacaggatggagatccaggtgccccccagccccacagatgtggccaagagcaacacagctgtgtgtgtgtgcaatgaatctgtgaggacagtcatcgtgcccagcgagaaggtggtggacctgctgagcaacagaaacaaccacacaggccccagccacaggacagaggaggtgcgctatggagtgtctgagcagaccagcctgaagacagtgtccaggaccaccagcccccccctgagcatccccaccacccacctgatccaccagcctgctggcagccgcagcctggagcccagcggcatcctgctgaagagcggcaactacagcggccacagtgatggcatcagcagcagccgcagccaggccgtggaggcccccagcgtgtctgtgaaccactacagccccaacagccaccagcacatcgactggaagaactacaagacctacaaggagtacatcgacaacagaaggctgcacatcggctgcaggaccatccaggagcggctggacagcctgcgggccgccagccagagcaccacagactacaaccaggtggtgcccaacagaaccaccctgcagggcagaagaagaagcaccagccatgacagagtgccccagagcgtgcagatccggcagaggtctgtgtcccaggagcggctggaggacagcgtgctgatgaagtactgccccaggtctgccagccagggcgccctgaccagccccagcgtgtccttcagcaaccacaggaccaggtcctgggactacatcgagggccaggatgagaccctggagaatgtgaacagcggcacccccatcccagacagcaatggagagaagaagcagacctacaagtggagcggcttcacagagcaggatgaccggcggggcatctgtgagcggccccggcagcaggagatccacaagagcttccggggcagcaacttcaccgtggcccccagcgtggtgaacagcgacaacagaaggatgagcggccggggcgtgggctctgtgtcccagttcaagaagatccccccagacctgaagaccctgcagagcaacagaaacttccagaccacctgtggcatgagcctgccccggggcatcagccaggacaggagccccctggtgaaggtgcgcagcaacagcctgaaggcccccagcacccacgtgaccaagcccagcttcagccagaagagctttgtgtccatcaaggaccagaggcctgtgaaccacctgcaccagaacagcctgctgaaccagcagacctgggtgaggacagacagcgccccagaccagcaggtggagaccgggaagagccccagcctgagcggggccagcgccaagccagccccccagagcagtgaaaatgccggcaccagtgacctggagctgcctgtgtcccagaggaaccaggacctgagcctgcaggaggccgagacagagcagagcgacaccctggacaacaaggaggccgtcatcctgcgggagaagccacccagcggccggcagaccccccagcccctgcggcaccagagctacatcctggccgtgaatgaccaggagaccggcagtgacaccacctgctggctgcccaatgatgcccggcgggaggtgcacatcaagaggatggaggagaggaaggccagcagcaccagccccccaggggacagcctggccagcatccccttcattgatgagcccaccagccccagcattgaccatgacatcgcccacatcccagccagcgctgtgatcagcgccagcaccagccaggtgcccagcatcgccaccgtgcccccctgcctgaccaccagcgcccccctcatccggcggcagctgagccatgaccatgaatctgtgggcccccccagcctggatgcccagcccaacagcaagacagagaggagcaagagctatgatgagggcctggatgactaccgggaggatgccaagctgtccttcaagcacgtgagcagcctgaagggcatcaagattgctgacagccagaagagcagtgaagattctggcagcaggaaggacagcagcagcgaggtgttcagtgatgctgccaaggagggctggctgcacttccggcccctggtgacagacaagggcaagagggtgggcggcagcatccggccctggaagcagatgtatgtggtgctgcggggccacagcctgtacctgtacaaggacaagcgggagcagaccacccccagcgaggaggagcagcccatctctgtgaatgcctgcctgattgacatctcctacagcgagaccaagaggaagaatgtgttccggctgaccaccagtgactgtgagtgcctcttccaggccgaggacagagatgacatgctggcctggatcaagaccatccaggagagcagcaacctgaatgaagaagatactggagtgaccaacagagacctgatcagccgccgcatcaaggagtacaacaacctgatgagcaaggccgagcagctgccctag

SEQ ID NO: 167894 - DNA, 3396 bp, synthetic construct
  misc_feature 1..3396: note = Description of Artificial Sequence: Synthetic coding sequence
  source 1..3396: mol_type = other DNA
atgatggccaccaggagaacaggcctgtctgaaggagatggagacaagctgaaggcctgtgaggtgtccaagaacaaggatggcaaggagcagagcgagaccgtgtccctgtctgaagatgagaccttctcctggccaggccccaagacagtgaccctgaagaggaccagccagggcttcggcttcaccctgcggcacttcatcgtgtacccacctgagagcgccatccagttctcctacaaggatgaggagaatggaaacagaggaggcaagcagaggaaccggctggagcccatggacaccatctttgtgaagcaggtgaaggagggcggccctgcctttgaggccggcctgtgcaccggggaccgcatcatcaaggtgaatggagagagcgtgattggcaagacctacagccaggtgattgccctgatccagaacagcgacaccaccctggagctgtctgtgatgcccaaggatgaggacatcctgcaggtgctgcagttcaccaaggatgtgacagccctggcctacagccaggatgcctacctgaagggaaatgaggcctacagcggaaatgccaggaacatccctgagcccccacccatctgctacccctggctgcccagcgcccccagcgccatggcccagcctgtggagatcagccccccagacagcagcctgagcaagcagcagaccagcacccctgtgctgacccagcccggccgggcctacaggatggagatccaggtgccccccagccccacagatgtggccaagagcaacacagctgtgtgtgtgtgcaatgaatctgtgaggacagtgattgtgcccagcgagaaggtggtggacctgctgagcaacagaaacaaccacacaggccccagccacaggacagaggaggtgcgctatggagtgtctgagcagaccagcctgaagacagtgtccaggaccaccagcccccccctgagcatccccaccacccacctgatccaccagcctgctggcagccgcagcctggagcccagcggcatcctgctgaagagcggcaactacagcggccacagtgatggcatcagcagcagccgcagccaggccgtggaggcccccagcgtgtctgtgaaccactacagccccaacagccaccagcacatcgactggaagaactacaagacctacaaggagtacatcgacaacagaaggctgcacatcggctgcaggaccatccaggagcggctggacagcctgcgggccgccagccagagcaccacagactacaaccaggtggtgcccaacagaaccaccctgcagggcagaagaagaagcaccagccatgacagagtgccccagagcgtgcagatccggcagaggtctgtgtcccaggagcggctggaggacagcgtgctgatgaagtactgccccaggtctgccagccagggcgccctgaccagccccagcgtgtccttcagcaaccacaggaccaggtcctgggactacatcgagggccaggatgagaccctggagaatgtgaacagcggcacccccatcccagacagcaatggagagaagaagcagacctacaagtggagcggcttcacagagcaggatgacagaagaggcatctgtgagcggccccggcagcaggagatccacaagagcttccggggcagcaacttcaccgtggcccccagcgtggtgaacagcgacaacagaaggatgagcggccggggcgtgggctctgtgtcccagttcaagaagatccccccagacctgaagaccctgcagagcaacagaaacttccagaccacctgtggcatgagcctgccccggggcatcagccaggacaggagccccctggtgaaggtgcgcagcaacagcctgaaggcccccagcacccacgtgaccaagcccagcttcagccagaagagctttgtgtccatcaaggaccagaggcctgtgaaccacctgcaccagaacagcctgctgaaccagcagacctgggtgaggacagattctgccccagaccagcaggtggagaccgggaagagccccagcctgagcggggccagcgccaagccagccccccagagcagtgaaaatgccggcaccagtgacctggagctgcctgtgtcccagaggaaccaggacctgagcctgcaggaggccgagacagagcagagcgacaccctggacaacaaggaggccgtcatcctgcgggagaagcccccatctggccggcagaccccccagcccctgcggcaccagagctacatcctggccgtgaatgaccaggagactggaagtgacaccacctgctggctgcccaatgatgcccggcgggaggtgcacatcaagaggatggaggagaggaaggccagcagcaccagccccccaggggacagcctggccagcatccccttcattgatgagcccaccagccccagcattgaccatgacatcgcccacatcccagccagcgctgtgatcagcgccagcaccagccaggtgcccagcatcgccaccgtgcccccctgcctgaccaccagcgcccccctcatccggcggcagctgagccatgaccacgagagcgtgggcccccccagcctggatgcccagcccaacagcaagacagagaggagcaagagctatgatgagggcctggatgactacagagaagatgccaagctgtccttcaagcacgtgagcagcctgaagggcatcaagattgctgacagccagaagagcagcgaggacagcggcagcaggaaggacagcagcagcgaggtgttcagtgatgctgccaaggagggctggctgcacttccggcccctggtgacagacaagggcaagagggtgggcggcagcatccggccctggaagcagatgtatgtggtgctgcggggccacagcctgtacctgtacaaggacaagcgggagcagaccaccccatctgaggaggagcagcccatctctgtgaatgcctgcctgattgacatctcctacagcgagaccaagaggaagaatgtgttccggctgaccaccagtgactgtgaatgtctcttccaggctgaagatagagatgacatgctggcctggatcaagaccatccaggagagcagcaacctgaatgaggaggacaccggggtgaccaacagagacctgatcagccgccgcatcaaggagtacaacaacctgatgagcaaggccgagcagctgcccaagaccccccggcagagcctgagcatccggcagaccctgctgggcgccaagtctgagcccaagacccagagcccccacagccccaaggaggagagcgagaggaagctgctgagcaaggatgacaccagcccccccaaggacaagggcacctggaggaagggcatccccagcatcatgtag

SEQ ID NO: 167895 - DNA, 4224 bp, synthetic construct
  misc_feature 1..4224: note = Description of Artificial Sequence: Synthetic coding sequence
  source 1..4224: mol_type = other DNA
atggccaccaggagaacaggcctgtctgaaggagatggagacaagctgaaggcctgtgaggtgtccaagaacaaggatggcaaggagcagagcgagaccgtgtccctgtctgaagatgagaccttctcctggccaggccccaagacagtgaccctgaagaggaccagccagggcttcggcttcaccctgcggcacttcatcgtgtacccacctgagagcgccatccagttctcctacaaggatgaagaaaatggaaacagaggaggcaagcagaggaaccggctggagcccatggacaccatctttgtgaagcaggtgaaggagggcggccctgcctttgaagctggcctgtgcacaggagaccgcatcatcaaggtgaatggagagagcgtcatcggcaagacctacagccaggtgattgccctgatccagaacagcgacaccaccctggagctgtctgtgatgcccaaggatgaggacatcctgcaggtggcctacagccaggatgcctacctgaagggaaatgaggcctacagcggaaatgccaggaacatccctgagcccccacccatctgctacccctggctgcccagcgcccccagcgccatggcccagcctgtggagatcagccccccagacagcagcctgagcaagcagcagaccagcacccctgtgctgacccagcccggccgggcctacaggatggagatccaggtgccccccagccccacagatgtggccaagagcaacacagctgtgtgtgtgtgcaatgaatctgtgaggacagtcatcgtgcccagcgagaaggtggtggacctgctgagcaacagaaacaaccacacaggccccagccacaggacagaggaggtgcgctatggagtgtctgagcagaccagcctgaagacagtgtccaggaccaccagcccccccctgagcatccccaccacccacctgatccaccagcctgctggcagccgcagcctggagcccagcggcatcctgctgaagagcggcaactacagcggccacagtgatggcatcagcagcagccgcagccaggccgtggaggcccccagcgtgtctgtgaaccactacagccccaacagccaccagcacatcgactggaagaactacaagacctacaaggagtacatcgacaacagaaggctgcacatcggctgcaggaccatccaggagcggctggacagcctgcgggccgccagccagagcaccacagactacaaccaggtggtgcccaacagaaccaccctgcagggcagaagaagaagcaccagccatgacagagtgccccagagcgtgcagatccggcagaggtctgtgtcccaggagcggctggaggacagcgtgctgatgaagtactgccccaggtctgccagccagggcgccctgaccagccccagcgtgtccttcagcaaccacaggaccaggtcctgggactacatcgagggccaggatgagaccctggagaatgtgaacagcggcacccccatcccagacagcaatggagagaagaagcagacctacaagtggagcggcttcacagagcaggatgaccggcggggcatctgtgagcggccccggcagcaggagatccacaagagcttccggggcagcaacttcaccgtggcccccagcgtggtgaacagcgacaacagaaggatgagcggccggggcgtgggctctgtgagccactggaggaagggcatccccagcatcatgaggaagacctttgagaagaagcccacagccaccggcaccttcggcgtgcggctggatgactgccccccagcccacaccaaccgctacatccccctgattgtggacatctgctgcaagctggtggaggagcggggcctggagtacacaggcatctacagagtgcccggcaacaatgctgccatcagctccatgcaggaggagctgaacaagggcatggctgacatcgacatccaggatgacaagtggagggacctgaatgtcatcagcagcctgctgaagagcttcttcaggaagctgcctgagcccctcttcaccaatgacaagtatgctgacttcatcgaggccaacagaaaagaagaccccctggaccggctgaagaccctgaagaggctcatccatgacctgcctgagcaccactatgagaccctgaagttcctgagcgcccacctgaagacagtggctgaaaattctgagaagaacaagatggagcccaggaacctggccatcgtgtttggccccaccctggtgaggaccagcgaggacaacatgacccacatggtgacccacatgccagaccagtacaagatcgtggagaccctcatccagcaccacgactggttcttcacagaggagggcgctgaggagcccctgaccaccgtgcaggaggagagcacagtggacagccagcctgtgcccaacatcgaccacctgctgaccaacattggaagaactggagtgtccccaggagatgtgtctgacagcgccaccagtgacagcaccaagagcaagggctcctggggcagcggcaaggaccagtacagccgggagctgctggtgagcagcatctttgctgctgccagcaggaagaggaagaagcccaaggagaaggcccagcccagcagcagtgaagatgagctggacaacgtgttcttcaagaaggaaaatgtggagcagtgccacaatgacaccaaggaggagagcaagaaggagagcgagaccctgggcaggaagcagaagatcatcatcgccaaggagaacagcaccaggaaggaccccagcaccaccaaggatgagaagatcagcctgggcaaggagagcaccccatctgaggagcccagccccccccacaacagcaagcacaacaagagccccaccctgagctgccgctttgccatcctgaaggagagccccaggagcctgctggcccagaagagcagccacctggaggagactggaagtgacagcggcaccctgctgagcaccagcagccaggccagcctggcccgcttctccatgaagaagagcaccagccctgagaccaagcacagcgagttcctggccaacgtgtccaccatcaccagtgactacagcaccaccagcagcgccacctacctgaccagcctggacagcagccggctgagccctgaggtgcagagcgtggccgagagcaaaggagatgaagcagatgatgagaggtctgagctgatcagcgagggccggcctgtggagacagacagcgagagcgagttccctgtgttccccacagccctgaccagcgagcggctcttccggggcaagctgcaggaggtgaccaagagcagcagaagaaacagcgagggcagcgagctgagctgcacagagggcagcctgaccagcagcctggacagccggcggcagctgttcagcagccacaagctgattgaatgtgacaccctgagcaggaagaagagcgcccgcttcaagagtgacagcggcagcctgggagatgccaagaatgagaaggaggcccccagcctgaccaaggtgtttgatgtgatgaagaagggcaagagcacaggcagcctgctgacccccaccagaggagagagcgagaagcaggagcccacctggaagaccaagattgctgaccggctgaagctgcggccccgggccccagcagatgacatgtttggagtgggcaaccacaaggtgaatgctgagacagccaagaggaagagcatcagaagaagacacaccctgggcggccacagagatgccacagagatctctgtgctgaacttctggaaggtgcatgagcagagcggggagcgggagagcgagctgtctgctgtgaaccggctgaagcccaagtgcagcgcccaggacctgagcatcagtgactggctggcccgggagcggctgcggaccagcaccagtgacctgagcagaggagaaattggagacccccagacagagaaccccagcacccgggagatcgccaccacagacacccccctgagcctgcactgcaacacaggcagcagcagcagcaccctggccagcaccaaccggcccctgctgagcatccccccccagagcccagaccagatcaatggagagagcttccagaatgtgtccaagaatgccagcagcgctgccaatgcccagccccacaagctgtctgagaccccaggcagcaaggccgagttccacccctgcctgtag

SEQ ID NO: 167896 - DNA, 279 bp, synthetic construct
  misc_feature 1..279: note = Description of Artificial Sequence: Synthetic coding sequence
  source 1..279: mol_type = other DNA
atggacaccatctttgtgaagcaggtgaaggagggcggccctgcctttgaggccggcctgtgcaccggggaccgcatcatcaaggtgaatggagagagcgtgattggcaagacctacagccaggtgattgccctgatccagaacagcgacaccaccctggagctgtctgtgatgcccaaggatgaggacatcctgcaggtgaacctggagttcagcaccttctacaagaacaccatcgccaagttcctgcagctgagtgacatggagatgctgtgctag

SEQ ID NO: 167897 - DNA, 4476 bp, synthetic construct
  misc_feature 1..4476: note = Description of Artificial Sequence: Synthetic coding sequence
  source 1..4476: mol_type = other DNA
atgaatggagtggccttctgcctggtgggcatcccccccaggcctgagcccaggcctccccagctgcccctgggccccagagatggctgcagcccccggcggcccttcccctggcagggccccaggaccctgctgctgtacaagagcccccaggacggcttcggcttcaccctgcggcacttcatcgtgtacccacctgagagcgctgtgcactgcagcctgaaggaggaggagaatggaggccggggcggcggccccagcccccgctaccgcctggagcccatggacaccatctttgtgaagaatgtgaaggaggatggccctgcccaccgggccggcctgaggactggagaccggctggtgaaggtgaatggagagagcgtgattggcaagacctacagccaggtgattgccctgatccagaacagtgatgacaccctggagctgagcatcatgcccaaggatgaggacatcctgcagctggcctacagccaggatgcctacctgaagggaaatgagccctacagcggggaggcccggagcatccctgagcccccacccatctgctaccccaggaagacctacgcccccccagcccgggccagcacccgggccaccatggtgcctgagcccaccagcgccctgcccagcgaccccaggagccctgctgcctggagcgaccccggcctgcgggtgcccccagctgcccgggcccacctggacaacagcagcctgggcatgagccagccccggcccagccctggggccttcccccacctgagcagcgagcccaggaccccccgggccttccctgagcccggcagccgggtgccccccagccggctggagtgccagcaggccctgagccactggctgagcaaccaggtgccccggcgggccggggagcggcgctgcccagccatggccccccgggcccggagcgccagccaggaccggctggaggaggtggccgccccccggccctggccctgcagcaccagccaggatgccctgagccagctgggccaggagggctggcaccgggcccggagtgatgactacctgagccgggccaccaggtctgctgaggccctgggccctggggccctggtgagccccaggtttgagcgctgtggctgggccagccagaggagcagcgcccggaccccagcctgccccacccgggacctgcccggcccccaggcccccccacccagcggcctgcagggcctggatgacctgggctacatcggctaccgcagctacagccccagcttccagaggagaacaggcctgctgcacgccctgtccttccgggacagcccctttggaggcctgcccaccttcaacctggcccagagccctgccagcttccccccagaggccagcgagcccccccgggtggtgcggcctgagcccagcacccgggccctggagcccccagcagaagatagaggagatgaggtggtgctgcggcagaagcccccaactggaaggaaggtgcagctgaccccagcccggcagatgaacctgggctttggagatgagagccctgagcctgaggccagcggccgcggggagcggctgggcaggaaggtggcccccctggccaccacagaggacagcctggccagcatccccttcattgatgagcccaccagccccagcattgacctgcaggccaagcacgtgcctgccagcgctgtggtgagcagcgccatgaacagcgcccctgtgctgggcaccagccccagcagccccaccttcaccttcaccctgggccgccactacagccaggactgcagcagcatcaaggccggccgccgcagcagctacctgctggccatcaccacagagaggagcaagagctgtgatgatggcctgaacaccttcagagatgagggccgggtgctgcggcggctgcccaaccgcatccccagcctgaggatgctgcgctccttcttcacagatggcagcctggacagctggggcaccagtgaagatgctgatgcccccagcaagaggcacagcaccagtgacctgagtgatgccaccttcagtgacatccggcgggagggctggctgtactacaagcagatcctgaccaagaagggcaagaaggccggcagcggcctgcggcagtggaagagggtgtatgctgccctgcgggcccggagcctgagcctgagcaaggagcggcgggagcccggccctgctgctgctggagctgctgctgctggggccggggaggatgaagctgcccctgtgtgcatcggcagctgcctggtggacatctcctacagcgagaccaagagaagacatgtgttccggctgaccacagctgacttctgtgagtacctgttccaggctgaagatagagatgacatgctgggctggatccgggccatccgggagaacagcagagctgagggggaggaccccggctgtgccaaccaggccctgatcagcaagaagctgaatgactacaggaaggtgagccacagcagcggccccaaggctgacagcagccccaagggcagccggggcctgggcggcctgaagtctgagttcctgaagcagagcgctgcccggggcctgcggacccaggacctgcctgctggcagcaaggatgattctgctgctgcccccaagaccccctggggcatcaacatcatcaagaagaacaagaaggccgccccccgggcctttggagtgcggctggaggagtgccagcctgccacagagaaccagagggtgcccctcatcgtggccgcctgctgcagaattgtggaggcccggggcctggagagcacaggcatctacagagtgcccggcaacaatgctgtggtgagcagcctgcaggagcagctgaacagaggccctggggacatcaacctgcaggatgagcgctggcaggacctgaatgtcatcagcagcctgctgaagagcttcttcaggaagctgcctgagcccctcttcacagatgacaagtacaatgacttcatcgaggccaacagaattgaagatgcccgggagaggatgaggaccctgaggaagctgatccgggacctgcccggccactactatgagaccctgaagttcctggtgggccacctgaagaccatcgctgaccacagcgagaagaacaagatggagcccaggaacctggccctggtgtttggccccaccctggtgaggaccagcgaggacaacatgacagacatggtgacccacatgccagaccgctacaagatcgtggagaccctcatccagcacagcgactggttcttcagtgatgaagaagataaaggagagaggacccctgtgggggacaaggagccccaggccgtgcccaacatcgagtacctgctgcccaacattggaagaacagtgcccccaggggaccccggcagtgacagcaccacctgcagcagcgccaagagcaagggctcctgggcccccaagaaggagccctatgcccgggagatgctggccatctccttcatctctgctgtgaacaggaagaggaagaagagaagagaggcccggggcctgggcagcagcacagatgatgattctgagcaggaggcccacaagccaggggccggggccacagcccctggcacccaggagcggccccagggccccctgcccggggctgtggcccctgaggcccctggccgcctgagccccccagctgcccctgaggagaggcctgctgctgacaccaggagcatcgtgtctggctacagcaccctgagcaccatggacagatctgtgtgcagcggggccagcggcagaagagctggagctggagatgaagcagatgatgagaggtctgagctgagccacgtggagacagacacagaaggagctgctggagctggccctgggggccgcctgacccggcggcccagcttcagcagccaccacctgatgccctgtgacaccctggcccggcggcggctggcccggggccgcccagatggagagggcgccggccggggcggcccccgggcccctgagcccccaggcagcgccagcagcagcagccaggagagcctgcggcccccagctgctgccctggccagccggcccagcaggatggaggccctgcggctgcggctgcggggcacagcagatgacatgctggccgtgcggctgcggcggcccctgagccctgagaccaggagaagaagaagctcctggaggaggcacacagtggtggtgcagagccccctgacagacctgaacttcaatgagtggaaggagctgggcggcggcggccccccagagcctgctggggcccgggcccacagcgacaacaaggacagcggcctgagcagcctggagagcaccaaggcccgggcccccagcagcgctgccagccagcccccagcccctggggacaccggcagcctgcagagccagcccccccggcgctctgctgccagccggctgcaccagtgcctgtag

SEQ ID NO: 167898 - DNA, 3435 bp, synthetic construct
  misc_feature 1..3435: note = Description of Artificial Sequence: Synthetic coding sequence
  source 1..3435: mol_type = other DNA
atgaatggagtggccttctgcctggtgggcatcccccccaggcctgagcccaggcctccccagctgcccctgggccccagagatggctgcagcccccggcggcccttcccctggcagggccccaggaccctgctgctgtacaagagcccccaggacggcttcggcttcaccctgcggcacttcatcgtgtacccacctgagagcgctgtgcactgcagcctgaaggaggaggagaatggaggccggggcggcggccccagcccccgctaccgcctggagcccatggacaccatctttgtgaagaatgtgaaggaggatggccctgcccaccgggccggcctgaggactggagaccggctggtgaaggtgaatggagagagcgtgattggcaagacctacagccaggtgattgccctgatccagaacagtgatgacaccctggagctgagcatcatgcccaaggatgaggacatcctgcagctggcctacagccaggatgcctacctgaagggaaatgagccctacagcggggaggcccggagcatccctgagcccccacccatctgctaccccaggaagacctacgcccccccagcccgggccagcacccgggccaccatggtgcctgagcccaccagcgccctgcccagcgaccccaggagccctgctgcctggagcgaccccggcctgcgggtgcccccagctgcccgggcccacctggacaacagcagcctgggcatgagccagccccggcccagccctggggccttcccccacctgagcagcgagcccaggaccccccgggccttccctgagcccggcagccgggtgccccccagccggctggagtgccagcaggccctgagccactggctgagcaaccaggtgccccggcgggccggggagcggcgctgcccagccatggccccccgggcccggagcgccagccaggaccggctggaggaggtggccgccccccggccctggccctgcagcaccagccaggatgccctgagccagctgggccaggagggctggcaccgggcccggagtgatgactacctgagccgggccaccaggtctgctgaggccctgggccctggggccctggtgagccccaggtttgagcgctgtggctgggccagccagaggagcagcgcccggaccccagcctgccccacccgggacctgcccggcccccaggcccccccacccagcggcctgcagggcctggatgacctgggctacatcggctaccgcagctacagccccagcttccagaggagaacaggcctgctgcacgccctgtccttccgggacagcccctttggaggcctgcccaccttcaacctggcccagagccctgccagcttccccccagaggccagcgagcccccccgggtggtgcggcctgagcccagcacccgggccctggagcccccagcagaagatagaggagatgaggtggtgctgcggcagaagcccccaactggaaggaaggtgcagctgaccccagcccggcagatgaacctgggctttggagatgagagccctgagcctgaggccagcggccgcggggagcggctgggcaggaaggtggcccccctggccaccacagaggacagcctggccagcatccccttcattgatgagcccaccagccccagcattgacctgcaggccaagcacgtgcctgccagcgctgtggtgagcagcgccatgaacagcgcccctgtgctgggcaccagccccagcagccccaccttcaccttcaccctgggccgccactacagccaggactgcagcagcatcaaggccggccgccgcagcagctacctgctggccatcaccacagagaggagcaagagctgtgatgatggcctgaacaccttcagagatgagggccgggtgctgcggcggctgcccaaccgcatccccagcctgaggatgctgcgctccttcttcacagatggcagcctggacagctggggcaccagtgaagatgctgatgcccccagcaagaggcacagcaccagtgacctgagtgatgccaccttcagtgacatccggcgggagggctggctgtactacaagcagatcctgaccaagaagggcaagaaggccggcagcggcctgcggcagtggaagagggtgtatgctgccctgcgggcccggagcctgagcctgagcaaggagcggcgggagcccggccctgctgctgctggagctgctgctgctggggccggggaggatgaagctgcccctgtgtgcatcggcagctgcctggtggacatctcctacagcgagaccaagagaagacatgtgttccggctgaccacagctgacttctgtgagtacctgttccaggctgaagatagagatgacatgctgggctggatccgggccatccgggagaacagcagagctgagggggaggaccccggctgtgccaaccaggccctgatcagcaagaagctgaatgactacaggaaggtgagccacagcagcggccccaaggctgacagcagccccaagggcagccggggcctgggcggcctgaagtctgagttcctgaagcagagcgctgcccggggcctgcggacccaggacctgcctgctggcagcaaggatgattctgctgctgcccccaagaccccctggggcatcaacatcatcaagaagaacaagaaggccgccccccgggcctttggagtgcggctggaggagtgccagcctgccacagagaaccagagggtgcccctcatcgtggccgcctgctgcagaattgtggaggcccggggcctggagagcacaggcatctacagagtgcccggcaacaatgctgtggtgagcagcctgcaggagcagctgaacagaggccctggggacatcaacctgcaggatgagcgctggcaggacctgaatgtcatcagcagcctgctgaagagcttcttcaggaagctgcctgagcccctcttcacagatgacaagtacaatgacttcatcgaggccaacagaattgaagatgcccgggagaggatgaggaccctgaggaagctgatccgggacctgcccggccactactatgagaccctgaagttcctggtgggccacctgaagaccatcgctgaccacagcgagaagaacaagatggagcccaggaacctggccctggtgtttggccccaccctggtgaggaccagcgaggacaacatgacagacatggtgacccacatgccagaccgctacaagatcgtggagaccctcatccagcacagcgactggttcttcagtgatgaagaagataaaggagagaggacccctgtgggggacaaggagccccaggccgtgcccaacatcgagtacctgctgcccaacattggaagaacagtgcccccaggggaccccggcagcgctgacctgctggagatctag

SEQ ID NO: 167899 - DNA, 4194 bp, synthetic construct
  misc_feature 1..4194: note = Description of Artificial Sequence: Synthetic coding sequence
  source 1..4194: mol_type = other DNA
atggacaccatctttgtgaagaatgtgaaggaggatggccctgcccaccgggccggcctgaggactggagaccggctggtgaaggtgaatggagagagcgtgattggcaagacctacagccaggtgattgccctgatccagaacagtgatgacaccctggagctgagcatcatgcccaaggatgaggacatcctgcagctggcctacagccaggatgcctacctgaagggaaatgagccctacagcggggaggcccggagcatccctgagcccccacccatctgctaccccaggaagacctacgcccccccagcccgggccagcacccgggccaccatggtgcctgagcccaccagcgccctgcccagcgaccccaggagccctgctgcctggagcgaccccggcctgcgggtgcccccagctgcccgggcccacctggacaacagcagcctgggcatgagccagccccggcccagccctggggccttcccccacctgagcagcgagcccaggaccccccgggccttccctgagcccggcagccgggtgccccccagccggctggagtgccagcaggccctgagccactggctgagcaaccaggtgccccggcgggccggggagcggcgctgcccagccatggccccccgggcccggagcgccagccaggaccggctggaggaggtggccgccccccggccctggccctgcagcaccagccaggatgccctgagccagctgggccaggagggctggcaccgggcccggagtgatgactacctgagccgggccaccaggtctgctgaggccctgggccctggggccctggtgagccccaggtttgagcgctgtggctgggccagccagaggagcagcgcccggaccccagcctgccccacccgggacctgcccggcccccaggcccccccacccagcggcctgcagggcctggatgacctgggctacatcggctaccgcagctacagccccagcttccagaggagaacaggcctgctgcacgccctgtccttccgggacagcccctttggaggcctgcccaccttcaacctggcccagagccctgccagcttccccccagaggccagcgagcccccccgggtggtgcggcctgagcccagcacccgggccctggagcccccagcagaagatagaggagatgaggtggtgctgcggcagaagcccccaactggaaggaaggtgcagctgaccccagcccggcagatgaacctgggctttggagatgagagccctgagcctgaggccagcggccgcggggagcggctgggcaggaaggtggcccccctggccaccacagaggacagcctggccagcatccccttcattgatgagcccaccagccccagcattgacctgcaggccaagcacgtgcctgccagcgctgtggtgagcagcgccatgaacagcgcccctgtgctgggcaccagccccagcagccccaccttcaccttcaccctgggccgccactacagccaggactgcagcagcatcaaggccggccgccgcagcagctacctgctggccatcaccacagagaggagcaagagctgtgatgatggcctgaacaccttcagagatgagggccgggtgctgcggcggctgcccaaccgcatccccagcctgaggatgctgcgctccttcttcacagatggcagcctggacagctggggcaccagtgaagatgctgatgcccccagcaagaggcacagcaccagtgacctgagtgatgccaccttcagtgacatccggcgggagggctggctgtactacaagcagatcctgaccaagaagggcaagaaggccggcagcggcctgcggcagtggaagagggtgtatgctgccctgcgggcccggagcctgagcctgagcaaggagcggcgggagcccggccctgctgctgctggagctgctgctgctggggccggggaggatgaagctgcccctgtgtgcatcggcagctgcctggtggacatctcctacagcgagaccaagagaagacatgtgttccggctgaccacagctgacttctgtgagtacctgttccaggctgaagatagagatgacatgctgggctggatccgggccatccgggagaacagcagagctgagggggaggaccccggctgtgccaaccaggccctgatcagcaagaagctgaatgactacaggaaggtgagccacagcagcggccccaaggctgacagcagccccaagggcagccggggcctgggcggcctgaagtctgagttcctgaagcagagcgctgcccggggcctgcggacccaggacctgcctgctggcagcaaggatgattctgctgctgcccccaagaccccctggggcatcaacatcatcaagaagaacaagaaggccgccccccgggcctttggagtgcggctggaggagtgccagcctgccacagagaaccagagggtgcccctcatcgtggccgcctgctgcagaattgtggaggcccggggcctggagagcacaggcatctacagagtgcccggcaacaatgctgtggtgagcagcctgcaggagcagctgaacagaggccctggggacatcaacctgcaggatgagcgctggcaggacctgaatgtcatcagcagcctgctgaagagcttcttcaggaagctgcctgagcccctcttcacagatgacaagtacaatgacttcatcgaggccaacagaattgaagatgcccgggagaggatgaggaccctgaggaagctgatccgggacctgcccggccactactatgagaccctgaagttcctggtgggccacctgaagaccatcgctgaccacagcgagaagaacaagatggagcccaggaacctggccctggtgtttggccccaccctggtgaggaccagcgaggacaacatgacagacatggtgacccacatgccagaccgctacaagatcgtggagaccctcatccagcacagcgactggttcttcagtgatgaagaagataaaggagagaggacccctgtgggggacaaggagccccaggccgtgcccaacatcgagtacctgctgcccaacattggaagaacagtgcccccaggggaccccggcagtgacagcaccacctgcagcagcgccaagagcaagggctcctgggcccccaagaaggagccctatgcccgggagatgctggccatctccttcatctctgctgtgaacaggaagaggaagaagagaagagaggcccggggcctgggcagcagcacagatgatgattctgagcaggaggcccacaagccaggggccggggccacagcccctggcacccaggagcggccccagggccccctgcccggggctgtggcccctgaggcccctggccgcctgagccccccagctgcccctgaggagaggcctgctgctgacaccaggagcatcgtgtctggctacagcaccctgagcaccatggacagatctgtgtgcagcggggccagcggcagaagagctggagctggagatgaagcagatgatgagaggtctgagctgagccacgtggagacagacacagaaggagctgctggagctggccctgggggccgcctgacccggcggcccagcttcagcagccaccacctgatgccctgtgacaccctggcccggcggcggctggcccggggccgcccagatggagagggcgccggccggggcggcccccgggcccctgagcccccaggcagcgccagcagcagcagccaggagagcctgcggcccccagctgctgccctggccagccggcccagcaggatggaggccctgcggctgcggctgcggggcacagcagatgacatgctggccgtgcggctgcggcggcccctgagccctgagaccaggagaagaagaagctcctggaggaggcacacagtggtggtgcagagccccctgacagacctgaacttcaatgagtggaaggagctgggcggcggcggccccccagagcctgctggggcccgggcccacagcgacaacaaggacagcggcctgagcagcctggagagcaccaaggcccgggcccccagcagcgctgccagccagcccccagcccctggggacaccggcagcctgcagagccagcccccccggcgctctgctgccagccggctgcaccagtgcctgtag

SEQ ID NO: 167900 - DNA, 1968 bp, synthetic construct
  misc_feature 1..1968: note = Description of Artificial Sequence: Synthetic coding sequence
  source 1..1968: mol_type = other DNA
atgccagaagatagaaattctgggggctgcccagctggggccctggccagcacccccttcatccccaagaccacctaccgccgcatcaagcgctgcttctccttcaggaagggcatcttcggccagaagctggaggacacagtgcgctatgagaagagatatggcaaccggctggcccccatgctggtggagcagtgtgtggacttcatccggcagaggggcctgaaggaggagggcctcttccggctgcccggccaggccaacctggtgaaggagctgcaggatgcctttgactgtggggagaagcccagctttgacagcaacacagatgtgcacacagtggccagcctgctgaagctgtacctgcgggagctgcctgagcccgtcatcccctatgccaagtatgaggacttcctgagctgtgccaagctgctgagcaaggaggaggaggccggcgtgaaggagctggccaagcaggtgaagagcctgcctgtggtgaactacaacctgctgaagtacatctgccgcttcctggatgaggtgcagagctacagcggcgtgaacaagatgtctgtgcagaacctggccaccgtgtttggccccaacatcctgcggcccaaggtggaggaccccctgaccatcatggagggcaccgtggtggtgcagcagctgatgtctgtgatgatcagcaagcatgactgcctcttccccaaggatgctgagctgcagagcaagccccaggatggagtgagcaacaacaatgagatccagaagaaggccaccatgggccagctgcagaacaaggagaacaacaacaccaaggacagccccagccggcagtgctcctgggacaagtctgagagcccccagaggagctccatgaacaacggcagccccacagccctgagcggcagcaagaccaacagccccaagaacagcgtgcacaagctggatgtgagccgcagcccccccctgatggtgaagaagaacccagccttcaacaagggcagcggcatcgtgaccaacggcagcttcagcagcagcaatgctgagggcctggagaagacccagaccaccccaaatggcagcctgcaggcccggcgcagcagcagcctgaaggtgtctggcaccaagatgggcacccacagcgtgcagaatggcaccgtgaggatgggcatcctgaacagcgacaccctgggcaaccccaccaacgtgaggaacatgtcctggctgcccaacggctacgtgaccctgcgggacaacaagcagaaggagcaggccggggagctgggccagcacaaccggctgagcacctatgacaacgtgcaccagcagttctccatgatgaacctggatgacaagcagagcattgattctgccacctggagcaccagcagctgtgagatcagcctgcctgagaacagcaacagctgccgcagcagcaccaccacctgcccagagcaggacttctttggaggcaactttgaggaccctgtgctggatggccccccccaggatgacctgagccacccccgggactatgagagcaagagtgaccacaggtctgtgggcggccgcagcagccgggccaccagcagcagtgacaacagcgagacctttgtgggcaacagcagcagcaaccacagcgccctgcacagcctggtgagcagcctgaagcaggagatgaccaagcagaagattgaatatgagagccgcatcaagagcctggagcagaggaacctgaccctggagacagagatgatgagcctgcatgatgagctggaccaggagaggaagaagttcaccatgattgagatcaagatgagaaatgctgagcgggccaaggaggatgctgagaagagaaatgacatgctgcagaaggagatggagcagttcttcagcaccttcggggagctgactgtggagcccaggagaacagagcggggcaacaccatctggatccagtag

SEQ ID NO: 167901 - DNA, 1962 bp, synthetic construct
  misc_feature 1..1962: note = Description of Artificial Sequence: Synthetic coding sequence
  source 1..1962: mol_type = other DNA
atgacagccaaccacgagagctacctgctgatggccagcacccagaatgacatggaggactgggtgaagagcatccggcgggtcatctggggcccctttggaggcggcatcttcggccagaagctggaggacacagtgcgctatgagaagagatatggcaaccggctggcccccatgctggtggagcagtgtgtggacttcatccggcagaggggcctgaaggaggagggcctcttccggctgcccggccaggccaacctggtgaaggagctgcaggatgcctttgactgtggggagaagcccagctttgacagcaacacagatgtgcacacagtggccagcctgctgaagctgtacctgcgggagctgcctgagcccgtcatcccctatgccaagtatgaggacttcctgagctgtgccaagctgctgagcaaggaggaggaggccggcgtgaaggagctggccaagcaggtgaagagcctgcctgtggtgaactacaacctgctgaagtacatctgccgcttcctggatgaggtgcagagctacagcggcgtgaacaagatgtctgtgcagaacctggccaccgtgtttggccccaacatcctgcggcccaaggtggaggaccccctgaccatcatggagggcaccgtggtggtgcagcagctgatgtctgtgatgatcagcaagcatgactgcctcttccccaaggatgctgagctgcagagcaagccccaggatggagtgagcaacaacaatgagatccagaagaaggccaccatgggccagctgcagaacaaggagaacaacaacaccaaggacagccccagccggcagtgctcctgggacaagtctgagagcccccagaggagctccatgaacaacggcagccccacagccctgagcggcagcaagaccaacagccccaagaacagcgtgcacaagctggatgtgagccgcagcccccccctgatggtgaagaagaacccagccttcaacaagggcagcggcatcgtgaccaacggcagcttcagcagcagcaatgctgagggcctggagaagacccagaccaccccaaatggcagcctgcaggcccggcgcagcagcagcctgaaggtgtctggcaccaagatgggcacccacagcgtgcagaatggcaccgtgaggatgggcatcctgaacagcgacaccctgggcaaccccaccaacgtgaggaacatgtcctggctgcccaacggctacgtgaccctgcgggacaacaagcagaaggagcaggccggggagctgggccagcacaaccggctgagcacctatgacaacgtgcaccagcagttctccatgatgaacctggatgacaagcagagcattgattctgccacctggagcaccagcagctgtgagatcagcctgcctgagaacagcaacagctgccgcagcagcaccaccacctgcccagagcaggacttctttggaggcaactttgaggaccctgtgctggatggccccccccaggatgacctgagccacccccgggactatgagagcaagagtgaccacaggtctgtgggcggccgcagcagccgggccaccagcagcagtgacaacagcgagacctttgtgggcaacagcagcagcaaccacagcgccctgcacagcctggtgagcagcctgaagcaggagatgaccaagcagaagattgaatatgagagccgcatcaagagcctggagcagaggaacctgaccctggagacagagatgatgagcctgcatgatgagctggaccaggagaggaagaagttcaccatgattgagatcaagatgagaaatgctgagcgggccaaggaggatgctgagaagagaaatgacatgctgcagaaggagatggagcagttcttcagcaccttcggggagctgactgtggagcccaggagaacagagcggggcaacaccatctggatccagtag

SEQ ID NO: 167902 - DNA, 2247 bp, synthetic construct
  misc_feature 1..2247: note = Description of Artificial Sequence: Synthetic coding sequence
  source 1..2247: mol_type = other DNA
atggaggagaacaatgacagcacagagaacccccagcagggccagggccggcagaatgccatcaagtgtggctggctgaggaagcagggcggctttgtgaagacctggcacacccgctggtttgtgctgaagggggaccagctgtactacttcaaggatgaagatgagaccaagcccctgggcaccatcttcctgcccggcaacaaggtgtctgagcacccctgcaatgaggagaaccctgggaagttcctgtttgaggtggtgcctggaggagaccgggacaggatgacagccaaccacgagagctacctgctgatggccagcacccagaatgacatggaggactgggtgaagagcatcagaagagtcatctggggcccctttggaggcggcatcttcggccagaagctggaggacacagtgcgctatgagaagagatatggcaaccggctggcccccatgctggtggagcagtgtgtggacttcatccggcagaggggcctgaaggaggagggcctcttccggctgcccggccaggccaacctggtgaaggagctgcaggatgcctttgactgtggggagaagcccagctttgacagcaacacagatgtgcacacagtggccagcctgctgaagctgtacctgcgggagctgcctgagcctgtgatcccctatgccaagtatgaggacttcctgagctgtgccaagctgctgagcaaggaggaggaggccggcgtgaaggagctggccaagcaggtgaagagcctgcctgtggtgaactacaacctgctgaagtacatctgccgcttcctggatgaggtgcagagctacagcggcgtgaacaagatgtctgtgcagaacctggccaccgtgtttggccccaacatcctgcggcccaaggtggaggaccccctgaccatcatggagggcaccgtggtggtgcagcagctgatgtctgtgatgatcagcaagcatgactgcctcttccccaaggatgctgagctgcagagcaagccccaggatggagtgagcaacaacaatgagatccagaagaaggccaccatgggccagctgcagaacaaggagaacaacaacaccaaggacagccccagccggcagtgctcctgggacaagtctgagagcccccagaggagctccatgaacaacggcagccccacagccctgagcggcagcaagaccaacagccccaagaacagcgtgcacaagctggatgtgagccgcagcccccccctgatggtgaagaagaacccagccttcaacaagggcagcggcatcgtgaccaacggcagcttcagcagcagcaatgctgagggcctggagaagacccagaccacccccaacggcagcctgcaggcccggcgcagcagcagcctgaaggtgtctggcaccaagatgggcacccacagcgtgcagaatggaacagtgaggatgggcatcctgaacagcgacaccctgggcaaccccaccaacgtgaggaacatgtcctggctgcccaacggctacgtgaccctgcgggacaacaagcagaaggagcaggccggggagctgggccagcacaaccggctgagcacctatgacaacgtgcaccagcagttctccatgatgaacctggatgacaagcagagcattgacagcgccacctggagcaccagcagctgtgagatcagcctgcctgagaacagcaacagctgccgcagcagcaccaccacctgcccagagcaggacttcttcggcggcaactttgaagatcctgtgctggatggccccccccaggatgacctgagccacccccgggactatgagagcaagagtgaccacaggtctgtgggcggccgcagcagccgggccaccagcagcagtgacaacagcgagacctttgtgggcaacagcagcagcaaccacagcgccctgcacagcctggtgagcagcctgaagcaggagatgaccaagcagaagattgaatatgagagccgcatcaagagcctggagcagaggaacctgaccctggagacagagatgatgagcctgcatgatgagctggaccaggagaggaagaagttcaccatgattgagatcaagatgagaaatgctgagcgggccaaggaggatgctgagaagagaaatgacatgctgcagaaggagatggagcagttcttcagcacctttggagagctgactgtggagcccaggagaacagagcggggcaacaccatctggatccagtag

SEQ ID NO: 167903 - DNA, 741 bp, synthetic construct
  misc_feature 1..741: note = Description of Artificial Sequence: Synthetic coding sequence
  source 1..741: mol_type = other DNA
atggaggagaacaatgacagcacagagaacccccagcagggccagggccggcagaatgccatcaagtgtggctggctgaggaagcagggcggctttgtgaagacctggcacacccgctggtttgtgctgaagggggaccagctgtactacttcaaggatgaagatgagaccaagcccctgggcaccatcttcctgcccggcaacaaggtgtctgagcacccctgcaatgaggagaaccctgggaagttcctgtttgaggtggtgcctggaggagaccgggacaggatgacagccaaccacgagagctacctgctgatggccagcacccagaatgacatggaggactgggtgaagagcatcagaagagtcatctggggcccctttggaggcggcatcttcggccagaagctggaggacacagtgcgctatgagaagagatatggcaaccggctggcccccatgctggtggagcagtgtgtggacttcatccggcagaggggcctgaaggaggagggcctcttccggctgcccggccaggccaacctggtgaaggagctgcaggatgcctttgactgtggggagaagcccagctttgacagcaacacagatgtgcacacagtggccagcctgctgaagctgtacctgcgggagctgcctgagcctgtgatcccctatgccaagtatgaggacttcctgagctgtgccaagctgctgagcaaggaggaggaggccgtgtcctag

SEQ ID NO: 167904 - DNA, 249 bp, synthetic construct
  misc_feature 1..249: note = Description of Artificial Sequence: Synthetic coding sequence
  source 1..249: mol_type = other DNA
atgacagccaaccacgagagctacctgctgatggccagcacccagaatgacatggaggactgggtgaagagcatccggcgggtcatctggggcccctttggaggcggcatcttcggccagaagctggaggacacagtgcgctatgagaagagatatggcaaccggctggcccccatgctggtggagcagtgtgtggacttcatccggcagaggggcctgaaggaggagggcctcttccggctgccctag

SEQ ID NO: 167905 - DNA, 1938 bp, synthetic construct
  misc_feature 1..1938: note = Description of Artificial Sequence: Synthetic coding sequence
  source 1..1938: mol_type = other DNA
atgagcctgaagctgcccaggaactgggacttcaacctgaaggtggaggccgccaagatcgcccggagccgctctgtgatgaccggggagcagatggccgccttccaccccagcagcacccccaaccccctggagcggcccatcaagatgggctggctgaagaagcagaggagcatcgtgaagaactggcagcagcgctactttgtgctgcgggcccagcagctgtactactacaaggatgaggaggacaccaagccccagggctgcatgtacctgcccggctgcaccatcaaggagatcgccaccaaccctgaggaggccggcaagtttgtgtttgagatcatcccagcctcctgggaccagaacaggatgggccaggacagctatgtgctgatggccagcagccaggccgagatggaggagtgggtgaagttcctgcggcgggtggccggcaccccctgtggggtgtttggccagaggctggatgagaccgtggcctatgagcagaagtttggcccccacctggtgcccatcctggtggagaagtgtgccgagttcatcctggagcacggcagaaatgaggagggcatcttccggctgcccggccaggacaacctggtgaagcagctgagagatgcctttgatgctggggagcggcccagctttgaccgggacacagatgtgcacacagtggccagcctgctgaagctgtacctgcgggacctgcctgagcctgtggtgccctggagccagtatgagggcttcctgctgtgtggccagctgaccaatgctgatgaggccaaggcccagcaggagctgatgaagcagctgagcatcctgccccgggacaactacagcctgctgagctacatctgccgcttcctgcacgagatccagctgaactgtgctgtgaacaagatgtctgtggacaacctggccaccgtcatcggcgtgaacctgatccgcagcaaggtggaggaccctgctgtgatcatgaggggcaccccccagatccagagggtgatgaccatgatgatccgggaccacgaggtgctcttccccaagagcaaggacatccccctgagccccccagcccagaagaatgaccccaagaaggcccctgtggcccggagctctgtgggctgggatgccacagaggacctgcgcatcagcaggacagacagcttcagctccatgaccagtgacagcgacaccaccagccccaccggccagcagcccagtgatgccttccctgaggacagcagcaaggtgccccgggagaagccaggggactggaagatgcagagcaggaagaggacccagaccctgcccaacaggaagtgcttcctgaccagcgccttccagggcgccaacagcagcaagatggagatcttcaagaatgagttctggagccccagcagcgaggccaaggccggggagggccacaggaggaccatgagccaggacctgcggcagctgagtgacagccagaggaccagcacctatgacaacgtgcccagcctgcccggcagccctggagaggaggccagcgccctgagcagccaggcctgtgacagcaaaggagacaccctggccagccccaacagcgagaccggccctgggaagaagaacagcggggaggaggagattgacagcctgcagaggatggtgcaggagctgaggaaggagattgagacccagaagcagatgtatgaggagcagatcaagaacctggagaaggaaaattatgatgtgtgggccaaggtggtgcggctgaatgaggagctggagaaggagaagaagaagtctgctgccctggagatcagcctgaggaacatggagaggagccgggaggatgtggagaagaggaacaaggccctggaggaggaggtgaaggagtttgtgaagtccatgaaggagcccaagacagaggcctag

SEQ ID NO: 167906 - DNA, 1917 bp, synthetic construct
  misc_feature 1..1917: note = Description of Artificial Sequence: Synthetic coding sequence
  source 1..1917: mol_type = other DNA
atgagcctgggccagagcgcctgcctcttcctgagcatcgcccggagccgctctgtgatgactggagagcagatggccgccttccaccccagcagcacccccaaccccctggagcggcccatcaagatgggctggctgaagaagcagaggagcatcgtgaagaactggcagcagcgctactttgtgctgcgggcccagcagctgtactactacaaggatgaggaggacaccaagccccagggctgcatgtacctgcccggctgcaccatcaaggagatcgccaccaaccctgaggaggccggcaagtttgtgtttgagatcatcccagcctcctgggaccagaacaggatgggccaggacagctatgtgctgatggccagcagccaggccgagatggaggagtgggtgaagttcctgcggcgggtggccggcaccccctgtggggtgtttggccagaggctggatgaaacagtggcctatgagcagaagtttggcccccacctggtgcccatcctggtggagaagtgtgccgagttcatcctggagcacggcagaaatgaggagggcatcttccggctgcccggccaggacaacctggtgaagcagctgagagatgcctttgatgctggggagcggcccagctttgaccgggacacagatgtgcacacagtggccagcctgctgaagctgtacctgcgggacctgcctgagcctgtggtgccctggagccagtatgagggcttcctgctgtgtggccagctgaccaatgctgatgaggccaaggcccagcaggagctgatgaagcagctgagcatcctgccccgggacaactacagcctgctgagctacatctgccgcttcctgcacgagatccagctgaactgtgctgtgaacaagatgtctgtggacaacctggccaccgtgattggagtgaacctgatccgcagcaaggtggaggaccctgctgtgatcatgaggggcaccccccagatccagagggtgatgaccatgatgatccgggaccacgaggtgctcttccccaagagcaaggacatccccctgagccccccagcccagaagaatgaccccaagaaggcccctgtggcccggagctctgtgggctgggatgccacagaggacctgcgcatcagcaggacagacagcttcagctccatgaccagtgacagcgacaccaccagccccaccggccagcagcccagtgatgccttccctgaggacagcagcaaggtgccccgggagaagccaggggactggaagatgcagagcaggaagaggacccagaccctgcccaacaggaagtgcttcctgaccagcgccttccagggcgccaacagcagcaagatggagatcttcaagaatgagttctggagccccagcagcgaggccaaggccggggagggccacaggaggaccatgagccaggacctgcggcagctgagtgacagccagaggaccagcacctatgacaacgtgcccagcctgcccggcagccctggagaggaggccagcgccctgagcagccaggcctgtgacagcaagggggacaccctggccagccccaacagcgagactggacctgggaagaagaacagcggggaggaggagattgacagcctgcagaggatggtgcaggagctgaggaaggagattgagacccagaagcagatgtatgaggagcagatcaagaacctggagaaggagaactatgatgtgtgggccaaggtggtgcggctgaatgaggagctggagaaggagaagaagaagtctgctgccctggagatcagcctgaggaacatggagaggagcagagaagatgtggagaagaggaacaaggccctggaggaggaggtgaaggagtttgtgaagtccatgaaggagcccaagacagaggcctag

SEQ ID NO: 167907 - DNA, 1941 bp, synthetic construct
  misc_feature 1..1941: note = Description of Artificial Sequence: Synthetic coding sequence
  source 1..1941: mol_type = other DNA
atgagcctgaagctgcccaggaactgggacttcaacctgaaggtggaggccgccaagatcgcccggagccgctctgtgatgaccggggagcagatggccgccttccaccccagcagcacccccaaccccctggagcggcccatcaagatgggctggctgaagaagcagaggagcatcgtgaagaactggcagcagcgctactttgtgctgcgggcccagcagctgtactactacaaggatgaggaggacaccaagccccagggctgcatgtacctgcccggctgcaccatcaaggagatcgccaccaaccctgaggaggccggcaagtttgtgtttgagatcatcccagcctcctgggaccagaacaggatgggccaggacagctatgtgctgatggccagcagccaggccgagatggaggagtgggtgaagttcctgcggcgggtggccggcaccccctgtggggctgtgtttggccagaggctggatgaaacagtggcctatgagcagaagtttggcccccacctggtgcccatcctggtggagaagtgtgccgagttcatcctggagcacggcagaaatgaggagggcatcttccggctgcccggccaggacaacctggtgaagcagctgagagatgcctttgatgctggggagcggcccagctttgaccgggacacagatgtgcacacagtggccagcctgctgaagctgtacctgcgggacctgcctgagcctgtggtgccctggagccagtatgagggcttcctgctgtgtggccagctgaccaatgctgatgaggccaaggcccagcaggagctgatgaagcagctgagcatcctgccccgggacaactacagcctgctgagctacatctgccgcttcctgcacgagatccagctgaactgtgctgtgaacaagatgtctgtggacaacctggccaccgtgattggagtgaacctgatccgcagcaaggtggaggaccctgctgtgatcatgaggggcaccccccagatccagagggtgatgaccatgatgatccgggaccacgaggtgctcttccccaagagcaaggacatccccctgagccccccagcccagaagaatgaccccaagaaggcccctgtggcccggagctctgtgggctgggatgccacagaggacctgcgcatcagcaggacagacagcttcagctccatgaccagtgacagcgacaccaccagccccaccggccagcagcccagtgatgccttccctgaggacagcagcaaggtgccccgggagaagccaggggactggaagatgcagagcaggaagaggacccagaccctgcccaacaggaagtgcttcctgaccagcgccttccagggcgccaacagcagcaagatggagatcttcaagaatgagttctggagccccagcagcgaggccaaggccggggagggccacaggaggaccatgagccaggacctgcggcagctgagtgacagccagaggaccagcacctatgacaacgtgcccagcctgcccggcagccctggagaggaggccagcgccctgagcagccaggcctgtgacagcaagggggacaccctggccagccccaacagcgagactggacctgggaagaagaacagcggggaggaggagattgacagcctgcagaggatggtgcaggagctgaggaaggagattgagacccagaagcagatgtatgaggagcagatcaagaacctggagaaggagaactatgatgtgtgggccaaggtggtgcggctgaatgaggagctggagaaggagaagaagaagtctgctgccctggagatcagcctgaggaacatggagaggagcagagaagatgtggagaagaggaacaaggccctggaggaggaggtgaaggagtttgtgaagtccatgaaggagcccaagacagaggcctag

SEQ ID NO: 167908 - DNA, 1920 bp, synthetic construct
  misc_feature 1..1920: note = Description of Artificial Sequence: Synthetic coding sequence
  source 1..1920: mol_type = other DNA
atgagcctgggccagagcgcctgcctcttcctgagcatcgcccggagccgctctgtgatgactggagagcagatggccgccttccaccccagcagcacccccaaccccctggagcggcccatcaagatgggctggctgaagaagcagaggagcatcgtgaagaactggcagcagcgctactttgtgctgcgggcccagcagctgtactactacaaggatgaggaggacaccaagccccagggctgcatgtacctgcccggctgcaccatcaaggagatcgccaccaaccctgaggaggccggcaagtttgtgtttgagatcatcccagcctcctgggaccagaacaggatgggccaggacagctatgtgctgatggccagcagccaggccgagatggaggagtgggtgaagttcctgcggcgggtggccggcaccccctgtggggctgtgtttggccagaggctggatgagaccgtggcctatgagcagaagtttggcccccacctggtgcccatcctggtggagaagtgtgccgagttcatcctggagcacggcagaaatgaggagggcatcttccggctgcccggccaggacaacctggtgaagcagctgagagatgcctttgatgctggggagcggcccagctttgaccgggacacagatgtgcacacagtggccagcctgctgaagctgtacctgcgggacctgcctgagcctgtggtgccctggagccagtatgagggcttcctgctgtgtggccagctgaccaatgctgatgaggccaaggcccagcaggagctgatgaagcagctgagcatcctgccccgggacaactacagcctgctgagctacatctgccgcttcctgcacgagatccagctgaactgtgctgtgaacaagatgtctgtggacaacctggccaccgtcatcggcgtgaacctgatccgcagcaaggtggaggaccctgctgtgatcatgaggggcaccccccagatccagagggtgatgaccatgatgatccgggaccacgaggtgctcttccccaagagcaaggacatccccctgagccccccagcccagaagaatgaccccaagaaggcccctgtggcccggagctctgtgggctgggatgccacagaggacctgcgcatcagcaggacagacagcttcagctccatgaccagtgacagcgacaccaccagccccaccggccagcagcccagtgatgccttccctgaggacagcagcaaggtgccccgggagaagccaggggactggaagatgcagagcaggaagaggacccagaccctgcccaacaggaagtgcttcctgaccagcgccttccagggcgccaacagcagcaagatggagatcttcaagaatgagttctggagccccagcagcgaggccaaggccggggagggccacaggaggaccatgagccaggacctgcggcagctgagtgacagccagaggaccagcacctatgacaacgtgcccagcctgcccggcagccctggagaggaggccagcgccctgagcagccaggcctgtgacagcaaaggagacaccctggccagccccaacagcgagaccggccctgggaagaagaacagcggggaggaggagattgacagcctgcagaggatggtgcaggagctgaggaaggagattgagacccagaagcagatgtatgaggagcagatcaagaacctggagaaggaaaattatgatgtgtgggccaaggtggtgcggctgaatgaggagctggagaaggagaagaagaagtctgctgccctggagatcagcctgaggaacatggagaggagccgggaggatgtggagaagaggaacaaggccctggaggaggaggtgaaggagtttgtgaagtccatgaaggagcccaagacagaggcctag

SEQ ID NO: 167909 - DNA, 852 bp, synthetic construct
  misc_feature 1..852: note = Description of Artificial Sequence: Synthetic coding sequence
  source 1..852: mol_type = other DNA
atgaccggggagcagatggccgccttccaccccagcagcacccccaaccccctggagcggcccatcaagatgggctggctgaagaagcagaggagcatcgtgaagaactggcagcagcgctactttgtgctgcgggcccagcagctgtactactacaaggatgaggaggacaccaagccccagggctgcatgtacctgcccggctgcaccatcaaggagatcgccaccaaccctgaggaggccggcaagtttgtgtttgagatcatcccagcctcctgggaccagaacaggatgggccaggacagctatgtgctgatggccagcagccaggccgagatggaggagtgggtgaagttcctgcggcgggtggccggcaccccctgtggggctgtgtttggccagaggctggatgaaacagtggcctatgagcagaagtttggcccccacctggtgcccatcctggtggagaagtgtgccgagttcatcctggagcacggcagaaatgaggagggcatcttccggctgcccggccaggacaacctggtgaagcagctgagagatgcctttgatgctggggagcggcccagctttgaccgggacacagatgtgcacacagtggccagcctgctgaagctgtacctgcgggacctgcctgagcctgtggtgccctggagccagtatgagggcttcctgctgtgtggccagctgaccaatgctgatgaggccaagaactacagaaacagaaatgactgccagagcgtggtgtctgcccagatccaccagttctgcccccgggtgtccctgctggcccacggccaggcccacctgctggtgaatgacctgctggtgtag

SEQ ID NO: 167910 - DNA, 1776 bp, synthetic construct
  misc_feature 1..1776: note = Description of Artificial Sequence: Synthetic coding sequence
  source 1..1776: mol_type = other DNA
atgagcctgggccagagcgcctgcctcttcctgagcatcgcccggagccgctctgtgatgactggagagcagatggccgccttccaccccagcagcacccccaaccccctggagcggcccatcaagatgggctggctgaagaagcagaggagcatcgtgaagaactggcagcagcgctactttgtgctgcgggcccagcagctgtactactacaaggatgaggaggacaccaagccccagggctgcatgtacctgcccggctgcaccatcaaggagatcgccaccaaccctgaggaggccggcaagtttgtgtttgagatcatcccagcctcctgggaccagaacaggatgggccaggacagctatgtgctgatggccagcagccaggccgagatggaggagtgggtgaagttcctgcggcgggtggccggcaccccctgtggggctgtgtttggccagaggctggatgagaccgtggcctatgagcagaagtttggcccccacctggtgcccatcctggtggagaagtgtgccgagttcatcctggagcacggcagaaatgaggagggcatcttccggctgcccggccaggacaacctggtgaagcagctgagagatgcctttgatgctggggagcggcccagctttgaccgggacacagatgtgcacacagtggccagcctgctgaagctgtacctgcgggacctgcctgagcctgtggtgccctggagccagtatgagggcttcctgctgtgtggccagctgaccaatgctgatgaggccaaggcccagcaggagctgatgaagcagctgagcatcctgccccgggacaactacagcctgctgagctacatctgccgcttcctgcacgagatccagctgaactgtgctgtgaacaagatgtctgtggacaacctggccaccgtcatcggcgtgaacctgatccgcagcaaggtggaggaccctgctgtgatcatgaggggcaccccccagatccagagggtgatgaccatgatgatccgggaccacgaggtgctcttccccaagagcaaggacatccccctgagccccccagcccagaagaatgaccccaagaaggcccctgtggcccggagctctgtgggctgggatgccacagaggacctgcgcatcagcaggacagacagcttcagctccatgaccagtgacagcgacaccaccagccccaccggccagcagcccagtgatgccttccctgaggacagcagcaaggtgccccgggagaagccaggggactggaagatgcagagcaggaagaggacccagaccctgcccaacaggaagtgcttcctgaccagcgccttccagggcgccaacagcagcaagatggagatcttcaagaatgagttctggagccccagcagcgaggccaaggccggggagggccacaggaggaccatgagccaggacctgcggcagctgagtgacagccagaggaccagcacctatgacaacgtgcccagcctgcccggcagccctggagaggaggccagcgccctgagcagccaggcctgtgacagcaaaggagacaccctggccagccccaacagcgagaccggccctgggaagaagaacagcggggaggaggagattgacagcctgcagaggatggtgcaggagctgaggaaggagattgagacccagaagcagatgtatgaggagcagatcaagaacctggagaaggaaaattatgatgtgtgggccaaggtggtgcggcccttcctgagcgccatctag

SEQ ID NO: 167911 - DNA, 1377 bp, synthetic construct
  misc_feature 1..1377: note = Description of Artificial Sequence: Synthetic coding sequence
  source 1..1377: mol_type = other DNA
atgagcctgggccagagcgcctgcctcttcctgagcatcgcccggagccgctctgtgatgactggagagcagatggccgccttccaccccagcagcacccccaaccccctggagcggcccatcaagatgggctggctgaagaagcagaggagcatcgtgaagaactggcagcagcgctactttgtgctgcgggcccagcagctgtactactacaaggatgaggaggacaccaagccccagggctgcatgtacctgcccggctgcaccatcaaggagatcgccaccaaccctgaggaggccggcaagtttgtgtttgagatcatcccagcctcctgggaccagaacaggatgggccaggacagctatgtgctgatggccagcagccaggccgagatggaggagtgggtgaagttcctgcggcgggtggccggcaccccctgtggggctgtgtttggccagaggctggatgagaccgtggcctatgagcagaagtttggcccccacctggtgcccatcctggtggagaagtgtgccgagttcatcctggagcacggcagaaatgaggagggcatcttccggctgcccggccaggacaacctggtgaagcagctgagagatgcctttgatgctggggagcggcccagctttgaccgggacacagatgtgcacacagtggccagcctgctgaagctgtacctgcgggacctgcctgagcctgtggtgccctggagccagtatgagggcttcctgctgtgtggccagctgaccaatgctgatgaggccaaggcccagcaggagctgatgaagcagctgagcatcctgccccgggacaactacagcctgctgagctacatctgccgcttcctgcacgagatccagctgaactgtgctgtgaacaagatgtctgtggacaacctggccaccgtcatcggcgtgaacctgatccgcagcaaggtggaggaccctgctgtgatcatgaggggcaccccccagatccagagggtgatgaccatgatgatccgggaccacgaggtgctcttccccaagagcaaggacatccccctgagccccccagcccagaagaatgaccccaagaaggcccctgtggcccggagctctgtgggctgggatgccacagaggacctgcgcatcagcaggacagacagcttcagctccatggtgcgctgccgggagcccagctgcttccactgggtgctgcccctggtgcaggccatcccctgcaaggcctgcagccgggtggccatctggggcgtgctgggagatgctgtggccgtgggcgctgctgccacagacagcagcgagcacaccctgaaggcctggcccctgagcaagagcagcttctactggcacctgtag

SEQ ID NO: 167912 - DNA, 1893 bp, synthetic construct
  misc_feature 1..1893: note = Description of Artificial Sequence: Synthetic coding sequence
  source 1..1893: mol_type = other DNA
atgagcctgggccagagcgcctgcctcttcctgagcatcgcccggagccgctctgtgatgactggagagcagatggccgccttccaccccagcagcacccccaaccccctggagcggcccatcaagatgggctggctgaagaagcagaggagcatcgtgaagaactggcagcagagctactactacaaggatgaggaggacaccaagccccagggctgcatgtacctgcccggctgcaccatcaaggagatcgccaccaaccctgaggaggccggcaagtttgtgtttgagatcatcccagcctcctgggaccagaacaggatgggccaggacagctatgtgctgatggccagcagccaggccgagatggaggagtgggtgaagttcctgcggcgggtggccggcaccccctgtggggctgtgtttggccagaggctggatgaaacagtggcctatgagcagaagtttggcccccacctggtgcccatcctggtggagaagtgtgccgagttcatcctggagcacggcagaaatgaggagggcatcttccggctgcccggccaggacaacctggtgaagcagctgagagatgcctttgatgctggggagcggcccagctttgaccgggacacagatgtgcacacagtggccagcctgctgaagctgtacctgcgggacctgcctgagcctgtggtgccctggagccagtatgagggcttcctgctgtgtggccagctgaccaatgctgatgaggccaaggcccagcaggagctgatgaagcagctgagcatcctgccccgggacaactacagcctgctgagctacatctgccgcttcctgcacgagatccagctgaactgtgctgtgaacaagatgtctgtggacaacctggccaccgtgattggagtgaacctgatccgcagcaaggtggaggaccctgctgtgatcatgaggggcaccccccagatccagagggtgatgaccatgatgatccgggaccacgaggtgctcttccccaagagcaaggacatccccctgagccccccagcccagaagaatgaccccaagaaggcccctgtggcccggagctctgtgggctgggatgccacagaggacctgcgcatcagcaggacagacagcttcagctccatgaccagtgacagcgacaccaccagccccaccggccagcagcccagtgatgccttccctgaggacagcagcaaggtgccccgggagaagccaggggactggaagatgcagagcaggaagaggacccagaccctgcccaacaggaagtgcttcctgaccagcgccttccagggcgccaacagcagcaagatggagatcttcaagaatgagttctggagccccagcagcgaggccaaggccggggagggccacaggaggaccatgagccaggacctgcggcagctgagtgacagccagaggaccagcacctatgacaacgtgcccagcctgcccggcagccctggagaggaggccagcgccctgagcagccaggcctgtgacagcaagggggacaccctggccagccccaacagcgagactggacctgggaagaagaacagcggggaggaggagattgacagcctgcagaggatggtgcaggagctgaggaaggagattgagacccagaagcagatgtatgaggagcagatcaagaacctggagaaggagaactatgatgtgtgggccaaggtggtgcggctgaatgaggagctggagaaggagaagaagaagtctgctgccctggagatcagcctgaggaacatggagaggagcagagaagatgtggagaagaggaacaaggccctggaggaggaggtgaaggagtttgtgaagtccatgaaggagcccaagacagaggcctag

SEQ ID NO: 167913 - DNA, 852 bp, synthetic construct; identical to SEQ ID NO: 167909
  misc_feature 1..852: note = Description of Artificial Sequence: Synthetic coding sequence
  source 1..852: mol_type = other DNA

SEQ ID NO: 167914 - DNA, 1821 bp, synthetic construct
  misc_feature 1..1821: note = Description of Artificial Sequence: Synthetic coding sequence
  source 1..1821: mol_type = other DNA
atgagcctgaagctgcccaggaactgggacttcaacctgaaggtggaggccgccaagatcgcccggagccgctctgtgatgaccggggagcagatggccgccttccaccccagcagcacccccaaccccctggagcggcccatcaagatgggctggctgaagaagcagaggagcatcgtgaagaactggcagcagcgctactttgtgctgcgggcccagcagctgtactactacaaggatgaggaggacaccaagccccagggctgcatgtacctgcccggctgcaccatcaaggagatcgccaccaaccctgaggaggccggcaagtttgtgtttgagatcatccctgtgtttggccagaggctggatgaaacagtggcctatgagcagaagtttggcccccacctggtgcccatcctggtggagaagtgtgccgagttcatcctggagcacggcagaaatgaggagggcatcttccggctgcccggccaggacaacctggtgaagcagctgagagatgcctttgatgctggggagcggcccagctttgaccgggacacagatgtgcacacagtggccagcctgctgaagctgtacctgcgggacctgcctgagcctgtggtgccctggagccagtatgagggcttcctgctgtgtggccagctgaccaatgctgatgaggccaaggcccagcaggagctgatgaagcagctgagcatcctgccccgggacaactacagcctgctgagctacatctgccgcttcctgcacgagatccagctgaactgtgctgtgaacaagatgtctgtggacaacctggccaccgtgattggagtgaacctgatccgcagcaaggtggaggaccctgctgtgatcatgaggggcaccccccagatccagagggtgatgaccatgatgatccgggaccacgaggtgctcttccccaagagcaaggacatccccctgagccccccagcccagaagaatgaccccaagaaggcccctgtggcccggagctctgtgggctgggatgccacagaggacctgcgcatcagcaggacagacagcttcagctccatgaccagtgacagcgacaccaccagccccaccggccagcagcccagtgatgccttccctgaggacagcagcaaggtgccccgggagaagccaggggactggaagatgcagagcaggaagaggacccagaccctgcccaacaggaagtgcttcctgaccagcgccttccagggcgccaacagcagcaagatggagatcttcaagaatgagttctggagccccagcagcgaggccaaggccggggagggccacaggaggaccatgagccaggacctgcggcagctgagtgacagccagaggaccagcacctatgacaacgtgcccagcctgcccggcagccctggagaggaggccagcgccctgagcagccaggcctgtgacagcaagggggacaccctggccagccccaacagcgagactggacctgggaagaagaacagcggggaggaggagattgacagcctgcagaggatggtgcaggagctgaggaaggagattgagacccagaagcagatgtatgaggagcagatcaagaacctggagaaggagaactatgatgtgtgggccaaggtggtgcggctgaatgaggagctggagaaggagaagaagaagtctgctgccctggagatcagcctgaggaacatggagaggagcagagaagatgtggagaagaggaacaaggccctggaggaggaggtgaaggagtttgtgaagtccatgaaggagcccaagacagaggcctag

SEQ ID NO: 167915 - DNA, 2445 bp, synthetic construct
  misc_feature 1..2445: note = Description of Artificial Sequence: Synthetic coding sequence
  source 1..2445: mol_type = other DNA
atgggcctgcctgccctggagttcagtgactgctgcctggacagcccccacttccgggagaccctgaagagccatgaagctgagctggacaagaccaacaagttcatcaaggagctgatcaaggatggcaagagcctcatcagcgccctgaagaacctgagcagcgccaagaggaagtttgctgacagcctgaatgagttcaagttccagtgcattggagatgctgagacagatgatgagatgtgcatcgcccggagcctgcaggagtttgccaccgtgctgaggaacctggaggatgagcgcatccgcatgattgaaaatgccagcgaggtgctgatcacccccctggagaagttcaggaaggagcagatcggggccgccaaggaggccaagaagaagtatgacaaggagacagagaagtactgcggcatcctggagaagcacctgaacctgagcagcaagaagaaggagagccagctgcaggaggccgacagccaggtggacctggtgcggcagcacttctatgaggtgtccctggagtatgtgttcaaggtgcaggaggtgcaggagaggaagatgtttgaatttgtggagcccctgctggccttcctgcagggcctcttcaccttctaccaccacggctatgagctggccaaggactttggagacttcaagacccagctgaccatcagcatccagaacaccaggaacagatttgagggcaccaggtctgaggtggagagcctgatgaagaagatgaaggagaaccccctggagcacaagaccatcagcccctacaccatggagggctacctgtatgtgcaggagaagaggcacttcggcacctcctgggtgaagcactactgcacctaccagagggacagcaagcagatcaccatggtgccctttgaccagaagagcggcggcaaaggaggagaagatgagagcgtcatcctgaagagctgcaccaggaggaagacagacagcattgagaagcgcttctgctttgatgtggaggccgtggacaggcctggggtcatcaccatgcaggccctgtctgaagaagatagaaggctgtggatggaggccatggatggccgggagcctgtgtacaacagcaacaaggacagccagagcgagggcacagcccagctggacagcatcggcttcagcatcatcaggaagtgcatccatgctgtggagacccggggcatcaatgagcagggcctgtacagaattgtgggcgtgaacagccgggtgcagaagctgctgtctgtgctgatggaccccaagacagccagcgagacagaaacagacatctgtgccgagtgggagatcaagaccatcaccagcgccctgaagacctacctgaggatgctgcccggccccctgatgatgtaccagttccagaggagcttcatcaaggccgccaagctggagaaccaggagagccgggtgtctgagatccacagcctggtgcaccggctgcctgagaagaaccggcagatgctgcagctgctgatgaaccacctggccaacgtggccaacaaccacaagcagaacctgatgacagtggccaacctgggcgtggtgtttggccccaccctgctgcggccccaggaggagaccgtggccgccatcatggacatcaagttccagaacatcgtgattgagatcctgattgagaaccacgagaagatcttcaacacagtgcctgacatgcccctgaccaatgcccagctgcacctgagcaggaagaagagcagtgacagcaagccacccagctgcagcgagcggcccctgaccctcttccacacagtgcagagcacagagaagcaggagcagaggaacagcatcatcaacagcagcctggagagcgtgagcagcaaccccaacagcatcctgaacagcagcagcagcctgcagcccaacatgaacagcagtgaccctgacctggccgtggtgaagcccacccggcccaacagcctgccccccaaccccagccccaccagccccctgagccccagctggcccatgttttctgcccccagcagccccatgcccaccagcagcaccagcagtgacagcagccctgtgcgctctgtggccggctttgtgtggttctctgtggccgctgtggtgctgagcctggcccggagcagcctgcatgctgtgttcagcctgctggtgaactttgtgccctgccaccccaacctgcacctgctgtttgacaggcctgaggaggccgtgcatgaggacagcagcacccccttcaggaaggccaaggccctgtatgcctgcaaggccgagcatgattctgagctgtccttcaccgctggcaccgtgtttgacaacgtgcaccccagccaggagcccggctggctggagggcaccctgaatggcaagacaggcctcatccctgagaactacgtggagttcctgtag

SEQ ID NO: 167916 - DNA, 2280 bp, synthetic construct
  misc_feature 1..2280: note = Description of Artificial Sequence: Synthetic coding sequence
  source 1..2280: mol_type = other DNA
atgggcctgcctgccctggagttcagtgactgctgcctggacagcccccacttccgggagaccctgaagagccatgaagctgagctggacaagaccaacaagttcatcaaggagctgatcaaggatggcaagagcctcatcagcgccctgaagaacctgagcagcgccaagaggaagtttgctgacagcctgaatgagttcaagttccagtgcattggagatgctgagacagatgatgagatgtgcatcgcccggagcctgcaggagtttgccaccgtgctgaggaacctggaggatgagcgcatccgcatgattgaaaatgccagcgaggtgctgatcacccccctggagaagttcaggaaggagcagatcggggccgccaaggaggccaagaagaagtatgacaaggagacagagaagtactgcggcatcctggagaagcacctgaacctgagcagcaagaagaaggagagccagctgcaggaggccgacagccaggtggacctggtgcggcagcacttctatgaggtgtccctggagtatgtgttcaaggtgcaggaggtgcaggagaggaagatgtttgaatttgtggagcccctgctggccttcctgcagggcctcttcaccttctaccaccacggctatgagctggccaaggactttggagacttcaagacccagctgaccatcagcatccagaacaccaggaacagatttgagggcaccaggtctgaggtggagagcctgatgaagaagatgaaggagaaccccctggagcacaagaccatcagcccctacaccatggagggctacctgtatgtgcaggagaagaggcacttcggcacctcctgggtgaagcactactgcacctaccagagggacagcaagcagatcaccatggtgccctttgaccagaagagcggcggcaaaggaggagaagatgagagcgtcatcctgaagagctgcaccaggaggaagacagacagcattgagaagcgcttctgctttgatgtggaggccgtggacaggcctggggtcatcaccatgcaggccctgtctgaagaagatagaaggctgtggatggaggccatggatggccgggagcctgtgtacaacagcaacaaggacagccagagcgagggcacagcccagctggacagcatcggcttcagcatcatcaggaagtgcatccatgctgtggagacccggggcatcaatgagcagggcctgtacagaattgtgggcgtgaacagccgggtgcagaagctgctgtctgtgctgatggaccccaagacagccagcgagacagaaacagacatctgtgccgagtgggagatcaagaccatcaccagcgccctgaagacctacctgaggatgctgcccggccccctgatgatgtaccagttccagaggagcttcatcaaggccgccaagctggagaaccaggagagccgggtgtctgagatccacagcctggtgcaccggctgcctgagaagaaccggcagatgctgcagctgctgatgaaccacctggccaacgtggccaacaaccacaagcagaacctgatgacagtggccaacctgggcgtggtgtttggccccaccctgctgcggccccaggaggagaccgtggccgccatcatggacatcaagttccagaacatcgtgattgagatcctgattgagaaccacgagaagatcttcaacacagtgcctgacatgcccctgaccaatgcccagctgcacctgagcaggaagaagagcagtgacagcaagccacccagctgcagcgagcggcccctgaccctcttccacacagtgcagagcacagagaagcaggagcagaggaacagcatcatcaacagcagcctggagagcgtgagcagcaaccccaacagcatcctgaacagcagcagcagcctgcagcccaacatgaacagcagtgaccctgacctggccgtggtgaagcccacccggcccaacagcctgccccccaaccccagccccaccagccccctgagccccagctggcccatgttttctgcccccagcagccccatgcccaccagcagcaccagcagtgacagcagccctgtgtccacccccttcaggaaggccaaggccctgtatgcctgcaaggccgagcatgacagcgagctgtccttcaccgctggcaccgtgtttgacaacgtgcaccccagccaggagcccggctggctggagggcaccctgaatggcaagacaggcctcatcccagaaaattatgtggagttcctgtag

SEQ ID NO: 167917 - DNA, 885 bp, synthetic construct
  misc_feature 1..885: note = Description of Artificial Sequence: Synthetic coding sequence
  source 1..885: mol_type = other DNA
tgacccaagacagccagcgagacagaaacagacatctgtgccgagtgggagatcaagaccatcaccagcgccctgaagacctacctgaggatgctgcccggccccctgatgatgtaccagttccagaggagcttcatcaaggccgccaagctggagaaccaggagagccgggtgtctgagatccacagcctggtgcaccggctgcctgagaagaaccggcagatgctgcagctgctgatgaaccacctggccaacgtggccaacaaccacaagcagaacctgatgacagtggccaacctgggcgtggtgtttggccccaccctgctgcggccccaggaggagaccgtggccgccatcatggacatcaagttccagaacatcgtgattgagatcctgattgagaaccacgagaagatcttcaacacagtgcctgacatgcccctgaccaatgcccagctgcacctgagcaggaagaagagcagtgacagcaagccacccagctgcagcgagcggcccctgaccctcttccacacagtgcagagcacagagaagcaggagcagaggaacagcatcatcaacagcagcctggagagcgtgagcagcaaccccaacagcatcctgaacagcagcagcagcctgcagcccaacatgaacagcagtgaccctgacctggccgtggtgaagcccacccggcccaacagcctgacccccttcaggaaggccaaggccctgtatgcctgcaaggccgagcatgattctgagctgtccttcaccgctggcaccgtgtttgacaacgtgcaccccagccaggagcccggctggctggagggcaccctgaatggcaagacaggcctcatccctgagaactacgtggagttcctgtag

SEQ ID NO: 167918 - DNA, 861 bp, synthetic construct
  misc_feature 1..861: note = Description of Artificial Sequence: Synthetic coding sequence
  source 1..861: mol_type = other DNA
atggaccccaagacagccagcgagacagaaacagacatctgtgccgagtgggagatcaagaccatcaccagcgccctgaagacctacctgaggatgctgcccggccccctgatgatgtaccagttccagaggagcttcatcaaggccgccaagctggagaaccaggagagccgggtgtctgagatccacagcctggtgcaccggctgcctgagaagaaccggcagatgctgcagctgctgatgaaccacctggccaacgtggccaacaaccacaagcagaacctgatgacagtggccaacctgggcgtggtgtttggccccaccctgctgcggccccaggaggagaccgtggccgccatcatggacatcaagttccagaacatcgtcatcgagatcctgattgaaaatcatgagaagatcttcaacacagtgcctgacatgcccctgaccaatgcccagctgcacctgagcaggaagaagagcagtgacagcaagccacccagctgcagcgagcggcccctgaccctcttccacacagtgcagagcacagagaagcaggagcagagaaattccatcatcaacagcagcctggagagcgtgagcagcaaccccaacagcatcctgaacagcagcagcagcctgcagcccaacatgaacagcagtgaccctgacctggccgtggtgaagcccacccggcccaacagcctgccccccaaccccagccccaccagccccctgagccccagctggcccatgttcagcgcccccagcagccccatgcccaccagcagcaccagcagtgacagcagcccccgcatcacctggagcagcagcaacagaggcccccagcagaactgctag

SEQ ID NO: 167919 - DNA, 1167 bp, synthetic construct
  misc_feature 1..1167: note = Description of Artificial Sequence: Synthetic coding sequence
  source 1..1167: mol_type = other DNA
tgagcccagctggacagcatcggcttcagcatcatcaggaagtgcatccatgctgtggagacccggggcatcaatgagcagggcctgtaccgcatcgtgggcgtgaacagccgggtgcagaagctgctgtctgtgctgatggaccccaagacagccagcgagacagaaacagacatctgtgccgagtgggagatcaagaccatcaccagcgccctgaagacctacctgaggatgctgcccggccccctgatgatgtaccagttccagaggagcttcatcaaggccgccaagctggagaaccaggagagccgggtgtctgagatccacagcctggtgcaccggctgcctgagaagaaccggcagatgctgcagctgctgatgaaccacctggccaacgtggccaacaaccacaagcagaacctgatgacagtggccaacctgggcgtggtgtttggccccaccctgctgcggccccaggaggagaccgtggccgccatcatggacatcaagttccagaacatcgtcatcgagatcctgattgaaaatcatgagaagatcttcaacacagtgcctgacatgcccctgaccaatgcccagctgcacctgagcaggaagaagagcagtgacagcaagccacccagctgcagcgagcggcccctgaccctcttccacacagtgcagagcacagagaagcaggagcagagaaattccatcatcaacagcagcctggagagcgtgagcagcaaccccaacagcatcctgaacagcagcagcagcctgcagcccaacatgaacagcagtgaccctgacctggccgtggtgaagcccacccggcccaacagcctgccccccaaccccagccccaccagccccctgagccccagctggcccatgttcagcgcccccagcagccccatgcccaccagcagcaccagcagtgacagcagccctgtgcggcctgaggaggccgtgcatgaggacagcagcacccccttcaggaaggccaaggccctgtatgcctgcaaggccgagcatgattctgagctgtccttcaccgctggcaccgtgtttgacaacgtgcaccccagccaggagcccggctggctggagggcaccctgaatggcaagacaggcctcatccctgagaactacgtggagttcctgtag

SEQ ID NO: 167920 - DNA, 792 bp, synthetic construct
  misc_feature 1..792: note = Description of Artificial Sequence: Synthetic coding sequence
  source 1..792: mol_type = other DNA
atggctgctgatgtggtgggagatgtgtatgtgctggtggagcacccctttgagtacaccgggaaggatggaagaagagtggccatccggcccaatgaaagataccgcctgctgcggcgcagcacagagcactggtggcacgtgagaagagagcccggcggccggcccttctacctgcctgcccagtatgtgcgggagctgcctgccctgggcaacccagctgctgctgcccctcctggcccccaccccagccctgctgcccctgagcccctggcctatgactacagatttgtgtctgctgctgccacagctggcccagatggagcccctgaggagagcggcggccgggccagcagcctgtgtggccctgcccagagaggagctgccacccagaggagcagcctggcccctggcctgcctgcctgcctgtacctgcggcctgctgcccctgtgcggcctgcccagagcctgaatgacctggcctgtgccgctgtgtccccacctgctggcctgctgggcagcagcggcagcttcaaggcctgcagcgtggccggctcctgggtgtgcccccggcccctggcccggagtgacagtgaaaatgtgtatgaggtgatccaggacctgcacgtgcccccacctgaggagagcgctgagcaggtgcccccccgggccctgggccggggcggcggctggagggcccgggaccgggccaggacagagcccggcaggaaggagaccaggtctgcccagaggcgggcccggcggccccccctgtctgaggactttggatag

SEQ ID NO: 167921 - DNA, 1647 bp, synthetic construct
  misc_feature 1..1647: note = Description of Artificial Sequence: Synthetic coding sequence
  source 1..1647: mol_type = other DNA
atgcagcccggcctgagccctggcagccctggggaccccaggcctcccaccccagagacagactacccagagagcctgaccagctacccagaggaggactacagccctgtgggcagctttggagagcccggccccaccagccccctgaccaccccacctggctggagctgccacgtgtcccaggacaagcagatgctgtacaccaaccacttcacccaggagcagtgggtgcggctggaggacccccacggcaagccctacttctacaaccctgaggacagctctgtgcgctgggagctgccccaggtgcctgtgcctgcccccaggagcatccacaagagcagccaggatggagacaccccagcccaggccagccccccagaggagaaggtgcctgctgagctggatgaggtgggctcctgggaggaggtgtccccagccacagctgctgtgaggaccaagaccctggacaaggccggcgtgctgcacaggaccaagacagctgacaagggcaagaggctgaggaagaagcactggagcgcctcctggacagtgctggagggcggcgtgctgaccttcttcaaggacagcaagaccagcgctgctgggggcctgcggcagcccagcaagttcagcaccccagagtacacagtggagctgcggggggccaccctgtcctgggcccccaaggacaagagcagcaggaagaatgtgctggagctgcggagcagagatggcagcgagtacctgatccagcatgattctgaggccatcatcagcacctggcacaaggccatcgcccagggcatccaggagctgtctgctgagctgcccccagaggagagcgagagcagccgggtggactttggcagcagcgagcggctgggctcctggcaggagaaggaggaggatgcccggcccaatgctgctgccccagccctgggccctgtgggcctggagagtgacctgagcaaggtgcgccacaagctgaggaagttcctgcagaggcggcccaccctgcagagcctgcgggagaagggctacatcaaggaccaggtgtttggctgtgccctggccgccctgtgtgagcgggagaggagccgggtgcccaggtttgtgcagcagtgcatccgggctgtggaggcccggggcctggacattgatggcctgtaccgcatcagcggcaacctggccaccatccagaagctgcgctacaaggtggaccatgatgagcggctggacctggatgatggccgctgggaggatgtgcacgtgatcactggagccctgaagctgttcttccgggagctgcctgagcccctcttccccttcagccacttccggcagttcatcgccgccatcaagctgcaggaccaggcccggcgcagccgctgtgtgcgggacctggtgcgcagcctgcctgcccccaaccacgacaccctgaggatgctgttccagcacctgtgcagggtcatcgagcacggggagcagaacaggatgtctgtgcagagcgtggccatcgtgtttggccccaccctgctgcggcctgaggtggaggagacctccatgcccatgaccatggtgttccagaaccaggtggtggagctgatcctgcagcagtgtgccgacatcttccccccccactag

SEQ ID NO: 167922 - DNA, 2670 bp, synthetic construct
  misc_feature 1..2670: note = Description of Artificial Sequence: Synthetic coding sequence
  source 1..2670: mol_type = other DNA
atggctgctgatgtggtgggagatgtgtatgtgctggtggagcacccctttgagtacaccgggaaggatggaagaagagtggccatccggcccaatgaaagataccgcctgctgcggcgcagcacagagcactggtggcacgtgagaagagagcccggcggccggcccttctacctgcctgcccagtatgtgcgggagctgcctgccctgggcaacccagctgctgctgcccctcctggcccccaccccagccctgctgcccctgagcccctggcctatgactacagatttgtgtctgctgctgccacagctggcccagatggagcccctgaggagagcggcggccgggccagcagcctgtgtggccctgcccagagaggagctgccacccagaggagcagcctggcccctggcctgcctgcctgcctgtacctgcggcctgctgcccctgtgcggcctgcccagagcctgaatgacctggcctgtgccgctgtgtccccacctgctggcctgctgggcagcagcggcagcttcaaggcctgcagcgtggccggctcctgggtgtgcccccggcccctggcccggagtgacagtgaaaatgtgtatgaggtgatccaggacctgcacgtgcccccacctgaggagagcgctgagcaggtggatgatcctcctgagcctgtgtatgccaacatcgagcggcagccccgggccaccagccctggagctgctgctgcccccctgcccagccctgtgtgggagacccacacagatgctggcaccggccggccctactactacaacccagacaccggggtgaccacctgggagagcccctttgaagctgctgagggcgccgccagccctgccaccagccctgcctctgtggacagccacgtgtccctggagacagagtggggccagtactgggatgaggagagccggcgggtcttcttctacaaccccctgactggagaaacagcctgggaggatgaagcagaaaatgaacctgaggaggagctggagatgcagcccggcctgagccctggcagccctggggacccccggccccccaccccagagacagactacccagagagcctgaccagctacccagaggaggactacagccctgtgggcagctttggagagcccggccccaccagccccctgaccaccccacctggctggagctgccacgtgtcccaggacaagcagatgctgtacaccaaccacttcacccaggagcagtgggtgcggctggaggacccccacggcaagccctacttctacaaccctgaggacagctctgtgcgctgggagctgccccaggtgcctgtgcctgcccccaggagcatccacaagagcagccaggatggagacaccccagcccaggccagccccccagaggagaaggtgcctgctgagctggatgaggtgggctcctgggaggaggtgtccccagccacagctgctgtgaggaccaagaccctggacaaggccggcgtgctgcacaggaccaagacagctgacaagggcaagaggctgaggaagaagcactggagcgcctcctggacagtgctggagggcggcgtgctgaccttcttcaaggacagcaagaccagcgctgctgggggcctgcggcagcccagcaagttcagcaccccagagtacacagtggagctgcggggggccaccctgtcctgggcccccaaggacaagagcagcaggaagaatgtgctggagctgcggagcagagatggcagcgagtacctgatccagcacgacagcgaggccatcatcagcacctggcacaaggccatcgcccagggcatccaggagctgtctgctgagctgcccccagaggagagcgagagcagccgggtggactttggcagcagcgagcggctgggctcctggcaggagaaggaggaggatgcccggcccaatgctgctgccccagccctgggccctgtgggcctggagagtgacctgagcaaggtgcgccacaagctgaggaagttcctgcagaggcggcccaccctgcagagcctgcgggagaagggctacatcaaggaccaggtgtttggctgtgccctggccgccctgtgtgagcgggagaggagccgggtgcccaggtttgtgcagcagtgcatccgggctgtggaggcccggggcctggacattgatggcctgtaccgcatcagcggcaacctggccaccatccagaagctgcgctacaaggtggaccatgatgagcggctggacctggatgatggccgctgggaggatgtgcacgtgatcaccggggccctgaagctgttcttccgggagctgcctgagcccctcttccccttcagccacttccggcagttcatcgccgccatcaagctgcaggaccaggcccggcgcagccgctgtgtgcgggacctggtgcgcagcctgcctgcccccaaccacgacaccctgaggatgctgttccagcacctgtgccgggtgattgaacatggagagcagaacaggatgtctgtgcagagcgtggccatcgtgtttggccccaccctgctgcggcctgaggtggaggagacctccatgcccatgaccatggtgttccagaaccaggtggtggagctgatcctgcagcagtgtgccgacatcttccccccccactag

SEQ ID NO: 167923 - DNA, 2589 bp, synthetic construct
  misc_feature 1..2589: note = Description of Artificial Sequence: Synthetic coding sequence
  source 1..2589: mol_type = other DNA
atggctgctgatgtggtgggagatgtgtatgtgctggtggagcacccctttgagtacaccgggaaggatggaagaagagtggccatccggcccaatgaaagataccgcctgctgcggcgcagcacagagcactggtggcacgtgagaagagagcccggcggccggcccttctacctgcctgcccagtatgtgcgggagctgcctgccctgggcaacccagctgctgctgcccctcctggcccccaccccagccctgctgcccctgagcccctggcctatgactacagatttgtgtctgctgctgccacagctggcccagatggagcccctgaggagagcggcggccgggccagcagcctgtgtggccctgcccagagaggagctgccacccagaggagcagcctggcccctggcctgcctgcctgcctgtacctgcggcctgctgcccctgtgcggcctgcccagagcctgaatgacctggcctgtgccgctgtgtccccacctgctggcctgctgggcagcagcggcagcttcaaggcctgcagcgtggccggctcctgggtgtgcccccggcccctggcccggagtgacagtgaaaatgtgtatgaggtgatccaggacctgcacgtgcccccacctgaggagagcgctgagcaggtggatgatcctcctgagcctgtgtatgccaacatcgagcggcagccccgggccaccagccctggagctgctgctgcccccctgcccagccctgtgtgggagacccacacagatgctggcaccggccggccctactactacaacccagacaccggggtgaccacctgggagagcccctttgaagctgctgagggcgccgccagccctgccaccagccctgcctctgtggacagccacgtgtccctggagacagagtggggccagtactgggatgaggagagccggcgggtcttcttctacaaccccctgactggagaaacagcctgggaggatgaagcagaaaatgaacctgaggaggagctggagatgcagcccggcctgagccctggcagccctggggacccccggccccccaccccagagacagactacccagagagcctgaccagctacccagaggaggactacagccctgtgggcagctttggagagcccggccccaccagccccctgaccaccccacctggctggagctgccacgtgtcccaggacaagcagatgctgtacaccaaccacttcacccaggagcaggtgcctgtgcctgcccccaggagcatccacaagagcagccaggatggagacaccccagcccaggccagccccccagaggagaaggtgcctgctgagctggatgaggtgggctcctgggaggaggtgtccccagccacagctgctgtgaggaccaagaccctggacaaggccggcgtgctgcacaggaccaagacagctgacaagggcaagaggctgaggaagaagcactggagcgcctcctggacagtgctggagggcggcgtgctgaccttcttcaaggacagcaagaccagcgctgctgggggcctgcggcagcccagcaagttcagcaccccagagtacacagtggagctgcggggggccaccctgtcctgggcccccaaggacaagagcagcaggaagaatgtgctggagctgcggagcagagatggcagcgagtacctgatccagcatgattctgaggccatcatcagcacctggcacaaggccatcgcccagggcatccaggagctgtctgctgagctgcccccagaggagagcgagagcagccgggtggactttggcagcagcgagcggctgggctcctggcaggagaaggaggaggatgcccggcccaatgctgctgccccagccctgggccctgtgggcctggagagtgacctgagcaaggtgcgccacaagctgaggaagttcctgcagaggcggcccaccctgcagagcctgcgggagaagggctacatcaaggaccaggtgtttggctgtgccctggccgccctgtgtgagcgggagaggagccgggtgcccaggtttgtgcagcagtgcatccgggctgtggaggcccggggcctggacattgatggcctgtaccgcatcagcggcaacctggccaccatccagaagctgcgctacaaggtggaccatgatgagcggctggacctggatgatggccgctgggaggatgtgcacgtgatcactggagccctgaagctgttcttccgggagctgcctgagcccctcttccccttcagccacttccggcagttcatcgccgccatcaagctgcaggaccaggcccggcgcagccgctgtgtgcgggacctggtgcgcagcctgcctgcccccaaccacgacaccctgaggatgctgttccagcacctgtgcagggtcatcgagcacggggagcagaacaggatgtctgtgcagagcgtggccatcgtgtttggccccaccctgctgcggcctgaggtggaggagacctccatgcccatgaccatggtgttccagaaccaggtggtggagctgatcctgcagcagtgtgccgacatcttccccccccactag

SEQ ID NO: 167924 - DNA, 1647 bp, synthetic construct; identical to SEQ ID NO: 167921
  misc_feature 1..1647: note = Description of Artificial Sequence: Synthetic coding sequence
  source 1..1647: mol_type = other DNA

SEQ ID NO: 167925 - DNA, 792 bp, synthetic construct; identical to SEQ ID NO: 167920
  misc_feature 1..792: note = Description of Artificial Sequence: Synthetic coding sequence
  source 1..792: mol_type = other DNA

SEQ ID NO: 167926 - DNA, 1566 bp, synthetic construct
  misc_feature 1..1566: note = Description of Artificial Sequence: Synthetic coding sequence
  source 1..1566: mol_type = other DNA
atgcagcccggcctgagccctggcagccctggggaccccaggcctcccaccccagagacagactacccagagagcctgaccagctacccagaggaggactacagccctgtgggcagctttggagagcccggccccaccagccccctgaccaccccacctggctggagctgccacgtgtcccaggacaagcagatgctgtacaccaaccacttcacccaggagcaggtgcctgtgcctgcccccaggagcatccacaagagcagccaggatggagacaccccagcccaggccagccccccagaggagaaggtgcctgctgagctggatgaggtgggctcctgggaggaggtgtccccagccacagctgctgtgaggaccaagaccctggacaaggccggcgtgctgcacaggaccaagacagctgacaagggcaagaggctgaggaagaagcactggagcgcctcctggacagtgctggagggcggcgtgctgaccttcttcaaggacagcaagaccagcgctgctgggggcctgcggcagcccagcaagttcagcaccccagagtacacagtggagctgcggggggccaccctgtcctgggcccccaaggacaagagcagcaggaagaatgtgctggagctgcggagcagagatggcagcgagtacctgatccagcacgacagcgaggccatcatcagcacctggcacaaggccatcgcccagggcatccaggagctgtctgctgagctgcccccagaggagagcgagagcagccgggtggactttggcagcagcgagcggctgggctcctggcaggagaaggaggaggatgcccggcccaatgctgctgccccagccctgggccctgtgggcctggagagtgacctgagcaaggtgcgccacaagctgaggaagttcctgcagaggcggcccaccctgcagagcctgcgggagaagggctacatcaaggaccaggtgtttggctgtgccctggccgccctgtgtgagcgggagaggagccgggtgcccaggtttgtgcagcagtgcatccgggctgtggaggcccggggcctggacattgatggcctgtaccgcatcagcggcaacctggccaccatccagaagctgcgctacaaggtggaccatgatgagcggctggacctggatgatggccgctgggaggatgtgcacgtgatcaccggggccctgaagctgttcttccgggagctgcctgagcccctcttccccttcagccacttccggcagttcatcgccgccatcaagctgcaggaccaggcccggcgcagccgctgtgtgcgggacctggtgcgcagcctgcctgcccccaaccacgacaccctgaggatgctgttccagcacctgtgccgggtgattgaacatggagagcagaacaggatgtctgtgcagagcgtggccatcgtgtttggccccaccctgctgcggcctgaggtggaggagacctccatgcccatgaccatggtgttccagaaccaggtggtggagctgatcctgcagcagtgtgccgacatcttccccccccactag

SEQ ID NO: 167927 - DNA, 2013 bp, synthetic construct
  misc_feature 1..2013: note = Description of Artificial Sequence: Synthetic coding sequence
  source 1..2013: mol_type = other DNA
atgctgagcaatgaaagcctgcaccccccagccttcagccgcagcaacagcgaggcctctgtggacagcgcctccatggaggacttctggagagaaattgagagcatcaaggacagctccatgggcggccaggaggagcccccacctgctgaggtgacccctgtggatgaaggagagctggaggccgagtggctgcaggatgtgggcctgagcaccctcatctctggagatgaggaggaggatggcaaggccctgctgagcaccctgaccaggacccaggccgctgctgtgcagaagcgctaccacacctacacccagaccatgaggaagaaggacaagcagagcatcagagatgtgcgggacatctttggagtgtctgagagccccccccgggacacctgtggcaaccacaccaaccagctggatggcaccaaggaggagcgggagctgcccagggtcatcaagaccagcggctccatgccagatgatgccagcctgaacagcaccaccctgagtgatgccagccaggacaaggagggcagctttgctgtgcccaggagtgacagcgtggccatcctggagaccatccctgtgctgcctgtgcacagcaatggcagccctgagcccggccagcctgtgcagaatgccatcagtgatgatgacttcctggagaagaacatccccccagaggccgaggagctgagctttgaggtgtcctacagcgagatggtgacagaggccctgaagaggaacaagctgaagaagtctgagatcaagaaggaggactatgtgctgaccaagttcaacgtgcagaagaccaggtttggcctgacagaggccggggacctgtctgctgaggacatgaagaagatccgccacctgagcctgattgagctgacagccttctttgatgccttcggcatccagctgaagaggaacaagacagagaaggtgaagggccgggacaatggcatcttcggcgtgcccctgactgtgctgctggatggagacaggaagaaggaccccggggtgaaggtgcccctggtgctgcagaagttctttgagaaggtggaggagagcggcctggagagcgagggcatcttccggctgagcggctgcacagccaaggtgaagcagtaccgggaggagctggatgccaagttcaatgctgacaagttcaagtgggacaagatgtgccaccgggaggccgctgtgatgctgaaggccttcttccgggagctgcccaccagcctcttccctgtggagtacatcccagccttcatcagcctgatggagcggggcccccacgtgaaggtgcagttccaggccctgcacctgatggtgatggccctgcctgatgccaacagagatgctgcccaggccctgatgaccttcttcaacaaggtgattgccaatgaaagcaagaacaggatgagcctgtggaacatcagcacagtgatggcccccaacctcttcttcagccgcagcaagcacagcgactatgaggagctgctgctggccaacacagctgcccacatcatccggctgatgctgaagtaccagaagatcctgtggaaggtgcccagcttcctgatcacccaggtgcggaggatgaatgaggccaccatgctgctgaagaagcagctgcccagcgtgaggaagctgctgcggaggaagaccctggagcgggagacagccagccccaagaccagcaaggtgctgcagaagagccccagcgcccggaggatgtctgatgtgcctgagggcgtcatccgggtgcacgcccccctgctgagcaaggtgtccatggccatccagctgaacaaccagaccaaggccaaggacatcctggccaagttccagtatgaaaatcgcatcctgcactggcagagagctgccctgtccttcctgaatggcaagtgggtgaagaaggagcgggaggagagcacagagaccaacagaagccccaagcacgtgttcctgttcaccatcggcctggacatcagcacctag

SEQ ID NO: 167928 - DNA, 1713 bp, synthetic construct
  misc_feature 1..1713: note = Description of Artificial Sequence: Synthetic coding sequence
  source 1..1713: mol_type = other DNA
atgaggaagaaggacaagcagagcatcagagatgtgcgggacatcttcggcgtgtctgagagccccccccgggacacctgtggcaaccacaccaaccagctggatggcaccaaggaggagcgggagctgcccagggtcatcaagaccagcggctccatgccagatgatgccagcctgaacagcaccaccctgagtgatgccagccaggacaaggagggcagctttgctgtgcccaggagtgacagcgtggccatcctggagaccatccctgtgctgcctgtgcacagcaatggcagccctgagcccggccagcctgtgcagaatgccatcagtgatgatgacttcctggagaagaacatccccccagaggccgaggagctgagctttgaggtgtcctacagcgagatggtgacagaggccctgaagaggaacaagctgaagaagtctgagatcaagaaggaggactatgtgctgaccaagttcaacgtgcagaagacccgcttcggcctgacagaagctggggacctgtctgctgaggacatgaagaagatccgccacctgagcctcatcgagctgacagccttctttgatgccttcggcatccagctgaagaggaacaagacagagaaggtgaagggccgggacaatggcatctttggagtgcccctgactgtgctgctggatggagacaggaagaaggaccccggggtgaaggtgcccctggtgctgcagaagttctttgagaaggtggaggagagcggcctggagagcgagggcatcttccggctgagcggctgcacagccaaggtgaagcagtaccgggaggagctggatgccaagttcaatgctgacaagttcaagtgggacaagatgtgccaccgggaggccgctgtgatgctgaaggccttcttccgggagctgcccaccagcctcttccctgtggagtacatcccagccttcatcagcctgatggagcggggcccccacgtgaaggtgcagttccaggccctgcacctgatggtgatggccctgcctgatgccaacagagatgctgcccaggccctgatgaccttcttcaacaaggtgattgccaatgaaagcaagaacaggatgagcctgtggaacatcagcacagtgatggcccccaacctcttcttcagccgcagcaagcacagcgactatgaggagctgctgctggccaacacagctgcccacatcatccggctgatgctgaagtaccagaagatcctgtggaaggtgcccagcttcctgatcacccaggtgcggaggatgaatgaggccaccatgctgctgaagaagcagctgcccagcgtgaggaagctgctgcggaggaagaccctggagcgggagacagccagccccaagaccagcaaggtgctgcagaagagccccagcgcccggaggatgtctgatgtgcctgagggcgtcatccgggtgcacgcccccctgctgagcaaggtgtccatggccatccagctgaacaaccagaccaaggccaaggacatcctggccaagttccagtatgagaacagccacggcagcagcgagtgcatcaagatccagaaccagaggctgtatgaaattggaggcaacattggagagcactgcctggaccctgatgcctacatcctggatgtgtaccgcatcaacccccaggccgagtgggtgatcaagccccagcagagcagctag

SEQ ID NO: 167929 - DNA, 1638 bp, synthetic construct
  misc_feature 1..1638: note = Description of Artificial Sequence: Synthetic coding sequence
  source 1..1638: mol_type = other DNA
atgaatgagctgccccgggacacctgtggcaaccacaccaaccagctggatggcaccaaggaggagcgggagctgcccagggtcatcaagaccagcggctccatgccagatgatgccagcctgaacagcaccaccctgagtgatgccagccaggacaaggagggcagctttgctgtgcccaggagtgacagcgtggccatcctggagaccatccctgtgctgcctgtgcacagcaatggcagccctgagcccggccagcctgtgcagaatgccatcagtgatgatgacttcctggagaagaacatccccccagaggccgaggagctgagctttgaggtgtcctacagcgagatggtgacagaggccctgaagaggaacaagctgaagaagtctgagatcaagaaggaggactatgtgctgaccaagttcaacgtgcagaagacccgcttcggcctgacagaagctggggacctgtctgctgaggacatgaagaagatccgccacctgagcctcatcgagctgacagccttctttgatgccttcggcatccagctgaagaggaacaagacagagaaggtgaagggccgggacaatggcatctttggagtgcccctgactgtgctgctggatggagacaggaagaaggaccccggggtgaaggtgcccctggtgctgcagaagttctttgagaaggtggaggagagcggcctggagagcgagggcatcttccggctgagcggctgcacagccaaggtgaagcagtaccgggaggagctggatgccaagttcaatgctgacaagttcaagtgggacaagatgtgccaccgggaggccgctgtgatgctgaaggccttcttccgggagctgcccaccagcctcttccctgtggagtacatcccagccttcatcagcctgatggagcggggcccccacgtgaaggtgcagttccaggccctgcacctgatggtgatggccctgcctgatgccaacagagatgctgcccaggccctgatgaccttcttcaacaaggtgattgccaatgaaagcaagaacaggatgagcctgtggaacatcagcacagtgatggcccccaacctcttcttcagccgcagcaagcacagcgactatgaggagctgctgctggccaacacagctgcccacatcatccggctgatgctgaagtaccagaagatcctgtggaaggtgcccagcttcctgatcacccaggtgcggaggatgaatgaggccaccatgctgctgaagaagcagctgcccagcgtgaggaagctgctgcggaggaagaccctggagcgggagacagccagccccaagaccagcaaggtgctgcagaagagccccagcgcccggaggatgtctgatgtgcctgagggcgtcatccgggtgcacgcccccctgctgagcaaggtgtccatggccatccagctgaacaaccagaccaaggccaaggacatcctggccaagttccagtatgagaaccgcatcctgcactggcagagagctgccctgtccttcctgaatggcaagtgggtgaagaaggagcgggaggagagcacagagaccaacagaagccccaagcacgtgttcctgttcaccatcggcctggacatcagcacctag

SEQ ID NO: 167930 - DNA, 2169 bp, synthetic construct
  misc_feature 1..2169: note = Description of Artificial Sequence: Synthetic coding sequence
  source 1..2169: mol_type = other DNA
atggaggtggaggacagcggcggcgtggtgctgacagcctaccacagctatgcccgggcccagcccccaaatgctgagagccgctgtgcccccagggctgctgccagccaccccctgagcaggaagagcatcccccgctgccgccgcatcaacaggatgctgagcaatgaaagcctgcaccccccagccttcagccgcagcaacagcgaggcctctgtggacagcgcctccatggaggacttctggagagaaattgagagcatcaaggacagctccatgggcggccaggaggagcccccacctgctgaggtgacccctgtggatgaaggagagctggaggccgagtggctgcaggatgtgggcctgagcaccctcatctctggagatgaggaggaggatggcaaggccctgctgagcaccctgaccaggacccaggccgctgctgtgcagaagcgctaccacacctacacccagaccatgaggaagaaggacaagcagagcatcagagatgtgcgggacatctttggagtgtctgagagccccccccgggacacctgtggcaaccacaccaaccagctggatggcaccaaggaggagcgggagctgcccagggtcatcaagaccagcggctccatgccagatgatgccagcctgaacagcaccaccctgagtgatgccagccaggacaaggagggcagctttgctgtgcccaggagtgacagcgtggccatcctggagaccatccctgtgctgcctgtgcacagcaatggcagccctgagcccggccagcctgtgcagaatgccatcagtgatgatgacttcctggagaagaacatccccccagaggccgaggagctgagctttgaggtgtcctacagcgagatggtgacagaggccctgaagaggaacaagctgaagaagtctgagatcaagaaggaggactatgtgctgaccaagttcaacgtgcagaagaccaggtttggcctgacagaggccggggacctgtctgctgaggacatgaagaagatccgccacctgagcctgattgagctgacagccttctttgatgccttcggcatccagctgaagaggaacaagacagagaaggtgaagggccgggacaatggcatcttcggcgtgcccctgactgtgctgctggatggagacaggaagaaggaccccggggtgaaggtgcccctggtgctgcagaagttctttgagaaggtggaggagagcggcctggagagcgagggcatcttccggctgagcggctgcacagccaaggtgaagcagtaccgggaggagctggatgccaagttcaatgctgacaagttcaagtgggacaagatgtgccaccgggaggccgctgtgatgctgaaggccttcttccgggagctgcccaccagcctcttccctgtggagtacatcccagccttcatcagcctgatggagcggggcccccacgtgaaggtgcagttccaggccctgcacctgatggtgatggccctgcctgatgccaacagagatgctgcccaggccctgatgaccttcttcaacaaggtgattgccaatgaaagcaagaacaggatgagcctgtggaacatcagcacagtgatggcccccaacctcttcttcagccgcagcaagcacagcgactatgaggagctgctgctggccaacacagctgcccacatcatccggctgatgctgaagtaccagaagatcctgtggaaggtgcccagcttcctgatcacccaggtgcggaggatgaatgaggccaccatgctgctgaagaagcagctgcccagcgtgaggaagctgctgcggaggaagaccctggagcgggagacagccagccccaagaccagcaaggtgctgcagaagagccccagcgcccggaggatgtctgatgtgcctgagggcgtcatccgggtgcacgcccccctgctgagcaaggtgtccatggccatccagctgaacaaccagaccaaggccaaggacatcctggccaagttccagtatgaaaatcgcatcctgcactggcagagagctgccctgtccttcctgaatggcaagtgggtgaagaaggagcgggaggagagcacagagaccaacagaagccccaagcacgtgttcctgttcaccatcggcctggacatcagcacctag

SEQ ID NO: 167931 - DNA, 1692 bp, synthetic construct
  misc_feature 1..1692: note = Description of Artificial Sequence: Synthetic coding sequence
  source 1..1692: mol_type = other DNA
atgaggaagaaggacaagcagagcatcagagatgtgcgggacatcttcggcgtgtctgagagccccccccgggacacctgtggcaaccacaccaaccagctggatggcaccaaggaggagcgggagctgcccagggtcatcaagaccagcggctccatgccagatgatgccagcctgaacagcaccaccctgagtgatgccagccaggacaaggagggcagctttgctgtgcccaggagtgacagcgtggccatcctggagaccatccctgtgctgcctgtgcacagcaatggcagccctgagcccggccagcctgtgcagaatgccatcagtgatgatgacttcctggagaagaacatccccccagaggccgaggagctgagctttgaggtgtcctacagcgagatggtgacagaggccctgaagaggaacaagctgaagaagtctgagatcaagaaggaggactatgtgctgaccaagttcaacgtgcagaagacccgcttcggcctgacagaagctggggacctgtctgctgaggacatgaagaagatccgccacctgagcctcatcgagctgacagccttctttgatgccttcggcatccagctgaagaggaacaagacagagaaggtgaagggccgggacaatggcatctttggagtgcccctgactgtgctgctggatggagacaggaagaaggaccccggggtgaaggtgcccctggtgctgcagaagttctttgagaaggtggaggagagcggcctggagagcgagggcatcttccggctgagcggctgcacagccaaggtgaagcagtaccgggaggagctggatgccaagttcaatgctgacaagttcaagtgggacaagatgtgccaccgggaggccgctgtgatgctgaaggccttcttccgggagctgcccaccagcctcttccctgtggagtacatcccagccttcatcagcctgatggagcggggcccccacgtgaaggtgcagttccaggccctgcacctgatggtgatggccctgcctgatgccaacagagatgctgcccaggccctgatgaccttcttcaacaaggtgattgccaatgaaagcaagaacaggatgagcctgtggaacatcagcacagtgatggcccccaacctcttcttcagccgcagcaagcacagcgactatgaggagctgctgctggccaacacagctgcccacatcatccggctgatgctgaagtaccagaagatcctgtggaaggtgcccagcttcctgatcacccaggtgcggaggatgaatgaggccaccatgctgctgaagaagcagctgcccagcgtgaggaagctgctgcggaggaagaccctggagcgggagacagccagccccaagaccagcaaggtgctgcagaagagccccagcgcccggaggatgtctgatgtgcctgagggcgtcatccgggtgcacgcccccctgctgagcaaggtgtccatggccatccagctgaacaaccagaccaaggccaaggacatcctggccaagttccagtatgagaaccgcatcctgcactggcagagagctgccctgtccttcctgaatggcaagtgggtgaagaaggagcgggaggagagcacagagaccaacagaagccccaagcacgtgttcctgttcaccatcggcctggacatcagcacctag

SEQ ID NO: 167932 - DNA, 1713 bp, synthetic construct; identical to SEQ ID NO: 167928
  misc_feature 1..1713: note = Description of Artificial Sequence: Synthetic coding sequence
  source 1..1713: mol_type = other DNA

SEQ ID NO: 167933 - DNA, 354 bp, synthetic construct
  misc_feature 1..354: note = Description of Artificial Sequence: Synthetic coding sequence
  source 1..354: mol_type = other DNA
atgctgagcaatgaaagcctgcaccccccagccttcagccgcagcaacagcgaggcctctgtggacagcgcctccatggaggacttctggagagaaattgagagcatcaaggacagctccatgggcggccaggaggagcccccacctgctgaggtgacccctgtggatgaaggagagctggaggccgagtggctgcaggatgtgggcctgagcaccctcatctctggagatgaggaggaggatggcaaggccctgctgagcaccctgaccaggacccaggccgctgctgtgcagaagcgctaccacacctacacccagaccatgaggaagaaggacaagcagagcatcagatag

SEQ ID NO: 167934 - DNA, 1665 bp, synthetic construct
  misc_feature 1..1665: note = Description of Artificial Sequence: Synthetic coding sequence
  source 1..1665: mol_type = other DNA
atggccttcatgaggatcaacgtcatcatgaatgagctgccccgggacacctgtggcaaccacaccaaccagctggatggcaccaaggaggagcgggagctgcccagggtcatcaagaccagcggctccatgccagatgatgccagcctgaacagcaccaccctgagtgatgccagccaggacaaggagggcagctttgctgtgcccaggagtgacagcgtggccatcctggagaccatccctgtgctgcctgtgcacagcaatggcagccctgagcccggccagcctgtgcagaatgccatcagtgatgatgacttcctggagaagaacatccccccagaggccgaggagctgagctttgaggtgtcctacagcgagatggtgacagaggccctgaagaggaacaagctgaagaagtctgagatcaagaaggaggactatgtgctgaccaagttcaacgtgcagaagaccaggtttggcctgacagaggccggggacctgtctgctgaggacatgaagaagatccgccacctgagcctgattgagctgacagccttctttgatgccttcggcatccagctgaagaggaacaagacagagaaggtgaagggccgggacaatggcatcttcggcgtgcccctgactgtgctgctggatggagacaggaagaaggaccccggggtgaaggtgcccctggtgctgcagaagttctttgagaaggtggaggagagcggcctggagagcgagggcatcttccggctgagcggctgcacagccaaggtgaagcagtaccgggaggagctggatgccaagttcaatgctgacaagttcaagtgggacaagatgtgccaccgggaggccgctgtgatgctgaaggccttcttccgggagctgcccaccagcctcttccctgtggagtacatcccagccttcatcagcctgatggagcggggcccccacgtgaaggtgcagttccaggccctgcacctgatggtgatggccctgcctgatgccaacagagatgctgcccaggccctgatgaccttcttcaacaaggtgattgccaatgaaagcaagaacaggatgagcctgtggaacatcagcacagtgatggcccccaacctcttcttcagccgcagcaagcacagcgactatgaggagctgctgctggccaacacagctgcccacatcatccggctgatgctgaagtaccagaagatcctgtggaaggtgcccagcttcctgatcacccaggtgcggaggatgaatgaggccaccatgctgctgaagaagcagctgcccagcgtgaggaagctgctgcggaggaagaccctggagcgggagacagccagccccaagaccagcaaggtgctgcagaagagccccagcgcccggaggatgtctgatgtgcctgagggcgtcatccgggtgcacgcccccctgctgagcaaggtgtccatggccatccagctgaacaaccagaccaaggccaaggacatcctggccaagttccagtatgaaaatcgcatcctgcactggcagagagctgccctgtccttcctgaatggcaagtgggtgaagaaggagcgggaggagagcacagagaccaacagaagccccaagcacgtgttcctgttcaccatcggcctggacatcagcacctag

SEQ ID NO: 167935 - DNA, 3786 bp, synthetic construct
  misc_feature 1..3786: note = Description of Artificial Sequence: Synthetic coding sequence
  source 1..3786: mol_type = other DNA
atgattgcccacaagcagaagaagaccaagaagaagagggcctgggccagcggccagctgagcacagacatcaccaccagcgagatgggcctgaagagcctgagcagcaacagcatctttgatcctgactacatcaaggagctggtgaatgacatcaggaagttcagccacatgctgctgtacctgaaggaggccatcttcagtgactgcttcaaggaggtgatccacatccggctggaggagctgctgcgggtgctgaagagcatcatgaacaagcaccagaacctgaacagcgtggacctgcagaatgctgctgagatgctgacagccaaggtgaaggctgtgaacttcacagaggtgaatgaggagaacaagaatgacctcttccaggaggtgttcagcagcattgagaccctggccttcacctttggaaacatcctgaccaacttcctgatgggagatgtgggcaatgacagcctgctgcggctgcctgtgtcccgggagaccaagagctttgaaaatgtgtctgtggagagcgtggacagcagcagcgagaagggcaacttcagccccctggagctggacaacgtgctgctgaagaacacagacagcattgagctggccctgtcctatgccaagacctggagcaagtacaccaagaacatcgtgtcctgggtggagaagaagctgaacctggagctggagagcaccaggaacatggtgaagctggccgaggccaccaggaccaacatcggcatccaggagttcatgcccctgcagagcctcttcaccaatgccctgctgaatgacatcgagagcagccacctgctgcagcagaccatcgccgccctgcaggccaacaagtttgtgcagcccctgctgggcaggaagaatgagatggagaagcagaggaaggagatcaaggagctgtggaagcaggagcagaacaagatgctggaggccgagaatgccctgaagaaggccaagctgctgtgcatgcagaggcaggatgaatatgagaaggccaagagctccatgttccgggcagaggaggagcacctgagcagcagcggcggcctggccaagaacctgaacaagcagctggagaagaagaggcggctggaggaggaggccctgcagaaggtggaggaggccaatgagctgtacaaggtgtgtgtgaccaacgtggaggagaggagaaatgacctggagaacaccaagcgggagatcctggcccagctgcggaccctggtgttccagtgtgacctgaccctgaaggctgtgacagtgaacctcttccacatgcagcacctgcaggccgccagcctggccgacagcctgcagagcctgtgtgacagcgccaagctgtatgaccccggccaggagtacagcgagtttgtgaaggccaccaacagcacagaggaggagaaggtggatggaaatgtgaacaagcacctgaacagcagccagcccagcggcttcggccctgccaacagcctggaggatgtggtgcggctgcctgacagcagcaacaagattgaagaagatcgctgcagcaacagcgctgacatcaccggccccagcttcatccgctcctggaccttcggcatgttcagtgacagcgagagcactggaggcagcagcgagagccgcagcctggacagcgagagcatcagccctggggacttccacaggaagctgcccaggacccccagcagcggcaccatgagcagcgcagatgacctggatgagcgggagccccccagccccagcgagaccggccccaacagcctgggcaccttcaagaagaccctgatgagcaaggccgccctgacccacaagttcaggaagctgcggagccccaccaagtgccgggactgtgagggcatcgtggtgttccagggcgtggagtgtgaggagtgcctgctggtgtgccacaggaagtgcctggagaacctggtgatcatctgtggccaccagaagctgcccgggaagatccacctgtttggagctgagttcacccaggtggccaagaaggagccagatggcatccccttcatcctgaagatctgtgccagcgagattgagaacagagccctgtgcctgcagggcatctacagagtgtgtggcaacaagatcaagacagagaagctgtgccaggccctggagaatggcatgcacctggtggacatcagcgagttcagcagccatgacatctgtgatgtgctgaagctgtacctgcggcagctgcctgagcccttcatcctcttccggctgtacaaggagttcatcgacctggccaaggagatccagcacgtgaatgaggagcaggagaccaagaagaacagcctggaggacaagaagtggcccaacatgtgcatcgagatcaaccgcatcctgctgaagagcaaggacctgctgcggcagctgcctgccagcaacttcaacagcctgcacttcctgattgtgcacctgaagagggtggtggaccacgccgaggagaacaagatgaacagcaagaacctgggcgtcatcttcggccccagcctcatccggccccggcccaccacagcccccatcaccatcagcagcctggccgagtacagcaaccaggcccggctggtggagttcctgatcacctacagccagaagatctttgatggcagcctgcagccccaggatgtgatgtgcagcattggagtggtggaccagggctgcttccccaagcccctgctgagccctgaggagcgggacatcgagaggtccatgaagagcctcttcttcagcagcaaggaggacatccacaccagcgagagcgagagcaagatctttgagcgggccaccagctttgaggagagcgagaggaagcagaatgccctgggcaaatgtgatgcctgcctgagtgacaaggcccagctgctgctggaccaggaggccgagagcgccagccagaagattgaagatggcaagacccccaagcccctgagcctgaagagtgacaggagcaccaacaacgtggagcggcacacccccaggaccaagatccggcctgtgtccctgcctgtggaccggctgctgctggccagccccccaaatgaaagaaatggaagaaacatgggaaatgtgaacctggacaagttctgcaagaacccagcctttgaaggagtgaacaggaaggatgctgccaccaccgtgtgcagcaagttcaacggctttgaccagcagaccctgcagaagatccaggacaagcagtatgagcagaacagcctgacagccaagaccaccatgatcatgcccagcgccctgcaggagaagggcgtgaccaccagcctgcagatcagcggggaccacagcatcaatgccacccagcccagcaagccctatgcagagcctgtgcgctctgtgcgggaggccagcgagaggaggagcagtgacagctaccccctggcccctgtgcgggcccccaggaccctgcagccccagcactggaccaccttctacaagccccacgcccccatcatcagcatcagaggaaatgaggagaagccagccagccccagcgctgctgtgcccccaggcacagaccatgacccccacggcctggtggtgaagtccatgccagaccctgacaaggccagcgcctgccccggccaggccaccggccagcccaaggaggacagcgaggagctgggcctgcctgatgtgaaccccatgtgccagaggccccggctgaagaggatgcagcagtttgaggacctggagggggagatcccccagtttgtgtag

SEQ ID NO: 167936 - DNA, 1182 bp, synthetic construct
  misc_feature 1..1182: note = Description of Artificial Sequence: Synthetic coding sequence
  source 1..1182: mol_type = other DNA
atgattgcccacaagcagaagaagaccaagaagaagagggcctgggccagcggccagctgagcacagacatcaccaccagcgagatgggcctgaagagcctgagcagcaacagcatctttgatcctgactacatcaaggagctggtgaatgacatcaggaagttcagccacatgctgctgtacctgaaggaggccatcttcagtgactgcttcaaggaggtgatccacatccggctggaggagctgctgcgggtgctgaagagcatcatgaacaagcaccagaacctgaacagcgtggacctgcagaatgctgctgagatgctgacagccaaggtgaaggctgtgaacttcacagaggtgaatgaggagaacaagaatgacctcttccaggaggtgttcagcagcattgagaccctggccttcacctttggaaacatcctgaccaacttcctgatgggagatgtgggcaatgacagcctgctgcggctgcctgtgtcccgggagaccaagagctttgaaaatgtgtctgtggagagcgtggacagcagcagcgagaagggcaacttcagccccctggagctggacaacgtgctgctgaagaacacagacagcattgagctggccctgtcctatgccaagacctggagcaagtacaccaagaacatcgtgtcctgggtggagaagaagctgaacctggagctggagagcaccaggaacatggtgaagctggccgaggccaccaggaccaacatcggcatccaggagttcatgcccctgcagagcctcttcaccaatgccctgctgaatgacatcgagagcagccacctgctgcagcagaccatcgccgccctgcaggccaacaagtttgtgcagcccctgctgggcaggaagaatgagatggagaagcagaggaaggagatcaaggagctgtggaagcaggagcagaacaagatgctggaggccgagaatgccctgaagaaggccaagctgctgtgcatgcagaggcaggatgaatatgagaaggccaagagctccatgttccgggcagaggaggagcacctgagcagcagcggcggcctggccaagaacctgaacaagcagctggagaagaagaggcggctggaggaggaggccctgcagaaggtgaccatcttcttcttcttcatctgcaagctgaactag

SEQ ID NO: 167937 - DNA, 3306 bp, synthetic construct
  misc_feature 1..3306: note = Description of Artificial Sequence: Synthetic coding sequence
  source 1..3306: mol_type = other DNA
atgaagagccggcagaagggcaagaagaagggcagcgccaaggagcgggtgtttggctgtgacctgcaggagcacctgcagcacagcggccaggaggtgccccaggtgctgaagagctgtgccgagtttgtggaggagtatggagtggtggatggcatctaccgcctgtctggagtgagcagcaacatccagaagctgcggcaggagtttgagagcgagaggaagccagacctgcggagagatgtgtacctgcaggacatccactgtgtgagcagcctgtgcaaggcctacttccgggagctgcctgaccccctgctgacctaccgcctgtatgacaagtttgctgaggccgtgggcgtgcagctggagcctgagcggctggtgaagatcctggaggtgctgcgggagctgcctgtgcccaactaccgcaccctggagttcctgatgaggcacctggtgcacatggccagcttcagcgcccagaccaacatgcacgccaggaacctggccatcgtgtgggcccccaacctgctgcggagcaaggacatcgaggccagcggcttcaatggaacagctgccttcatggaggtgcgggtgcagagcatcgtggtggagttcatcctgacccacgtggaccagctgtttggaggagctgccctgtctggaggagaggtggagagcggctggaggagcctgcccggcacccgggccagcggcagccctgaggacctgatgccccggcccctgccctaccacctgcccagcatcctgcaggccggagatggccccccccagatgaggccctaccacaccatcattgaaattgctgagcacaagaggaagggcagcctgaaggtgaggaagtggaggagcatcttcaacctgggccgcagcggccacgagaccaagaggaagctgcccagaggagcagaagatcgggaggacaagagcaacaagggcaccctgcggcctgccaagtccatggacagcctgtctgctgctgctggggccagtgatgagcctgagggcctggtgggccccagcagcccccggcccagccccctgctgcctgagagcctggagaatgacagcattgaagctgctgagggggagcaggagcctgaggccgaggccctgggcggcaccaacagcgagcccggcacccccagggctggccgcagcgccatccgggccggcggcagcagcagagctgagcgctgtgccggcgtgcacatcagtgacccctacaacgtgaacctgcccctgcacatcaccagcatcctgtctgtgccccccaacatcatcagcaatgtgtccctggcccggctgacccggggcctggagtgcccagccctgcagcaccggcccagccctgccagcggccctggccctggccctggcctgggccctggccccccagatgagaagctggaggccagccctgccagcagccccctggccgacagcggcccagatgacctggccccagccctggaggacagcctgagccaggaggtgcaggacagcttctccttcctggaggacagcagcagcagcgagcctgagtgggtgggcgcagaagatggagaggtggcccaggccgaggccgccggggccgccttcagccctggagaagatgaccccggcatgggctacctggaggagctgctgggcgtgggcccccaggtggaggagttctctgtggagccccccctggatgacctgagcctggatgaggcccagtttgtgctggcccccagctgctgcagcctggacagcgctggccccaggcctgaggtggaggaggagaatggagaggaggtgttcctgagcgcctatgatgacctgagccccctgctgggccccaagccacccatctggaagggcagcggcagcctggagggggaggccgccggctgcggccggcaggccctgggccagggcggggaggagcaggcctgctgggaggtgggggaggacaagcaggccgagcccggcggccgcctggacatccgggaggaggccgagggcagccctgagaccaaggtggaggccggcaaggccagcgaggacagaggagaggccggcggcagccaggagaccaaggtgcggctgcgggagggcagccgggaggagacagaggccaaggaggagaagagcaagggccagaagaaggctgacagcatggaggccaagggcgtggaggagcctggaggagatgagtacacagatgagaaggagaaggagattgaaagagaggaggatgagcagcgggaggaggcccaggtggaggccggccgggacctggagcagggcgcccaggaggaccaggtggccgaggagaagtgggaggtggtgcagaagcaggaggccgagggcgtgcgggaggatgaggacaagggccagcgggagaagggctaccacgaggccaggaaggaccagggagatggagaggacagccgcagccctgaggccgccacagaaggaggagctggggaggtgtccaaggagcgggagagcggagatggagaggccgagggggaccagagagctgggggctactacctggaggaggacaccctgtctgagggcagcggcgtggccagcctggaggtggactgtgccaaggagggcaacccccacagcagcgagatggaggaggtggccccccagcccccccagcctgaggagatggagcctgagggccagcccagcccagatggctgcctgtgcccctgcagcctgggcctgggcggcgtgggcatgaggctggccagcaccctggtgcaggtgcagcaggtgcgctctgtgcctgtggtgccccccaagccccagtttgccaagatgcccagcgccatgtgcagcaagatccacgtggccccagccaacccctgcccccggcccggccgcctggatggcaccccaggagagcgggcctggggcagccgggccagccgcagctcctggagaaatggaggcagcctgagctttgatgctgctgtggccctggcccgggaccggcagaggacagaggcccagggcgtgcggaggacccagacctgcacagagggcggggactactgcctgatccccaggaccagcccctgcagcatgatcagcgcccacagcccccggcccctgagctgcctggagctgcccagcgagggcgctgagggcagcggcagccgcagccggctgagcctgcccccccgggagccccaggtgcctgaccccctgctgagcagccagaggaggagctatgcctttgagacccaggccaaccctggaaaaggagagggcctgtag

SEQ ID NO: 167938 - DNA, 2673 bp, synthetic construct
  misc_feature 1..2673: note = Description of Artificial Sequence: Synthetic coding sequence
  source 1..2673: mol_type = other DNA
atgaagagccggcagaagggcaagaagaagggcagcgccaaggagcgggtgtttggctgtgacctgcaggagcacctgcagcacagcggccaggaggtgccccaggtgctgaagagctgtgccgagtttgtggaggagtatggagtggtggatggcatctaccgcctgtctggagtgagcagcaacatccagaagctgcggcaggagtttgagagcgagaggaagccagacctgcggagagatgtgtacctgcaggacatccactgtgtgagcagcctgtgcaaggcctacttccgggagctgcctgaccccctgctgacctaccgcctgtatgacaagtttgctgaggccgtgggcgtgcagctggagcctgagcggctggtgaagatcctggaggtgctgcgggagctgcctgtgcccaactaccgcaccctggagttcctgatgaggcacctggtgcacatggccagcttcagcgcccagaccaacatgcacgccaggaacctggccatcgtgtgggcccccaacctgctgcggagcaaggacatcgaggccagcggcttcaatggaacagctgccttcatggaggtgcgggtgcagagcatcgtggtggagttcatcctgacccacgtggaccagctgtttggaggagctgccctgtctggaggagaggtggagagcggctggaggagcctgcccggcacccgggccagcggcagccctgaggacctgatgccccggcccctgccctaccacctgcccagcatcctgcaggccggagatggccccccccagatgaggccctaccacaccatcattgaaattgctgagcacaagaggaagggcagcctgaaggtgaggaagtggaggagcatcttcaacctgggccgcagcggccacgagaccaagaggaagctgcccagaggagcagaagatcgggaggacaagagcaacaagggcaccctgcggcctgccaagtccatggacagcctgtctgctgctgctggggccagtgatgagcctgagggcctggtgggccccagcagcccccggcccagccccctgctgcctgagagcctggagaatgacagcattgaagctgctgagggggagcaggagcctgaggccgaggccctgggcggcaccaacagcgagcccggcacccccagggctggccgcagcgccatccgggccggcggcagcagcagagctgagcgctgtgccggcgtgcacatcagtgacccctacaacgtgaacctgcccctgcacatcaccagcatcctgtctgtgccccccaacatcatcagcaatgtgtccctggcccggctgacccggggcctggagtgcccagccctgcagcaccggcccagccctgccagcggccctggccctggccctggcctgggccctggccccccagatgagaagctggaggccagccctgccagcagccccctggccgacagcggcccagatgacctggccccagccctggaggacagcctgagccaggaggtgcaggacagcttctccttcctggaggacagcagcagcagcgagcctgagtgggtgggcgcagaagatggagaggtggcccaggccgaggccgccggggccgccttcagccctggagaagatgaccccggcatgggctacctggaggagctgctgggcgtgggcccccaggtggaggagttctctgtggagccccccctggatgacctgagcctggatgaggcccagtttgtgctggcccccagctgctgcagcctggacagcgctggccccaggcctgaggtggaggaggagaatggagaggaggtgttcctgagcgcctatgatgacctgagccccctgctgggccccaagccacccatctggaagggcagcggcagcctggagggggaggccgccggctgcggccggcaggccctgggccagggcggggaggagcaggcctgctgggaggtgggggaggacaagcaggccgagcccggcggccgcctggacatccgggaggaggccgagggcaccccccagcccccccagcctgaggagatggagcctgagggccagcccagcccagatggctgcctgtgcccctgcagcctgggcctgggcggcgtgggcatgaggctggccagcaccctggtgcaggtgcagcaggtgcgctctgtgcctgtggtgccccccaagccccagtttgccaagatgcccagcgccatgtgcagcaagatccacgtggccccagccaacccctgccccaggcctggccgcctggatggcaccccaggagagcgggcctggggcagccgggccagccgcagctcctggagaaatggaggcagcctgagctttgatgctgctgtggccctggcccgggaccggcagaggacagaggcccagggcgtgcggaggacccagacctgcacagaaggaggagactactgcctgatccccaggaccagcccctgcagcatgatcagcgcccacagcccccggcccctgagctgcctggagctgcccagcgagggcgctgagggcagcggcagccgcagccggctgagcctgcccccccgggagccccaggtgcctgaccccctgctgagcagccagaggaggagctatgcctttgagacccaggccaaccctgggaagggggagggcctgtag

SEQ ID NO: 167939 - DNA, 1500 bp, synthetic construct
  misc_feature 1..1500: note = Description of Artificial Sequence: Synthetic coding sequence
  source 1..1500: mol_type = other DNA
atgaggcacctggtgcacatggccagcttcagcgcccagaccaacatgcacgccaggaacctggccatcgtgtgggcccccaacctgctgcggagcaaggacatcgaggccagcggcttcaatggaacagctgccttcatggaggtgcgggtgcagagcatcgtggtggagttcatcctgacccacgtggaccagctgtttggaggagctgccctgtctggaggagaggtggagagcggctggaggagcctgcccggcacccgggccagcggcagccctgaggacctgatgccccggcccctgccctaccacctgcccagcatcctgcaggccggagatggccccccccagatgaggccctaccacaccatcattgaaattgctgagcacaagaggaagggcagcctgaaggtgaggaagtggaggagcatcttcaacctgggccgcagcggccacgagaccaagaggaagctgcccagaggagcagaagatcgggaggacaagagcaacaagggcaccctgcggcctgccaagtccatggacagcctgtctgctgctgctggggccagtgatgagcctgagggcctggtgggccccagcagcccccggcccagccccctgctgcctgagagcctggagaatgacagcattgaagctgctgagggggagcaggagcctgaggccgaggccctgggcggcaccaacagcgagcccggcacccccagggctggccgcagcgccatccgggccggcggcagcagcagagctgagcgctgtgccggcgtgcacatcagtgacccctacaacgtgaacctgcccctgcacatcaccagcatcctgtctgtgccccccaacatcatcagcaatgtgtccctggcccggctgacccggggcctggagtgcccagccctgcagcaccggcccagccctgccagcggccctggccctggccctggcctgggccctggccccccagatgagaagctggaggccagccctgccagcagccccctggccgacagcggcccagatgacctggccccagccctggaggacagcctgagccaggaggtgcaggacagcttctccttcctggaggacagcagcagcagcgagcctgagtgggtgggcgcagaagatggagaggtggcccaggccgaggccgccggggccgccttcagccctggagaagatgaccccggcatgggctacctggaggagctgctgggcgtgggcccccaggtggaggagttctctgtggagccccccctggatgacctgagcctggatgaggcccagtttgtgctggcccccagctgctgcagcctggacagcgctggccccaggcctgaggtggaggaggagaatggagaggaggtgttcctgagcgcctatgatgacctgagccctgccctgggcctgctgctgcagcccggctggggccacaggagccacagcagcgagggccagtgcctgcgcatcaaggctgtgttcctgtag

SEQ ID NO: 167940 - DNA, 4335 bp, synthetic construct
  misc_feature 1..4335: note = Description of Artificial Sequence: Synthetic coding sequence
  source 1..4335: mol_type = other DNA
atgaagaacaagggggccaagcagaagctgaagaggaaaggagctgccagcgccttcggctgtgacctgacagagtacctggagagcagcggccaggatgtgccctacgtgctgaagagctgtgccgagttcatcgagacccacggcatcgtggatggcatctaccgcctgagcggcgtgaccagcaacatccagaggctgcggcaggagtttggaagtgaccagtgcccagacctgacccgggaggtgtacctgcaggacatccactgtgtgggcagcctgtgcaagctgtacttccgggagctgcccaaccccctgctgacctatgagctgtatgagaagttcacagaggccgtgagccactgcccagaggagggccagctggcccgcatccagaatgtcatccaggagctgccccccagccactaccgcaccctggagtacctgatccgccacctggcccacatcgccagcttcagcagcaagaccaacatgcacgccaggaacctggccctggtgtgggcccccaacctgctgcggagcaaggagattgaggccaccggctgcaatggagatgctgccttcctggccgtgcgggtgcagcaggtggtgattgagttcatcctgaaccacgtggaccagatcttcaacaacggggcccctggcagcctggagaatgatgagaaccggcccatcatgaagagcctgaccctgcctgccctgagcctgcccatgaagctggtgtccctggaggaggcccaggcccggagcctggccaccaaccacccagccaggaaggagcggcgggagaacagcctgcctgagatcgtgccccccatgggcaccctcttccacacagtgctggagctgcctgacaacaagaggaagctgagcagcaagagcaagaagtggaagagcatcttcaacctgggccgcagcggcagtgacagcaagagcaagctgagcagaaatggatctgtgtttgtgcggggccagaggctgtctgtggagaaggccaccatccggcctgccaagtccatggacagcctgtgcagcgtgcctgtggagggcaaggagaccaagggcaacttcaacagaacagtgaccaccggcggcttcttcatcccagccaccaagatgcacagcactggaacaggcagcagctgtgacctgaccaagcaggagggggagtggggccaggagggcatgcctcctggagctgagggcggctttgatgtgtccagtgacaggagccacctgcagggcgcccaggcccggcccccacctgagcagctgaaggtgttccggcctgtggaggaccctgagagcgagcagacagcccccaagatgctgggcatgttctacaccagcaatgacagccccagcaagagcgtcttcaccagcagcctcttccagatggagcccagccccaggaaccagaggaaggccctgaacatcagcgagccctttgctgtgtctgtgcccctgcgggtgtctgctgtgatcagcaccaacagcaccccctgcaggaccccacccaaggagctgcagagcctgagcagcctggaggagttctccttccacggcagcgagagcggcggctggccagaggaggagaagcccctgggcgctgagaccagcgctgcctctgtgcccaagaaggccggcctggaggatgccaaggctgtgcctgaggcccctggcaccgtggagtgcagcaagggcctgagccaggagcccggggcccacctggaggagaagaagaccccagagagcagcctgagcagccagcacctgaatgagctggagaagaggcccaaccctgagaaggtggtggaggagggccgggaggccggggagatggagagcagcaccctgcaggagagcccccgggcccgggcagaggccgtgctgctgcacgagatggatgaagatgacctggccaatgccctgatctggccagagatccagcaggagctgaagatcattgaaagtgaggaggagctgagcagcctgcccccaccagccctgaagaccagccccatccagcccatcctggagagcagcctgggccccttcatccccagcgagcccccaggcagcctgccctgtggcagcttccctgcccctgtgtccacccccctggaggtgtggacccgggaccctgccaaccagagcacccagggcgccagcacagctgccagccgggagaagccagagcctgagcagggcctgcacccagacctggccagcctggcccccctggagatcgtgccctttgagaaggccagcccccaggccaccgtggaggtgggcggccctggcaacctgagcccccccctgcccccagcccctcctccacccacccccctggaggagagcacccctgtgctgctgagcaaaggaggccctgagcgggaggacagcagcaggaagctgaggacagacctgtacatcgaccagctgaagagccaggacagccctgagatcagcagcctgtgccagggcgaggaggccacccccaggcacagcgacaagcagaacagcaagaatgctgccagcgagggcaagggctgcggcttccccagccccacccgggaggtggagatcgtgtcccaggaggaggaggatgtgacccacagcgtgcaggagcccagcgactgtgatgaagatgacacagtgacagacatcgcccagcacggcctggagatggtggagccctgggaggagccccagtgggtgaccagccccctgcacagccccaccctgaaggatgcccacaaggcccaggtgcagggcctgcagggccaccagctggagaagaggctgagccaccggcccagcctgcggcagagccacagcctggacagcaagcccaccgtgaagagccagtggaccctggaggtgcccagcagcagcagctgtgccaacctggagacagagaggaacagcgaccccctgcagccccaggccccccggcgggagatcaccggctgggatgagaaggccctgcggagcttccgggagttcagcggcctgaagggagctgaggccccacccaaccagaagggccccagcggcgtgcagcccaacccagctgagaccagccccatcagcctggccgagggcaaggagctgggcacccacctgggccacagcagcccccagatccggcagggcggcgtgcccggccctgagagcagcaaggagagcagccccagcgtgcaggacagcaccagccctggagagcacccagccaagctgcagctgaagagcacagaatgtggcccccccaagggcaagaaccggcccagcagcctgaacctggaccctgccatccccatcgctgacctcttctggtttgaaaatgtggccagcttcagcagccctggcatgcaggtgtctgagcccggggaccccaaggtgacctggatgaccagcagctactgcaaggctgacccctggagggtgtacagccaggacccccaggacctggacatcgtggcccacgccctgactggaagaagaaacagcgcccctgtgtctgtgtctgctgtgaggaccagcttcatggtgaagatgtgccaggcccgggctgtgcctgtgatcccccccaagatccagtacacccagatcccccagcccctgcccagccagagcagtggagaaaatggagtgcagcccctggagaggagccaggagggccccagcagcaccagcggcaccacccagaagccagccaaggatgacagccccagcagcctggagagcagcaaggaggagaagcccaagcaggaccccggggccatcaagagcagccctgtggatgccacagccccctgcatgtgtgagggccccaccctgagccctgagcccggcagcagcaacctgctgagcacccaggatgctgtggtgcagtgcaggaagaggatgtctgaaacagagcccagcggggacaacctgctgagcagcaagctggagcggcccagcggcggcagcaagcccttccacaggagcaggcctggccggccccagagcctcatcctcttcagcccccccttccccatcatggaccacctgccccccagcagcacagtgacagacagcaaggtgctgctgagccccatccgcagccccacccagacagtgtccccaggcctgctgtgtggggagctggccgagaacacctgggtgaccccagagggcgtgaccctgaggaacaagatgaccatccccaagaatggccagaggctggagaccagcaccagctgcttctaccagccccagaggaggagcgtcatcctggatggccgcagcggccggcagattgaatag

SEQ ID NO: 167941 - DNA, 3300 bp, synthetic construct
  misc_feature 1..3300: note = Description of Artificial Sequence: Synthetic coding sequence
  source 1..3300: mol_type = other DNA
atgaagaacaagggggccaagcagaagctgaagaggaaaggagctgccagcgccttcggctgtgacctgacagagtacctggagagcagcggccaggatgtgccctacgtgctgaagagctgtgccgagttcatcgagacccacggcatcgtggatggcatctaccgcctgagcggcgtgaccagcaacatccagaggctgcggcaggagtttggaagtgaccagtgcccagacctgacccgggaggtgtacctgcaggacatccactgtgtgggcagcctgtgcaagctgtacttccgggagctgcccaaccccctgctgacctatgagctgtatgagaagttcacagaggccgtgagccactgcccagaggagggccagctggcccgcatccagaatgtcatccaggagctgccccccagccactaccgcaccctggagtacctgatccgccacctggcccacatcgccagcttcagcagcaagaccaacatgcacgccaggaacctggccctggtgtgggcccccaacctgctgcggagcaaggagattgaggccaccggctgcaatggagatgctgccttcctggccgtgcgggtgcagcaggtggtgattgagttcatcctgaaccacgtggaccagatcttcaacaacggggcccctggcagcctggagaatgatgagaaccggcccatcatgaagagcctgaccctgcctgccctgagcctgcccatgaagctggtgtccctggaggaggcccaggcccggagcctggccaccaaccacccagccaggaaggagcggcgggagaacagcctgcctgagatcgtgccccccatgggcaccctcttccacacagtgctggagctgcctgacaacaagaggaagctgagcagcaagagcaagaagtggaagagcatcttcaacctgggccgcagcggcagtgacagcaagagcaagctgagcagaaatggatctgtgtttgtgcggggccagaggctgtctgtggagaaggccaccatccggcctgccaagtccatggacagcctgtgcagcgtgcctgtggagggcaaggagaccaagggcaacttcaacagaacagtgaccaccggcggcttcttcatcccagccaccaagatgcacagcactggaacaggcagcagctgtgacctgaccaagcaggagggggagtggggccaggagggcatgcctcctggagctgagggcggctttgatgtgtccagtgacaggagccacctgcagggcgcccaggcccggcccccacctgagcagctgaaggtgttccggcctgtggaggaccctgagagcgagcagacagcccccaagatgctgggcatgttctacaccagcaatgacagccccagcaagagcgtcttcaccagcagcctcttccagatggagcccagccccaggaaccagaggaaggccctgaacatcagcgagccctttgctgtgtctgtgcccctgcgggtgtctgctgtgatcagcaccaacagcaccccctgcaggaccccacccaaggagctgcagagcctgagcagcctggaggagttctccttccacggcagcgagagcggcggctggccagaggaggagaagcccctgggcgctgagaccagcgctgcctctgtgcccaagaaggccggcctggaggatgccaaggctgtgcctgaggcccctggcaccgtggagtgcagcaagggcctgagccaggagcccggggcccacctggaggagaagaagaccccagagagcagcctgagcagccagcacctgaatgagctggagaagaggcccaaccctgagaaggtggtggaggagggccgggaggccggggagatggagagcagcaccctgcaggagagcccccgggcccgggcagaggccgtgctgctgcacgagatggatgaagatgacctggccaatgccctgatctggccagagatccagcaggagctgaagatcattgaaagtgaggaggagctgagcagcctgcccccaccagccctgaagaccagccccatccagcccatcctggagagcagcctgggccccttcatccccagcgagcccccaggcagcctgccctgtggcagcttccctgcccctgtgtccacccccctggaggtgtggacccgggaccctgccaaccagagcacccagggcgccagcacagctgccagccgggagaagccagagcctgagcagggcctgcacccagacctggccagcctggcccccctggagatcgtgccctttgagaaggccagcccccaggccaccgtggaggtgggcggccctggcaacctgagcccccccctgcccccagcccctcctccacccacccccctggaggagagcacccctgtgctgctgagcaaaggaggccctgagcgggaggacagcagcaggaagctgaggacagacctgtacatcgaccagctgaagagccaggacagccctgagatcagcagcctgtgccagggcgaggaggccacccccaggcacagcgacaagcagaacagcaagaatgctgccagcgagggcaagggctgcggcttccccagccccacccgggaggtggagatcgtgtcccaggaggaggaggatgtgacccacagcgtgcaggagcccagcgactgtgatgaagatgacacagtgacagacatcgcccagcacggcctggagatggtggagccctgggaggagccccagtgggtgaccagccccctgcacagccccaccctgaaggatgcccacaaggcccaggtgcagggcctgcagggccaccagctggagaagaggctgagccaccggcccagcctgcggcagagccacagcctggacagcaagcccaccgtgaagagccagtggaccctggaggtgcccagcagcagcagctgtgccaacctggagacagagaggaacagcgaccccctgcagccccaggccccccggcgggagatcaccggctgggatgagaaggccctgcggagcttccgggagttcagcggcctgaagggagctgaggccccacccaaccagaagggccccagcggcgtgcagcccaacccagcccagcctgtgggccccctgaggaacctgcccaagatgatcctgcccccaccctggaaggcccagaggaagaagaaccagagcaagatccctgagcccctgagcccccaccagtggatgcccctgcacccagcctgtgcccgggacctgcccttcctgcagaaccaggcccggctgacctgcagcccccccaggatgcagtag

SEQ ID NO: 167942 - DNA, 4509 bp, synthetic construct
  misc_feature 1..4509: note = Description of Artificial Sequence: Synthetic coding sequence
  source 1..4509: mol_type = other DNA
atgatggccaagaacaaggagccccggccccccagctacaccatcagcatcgtgggcctgtctggaacagagaaggacaagggcaactgtggggtgggcaagagctgcctgtgcaacagatttgtgcgcagcaaggcagatgagtactacccagagcacacctctgtgctgagcaccatcgactttggaggccgggtggtgaacaatgaccacttcctgtactggggagacatcatccagaacagtgaagatggagtggagtgcaagatccacgtgattgagcagacagagttcattgatgaccagaccttcctgccccacaggagcaccaacctgcagccctacatcaagagagctgctgccagcaagctgcagagcgctgagaagctgatgtacatctgcacagaccagctgggcctggagcaggactttgagcagaagcagatgcctgagggcaagctgaatgtggatggcttcctgctgtgcattgatgtgtcccagggctgcaacaggaagtttgatgaccagctgaagtttgtgaacaacctgtttgtgcagctgagcaagagcaagaagcctgtgatcatcgccgccaccaagtgtgatgaatgtgtggaccactacctgcgggaggtgcaggcctttgccagcaacaagaagaacctgctggtggtggagaccagcgcccgcttcaacgtgaacatcgagacctgcttcaccgccctggtgcagatgctggacaagaccaggagcaagcccaagatcatcccctacctggatgcctacaagacccagaggcagctggtggtgacagccacagacaagtttgagaagctggtgcagacagtgcgggactaccacgccacctggaagacagtgagcaacaagctgaagaaccacccagactatgaggagtacatcaacctggagggcaccaggaaggccaggaacaccttcagcaagcacatcgagcagctgaagcaggagcacatcaggaagaggcgggaggagtacatcaacaccctgccccgggccttcaacaccctgctgcccaacctggaggagattgagcacctgaactggagcgaggccctgaagctgatggagaagagagctgacttccagctgtgctttgtggtgctggagaagaccccctgggatgaaacagaccacatcgacaagatcaatgaccggcgcatcccctttgacctgctgagcaccctggaggccgagaaggtgtaccagaaccacgtgcagcacctgatcagcgagaagagaagagtggagatgaaggagaagttcaagaagaccctggagaagatccagttcatcagccctggccagccctgggaggaggtgatgtgctttgtgatggaggatgaggcctacaagtacatcacagaagctgacagcaaggaggtgtatggccgccaccagcgggagatcgtggagaaggccaaggaggagttccaggagatgctgtttgagcacagcgagctgttctatgacctggacctgaatgccacccccagcagtgacaagatgtctgagatccacacagtgctgtctgaggagccccgctacaaggccctgcagaagctggccccagaccgggagagcctgctgctgaagcacatcggctttgtgtaccaccccaccaaggagacctgcctgagcggccagaactgcacagacatcaaggtggagcagctgctggccagcagcctgctgcagctggaccacggccgcctgcggctgtaccatgacagcaccaacatcgacaaggtgaacctcttcatcctgggcaaggatggcctggcccaggagctggccaatgagatccgcacccagagcacagatgatgaatatgccctggatggcaagatctatgagctggacctgcggcctgtggatgccaagagcccctacttcctgagccagctgtggacagctgccttcaagccccacggctgcttctgtgtgttcaacagcattgagagcctgtccttcatcggggagttcatcggcaagatcagaacagaggccagccagatcaggaaggacaagtacatggccaacctgcccttcaccctcatcctggccaaccagagggacagcatcagcaagaacctgcccatcctgcggcaccagggccagcagctggccaacaagctgcagtgcccctttgtggatgtgcctgctggcacctaccccaggaagttcaatgagacccagatcaagcaggccctgcggggcgtgctggagagcgtgaagcacaacctggatgtggtgagccccatcccagccaacaaggacctgtctgaggccgacctgcgcatcgtgatgtgtgccatgtgtggggaccccttctctgtggacctgatcctgagccccttcctggacagccacagctgcagcgctgcccaggccggccagaacaacagcctgatgctggacaagatcatcggggagaagagaagacgcatccagatcaccatcctgagctaccacagcagcattggagtgaggaaggatgagctggtgcacggctacatcctggtgtacagcgccaagaggaaggcctccatgggcatgctgcgggccttcctgtctgaggtgcaggacaccatccctgtgcagctggtggccgtgacagacagccaggccgacttctttgaaaatgaggccatcaaggagctgatgacagaaggagagcacatcgccacagagatcacagccaagttcaccgccctgtacagcctgagccagtaccaccggcagacagaggtgttcaccctcttcttcagtgatgtgctggagaagaagaacatgattgagaacagctacctgagtgacaacacccgggagagcacccaccagagtgaagatgtgttcctgcccagcccccgggactgcttcccctacaacaactacccagacagtgatgatgacacagaggcccccccaccctacagccccatcggagatgatgtgcagctgctgcccacccccagcgacaggagccgctaccgcctggacctggagggcaatgagtaccccatccacagcacccccaactgccacgaccacgagaggaaccacaaggtgcccccacccatcaagcccaagcctgtggtgcccaagaccaacgtgaagaagctggaccccaacctgctgaagaccatcgaggccggcatcggcaagaaccccaggaagcagaccagccgggtgcccctggcccaccctgaggacatggaccccagcgacaactatgcagagcccatcgacaccatcttcaagcagaagggctacagtgatgagatctacgtggtgcctgatgacagccagaaccgcatcaagatccggaacagctttgtgaacaacacccagggagatgaggagaatggcttcagtgacaggaccagcaagagccatggagagcggcggcccagcaagtacaagtacaagagcaagaccctcttcagcaaggccaagagctactacagaaggacccacagtgatgccagtgatgatgaggccttcaccaccagcaagaccaagaggaagggccgccaccggggcagcgaggaggaccccctgctgagccctgtggagacctggaagggcggcatcgacaacccagccatcaccagtgaccaggagctggatgacaagaagatgaagaagaagacccacaaggtgaaggaggacaagaagcagaagaagaagaccaagaacttcaacccccccaccaggaggaactgggagagcaactacttcggcatgcccctgcaggacctggtgacagctgagaagcccatccccctgtttgtggagaagtgtgtggagttcatcgaggacaccggcctgtgcacagagggcctgtacagagtgtctggcaacaagacagaccaggacaacatccagaagcagtttgaccaggaccacaacatcaacctggtgtccatggaggtgacagtgaatgctgtggccggggccctgaaggccttctttgctgacctgcctgaccccctcatcccctacagcctgcaccctgagctgctggaggccgccaagatcccagacaagacagagcggctgcacgccctgaaggagatcgtgaagaagttccaccctgtgaactatgatgtgttccgctacgtgatcacccacctgaacagagtgtcccagcagcacaagatcaacctgatgacagctgacaacctgagcatctgcttctggcccaccctgatgaggccagactttgaaaatcgggagttcctgagcaccaccaagatccaccagagcgtggtggagaccttcatccagcagtgccagttcttcttctacaatggagagatcgtggagaccaccaacatcgtggcccctcctccacccagcaaccctggccagctggtggagcccatggtgcccctgcagctgcccccacccctgcagccccagctgatccagccccagctgcagacagaccccctgggcatcatctag

SEQ ID NO: 167943 - DNA, 714 bp, synthetic construct
  misc_feature 1..714: note = Description of Artificial Sequence: Synthetic coding sequence
  source 1..714: mol_type = other DNA
atgagcctgcccccacctcctcctggccccctgcccctgcggaggagaagaagaagacccaccctgctgggcctgtgcacagagggcctgtacagagtgtctggcaacaagacagaccaggacaacatccagaagcagtttgaccaggaccacaacatcaacctggtgtccatggaggtgacagtgaatgctgtggccggggccctgaaggccttctttgctgacctgcctgaccccctcatcccctacagcctgcaccctgagctgctggaggccgccaagatcccagacaagacagagcggctgcacgccctgaaggagatcgtgaagaagttccaccctgtgaactatgatgtgttccgctacgtgatcacccacctgaacagagtgtcccagcagcacaagatcaacctgatgacagctgacaacctgagcatctgcttctggcccaccctgatgaggccagactttgagaaccgggagttcctgagcaccaccaagatccaccagagcgtggtggagaccttcatccagcagtgccagttcttcttctacaacggggagatcgtggagaccaccaacatcgtggcccctcctccacccagcaaccctggccagctggtggagcccatggtgcccctgcagctgcccccacccctgcagccccagctgatccagccccagctgcagacagaccccctgggcatcatctag

SEQ ID NO: 167944 - DNA, 4506 bp, synthetic construct
  misc_feature 1..4506: note = Description of Artificial Sequence: Synthetic coding sequence
  source 1..4506: mol_type = other DNA
atgatggccaagaacaaggagccccggccccccagctacaccatcagcatcgtgggcctgtctggaacagagaaggacaagggcaactgtggggtgggcaagagctgcctgtgcaacagatttgtgcgcagcaaggcagatgagtactacccagagcacacctctgtgctgagcaccatcgactttggaggccgggtggtgaacaatgaccacttcctgtactggggagacatcatccagaacagtgaagatggagtggagtgcaagatccacgtgattgagcagacagagttcattgatgaccagaccttcctgccccacaggagcaccaacctgcagccctacatcaagagagctgctgccagcaagctgcagagcgctgagaagctgatgtacatctgcacagaccagctgggcctggagcaggactttgagcagaagcagatgcctgagggcaagctgaatgtggatggcttcctgctgtgcattgatgtgtcccagggctgcaacaggaagtttgatgaccagctgaagtttgtgaacaacctgtttgtgcagctgagcaagagcaagaagcctgtgatcatcgccgccaccaagtgtgatgaatgtgtggaccactacctgcgggaggtgcaggcctttgccagcaacaagaagaacctgctggtggtggagaccagcgcccgcttcaacgtgaacatcgagacctgcttcaccgccctggtgcagatgctggacaagaccaggagcaagcccaagatcatcccctacctggatgcctacaagacccagaggcagctggtggtgacagccacagacaagtttgagaagctggtgcagacagtgcgggactaccacgccacctggaagacagtgagcaacaagctgaagaaccacccagactatgaggagtacatcaacctggagggcaccaggaaggccaggaacaccttcagcaagcacatcgagcagctgaagcaggagcacatcaggaagaggcgggaggagtacatcaacaccctgccccgggccttcaacaccctgctgcccaacctggaggagattgagcacctgaactggagcgaggccctgaagctgatggagaagagagctgacttccagctgtgctttgtggtgctggagaagaccccctgggatgaaacagaccacatcgacaagatcaatgaccggcgcatcccctttgacctgctgagcaccctggaggccgagaaggtgtaccagaaccacgtgcagcacctgatcagcgagaagagaagagtggagatgaaggagaagttcaagaagaccctggagaagatccagttcatcagccctggccagccctgggaggaggtgatgtgctttgtgatggaggatgaggcctacaagtacatcacagaagctgacagcaaggaggtgtatggccgccaccagcgggagatcgtggagaaggccaaggaggagttccaggagatgctgtttgagcacagcgagctgttctatgacctggacctgaatgccacccccagcagtgacaagatgtctgagatccacacagtgctgtctgaggagccccgctacaaggccctgcagaagctggccccagaccgggagagcctgctgctgaagcacatcggctttgtgtaccaccccaccaaggagacctgcctgagcggccagaactgcacagacatcaaggtggagcagctgctggccagcagcctgctgcagctggaccacggccgcctgcggctgtaccatgacagcaccaacatcgacaaggtgaacctcttcatcctgggcaaggatggcctggcccaggagctggccaatgagatccgcacccagagcacagatgatgaatatgccctggatggcaagatctatgagctggacctgcggcctgtggatgccaagagcccctacttcctgagccagctgtggacagctgccttcaagccccacggctgcttctgtgtgttcaacagcattgagagcctgtccttcatcggggagttcatcggcaagatcagaacagaggccagccagatcaggaaggacaagtacatggccaacctgcccttcaccctcatcctggccaaccagagggacagcatcagcaagaacctgcccatcctgcggcaccagggccagcagctggccaacaagctgcagtgcccctttgtggatgtgcctgctggcacctaccccaggaagttcaatgagacccagatcaagcaggccctgcggggcgtgctggagagcgtgaagcacaacctggatgtggtgagccccatcccagccaacaaggacctgtctgaggccgacctgcgcatcgtgatgtgtgccatgtgtggggaccccttctctgtggacctgatcctgagccccttcctggacagccacagctgcagcgctgcccaggccggccagaacaacagcctgatgctggacaagatcatcggggagaagagaagacgcatccagatcaccatcctgagctaccacagcagcattggagtgaggaaggatgagctggtgcacggctacatcctggtgtacagcgccaagaggaaggcctccatgggcatgctgcgggccttcctgtctgaggtgcaggacaccatccctgtgcagctggtggccgtgacagacagccaggccgacttctttgaaaatgaggccatcaaggagctgatgacagaaggagagcacatcgccacagagatcacagccaagttcaccgccctgtacagcctgagccagtaccaccggcagacagaggtgttcaccctcttcttcagtgatgtgctggagaagaagaacatgattgagaacagctacctgagtgacaacacccgggagagcacccaccagagtgaagatgtgttcctgcccagcccccgggactgcttcccctacaacaactacccagacagtgatgatgacacagaggcccccccaccctacagccccatcggagatgatgtgcagctgctgcccacccccagcgacaggagccgctaccgcctggacctggagggcaatgagtaccccatccacagcacccccaactgccacgaccacgagaggaaccacaaggtgcccccacccatcaagcccaagcctgtggtgcccaagaccaacgtgaagaagctggaccccaacctgctgaagaccatcgaggccggcatcggcaagaaccccaggaagcagaccagccgggtgcccctggcccaccctgaggacatggaccccagcgacaactatgcagagcccatcgacaccatcttcaagcagaagggctacagtgatgagatctacgtggtgcctgatgacagccagaaccgcatcaagatccggaacagctttgtgaacaacacccagggagatgaggagaatggcttcagtgacaggaccagcaagagccatggagagcggcggcccagcaagtacaagtacaagagcaagaccctcttcagcaaggccaagagctactacagaaggacccacagtgatgccagtgatgatgaggccttcaccaccagcaagaccaagaggaagggccgccaccggggcagcgaggaggaccccctgctgagccctgtggagacctggaagggcggcatcgacaacccagccatcaccagtgaccaggagctggatgacaagaagatgaagaagaagacccacaaggtgaaggaggacaagaagaagaagaagaccaagaacttcaacccccccaccaggaggaactgggagagcaactacttcggcatgcccctgcaggacctggtgacagctgagaagcccatccccctgtttgtggagaagtgtgtggagttcatcgaggacaccggcctgtgcacagagggcctgtacagagtgtctggcaacaagacagaccaggacaacatccagaagcagtttgaccaggaccacaacatcaacctggtgtccatggaggtgacagtgaatgctgtggccggggccctgaaggccttctttgctgacctgcctgaccccctcatcccctacagcctgcaccctgagctgctggaggccgccaagatcccagacaagacagagcggctgcacgccctgaaggagatcgtgaagaagttccaccctgtgaactatgatgtgttccgctacgtgatcacccacctgaacagagtgtcccagcagcacaagatcaacctgatgacagctgacaacctgagcatctgcttctggcccaccctgatgaggccagactttgagaaccgggagttcctgagcaccaccaagatccaccagagcgtggtggagaccttcatccagcagtgccagttcttcttctacaacggggagatcgtggagaccaccaacatcgtggcccctcctccacccagcaaccctggccagctggtggagcccatggtgcccctgcagctgcccccacccctgcagccccagctgatccagccccagctgcagacagaccccctgggcatcatctag

SEQ ID NO: 167945 - DNA, 726 bp, synthetic construct
  misc_feature 1..726: note = Description of Artificial Sequence: Synthetic coding sequence
  source 1..726: mol_type = other DNA
atgcccctgcaggacctggtgacagctgagaagcccatccccctgtttgtggagaagtgtgtggagttcatcgaggacaccggcctgtgcacagagggcctgtacagagtgtctggcaacaagacagaccaggacaacatccagaagcagtttgaccaggaccacaacatcaacctggtgtccatggaggtgacagtgaatgctgtggccggggccctgaaggccttctttgctgacctgcctgaccccctcatcccctacagcctgcaccctgagctgctggaggccgccaagatcccagacaagacagagcggctgcacgccctgaaggagatcgtgaagaagttccaccctgtgaactatgatgtgttccgctacgtgatcacccacctgaacagagtgtcccagcagcacaagatcaacctgatgacagctgacaacctgagcatctgcttctggcccaccctgatgaggccagactttgagaaccgggagttcctgagcaccaccaagatccaccagagcgtggtggagaccttcatccagcagtgccagttcttcttctacaacggggagatcgtggagaccaccaacatcgtggcccctcctccacccagcaaccctggccagctggtggagcccatggtgcccctgcagctgcccccacccctgcagccccagctgatccagccccagctgcagacagaccccctgggcatcatctag

SEQ ID NO: 167946 - DNA, 4509 bp, synthetic construct; identical to SEQ ID NO: 167942
  misc_feature 1..4509: note = Description of Artificial Sequence: Synthetic coding sequence
  source 1..4509: mol_type = other DNA

SEQ ID NO: 167947 - DNA, 414 bp, synthetic construct
  misc_feature 1..414: note = Description of Artificial Sequence: Synthetic coding sequence
  source 1..414: mol_type = other DNA
atgcccctgcaggacctggtgacagctgagaagcccatccccctgtttgtggagaagtgtgtggagttcatcgaggacaccggcctgtgcacagagggcctgtacagagtgtctggcaacaagacagaccaggacaacatccagaagcagtttgaccaggaccacaacatcaacctggtgtccatggaggtgacagtgaatgctgtggccggggccctgaaggccttctttgctgacctgcctgaccccctcatcccctacagcctgcaccctgagctgctggaggccgccaagatcccagacaagacagagcggctgcacgccctgaaggagatcgtgaagaagttccaccctgtgaactatgatgtgttccgctacgtgatcacccacctgaacagagtgtcccagcagtag

SEQ ID NO: 167948 - DNA, 114 bp, synthetic construct
  misc_feature 1..114: note = Description of Artificial Sequence: Synthetic coding sequence
  source 1..114: mol_type = other DNA
atgatggccaagaacaaggagccccggccccccagctacaccatcagcatcgtgggcctgtctggaacagagaaggacaagggcaactgtggggtgggcaagagctgcctgtag

SEQ ID NO: 167949 - DNA, 423 bp, synthetic construct
  misc_feature 1..423: note = Description of Artificial Sequence: Synthetic coding sequence
  source 1..423: mol_type = other DNA
atgatggccaagaacaaggagccccggccccccagctacaccatcagcatcgtgggcctgtctggaacagagaaggacaagggcaactgtggggtgggcaagagctgcctgtgcaacagatttgtgcgcagcaaggcagatgagtactacccagagcacacctctgtgctgagcaccatcgactttggaggccgggtggtgaacaatgaccacttcctgtactggggagacatcatccagaacagtgaagatggagtggagtgcaagatccacgtgattgagcagacagagttcattgatgaccagaccttcctgccccacaggagcaccaacctgcagccctacatcaagagagctgctgccagcaagctgcagagcgctgagaagctgatgtacatctgcacagaccagctgggcctgtag

SEQ ID NO: 167950 - DNA, 4506 bp, synthetic construct; identical to SEQ ID NO: 167944
  misc_feature 1..4506: note = Description of Artificial Sequence: Synthetic coding sequence
  source 1..4506: mol_type = other DNA

SEQ ID NO: 167951 - DNA, 2316 bp, synthetic construct
  misc_feature 1..2316: note = Description of Artificial Sequence: Synthetic coding sequence
  source 1..2316: mol_type = other DNA
atgagcggccgctctgtgcggctgcggtctgtgcccatccagagcctgtctgagctggagcgggcccggctgcaggaggtggccttctaccagctgcagcaggactgtgacctgagctgccagatcaccatccccaaggatggccagaagaggaagaagagcctgaggaagaagctggacagcctgggcaaggagaagaacaaggacaaggagttcatcccccaggccttcggcatgcccctgagccaggtgattgccaatgaccgggcctacaagctgaagcaggacctgcagagagatgagcagaaggatgccagtgactttgtggccagcctgctgccctttggaaacaagaggcagaacaaggagctgagcagcagcaacagcagcctgagcagcaccagcgagaccccaaatgaaagcaccagccccaacaccccagagcccgccccccgggccaggagaagaggagccatgtctgtggacagcatcacagacctggatgacaaccagagccggctgctggaggccctgcagctgagcctgcctgctgaggcccagagcaagaaggagaaggcccgggacaagaagctgagcctgaaccccatctaccggcaggtgccccggctggtggacagctgctgccagcacctggagaagcacggcctgcagacagtgggcatcttccgggtgggcagcagcaagaagagggtgcggcagctgcgggaggagtttgaccggggcattgatgtgtccctggaggaggagcacagcgtgcatgatgtggccgccctgctgaaggagttcctgcgggacatgccagaccccctgctgacccgggagctgtacacagccttcatcaacaccctgctgctggagcctgaggagcagctgggcaccctgcagctgctgatctacctgctgcccccctgcaactgtgacaccctgcaccggctgctgcagttcctgagcatcgtggcccggcatgctgatgacaacatcagcaaggatggccaggaggtgacaggcaacaagatgaccagcctgaacctggccaccatcttcggccccaacctgctgcacaagcagaagagcagtgacaaggagttctctgtgcagagcagcgcccgggcagaggagagcacagccatcatcgctgtggtgcagaagatgattgaaaattatgaggccctcttcatggtgcccccagacctgcagaatgaggtgctgatcagcctgctggagacagatcctgatgtggtggactacctgctgcggaggaaggccagccagagcagcagcccagacatgctgcagagcgaggtgtccttctctgtgggcggccgccacagcagcacagacagcaacaaggccagcagcggggacatcagcccctatgacaacaacagccctgtgctgtctgagaggagcctgctggccatgcaggaggatgctgcccctgggggcagcgagaagctgtacagagtgcccggccagttcatgctggtgggccacctgagcagcagcaagagccgggagagcagccctggcccccggctgggcaaggacctgtctgaggagccctttgacatctggggcacctggcacagcaccctgaagagcggcagcaaggaccccggcatgacaggcagcagcggggacatctttgagagcagcagcctgcgggccggcccctgcagcctgagccagggcaacctgagccccaactggccccgctggcagggcagccctgctgagctggacagcgacacccagggcgcccggaggacccaggccgccgccccagccacagagggccgggcccaccctgctgtgtcccgggcctgcagcaccccccacgtgcaggtggccggcaaggccgagcggcccacagcccggtctgagcagtacctgaccctgagcggggcccatgacctgtctgagagcgagctggatgtggccggcctgcagagccgggccaccccccagtgccagaggccccacggcagcggcagagatgacaagaggcctcctccaccctacccaggccctgggaagccagctgctgctgctgcctggatccagggccccccagagggcgtggagacccccacagaccagggcggccaggccgctgagcgggagcagcaggtgacccagaagaagctgagcagcgccaacagcctgcctgctggggagcaggacagcccccggctgggagatgctggctggctggactggcagcgggagcgctggcagatctgggagctgctgagcacagacaacccagatgccctgcctgagaccctggtgtag

SEQ ID NO: 167952 - DNA, 2925 bp, synthetic construct
  misc_feature 1..2925: note = Description of Artificial Sequence: Synthetic coding sequence
  source 1..2925: mol_type = other DNA
atgtctgcccagagcctgctgcacagcgtcttcagctgcagcagccctgccagcagcagcgctgccagcgccaagggcttcagcaagaggaagctgcggcagaccaggagcctggaccctgccctgattggaggctgcggcagtgatgaagctggagctgagggcagcgcccggggggccacagctggccgcctgtacagccccagcctgcctgctgagagcctgggcccccggctggccagcagcagccggggccccccaccccgggccacccggctgcccccacctggccccctgtgcagcagcttcagcacccccagcaccccccaggagaagagccccagcggcagcttccactttgattatgaggtgcccctgggccggggcggcctgaagaagtccatggcctgggacctgcccagcgtgctggccggccctgccagcagccgcagcgccagcagcatcctgtgcagcagcggcggcggccccaacggcatctttgccagcccccggcgctggctgcagcagaggaagttccagagccccccagacagccggggccacccctacgtggtgtggaagtctgagggggacttcacctggaacagcatgagcggccgctctgtgcggctgcggtctgtgcccatccagagcctgtctgagctggagcgggcccggctgcaggaggtggccttctaccagctgcagcaggactgtgacctgagctgccagatcaccatccccaaggatggccagaagaggaagaagagcctgaggaagaagctggacagcctgggcaaggagaagaacaaggacaaggagttcatcccccaggccttcggcatgcccctgagccaggtgattgccaatgaccgggcctacaagctgaagcaggacctgcagagagatgagcagaaggatgccagtgactttgtggccagcctgctgcccttcggcaacaagaggcagaacaaggagctgagcagcagcaacagcagcctgagcagcaccagcgagaccccaaatgaaagcaccagccccaacaccccagagcccgccccccgggcccggcggcggggggccatgtctgtggacagcatcacagacctggatgacaaccagagccggctgctggaggccctgcagctgagcctgcctgctgaggcccagagcaagaaggagaaggcccgggacaagaagctgagcctgaaccccatctaccggcaggtgccccggctggtggacagctgctgccagcacctggagaagcacggcctgcagacagtgggcatcttccgggtgggcagcagcaagaagagggtgcggcagctgcgggaggagtttgaccggggcattgatgtgtccctggaggaggagcacagcgtgcatgatgtggccgccctgctgaaggagttcctgcgggacatgccagaccccctgctgacccgggagctgtacacagccttcatcaacaccctgctgctggagcctgaggagcagctgggcaccctgcagctgctgatctacctgctgcccccctgcaactgtgacaccctgcaccggctgctgcagttcctgagcatcgtggcccggcatgctgatgacaacatcagcaaggatggccaggaggtgactggaaacaagatgaccagcctgaacctggccaccatcttcggccccaacctgctgcacaagcagaagagcagtgacaaggagttctctgtgcagagcagcgcccgggcagaggagagcacagccatcatcgctgtggtgcagaagatgattgagaactatgaggccctcttcatggtgcccccagacctgcagaatgaggtgctgatcagcctgctggagacagatcctgatgtggtggactacctgctgcggaggaaggccagccagagcagcagcccagacatgctgcagagcgaggtgtccttctctgtgggcggccgccacagcagcacagacagcaacaaggccagcagcggggacatcagcccctatgacaacaacagccctgtgctgtctgagaggagcctgctggccatgcaggaggatgctgcccctgggggcagcgagaagctgtacagagtgcccggccagttcatgctggtgggccacctgagcagcagcaagagccgggagagcagccctggcccccggctgggcaaggacctgtctgaggagccctttgacatctggggcacctggcacagcaccctgaagagcggcagcaaggaccccggcatgacaggcagcagcggggacatctttgagagcagcagcctgcgggccggcccctgcagcctgagccagggcaacctgagccccaactggccccgctggcagggcagccctgctgagctggacagcgacacccagggcgcccggaggacccaggccgccgccccagccacagagggccgggcccaccctgctgtgtcccgggcctgcagcacccctcatgtgcaggtggccggcaaggccgagcggcccacagcccggtctgagcagtacctgaccctgagcggggcccatgacctgtctgagagcgagctggatgtggccggcctgcagagccgggccaccccccagtgccagaggcctcatggcagcggcagagatgacaagaggcctcctccaccctacccaggccctgggaagccagctgctgctgctgcctggatccagggccccccagagggcgtggagacccccacagaccagggcggccaggccgctgagcgggagcagcaggtgacccagaagaagctgagcagcgccaacagcctgcctgctggggagcaggacagcccccggctgggagatgctggctggctggactggcagcgggagcgctggcagatctgggagctgctgagcacagacaacccagatgccctgcctgagaccctggtgtag

SEQ ID NO: 167953 - DNA, 1806 bp, synthetic construct
  misc_feature 1..1806: note = Description of Artificial Sequence: Synthetic coding sequence
  source 1..1806: mol_type = other DNA
ctggagctgtatgacctgcagatcctgggcaccaagccacccatgaacagcgacacccacaggaactttgaccccacagccaccctgaggaaccagggcgacttcacctggaacagcatgagcggccgctctgtgcggctgcggtctgtgcccatccagagcctgtctgagctggagcgggcccggctgcaggaggtggccttctaccagctgcagcaggactgtgacctgagctgccagatcaccatccccaaggatggccagaagaggaagaagagcctgaggaagaagctggacagcctgggcaaggagaagaacaaggacaaggagttcatcccccaggccttcggcatgcccctgagccaggtgattgccaatgaccgggcctacaagctgaagcaggacctgcagagagatgagcagaaggatgccagtgactttgtggccagcctgctgcccttcggcaacaagaggcagaacaaggagctgagcagcagcaacagcagcctgagcagcaccagcgagaccccaaatgaaagcaccagccccaacaccccagagcccgccccccgggcccggcggcggggggccatgtctgtggacagcatcacagacctggatgacaaccagagccggctgctggaggccctgcagctgagcctgcctgctgaggcccagagcaagaaggagaaggcccgggacaagaagctgagcctgaaccccatctaccggcaggtgccccggctggtggacagctgctgccagcacctggagaagcacggcctgcagacagtgggcatcttccgggtgggcagcagcaagaagagggtgcggcagctgcgggaggagtttgaccggggcattgatgtgtccctggaggaggagcacagcgtgcatgatgtggccgccctgctgaaggagttcctgcgggacatgccagaccccctgctgacccgggagctgtacacagccttcatcaacaccctgctgctggagcctgaggagcagctgggcaccctgcagctgctgatctacctgctgcccccctgcaactgtgacaccctgcaccggctgctgcagttcctgagcatcgtggcccggcatgctgatgacaacatcagcaaggatggccaggaggtgactggaaacaagatgaccagcctgaacctggccaccatcttcggccccaacctgctgcacaagcagaagagcagtgacaaggagttctctgtgcagagcagcgcccgggcagaggagagcacagccatcatcgctgtggtgcagaagatgattgagaactatgaggccctcttcatggtgcccccagacctgcagaatgaggtgctgatcagcctgctggagacagatcctgatgtggtggactacctgctgcggaggaaggccagccagagcagcagcccagacatgctgcagagcgaggtgtccttctctgtgggcggccgccacagcagcacagacagcaacaaggccagcagcggggacatcagcccctatgacaacaacagccctgtgctgtctgagaggagcctgctggccatgcaggaggatgctgcccctgggggcagcgagaagctgtacagagtgcccggccagttcatgctggtgggccacctgagcagcagcaagagccgggagagcagccctggcccccggctgggcaaaggaaactggagcctggccagccgccgctggcccaagcaggccaccctgctgctgctgcacgtggcctggtgtggggccctgcggaccttcagcagcagcctgccctacctgatgttcctgtag

SEQ ID NO: 167954 - DNA, 2298 bp, synthetic construct
  misc_feature 1..2298: note = Description of Artificial Sequence: Synthetic coding sequence
  source 1..2298: mol_type = other DNA
atgtctgcccagagcctgctgcacagcgtcttcagctgcagcagccctgccagcagcagcgctgccagcgccaagggcttcagcaagaggaagctgcggcagaccaggagcctggaccctgccctgattggaggctgcggcagtgatgaagctggagctgagggcagcgcccggggggccacagctggccgcctgtacagccccagcctgcctgctgagagcctgggcccccggctggccagcagcagccggggccccccaccccgggccacccggctgcccccacctggccccctgtgcagcagcttcagcacccccagcaccccccaggagaagagccccagcggcagcttccactttgattatgaggtgcccctgggccggggcggcctgaagaagtccatggcctgggacctgcccagcgtgctggccggccctgccagcagccgcagcgccagcagcatcctgtgcagcagcggcggcggccccaacggcatctttgccagcccccggcgctggctgcagcagaggaagttccagagccccccagacagccggggccacccctacgtggtgtggaagtctgagggggacttcacctggaacagcatgagcggccgctctgtgcggctgcggtctgtgcccatccagagcctgtctgagctggagcgggcccggctgcaggaggtggccttctaccagctgcagcaggactgtgacctgagctgccagatcaccatccccaaggatggccagaagaggaagaagagcctgaggaagaagctggacagcctgggcaaggagaagaacaaggacaaggagttcatcccccaggccttcggcatgcccctgagccaggtgattgccaatgaccgggcctacaagctgaagcaggacctgcagagagatgagcagaaggatgccagtgactttgtggccagcctgctgcccttcggcaacaagaggcagaacaaggagctgagcagcagcaacagcagcctgagcagcaccagcgagaccccaaatgaaagcaccagccccaacaccccagagcccgccccccgggcccggcggcggggggccatgtctgtggacagcatcacagacctggatgacaaccagagccggctgctggaggccctgcagctgagcctgcctgctgaggcccagagcaagaaggagaaggcccgggacaagaagctgagcctgaaccccatctaccggcaggtgccccggctggtggacagctgctgccagcacctggagaagcacggcctgcagacagtgggcatcttccgggtgggcagcagcaagaagagggtgcggcagctgcgggaggagtttgaccggggcattgatgtgtccctggaggaggagcacagcgtgcatgatgtggccgccctgctgaaggagttcctgcgggacatgccagaccccctgctgacccgggagctgtacacagccttcatcaacaccctgctgctggagcctgaggagcagctgggcaccctgcagctgctgatctacctgctgcccccctgcaactgtgacaccctgcaccggctgctgcagttcctgagcatcgtggcccggcatgctgatgacaacatcagcaaggatggccaggaggtgactggaaacaagatgaccagcctgaacctggccaccatcttcggccccaacctgctgcacaagcagaagagcagtgacaaggagttctctgtgcagagcagcgcccgggcagaggagagcacagccatcatcgctgtggtgcagaagatgattgagaactatgaggccctcttcatggtgcccccagacctgcagaatgaggtgctgatcagcctgctggagacagatcctgatgtggtggactacctgctgcggaggaaggccagccagagcagcagcccagacatgctgcagagcgaggtgtccttctctgtgggcggccgccacagcagcacagacagcaacaaggccagcagcggggacatcagcccctatgacaacaacagccctgtgctgtctgagaggagcctgctggccatgcaggaggatgctgcccctgggggcagcgagaagctgtacagagtgcccggccagttcatgctggtgggccacctgagcagcagcaagagccgggagagcagccctggcccccggctgggcaaaggaaactggagcctggccagccgccgctggcccaagcaggccaccctgctgctgctgcacgtggcctggtgtggggccctgcggaccttcagcagcagcctgccctacctgatgttcctgtag

SEQ ID NO: 167955 - DNA, 2073 bp, synthetic construct
  misc_feature 1..2073: note = Description of Artificial Sequence: Synthetic coding sequence
  source 1..2073: mol_type = other DNA
atgtctgcccagagcctgctgcacagcgtcttcagctgcagcagccctgccagcagcagcgctgccagcgccaagggcttcagcaagaggaagctgcggcagaccaggagcctggaccctgccctgattggaggctgcggcagtgatgaagctggagctgagggcagcgcccggggggccacagctggccgcctgtacagccccagcctgcctgctgagagcctgggcccccggctggccagcagcagccggggccccccaccccgggccacccggctgcccccacctggccccctgtgcagcagcttcagcacccccagcaccccccaggagaagagccccagcggcagcttccactttgattatgaggtgcccctgggccggggcggcctgaagaagtccatggcctgggacctgcccagcgtgctggccggccctgccagcagccgcagcgccagcagcatcctgtgcagcagcggcggcggccccaacggcatctttgccagcccccggcgctggctgcagcagaggaagttccagagccccccagacagccggggccacccctacgtggtgtggaagtctgagctggagctgtatgacctgcagatcctgggcaccaagccacccatgaacagcgacacccacaggaactttgaccccacagccaccctgaggaaccagggcgacttcacctggaacagcatgagcggccgctctgtgcggctgcggtctgtgcccatccagagcctgtctgagctggagcgggcccggctgcaggaggtggccttctaccagctgcagcaggactgtgacctgagctgccagatcaccatccccaaggatggccagaagaggaagaagagcctgaggaagaagctggacagcctgggcaaggagaagaacaaggacaaggagttcatcccccaggccttcggcatgcccctgagccaggtgattgccaatgaccgggcctacaagctgaagcaggacctgcagagagatgagcagaaggatgccagtgactttgtggccagcctgctgcccttcggcaacaagaggcagaacaaggagctgagcagcagcaacagcagcctgagcagcaccagcgagaccccaaatgaaagcaccagccccaacaccccagagcccgccccccgggcccggcggcggggggccatgtctgtggacagcatcacagacctggatgacaaccagagccggctgctggaggccctgcagctgagcctgcctgctgaggcccagagcaagaaggagaaggcccgggacaagaagctgagcctgaaccccatctaccggcaggtgccccggctggtggacagctgctgccagcacctggagaagcacggcctgcagacagtgggcatcttccgggtgggcagcagcaagaagagggtgcggcagctgcgggaggagtttgaccggggcattgatgtgtccctggaggaggagcacagcgtgcatgatgtggccgccctgctgaaggagttcctgcgggacatgccagaccccctgctgacccgggagctgtacacagccttcatcaacaccctgctgctggagcctgaggagcagctgggcaccctgcagctgctgatctacctgctgcccccctgcaactgtgacaccctgcaccggctgctgcagttcctgagcatcgtggcccggcatgctgatgacaacatcagcaaggatggccaggaggtgactggaaacaagatgaccagcctgaacctggccaccatcttcggccccaacctgctgcacaagcagaagagcagtgacaaggagttctctgtgcagagcagcgcccgggcagaggagagcacagccatcatcgctgtggtgcagaagatgattgagaactatgaggccctcttcatggtgcccccagacctgcagaatgaggtgctgatcagcctgctggagacagatcctgatgtggtggactacctgctgcggaggaaggccagccagagcagcaccagctctgtgctgcctgctgctgtgcaggcctgcccccagtacccagcctccatgttcaccccctag

SEQ ID NO: 167956 - DNA, 2316 bp, synthetic construct; identical to SEQ ID NO: 167951
  misc_feature 1..2316: note = Description of Artificial Sequence: Synthetic coding sequence
  source 1..2316: mol_type = other DNA

SEQ ID NO: 167957 - DNA, 1404 bp, synthetic construct
  misc_feature 1..1404: note = Description of Artificial Sequence: Synthetic coding sequence
  source 1..1404: mol_type = other DNA
atgtaccgcatctttggagacttcacctggaacagcatgagcggccgctctgtgcggctgcggtctgtgcccatccagagcctgtctgagctggagcgggcccggctgcaggaggtggccttctaccagctgcagcaggactgtgacctgagctgccagatcaccatccccaaggatggccagaagaggaagaagagcctgaggaagaagctggacagcctgggcaaggagaagaacaaggacaaggagttcatcccccaggccttcggcatgcccctgagccaggtgattgccaatgaccgggcctacaagctgaagcaggacctgcagagagatgagcagaaggatgccagtgactttgtggccagcctgctgccctttggaaacaagaggcagaacaaggagctgagcagcagcaacagcagcctgagcagcaccagcgagaccccaaatgaaagcaccagccccaacaccccagagcccgccccccgggccaggagaagaggagccatgtctgtggacagcatcacagacctggatgacaaccagagccggctgctggaggccctgcagctgagcctgcctgctgaggcccagagcaagaaggagaaggcccgggacaagaagctgagcctgaaccccatctaccggcaggtgccccggctggtggacagctgctgccagcacctggagaagcacggcctgcagacagtgggcatcttccgggtgggcagcagcaagaagagggtgcggcagctgcgggaggagtttgaccggggcattgatgtgtccctggaggaggagcacagcgtgcatgatgtggccgccctgctgaaggagttcctgcgggacatgccagaccccctgctgacccgggagctgtacacagccttcatcaacaccctgctgctggagcctgaggagcagctgggcaccctgcagctgctgatctacctgctgcccccctgcaactgtgacaccctgcaccggctgctgcagttcctgagcatcgtggcccggcatgctgatgacaacatcagcaaggatggccaggaggtgacaggcaacaagatgaccagcctgaacctggccaccatcttcggccccaacctgctgcacaagcagaagagcagtgacaaggagttctctgtgcagagcagcgcccgggcagaggagagcacagccatcatcgctgtggtgcagaagatgattgaaaattatgaggccctcttcatggtgcccccagacctgcagaatgaggtgctgatcagcctgctggagacagatcctgatgtggtggactacctgctgcggaggaaggccagccagagcagcaccagctctgtgctgcctgctgctgtgcaggcctgcccccagtacccagcctccatgttcaccccctag

SEQ ID NO: 167958 - DNA, 1815 bp, synthetic construct
  misc_feature 1..1815: note = Description of Artificial Sequence: Synthetic coding sequence
  source 1..1815: mol_type = other DNA
atgaagaggctgcacatcttcggccccaagatccacagcagcggcggcctgtggcagcagaagggggacttcacctggaacagcatgagcggccgctctgtgcggctgcggtctgtgcccatccagagcctgtctgagctggagcgggcccggctgcaggaggtggccttctaccagctgcagcaggactgtgacctgagctgccagatcaccatccccaaggatggccagaagaggaagaagagcctgaggaagaagctggacagcctgggcaaggagaagaacaaggacaaggagttcatcccccaggccttcggcatgcccctgagccaggtgattgccaatgaccgggcctacaagctgaagcaggacctgcagagagatgagcagaaggatgccagtgactttgtggccagcctgctgccctttggaaacaagaggcagaacaaggagctgagcagcagcaacagcagcctgagcagcaccagcgagaccccaaatgaaagcaccagccccaacaccccagagcccgccccccgggccaggagaagaggagccatgtctgtggacagcatcacagacctggatgacaaccagagccggctgctggaggccctgcagctgagcctgcctgctgaggcccagagcaagaaggagaaggcccgggacaagaagctgagcctgaaccccatctaccggcaggtgccccggctggtggacagctgctgccagcacctggagaagcacggcctgcagacagtgggcatcttccgggtgggcagcagcaagaagagggtgcggcagctgcgggaggagtttgaccggggcattgatgtgtccctggaggaggagcacagcgtgcatgatgtggccgccctgctgaaggagttcctgcgggacatgccagaccccctgctgacccgggagctgtacacagccttcatcaacaccctgctgctggagcctgaggagcagctgggcaccctgcagctgctgatctacctgctgcccccctgcaactgtgacaccctgcaccggctgctgcagttcctgagcatcgtggcccggcatgctgatgacaacatcagcaaggatggccaggaggtgacaggcaacaagatgaccagcctgaacctggccaccatcttcggccccaacctgctgcacaagcagaagagcagtgacaaggagttctctgtgcagagcagcgcccgggcagaggagagcacagccatcatcgctgtggtgcagaagatgattgaaaattatgaggccctcttcatggtgcccccagacctgcagaatgaggtgctgatcagcctgctggagacagatcctgatgtggtggactacctgctgcggaggaaggccagccagagcagcagcccagacatgctgcagagcgaggtgtccttctctgtgggcggccgccacagcagcacagacagcaacaaggccagcagcggggacatcagcccctatgacaacaacagccctgtgctgtctgagaggagcctgctggccatgcaggaggatgctgcccctgggggcagcgagaagctgtacagagtgcccggccagttcatgctggtgggccacctgagcagcagcaagagccgggagagcagccctggcccccggctgggcaaggacctgtctgaggagccctttgacatctggggcacctggcacagcaccctgaagagcggcagcaaggaccccggcatgacaggcaccacccccctgctgaacatcagcagccaggaggaccaccggcagaaggacctgcggctcatcttcaagatctacccctag

SEQ ID NO: 167959 - DNA, 918 bp, synthetic construct
  misc_feature 1..918: note = Description of Artificial Sequence: Synthetic coding sequence
  source 1..918: mol_type = other DNA
atggccggccaggaccctgccctgagcaccagccaccccttctatgatgtggcccggcacggcatcctgcaggtggccggagatgacagatttggaagaagagtggtgaccttcagctgctgcaggatgccacccagccatgagctggaccaccagaggctgctggagtacctgaagtacaccctggaccagtatgtggagaatgactacaccatcgtgtacttccactacggcctgaacagcaggaacaagcccagcctgggctggctgcagagcgcctacaaggagtttgacaggaagtacaagaagaacctgaaggccctgtatgtggtgcaccccaccagcttcatcaaggtgctgtggaacatcctgaagcccctcatcagccacaagtttgggaagaaggtgatctacttcaactacctgtctgagctgcacgagcacctgaagtatgaccagctggtgattcctcctgaggtgctgcgctatgatgagaagctgcagagcctgcacgagggccgcaccccaccacccaccaagaccccaccaccccggccccccctgcccacccagcagtttggagtgtccctgcagtacctgaaggacaagaaccagggcgagctgatcccccctgtgctgcgcttcaccgtgacctacctgcgggagaagggcctgaggacagagggcctcttccgccgcagcgcctctgtgcagacagtgcgggagatccagaggctgtacaaccagggcaagcctgtgaactttgatgattatggagacatccacatcccagctgtgatcctgaagaccttcctgcgggagctgccccagcccctgctgaccttccaggcctatgagcagatcctgggcatcacctgtgtgcctggagagcacctgcagcagaatgagcagctgtag

SEQ ID NO: 167960 - DNA, 1302 bp, synthetic construct
  misc_feature 1..1302: note = Description of Artificial Sequence: Synthetic coding sequence
  source 1..1302: mol_type = other DNA
atggccggccaggaccctgccctgagcaccagccaccccttctatgatgtggcccggcacggcatcctgcaggtggccggagatgacagatttggaagaagagtggtgaccttcagctgctgcaggatgccacccagccatgagctggaccaccagaggctgctggagtacctgaagtacaccctggaccagtatgtggagaatgactacaccatcgtgtacttccactacggcctgaacagcaggaacaagcccagcctgggctggctgcagagcgcctacaaggagtttgacaggaagtacaagaagaacctgaaggccctgtatgtggtgcaccccaccagcttcatcaaggtgctgtggaacatcctgaagcccctcatcagccacaagtttgggaagaaggtgatctacttcaactacctgtctgagctgcacgagcacctgaagtatgaccagctggtgattcctcctgaggtgctgcgctatgatgagaagctgcagagcctgcacgagggccgcaccccaccacccaccaagaccccaccaccccggccccccctgcccacccagcagtttggagtgtccctgcagtacctgaaggacaagaaccagggcgagctgatcccccctgtgctgcgcttcaccgtgacctacctgcgggagaagggcctgaggacagagggcctcttccgccgcagcgcctctgtgcagacagtgcgggagatccagaggctgtacaaccagggcaagcctgtgaactttgatgattatggagacatccacatcccagctgtgatcctgaagaccttcctgcgggagctgccccagcccctgctgaccttccaggcctatgagcagatcctgggcatcacctgtgtggagagcagcctgcgggtgacaggctgccggcagatcctgcggagcctgcctgagcacaactacgtggtgctgcgctacctgatgggcttcctgcatgctgtgtcccgggagagcatcttcaacaagatgaacagcagcaacctggcctgtgtgtttggcctgaacctgatctggcccagccagggcgtgagcagcctgagcgccctggtgcccctgaacatgttcacagagctgctgattgagtactatgagaagatcttcagcaccccagaggcccctggagagcacggcctggccccctgggagcagggcagcagagctgcccccctgcaggaggccgtgcccaggacccaggccaccggcctgaccaagcccaccctgccccccagccccctgatggccgcccggcggcggctgtag

SEQ ID NO: 167961 - DNA, 1668 bp, synthetic construct
  misc_feature 1..1668: note = Description of Artificial Sequence: Synthetic coding sequence
  source 1..1668: mol_type = other DNA
atgagcagccccagcctgagtgacctgggcaagcgggagcctgctgctgctgctgatgagcggggcacccagcagaggcgggcctgtgccaatgccacctggaacagcatccacaatggagtgattgctgtgttccagaggaagggcctgcctgaccaggagctgttcagcctgaatgaaggagtgcggcagctgctgaagacagagctgggcagcttcttcacagagtacctgcagaaccagctgctgaccaagggcatggtgatcctgcgggacaagatccgcttctatgaggagctgcagagggacaaggctgctgctgctgctgtgctgggcgctgtgaggaagaggccttctgtggtgcccatggccggccaggaccctgccctgagcaccagccaccccttctatgatgtggcccggcacggcatcctgcaggtggccggagatgacagatttggaagaagagtggtgaccttcagctgctgcaggatgccacccagccatgagctggaccaccagaggctgctggagtacctgaagtacaccctggaccagtatgtggagaatgactacaccatcgtgtacttccactacggcctgaacagcaggaacaagcccagcctgggctggctgcagagcgcctacaaggagtttgacaggaagtacaagaagaacctgaaggccctgtatgtggtgcaccccaccagcttcatcaaggtgctgtggaacatcctgaagcccctcatcagccacaagtttgggaagaaggtgatctacttcaactacctgtctgagctgcacgagcacctgaagtatgaccagctggtgattcctcctgaggtgctgcgctatgatgagaagctgcagagcctgcacgagggccgcaccccaccacccaccaagaccccaccaccccggccccccctgcccacccagcagtttggagtgtccctgcagtacctgaaggacaagaaccagggcgagctgatcccccctgtgctgcgcttcaccgtgacctacctgcgggagaagggcctgaggacagagggcctcttccgccgcagcgcctctgtgcagacagtgcgggagatccagaggctgtacaaccagggcaagcctgtgaactttgatgattatggagacatccacatcccagctgtgatcctgaagaccttcctgcgggagctgccccagcccctgctgaccttccaggcctatgagcagatcctgggcatcacctgtgtggagagcagcctgcgggtgacaggctgccggcagatcctgcggagcctgcctgagcacaactacgtggtgctgcgctacctgatgggcttcctgcatgctgtgtcccgggagagcatcttcaacaagatgaacagcagcaacctggcctgtgtgtttggcctgaacctgatctggcccagccagggcgtgagcagcctgagcgccctggtgcccctgaacatgttcacagagctgctgattgagtactatgagaagatcttcagcaccccagaggcccctggagagcacggcctggccccctgggagcagggcagcagagctgcccccctgcaggaggccgtgcccaggacccaggccaccggcctgaccaagcccaccctgccccccagccccctgatggccgcccggcggcggctgtag

SEQ ID NO: 167962 - DNA, 1395 bp, synthetic construct
  misc_feature 1..1395: note = Description of Artificial Sequence: Synthetic coding sequence
  source 1..1395: mol_type = other DNA
atggccggccaggaccctgccctgagcaccagccaccccttctatgatgtggcccggcacggcatcctgcaggtggccggagatgacagatttggaagaagagtggtgaccttcagctgctgcaggatgccacccagccatgagctggaccaccagaggctgctggagtacctgaagtacaccctggaccagtatgtggagaatgactacaccatcgtgtacttccactacggcctgaacagcaggaacaagcccagcctgggctggctgcagagcgcctacaaggagtttgacaggaaggatggagacctgaccatgtggccccggctggtgagcaacagcaagctgaagaggagcagccacctgagcctgcccaagtactgggactaccgctacaagaagaacctgaaggccctgtatgtggtgcaccccaccagcttcatcaaggtgctgtggaacatcctgaagcccctcatcagccacaagtttgggaagaaggtgatctacttcaactacctgtctgagctgcacgagcacctgaagtatgaccagctggtgatccccccagaggtgctgcgctatgatgagaagctgcagagcctgcacgagggccgcaccccaccacccaccaagaccccaccacccaggcctcccctgcccacccagcagtttggagtgtccctgcagtacctgaaggacaagaaccagggcgagctgatcccccctgtgctgcgcttcaccgtgacctacctgcgggagaagggcctgaggacagagggcctcttcagaagaagtgcctctgtgcagacagtgcgggagatccagaggctgtacaaccagggcaagcctgtgaactttgatgattatggagacatccacatcccagctgtgatcctgaagaccttcctgcgggagctgccccagcccctgctgaccttccaggcctatgagcagatcctgggcatcacctgtgtggagagcagcctgcgggtgacaggctgccggcagatcctgcggagcctgcctgagcacaactacgtggtgctgcgctacctgatgggcttcctgcatgctgtgtcccgggagagcatcttcaacaagatgaacagcagcaacctggcctgtgtgtttggcctgaacctgatctggcccagccagggcgtgagcagcctgagcgccctggtgcccctgaacatgttcacagagctgctgattgagtactatgagaagatcttcagcaccccagaggcccctggagaacatggcctggccccctgggagcagggcagccgggccgcccccctgcaggaggccgtgcccaggacccaggccaccggcctgaccaagcccaccctgccccccagccccctgatggccgcccggcggcggctgtag

SEQ ID NO: 167963 - DNA, 393 bp, synthetic construct
  misc_feature 1..393: note = Description of Artificial Sequence: Synthetic coding sequence
  source 1..393: mol_type = other DNA
atggccggccaggaccctgccctgagcaccagccaccccttctatgatgtggcccggcacggcatcctgcaggtggccggagatgacagatttggaagaagagtggtgaccttcagctgctgcaggatgccacccagccatgagctggaccaccagaggctgctggagtacctgaagtacaccctggaccagtatgtggagaatgactacaccatcgtgtacttccactacggcctgaacagcaggaacaagcccagcctgggctggctgcagagcgcctacaaggagtttgacaggaaggatggagacctgaccatgtggccccggctggtgagcaacagcaagctgaagaggagcagccacctgagcctgcccaagtactgggactactag

SEQ ID NO: 167964 - DNA, 348 bp, synthetic construct
  misc_feature 1..348: note = Description of Artificial Sequence: Synthetic coding sequence
  source 1..348: mol_type = other DNA
atggccggccaggaccctgccctgagcaccagccaccccttctatgatgtggcccggcacggcatcctgcaggtggccggagatgacagatttggaagaagagtggtgaccttcagctgctgcaggatgccacccagccatgagctggaccaccagaggctgctggagtacctgaagtacaccctggaccagtatgtggagaatgactacaccatcgtgtacttccactacggcctgaacagcaggaacaagcccagcctgggctggctgcagagcgcctacaaggagtttgacaggaagtacaagaagaacctgaaggccctgtatgtggtgcaccccaccagctag

SEQ ID NO: 167965 - DNA, 1932 bp, synthetic construct
  misc_feature 1..1932: note = Description of Artificial Sequence: Synthetic coding sequence
  source 1..1932: mol_type = other DNA
atgaggaccctgcggcggctgaagttcatgagcagccccagcctgagtgacctgggcaagcgggagcctgctgctgctgctgatgagcggggcacccagcagaggcgggcctgtgccaatgccacctggaacagcatccacaacggggtgattgctgtgttccagaggaagggcctgcctgaccaggagctgttcagcctgaatgaaggagtgcggcagctgctgaagacagagctgggcagcttcttcacagagtacctgcagaaccagctgctgaccaagggcatggtgatcctgcgggacaagatccgcttctatgagggccagaagctgctggacagcctggccgagacctgggacttcttcttcagtgatgtgctgcccatgctgcaggccatcttctaccctgtgcagggcaaggagcccagcgtgcggcagctggccctgctgcacttcagaaatgccatcaccctgtctgtgaagctggaggatgccctggcccgggcccacgcccgggtgcccccagccatcgtgcagatgctgctggtgctgcagggcgtgcatgagagccggggcgtgacagaggactacctgcggctggagaccctggtgcagaaggtggtgagcccctacctgggcacctacggcctgcacagcagcgagggccccttcacccacagctgcatcctggagctgcagagggacaaggctgctgctgctgctgtgctgggcgctgtgaggaagaggccttctgtggtgcccatggccggccaggaccctgccctgagcaccagccaccccttctatgatgtggcccggcacggcatcctgcaggtggccggagatgacagatttggaagaagagtggtgaccttcagctgctgcaggatgccacccagccatgagctggaccaccagaggctgctggagtacaagaagaacctgaaggccctgtatgtggtgcaccccaccagcttcatcaaggtgctgtggaacatcctgaagcccctcatcagccacaagtttgggaagaaggtgatctacttcaactacctgtctgagctgcacgagcacctgaagtatgaccagctggtgattcctcctgaggtgctgcgctatgatgagaagctgcagagcctgcacgagggccgcaccccaccacccaccaagaccccaccaccccggccccccctgcccacccagcagtttggagtgtccctgcagtacctgaaggacaagaaccagggcgagctgatcccccctgtgctgcgcttcaccgtgacctacctgcgggagaagggcctgaggacagagggcctcttccgccgcagcgcctctgtgcagacagtgcgggagatccagaggctgtacaaccagggcaagcctgtgaactttgatgattatggagacatccacatcccagctgtgatcctgaagaccttcctgcgggagctgccccagcccctgctgaccttccaggcctatgagcagatcctgggcatcacctgtgtggagagcagcctgcgggtgacaggctgccggcagatcctgcggagcctgcctgagcacaactacgtggtgctgcgctacctgatgggcttcctgcatgctgtgtcccgggagagcatcttcaacaagatgaacagcagcaacctggcctgtgtgtttggcctgaacctgatctggcccagccagggcgtgagcagcctgagcgccctggtgcccctgaacatgttcacagagctgctgattgagtactatgagaagatcttcagcaccccagaggcccctggagagcacggcctggccccctgggagcagggcagcagagctgcccccctgcaggaggccgtgcccaggacccaggccaccggcctgaccaagcccaccctgccccccagccccctgatggccgcccggcggcggctgtag

SEQ ID NO: 167966 - DNA, 2322 bp, synthetic construct
  misc_feature 1..2322: note = Description of Artificial Sequence: Synthetic coding sequence
  source 1..2322: mol_type = other DNA
cagacccagacagagagcctgaccctgtgcagcggggaggccgagcggcggggcaaggaggagtggccagacagccaccactacccaggccccaccccagcccctgagagcagtgatggcccccacaaggtgacagtgctggccaccatgctgagcagccgctggtggcccagctcctggggcatcctgggcctgggccccaggagccccccccggggcagccagctgtgtgccctgtatgccttcacctacacaggagcagatggccagcaggtgtccctggccgagggggaccgcttcctgctgctgaggaagaccaacagcgactggtggctggcccggcggctggaggcccccagcaccagccggcccatctttgtgcctgctgcctacatgattgaggagagcatccccagccagagccccaccaccgtcatccctggccagctgctgtggaccccaggccccaagctgttccacggcagcctggaggagctgagccaggccctgcccagccgggcccaggccagcagcgagcagcccccacccctgcccaggaagatgtgccgctctgtgtccacagacaacctgagccccagcctgctgaagcccttccaggagggccccagcggccgcagcctgagccaggaggacctgcccagcgaggccagcgccagcacagctggcccccagcccctgatgtctgagccccctgtgtactgcaacctggtggacctgcggcgctgccccaggagccccccacctggccctgcctgccccctgctgcagaggctggatgcctgggagcagcacctggaccccaacagcggccgctgcttctacatcaacagcctgaccggctgcaagtcctggaagcccccaagaagaagccgctctgagaccaaccctggctccatggagggcacccagaccctgaagaggaacaatgatgtgctgcagccccaggccaagggcttcagaagtgacaccggcaccccagagcccctggacccccagggcagcctgagcctgagccagaggaccagccagctggaccccccagccctgcaggccccccggcccctgccccagctgctggatgacccccatgaggtggagaagagcggcctgctgaacatgaccaagatcgcccagggcggcaggaagctgaggaagaactggggccccagctgggtggtgctgaccggcaacagcctggtgttctaccgggagcccccacccacagcccccagcagcggctggggccctgctggcagcaggcctgagagctctgtggacctgcggggagctgccctggcccacggccgccacctgagcagcagaagaaatgtgctgcacatccgcaccatccctggccacgagttcctgctgcagagcgaccacgagacagagctgcgggcctggcaccgggccctgaggacagtgattgagcggctggaccgggagaaccccctggagctgcggctgagcggcagcggccctgctgagctgtctgctggggaggatgaggaggaggagagcgagctggtgtccaagcccctgctgcggctgagcagcagaagaagcagcatccggggccctgagggcacagagcagaacagagtgaggaacaagctgaagaggctcatcgccaagaggcctcccctgcagagcctgcaggagcggggcctgctgcgggaccaggtgtttggctgccagctggagagcctgtgccagcgggagggggacacagtgcccagcttcctgcggctgtgcatcgctgctgtggacaagaggggcctggatgtggatggcatctacagagtgtctggcaacctggccgtggtgcagaagctgcgcttcctggtggaccgggagagagctgtgaccagtgatggccgctacgtgtttcctgagcagcccggccaggagggccgcctggacctggacagcacagagtgggatgacatccacgtggtgactggagccctgaagctgttcctgcgggagctgccccagcccctggtgccccccctgctgctgccccacttccgggccgccctggccctgagccagatccaggagctgattggctccatgcccaagcccaaccacgacaccctgcgctacctgctggagcacctgtgccgggtgattgcccacagcgacaagaacaggatgaccccccacaacctgggcatcgtgtttggccccaccctcttccggcctgagcaggagaccagtgaccctgctgcccacgccctgtacccaggccagctggtgcagctgatgctgaccaacttcaccagcctcttcccctag

SEQ ID NO: 167967 - DNA, 2253 bp, synthetic construct
  misc_feature 1..2253: note = Description of Artificial Sequence: Synthetic coding sequence
  source 1..2253: mol_type = other DNA
atgctgagcagccgctggtggcccagctcctggggcatcctgggcctgggccccaggagccccccccggggcagccagctgtgtgccctgtatgccttcacctacaccggggctgatggccagcaggtgtccctggccgagggggaccgcttcctgctgctgaggaagaccaacagcgactggtggctggcccggcggctggaggcccccagcaccagccggcccatctttgtgcctgctgcctacatgattgaggagagcatccccagccagagccccaccaccgtcatccctggccagctgctgtggaccccaggccccaagctgttccacggcagcctggaggagctgagccaggccctgcccagccgggcccaggccagcagcgagcagcccccacccctgcccaggaagatgtgccgctctgtgtccacagacaacctgagccccagcctgctgaagcccttccaggagggccccagcggccgcagcctgagccaggaggacctgcccagcgaggccagcgccagcacagctggcccccagcccctgatgtctgagccccctgtgtactgcaacctggtggacctgcggcgctgccccaggagccccccacctggccctgcctgccccctgctgcagaggctggatgcctgggagcagcacctggaccccaacagcggccgctgcttctacatcaacagcctgaccggctgcaagtcctggaagccaccccggcgcagccgctctgagaccaaccctggctccatggagggcacccagaccctgaagagaaataatgatgtgctgcagccccaggccaagggcttcagaagtgacaccggcaccccagagcccctggacccccagggcagcctgagcctgagccagaggaccagccagctggaccccccagccctgcaggccccccggcccctgccccagctgctggatgacccccatgaggtggagaagagcggcctgctgaacatgaccaagatcgcccagggcggcaggaagctgaggaagaactggggccccagctgggtggtgctgactggaaacagcctggtgttctaccgggagcccccacccacagcccccagcagcggctggggccctgctggcagcaggcctgagagctctgtggacctgcggggggccgccctggcccacggccgccacctgagcagcagaagaaatgtgctgcacatccgcaccatccctggccacgagttcctgctgcagagcgaccatgaaacagagctgcgggcctggcaccgggccctgaggacagtcatcgagcggctggtgcgctgggtggaggcccggcgggaggcccccaccggccgggaccagggcagcggggaccgggagaaccccctggagctgcggctgagcggcagcggccctgctgagctgtctgctggggaggatgaggaggaggagagcgagctggtgtccaagcccctgctgcggctgagcagcagaagaagcagcatccggggccctgagggcacagagcagaacagagtgaggaacaagctgaagaggctcatcgccaagaggcctcccctgcagagcctgcaggagcggggcctgctgcgggaccaggtgtttggctgccagctggagagcctgtgccagcgggagggggacacagtgcccagcttcctgcggctgtgcatcgctgctgtggacaagaggggcctggatgtggatggcatctacagagtgtctggcaacctggccgtggtgcagaagctgcgcttcctggtggaccgggagagagctgtgaccagtgatggccgctacgtgtttcctgagcagcccggccaggagggccgcctggacctggacagcacagagtgggatgacatccacgtggtgactggagccctgaagctgttcctgcgggagctgccccagcccctggtgccccccctgctgctgccccacttccgggccgccctggccctgtctgagagcgagcagtgcctgagccagatccaggagctgattggctccatgcccaagcccaaccacgacaccctgcgctacctgctggagcacctgtgcagggtcatcgcccacagcgacaagaacaggatgaccccccacaacctgggcatcgtgtttggccccaccctcttccggcctgagcaggagaccagtgaccctgctgcccacgccctgtacccaggccagctggtgcagctgatgctgaccaacttcaccagcctcttcccctag

SEQ ID NO: 167968 - DNA, 2196 bp, synthetic construct
  misc_feature 1..2196: note = Description of Artificial Sequence: Synthetic coding sequence
  source 1..2196: mol_type = other DNA
atgctgagcagccgctggtggcccagctcctggggcatcctgggcctgggccccaggagccccccccggggcagccagctgtgtgccctgtatgccttcacctacaccggggctgatggccagcaggtgtccctggccgagggggaccgcttcctgctgctgaggaagaccaacagcgactggtggctggcccggcggctggaggcccccagcaccagccggcccatctttgtgcctgctgcctacatgattgaggagagcatccccagccagagccccaccaccgtcatccctggccagctgctgtggaccccaggccccaagctgttccacggcagcctggaggagctgagccaggccctgcccagccgggcccaggccagcagcgagcagcccccacccctgcccaggaagatgtgccgctctgtgtccacagacaacctgagccccagcctgctgaagcccttccaggagggccccagcggccgcagcctgagccaggaggacctgcccagcgaggccagcgccagcacagctggcccccagcccctgatgtctgagccccctgtgtactgcaacctggtggacctgcggcgctgccccaggagccccccacctggccctgcctgccccctgctgcagaggctggatgcctgggagcagcacctggaccccaacagcggccgctgcttctacatcaacagcctgaccggctgcaagtcctggaagccaccccggcgcagccgctctgagaccaaccctggctccatggagggcacccagaccctgaagagaaataatgatgtgctgcagccccaggccaagggcttcagaagtgacaccggcaccccagagcccctggacccccagggcagcctgagcctgagccagaggaccagccagctggaccccccagccctgcaggccccccggcccctgccccagctgctggatgacccccatgaggtggagaagagcggcctgctgaacatgaccaagatcgcccagggcggcaggaagctgaggaagaactggggccccagctgggtggtgctgactggaaacagcctggtgttctaccgggagcccccacccacagcccccagcagcggctggggccctgctggcagcaggcctgagagctctgtggacctgcggggggccgccctggcccacggccgccacctgagcagcagaagaaatgtgctgcacatccgcaccatccctggccacgagttcctgctgcagagcgaccatgaaacagagctgcgggcctggcaccgggccctgaggacagtcatcgagcggctggaccgggagaaccccctggagctgcggctgagcggcagcggccctgctgagctgtctgctggagaagatgaggaggaggagagcgagctggtgtccaagcccctgctgcggctgagcagccgccgcagcagcatccggggccctgagggcacagagcagaacagagtgaggaacaagctgaagaggctgattgccaagaggcctcccctgcagagcctgcaggagcggggcctgctgcgggaccaggtgtttggctgccagctggagagcctgtgccagcgggagggggacacagtgcccagcttcctgcggctgtgcatcgctgctgtggacaagaggggcctggatgtggatggcatctacagagtgtctggcaacctggccgtggtgcagaagctgcgcttcctggtggaccgggagagagctgtgaccagtgatggccgctacgtgtttcctgagcagcccggccaggagggccgcctggacctggacagcacagagtgggatgacatccacgtggtgactggagccctgaagctgttcctgcgggagctgccccagcccctggtgccccccctgctgctgccccacttccgggccgccctggccctgtctgagagcgagcagtgcctgagccagatccaggagctgattggctccatgcccaagcccaaccacgacaccctgcgctacctgctggagcacctgtgccgggtgattgcccacagcgacaagaacaggatgaccccccacaacctgggcatcgtgtttggccccaccctcttccggcctgagcaggagaccagtgaccctgctgcccacgccctgtacccaggccagctggtgcagctgatgctgaccaacttcaccagcctcttcccctag

SEQ ID NO: 167969 - DNA, 2466 bp, synthetic construct
  misc_feature 1..2466: note = Description of Artificial Sequence: Synthetic coding sequence
  source 1..2466: mol_type = other DNA
atgaggcggggcagcagtgacagctgtgccagcggcagccaggtggccggcaccaccgtggccggccctgcccaccctgagagcctgaccctgtgcagcggggaggccgagcggcggggcaaggaggagtggccagacagccaccactacccaggccccaccccagcccctgagagcagtgatggcccccacaaggtgacagtgctggccaccatgctgagcagccgctggtggcccagctcctggggcatcctgggcctgggccccaggagccccccccggggcagccagctgtgtgccctgtatgccttcacctacacaggagcagatggccagcaggtgtccctggccgagggggaccgcttcctgctgctgaggaagaccaacagcgactggtggctggcccggcggctggaggcccccagcaccagccggcccatctttgtgcctgctgcctacatgattgaggagagcatccccagccagagccccaccaccgtcatccctggccagctgctgtggaccccaggccccaagctgttccacggcagcctggaggagctgagccaggccctgcccagccgggcccaggccagcagcgagcagcccccacccctgcccaggaagatgtgccgctctgtgtccacagacaacctgagccccagcctgctgaagcccttccaggagggccccagcggccgcagcctgagccaggaggacctgcccagcgaggccagcgccagcacagctggcccccagcccctgatgtctgagccccctgtgtactgcaacctggtggacctgcggcgctgccccaggagccccccacctggccctgcctgccccctgctgcagaggctggatgcctgggagcagcacctggaccccaacagcggccgctgcttctacatcaacagcctgaccggctgcaagtcctggaagcccccaagaagaagccgctctgagaccaaccctggctccatggagggcacccagaccctgaagaggaacaatgatgtgctgcagccccaggccaagggcttcagaagtgacaccggcaccccagagcccctggacccccagggcagcctgagcctgagccagaggaccagccagctggaccccccagccctgcaggccccccggcccctgccccagctgctggatgacccccatgaggtggagaagagcggcctgctgaacatgaccaagatcgcccagggcggcaggaagctgaggaagaactggggccccagctgggtggtgctgaccggcaacagcctggtgttctaccgggagcccccacccacagcccccagcagcggctggggccctgctggcagcaggcctgagagctctgtggacctgcggggagctgccctggcccacggccgccacctgagcagcagaagaaatgtgctgcacatccgcaccatccctggccacgagttcctgctgcagagcgaccacgagacagagctgcgggcctggcaccgggccctgaggacagtgattgagcggctggtgcgctgggtggaggcccggcgggaggcccccaccggccgggaccagggcagcggggaccgggagaaccccctggagctgcggctgagcggcagcggccctgctgagctgtctgctggagaagatgaggaggaggagagcgagctggtgtccaagcccctgctgcggctgagcagccgccgcagcagcatccggggccctgagggcacagagcagaacagagtgaggaacaagctgaagaggctgattgccaagaggcctcccctgcagagcctgcaggagcggggcctgctgcgggaccaggtgtttggctgccagctggagagcctgtgccagcgggagggggacacagtgcccagcttcctgcggctgtgcatcgctgctgtggacaagaggggcctggatgtggatggcatctacagagtgtctggcaacctggccgtggtgcagaagctgcgcttcctggtggaccgggagagagctgtgaccagtgatggccgctacgtgtttcctgagcagcccggccaggagggccgcctggacctggacagcacagagtgggatgacatccacgtggtgactggagccctgaagctgttcctgcgggagctgccccagcccctggtgccccccctgctgctgccccacttccgggccgccctggccctgtctgagagcgagcagtgcctgagccagatccaggagctgattggctccatgcccaagcccaaccacgacaccctgcgctacctgctggagcacctgtgccgggtgattgcccacagcgacaagaacaggatgaccccccacaacctgggcatcgtgtttggccccaccctcttccggcctgagcaggagaccagtgaccctgctgcccacgccctgtacccaggccagctggtgcagctgatgctgaccaacttcaccagcctcttcccctag

SEQ ID NO: 167970 - DNA, 900 bp, synthetic construct
  misc_feature 1..900: note = Description of Artificial Sequence: Synthetic coding sequence
  source 1..900: mol_type = other DNA
atgaccaagatcgcccagggcggcaggaagctgaggaagaactggggccccagctgggtggtgctgactggaaacagcctggtgttctaccgggagcccccacccacagcccccagcagcggctggggccctgctggcagcaggcctgagagctctgtggacctgcggggggccgccctggcccacggccgccacctgagcagcagaagaaatgtgctgcacatccgcaccatccctggccacgagttcctgctgcagagcgaccatgaaacagagctgcgggcctggcaccgggccctgaggacagtcatcgagcggctggaccgggagaaccccctggagctgcggctgagcggcagcggccctgctgagctgtctgctggagaagatgaggaggaggagagcgagctggtgtccaagcccctgctgcggctgagcagccgccgcagcagcatccggggccctgagggcacagagcagaacagagtgaggaacaagctgaagaggctgattgccaagaggcctcccctgcagagcctgcaggagcggggcctgctgcgggaccaggtgtttggctgccagctggagagcctgtgccagcgggagggggacacagtgcccagcttcctgcggctgtgcatcgctgctgtggacaagaggggcctggatgtggatggcatctacagagtgtctggcaacctggccgtggtgcagaagctgcgcttcctggtggaccgggagagagctgtgaccagtgatggccgctacgtgtttcctgagcagcccggccaggccctgtctgagagcgagcagtgcctgagccagatccaggagctgattggctccatgcccaagcccaaccacgacaccctgcgctacctgctggagcacctgtgctag

SEQ ID NO: 167971 - DNA, 1923 bp, synthetic construct
  misc_feature 1..1923: note = Description of Artificial Sequence: Synthetic coding sequence
  source 1..1923: mol_type = other DNA
atgctgagcagccgctggtggcccagctcctggggcatcctgggcctgggccccaggagccccccccggggcagccagctgtgtgccctgtatgccttcacctacaccggggctgatggccagcaggtgtccctggccgagggggaccgcttcctgctgctgaggaagaccaacagcgactggtggctggcccggcggctggaggcccccagcaccagccggcccatctttgtgcctgctgcctacatgattgaggagagcatccccagccagagccccaccaccgtcatccctggccagctgctgtggaccccaggccccaagctgttccacggcagcctggaggagctgagccaggccctgcccagccgggcccaggccagcagcgagcagcccccacccctgcccaggaagatgtgccgctctgtgtccacagacaacctgagccccagcctgctgaagcccttccaggagggccccagcggccgcagcctgagccaggaggacctgcccagcgaggccagcgccagcacagctggcccccagcccctgatgtctgagccccctgtgtactgcaacctggtggacctgcggcgctgccccaggagccccccacctggccctgcctgccccctgctgcagaggctggatgcctgggagcagcacctggaccccaacagcggccgctgcttctacatcaacagcctgaccggctgcaagtcctggaagccaccccggcgcagccgctctgagaccaaccctggctccatggagggcacccagaccctgaagagaaataatgatgtgctgcagccccaggccaagggcttcagaagtgacaccggcaccccagagcccctggacccccagggcagcctgagcctgagccagaggaccagccagctggaccccccagccctgcaggccccccggcccctgccccagctgctggatgacccccatgaggtggagaagagcggcctgctgaacatgaccaagatcgcccagggcggcaggaagctgaggaagaactggggccccagctgggtggtgctgactggaaacagcctggtgttctaccgggagcccccacccacagcccccagcagcggctggggccctgctggcagcaggcctgagagctctgtggacctgcggggggccgccctggcccacggccgccacctgagcagcagaagaaatgtgctgcacatccgcaccatccctggccacgagttcctgctgcagagcgaccatgaaacagagctgcgggcctggcaccgggccctgaggacagtcatcgagcggctggaccgggagaaccccctggagctgcggctgagcggcagcggccctgctgagctgtctgctggagaagatgaggaggaggagagcgagctggtgtccaagcccctgctgcggctgagcagccgccgcagcagcatccggggccctgagggcacagagcagaacagagtgaggaacaagctgaagaggctgattgccaagaggcctcccctgcagagcctgcaggagcggggcctgctgcgggaccaggtgtttggctgccagctggagagcctgtgccagcgggagggggacacagtgcccagcttcctgcggctgtgcatcgctgctgtggacaagaggggcctggatgtggatggcatctacagagtgtctggcaacctggccgtggtgcagaagctgcgcttcctggtggaccgggagagagctgtgaccagtgatggccgctacgtgtttcctgagcagcccggccaggagggccgcctggacctggacagcacagagtgggatgacatccacgtggtgactggagccctgaagctgttcctgcgggagctgccccagcccctggtgccccccctgctgctgccccacttccgggccgccctgggctag

SEQ ID NO: 167972 - DNA, 1644 bp, synthetic construct
  misc_feature 1..1644: note = Description of Artificial Sequence: Synthetic coding sequence
  source 1..1644: mol_type = other DNA
atgtctgagccccctgtgtactgcaacctggtggacctgcggcgctgccccaggagccccccacctggccctgcctgccccctgctgcagaggctggatgcctgggagcagcacctggaccccaacagcggccgctgcttctacatcaacagcctgaccggctgcaagtcctggaagccaccccggcgcagccgctctgagaccaaccctggctccatggagggcacccagaccctgaagagaaataatgatgtgctgcagccccaggccaagggcttcagaagtgacaccggcaccccagagcccctggacccccagggcagcctgagcctgagccagaggaccagccagctggaccccccagccctgcaggccccccggcccctgccccagctgctggatgacccccatgaggtggagaagagcggcctgctgaacatgaccaagatcgcccagggcggcaggaagctgaggaagaactggggccccagctgggtggtgctgactggaaacagcctggtgttctaccgggagcccccacccacagcccccagcagcggctggggccctgctggcagcaggcctgagagctctgtggacctgcggggggccgccctggcccacggccgccacctgagcagcagaagaaatgtgctgcacatccgcaccatccctggccacgagttcctgctgcagagcgaccatgaaacagagctgcgggcctggcaccgggccctgaggacagtcatcgagcggctggaccgggagaaccccctggagctgcggctgagcggcagcggccctgctgagctgtctgctggagaagatgaggaggaggagagcgagctggtgtccaagcccctgctgcggctgagcagccgccgcagcagcatccggggccctgagggcacagagcagaacagagtgaggaacaagctgaagaggctgattgccaagaggcctcccctgcagagcctgcaggagcggggcctgctgcgggaccaggtgtttggctgccagctggagagcctgtgccagcgggagggggacacagtgcccagcttcctgcggctgtgcatcgctgctgtggacaagaggggcctggatgtggatggcatctacagagtgtctggcaacctggccgtggtgcagaagctgcgcttcctggtggaccgggagagagctgtgaccagtgatggccgctacgtgtttcctgagcagcccggccaggagggccgcctggacctggacagcacagagtgggatgacatccacgtggtgactggagccctgaagctgttcctgcgggagctgccccagcccctggtgccccccctgctgctgccccacttccgggccgccctggccctgtctgagagcgagcagtgcctgagccagatccaggagctgattggctccatgcccaagcccaaccacgacaccctgcgctacctgctggagcacctgtgccgggtgattgcccacagcgacaagaacaggatgaccccccacaacctgggcatcgtgtttggccccaccctcttccggcctgagcaggagaccagtgaccctgctgcccacgccctgtacccaggccagctggtgcagctgatgctgaccaacttcaccagcctcttcccctag

SEQ ID NO: 167973 - DNA, 894 bp, synthetic construct
  misc_feature 1..894: note = Description of Artificial Sequence: Synthetic coding sequence
  source 1..894: mol_type = other DNA
atgtctgagccccctgtgtactgcaacctggtggacctgcggcgctgccccaggagccccccacctggccctgcctgccccctgctgcagaggctggatgcctgggagcagcacctggaccccaacagcggccgctgcttctacatcaacagcctgaccggctgcaagtcctggaagccaccccggcgcagccgctctgagaccaaccctggctccatggagggcacccagaccctgaagagaaataatgatgtgctgcagccccaggccaagggcttcagaagtgacaccggcaccccagagcccctggacccccagggcagcctgagcctgagccagaggaccagccagctggaccccccagccctgcaggccccccggcccctgccccagctgctggatgacccccatgaggtggagaagagcggcctgctgaacatgaccaagatcgcccagggcggcaggaagctgaggaagaactggggccccagctgggtggtgctgactggaaacagcctggtgttctaccgggagcccccacccacagcccccagcagcggctggggccctgctggcagcaggcctgagagctctgtggacctgcggggggccgccctggcccacggccgccacctgagcagcagaagaaatgtgctgcacatccgcaccatccctggccacgagttcctgctgcagagcgaccatgaaacagagctgcgggcctggcaccgggccctgaggacagtcatcgagcggctggaccgggagaaccccctggagctgcggctgagcggcagcggccctgctgagctgtctgctggagaagatgaggaggaggagagcgagctggtgtccaagcccctgctgcggctgagcagccgccgcagcagctag

SEQ ID NO: 167974 - DNA, 186 bp, synthetic construct
  misc_feature 1..186: note = Description of Artificial Sequence: Synthetic coding sequence
  source 1..186: mol_type = other DNA
atgtctgagccccctgtgtactgcaacctggtggacctgcggcgctgccccaggagccccccacctggccctgcctgccccctgctgcagaggctggatgcctgggagcagcacctggaccccaacagcggccgctgcttctacatcaacagcctgaccggctgcaagtcctggaagccaccctag

SEQ ID NO: 167975 - DNA, 471 bp, synthetic construct
  misc_feature 1..471: note = Description of Artificial Sequence: Synthetic coding sequence
  source 1..471: mol_type = other DNA
tgagaaggagacacagtgcccagcttcctgcggctgtgcatcgctgctgtggacaagaggggcctggatgtggatggcatctacagagtgtctggcaacctggccgtggtgcagaagctgcgcttcctggtggaccgggagagagctgtgaccagtgatggccgctacgtgtttcctgagcagcccggccaggccctgtctgagagcgagcagtgcctgagccagatccaggagctgattggctccatgcccaagcccaaccacgacaccctgcgctacctgctggagcacctgtgcagggtcatcgcccacagcgacaagaacaggatgaccccccacaacctgggcatcgtgtttggccccaccctcttccggcctgagcaggagaccagtgaccctgctgcccacgccctgtacccaggccagctggtgcagctgatgctgaccaacttcaccagcctcttcccctag

SEQ ID NO: 167976 - DNA, 396 bp, synthetic construct
  misc_feature 1..396: note = Description of Artificial Sequence: Synthetic coding sequence
  source 1..396: mol_type = other DNA
atgtctgagccccctgtgtactgcaacctggtggacctgcggcgctgccccaggagccccccacctggccctgcctgccccctgctgcagaggctggatgcctgggagcagcacctggaccccaacagcggccgctgcttctacatcaacagcctgaccggctgcaagtcctggaagccaccccggcgcagccgctctgagaccaaccctggctccatggagggcacccagaccctgaagagaaataatgatgtgctgcagccccaggccaagggcttcagaagtgacaccggcaccccagagcccctggacccccagggcagcctgagcctgagccagaggaccagccagctggaccccccagccctgcaggccccccggcccctgccccagtag

SEQ ID NO: 167977 - DNA, 2028 bp, synthetic construct
  misc_feature 1..2028: note = Description of Artificial Sequence: Synthetic coding sequence
  source 1..2028: mol_type = other DNA
gagcccggcagcggcagccgggaccccggccctggcattgctgagccagacctgggccggcctgctggccacctgcgggctgacaccagccctgctgagccccgggagatggaggactttgcccggggggccgccagccctggccccagccggcccggcctggtgcctgtgtccatcatcggggctgaagatgaagattttgaaaatgagctggagaccaacagcgaggagcagaacagccagttccagagcctggagcaggtgaagaggaggcctgcccacctgatggccctgctgcagcacgtggccctgcagtttgagcccggccccctgctgtgctgcctgcatgctgacatgctgggcagcctgggccccaaggaggccaagaaggccttcctggacttctaccacagcttcctggagaagacagctgtgctgcgggtgcctgtgcccccaaatgtggcctttgagctggacaggaccagggctgacctgatcagtgaagatgtgcagaggagatttgtgcaggaggtggtgcagagccagcaggtggccgtgggccggcagctggaggacttccgcagcaagaggctgatgggcatgaccccctgggagcaggagctggcccagctggaggcctgggtgggccgggaccgggccagctatgaggcccgggagcggcacgtggccgagcggctgctgatgcacctggaggagatgcagcacaccatcagcacagatgaggagaagtctgctgctgtggtgaatgccatcggcctgtacatgaggcacctgggcgtgaggaccaagagcggggacaagaagagcggcaggaacttcttcaggaagaaggtgatgggcaacagaagaagtgatgagcccgccaagaccaagaagggcctgagcagcatcctggatgctgcccgctggaacagaggagagccccaggtgcctgacttccgccacctgaaggccgaggtggatgctgagaagccaggggccacagacaggaagggcggcgtgggcatgcccagccgggacaggaacatcggggcccctggccaggacaccccaggagtgtccctgcaccccctgagcctggacagcccagaccgggagcccggggctgatgcccccctggagctgggggacagcagcccccagggccccatgagcctggagagcctggcccctcctgagagcacagatgaaggagctgagacagagcgctgccccggctggggcgctggggccggcggcgtggcctactgggccctggtgggcggctgccgggtgacagctgccatctgtgcctgcctgagccaggccctggcccctcatgcccccctgctgctgagcggcagcggccacagcagccccttcttcttccccttcctgatcagcctgctgctgccccactgcccccccttcctgctgtccttcctgttccccctgctgctgcccctgctgcccttcttcaccaaccccagccccccacccttcctgagcaccacccccagcatctccttcatcagcagccccctgctgagccacctgcccccacccctcttccccccccacagcagcctgacctgggtgttcttcccccacctgcccagccccagcgacctgcctgccaccttccacttcttcagccccagccccttctccttcaagccaccctgccccctgccccccaccccccggctggccccagcctcctggtgccccagcctgaaccccccacccctgtgcagcgtgccctggggcccctgccccccctacagctggggcgccggcagcgccagctgccccagcctgtgccgctgctttggagaccccctggtgggcgccggccgctgggtgcgcttccacctgggcccccccctgaccctgtgccccagcctgccccggcgctggaagcgctgggtgcccggcccctgggtgggggagggcctggcccccccacccttcctgcctgccccacccctgagcccctggcccctgccccccctgcacagcctgtag

SEQ ID NO: 167978 - DNA, 2784 bp, synthetic construct
  misc_feature 1..2784: note = Description of Artificial Sequence: Synthetic coding sequence
  source 1..2784: mol_type = other DNA
atggccagcctgagcacctggagcagccctgctgagccccgggagatggaggactttgcccggggagctgccagccctggccccagcaggcctggcctggtgcctgtgtccatcattggagcagaagatgaggactttgaaaatgagctggagaccaacagcgaggagcagaacagccagttccagagcctggagcaggtgaagagaagacctgcccacctgatggccctgctgcagcacgtggccctgcagtttgagcccggccccctgctgtgctgcctgcacgccgacatgctgggcagcctgggccccaaggaggccaagaaggccttcctggacttctaccacagcttcctggagaagacagctgtgctgcgggtgcctgtgccccccaacgtggcctttgagctggacaggaccagggctgacctgatcagtgaagatgtgcagaggagatttgtgcaggaggtggtgcagagccagcaggtggccgtgggccggcagctggaggacttccgcagcaagaggctgatgggcatgaccccctgggagcaggagctggcccagctggaggcctgggtgggccgggaccgggccagctatgaggcccgggagagacatgtggccgagcggctgctgatgcacctggaggagatgcagcacaccatcagcacagatgaggagaagtctgctgctgtggtgaatgccatcggcctgtacatgaggcacctgggcgtgaggaccaagagcggggacaagaagtctggaagaaacttcttcaggaagaaggtgatgggcaacagaagaagtgatgagcccgccaagaccaagaagggcctgagcagcatcctggatgctgcccgctggaacagaggagagccccaggtgcctgacttccgccacctgaaggccgaggtggatgctgagaagccaggggccacagacagaaaaggaggagtgggcatgcccagccgggacagaaatattggagcccctggccaggacaccccaggagtgtccctgcaccccctgagcctggacagcccagaccgggagcctggagcagatgcccccctggagctgggggacagcagcccccagggccccatgagcctggagagcctggcccctcctgagagcacagatgagggcgctgagacagagagccctgagcctggagatgaaggagagcccggccgcagcggcctggagctggagcctgaggagcccccaggctggagggagctggtgcccccagacaccctgcacagcctgcccaagagccaggtgaagaggcaggaggtgatcagcgagctgctggtgacagaggccgcccacgtgaggatgctgcgggtgctgcatgacctcttcttccagcccatggctgaatgtctcttcttccccctggaggagctgcagaacatcttccccagcctggatgagctgattgaggtgcacagcctcttcctggaccggctgatgaagaggcggcaggagagcggctacctgattgaggagattggagatgtgctgctggccaggtttgatggagctgagggctcctggttccagaagatcagcagccgcttctgcagccggcagagctttgccctggagcagctgaaggccaagcagaggaaggacccccgcttctgtgcctttgtgcaggaggccgagagccggccccgctgccggcggctgcagctgaaggacatgatccccacagagatgcagaggctgaccaagtaccccctgctgctgcagagcatcggccagaacacagaggagcccacagagcgggagaaggtggagctggccgctgagtgctgccgggagatcctgcaccacgtgaaccaggccgtgcgggacatggaggacctgctgcggctgaaggactaccagaggcggctggacctgagccacctgcggcagagcagtgaccccatgctgtctgagttcaagaacctggacatcaccaagaagaagctggtgcatgagggccccctgacctggagggtgaccaaggacaaggctgtggaggtgcacgtgctgctgctggatgacctgctgctgctgctgcagaggcaggatgagcggctgctgctgaagagccacagcaggaccctgacccccaccccagatggcaagaccatgctgcggcctgtgctgcggctgaccagcgccatgacccgggaggtggccacagaccacaaggccttctacgtgctcttcacctgggaccaggaggcccagatctatgagctggtggcccagacagtgtctgagaggaagaactggtgtgccctgatcacagaaacagctggcagcctgaaggtgcctgccccagccagccggcccaagccccggcccagccccagcagcacccgggagcccctgctgagcagcagtgaaaatggaaatggaggccgggagaccagccctgcagatgccaggacagagcgcatcctgagtgacctgctgcccttctgccggcccggccctgagggccagctggccgccacagccctgaggaaggtgctgagcctgaagcagctgctcttccctgctgaggaggacaacggggccggccccccaagagatggagatggagtgcctgggggcggccccctgagccctgcccggacccaggagatccaggagaacctgctgagcctggaggagaccatgaagcagctggaggagctggaggaggagttctgccgcctgcggcccctgctgagccagctgggcggcaacagcgtgccccagcccggctgcacctag

SEQ ID NO: 167979 - DNA, 2640 bp, synthetic construct
  misc_feature 1..2640: note = Description of Artificial Sequence: Synthetic coding sequence
  source 1..2640: mol_type = other DNA
atggaggactttgcccggggggccgccagccctggccccagccggcccggcctggtgcctgtgtccatcatcggggctgaagatgaagattttgaaaatgagctggagaccaacagcgaggagcagaacagccagttccagagcctggagcaggtgaagaggaggcctgcccacctgatggccctgctgcagcacgtggccctgcagtttgagcccggccccctggtgctgcgggtgcctgtgccccccaacgtggcctttgagctggacaggaccagggctgacctgatcagtgaagatgtgcagaggagatttgtgcaggaggtggtgcagagccagcaggtggccgtgggccggcagctggaggacttccgcagcaagaggctgatgggcatgaccccctgggagcaggagctggcccagctggaggcctgggtgggccgggaccgggccagctatgaggcccgggagagacatgtggccgagcggctgctgatgcacctggaggagatgcagcacaccatcagcacagatgaggagaagtctgctgctgtggtgaatgccatcggcctgtacatgaggcacctgggcgtgaggaccaagagcggggacaagaagtctggaagaaacttcttcaggaagaaggtgatgggcaacagaagaagtgatgagcccgccaagaccaagaagggcctgagcagcatcctggatgctgcccgctggaacagaggagagccccaggtgcctgacttccgccacctgaaggccgaggtggatgctgagaagccaggggccacagacagaaaaggaggagtgggcatgcccagccgggacagaaatattggagcccctggccaggacaccccaggagtgtccctgcaccccctgagcctggacagcccagaccgggagcctggagcagatgcccccctggagctgggggacagcagcccccagggccccatgagcctggagagcctggcccctcctgagagcacagatgagggcgctgagacagagagccctgagcctggagatgaaggagagcccggccgcagcggcctggagctggagcctgaggagcccccaggctggagggagctggtgcccccagacaccctgcacagcctgcccaagagccaggtgaagaggcaggaggtgatcagcgagctgctggtgacagaggccgcccacgtgaggatgctgcgggtgctgcatgacctcttcttccagcccatggctgaatgtctcttcttccccctggaggagctgcagaacatcttccccagcctggatgagctgattgaggtgcacagcctcttcctggaccggctgatgaagaggcggcaggagagcggctacctgattgaggagattggagatgtgctgctggccaggtttgatggagctgagggctcctggttccagaagatcagcagccgcttctgcagccggcagagctttgccctggagcagctgaaggccaagcagaggaaggacccccgcttctgtgcctttgtgcaggaggccgagagccggccccgctgccggcggctgcagctgaaggacatgatccccacagagatgcagaggctgaccaagtaccccctgctgctgcagagcatcggccagaacacagaggagcccacagagcgggagaaggtggagctggccgctgagtgctgccgggagatcctgcaccacgtgaaccaggccgtgcgggacatggaggacctgctgcggctgaaggactaccagaggcggctggacctgagccacctgcggcagagcagtgaccccatgctgtctgagttcaagaacctggacatcaccaagaagaagctggtgcatgagggccccctgacctggagggtgaccaaggacaaggctgtggaggtgcacgtgctgctgctggatgacctgctgctgctgctgcagaggcaggatgagcggctgctgctgaagagccacagcaggaccctgacccccaccccagatggcaagaccatgctgcggcctgtgctgcggctgaccagcgccatgacccgggaggtggccacagaccacaaggccttctacgtgctcttcacctgggaccaggaggcccagatctatgagctggtggcccagacagtgtctgagaggaagaactggtgtgccctgatcacagaaacagctggcagcctgaaggtgcctgccccagccagccggcccaagccccggcccagccccagcagcacccgggagcccctgctgagcagcagtgaaaatggaaatggaggccgggagaccagccctgcagatgccaggacagagcgcatcctgagtgacctgctgcccttctgccggcccggccctgagggccagctggccgccacagccctgaggaaggtgctgagcctgaagcagctgctcttccctgctgaggaggacaacggggccggccccccaagagatggagatggagtgcctgggggcggccccctgagccctgcccggacccaggagatccaggagaacctgctgagcctggaggagaccatgaagcagctggaggagctggaggaggagttctgccgcctgcggcccctgctgagccagctgggcggcaacagcgtgccccagcccggctgcacctag

SEQ ID NO: 167980 - DNA, 2739 bp, synthetic construct
  misc_feature 1..2739: note = Description of Artificial Sequence: Synthetic coding sequence
  source 1..2739: mol_type = other DNA
atggaggactttgcccggggggccgccagccctggccccagccggcccggcctggtgcctgtgtccatcatcggggctgaagatgaagattttgaaaatgagctggagaccaacagcgaggagcagaacagccagttccagagcctggagcaggtgaagaggaggcctgcccacctgatggccctgctgcagcacgtggccctgcagtttgagcccggccccctgctgtgctgcctgcatgctgacatgctgggcagcctgggccccaaggaggccaagaaggccttcctggacttctaccacagcttcctggagaagacagctgtgctgcgggtgcctgtgcccccaaatgtggcctttgagctggacaggaccagggctgacctgatcagtgaagatgtgcagaggagatttgtgcaggaggtggtgcagagccagcaggtggccgtgggccggcagctggaggacttccgcagcaagaggctgatgggcatgaccccctgggagcaggagctggcccagctggaggcctgggtgggccgggaccgggccagctatgaggcccgggagcggcacgtggccgagcggctgctgatgcacctggaggagatgcagcacaccatcagcacagatgaggagaagtctgctgctgtggtgaatgccatcggcctgtacatgaggcacctgggcgtgaggaccaagagcggggacaagaagagcggcaggaacttcttcaggaagaaggtgatgggcaacagaagaagtgatgagcccgccaagaccaagaagggcctgagcagcatcctggatgctgcccgctggaacagaggagagccccaggtgcctgacttccgccacctgaaggccgaggtggatgctgagaagccaggggccacagacaggaagggcggcgtgggcatgcccagccgggacaggaacatcggggcccctggccaggacaccccaggagtgtccctgcaccccctgagcctggacagcccagaccgggagcccggggctgatgcccccctggagctgggggacagcagcccccagggccccatgagcctggagagcctggcccctcctgagagcacagatgaaggagctgagacagagagccctgagcctggagatgaaggagagcccggccgcagcggcctggagctggagcctgaggagcccccaggctggagggagctggtgcccccagacaccctgcacagcctgcccaagagccaggtgaagaggcaggaggtgatcagcgagctgctggtgacagaagctgcccacgtgaggatgctgcgggtgctgcatgacctcttcttccagcccatggccgagtgcctcttcttccccctggaggagctgcagaacatcttccccagcctggatgagctgattgaggtgcacagcctcttcctggaccggctgatgaagaggcggcaggagagcggctacctgattgaggagattggagatgtgctgctggccaggtttgatggagctgagggctcctggttccagaagatcagcagccgcttctgcagccggcagagctttgccctggagcagctgaaggccaagcagaggaaggacccccgcttctgtgcctttgtgcaggaggccgagagccggccccgctgccggcggctgcagctgaaggacatgatccccacagagatgcagaggctgaccaagtaccccctgctgctgcagagcatcggccagaacacagaggagcccacagagcgggagaaggtggagctggccgctgagtgctgccgggagatcctgcaccacgtgaaccaggccgtgcgggacatggaggacctgctgcggctgaaggactaccagaggcggctggacctgagccacctgcggcagagcagtgaccccatgctgtctgagttcaagaacctggacatcaccaagaagaagctggtgcatgagggccccctgacctggagggtgaccaaggacaaggctgtggaggtgcacgtgctgctgctggatgacctgctgctgctgctgcagaggcaggatgagcggctgctgctgaagagccacagcaggaccctgacccccaccccagatggcaagaccatgctgcggcctgtgctgcggctgaccagcgccatgacccgggaggtggccacagaccacaaggccttctacgtgctcttcacctgggaccaggaggcccagatctatgagctggtggcccagacagtgtctgagaggaagaactggtgtgccctgatcacagaaacagctggcagcctgaaggtgcctgccccagccagccggcccaagccccggcccagccccagcagcacccgggagcccctgctgagcagcagtgaaaatggaaatggaggccgggagaccagccctgcagatgccaggacagagcgcatcctgagtgacctgctgcccttctgcaggcctggccctgagggccagctggccgccacagccctgaggaaggtgctgagcctgaagcagctgctcttcccagcagaagaagataatggagctggccccccaagagatggagatggagtgcctgggggcggccccctgagccctgcccggacccaggagatccaggagaacctgctgagcctggaggagaccatgaagcagctggaggagctggaggaggagttctgccgcctgcggcccctgctgagccagctgggcggcaacagcgtgccccagcccggctgcacctag

SEQ ID NO: 167981 - DNA, 2847 bp, synthetic construct
  misc_feature 1..2847: note = Description of Artificial Sequence: Synthetic coding sequence
  source 1..2847: mol_type = other DNA
atggccagcctgagcacctggagcagccctgctgagccccgggagatggaggactttgcccggggagctgccagccctggccccagcaggcctggcctggtgcctgtgtccatcattggagcagaagatgaggactttgaaaatgagctggagaccaacagcgaggagcagaacagccagttccagagcctggagcaggtgaagagaagacctgcccacctgatggccctgctgcagcacgtggccctgcagtttgagcccggccccctggtgctgcgggtgcctgtgcccccaaatgtggcctttgagctggacaggaccagggctgacctgatcagtgaagatgtgcagaggagatttgtgcaggaggtggtgcagagccagcaggtggccgtgggccggcagctggaggacttccgcagcaagaggctgatgggcatgaccccctgggagcaggagctggcccagctggaggcctgggtgggccgggaccgggccagctatgaggcccgggagcggcacgtggccgagcggctgctgatgcacctggaggagatgcagcacaccatcagcacagatgaggagaagtctgctgctgtggtgaatgccatcggcctgtacatgaggcacctgggcgtgaggaccaagagcggggacaagaagagcggcaggaacttcttcaggaagaaggtgatgggcaacagaagaagtgatgagcccgccaagaccaagaagggcctgagcagcatcctggatgctgcccgctggaacagaggagagccccaggtgcctgacttccgccacctgaaggccgaggtggatgctgagaagccaggggccacagacaggaagggcggcgtgggcatgcccagccgggacaggaacatcggggcccctggccaggacaccccaggagtgtccctgcaccccctgagcctggacagcccagaccgggagcccggggctgatgcccccctggagctgggggacagcagcccccagggccccatgagcctggagagcctggcccctcctgagagcacagatgaaggagctgagacagagagccctgagcctggagatgaaggagagcccggccgcagcggcctggagctggagcctgaggagcccccaggctggagggagctggtgcccccagacaccctgcacagcctgcccaagagccaggtgaagaggcaggaggtgatcagcgagctgctggtgacagaagctgcccacgtgaggatgctgcgggtgctgcatgacctcttcttccagcccatggccgagtgcctcttcttccccctggaggagctgcagaacatcttccccagcctggatgagctgattgaggtgcacagcctcttcctggaccggctgatgaagaggcggcaggagagcggctacctgattgaggagattggagatgtgctgctggccaggtttgatggagctgagggctcctggttccagaagatcagcagccgcttctgcagccggcagagctttgccctggagcagctgaaggccaagcagaggaaggacccccgcttctgtgcctttgtgcaggaggccgagagccggccccgctgccggcggctgcagctgaaggacatgatccccacagagatgcagaggctgaccaagtaccccctgctgctgcagagcatcggccagaacacagaggagcccacagagcgggagaaggtggagctggccgctgagtgctgccgggagatcctgcaccacgtgaaccaggccgtgcgggacatggaggacctgctgcggctgaaggactaccagaggcggctggacctgagccacctgcggcagagcagtgaccccatgctgtctgagttcaagaacctggacatcaccaagaagaagctggtgcatgagggccccctgacctggagggtgaccaaggacaaggctgtggaggtgcacgtgctgctgctggatgacctgctgctgctgctgcagaggcaggatgagcggctgctgctgaagagccacagcaggaccctgacccccaccccagatggcaagaccatgctgcggcctgtgctgcggctgaccagcgccatgacccgggaggtggccacagaccacaaggccttctacgtgctcttcacctgggaccaggaggcccagatctatgagctggtggcccagacagtgtctgagaggaagaactggtgtgccctgatcacagaaacagctggcagcctgaaggtgcctgccccagccagccggcccaagccccggcccagccccagcagcacccgggagcccctgctgagcagcagtgaaaatggaaatggaggccgggagaccagccctgcagatgccaggacagagcgcatcctgagtgacctgctgcccttctgcaggcctggccctgagggccagctggccgccacagccctgaggaagggcgtgggcggcggcatcctgcccccagagaccccacctgtgtctgcctggggcgagctgtgccccccagcctggctgcacctgcgcttcccccccaggaaggccttctgcaagaaggagagaaatggaggagaagatgtgcgggaccacccccacccccacagctgccgcagcatcagccaccctgagggcctgcggcggggcagctgtggcccccggctgggcggggcccagctgggcctgctggcccctcatgagccccggcccagcctgcccccagccctgtgcctgggggacagcggcctgcacagcggcggccaccacggggaccccggccacctgagcatcgcctgtggcggccaccccagcacccccacccccaagtgcctgcggagcgtcttcatcccctag

SEQ ID NO: 167982 - DNA, 4023 bp, synthetic construct
  misc_feature 1..4023: note = Description of Artificial Sequence: Synthetic coding sequence
  source 1..4023: mol_type = other DNA
atgaggcctcctggcttcctgagccgggcccccagcctgaacagagctgagcggggcatctggagctgcagcatggaccagcgggagcccctgcccccagccccagcagaaaatgagatgaagtatgacaccaacaacaatgaggaggaggagggggagcagtttgattttgattctggagatgagatccctgaggccgaccggcaggcccccagcgcccctgagaccggcggggccggggccagcgaggccccagcccccactggaggagaagatggagctggagctgagaccacccctgtggccgagcccaccaagctggtgctgcccatgaaggtgaacccctacagcgtgattgacatcacccccttccaggaggaccagccccccacccctgtgcccagcgctgaggaggagaatgtgggcctgcacgtgccctgtggctacctggtgcctgtgccctgtggctatgctgtgcccagcaacctgcccctgctgctgcctgcctacagcagccctgtgatcatctgtgccaccagcctggatgaggaggccgagaccccagaggtgacagaggaccggcagcccaacagcctgagcagcgaggagccccccaccagcgaggaccaggtgggccgggaggacagcgccctggcccgctgggccgctgaccctgccaacacagcctggatggagaaccctgaggaggccatctatgatgatgtgcccagagaaaattctgattctgagccagatgagatgatctatgatgatgtggagaatggagatgaaggaggcaacagcagcctggagtatggctggagcagcagcgagtttgagagctatgaggagcagagcgacagcgagtgcaagaatggcatccccaggagcttcctgcggagcaaccacaagaagcagctgagccatgacctgacccggctgaaggagcactatgagaagaagatgagggacctgatggccagcacagtgggcgtggtggagatccagcagctgcggcagaagcatgagctgaagatgcagaagctggtgaaggccgccaaggatggcaccaaggatggcctggagaggaccagggctgctgtgaagaggggccgctccttcatccgcaccaagagcctgattgcccaggaccacaggagcagcctggaggaggagcagaacctcttcattgatgtggactgcaagcaccctgaggccatcctgacccccatgcctgagggcctgagccagcagcaggtggtgcggcgctacatcctgggctctgtggtggacagcgagaagaactacgtggatgccctgaagaggatcctggagcagtatgagaagcccctgtctgagatggagcccaaggtgctgtctgagaggaagctgaagacagtgttctacagagtgaaggagatcctgcagtgccacagcctcttccagatcgccctggccagccgggtgtctgagtgggacagcgtggagatgattggagatgtgtttgtggccagcttcagcaagtccatggtgctggatgcctacagtgaatatgtgaacaacttcagcacagctgtggccgtgctgaagaagacctgtgccaccaagccagccttcctggagttcctgaagcaggagcaggaggccagcccagacaggaccaccctgtacagcctgatgatgaagcccatccagcgcttcccccagttcatcctgctgctgcaggacatgctgaagaacaccagcaagggccacccagaccggctgcccctgcagatggccctgacagagctggagaccctggccgagaagctgaatgaaaggaagagagatgctgaccagagatgtgaggtgaagcagatcgccaaggccatcaatgaaagatacctgaacaagctgctgagcagcggcagccgctacctgatccgcagtgatgacatgattgagaccgtgtacaatgacagaggagagatcgtgaagaccaaggagcggcgggtcttcatgctgaatgatgtgctgatgtgtgccaccgtgagcagccggcccagccatgacagccgggtgatgagcagccagcgctacctgctgaagtggagcgtgcccctgggccacgtggatgccatcgagtatggcagcagcgctggcaccggggagcacagccgccacctggccgtgcaccccccagagagcctggccgtggtggccaatgccaagcccaacaaggtgtacatgggccctggccagctgtaccaggacctgcagaacctgctgcatgacctgaatgtgattggccagatcacccagctgattggcaacctgaagggcaactaccagaacctgaaccagagcgtggcccatgactggaccagcggcctgcagaggctcatcctgaagaaggaggatgagatccgggctgctgactgctgccgcatccagctgcagctgcccgggaagcaggacaagagcggccggcccaccttcttcaccgctgtgttcaacaccttcaccccagccatcaaggagagctgggtgaacagcctgcagatggccaagctggccctggaggaggagaaccacatgggctggttctgtgtggaggatgatggcaaccacatcaagaaggagaagcaccccctgctggtgggccacatgcctgtgatggtggccaagcagcaggagttcaagattggcagctgcacccaccagatgggccagatcgccatcgtgtccttccagaacagcacccccaaggtgattgagtgcttcaacgtggagagccgcatcctgtgcatgctgtatgtgcctgtggaggagaagaggcgggagcccggggcccccccagaccctgagaccccagctgtgcgggccagtgatgtgcccaccatctgtgtgggcacagaggagggcagcatcagcatctacaagagcagccagggcagcaagaaggtgcggctgcagcacttcttcaccccagagaagagcacagtgatgagcctggcctgcaccagccagagcctgtatgccggcctggtgaatggagctgtggccagctatgcccgggccccagatggctcctgggacagcgagccccagaaggtgatcaagctgggcgtgctgcctgtgcgcagcctgctgatgatggaggacaccctgtgggccgccagcggcggccaggtgttcatcatctctgtggagacccatgctgtggagggccagctggaggcccaccaggaggagggcatggtgatcagccacatggctgtgtctggagtgggcatctggatcgccttcaccagcggcagcaccctgcggctcttccacacagagaccctgaagcacctgcaggacatcaacatcgccacccctgtgcacaacatgctgcccggccaccagaggctgtctgtgaccagcctgctggtgtgccacggcctgctgatggtgggcaccagcctgggcgtgctggtggccctgcctgtgccccggctgcagggcatccccaaggtgacaggccggggcatggtgtcctaccacgcccacaacagccctgtgaagttcatcgtgctggccacagccctgcacgagaaggacaaggacaagagccgggacagcctggcccctggccctgagccccaggatgaggaccagaaggatgccctgcccagcggcggggccggcagcagcctgagccagggcgaccctgatgctgccatctggctgggggacagcctgggctccatgacccagaagagtgacctgagcagcagcagcggcagcctgagcctgagccacggcagcagcagcctggagcacagaagtgaggacagcaccatctatgacctgctgaaggaccctgtgtccctgcggagcaaggcccggcgggccaagaaggccaaggccagcagcgccctggtggtgtgtggcggccagggccaccggcgggtgcacaggaaggcccggcagccccaccaggaggagctggcccccaccgtgatggtgtggcagatccccctgctgaacatctag

SEQ ID NO: 167983 - DNA, 4035 bp, synthetic construct
  misc_feature 1..4035: note = Description of Artificial Sequence: Synthetic coding sequence
  source 1..4035: mol_type = other DNA
atggaccagcgggagcccctgcccccagccccagcagaaaatgagatgaagtatgacaccaacaacaatgaggaggaggagggggagcagtttgattttgattctggagatgagatccctgaggccgaccggcaggcccccagcgcccctgagaccggcggggccggggccagcgaggccccagcccccactggaggagaagatggagctggagctgagaccacccctgtggccgagcccaccaagctggtgctgcccatgaaggtgaacccctacagcgtgattgacatcacccccttccaggaggaccagccccccacccctgtgcccagcgctgaggaggagaatgtgggcctgcacgtgccctgtggctacctggtgcctgtgccctgtggctatgctgtgcccagcaacctgcccctgctgctgcctgcctacagcagccctgtgatcatctgtgccaccagcctggatgaggaggagaccccagaggtgacagaagatcggcagcccaacagcctgagcagcgaggagccccccaccagcgaggaccaggtgggcagagaagattctgccctggcccgctgggccgctgaccctgccaacacagcctggatggagaaccctgaggaggccatctatgatgatgtgccccgggagaacagcgacagcgagccagatgagatgatctatgatgatgtggagaatggagatgagggcggcaacagcagcctggagtatggctggagcagcagcgagtttgagagctatgaggagcagagcgacagcgagtgcaagaatggcatccccaggagcttcctgcggagcaaccacaagaagcagctgagccatgacctgacccggctgaaggagcactatgagaagaagatgagggacctgatggccagcacagtgggcgtggtggagatccagcagctgcggcagaagcatgagctgaagatgcagaagctggtgaaggccgccaaggatggcaccaaggatggcctggagaggaccagggctgctgtgaagaggggccgctccttcatccgcaccaagagcctcatcgcccaggaccacaggagcagcctggaggaggagcagaacctcttcattgatgtggactgcaagcaccctgaggccatcctgacccccatgcctgagggcctgagccagcagcaggtggtgcggcgctacatcctgggctctgtggtggacagcgagaagaactacgtggatgccctgaagaggatcctggagcagtatgagaagcccctgtctgagatggagcccaaggtgctgtctgagaggaagctgaagacagtgttctacagagtgaaggagatcctgcagtgccacagcctcttccagatcgccctggccagccgggtgtctgagtgggacagcgtggagatgattggagatgtgtttgtggccagcttcagcaagtccatggtgctggatgcctacagtgaatatgtgaacaacttcagcacagctgtggccgtgctgaagaagacctgtgccaccaagccagccttcctggagttcctgaagcaggagcaggaggccagcccagacaggaccaccctgtacagcctgatgatgaagcccatccagcgcttcccccagttcatcctgctgctgcaggacatgctgaagaacaccagcaagggccacccagaccggctgcccctgcagatggccctgacagagctggagaccctggccgagaagctgaatgaaaggaagagagatgctgaccagagatgtgaggtgaagcagatcgccaaggccatcaatgaaagatacctgaacaagctgctgagcagcggcagccgctacctgatccgcagtgatgacatgattgaaacagtgtacaatgacagaggagaaattgtgaagaccaaggagaggagggtcttcatgctgaatgatgtgctgatgtgtgccaccgtgagcagccggcccagccatgacagccgggtgatgagcagccagcgctacctgctgaagtggagcgtgcccctgggccacgtggatgccattgaatatggcagcagcgctggcactggagagcacagccgccacctggccgtgcaccccccagagagcctggccgtggtggccaatgccaagcccaacaaggtgtacatgggccctggccagctgtaccaggacctgcagaacctgctgcatgacctgaatgtcatcggccagatcacccagctgattggcaacctgaagggcaactaccagaacctgaaccagagcgtggcccatgactggaccagcggcctgcagaggctcatcctgaagaaggaggatgagatccgggctgctgactgctgccgcatccagctgcagctgcccgggaagcaggacaagagcggccggcccaccttcttcaccgctgtgttcaacaccttcaccccagccatcaaggagagctgggtgaacagcctgcagatggccaagctggccctggaggaggagaaccacatgggctggttctgtgtggaggatgatggcaaccacatcaagaaggagaagcaccccctgctggtgggccacatgcctgtgatggtggccaagcagcaggagttcaagattgaatgtgccgcctacaaccctgagccctacctgaacaatgaaagccagcctgacagcttcagcacagcccacggcttcctgtggattggcagctgcacccaccagatgggccagatcgccatcgtgtccttccagaacagcacccccaaggtgattgagtgcttcaacgtggagagccgcatcctgtgcatgctgtatgtgcctgtggaggagaagaggcgggagcccggggcccccccagaccctgagaccccagctgtgcgggccagtgatgtgcccaccatctgtgtgggcacagaggagggcagcatcagcatctacaagagcagccagggcagcaagaaggtgcggctgcagcacttcttcaccccagagaagagcacagtgatgagcctggcctgcaccagccagagcctgtatgccggcctggtgaatggagctgtggccagctatgcccgggccccagatggctcctgggacagcgagccccagaaggtgatcaagctgggcgtgctgcctgtgcgcagcctgctgatgatggaggacaccctgtgggccgccagcggcggccaggtgttcatcatctctgtggagacccatgctgtggagggccagctggaggcccaccaggaggagggcatggtgatcagccacatggctgtgtctggagtgggcatctggatcgccttcaccagcggcagcaccctgcggctcttccacacagagaccctgaagcacctgcaggacatcaacatcgccacccctgtgcacaacatgctgcccggccaccagaggctgtctgtgaccagcctgctggtgtgccacggcctgctgatggtgggcaccagcctgggcgtgctggtggccctgcctgtgccccggctgcagggcatccccaaggtgacaggccggggcatggtgtcctaccacgcccacaacagccctgtgaagttcatcgtgctggccacagccctgcacgagaaggacaaggacaagagccgggacagcctggcccctggccctgagccccaggatgaggaccagaaggatgccctgcccagcggcggggccggcagcagcctgagccagggcgaccctgatgctgccatctggctgggggacagcctgggctccatgacccagaagagtgacctgagcagcagcagcggcagcctgagcctgagccacggcagcagcagcctggagcacagaagtgaggacagcaccatctatgacctgctgaaggaccctgtgtccctgcggagcaaggcccggcgggccaagaaggccaaggccagcagcgccctggtggtgtgtggcggccagggccaccggcgggtgcacaggaaggcccggcagccccaccaggaggagctggcccccaccgtgatggtgtggcagatccccctgctgaacatctag

SEQ ID NO: 167984 - DNA, 1833 bp, synthetic construct
  misc_feature 1..1833: note = Description of Artificial Sequence: Synthetic coding sequence
  source 1..1833: mol_type = other DNA
atgaggcctcctggcttcctgagccgggcccccagcctgaacagagctgagcggggcatctggagctgcagcatggaccagcgggagcccctgcccccagccccagcagaaaatgagatgaagtatgacaccaacaacaatgaggaggaggagggggagcagtttgattttgattctggagatgagatccctgaggccgaccggcaggcccccagcgcccctgagaccggcggggccggggccagcgaggccccagcccccactggaggagaagatggagctggagctgagaccacccctgtggccgagcccaccaagctggtgctgcccatgaaggtgaacccctacagcgtgattgacatcacccccttccaggaggaccagccccccacccctgtgcccagcgctgaggaggagaatgtgggcctgcacgtgccctgtggctacctggtgcctgtgccctgtggctatgctgtgcccagcaacctgcccctgctgctgcctgcctacagcagccctgtgatcatctgtgccaccagcctggatgaggaggccgagaccccagaggtgacagaggaccggcagcccaacagcctgagcagcgaggagccccccaccagcgaggaccaggtgggccgggaggacagcgccctggcccgctgggccgctgaccctgccaacacagcctggatggagaaccctgaggaggccatctatgatgatgtgcccagagaaaattctgattctgagccagatgagatgatctatgatgatgtggagaatggagatgaaggaggcaacagcagcctggagtatggctggagcagcagcgagtttgagagctatgaggagcagagcgacagcgagtgcaagaatggcatccccaggagcttcctgcggagcaaccacaagaagcagatgcagaagctggtgaaggccgccaaggatggcaccaaggatggcctggagaggaccagggctgctgtgaagaggggccgctccttcatccgcaccaagagcctcatcgcccaggaccacaggagcagcctggaggaggagcagaacctcttcattgatgtggactgcaagcaccctgaggccatcctgacccccatgcctgagggcctgagccagcagcaggtggtgcggcgctacatcctgggctctgtggtggacagcgagaagaactacgtggatgccctgaagaggatcctggagcagtatgagaagcccctgtctgagatggagcccaaggtgctgtctgagaggaagctgaagacagtgttctacagagtgaaggagatcctgcagtgccacagcctcttccagatcgccctggccagccgggtgtctgagtgggacagcgtggagatgattggagatgtgtttgtggccagcttcagcaagtccatggtgctggatgcctacagtgaatatgtgaacaacttcagcacagctgtggccgtgctgaagaagacctgtgccaccaagccagccttcctggagttcctgaagcaggagcaggaggccagcccagacaggaccaccctgtacagcctgatgatgaagcccatccagcgcttcccccagttcatcctgctgctgcaggacatgctgaagaacaccagcaagggccacccagaccggctgcccctgcagatggccctgacagagctggagaccctggccgagaagctgaatgaaaggaagagagatgctgaccagagatgtgaggtgaagcagatcgccaaggccatcaatgaaagatacctgaacaaggtggagcggggcttcctgcagctgtacagcaagatcatctttgccctgtgctag

SEQ ID NO: 167985 - DNA, 4110 bp, synthetic construct
  misc_feature 1..4110: note = Description of Artificial Sequence: Synthetic coding sequence
  source 1..4110: mol_type = other DNA
atgaggcctcctggcttcctgagccgggcccccagcctgaacagagctgagcggggcatctggagctgcagcatggaccagcgggagcccctgcccccagccccagcagaaaatgagatgaagtatgacaccaacaacaatgaggaggaggagggggagcagtttgattttgattctggagatgagatccctgaggccgaccggcaggcccccagcgcccctgagaccggcggggccggggccagcgaggccccagcccccactggaggagaagatggagctggagctgagaccacccctgtggccgagcccaccaagctggtgctgcccatgaaggtgaacccctacagcgtgattgacatcacccccttccaggaggaccagccccccacccctgtgcccagcgctgaggaggagaatgtgggcctgcacgtgccctgtggctacctggtgcctgtgccctgtggctatgctgtgcccagcaacctgcccctgctgctgcctgcctacagcagccctgtgatcatctgtgccaccagcctggatgaggaggccgagaccccagaggtgacagaggaccggcagcccaacagcctgagcagcgaggagccccccaccagcgaggaccaggtgggccgggaggacagcgccctggcccgctgggccgctgaccctgccaacacagcctggatggagaaccctgaggaggccatctatgatgatgtgcccagagaaaattctgattctgagccagatgagatgatctatgatgatgtggagaatggagatgaaggaggcaacagcagcctggagtatggctggagcagcagcgagtttgagagctatgaggagcagagcgacagcgagtgcaagaatggcatccccaggagcttcctgcggagcaaccacaagaagcagctgagccatgacctgacccggctgaaggagcactatgagaagaagatgagggacctgatggccagcacagtgggcgtggtggagatccagcagctgcggcagaagcatgagctgaagatgcagaagctggtgaaggccgccaaggatggcaccaaggatggcctggagaggaccagggctgctgtgaagaggggccgctccttcatccgcaccaagagcctgattgcccaggaccacaggagcagcctggaggaggagcagaacctcttcattgatgtggactgcaagcaccctgaggccatcctgacccccatgcctgagggcctgagccagcagcaggtggtgcggcgctacatcctgggctctgtggtggacagcgagaagaactacgtggatgccctgaagaggatcctggagcagtatgagaagcccctgtctgagatggagcccaaggtgctgtctgagaggaagctgaagacagtgttctacagagtgaaggagatcctgcagtgccacagcctcttccagatcgccctggccagccgggtgtctgagtgggacagcgtggagatgattggagatgtgtttgtggccagcttcagcaagtccatggtgctggatgcctacagtgaatatgtgaacaacttcagcacagctgtggccgtgctgaagaagacctgtgccaccaagccagccttcctggagttcctgaagcaggagcaggaggccagcccagacaggaccaccctgtacagcctgatgatgaagcccatccagcgcttcccccagttcatcctgctgctgcaggacatgctgaagaacaccagcaagggccacccagaccggctgcccctgcagatggccctgacagagctggagaccctggccgagaagctgaatgaaaggaagagagatgctgaccagagatgtgaggtgaagcagatcgccaaggccatcaatgaaagatacctgaacaagctgctgagcagcggcagccgctacctgatccgcagtgatgacatgattgagaccgtgtacaatgacagaggagagatcgtgaagaccaaggagcggcgggtcttcatgctgaatgatgtgctgatgtgtgccaccgtgagcagccggcccagccatgacagccgggtgatgagcagccagcgctacctgctgaagtggagcgtgcccctgggccacgtggatgccatcgagtatggcagcagcgctggcaccggggagcacagccgccacctggccgtgcaccccccagagagcctggccgtggtggccaatgccaagcccaacaaggtgtacatgggccctggccagctgtaccaggacctgcagaacctgctgcatgacctgaatgtgattggccagatcacccagctgattggcaacctgaagggcaactaccagaacctgaaccagagcgtggcccatgactggaccagcggcctgcagaggctcatcctgaagaaggaggatgagatccgggctgctgactgctgccgcatccagctgcagctgcccgggaagcaggacaagagcggccggcccaccttcttcaccgctgtgttcaacaccttcaccccagccatcaaggagagctgggtgaacagcctgcagatggccaagctggccctggaggaggagaaccacatgggctggttctgtgtggaggatgatggcaaccacatcaagaaggagaagcaccccctgctggtgggccacatgcctgtgatggtggccaagcagcaggagttcaagattgaatgtgccgcctacaaccctgagccctacctgaacaatgaaagccagcctgacagcttcagcacagcccacggcttcctgtggattggcagctgcacccaccagatgggccagatcgccatcgtgtccttccagaacagcacccccaaggtgattgagtgcttcaacgtggagagccgcatcctgtgcatgctgtatgtgcctgtggaggagaagagaagagagcccggggcccccccagaccctgagaccccagctgtgcgggccagtgatgtgcccaccatctgtgtgggcacagaggagggcagcatcagcatctacaagagcagccagggcagcaagaaggtgcggctgcagcacttcttcaccccagagaagagcacagtgatgagcctggcctgcaccagccagagcctgtatgccggcctggtgaatggagctgtggccagctatgcccgggccccagatggctcctgggacagcgagccccagaaggtgatcaagctgggcgtgctgcctgtgcgcagcctgctgatgatggaggacaccctgtgggccgccagcggcggccaggtgttcatcatctctgtggagacccatgctgtggagggccagctggaggcccaccaggaggagggcatggtgatcagccacatggctgtgtctggagtgggcatctggatcgccttcaccagcggcagcaccctgcggctcttccacacagagaccctgaagcacctgcaggacatcaacatcgccacccctgtgcacaacatgctgcccggccaccagaggctgtctgtgaccagcctgctggtgtgccacggcctgctgatggtgggcaccagcctgggcgtgctggtggccctgcctgtgccccggctgcagggcatccccaaggtgacaggccggggcatggtgtcctaccacgcccacaacagccctgtgaagttcatcgtgctggccacagccctgcacgagaaggacaaggacaagagccgggacagcctggcccctggccctgagccccaggatgaggaccagaaggatgccctgcccagcggcggggccggcagcagcctgagccagggcgaccctgatgctgccatctggctgggggacagcctgggctccatgacccagaagagtgacctgagcagcagcagcggcagcctgagcctgagccacggcagcagcagcctggagcacaggtctgaggacagcaccatctatgacctgctgaaggaccctgtgtccctgcggagcaaggcccggcgggccaagaaggccaaggccagcagcgccctggtggtgtgtggcggccagggccacagaagagtgcacaggaaggcccggcagccccaccaggaggagctggcccccaccgtgatggtgtggcagatccccctgctgaacatctag

SEQ ID NO: 167986 - DNA, 4107 bp, synthetic construct
  misc_feature 1..4107: note = Description of Artificial Sequence: Synthetic coding sequence
  source 1..4107: mol_type = other DNA
atgaggcctcctggcttcctgagccgggcccccagcctgaacagagctgagcggggcatctggagctgcagcatggaccagcgggagcccctgcccccagccccagcagaaaatgagatgaagtatgacaccaacaacaatgaggaggaggagggggagcagtttgattttgattctggagatgagatccctgaggccgaccggcaggcccccagcgcccctgagaccggcggggccggggccagcgaggccccagcccccactggaggagaagatggagctggagctgagaccacccctgtggccgagcccaccaagctggtgctgcccatgaaggtgaacccctacagcgtgattgacatcacccccttccaggaggaccagccccccacccctgtgcccagcgctgaggaggagaatgtgggcctgcacgtgccctgtggctacctggtgcctgtgccctgtggctatgctgtgcccagcaacctgcccctgctgctgcctgcctacagcagccctgtgatcatctgtgccaccagcctggatgaggaggccgagaccccagaggtgacagaggaccggcagcccaacagcctgagcagcgaggagccccccaccagcgaggaccaggtgggccgggaggacagcgccctggcccgctgggccgctgaccctgccaacacagcctggatggagaaccctgaggaggccatctatgatgatgtgcccagagaaaattctgattctgagccagatgagatgatctatgatgatgtggagaatggagatgaaggaggcaacagcagcctggagtatggctggagcagcagcgagtttgagagctatgaggagcagagcgacagcgagtgcaagaatggcatccccaggagcttcctgcggagcaaccacaagaagcagctgagccatgacctgacccggctgaaggagcactatgagaagaagatgagggacctgatggccagcacagtgggcgtggtggagatccagcagctgcggcagaagcatgagctgaagatgcagaagctggtgaaggccgccaaggatggcaccaaggatggcctggagaggaccagggctgctgtgaagaggggccgctccttcatccgcaccaagagcctgattgcccaggaccacaggagcagcctggaggaggagcagaacctcttcattgatgtggactgcaagcaccctgaggccatcctgacccccatgcctgagggcctgagccagcagcaggtggtgcggcgctacatcctgggctctgtggtggacagcgagaagaactacgtggatgccctgaagaggatcctggagcagtatgagaagcccctgtctgagatggagcccaaggtgctgtctgagaggaagctgaagacagtgttctacagagtgaaggagatcctgcagtgccacagcctcttccagatcgccctggccagccgggtgtctgagtgggacagcgtggagatgattggagatgtgtttgtggccagcttcagcaagtccatggtgctggatgcctacagtgaatatgtgaacaacttcagcacagctgtggccgtgctgaagaagacctgtgccaccaagccagccttcctggagttcctgaaggagcaggaggccagcccagacaggaccaccctgtacagcctgatgatgaagcccatccagcgcttcccccagttcatcctgctgctgcaggacatgctgaagaacaccagcaagggccacccagaccggctgcccctgcagatggccctgacagagctggagaccctggccgagaagctgaatgaaaggaagagagatgctgaccagagatgtgaggtgaagcagatcgccaaggccatcaatgaaagatacctgaacaagctgctgagcagcggcagccgctacctgatccgcagtgatgacatgattgaaacagtgtacaatgacagaggagaaattgtgaagaccaaggagaggagggtcttcatgctgaatgatgtgctgatgtgtgccaccgtgagcagccggcccagccatgacagccgggtgatgagcagccagcgctacctgctgaagtggagcgtgcccctgggccacgtggatgccattgaatatggcagcagcgctggcactggagagcacagccgccacctggccgtgcaccccccagagagcctggccgtggtggccaatgccaagcccaacaaggtgtacatgggccctggccagctgtaccaggacctgcagaacctgctgcatgacctgaatgtcatcggccagatcacccagctgattggcaacctgaagggcaactaccagaacctgaaccagagcgtggcccatgactggaccagcggcctgcagaggctcatcctgaagaaggaggatgagatccgggctgctgactgctgccgcatccagctgcagctgcccgggaagcaggacaagagcggccggcccaccttcttcaccgctgtgttcaacaccttcaccccagccatcaaggagagctgggtgaacagcctgcagatggccaagctggccctggaggaggagaaccacatgggctggttctgtgtggaggatgatggcaaccacatcaagaaggagaagcaccccctgctggtgggccacatgcctgtgatggtggccaagcagcaggagttcaagattgaatgtgccgcctacaaccctgagccctacctgaacaatgaaagccagcctgacagcttcagcacagcccacggcttcctgtggattggcagctgcacccaccagatgggccagatcgccatcgtgtccttccagaacagcacccccaaggtgattgagtgcttcaacgtggagagccgcatcctgtgcatgctgtatgtgcctgtggaggagaagaggcgggagcccggggcccccccagaccctgagaccccagctgtgcgggccagtgatgtgcccaccatctgtgtgggcacagaggagggcagcatcagcatctacaagagcagccagggcagcaagaaggtgcggctgcagcacttcttcaccccagagaagagcacagtgatgagcctggcctgcaccagccagagcctgtatgccggcctggtgaatggagctgtggccagctatgcccgggccccagatggctcctgggacagcgagccccagaaggtgatcaagctgggcgtgctgcctgtgcgcagcctgctgatgatggaggacaccctgtgggccgccagcggcggccaggtgttcatcatctctgtggagacccatgctgtggagggccagctggaggcccaccaggaggagggcatggtgatcagccacatggctgtgtctggagtgggcatctggatcgccttcaccagcggcagcaccctgcggctcttccacacagagaccctgaagcacctgcaggacatcaacatcgccacccctgtgcacaacatgctgcccggccaccagaggctgtctgtgaccagcctgctggtgtgccacggcctgctgatggtgggcaccagcctgggcgtgctggtggccctgcctgtgccccggctgcagggcatccccaaggtgacaggccggggcatggtgtcctaccacgcccacaacagccctgtgaagttcatcgtgctggccacagccctgcacgagaaggacaaggacaagagccgggacagcctggcccctggccctgagccccaggatgaggaccagaaggatgccctgcccagcggcggggccggcagcagcctgagccagggcgaccctgatgctgccatctggctgggggacagcctgggctccatgacccagaagagtgacctgagcagcagcagcggcagcctgagcctgagccacggcagcagcagcctggagcacagaagtgaggacagcaccatctatgacctgctgaaggaccctgtgtccctgcggagcaaggcccggcgggccaagaaggccaaggccagcagcgccctggtggtgtgtggcggccagggccaccggcgggtgcacaggaaggcccggcagccccaccaggaggagctggcccccaccgtgatggtgtggcagatccccctgctgaacatctag

SEQ ID NO: 167987 - DNA, 2949 bp, synthetic construct
  misc_feature 1..2949: note = Description of Artificial Sequence: Synthetic coding sequence
  source 1..2949: mol_type = other DNA
atgctgcccagcagctcctggggcaagaggaagctgcggggccgcctgggctgggtgcggagtgatgcccggggcgtgatgtgggcccggcaggagggcctgcaccacccccacccccatgctgtgatccgctgccccagcagcagcagcagctctgtgtcctgcagcggggacagcgaggaggaggacatgggcctgctggaggtgtctgtgtctgacatcaagcccccagcccctgagctgggccccatgcctgagggcctgagcccccagcaggtggtgagaagacacatcctgggcagcatcgtgcagagcgagggcagctatgtggagagcctgaagaggatcctgcaggactacagaaaccccctgatggagatggagcccaaggccctgagcgccaggaagtgccaggtggtgttcttccgggtgaaggagatcctgcactgccacagcatgttccagatcgccctgagcagccgggtggccgagtgggacagcacagagaagattggagacctgtttgtggccagtgacatgctgaagaacaccccccggggccacccagaccggctgagcctgcagctggccctgacagagctggagaccctggccgagaagctgaatgagcagaagaggctggccgaccaggtggccgagatccagcagctgaccaagtctgtgtctgacaggagcagcctgaacaagctgctgaccagcggccagaggcagctgctgctgtgtgagaccctgacagagaccgtgtatggagaccggggccagctgatcaagagcaaggagcggcgggtcttcctgctgaatgacatgctggtgtgtgccaacatcaacttcaagggccagctggagatcagcagcctggtgcccctgggccccaagtatgtggtgaagtggaacacagccctgccccaggtgcaggtggtggaggtgggccaggacggcggcacctatgacaaggacaacgtgctgatccagcacagcggggccaagaaggccagcgccagcggccaggcccagaacaaggtgtacctgggcccccccaggctcttccaggagctgcaggacctgcagaaggacctggccgtggtggagcagatcaccctgctgatcagcaccctgcacggcacctaccagaacctgaacatgacagtggcccaggactggtgcctggccctgcagaggctgatgagggtgaaggaggaggagatccacagcgccaacaagtgccgcctgcggctgctgctgcccgggaagccagacaagagcggccggcccatctccttcatggtggtgttcatcacccccaaccccctgagcaagatctcctgggtgaaccggctgcacctggccaagattggcctgcgggaggagaaccagcccggctggctgtgcccagatgaggacaagaagagcaaggcccccttctggtgccccatcctggcctgctgcatcccagccttcagcagccgggccctgagcctgcagctgggcgccctggtgcacagccctgtgaactgccccctgctgggcttctctgctgtgtccaccagcctgccccagggctacctgtgggtgggcggcggccaggagggcgctgggggccaggtggagatcttcagcctgaaccggcccagccccaggacagtgaagagcttccccctggccgcccctgtgctgtgcatggagtacatccctgagctggaggaggaggccgagagcagagatgagagccccaccgtggccgaccccagcgccaccgtgcaccccaccatctgcctgggcctgcaggacggcagcatcctgctgtacagctctgtggacaccggcacccagtgcctggtgtcctgccgcagccctggcctgcagcctgtgctgtgcctgcggcacagccccttccacctgctggccggcctgcaggacggcaccctggccgcctaccccaggaccagcggcggcgtgctgtgggacctggagagcccccctgtgtgcctgactgtgggccctggccctgtgaggaccctgctgagcctggaggatgctgtgtgggccagctgtggcccctgggtgacagtgctggaggccaccaccctgcagccccagcagagctttgaggcccaccaggatgaggccgtgtctgtgacccacatggtgaaggccggcagcggcgtgtggatggccttcagcagcggcaccagcatccgcctcttccacacagagaccctggagcacctgcaggagatcaacatcgccaccaggaccaccttcctgctgcccggccagaagcacctgtgtgtgaccagcctgctgatctgccagggcctgctgtgggtgggcacagaccagggcgtcatcgtgctgctgcctgtgccccggctggagggcatccccaagatcaccgggaagggcatggtgtccctgaatggccactgcggccctgtggccttcctggccgtggccaccagcatcctggccccagacatcctgcggagtgaccaggaggaggccgagggccccagggctgaggaggacaagccagatggccaggcccacgagcccatgccagacagccacgtgggccgggagctgaccaggaagaagggcatcctgctgcagtaccgcctgcggagcacagcccacctgcccggccccctgctgtccatgagggagcccgccccagcagatggagctgccctggagcacagtgaagaagatggcagcatctatgagatggctgatgatcctgacatctgggtgcgcagccggccctgtgccagagatgcccacaggaaggagatctgcagcgtggccatcatcagcggcggccagggctacagaaactttggaagtgccctgggcagcagcggccggcaggccccctgtggggagacagacagcaccctgctgatctggcaggtgcccctgatgctgtag

SEQ ID NO: 167988 - DNA, 3840 bp, synthetic construct
  misc_feature 1..3840: note = Description of Artificial Sequence: Synthetic coding sequence
  source 1..3840: mol_type = other DNA
atggccagcagcaaccccccaccccagcctgccatcggggaccagctggtgcctggggtgcccggccccagcagcgaggccgaggatgatcctggagaggcctttgaatttgatgacagtgatgatgaggaggacaccagcgctgccctgggcgtgcccagcctggcccctgagcgggacacagatcctcctctcatccacctggacagcatccctgtgacagatcctgaccctgctgctgcccctcctggcactggagtgcctgcctgggtgtccaatggagatgctgctgatgctgccttcagcggggcccggcacagctcctggaagaggaagagcagcagaagaattgaccgcttcaccttccctgccctggaggaggatgtgatctatgatgatgtgccctgtgagagcccagatgcccaccagcccggggctgagaggaacctgctgtatgaagatgcccaccgggccggggccccccggcaggccgaggacctgggctggagcagcagcgagtttgagagctacagtgaagattctggagaggaggccaagccagaggtggaggtggagcccgccaagcaccgggtgtccttccagcccaagctgagcccagacctgacccggctgaaggagagatatgcccggaccaagagggacatcctggccctgcgggtgggcggccgggacatgcaggagctgaagcacaagtatgactgcaagatgacccagctgatgaaggccgccaagagcggcaccaaggatggcctggagaagaccaggatggctgtgatgaggaaggtgtccttcctgcacaggaaggatgtgctgggggacagcgaggaggaggacatgggcctgctggaggtgtctgtgtctgacatcaagcccccagcccctgagctgggccccatgcctgagggcctgagcccccagcaggtggtgagaagacacatcctgggcagcatcgtgcagagcgagggcagctatgtggagagcctgaagaggatcctgcaggactacagaaaccccctgatggagatggagcccaaggccctgagcgccaggaagtgccaggtggtgttcttccgggtgaaggagatcctgcactgccacagcatgttccagatcgccctgagcagccgggtggccgagtgggacagcacagagaagattggagacctgtttgtggccagcttcagcaagtccatggtgctggatgtgtacagcgactatgtgaacaacttcaccagcgccatgagcatcatcaagaaggcctgcctgaccaagccagccttcctggagttcctgaagaggcggcaggtgtgcagcccagacagagtgaccctgtatggcctgatggtgaagcccatccagcgcttcccccagttcatcctgctgctgcaggacatgctgaagaacaccccccggggccacccagaccggctgagcctgcagctggccctgacagagctggagaccctggccgagaagctgaatgagcagaagaggctggccgaccaggtggccgagatccagcagctgaccaagtctgtgtctgacaggagcagcctgaacaagctgctgaccagcggccagaggcagctgctgctgtgtgagaccctgacagagaccgtgtatggagaccggggccagctgatcaagagcaaggagcggcgggtcttcctgctgaatgacatgctggtgtgtgccaacatcaacttcaagccagccaaccaccggggccagctggagatcagcagcctggtgcccctgggccccaagtatgtggtgaagtggaacacagccctgccccaggtgcaggtggtggaggtgggccaggacggcggcacctatgacaaggacaacgtgctgatccagcacagcggggccaagaaggccagcgccagcggccaggcccagaacaaggtgtacctgggcccccccaggctcttccaggagctgcaggacctgcagaaggacctggccgtggtggagcagatcaccctgctgatcagcaccctgcacggcacctaccagaacctgaacatgacagtggcccaggactggtgcctggccctgcagaggctgatgagggtgaaggaggaggagatccacagcgccaacaagtgccgcctgcggctgctgctgcccgggaagccagacaagagcggccggcccatctccttcatggtggtgttcatcacccccaaccccctgagcaagatctcctgggtgaaccggctgcacctggccaagattggcctgcgggaggagaaccagcccggctggctgtgcccagatgaggacaagaagagcaaggcccccttctggtgccccatcctggcctgctgcatcccagccttcagcagccgggccctgagcctgcagctgggcgccctggtgcacagccctgtgaactgccccctgctgggcttctctgctgtgtccaccagcctgccccagggctacctgtgggtgggcggcggccaggagggcgccggcggccaggtggagatcttcagcctgaaccggcccagccccaggacagtgaagagcttccccctggccgcccctgtgctgtgcatggagtacatccctgagctggaggaggaggccgagagcagagatgagagccccaccgtggccgaccccagcgccaccgtgcaccccaccatctgcctgggcctgcaggacggcagcatcctgctgtacagctctgtggacaccggcacccagtgcctggtgtcctgccgcagccctggcctgcagcctgtgctgtgcctgcggcacagccccttccacctgctggccggcctgcaggacggcaccctggccgcctaccccaggaccagcggaggagtgctgtgggacctggagagcccccctgtgtgcctgactgtgggccctggccctgtgaggaccctgctgagcctggaggatgctgtgtgggccagctgtggcccctgggtgacagtgctggaggccaccaccctgcagccccagcagagctttgaggcccaccaggatgaagctgtgtctgtgacccacatggtgaaggccggcagcggcgtgtggatggccttcagcagcggcaccagcatccgcctcttccacacagagaccctggagcacctgcaggagatcaacatcgccaccaggaccaccttcctgctgcccggccagaagcacctgtgtgtgaccagcctgctgatctgccagggcctgctgtgggtgggcacagaccagggcgtgattgtgctgctgcctgtgccccggctggagggcatccccaagatcaccgggaagggcatggtgtccctgaatggccactgcggccctgtggccttcctggccgtggccaccagcatcctggccccagacatcctgcggagtgaccaggaggaggccgagggccccagggctgaggaggacaagccagatggccaggcccacgagcccatgccagacagccacgtgggccgggagctgaccaggaagaagggcatcctgctgcagtaccgcctgcggagcacagcccacctgcccggccccctgctgtccatgagggagcccgccccagcagatggagctgccctggagcacagcgaggaggatggcagcatctatgagatggctgatgatcctgacatctgggtgcgcagccggccctgtgccagagatgcccacaggaaggagatctgcagcgtggccatcatcagcggcggccagggctacagaaactttggcagcgccctgggcagcagcggccggcaggccccctgtggggagacagacagcaccctgctgatctggcaggtgcccctgatgctgtag

SEQ ID NO: 167989 - DNA, 3159 bp, synthetic construct
  misc_feature 1..3159: note = Description of Artificial Sequence: Synthetic coding sequence
  source 1..3159: mol_type = other DNA
atgctgcccagcagctcctggggcaagaggaagctgcggggccgcctgggctgggtgcggagtgatgcccggggcgtgatgtgggcccggcaggagggcctgcaccacccccacccccatgctgtgatccgctgccccagcagcagcagcagctctgtgtcctgcagcggggacagcgaggaggaggacatgggcctgctggaggtgtctgtgtctgacatcaagcccccagcccctgagctgggccccatgcctgagggcctgagcccccagcaggtggtgagaagacacatcctgggcagcatcgtgcagagcgagggcagctatgtggagagcctgaagaggatcctgcaggactacagaaaccccctgatggagatggagcccaaggccctgagcgccaggaagtgccaggtggtgttcttccgggtgaaggagatcctgcactgccacagcatgttccagatcgccctgagcagccgggtggccgagtgggacagcacagagaagattggagacctgtttgtggccagcttcagcaagtccatggtgctggatgtgtacagcgactatgtgaacaacttcaccagcgccatgagcatcatcaagaaggcctgcctgaccaagccagccttcctggagttcctgaagaggcggcaggtgtgcagcccagacagagtgaccctgtatggcctgatggtgaagcccatccagcgcttcccccagttcatcctgctgctgcaggacatgctgaagaacaccccccggggccacccagaccggctgagcctgcagctggccctgacagagctggagaccctggccgagaagctgaatgagcagaagaggctggccgaccaggtggccgagatccagcagctgaccaagtctgtgtctgacaggagcagcctgaacaagctgctgaccagcggccagaggcagctgctgctgtgtgagaccctgacagagaccgtgtatggagaccggggccagctgatcaagagcaaggagcggcgggtcttcctgctgaatgacatgctggtgtgtgccaacatcaacttcaagggccagctggagatcagcagcctggtgcccctgggccccaagtatgtggtgaagtggaacacagccctgccccaggtgcaggtggtggaggtgggccaggacggcggcacctatgacaaggacaacgtgctgatccagcacagcggggccaagaaggccagcgccagcggccaggcccagaacaaggtgtacctgggcccccccaggctcttccaggagctgcaggacctgcagaaggacctggccgtggtggagcagatcaccctgctgatcagcaccctgcacggcacctaccagaacctgaacatgacagtggcccaggactggtgcctggccctgcagaggctgatgagggtgaaggaggaggagatccacagcgccaacaagtgccgcctgcggctgctgctgcccgggaagccagacaagagcggccggcccatctccttcatggtggtgttcatcacccccaaccccctgagcaagatctcctgggtgaaccggctgcacctggccaagattggcctgcgggaggagaaccagcccggctggctgtgcccagatgaggacaagaagagcaaggcccccttctggtgccccatcctggcctgctgcatcccagccttcagcagccgggccctgagcctgcagctgggcgccctggtgcacagccctgtgaactgccccctgctgggcttctctgctgtgtccaccagcctgccccagggctacctgtgggtgggcggcggccaggagggcgctgggggccaggtggagatcttcagcctgaaccggcccagccccaggacagtgaagagcttccccctggccgcccctgtgctgtgcatggagtacatccctgagctggaggaggaggccgagagcagagatgagagccccaccgtggccgaccccagcgccaccgtgcaccccaccatctgcctgggcctgcaggacggcagcatcctgctgtacagctctgtggacaccggcacccagtgcctggtgtcctgccgcagccctggcctgcagcctgtgctgtgcctgcggcacagccccttccacctgctggccggcctgcaggacggcaccctggccgcctaccccaggaccagcggcggcgtgctgtgggacctggagagcccccctgtgtgcctgactgtgggccctggccctgtgaggaccctgctgagcctggaggatgctgtgtgggccagctgtggcccctgggtgacagtgctggaggccaccaccctgcagccccagcagagctttgaggcccaccaggatgaggccgtgtctgtgacccacatggtgaaggccggcagcggcgtgtggatggccttcagcagcggcaccagcatccgcctcttccacacagagaccctggagcacctgcaggagatcaacatcgccaccaggaccaccttcctgctgcccggccagaagcacctgtgtgtgaccagcctgctgatctgccagggcctgctgtgggtgggcacagaccagggcgtcatcgtgctgctgcctgtgccccggctggagggcatccccaagatcaccgggaagggcatggtgtccctgaatggccactgcggccctgtggccttcctggccgtggccaccagcatcctggccccagacatcctgcggagtgaccaggaggaggccgagggccccagggctgaggaggacaagccagatggccaggcccacgagcccatgccagacagccacgtgggccgggagctgaccaggaagaagggcatcctgctgcagtaccgcctgcggagcacagcccacctgcccggccccctgctgtccatgagggagcccgccccagcagatggagctgccctggagcacagtgaagaagatggcagcatctatgagatggctgatgatcctgacatctgggtgcgcagccggccctgtgccagagatgcccacaggaaggagatctgcagcgtggccatcatcagcggcggccagggctacagaaactttggaagtgccctgggcagcagcggccggcaggccccctgtggggagacagacagcaccctgctgatctggcaggtgcccctgatgctgtag

SEQ ID NO: 167990 - DNA, 3723 bp, synthetic construct
  misc_feature 1..3723: note = Description of Artificial Sequence: Synthetic coding sequence
  source 1..3723: mol_type = other DNA
atggccagcagcaaccccccaccccagcctgccatcggggaccagctggtgcctggggtgcccggccccagcagcgaggccgaggatgatcctggagaggcctttgaatttgatgacagtgatgatgaggaggacaccagcgctgccctgggcgtgcccagcctggcccctgagcgggacacagatcctcctctcatccacctggacagcatccctgtgacagatcctgaccctgctgctgcccctcctggcactggagtgcctgcctgggtgtccaatggagatgctgctgatgctgccttcagcggggcccggcacagctcctggaagaggaagagcagcagaagaattgaccgcttcaccttccctgccctggaggaggatgtgatctatgatgatgtgccctgtgagagcccagatgcccaccagcccggggctgagaggaacctgctgtatgaagatgcccaccgggccggggccccccggcaggccgaggacctgggctggagcagcagcgagtttgagagctacagtgaagattctggagaggaggccaagccagaggtggaggtggagcccgccaagcaccgggtgtccttccagcccaagatgacccagctgatgaaggccgccaagagcggcaccaaggatggcctggagaagaccaggatggctgtgatgaggaaggtgtccttcctgcacaggaaggatgtgctgggggacagcgaggaggaggacatgggcctgctggaggtgtctgtgtctgacatcaagcccccagcccctgagctgggccccatgcctgagggcctgagcccccagcaggtggtgcggcggcacatcctgggcagcatcgtgcagagcgagggcagctatgtggagagcctgaagaggatcctgcaggactacagaaaccccctgatggagatggagcccaaggccctgagcgccaggaagtgccaggtggtgttcttccgggtgaaggagatcctgcactgccacagcatgttccagatcgccctgagcagccgggtggccgagtgggacagcacagagaagatcggggacctgtttgtggccagcttcagcaagtccatggtgctggatgtgtacagcgactatgtgaacaacttcaccagcgccatgagcatcatcaagaaggcctgcctgaccaagccagccttcctggagttcctgaagaggcggcaggtgtgcagcccagacagagtgaccctgtatggcctgatggtgaagcccatccagcgcttcccccagttcatcctgctgctgcaggacatgctgaagaacaccccccggggccacccagaccggctgagcctgcagctggccctgacagagctggagaccctggccgagaagctgaatgagcagaagaggctggccgaccaggtggccgagatccagcagctgaccaagtctgtgtctgacaggagcagcctgaacaagctgctgaccagcggccagaggcagctgctgctgtgtgagaccctgacagaaacagtgtatggagaccggggccagctgatcaagagcaaggagaggagggtcttcctgctgaatgacatgctggtgtgtgccaacatcaacttcaagccagccaaccaccggggccagctggagatcagcagcctggtgcccctgggccccaagtatgtggtgaagtggaacacagccctgccccaggtgcaggtggtggaggtgggccaggacggcggcacctatgacaaggacaacgtgctgatccagcacagcggggccaagaaggccagcgccagcggccaggcccagaacaaggtgtacctgggcccccccaggctcttccaggagctgcaggacctgcagaaggacctggccgtggtggagcagatcaccctgctgatcagcaccctgcacggcacctaccagaacctgaacatgacagtggcccaggactggtgcctggccctgcagaggctgatgagggtgaaggaggaggagatccacagcgccaacaagtgccgcctgcggctgctgctgcccgggaagccagacaagagcggccggcccatctccttcatggtggtgttcatcacccccaaccccctgagcaagatctcctgggtgaaccggctgcacctggccaagattggcctgcgggaggagaaccagcccggctggctgtgcccagatgaggacaagaagagcaaggcccccttctggtgccccatcctggcctgctgcatcccagccttcagcagccgggccctgagcctgcagctgggcgccctggtgcacagccctgtgaactgccccctgctgggcttctctgctgtgtccaccagcctgccccagggctacctgtgggtgggcggcggccaggagggcgctgggggccaggtggagatcttcagcctgaaccggcccagccccaggacagtgaagagcttccccctggccgcccctgtgctgtgcatggagtacatccctgagctggaggaggaggccgagagcagagatgagagccccaccgtggccgaccccagcgccaccgtgcaccccaccatctgcctgggcctgcaggacggcagcatcctgctgtacagctctgtggacaccggcacccagtgcctggtgtcctgccgcagccctggcctgcagcctgtgctgtgcctgcggcacagccccttccacctgctggccggcctgcaggacggcaccctggccgcctaccccaggaccagcggcggcgtgctgtgggacctggagagcccccctgtgtgcctgactgtgggccctggccctgtgaggaccctgctgagcctggaggatgctgtgtgggccagctgtggcccctgggtgacagtgctggaggccaccaccctgcagccccagcagagctttgaggcccaccaggatgaggccgtgtctgtgacccacatggtgaaggccggcagcggcgtgtggatggccttcagcagcggcaccagcatccgcctcttccacacagagaccctggagcacctgcaggagatcaacatcgccaccaggaccaccttcctgctgcccggccagaagcacctgtgtgtgaccagcctgctgatctgccagggcctgctgtgggtgggcacagaccagggcgtcatcgtgctgctgcctgtgccccggctggagggcatccccaagatcaccgggaagggcatggtgtccctgaatggccactgcggccctgtggccttcctggccgtggccaccagcatcctggccccagacatcctgcggagtgaccaggaggaggccgagggccccagggctgaggaggacaagccagatggccaggcccacgagcccatgccagacagccacgtgggccgggagctgaccaggaagaagggcatcctgctgcagtaccgcctgcggagcacagcccacctgcccggccccctgctgtccatgagggagcccgccccagcagatggagctgccctggagcacagtgaagaagatggcagcatctatgagatggctgatgatcctgacatctgggtgcgcagccggccctgtgccagagatgcccacaggaaggagatctgcagcgtggccatcatcagcggcggccagggctacagaaactttggaagtgccctgggcagcagcggccggcaggccccctgtggggagacagacagcaccctgctgatctggcaggtgcccctgatgctgtag

SEQ ID NO: 167991 - DNA, 1467 bp, synthetic construct
  misc_feature 1..1467: note = Description of Artificial Sequence: Synthetic coding sequence
  source 1..1467: mol_type = other DNA
atgacccagctgatgaaggccgccaagagcggcaccaaggatggcctggagaagaccaggatggctgtgatgaggaaggtgtccttcctgcacaggaaggatgtgctgggggacagcgaggaggaggacatgggcctgctggaggtgtctgtgtctgacatcaagcccccagcccctgagctgggccccatgcctgagggcctgagcccccagcaggtggtgagaagacacatcctgggcagcatcgtgcagagcgagggcagctatgtggagagcctgaagaggatcctgcaggactacagaaaccccctgatggagatggagcccaaggccctgagcgccaggaagtgccaggtggtgttcttccgggtgaaggagatcctgcactgccacagcatgttccagatcgccctgagcagccgggtggccgagtgggacagcacagagaagattggagacctgtttgtggccagcttcagcaagtccatggtgctggatgtgtacagcgactatgtgaacaacttcaccagcgccatgagcatcatcaagaaggcctgcctgaccaagccagccttcctggagttcctgaagaggcggcaggtgtgcagcccagacagagtgaccctgtatggcctgatggtgaagcccatccagcgcttcccccagttcatcctgctgctgcaggacatgctgaagaacaccccccggggccacccagaccggctgagcctgcagctggccctgacagagctggagaccctggccgagaagctgaatgagcagaagaggctggccgaccaggtggccgagatccagcagctgaccaagtctgtgtctgacaggagcagcctgaacaagctgctgaccagcggccagaggcagctgctgctgtgtgagaccctgacagagaccgtgtatggagaccggggccagctgatcaagagcaaggagcggcgggtcttcctgctgaatgacatgctggtgtgtgccaacatcaacttcaagccagccaaccaccggggccagctggagatcagcagcctggtgcccctgggccccaagtatgtggtgaagtggaacacagccctgccccaggtgcaggtggtggaggtgggccaggacggcggcacctatgacaaggacaacgtgctgatccagcacagcggggccaagaaggccagcgccagcggccaggcccagaacaaggtgtacctgggcccccccaggctcttccaggagctgcaggacctgcagaaggacctggccgtggtggagcagatcaccctgctgatcagcaccctgcacggcacctaccagaacctgaacatgacagtggcccaggactggtgcctggccctgcagaggctgatgagggtgaaggaggaggagatccacagcgccaacaagtgccgcctgcggctgctgctgcccgggaagccagacaagggcacctggagcgacatgtag

SEQ ID NO: 167992 - DNA, 3204 bp, synthetic construct
  misc_feature 1..3204: note = Description of Artificial Sequence: Synthetic coding sequence
  source 1..3204: mol_type = other DNA
atggccagcagcaaccccccaccccagcctgccatcggggaccagctggtgcctggggtgcccggccccagcagcgaggccgaggatgatcctggagaggcctttgaatttgatgacagtgatgatgaggaggacaccagcgctgccctgggcgtgcccagcctggcccctgagcgggacacagatcctcctctcatccacctggacagcatccctgtgacagatcctgaccctgctgctgcccctcctggcactggagtgcctgcctgggtgtccaatggagatgctgctgatgctgccttcagcggggcccggcacagctcctggaagaggaagagcagcagaagaattgaccgcttcaccttccctgccctggaggaggatgtgatctatgatgatgtgccctgtgagagcccagatgcccaccagcccggggctgagaggaacctgctgtatgaagatgcccaccgggccggggccccccggcaggccgaggacctgggctggagcagcagcgagtttgagagctacagtgaagattctggagaggaggccaagccagaggtggaggtggagcccgccaagcaccgggtgtccttccagcccaagctgagcccagacctgacccggctgaaggagagatatgcccggaccaagagggacatcctggccctgcgggtgggcggccgggacatgcaggagctgaagcacaagtatgactgcaagatgacccagctgatgaaggccgccaagagcggcaccaaggatggcctggagaagaccaggatggctgtgatgaggaaggtgtccttcctgcacaggaaggatgtgctgggggacagcgaggaggaggacatgggcctgctggaggtgtctgtgtctgacatcaagcccccagcccctgagctgggccccatgcctgagggcctgagcccccagcaggtggtgagaagacacatcctgggcagcatcgtgcagagcgagggcagctatgtggagagcctgaagaggatcctgcaggactacagaaaccccctgatggagatggagcccaaggccctgagcgccaggaagtgccaggtggtgttcttccgggtgaaggagatcctgcactgccacagcatgttccagatcgccctgagcagccgggtggccgagtgggacagcacagagaagattggagacctgtttgtggccagcttcagcaagtccatggtgctggatgtgtacagcgactatgtgaacaacttcaccagcgccatgagcatcatcaagaaggcctgcctgaccaagccagccttcctggagttcctgaagaggcggcaggtgtgcagcccagacagagtgaccctgtatggcctgatggtgaagcccatccagcgcttcccccagttcatcctgctgctgcaggacatgctgaagaacaccccccggggccacccagaccggctgagcctgcagctggccctgacagagctggagaccctggccgagaagctgaatgagcagaagaggctggccgaccaggtggccgagatccagcagctgaccaagtctgtgtctgacaggagcagcctgaacaagctgctgaccagcggccagaggcagctgctgctgtgtgagaccctgacagagaccgtgtatggagaccggggccagctgatcaagagcaaggagcggcgggtcttcctgctgaatgacatgctggtgtgtgccaacatcaacttcaagggccagctggagatcagcagcctggtgcccctgggccccaagtatgtggtgaagtggaacacagccctgccccaggtgcaggtggtggaggtgggccaggacggcggcacctatgacaaggacaacgtgctgatccagcacagcggggccaagaaggccagcgccagcggccaggcccagaacaaggtgtacctgggcccccccaggctcttccaggagctgcaggacctgcagaaggacctggccgtggtggagcagatcaccctgctgatcagcaccctgcacggcacctaccagaacctgaacatgacagtggcccaggactggtgcctggccctgcagaggctgatgagggtgaaggaggaggagatccacagcgccaacaagtgccgcctgcggctgctgctgcccgggaagccagacaagagcggccggcccatctccttcatggtggtgttcatcacccccaaccccctgagcaagatctcctgggtgaaccggctgcacctggccaagattggcctgcgggaggagaaccagcccggctggctgtgcccagatgaggacaagaagagcaaggcccccttctggtgccccatcctggcctgctgcatcccagccttcagcagccgggccctgagcctgcagctgggcgccctggtgcacagccctgtgaactgccccctgctgggcttctctgctgtgtccaccagcctgccccagggctacctgtgggtgggcggcggccaggagggcgctgggggccaggtggagatcttcagcctgaaccggcccagccccaggacagtgaagagcttccccctggccgcccctgtgctgtgcatggagtacatccctgagctggaggaggaggccgagagcagagatgagagccccaccgtggccgaccccagcgccaccgtgcaccccaccatctgcctgggcctgcaggacggcagcatcctgctgtacagctctgtggacaccggcacccagtgcctggtgtcctgccgcagccctggcctgcagcctgtgctgtgcctgcggcacagccccttccacctgctggccggcctgcaggacggcaccctggccgcctaccccaggaccagcggcggcgtgctgtgggacctggagagcccccctgtgtgcctgactgtgggccctggccctgtgaggaccctgctgagcctggaggatgctgtgtgggccagctgtggcccctgggtgacagtgctggaggccaccaccctgcagccccagcagagctttgaggcccaccaggatgaggccgtgtctgtgacccacatggtgaaggccggcagcggcgtgtggatggccttcagcagcggcaccagcatccgcctcttccacacagagaccctggagcacctgcaggagatcaacatcgccaccaggaccaccttcctgctgcctgacaggagcctcatcaagtgcagcccccgggcctag

SEQ ID NO: 167993 - DNA, 3723 bp, synthetic construct; identical to SEQ ID NO: 167990
  misc_feature 1..3723: note = Description of Artificial Sequence: Synthetic coding sequence
  source 1..3723: mol_type = other DNA

SEQ ID NO: 167994 - DNA, 3129 bp, synthetic construct
  misc_feature 1..3129: note = Description of Artificial Sequence: Synthetic coding sequence
  source 1..3129: mol_type = other DNA
atgctgcccagcagctcctggggcaagaggaagctgcggggccgcctgggctgggtgcggagtgatgcccggggcgtgatgtgggcccggcaggagggcctgcaccacccccacccccatgctgtgatccgctgccccagcagcagcagcagctctgtgtcctgcagcggggacagcgaggaggaggacatgggcctgctggaggtgtctgtgtctgacatcaagcccccagcccctgagctgggccccatgcctgagggcctgagcccccagcaggtggtgagaagacacatcctgggcagcatcgtgcagagcgagggcagctatgtggagagcctgaagaggatcctgcaggactacagaaaccccctgatggagatggagcccaaggccctgagcgccaggaagtgccaggtggtgttcttccgggtgaaggagatcctgcactgccacagcatgttccagatcgccctgagcagccgggtggccgagtgggacagcacagagaagattggagacctgtttgtggccagcttcagcaagtccatggtgctggatgtgtacagcgactatgtgaacaacttcaccagcgccatgagcatcatcaagaaggcctgcctgaccaagccagccttcctggagttcctgaagaggcggcaggtgtgcagcccagacagagtgaccctgtatggcctgatggtgaagcccatccagcgcttcccccagttcatcctgctgctgcaggacatgctgaagaacaccccccggggccacccagaccggctgagcctgcagctggccctgacagagctggagaccctggccgagaagctgaatgagcagaagaggctggccgaccaggtggccgagatccagcagctgaccaagtctgtgtctgacaggagcagcctgaacaagctgctgaccagcggccagaggcagctgctgctgtgtgagaccctgacagagaccgtgtatggagaccggggccagctgatcaagagcaaggagcggcgggtcttcctgctgaatgacatgctggtgtgtgccaacatcaacttcaagggccagctggagatcagcagcctggtgcccctgggccccaagtatgtggtgaagtggaacacagccctgccccaggtgcaggtggtggaggtgggccaggacggcggcacctatgacaaggacaacgtgctgatccagcacagcggggccaagaaggccagcgccagcggccaggcccagaacaaggtgtacctgggcccccccaggctcttccaggagctgcaggacctgcagaaggacctggccgtggtggagcagatcaccctgctgatcagcaccctgcacggcacctaccagaacctgaacatgacagtggcccaggactggtgcctggccctgcagaggctgatgagggtgaaggaggaggagatccacagcgccaacaagtgccgcctgcggctgctgctgcccgggaagccagacaagagcggccggcccatctccttcatggtggtgttcatcacccccaaccccctgagcaagatctcctgggtgaaccggctgcacctggccaagattggcctgcgggaggagaaccagcccggctggctgtgcccagatgaggacaagaagagcaaggcccccttctggtgccccatcctggcctgctgcatcccagccttcagcagccgggccctgagcctgcagctgggcgccctggtgcacagccctgtgaactgccccctgctgggcttctctgctgtgtccaccagcctgccccagggctacctgtgggtgggcggcggccaggagggcgctgggggccaggtggagatcttcagcctgaaccggcccagccccaggacagtgaagagcttccccctggccgcccctgtgctgtgcatggagtacatccctgagctggaggaggaggccgagagcagagatgagagccccaccgtggccgaccccagcgccaccgtgcaccccaccatctgcctgggcctgcaggacggcagcatcctgctgtacagctctgtggacaccggcacccagtgcctggtgtcctgccgcagccctggcctgcagcctgtgctgtgcctgcggcacagccccttccacctgctggccggcctgcaggacggcaccctggccgcctaccccaggaccagcggcggcgtgctgtgggacctggagagcccccctgtgtgcctgactgtgggccctggccctgtgaggaccctgctgagcctggaggatgctgtgtgggccagctgtggcccctgggtgacagtgctggaggccaccaccctgcagccccagcagagctttgaggcccaccaggatgaggccgtgtctgtgacccacatggtgaaggccggcagcggcgtgtggatggccttcagcagcggcaccagcatccgcctcttccacacagagaccctggagcacctgcaggagatcaacatcgccaccaggaccaccttcctgctgcccggccagaagcacctgtgtgtgaccagcctgctgatctgccagggcctgctgtgggtgggcacagaccagggcgtcatcgtgctgctgcctgtgccccggctggagggcatccccaagatcaccgggaagggcatggtgtccctgaatggccactgcggccctgtggccttcctggccgtggccaccagcatcctggccccagacatcctgcggagtgaccaggaggaggccgagggccccagggctgaggaggacaagccagatggccaggcccacgagcccatgccagacagccacgtgggccgggagctgaccaggaagaagggcatcctgctgcagtaccgcctgcggagcacagcccacctgcccggccccctgctgtccatgagggagcccgccccagcagatggagctgccctggagcacagtgaagaagatggcagcatctatgagatggccttcttcctgaaggccaagaacaccaagccccacaactgcctggccagccctgtgtccctggtgtgggccctggccggcctgcagggcagccacacccccctgctggagggctgtgtgcgggtgtctgtgtgtgaatgtgtgggctggtgtgtgaacatctacaagtag

SEQ ID NO: 167995 - DNA, 4578 bp, synthetic construct
  misc_feature 1..4578: note = Description of Artificial Sequence: Synthetic coding sequence
  source 1..4578: mol_type = other DNA
atgagcggcacccagagcaccatcacagaccgcttccccctgaagaagcccatccgccacggcagcatcctgaaccgggagagccccacagacaagaagcagaaggtggagagaattgccagccatgactttgaccccaccggcctggtgcagagatgtgtgatcatccagaaggatgacaatggatttggcctgactgtgtctggggacaaccctgtgtttgtgcagagcgtgaaggaggatggagctgccatgagagctggggtgcagacaggagaccgcatcatcaaggtgaatggcaccctggtgacccacagcaaccacctggaggtggtgaagctgatcaagagcggcagctatgtggccctgactgtgcagggccggcccccaggcagcccccagatccccctggccgacagcgaggtggagcccagcgtgattggccacatgagccccatcatgaccagcccccacagccctggggccagcggcaacatggagcgcatcaccagccctgtgctgatgggagaggagaacaacgtggtgcacaaccagaaggtggagatcctgaggaagatgctgcagaaggagcaggagcggctgcagctgctgcaggaggactacaacagaacaccagcccagaggctgctgaaggagatccaggaggccaagaagcacatcccccagctgcaggagcagctgagcaaggccaccggcagcgcccaggatggagctgtggtgacccccagccggcccctgggggacaccctgactgtgtctgaggccgagacagatcctggagatgtgctgggccgcacagactgcagcagtggagatgccagccggcccagcagtgacaatgctgacagccccaagagcggccccaaggagcgcatctacctggaggagaaccctgagaagtctgagaccatccaggacacagacacccagagcctggtgggcagccccagcaccagaattgccccccacatcatcggggctgaagatgatgactttggaacagaacatgagcagatcaatggccagtgcagctgcttccagagcattgagctgctgaagagcaggcctgcccacctggccgtgttcctgcaccacgtggtgtcccagtttgatcctgccaccctgctgtgctacctgtacagcgacctgtacaagcacaccaacagcaaggagacccggcgcatcttcctggagttccaccagttcttcctggacagaagtgcccacctgaaggtgtctgtgcctgatgagatgtctgctgacctggagaagaggaggcctgagctgatccctgaggacctgcaccgccactacatccagaccatgcaggagcgggtgcaccctgaggtgcagaggcacctggaggacttccggcagaagaggtccatgggcctgaccctggccgagagcgagctgaccaagctggatgctgagcgggacaaggaccggctgaccctggagaaggagaggacctgtgccgagcagatcgtggccaagattgaggaggtgctgatgacagcccaggccgtggaggaggacaagagcagcaccatgcagtatgtgatcctgatgtacatgaagcacctgggcgtgaaggtgaaggagcccaggaacctggagcacaagagaggaagaattggcttcctgcccaagatcaagcagagcatgaagaaggacaaggagggggaggagaagggcaagagaagaggcttccccagcatcctgggccccccccggcggcccagcagacatgacaacagcgccatcggccgggccatggagctgcagaaggcccggcaccccaagcacctgagcacccccagctctgtgtccccagagccccaggacagcgccaagctgcggcagagcggcctggccaatgaaggaacagatgctggctacctgcctgccaacagcatgagctctgtggccagcggggccagcttcagccaggagggcggcaaggaaaatgacaccggcagcaagcaggtgggggagaccagcgcccctggggacaccctggatggcacccccaggaccctgaacacagtgtttgacttccccccaccacccctggaccaggtgcaggaggaggagtgtgaggtggagcgggtgacagaacatggcacccccaagcccttcaggaagtttgacagcgtggcctttggagagagccagagtgaagatgagcagtttgaaaatgacctggagacagatcctcccaactggcagcagctggtgtcccgggaggtgctgctgggcctgaagccctgtgagatcaagaggcaggaggtgatcaatgagctgttctacacagagcgggcccacgtgaggaccctgaaggtgctggaccaggtgttctaccagagggtgtcccgggagggcatcctgagccccagcgagctgaggaagatcttcagcaacctggaggacatcctgcagctgcacatcggcctgaatgagcagatgaaggctgtgaggaagagaaatgagaccagcgtcatcgaccagattggagaggacctgctgacctggttcagcggccctggagaggagaagctgaagcacgccgccgccaccttctgcagcaaccagccctttgccctggagatgatcaagagccggcagaagaaggacagccgcttccagacctttgtgcaggatgctgagagcaaccccctgtgccggcggctgcagctgaaggacatcatccccacccagatgcagaggctgaccaagtaccccctgctgctggacaacatcgccaagtacacagagtggcccacagagcgggagaaggtgaagaaggctgctgaccactgccggcagatcctgaactacgtgaaccaggccgtgaaggaggccgagaacaagcagaggctggaggactaccagaggcggctggacaccagcagcctgaagctgtctgagtacccaaatgtggaggagctgaggaacctggacctgaccaagaggaagatgattcatgagggccccctggtgtggaaggtgaacagagacaagaccatcgacctgtacaccctgctgctggaggacatcctggtgctgctgcagaagcaggatgaccggctggtgctgcgctgccacagcaagatcctggccagcacagctgacagcaagcacaccttcagccctgtgatcaagctgagcacagtgctggtgcggcaggtggccacagacaacaaggccctgtttgtgatctccatgtctgacaacggggcccagatctatgagctggtggcccagacagtgtctgagaagacagtgtggcaggacctgatctgcaggatggccgcctctgtgaaggagcagagcaccaagcccatccccctgccccagagcaccccaggagagggggacaatgatgaggaggaccccagcaagctgaaggaggagcagcacggcatctctgtgacaggcctgcagagcccagaccgggacctgggcctggagagcaccctcatcagcagcaagccccagagccacagcctgagcaccagcggcaagtctgaggtgcgggacctgtttgtggccgagcggcagtttgccaaggagcagcacacagatggcaccctgaaggaggtgggggaggactaccagatcgccatcccagacagccacctgcctgtgtctgaggagcgctgggccctggatgccctgaggaacctgggcctgctgaagcagctgctggtgcagcagctgggcctgacagagaagtctgtgcaggaggactggcagcacttcccccgctacagaacagccagccagggcccccagacagacagcgtcatccagaacagcgagaacatcaaggcctaccacagcggggagggccacatgcccttcagaacaggcaccggggacatcgccacctgctacagccccaggaccagcacagagagctttgccccccgggacagcgtgggcctggccccccaggacagccaggccagcaacatcctggtgatggaccacatgatcatgaccccagagatgcccaccatggagcctgagggcggcctggatgacagcggggagcacttctttgatgcccgggaggcccacagtgatgagaaccccagtgaaggagatggagctgtgaacaaggaggagaaggatgtgaacctgcgcatcagcggcaactacctgatcctggatggctatgaccctgtgcaggagagcagcacagatgaggaggtggccagcagcctgaccctgcagcccatgacaggcatcccagctgtggagagcacccaccagcagcagcacagcccccagaacacccacagtgatggagccatcagccccttcaccccagagttcctggtgcagcagcgctggggcgccatggagtacagctgctttgagatccagagccccagcagctgtgccgacagccagagccagatcatggagtacatccacaagattgaagctgacctggagcacctgaagaaggtggaggagagctacaccatcctgtgccagaggctggccggcagcgccctgacagacaagcacagcgacaagagctag

SEQ ID NO: 167996 - DNA, 4635 bp, synthetic construct
  misc_feature 1..4635: note = Description of Artificial Sequence: Synthetic coding sequence
  source 1..4635: mol_type = other DNA
atgagcggcacccagagcaccatcacagaccgcttccccctgaagaagcccatccgccacggcagcatcctgaaccgggagagccccacagacaagaagcagaaggtggagagaattgccagccatgactttgaccccacagacagcagcagcaagaagaccaagagcagcagcgaggagagccgctctgagatctacggcctggtgcagcgctgcgtcatcatccagaaggatgacaatggcttcggcctgactgtgtctggggacaaccctgtgtttgtgcagagcgtgaaggaggatggagctgccatgagagctggggtgcagacaggagaccgcatcatcaaggtgaatggcaccctggtgacccacagcaaccacctggaggtggtgaagctgatcaagagcggcagctatgtggccctgactgtgcagggccggcccccaggcagcccccagatccccctggccgacagcgaggtggagcccagcgtcatcggccacatgagccccatcatgaccagcccccacagccctggggccagcggcaacatggagcgcatcaccagccctgtgctgatgggagaagaaaataatgtggtgcacaaccagaaggtggagatcctgaggaagatgctgcagaaggagcaggagcggctgcagctgctgcaggaggactacaacagaacaccagcccagaggctgctgaaggagatccaggaggccaagaagcacatcccccagctgcaggagcagctgagcaaggccactggaagtgcccaggatggagctgtggtgacccccagccggcccctgggggacaccctgactgtgtctgaggccgagacagatcctggagatgtgctgggccgcacagactgcagcagtggagatgccagccggcccagcagtgacaatgctgacagccccaagagcggccccaaggagcgcatctacctggaggagaaccctgagaagtctgagaccatccaggacacagacacccagagcctggtgggcagccccagcacccgcatcgccccccacatcattggagcagaagatgatgactttggaacagagcacgagcagatcaatggccagtgcagctgcttccagagcattgagctgctgaagagcaggcctgcccacctggccgtgttcctgcaccacgtggtgtcccagtttgatcctgccaccctgctgtgctacctgtacagcgacctgtacaagcacaccaacagcaaggagacccggcgcatcttcctggagttccaccagttcttcctggacagaagtgcccacctgaaggtgtctgtgcctgatgagatgtctgctgacctggagaagagaagacctgagctgatccctgaggacctgcaccgccactacatccagaccatgcaggagcgggtgcaccctgaggtgcagaggcacctggaggacttccggcagaagaggtccatgggcctgaccctggccgagagcgagctgaccaagctggatgctgagcgggacaaggaccggctgaccctggagaaggagaggacctgtgccgagcagatcgtggccaagattgaggaggtgctgatgacagcccaggccgtggaggaggacaagagcagcaccatgcagtatgtgatcctgatgtacatgaagcacctgggcgtgaaggtgaaggagcccaggaacctggagcacaagaggggccgcatcggcttcctgcccaagatcaagcagagcatgaagaaggacaaggagggggaggagaagggcaagaggcggggcttccccagcatcctgggccccccaagaagacccagcagacatgacaacagcgccatcggccgggccatggagctgcagaaggcccggcaccccaagcacctgagcacccccagctctgtgtccccagagccccaggacagcgccaagctgcggcagagcggcctggccaatgaaggaacagatgctggctacctgcctgccaacagcatgagctctgtggccagcggggccagcttcagccaggagggcggcaaggaaaatgacaccggcagcaagcaggtgggggagaccagcgcccctggggacaccctggatggcacccccaggaccctgaacacagtgtttgacttccccccaccacccctggaccaggtgcaggaggaggagtgtgaggtggagcgggtgacagagcacggcacccccaagcccttcaggaagtttgattctgtggccttcggggagagccagagtgaagatgagcagtttgaaaatgacctggagacagacccccccaactggcagcagctggtgtcccgggaggtgctgctgggcctgaagccctgtgagatcaagaggcaggaggtgatcaatgaactcttctacacagagcgggcccacgtgaggaccctgaaggtgctggaccaggtgttctaccagagggtgtcccgggagggcatcctgagccccagcgagctgaggaagatcttcagcaacctggaggacatcctgcagctgcacatcggcctgaatgagcagatgaaggctgtgaggaagagaaatgagacctctgtgattgaccagatcggggaggacctgctgacctggttcagcggccctggagaggagaagctgaagcatgctgctgccaccttctgcagcaaccagccctttgccctggagatgatcaagagccggcagaagaaggacagccgcttccagacctttgtgcaggatgctgagagcaaccccctgtgccggcggctgcagctgaaggacatcatccccacccagatgcagaggctgaccaagtaccccctgctgctggacaacatcgccaagtacacagagtggcccacagagcgggagaaggtgaagaaggctgctgaccactgccggcagatcctgaactacgtgaaccaggccgtgaaggaggccgagaacaagcagaggctggaggactaccagaggcggctggacaccagcagcctgaagctgtctgagtaccccaacgtggaggagctgaggaacctggacctgaccaagaggaagatgatccacgagggccccctggtgtggaaggtgaacagagacaagaccatcgacctgtacaccctgctgctggaggacatcctggtgctgctgcagaagcaggatgaccggctggtgctgcgctgccacagcaagatcctggccagcacagctgacagcaagcacaccttcagccctgtgatcaagctgagcacagtgctggtgcggcaggtggccacagacaacaaggccctcttcgtcatctccatgtctgacaatggagcccagatctatgagctggtggcccagacagtgtctgagaagacagtgtggcaggacctgatctgcaggatggccgcctctgtgaaggagcagagcaccaagcccatccccctgccccagagcaccccaggagagggggacaatgatgaggaggaccccagcaagctgaaggaggagcagcacggcatctctgtgacaggcctgcagagcccagaccgggacctgggcctggagagcaccctcatcagcagcaagccccagagccacagcctgagcaccagcggcaagtctgaggtgcgggacctgtttgtggccgagcggcagtttgccaaggagcagcacacagatggcaccctgaaggaggtgggggaggactaccagatcgccatcccagacagccacctgcctgtgtctgaggagcgctgggccctggatgccctgaggaacctgggcctgctgaagcagctgctggtgcagcagctgggcctgacagagaagtctgtgcaggaggactggcagcacttcccccgctacagaacagccagccagggcccccagacagattctgtcatccagaacagcgagaacatcaaggcctaccacagcggggagggccacatgcccttcagaactggaactggagacatcgccacctgctacagccccaggaccagcacagagagctttgccccccgggacagcgtgggcctggccccccaggacagccaggccagcaacatcctggtgatggaccacatgatcatgaccccagagatgcccaccatggagcctgagggcggcctggatgattctggagagcacttctttgatgcccgggaggcccacagtgatgagaaccccagtgaaggagatggagctgtgaacaaggaggagaaggatgtgaacctgcgcatcagcggcaactacctgatcctggatggctatgaccctgtgcaggagagcagcacagatgaggaggtggccagcagcctgaccctgcagcccatgacaggcatcccagctgtggagagcacccaccagcagcagcacagcccccagaacacccacagtgatggagccatcagccccttcaccccagagttcctggtgcagcagcgctggggcgccatggagtacagctgctttgagatccagagccccagcagctgtgccgacagccagagccagatcatggagtacatccacaagattgaggccgacctggagcacctgaagaaggtggaggagagctacaccatcctgtgccagaggctggccggcagcgccctgacagacaagcacagcgacaagagctag

SEQ ID NO: 167997 - DNA, 2409 bp, synthetic construct
  misc_feature 1..2409: note = Description of Artificial Sequence: Synthetic coding sequence
  source 1..2409: mol_type = other DNA
atggactgtggccccccagccaccctgcagccccacctgaccggccccccaggcacagcccaccaccctgtggccgtgtgccagcaggagagcctgagctttgctgagctgcctgccctgaagccacccagccctgtgtgcctggacctcttccctgtggcccctgaggagctgcgggcccctggcagccgctggagcctgggcaccccagcccccctgcagggcctgctgtggcccctgagccctgggggcagtgacacagagatcaccagcggcggcatgaggcccagcagagctggctcctggccccactgccctggggcccagcccccagccctggagggcccctggagccccaggcacacccagccccagaggcgggccagccacggcagcgagaagaagagcgcctggaggaagatgagggtgtaccagcgggaggaggtgcccggctgcccagaggcccatgctgtgttcctggagcccggccaggtggtgcaggagcaggccctgagcacagaggagccccgggtggagctgagcggcagcaccagggtgtccctggagggccctgagcggcggcgcttcagcgccagcgagctgatgacccggctgcacagcagcctgcggctgggcagaaattctgctgcccgggccctgatcagcggcagcggcaccggggccgcccgggagggcaaggccagcggcatggaggcccggtctgtggagatgtctggggacagagtgtccaggcctgcccctggggacagccgggagggggactggagcgagccccggctggacacccaggaggagccccccctgggcagccgcagcaccaatgaaagacggcagagccgcttcctgctgaacagcgtgctgtaccaggagtacagtgatgtggccagcgcccgggagctgcggcggcagcagcgggaggaggagggccctggagatgaagctgagggcgctgaggagggccctggccccccccgggccaacctgagccccagcagcagcttccgggcccagaggtctgcccggggcagcaccttcagcctgtggcaggacatcccagatgtgcggggcagcggcgtgctggccaccctgagcctgcgggactgcaagctgcaggaggccaagtttgagctgatcaccagcgaggccagctacatccacagcctgtctgtggccgtgggccacttcctgggcagcgctgagctgtctgagtgcctgggcgcccaggacaagcagtggctgttcagcaagctgcctgaggtgaagagcaccagcgagcgcttcctgcaggacctggagcagaggctggaggctgatgtgctgcgcttctctgtgtgtgatgtggtgctggaccactgcccagccttcagaagagtgtacctgccctacgtgaccaaccaggcctaccaggagaggacctaccagaggctgctgctggagaacccccgcttccctggcatcctggcccggctggaggagagccctgtgtgccagaggctgcccctgaccagcttcctgatcctgcccttccagaggatcacccggctgaagatgctggtggagaacatcctgaagaggacagcccagggctctgaagatgaggacatggccaccaaggccttcaatgccctgaaggagctggtgcaggagtgcaatgcctctgtgcagagcatgaagaggacagaggagctgatccacctgagcaagaagatccactttgagggcaagatcttccccctcatcagccaggcccgctggctggtgcgccacggggagctggtggagctggcccccctgcctgctgcccccccagccaagctgaagctgagcagcaaggctgtgtacctgcacctgttcaatgactgcctgctgctgagcaggaggaaggagctgggcaagtttgctgtgtttgtgcacgccaagatggccgagctgcaggtgcgggacctgagcctgaagctgcagggcatccctggccacgtgttcctgctgcagctgctgcacggccagcacatgaagcaccagttcctgctgcgggccaggacagagagcgagaagcagcgctggatcagcgccctgtgccccagcagcccccaggaggacaaggaggtgatcagtgaaggagaggactgcccccaggtgcagtgtgtgaggacctacaaggccctgcacccagatgagctgaccctggagaagacagacatcctgtctgtgaggacctggaccagtgatggctggctggagggcgtgcggctggctgatggagagaagggctgggtgccccaggcctacgtggaggagatcagcagcctgagcgcccggctgaggaacctgcgggagaacaagagggtgaccagcgccaccagcaagctgggggaggcccctgtgtag

SEQ ID NO: 167998 - DNA, 1575 bp, synthetic construct
  misc_feature 1..1575: note = Description of Artificial Sequence: Synthetic coding sequence
  source 1..1575: mol_type = other DNA
atggactgtggccccccagccaccctgcagccccacctgaccggccccccaggcacagcccaccaccctgtggccgtgtgccagcaggagagcctgagctttgctgagctgcctgccctgaagccacccagccctgtgtgcctggacctcttccctgtggcccctgaggagctgcgggcccctggcagccgctggagcctgggcaccccagcccccctgcagggcctgctgtggcccctgagccctgggggcagtgacacagagatcaccagcggcggcatgaggcccagcagagctggctcctggccccactgccctggggcccagcccccagccctggagggcccctggagccccaggcacacccagccccagaggcgggccagccacggcagcgagaagaagagcgcctggaggaagatgagggtgtaccagcgggaggaggtgcccggctgcccagaggcccatgctgtgttcctggagcccggccaggtggtgcaggagcaggccctgagcacagaggagccccgggtggagctgagcggcagcaccagggtgtccctggagggccctgagcggcggcgcttcagcgccagcgagctgatgacccggctgcacagcagcctgcggctgggcagaaattctgctgcccgggccctgatcagcggcagcggcaccggggccgcccgggagggcaaggccagcggcatggaggcccggtctgtggagatgtctggggacagagtgtccaggcctgcccctggggacagccgggagggggactggagcgagccccggctggacacccaggaggagccccccctgggcagccgcagcaccaatgaaagacggcagagccgcttcctgctgaacagcgtgctgtaccaggagtacagtgatgtggccagcgcccgggagctgcggcggcagcagcgggaggaggagggccctggagatgaagctgagggcgctgaggagggccctggccccccccgggccaacctgagccccagcagcagcttccgggcccagaggtctgcccggggcagcaccttcagcctgtggcaggacatcccagatgtgcggggcagcggcgtgctggccaccctgagcctgcgggactgcaagctgcaggaggccaagtttgagctgatcaccagcgaggccagctacatccacagcctgtctgtggccgtgggccacttcctgggcagcgctgagctgtctgagtgcctgggcgcccaggacaagcagtggctgttcagcaagctgcctgaggtgaagagcaccagcgagcgcttcctgcaggacctggagcagaggctggaggctgatgtgctgcgcttctctgtgtgtgatgtggtgctggaccactgcccagccttcagaagagtgtacctgccctacgtgaccaaccaggcctaccaggagaggacctaccagaggctgctgctggagaacccccgcttccctggcatcctggcccggctggaggagagccctgtgtgccagaggctgcccctgaccagcttcctgatcctgcagcccccaggcggccagggcggccaccagtag

SEQ ID NO: 167999 - DNA, 1509 bp, synthetic construct
  misc_feature 1..1509: note = Description of Artificial Sequence: Synthetic coding sequence
  source 1..1509: mol_type = other DNA
atggactgtggccccccagccaccctgcagccccacctgaccggccccccaggcacagcccaccaccctgtggccgtgtgccagcaggagagcctgagctttgctgagctgcctgccctgaagccacccagccctgtgtgcctggacctcttccctgtggcccctgaggagctgcgggcccctggcagccgctggagcctgggcaccccagcccccctgcagggcctgctgtggcccctgagccctgggggcagtgacacagagatcaccagcggcggcatgaggcccagcagagctggctcctggccccactgccctggggcccagcccccagccctggagggcccctggagccccaggcacacccagccccagaggcgggccagccacggcagcgagaagaagagcgcctggaggaagatgagggtgtaccagcgggaggaggtgcccggctgcccagaggcccatgctgtgttcctggagcccggccaggtggtgcaggagcaggccctgagcacagaggagccccgggtggagctgagcggcagcaccagggtgtccctggagggccctgagcggcggcgcttcagcgccagcgagctgatgacccggctgcacagcagcctgcggctgggcagaaattctgctgcccgggccctgatcagcggcagcggcaccggggccgcccgggagggcaaggccagcggcatggaggcccggtctgtggagatgtctggggacagagtgtccaggcctgcccctggggacagccgggagggggactggagcgagccccggctggacacccaggaggagccccccctgggcagccgcagcaccaatgaaagacggcagagccgcttcctgctgaacagcgtgctgtaccaggagtacagtgatgtggccagcgcccgggagctgcggcggcagcagcgggaggaggagggccctggagatgaagctgagggcgctgaggagggccctggccccccccgggccaacctgagccccagcagcagcttccgggcccagaggtctgcccggggcagcaccttcagcctgtggcaggacatcccagatgtgcggggcagcggcgtgctggccaccctgagcctgcgggactgcaagctgcaggaggccaagtttgagctgatcaccagcgaggccagctacatccacagcctgtctgtggccgtgggccacttcctgggcagcgctgagctgtctgagtgcctgggcgcccaggacaagcagtggctgttcagcaagctgcctgaggtgaagagcaccagcgagcgcttcctgcaggacctggagcagaggctggaggctgatgtgctgcgcttctctgtgtgtgatgtggtgctggaccactgcccagccttcagaagagtgtacctgccctacgtgaccaaccaggcctaccaggagaggacctaccagaggctgctgcgggagaacaagagggtgaccagcgccaccagcaagctgggggaggcccctgtgtag

SEQ ID NO: 168000 - DNA, 504 bp, synthetic construct
  misc_feature 1..504: note = Description of Artificial Sequence: Synthetic coding sequence
  source 1..504: mol_type = other DNA
gagcggctggcccagtttcctgctgctggccggggcagccctggccccccaggggcccggctgggcgtgggcctggagaagggccggggccgggaggtgtggaggcctggggtgtggggctgtgaggcccgggccagcgaggtgaactggagctgcccctttgatcctgtgtgtgccctgccccaggccaagtttgagctgatcaccagcgaggccagctacatccacagcctgtctgtggccgtgggccacttcctgggcagcgctgagctgtctgaatgtctgggcgcccaggacaagcagtggctgttcagcaagctgcctgaggtgaagagcaccagcgagcgcttcctgcaggacctggagcagaggctggaggctgatgtgctgcgcttctctgtgtgtgatgtggtgctggaccactgcccagccttccggcgggtgtacctgccctacgtgaccaaccaggcctaccaggagaggacctaccagaggctgctgtag

SEQ ID NO: 168001 - DNA, 924 bp, synthetic construct
  misc_feature 1..924: note = Description of Artificial Sequence: Synthetic coding sequence
  source 1..924: mol_type = other DNA
tgaagagaccggggccaggagcggctggcccagtttcctgctgctggccggggcagccctggccccccaggggcccggctgggcgtgggcctggagaagggccggggccgggaggtgtggaggcctggggtgtggggctgtgaggcccgggccagcgaggtgaactggagctgcccctttgatcctgtgtgtgccctgccccaggccaagtttgagctgatcaccagcgaggccagctacatccacagcctgtctgtggccgtgggccacttcctgggcagcgctgagctgtctgaatgtctgggcgcccaggacaagcagtggctgttcagcaagctgcctgaggtgaagagcaccagcgagcgcttcctgcaggacctggagcagaggctggaggctgatgtgctgcgcttctctgtgtgtgatgtggtgctggaccactgcccagccttccggcgggtgtacctgccctacgtgaccaaccaggcctaccaggagaggacctaccagaggctgctgctggagaacccccgcttccctggcatcctggcccggctggaggagagccctgtgtgccagaggctgcccctgaccagcttcctgatcctgcccttccagaggatcacccggctgaagatgctggtggagaacatcctgaagaggacagcccagggctctgaagatgaggacatggccaccaaggccttcaatgccctgaaggagctggtgcaggagtgcaatgcctctgtgcagagcatgaagaggacagaggagctgatccacctgagcaagaagatccactttgagggcaagatcttccccctcatcagccaggcccgctggctggtgagacatggagagctggtggagctggcccccctgcctgctgcccccccagccaagctgaagctgagcagcaagtag

SEQ ID NO: 168002 - DNA, 1581 bp, synthetic construct
  misc_feature 1..1581: note = Description of Artificial Sequence: Synthetic coding sequence
  source 1..1581: mol_type = other DNA
atggtggccaaggactaccccttctacctgactgtgaagagggccaactgcagcctggagctgcccccagccagcggccctgccaaggatgctgaggagcccagcaacaagagggtgaagcccctgagccgggtgaccagcctggccaacctgatcccccctgtgaaggccacccccctgaagcgcttcagccagaccctgcagaggagcatctccttccgctctgagagcaggccagacatcctggccccccggccctggagcagaaatgctgcccccagcagcaccaagaggcgggacagcaagctgtggagcgagacctttgatgtgtgtgtgaaccagatgctgaccagcaaggagatcaagaggcaggaggccatctttgagctgagccagggcgaggaggacctgattgaggacctgaagctggccaagaaggcctaccatgaccccatgctgaagctgagcatcatgacagagcaggagctgaaccagatcttcggcaccctggacagcctcatccccctgcacgaggagctgctgagccagctgagagatgtgaggaagccagatggcagcacagagcacgtgggccccatcctggtgggctggctgccctgcctgagcagctatgacagctactgcagcaaccaggtggccgccaaggccctgctggaccacaagaagcaggaccaccgggtgcaggacttcctgcagcgctgcctggagagccccttcagcaggaagctggacctgtggaacttcctggacatccccaggagccggctggtgaagtaccccctgctgctgcgggagatcctgcggcacaccccaaatgacaacccagaccagcagcacctggaggaggccatcaacatcatccagggcatcgtggccgagatcaacaccaagacaggagagagtgaatgtcgctactacaaggagcggctgctgtacctggaggagggccagaaggacagcctgattgacagcagccgggtgctgtgctgccacggggagctgaagaacaacagaggagtgaagctgcacgtgttcctgttccaggaggtgctggtgatcaccagggctgtgacccacaatgagcagctgtgctaccagctgtaccggcagcccatccctgtgaaggacctgctgctggaggacctgcaggatggagaggtgcggctgggcggcagcctgcggggggccttcagcaacaatgaaagaatcaagaacttcttccgggtgtccttcaagaatggcagccagagccagacccacagcctgcaggccaatgacaccttcaacaagcagcagtggctgaactgcatccggcaggccaaggagaccgtgctgtgtgccgccggccaggccggcgtgctggacagcgagggcagcttcctgaaccccaccaccggcagccgggagctgcagggcgagaccaagctggagcagatggaccagagcgacagcgagagtgactgcagcatggacaccagcgaggtgtccctggactgtgagaggatggagcagacagacagcagctgtggcaacagcagacatggagagagcaatgtgtag

SEQ ID NO: 168003 - DNA, 1677 bp, synthetic construct
  misc_feature 1..1677: note = Description of Artificial Sequence: Synthetic coding sequence
  source 1..1677: mol_type = other DNA
atggacagcagcacagccatgaaccagtgcagctgccggggcatggaggagaacaaggagcggcccaagaggcagaggcagaacaacttccccatgttccccagccccaaggcctggaacttccggggcaggaagaggaagcagagcacccaggatgaagatgctgtgtccctgtgcagcctggacatcagcgagcccagcaacaagagggtgaagcccctgagccgggtgaccagcctggccaacctgatcccccctgtgaaggccacccccctgaagcgcttcagccagaccctgcagaggagcatctccttccgctctgagagcaggccagacatcctggccccccggccctggagcagaaatgctgcccccagcagcaccaagaggcgggacagcaagctgtggagcgagacctttgatgtgtgtgtgaaccagatgctgaccagcaaggagatcaagaggcaggaggccatctttgagctgagccagggcgaggaggacctgattgaggacctgaagctggccaagaaggcctaccatgaccccatgctgaagctgagcatcatgacagagcaggagctgaaccagatcttcggcaccctggacagcctcatccccctgcacgaggagctgctgagccagctgagagatgtgaggaagccagatggcagcacagagcacgtgggccccatcctggtgggctggctgccctgcctgagcagctatgacagctactgcagcaaccaggtggccgccaaggccctgctggaccacaagaagcaggaccaccgggtgcaggacttcctgcagcgctgcctggagagccccttcagcaggaagctggacctgtggaacttcctggacatccccaggagccggctggtgaagtaccccctgctgctgcgggagatcctgcggcacaccccaaatgacaacccagaccagcagcacctggaggaggccatcaacatcatccagggcatcgtggccgagatcaacaccaagacaggagagagtgaatgtcgctactacaaggagcggctgctgtacctggaggagggccagaaggacagcctgattgacagcagccgggtgctgtgctgccacggggagctgaagaacaacagaggagtgaagctgcacgtgttcctgttccaggaggtgctggtgatcaccagggctgtgacccacaatgagcagctgtgctaccagctgtaccggcagcccatccctgtgaaggacctgctgctggaggacctgcaggatggagaggtgcggctgggcggcagcctgcggggggccttcagcaacaatgaaagaatcaagaacttcttccgggtgtccttcaagaatggcagccagagccagacccacagcctgcaggccaatgacaccttcaacaagcagcagtggctgaactgcatccggcaggccaaggagaccgtgctgtgtgccgccggccaggccggcgtgctggacagcgagggcagcttcctgaaccccaccaccggcagccgggagctgcagggcgagaccaagctggagcagatggaccagagcgacagcgagagtgactgcagcatggacaccagcgaggtgtccctggactgtgagaggatggagcagacagacagcagctgtggcaacagcagacatggagagagcaatgtgtag

SEQ ID NO: 168004 - DNA, 1599 bp, synthetic construct
  misc_feature 1..1599: note = Description of Artificial Sequence: Synthetic coding sequence
  source 1..1599: mol_type = other DNA
atgattgaggtgtgccaccacaactggctgctgtggctgtgccccagcaagtttggcatcttcatgtgctgcctggccagcaccaccggccagatggagctgcggaggacccgggagcccagcaacaagagggtgaagcccctgagccgggtgaccagcctggccaacctgatcccccctgtgaaggccacccccctgaagcgcttcagccagaccctgcagaggagcatctccttccgctctgagagcaggccagacatcctggccccccggccctggagcagaaatgctgcccccagcagcaccaagaggcgggacagcaagctgtggagcgagacctttgatgtgtgtgtgaaccagatgctgaccagcaaggagatcaagaggcaggaggccatctttgagctgagccagggcgaggaggacctgattgaggacctgaagctggccaagaaggcctaccatgaccccatgctgaagctgagcatcatgacagagcaggagctgaaccagatcttcggcaccctggacagcctcatccccctgcacgaggagctgctgagccagctgagagatgtgaggaagccagatggcagcacagagcacgtgggccccatcctggtgggctggctgccctgcctgagcagctatgacagctactgcagcaaccaggtggccgccaaggccctgctggaccacaagaagcaggaccaccgggtgcaggacttcctgcagcgctgcctggagagccccttcagcaggaagctggacctgtggaacttcctggacatccccaggagccggctggtgaagtaccccctgctgctgcgggagatcctgcggcacaccccaaatgacaacccagaccagcagcacctggaggaggccatcaacatcatccagggcatcgtggccgagatcaacaccaagacaggagagagtgaatgtcgctactacaaggagcggctgctgtacctggaggagggccagaaggacagcctgattgacagcagccgggtgctgtgctgccacggggagctgaagaacaacagaggagtgaagctgcacgtgttcctgttccaggaggtgctggtgatcaccagggctgtgacccacaatgagcagctgtgctaccagctgtaccggcagcccatccctgtgaaggacctgctgctggaggacctgcaggatggagaggtgcggctgggcggcagcctgcggggggccttcagcaacaatgaaagaatcaagaacttcttccgggtgtccttcaagaatggcagccagagccagacccacagcctgcaggccaatgacaccttcaacaagcagcagtggctgaactgcatccggcaggccaaggagaccgtgctgtgtgccgccggccaggccggcgtgctggacagcgagggcagcttcctgaaccccaccaccggcagccgggagctgcagggcgagaccaagctggagcagatggaccagagcgacagcgagagtgactgcagcatggacaccagcgaggtgtccctggactgtgagaggatggagcagacagacagcagctgtggcaacagcagacatggagagagcaatgtgtag

SEQ ID NO: 168005 - DNA, 2073 bp, synthetic construct
  misc_feature 1..2073: note = Description of Artificial Sequence: Synthetic coding sequence
  source 1..2073: mol_type = other DNA
atgccctgggaggagcctgctggggagaagcccagctgcagccacagccagaaggccttccacatggagcccgcccagaagccctgcttcaccacagacatggtgacctgggccctgctgtgcatctctgctgagaccgtgcggggggaggcccccagccagccccggggcatcccccacaggagccctgtgtctgtggatgacctgtggctggagaagacccagaggaagaagctgcagaagcaggcccacgtggagcggcggctgcacatcggggctgtgcacaaggatggagtgaagtgctggaggaagaccatcatcaccagccctgagagcctgaacctgcccaggaggagccaccccctgagccagagcgcccccaccggcctgaaccacatgggctggccagagcacaccccaggcacagccatgccagatggagccctggacacagctgtgtgtgctgatgaggtgggcagcgaggaggacctgtatgatgacctgcacagcagcagccaccactacagccaccctgggggcggcggggagcagctggccatcaatgagctgatcagtgatggctctgtggtgtgtgccgaggccctgtgggaccacgtgaccatggatgaccaggagctgggcttcaaggctggagatgtgattgaggtgatggatgccaccaaccgggagtggtggtggggccgggtggctgatggagagggctggttccctgccagctttgtgcggctgcgggtgaaccaggatgagccagcagatgatgatgcccccctggccggcaacagcggggctgaagatggcggcgctgaggcccagagcagcaaggaccagatgaggaccaacgtcatcaatgagatcctgagcacagagcgggactacatcaagcacctgcgggacatctgtgagggctacgtgcggcagtgcaggaagagagctgacatgttcagcgaggagcagctgcggaccatcttcggcaacatcgaggacatctaccgctgccagaaggcctttgtgaaggccctggagcagcgcttcaaccgggagcggccccacctgtctgagctgggcgcctgcttcctggagcaccaggccgacttccagatctacagcgagtactgcaacaaccaccccaatgcctgtgtggagctgagccggctgaccaagctgagcaaatatgtgtacttctttgaggcctgccgcctgctgcagaagatgattgacatcagcctggatggcttcctgctgacccctgtgcagaagatctgcaagtaccccctgcagctggccgagctgctgaagtacacccacccccagcaccgggacttcaaggatgtggaggccgccctgcacgccatgaagaatgtggcccagctgatcaatgaaaggaagaggcggctggagaacatcgacaagatcgcccagtggcagagcagcattgaggactgggagggggaggacctgctggtgcgcagcagcgagctgatctacagcggggagctgaccagggtgacccagccccaggccaagagccagcagaggatgttcttcctgtttgaccaccagctgatctactgcaagaaggacctgctgcggagagatgtgctgtactacaagggccgcctggacatggatggcctggaggtggtggacctggaggatggcaaggaccgggacctgcacgtgtccatcaagaatgccttccggctgcacagaggagccaccggggacagccacctgctgtgcaccaggaagccagagcagaagcagcgctggctgaaggcctttgcccgggagcgggagcaggtgcagctggaccaggagaccggcttcagcatcacagagctgcagaggaagcaggccatgctgaatgccagcaagcagcaggtgacaggcaagcccaaggctgtgggccggccctgctacctgacccggcagaagcacccagccctgcccagcaaccggccccagcagcaggtgctggtgctggccgagcccaggaggaagcccagcaccttctggcacagcatcagccggctggcccccttcaggaagtag

SEQ ID NO: 168006 - DNA, 1860 bp, synthetic construct
  misc_feature 1..1860: note = Description of Artificial Sequence: Synthetic coding sequence
  source 1..1860: mol_type = other DNA
atgaggccagatggccagcaggccctggatgctgtggtgcgcagctttgactgccacagcgaggccgccctgcggcagagaaatgatgtgatctactgcagcctgcccaggacagcccagggcatcgtgcagcgggaggaccagctggaggtgctggtgtccctgcgggaggtgtggggcagaagaagaggaagagatggcacctgcaccggggccatgccagatggagccctggacacagctgtgtgtgctgatgaggtgggcagcgaggaggacctgtatgatgacctgcacagcagcagccaccactacagccaccctgggggcggcggggagcagctggccatcaatgaactcatcagtgatggctctgtggtgtgtgccgaggccctgtgggaccacgtgaccatggatgaccaggagctgggcttcaaggctggagatgtgattgaggtgatggatgccaccaaccgggagtggtggtggggccgggtggctgatggagagggctggttccctgccagctttgtgcggctgcgggtgaaccaggatgagccagcagatgatgatgcccccctggccggcaacagcggggctgaagatggaggagctgaggcccagagcagcaaggaccagatgaggaccaacgtcatcaatgagatcctgagcacagagcgggactacatcaagcacctgcgggacatctgtgagggctacgtgcggcagtgcaggaagagagctgacatgttttctgaggagcagctgcggaccatctttggaaatattgaggacatctaccgctgccagaaggcctttgtgaaggccctggagcagcgcttcaaccgggagcggccccacctgtctgagctgggcgcctgcttcctggagcaccaggccgacttccagatctacagcgagtactgcaacaaccaccccaatgcctgtgtggagctgagccggctgaccaagctgagcaaatatgtgtacttctttgaggcctgccgcctgctgcagaagatgattgacatcagcctggatggcttcctgctgacccctgtgcagaagatctgcaagtaccccctgcagctggccgagctgctgaagtacacccacccccagcaccgggacttcaaggatgtggaggccgccctgcacgccatgaagaatgtggcccagctgatcaatgaaaggaagaggcggctggagaacatcgacaagatcgcccagtggcagagcagcattgaggactgggagggggaggacctgctggtgcgcagcagcgagctgatctacagcggggagctgaccagggtgacccagccccaggccaagagccagcagaggatgttcttcctgtttgaccaccagctgatctactgcaagaaggacctgctgcggagagatgtgctgtactacaagggccgcctggacatggatggcctggaggtggtggacctggaggatggcaaggaccgggacctgcacgtgtccatcaagaatgccttccggctgcacagaggagccactggagacagccacctgctgtgcaccaggaagccagagcagaagcagcgctggctgaaggcctttgcccgggagcgggagcaggtgcagctggaccaggagaccggcttcagcatcacagagctgcagaggaagcaggccatgctgaatgccagcaagcagcaggtgacaggcaagcccaaggctgtgggccggccctgctacctgacccggcagaagcacccagccctgcccagcaaccggccccagcagcaggtgctggtgctggccgagcccaggaggaagcccagcaccttctggcacagcatcagccggctggcccccttcaggaagtag

SEQ ID NO: 168007 - DNA, 2013 bp, synthetic construct
  misc_feature 1..2013: note = Description of Artificial Sequence: Synthetic coding sequence
  source 1..2013: mol_type = other DNA
atgccctgggaggagcctgctggggagaagcccagctgcagccacagccagaaggccttccacatggagcccgcccagaagccctgcttcaccacagacatggtgacctgggccctgctgtgcatctctgctgagaccgtgcggggggaggcccccagccagccccggggcatcccccacaggagccctgtgtctgtggatgacctgtggctggagaagacccagaggaagaagctgcagaagcaggcccacgtggagcggcggctgcacatcggggctgtgcacaaggatggagtgaagtgctggaggaagaccatcatcaccagccctgagagcctgaacctgcccaggaggagccaccccctgagccagagcgcccccaccggcctgaaccacatgggctggccagagcacaccccaggcacagccatgccagatggagccctggacacagctgtgtgtgctgatgaggtgggcagcgaggaggacctgtatgatgacctgcacagcagcagccaccactacagccaccctgggggcggcggggagcagctggccatcaatgagctgatcagtgatggctctgtggtgtgtgccgaggccctgtgggaccacgtgaccatggatgaccaggagctgggcttcaaggctggagatgtgattgaggtgatggatgccaccaaccgggagtggtggtggggccgggtggctgatggagagggctggttccctgccagctttgtgcggctgcgggtgaaccaggatgagccagcagatgatgatgcccccctggccggcaacagcggggctgaagatggcggcgctgaggcccagagcagcaaggaccagatgaggaccaacgtcatcaatgagatcctgagcacagagcgggactacatcaagcacctgcgggacatctgtgagggctacgtgcggcagtgcaggaagagagctgacatgttcagcgaggagcagctgcggaccatcttcggcaacatcgaggacatctaccgctgccagaaggcctttgtgaaggccctggagcagcgcttcaaccgggagcggccccacctgtctgagctgggcgcctgcttcctggagcaccaggccgacttccagatctacagcgagtactgcaacaaccaccccaatgcctgtgtggagctgagccggctgaccaagctgagcaaatatgtgtacttctttgaggcctgccgcctgctgcagaagatgattgacatcagcctggatggcttcctgctgacccctgtgcagaagatctgcaagtaccccctgcagctggccgagctgctgaagtacacccacccccagcaccgggacttcaaggatgtggaggccgccctgcacgccatgaagaatgtggcccagctgatcaatgaaaggaagaggcggctggagaacatcgacaagatcgcccagtggcagagcagcattgaggactgggagggggaggacctgctggtgcgcagcagcgagctgatctacagcggggagctgaccagggtgacccagccccaggccaagagccagcagaggatgttcttcctgtttgaccaccagctgatctactgcaagaaggacctgctgcggagagatgtgctgtactacaagggccgcctggacatggatggcctggaggtggtggacctggaggatggcaaggaccgggacctgcacgtgtccatcaagaatgccttccggctgcacagaggagccaccggggacagccacctgctgtgcaccaggaagccagagcagaagcagcgctggctgaaggcctttgcccgggagcgggagcaggtgcagctggaccaggagaccggcttcagcatcacagagctgcagaggaagcaggccatgctgaatgccagcaagcagcaggtgacaggcaagcccaagggccgcaggacagctgcccccccaccccggctgcccggcccctacccagctgacatcatccccttcagcgagccccagagccaggccagctag

SEQ ID NO: 168008 - DNA, 1893 bp, synthetic construct
  misc_feature 1..1893: note = Description of Artificial Sequence: Synthetic coding sequence
  source 1..1893: mol_type = other DNA
atgccctgggaggagcctgctggggagaagcccagctgcagccacagccagaaggccttccacatggagcccgcccagaagccctgcttcaccacagacatggtgacctgggccctgctgtgcatctctgctgagaccgtgcggggggaggcccccagccagccccggggcatcccccacaggagccctgtgtctgtggatgacctgtggctggagaagacccagaggaagaagctgcagaagcaggcccacgtggagcggcggctgcacatcggggctgtgcacaaggatggagtgaagtgctggaggaagaccatcatcaccagccctgagagcctgaacctgcccaggaggagccaccccctgagccagagcgcccccaccggcctgaaccacatgggctggccagagcacaccccaggcacagccatgccagatggagccctggacacagctgtgtgtgctgatgaggtgggcagcgaggaggacctgtatgatgacctgcacagcagcagccaccactacagccaccctgggggcggcggggagcagctggccatcaatgagctgatcagtgatggctctgtggtgtgtgccgaggccctgtgggaccacgtgaccatggatgaccaggagctgggcttcaaggctggagatgtgattgaggtgatggatgccaccaaccgggagtggtggtggggccgggtggctgatggagagggctggttccctgccagctttgtgcggctgcgggtgaaccaggatgagccagcagatgatgatgcccccctggccggcaacagcggggctgaagatggcggcgctgaggcccagagcagcaaggaccagatgaggaccaacgtcatcaatgagatcctgagcacagagcgggactacatcaagcacctgcgggacatctgtgagcaggccgacttccagatctacagcgagtactgcaacaaccaccccaatgcctgtgtggagctgagccggctgaccaagctgagcaaatatgtgtacttctttgaggcctgccgcctgctgcagaagatgattgacatcagcctggatggcttcctgctgacccctgtgcagaagatctgcaagtaccccctgcagctggccgagctgctgaagtacacccacccccagcaccgggacttcaaggatgtggaggccgccctgcacgccatgaagaatgtggcccagctgatcaatgaaaggaagaggcggctggagaacatcgacaagatcgcccagtggcagagcagcattgaggactgggagggggaggacctgctggtgcgcagcagcgagctgatctacagcggggagctgaccagggtgacccagccccaggccaagagccagcagaggatgttcttcctgtttgaccaccagctgatctactgcaagaaggacctgctgcggagagatgtgctgtactacaagggccgcctggacatggatggcctggaggtggtggacctggaggatggcaaggaccgggacctgcacgtgtccatcaagaatgccttccggctgcacagaggagccaccggggacagccacctgctgtgcaccaggaagccagagcagaagcagcgctggctgaaggcctttgcccgggagcgggagcaggtgcagctggaccaggagaccggcttcagcatcacagagctgcagaggaagcaggccatgctgaatgccagcaagcagcaggtgacaggcaagcccaaggctgtgggccggccctgctacctgacccggcagaagcacccagccctgcccagcaaccggccccagcagcaggtgctggtgctggccgagcccaggaggaagcccagcaccttctggcacagcatcagccggctggcccccttcaggaagtag

SEQ ID NO: 168009 - DNA, 579 bp, synthetic construct
  misc_feature 1..579: note = Description of Artificial Sequence: Synthetic coding sequence
  source 1..579: mol_type = other DNA
atgccctgggaggagcctgctggggagaagcccagctgcagccacagccagaaggccttccacatggagcccgcccagaagccctgcttcaccacagacatggtgacctgggccctgctgtgcatctctgctgagaccgtgcggggggaggcccccagccagccccggggcatcccccacaggagccctgtgtctgtggatgacctgtggctggagaagacccagaggaagaagctgcagaagcaggcccacgtggagcggcggctgcacatcggggctgtgcacaaggatggagtgaagtgctggaggaagaccatcatcaccagccctgagagcctgaacctgcccaggaggagccaccccctgagccagagcgcccccaccggcctgaaccacatgggctggccagagcacaccccaggcacagctgtgggccggccctgctacctgacccggcagaagcacccagccctgcccagcaaccggccccagcagcaggtgctggtgctggccgagcccaggaggaagcccagcaccttctggcacagcatcagccggctggcccccttcaggaagtag

SEQ ID NO: 168010 - DNA, 2013 bp, synthetic construct; identical to SEQ ID NO: 168007
  misc_feature 1..2013: note = Description of Artificial Sequence: Synthetic coding sequence
  source 1..2013: mol_type = other DNA

SEQ ID NO: 168011 - DNA, 4794 bp, synthetic construct
  misc_feature 1..4794: note = Description of Artificial Sequence: Synthetic coding sequence
  source 1..4794: mol_type = other DNA
atggaggccgaggaggcccagagaggagccagcccccccatcagcgccatcgaggagttcagcatcatccctgaggcccccatgaggagcagccaggtgtctgccctgggcctggaggcccaggaggatgaggaccccagctacaagtggagggaggagcaccggctgagcgccacccagcagagcgagctgagagatgtgtgtgactatgccatcgagaccatgcccagcttccccaaggagggcagcgcagatgtggagcccaaccaggagagcctggtggccgaggcctgtgacaccccagagcactgggaggccgtgccccagagcctggccggccggcaggcccggaccctggcccctcctgagctgtgggcctgccccatccagagcgagcacctggacatggcccccttcagcagtgacctgggcagcgaggaggaggaggtggagttctggccaggcctgaccagcctgaccctgggcagcggccaggccgaggaggaggaggagaccagcagtgacaacagcggccagacccgctactacagcccctgtgaggagcaccctgctgagaccaaccagaatgaaggcagcgagagcggcaccatccggcagggcgaggagctgcccccagaggagctgcaggagagccagggcctgctgcacccccaggaggtgcaggtgctggaggagcagggccagcaggaggccggcttccggggggagggcaccctgcgggaggatgtgtgtgctgatggcctgctgggggaggagcagatgattgagcaggtgaatgatgagaagggggagcagaagcagaagcaggagcaggtgcaggatgtgatgctgggccggcagggcgagaggatgggcctgaccggggagcctgagggcctgaatgatggagagtgggagcaggaggacatggagaggaaggcccagggccagggcggccctgagcagggcgaggagaggaagcgggagctgcaggtgcctgaagaaaatagagctgacagccaggatgagaagagccagaccttcctgggcaagtctgaggaggtgacaggcaagcaggaggaccacggcatcaaggagaagggcgtgcctgtgtctggccaggaggccaaggagcctgagagctgggatggcggccgcctgggcgctgtgggccgggcccggagccgggaggaggagaatgagcaccacggccccagcatgcctgccctgattgcccctgaggacagcccccactgtgacctcttccctggggccagctacctgatgacccagatccctggcacccagacagagagcagagctgaggagctgagccctgctgccctgagccccagcctggagcccatccgctgcagccaccagcccatcagcctgctgggcagcttcctgacagaggagagcccagacaaggagattgaccagaacagccagcaggaggagagccggctgaggaagggcaccgtgagcagccagggcacagaggtggtgtttgccagcgcctctgtgaccccacccaggaccccagattctgccccacccagccctgctgaggcctaccccatcaccccagcctctgtgtctgcccggccccctgtggccttcccccggcgggagaccagctgtgccgcccgggcccctgagacagccagcgcccccctgtccatggatgaccccagcccctgtggcaccagcgagatgtgcccagctgccctgtatggcttccccagcacaggcaccagccccccccggcccccagccaacagcacaggcaccgtgcagcacctgcggagtgacagcttccctggcagccacaggacagagcagaccccagacctggtgggcatgctgctgagctacagccacagcgagctgccccagaggcctcccaagccagccatctacagctctgtgaccccaagaagagaccggcgcagcggccgggactacagcacagtgtctgccagccccacagccctgagcaccctgaagcaggacagccaggagagcatcagcaacctggagcggcccagcagcccccccagcatccagccctgggtgagcccccacaacccagcctttgccacagagagccctgcctacggcagcagccccagctttgtgtccatggaggatgtgcgcatccacgagcccctgcccccacctccaccccagaggcgggacacccaccccagcgtggtggagacagatggccacgcccgggtggtggtgcccaccctgaagcagcacagccaccccccacccctggccctgggcagcggcctgcacgccccccacaagggccccctgccccaggccagtgaccctgctgtggcccggcagcaccggcccctgcccagcaccccagacagcagccaccacgcccaggccaccccccgctggagatacaacaagcccctgccccccaccccagacctgccccagccccacctgccccccatcagcgcccctggcagcagccgcatctaccggcccctgccccccctgcccatcattgatcctcccacagagcccccacccctgccccccaagagccggggccgcagccgcagcacccggggcggccacatgaacagcggcggccacgccaagaccaggcctgcctgccaggactggacagtgcccctgcctgccagcgctggccgcacctcctggcccccagccacagcccggagcacagagagcttcaccagcaccagccgcagcaagtctgaggtgtccccaggcatggccttcagcaacatgaccaacttcctgtgccccagcagccccaccaccccctggaccccagagctgcagggccccaccagcaaggatgaggccggcgtgtctgagcaccctgaggccccagcccgggagcccctgcggaggaccaccccccagcagggcgccagcggccctggccgcagccctgtgggccaggcccggcagcctgagaagcccagccacctgcacctggagaaggccagctcctggccccaccggcgggacagcggccggcccccaggggacagcagcggccaggccgtggcccccagcgagggcgccaacaagcacaagggctggagccggcagggcctgcggcggcccagcatcctgcctgagggcagcagtgacagccggggccctgctgtggagaagcaccctggccccagcgacacagtggtgttccgggagaagaagcccaaggaggtgatgggcggcttcagccgccgctgcagcaagctgatcaacagcagccagctgctgtaccaggagtacagtgatgtggtgctgaacaaggagatccagagccagcagaggctggagagcctgtctgagaccccaggccccagcagcccccggcagcccaggaaggccctggtgtcctctgagagctacctgcagaggctgtccatggccagcagcggcagcctgtggcaggagatccctgtggtgaggaacagcacagtgctgctgtccatgacccatgaggaccagaagctgcaggaggtgaagtttgagctgattgtgtctgaggccagctacctgcggagcctgaacattgctgtggaccacttccagctgagcaccagcctgcgggccaccctgagcaaccaggagcaccagtggctgttcagccggctgcaggatgtgagagatgtgtctgccaccttcctgagtgacctggaggagaactttgagaacaacatcttctccttccaggtgtgtgatgtggtgctgaaccacgccccagacttcagaagagtgtacctgccctacgtgaccaaccagacctaccaggagaggaccttccagagcctgatgaacagcaacagcaacttccgggaggtgctggagaagctggagagtgaccctgtgtgccagaggctgagcctgaagagcttcctgatcctgcccttccagaggatcacccggctgaagctgctgctgcagaacatcctgaagaggacccagcccggcagcagcgaggaggccgaggccaccaaggcccaccacgccctggagcagctgatccgggactgcaacaacaacgtgcagagcatgagaagaacagaggagctgatctacctgagccagaagattgaatttgagtgcaagatcttccccctcatcagccagagccgctggctggtgaagagcggggagctgacagccctggagttcagcgccagccctggcctgcggaggaagctgaacaccaggcctgtgcacctgcacctgttcaatgactgcctgctgctgagccggccccgggagggcagccgcttcctggtgtttgaccacgcccccttcagcagcatccggggggagaagtgtgagatgaagctgcacggcccccacaagaacctcttccgcctcttcctgcggcagaacacccagggcgcccaggccgagttcctgttcagaacagagacccagagcgagaagctgcgctggatcagcgccctggccatgccccgggaggagctggacctgctggagtgctacaacagcccccaggtgcagtgcctgcgggcctacaagcccagagaaaatgatgagctggccctggagaaggcagatgtggtgatggtgacccagcagagcagtgatggctggctggagggcgtgcggctgagtgatggagagcggggctggttccctgtgcagcaggtggagttcatcagcaaccctgaggtgcgggcccagaacctgaaggaggcccaccgggtgaagacagccaagctgcagctggtggagcagcaggcctag

SEQ ID NO: 168012 - DNA, 1197 bp, synthetic construct
  misc_feature 1..1197: note = Description of Artificial Sequence: Synthetic coding sequence
  source 1..1197: mol_type = other DNA
atggccagcagcggcagcctgtggcaggagatccctgtggtgaggaacagcacagtgctgctgtccatgacccatgaggaccagaagctgcaggaggtgaagtttgagctgattgtgtctgaggccagctacctgcggagcctgaacattgctgtggaccacttccagctgagcaccagcctgcgggccaccctgagcaaccaggagcaccagtggctgttcagccggctgcaggatgtgagagatgtgtctgccaccttcctgagtgacctggaggagaactttgagaacaacatcttctccttccaggtgtgtgatgtggtgctgaaccacgccccagacttccggcgggtgtacctgccctacgtgaccaaccagacctaccaggagaggaccttccagagcctgatgaacagcaacagcaacttccgggaggtgctggagaagctggagagtgaccctgtgtgccagaggctgagcctgaagagcttcctgatcctgcccttccagaggatcacccggctgaagctgctgctgcagaacatcctgaagaggacccagcccggcagcagcgaggaggccgaggccaccaaggcccaccacgccctggagcagctgatccgggactgcaacaacaacgtgcagagcatgagaagaacagaggagctgatctacctgagccagaagattgaatttgagtgcaagatcttccccctcatcagccagagccgctggctggtgaagtctggagagctgacagccctggagttcagcgccagccctggcctgcggaggaagctgaacaccaggcctgtgcacctgcacctgttcaatgactgcctgctgctgagccggccccgggagagcgagaagctgcgctggatcagcgccctggccatgccccgggaggagctggacctgctggagtgctacaacagcccccaggtgcagtgcctgcgggcctacaagccccgggagaatgatgagctggccctggagaaggcagatgtggtgatggtgacccagcagagcagtgatggctggctggagggcgtgcggctgagtgatggagagcggggctggttccctgtgcagcaggtggagttcatcagcaaccctgaggtgcgggcccagaacctgaaggaggcccaccgggtgaagacagccaagctgcagctggtggagcagcaggcctag

SEQ ID NO: 168013 - DNA, 1560 bp, synthetic construct
  misc_feature 1..1560: note = Description of Artificial Sequence: Synthetic coding sequence
  source 1..1560: mol_type = other DNA
atgggcggcttcagccgccgctgcagcaagctgatcaacagcagccagctgctgtaccaggagtacagtgatgtggtgctgaacaaggagatccagagccagcagaggctggagagcctgtctgagaccccaggccccagcagcccccggcagcccaggaaggccctggtgtcctctgagagctacctgcagaggctgtccatggccagcagcggcagcctgtggcaggagatccctgtggtgaggaacagcacagtgctgctgtccatgacccatgaggaccagaagctgcaggaggtgaagtttgagctgattgtgtctgaggccagctacctgcggagcctgaacattgctgtggaccacttccagctgagcaccagcctgcgggccaccctgagcaaccaggagcaccagtggctgttcagccggctgcaggatgtgagagatgtgtctgccaccttcctgagtgacctggaggagaactttgagaacaacatcttctccttccaggtgtgtgatgtggtgctgaaccacgccccagacttcagaagagtgtacctgccctacgtgaccaaccagacctaccaggagaggaccttccagagcctgatgaacagcaacagcaacttccgggaggtgctggagaagctggagagtgaccctgtgtgccagaggctgagcctgaagagcttcctgatcctgcccttccagaggatcacccggctgaagctgctgctgcagaacatcctgaagaggacccagcccggcagcagcgaggaggccgaggccaccaaggcccaccacgccctggagcagctgatccgggactgcaacaacaacgtgcagagcatgagaagaacagaggagctgatctacctgagccagaagattgaatttgagtgcaagatcttccccctcatcagccagagccgctggctggtgaagagcggggagctgacagccctggagttcagcgccagccctggcctgcggaggaagctgaacaccaggcctgtgcacctgcacctgttcaatgactgcctgctgctgagccggccccgggagggcagccgcttcctggtgtttgaccacgcccccttcagcagcatccggggggagaagtgtgagatgaagctgcacggcccccacaagaacctcttccgcctcttcctgcggcagaacacccagggcgcccaggccgagttcctgttcagaacagagacccagagcgagaagctgcgctggatcagcgccctggccatgccccgggaggagctggacctgctggagtgctacaacagcccccaggtgcagtgcctgcgggcctacaagcccagagaaaatgatgagctggccctggagaaggcagatgtggtgatggtgacccagcagagcagtgatggctggctggagggcgtgcggctgagtgatggagagcggggctggttccctgtgcagcaggtggagttcatcagcaaccctgaggtgcgggcccagaacctgaaggaggcccaccgggtgaagacagccaagctgcagctggtggagcagcaggcctag

SEQ ID NO: 168014 - DNA, 2394 bp, synthetic construct
  misc_feature 1..2394: note = Description of Artificial Sequence: Synthetic coding sequence
  source 1..2394: mol_type = other DNA
tgagtggtggtgcccaccctgaagcagcacagccaccccccacccctggccctgggcagcggcctgcacgccccccacaagggccccctgccccaggccagtgaccctgctgtggcccggcagcaccggcccctgcccagcaccccagacagcagccaccacgcccaggccaccccccgctggagatacaacaagcccctgccccccaccccagacctgccccagccccacctgccccccatcagcgcccctggcagcagccgcatctaccggcccctgccccccctgcccatcattgatcctcccacagagcccccacccctgccccccaagagccggggccgcagccgcagcacccggggcggccacatgaacagcggcggccacgccaagaccaggcctgcctgccaggactggacagtgcccctgcctgccagcgctggccgcacctcctggcccccagccacagcccggagcacagagagcttcaccagcaccagccgcagcaagtctgaggtgtccccaggcatggccttcagcaacatgaccaacttcctgtgccccagcagccccaccaccccctggaccccagagctgcagggccccaccagcaaggatgaggccggcgtgtctgagcaccctgaggccccagcccgggagcccctgcggaggaccaccccccagcagggcgccagcggccctggccgcagccctgtgggccaggcccggcagcctgagaagcccagccacctgcacctggagaaggccagctcctggccccaccggcgggacagcggccggcccccaggggacagcagcggccaggccgtggcccccagcgagggcgccaacaagcacaagggctggagccggcagggcctgcggcggcccagcatcctgcctgagggcagcagtgacagccggggccctgctgtggagaagcaccctggccccagcgacacagtggtgttccgggagaagaagcccaaggaggtgatgggcggcttcagccgccgctgcagcaagctgatcaacagcagccagctgctgtaccaggagtacagtgatgtggtgctgaacaaggagatccagagccagcagaggctggagagcctgtctgagaccccaggccccagcagcccccggcagcccaggaaggccctggtgtcctctgagagctacctgcagaggctgtccatggccagcagcggcagcctgtggcaggagatccctgtggtgaggaacagcacagtgctgctgtccatgacccatgaggaccagaagctgcaggaggtgaagtttgagctgattgtgtctgaggccagctacctgcggagcctgaacattgctgtggaccacttccagctgagcaccagcctgcgggccaccctgagcaaccaggagcaccagtggctgttcagccggctgcaggatgtgagagatgtgtctgccaccttcctgagtgacctggaggagaactttgagaacaacatcttctccttccaggtgtgtgatgtggtgctgaaccacgccccagacttcagaagagtgtacctgccctacgtgaccaaccagacctaccaggagaggaccttccagagcctgatgaacagcaacagcaacttccgggaggtgctggagaagctggagagtgaccctgtgtgccagaggctgagcctgaagagcttcctgatcctgcccttccagaggatcacccggctgaagctgctgctgcagaacatcctgaagaggacccagcccggcagcagcgaggaggccgaggccaccaaggcccaccacgccctggagcagctgatccgggactgcaacaacaacgtgcagagcatgagaagaacagaggagctgatctacctgagccagaagattgaatttgagtgcaagatcttccccctcatcagccagagccgctggctggtgaagagcggggagctgacagccctggagttcagcgccagccctggcctgcggaggaagctgaacaccaggcctgtgcacctgcacctgttcaatgactgcctgctgctgagccggccccgggagagcgagaagctgcgctggatcagcgccctggccatgccccgggaggagctggacctgctggagtgctacaacagcccccaggtgcagtgcctgcgggcctacaagcccagagaaaatgatgagctggccctggagaaggcagatgtggtgatggtgacccagcagagcagtgatggctggctggagggcgtgcggctgagtgatggagagcggggctggttccctgtgcagcaggtggagttcatcagcaaccctgaggtgcgggcccagaacctgaaggaggcccaccgggtgaagacagccaagctgcagctggtggagcagcaggcctag

SEQ ID NO: 168015 - DNA, 2958 bp, synthetic construct
  misc_feature 1..2958: note = Description of Artificial Sequence: Synthetic coding sequence
  source 1..2958: mol_type = other DNA
atgagccgcatcgagagcctgacccgggccagaattgacaggagccgggagctggccagcaagacccgggagaaggagaagatgaaggaggccaaggatgcccgctacaccaacggccacctgttcaccaccatctctgtgtctggcatgaccatgtgctacgcctgcaacaagagcatcacagccaaggaggccctgatctgccccacctgcaatgtgaccatccacaaccgctgcaaggacaccctggccaactgcaccaaggtgaagcagaagcagcagaaggccgccctgctgaagaacaacacagccctgcagagcgtgtccctgcggagcaagaccaccatccgggagcggcccagcagcgccatctaccccagcgacagcttccggcagagcctgctgggcagccggcggggccgcagcagcctgagcctggccaagtctgtgtccaccaccaacattgctggccacttcaatgatgagagccccctgggcctgcggcgcatcctgagccagagcacagacagcctgaacatgaggaacagaaccctgtctgtggagagcctgattgatgaggaggtgatctacagcgagctgatgtctgactttgagatggatgagaaggactttgctgctgacagctggagcctggccgtggacagcagcttcctgcagcagcacaagaaggaggtgatgaagcagcaggatgtgatctatgagctgatccagacagagctgcaccacgtgaggaccctgaagatcatgaccaggctcttcagaacaggcatgctggaggagctgcacctggagcccggggtggtgcagggcctcttcccctgtgtggatgagctgagtgacatccacacccgcttcctgagccagctgctggagcggcggcggcaggccctgtgccccggcagcaccaggaacttcgtcatccaccggctgggggacctgctgatcagccagttcagcggccccagcgctgagcagatgtgcaagacctacagcgagttctgcagccgccacagcaaggccctgaagctgtacaaggagctgtatgcccgggacaagcgcttccagcagttcatcaggaaggtgaccaggcctgctgtgctgaagagacatggagtgcaggagtgcatcctgctggtgacccagaggatcaccaagtaccccctgctgatcagccgcatcctgcagcacagccatggaattgaggaggagcggcaggacctgaccacagccctgggcctggtgaaggagctgctgagcaatgtggatgagggcatctaccagctggagaagggggcccggctgcaggagatctacaacaggatggacccccgggcccagacccctgtgcctgggaagggccccttcggccgggaggagctgctgcggaggaagctgattcatgatggctgcctgctgtggaagacagccaccggccgcttcaaggatgtgctggtgctgctgatgacagatgtgctggtgttcctgcaggagaaggaccagaagtacatcttccccaccctggacaagcccagcgtggtgtccctgcagaacctgattgtgcgggacatcgccaaccaggagaagggcatgttcctgatctctgctgcccctcctgagatgtatgaggtgcacacagccagcagagatgacaggagcacctggatccgggtcatccagcagagcgtgaggacctgccccagccgggaggacttccccctgattgaaacagaagatgaggcctacctgcggcgcatcaagatggagctgcagcagaaggaccgggccctggtggagctgctgcgggagaaggtgggcctgtttgctgagatgacccacttccaggccgaggaggatggcggcagcggcatggccctgcccaccctgccccggggcctcttccgctctgagagcctggagagccccagaggagagcggctgctgcaggatgccatccgggaggtggagggcctgaaggacctgctggtgggccctggggtggagctgctgctgaccccccgggagcccgccctgcccctggagccagacagcggcggcaacaccagccctggggtgacagccaatggagaggcccggaccttcaacggcagcattgagctgtgcagagctgacagcgacagcagccagagggacagaaatggaaaccagctgcggagcccccaggaggaggccctgcagaggctggtgaacctgtatggcctgctgcacggcctgcaggccgctgtggcccagcaggacaccctgatggaggcccgcttccctgagggccctgagcggcgggagaagctgtgccgggccaacagcagagatggagaggccggccgggccggggccgcccctgtggcccctgagaagcaggccacagagctggccctgctgcagaggcagcacgccctgctgcaggaggagctgcggcgctgccggcggctgggggaggagcgggccacagaagctggcagcctggaggcccggctgcgggagagcgagcaggcccgggccctgctggagcgggaggccgaggaggcccggcggcagctggccgccctgggccagacagagcccctgcctgctgaggccccctgggcccggcggcctgtggaccccaggagaagaagcctgcctgctggagatgccctgtacctgtccttcaaccccccccagcccagccggggcacagaccggctggacctgcctgtgaccaccaggtctgtgcacaggaactttgaggaccgggagcggcaggagctgggcagccctgaggagcggctgcaggacagcagtgaccctgacaccggcagcgaggaggagggcagcagccggctgagccccccccacagcccccgggacttcaccaggatgcaggacatccctgaggagacagagagcagagatggagaggccgtggccagcgagagctag

SEQ ID NO: 168016 - DNA, 2877 bp, synthetic construct
  misc_feature 1..2877: note = Description of Artificial Sequence: Synthetic coding sequence
  source 1..2877: mol_type = other DNA
atgaaggaggccaaggatgcccgctacaccaacggccacctgttcaccaccatctctgtgtctggcatgaccatgtgctacgcctgcaacaagagcatcacagccaaggaggccctgatctgccccacctgcaatgtgaccatccacaaccgctgcaaggacaccctggccaactgcaccaaggtgaagcagaagcagcagaaggccgccctgctgaagaacaacacagccctgcagagcgtgtccctgcggagcaagaccaccatccgggagcggcccagcagcgccatctaccccagcgacagcttccggcagagcctgctgggcagcagaagaggccgcagcagcctgagcctggccaagtctgtgtccaccaccaacattgctggccacttcaatgatgagagccccctgggcctgcggcgcatcctgagccagagcacagacagcctgaacatgaggaacagaaccctgtctgtggagagcctgattgatgaggaggtgatctacagcgagctgatgtctgactttgagatggatgagaaggactttgctgctgacagctggagcctggccgtggacagcagcttcctgcagcagcacaagaaggaggtgatgaagcagcaggacgtcatctatgagctgatccagacagagctgcaccacgtgaggaccctgaagatcatgaccaggctcttcagaacaggcatgctggaggagctgcacctggagcccggggtggtgcagggcctcttcccctgtgtggatgagctgagtgacatccacacccgcttcctgagccagctgctggagcggcggcggcaggccctgtgccccggcagcaccaggaactttgtgatccaccggctgggggacctgctgatcagccagttcagcggccccagcgctgagcagatgtgcaagacctacagcgagttctgcagccgccacagcaaggccctgaagctgtacaaggagctgtatgcccgggacaagcgcttccagcagttcatcaggaaggtgaccaggcctgctgtgctgaagagacatggagtgcaggagtgcatcctgctggtgacccagaggatcaccaagtaccccctgctgatcagccgcatcctgcagcacagccacggcatcgaggaggagcggcaggacctgaccacagccctgggcctggtgaaggagctgctgagcaatgtggatgagggcatctaccagctggagaagggggcccggctgcaggagatctacaacaggatggacccccgggcccagacccctgtgcctgggaagggccccttcggccgggaggagctgctgcggaggaagctgattcatgatggctgcctgctgtggaagacagccaccggccgcttcaaggatgtgctggtgctgctgatgacagatgtgctggtgttcctgcaggagaaggaccagaagtacatcttccccaccctggacaagcccagcgtggtgtccctgcagaacctgattgtgcgggacatcgccaaccaggagaagggcatgttcctgatctctgctgcccctcctgagatgtatgaggtgcacacagccagcagagatgacaggagcacctggatccgggtcatccagcagagcgtgaggacctgccccagccgggaggacttccccctcatcgagacagaagatgaggcctacctgcggcgcatcaagatggagctgcagcagaaggaccgggccctggtggagctgctgcgggagaaggtgggcctgtttgctgagatgacccacttccaggccgaggaggatggcggcagcggcatggccctgcccaccctgccccggggcctcttccgctctgagagcctggagagccccagaggagagcggctgctgcaggatgccatccgggaggtggagggcctgaaggacctgctggtgggccctggggtggagctgctgctgaccccccgggagcccgccctgcccctggagccagattctgggggcaacaccagccctggggtgacagccaacggggaggcccggaccttcaacggcagcattgagctgtgcagagctgacagcgacagcagccagagggacagaaatggaaaccagctgcggagcccccaggaggaggccctgcagaggctggtgaacctgtatggcctgctgcacggcctgcaggccgctgtggcccagcaggacaccctgatggaggcccgcttccctgagggccctgagcggcgggagaagctgtgccgggccaacagcagagatggagaggccggccgggccggggccgcccctgtggcccctgagaagcaggccacagagctggccctgctgcagaggcagcacgccctgctgcaggaggagctgcggcgctgccggcggctgggggaggagcgggccacagaggccggcagcctggaggcccggctgcgggagagcgagcaggcccgggccctgctggagcgggaggccgaggaggcccggcggcagctggccgccctgggccagacagagcccctgcctgctgaggccccctgggcccggcggcctgtggacccccggcggcgcagcctgcctgctggagatgccctgtacctgtccttcaaccccccccagcccagccggggcacagaccggctggacctgcctgtgaccaccaggtctgtgcacaggaactttgaagatcgggagcggcaggagctgggcagccctgaggagcggctgcaggacagcagtgaccctgacaccggcagcgaggaggagggcagcagccggctgagccccccccacagcccccgggacttcaccaggatgcaggacatccctgaggagacagagagcagagatggagaggccgtggccagcgagagctag

SEQ ID NO: 168017 - DNA, 2961 bp, synthetic construct
  misc_feature 1..2961: note = Description of Artificial Sequence: Synthetic coding sequence
  source 1..2961: mol_type = other DNA
atgagccgcatcgagagcctgacccgggccagaattgacaggagccgggagctggccagcaagacccgggagaaggagaagatgaaggaggccaaggatgcccgctacaccaacggccacctgttcaccaccatctctgtgtctggcatgaccatgtgctacgcctgcaacaagagcatcacagccaaggaggccctgatctgccccacctgcaatgtgaccatccacaaccgctgcaaggacaccctggccaactgcaccaaggtgaagcagaagcagcagaaggccgccctgctgaagaacaacacagccctgcagagcgtgtccctgcggagcaagaccaccatccgggagcggcccagcagcgccatctaccccagcgacagcttccggcagagcctgctgggcagccggcggggccgcagcagcctgagcctggccaagtctgtgtccaccaccaacattgctggccacttcaatgatgagagccccctgggcctgcggcgcatcctgagccagagcacagacagcctgaacatgaggaacagaaccctgtctgtggagagcctgattgatgaggccgaggtgatctacagcgagctgatgtctgactttgagatggatgagaaggactttgctgctgacagctggagcctggccgtggacagcagcttcctgcagcagcacaagaaggaggtgatgaagcagcaggacgtcatctatgagctgatccagacagagctgcaccacgtgaggaccctgaagatcatgaccaggctcttcagaacaggcatgctggaggagctgcacctggagcccggggtggtgcagggcctcttcccctgtgtggatgagctgagtgacatccacacccgcttcctgagccagctgctggagcggcggcggcaggccctgtgccccggcagcaccaggaactttgtgatccaccggctgggggacctgctgatcagccagttcagcggccccagcgctgagcagatgtgcaagacctacagcgagttctgcagccgccacagcaaggccctgaagctgtacaaggagctgtatgcccgggacaagcgcttccagcagttcatcaggaaggtgaccaggcctgctgtgctgaagagacatggagtgcaggagtgcatcctgctggtgacccagaggatcaccaagtaccccctgctgatcagccgcatcctgcagcacagccacggcatcgaggaggagcggcaggacctgaccacagccctgggcctggtgaaggagctgctgagcaatgtggatgagggcatctaccagctggagaagggggcccggctgcaggagatctacaacaggatggacccccgggcccagacccctgtgcctgggaagggccccttcggccgggaggagctgctgcggaggaagctgattcatgatggctgcctgctgtggaagacagccaccggccgcttcaaggatgtgctggtgctgctgatgacagatgtgctggtgttcctgcaggagaaggaccagaagtacatcttccccaccctggacaagcccagcgtggtgtccctgcagaacctgattgtgcgggacatcgccaaccaggagaagggcatgttcctgatctctgctgcccctcctgagatgtatgaggtgcacacagccagcagagatgacaggagcacctggatccgggtcatccagcagagcgtgaggacctgccccagccgggaggacttccccctcatcgagacagaagatgaggcctacctgcggcgcatcaagatggagctgcagcagaaggaccgggccctggtggagctgctgcgggagaaggtgggcctgtttgctgagatgacccacttccaggccgaggaggatggcggcagcggcatggccctgcccaccctgccccggggcctcttccgctctgagagcctggagagccccagaggagagcggctgctgcaggatgccatccgggaggtggagggcctgaaggacctgctggtgggccctggggtggagctgctgctgaccccccgggagcccgccctgcccctggagccagattctgggggcaacaccagccctggggtgacagccaacggggaggcccggaccttcaacggcagcattgagctgtgcagagctgacagcgacagcagccagagggacagaaatggaaaccagctgcggagcccccaggaggaggccctgcagaggctggtgaacctgtatggcctgctgcacggcctgcaggccgctgtggcccagcaggacaccctgatggaggcccgcttccctgagggccctgagcggcgggagaagctgtgccgggccaacagcagagatggagaggccggccgggccggggccgcccctgtggcccctgagaagcaggccacagagctggccctgctgcagaggcagcacgccctgctgcaggaggagctgcggcgctgccggcggctgggggaggagcgggccacagaggccggcagcctggaggcccggctgcgggagagcgagcaggcccgggccctgctggagcgggaggccgaggaggcccggcggcagctggccgccctgggccagacagagcccctgcctgctgaggccccctgggcccggcggcctgtggacccccggcggcgcagcctgcctgctggagatgccctgtacctgtccttcaaccccccccagcccagccggggcacagaccggctggacctgcctgtgaccaccaggtctgtgcacaggaactttgaagatcgggagcggcaggagctgggcagccctgaggagcggctgcaggacagcagtgaccctgacaccggcagcgaggaggagggcagcagccggctgagccccccccacagcccccgggacttcaccaggatgcaggacatccctgaggagacagagagcagagatggagaggccgtggccagcgagagctag

SEQ ID NO: 168018 - DNA, 2964 bp, synthetic construct
  misc_feature 1..2964: note = Description of Artificial Sequence: Synthetic coding sequence
  source 1..2964: mol_type = other DNA
atgtgctgctgctgcggctgctgccccctgctggcccacctggagcagggcagcctgcgggagaggacccgggagaaggagaagatgaaggaggccaaggatgcccgctacaccaacggccacctgttcaccaccatctctgtgtctggcatgaccatgtgctacgcctgcaacaagagcatcacagccaaggaggccctgatctgccccacctgcaatgtgaccatccacaaccgctgcaaggacaccctggccaactgcaccaaggtgaagcagaagcagcagaaggccgccctgctgaagaacaacacagccctgcagagcgtgtccctgcggagcaagaccaccatccgggagcggcccagcagcgccatctaccccagcgacagcttccggcagagcctgctgggcagcagaagaggccgcagcagcctgagcctggccaagtctgtgtccaccaccaacattgctggccacttcaatgatgagagccccctgggcctgcggcgcatcctgagccagagcacagacagcctgaacatgaggaacagaaccctgtctgtggagagcctgattgatgaagctgaggtgatctacagcgagctgatgtctgactttgagatggatgagaaggactttgctgctgacagctggagcctggccgtggacagcagcttcctgcagcagcacaagaaggaggtgatgaagcagcaggatgtgatctatgagctgatccagacagagctgcaccacgtgaggaccctgaagatcatgaccaggctcttcagaacaggcatgctggaggagctgcacctggagcccggggtggtgcagggcctcttcccctgtgtggatgagctgagtgacatccacacccgcttcctgagccagctgctggagcggcggcggcaggccctgtgccccggcagcaccaggaacttcgtcatccaccggctgggggacctgctgatcagccagttcagcggccccagcgctgagcagatgtgcaagacctacagcgagttctgcagccgccacagcaaggccctgaagctgtacaaggagctgtatgcccgggacaagcgcttccagcagttcatcaggaaggtgaccaggcctgctgtgctgaagagacatggagtgcaggagtgcatcctgctggtgacccagaggatcaccaagtaccccctgctgatcagccgcatcctgcagcacagccatggaattgaggaggagcggcaggacctgaccacagccctgggcctggtgaaggagctgctgagcaatgtggatgagggcatctaccagctggagaagggggcccggctgcaggagatctacaacaggatggacccccgggcccagacccctgtgcctgggaagggccccttcggccgggaggagctgctgcggaggaagctgattcatgatggctgcctgctgtggaagacagccaccggccgcttcaaggatgtgctggtgctgctgatgacagatgtgctggtgttcctgcaggagaaggaccagaagtacatcttccccaccctggacaagcccagcgtggtgtccctgcagaacctgattgtgcgggacatcgccaaccaggagaagggcatgttcctgatctctgctgcccctcctgagatgtatgaggtgcacacagccagcagagatgacaggagcacctggatccgggtcatccagcagagcgtgaggacctgccccagccgggaggacttccccctgattgaaacagaagatgaggcctacctgcggcgcatcaagatggagctgcagcagaaggaccgggccctggtggagctgctgcgggagaaggtgggcctgtttgctgagatgacccacttccaggccgaggaggatggcggcagcggcatggccctgcccaccctgccccggggcctcttccgctctgagagcctggagagccccagaggagagcggctgctgcaggatgccatccgggaggtggagggcctgaaggacctgctggtgggccctggggtggagctgctgctgaccccccgggagcccgccctgcccctggagccagacagcggcggcaacaccagccctggggtgacagccaatggagaggcccggaccttcaacggcagcattgagctgtgcagagctgacagcgacagcagccagagggacagaaatggaaaccagctgcggagcccccaggaggaggccctgcagaggctggtgaacctgtatggcctgctgcacggcctgcaggccgctgtggcccagcaggacaccctgatggaggcccgcttccctgagggccctgagcggcgggagaagctgtgccgggccaacagcagagatggagaggccggccgggccggggccgcccctgtggcccctgagaagcaggccacagagctggccctgctgcagaggcagcacgccctgctgcaggaggagctgcggcgctgccggcggctgggggaggagcgggccacagaagctggcagcctggaggcccggctgcgggagagcgagcaggcccgggccctgctggagcgggaggccgaggaggcccggcggcagctggccgccctgggccagacagagcccctgcctgctgaggccccctgggcccggcggcctgtggaccccaggagaagaagcctgcctgctggagatgccctgtacctgtccttcaaccccccccagcccagccggggcacagaccggctggacctgcctgtgaccaccaggtctgtgcacaggaactttgaggaccgggagcggcaggagctgggcagccctgaggagcggctgcaggacagcagtgaccctgacaccggcagcgaggaggagggcagcagccggctgagccccccccacagcccccgggacttcaccaggatgcaggacatccctgaggagacagagagcagagatggagaggccgtggccagcgagagctag

SEQ ID NO: 168019 - DNA, 2877 bp, synthetic construct; identical to SEQ ID NO: 168016
  misc_feature 1..2877: note = Description of Artificial Sequence: Synthetic coding sequence
  source 1..2877: mol_type = other DNA

SEQ ID NO: 168020 - DNA, 1548 bp, synthetic construct
  misc_feature 1..1548: note = Description of Artificial Sequence: Synthetic coding sequence
  source 1..1548: mol_type = other DNA
atgctgagcaagtctgtgcctgtgtctggcatcaactgcctgctggacagaagtgacacagatggaaatgtgtcccagagcagcgccatcgacctgaggaagcgctgcagccagctggagggccacagcggcaccagggtgggcagcagcctgcggcagaccttctccttcctgagcggcatgaccgggaaggccaagacccgggagaaggagaagatgaaggaggccaaggatgcccgctacaccaacggccacctgttcaccaccatctctgtgtctggcatgaccatgtgctacgcctgcaacaagagcatcacagccaaggaggccctgatctgccccacctgcaatgtgaccatccacaaccgctgcaaggacaccctggccaactgcaccaaggtgaagcagaagcagcagaaggccgccctgctgaagaacaacacagccctgcagagcgtgtccctgcggagcaagaccaccatccgggagcggcccagcagcgccatctaccccagcgacagcttccggcagagcctgctgggcagcagaagaggccgcagcagcctgagcctggccaagtctgtgtccaccaccaacattgctggccacttcaatgatgagagccccctgggcctgcggcgcatcctgagccagagcacagacagcctgaacatgaggaacagaaccctgtctgtggagagcctgattgatgaagctgaggtgatctacagcgagctgatgtctgactttgagatggatgagaaggactttgctgctgacagctggagcctggccgtggacagcagcttcctgcagcagcacaagaaggaggtgatgaagcagcaggatgtgatctatgagctgatccagacagagctgcaccacgtgaggaccctgaagatcatgaccaggctcttcagaacaggcatgctggaggagctgcacctggagcccggggtggtgcagggcctcttcccctgtgtggatgagctgagtgacatccacacccgcttcctgagccagctgctggagcggcggcggcaggccctgtgccccggcagcaccaggaacttcgtcatccaccggctgggggacctgctgatcagccagttcagcggccccagcgctgagcagatgtgcaagacctacagcgagttctgcagccgccacagcaaggccctgaagctgtacaaggagctgtatgcccgggacaagcgcttccagcagttcatcaggaaggtgaccaggcctgctgtgctgaagagacatggagtgcaggagtgcatcctgctggtgacccagaggatcaccaagtaccccctgctgatcagccgcatcctgcagcacagccatggaattgaggaggagcggcaggacctgaccacagccctgggcctggtgaaggagctgctgagcaatgtggatgagggcatctaccagctggagaagggggcccggctgcaggagatctacaacctgctgctgctcttcagcctgagccccagcttcatggaggccctgggggacaacctggcctcctggagctag

SEQ ID NO: 168021 - DNA, 1332 bp, synthetic construct
  misc_feature 1..1332: note = Description of Artificial Sequence: Synthetic coding sequence
  source 1..1332: mol_type = other DNA
atgaaggaggccaaggatgcccgctacaccaacggccacctgttcaccaccatctctgtgtctggcatgaccatgtgctacgcctgcaacaagagcatcacagccaaggaggccctgatctgccccacctgcaatgtgaccatccacaaccgctgcaaggacaccctggccaactgcaccaaggtgaagcagaagcagcagaaggccgccctgctgaagaacaacacagccctgcagagcgtgtccctgcggagcaagaccaccatccgggagcggcccagcagcgccatctaccccagcgacagcttccggcagagcctgctgggcagcagaagaggccgcagcagcctgagcctggccaagtctgtgtccaccaccaacattgctggccacttcaatgatgagagccccctgggcctgcggcgcatcctgagccagagcacagacagcctgaacatgaggaacagaaccctgtctgtggagagcctgattgatgaagctgaggtgatctacagcgagctgatgtctgactttgagatggatgagaaggactttgctgctgacagctggagcctggccgtggacagcagcttcctgcagcagcacaagaaggaggtgatgaagcagcaggatgtgatctatgagctgatccagacagagctgcaccacgtgaggaccctgaagatcatgaccaggctcttcagaacaggcatgctggaggagctgcacctggagcccggggtggtgcagggcctcttcccctgtgtggatgagctgagtgacatccacacccgcttcctgagccagctgctggagcggcggcggcaggccctgtgccccggcagcaccaggaacttcgtcatccaccggctgggggacctgctgatcagccagttcagcggccccagcgctgagcagatgtgcaagacctacagcgagttctgcagccgccacagcaaggccctgaagctgtacaaggagctgtatgcccgggacaagcgcttccagcagttcatcaggaaggtgaccaggcctgctgtgctgaagagacatggagtgcaggagtgcatcctgctggtgacccagaggatcaccaagtaccccctgctgatcagccgcatcctgcagcacagccatggaattgaggaggagcggcaggacctgaccacagccctgggcctggtgaaggagctgctgagcaatgtggatgagggcatctaccagctggagaagggggcccggctgcaggagatctacaacctgctgctgctcttcagcctgagccccagcttcatggaggccctgggggacaacctggcctcctggagctag

SEQ ID NO: 168022 - DNA, 4167 bp, synthetic construct
  misc_feature 1..4167: note = Description of Artificial Sequence: Synthetic coding sequence
  source 1..4167: mol_type = other DNA
atgagccggcccccacccaccgggaagatgcctggggcccctgagacagcccctggagatggagctggggccagccggcagaggaagctggaggccctgatccgggaccccaggagccccatcaacgtggagagcctgctggatggcctgaacagcctggtgctggacctggacttccctgccctgaggaagaacaagaacatcgacaacttcctgaacagatatgagaagatcgtgaagaagatccggggcctgcagatgaaggccgaggactatgatgtggtgaaggtgattggccgcggggcctttggagaggtgcagctggtgcgccacaaggccagccagaaggtgtatgccatgaagctgctgagcaagtttgagatgatcaagagaagtgacagcgccttcttctgggaggagcgggacatcatggcctttgccaacagcccctgggtggtgcagctgttctacgccttccaggatgaccgctacctgtacatggtgatggagtacatgcctggaggagacctggtgaacctgatgagcaactatgatgtgcctgagaagtgggccaagttctacacagctgaggtggtgctggccctggatgccatccacagcatgggcctcatccacagagatgtgaagccagacaacatgctgctggacaagcacggccacctgaagctggccgactttggcacctgcatgaagatggatgagaccggcatggtgcactgtgacacagctgtgggcaccccagactacatcagccctgaggtgctgaagagccagggcggagatggcttctacggccgggagtgtgactggtggagcgtgggcgtcttcctgtatgagatgctggtgggggacacccccttctacgccgacagcctggtgggcacctacagcaagatcatggaccacaagaacagcctgtgcttcccagaagatgctgagatcagcaagcacgccaagaacctgatctgtgccttcctgacagaccgggaggtgcggctgggcagaaatggagtggaggagatccggcagcaccccttcttcaagaatgaccagtggcactgggacaacatccgggagacagctgcccctgtggtgcctgagctgagcagtgacatcgacagcagcaactttgatgacattgaagatgacaagggagatgtggagaccttccccatccccaaggcctttgtgggcaaccagctgcccttcatcggcttcacctactaccgggagaacctgctgctgagtgacagccccagctgccgggagacagacagcatccagagcaggaagaatgaggagagccaggagatccagaagaagctgtacaccctggaggagcacctgagcaatgagatgcaggccaaggaggagctggagcagaagtgcaagtctgtgaacacccggctggagaagacagccaaggagctggaggaggagatcaccctgaggaagtctgtggagagcgccctgcggcagctggagcgggagaaggccctgctgcagcacaagaatgctgagtaccagaggaaggctgaccatgaagctgacaagaagaggaacctggagaatgatgtgaacagcctgaaggaccagctggaggacctgaagaagaggaaccagaacagccagatcagcacagagaaggtgaaccagctgcagaggcagctggatgagaccaatgccctgctgaggacagaaagtgacacagctgcccggctgaggaagacccaggccgagagcagcaagcagatccagcagctggagagcaacaacagagacctgcaggacaagaactgcctgctggagacagccaagctgaagctggagaaggagttcatcaacctgcagagcgccctggagagcgagcggcgggacaggacccacggcagcgagatcatcaatgacctgcagggccgcatctgtggcctggaggaggacctgaagaatggcaagatcctgctggccaaggtggagctggagaagaggcagctgcaggagcgcttcacagacctggagaaggagaagagcaacatggagattgacatgacctaccagctgaaggtgatccagcagagcctggagcaggaggaggccgagcacaaggccaccaaggcccggctggccgacaagaacaagatctatgagagcattgaggaggccaagtctgaggccatgaaggagatggagaagaagctgctggaggagaggaccctgaagcagaaggtggagaacctgctgctggaggccgagaagcgctgcagcctgctggactgtgacctgaagcagagccagcagaagatcaatgagctgctgaagcagaaggatgtgctgaatgaagatgtgaggaacctgaccctgaagattgagcaggagacccagaagcgctgcctgacccagaatgacctgaagatgcagacccagcaggtgaacaccctgaagatgtctgagaagcagctgaagcaggagaacaaccacctgatggagatgaagatgaacctggagaagcagaatgctgagctgaggaaggagcggcaggatgctgatggccagatgaaggagctgcaggaccagctggaggccgagcagtacttcagcaccctgtacaagacccaggtgcgggagctgaaggaggagtgtgaggagaagaccaagctgggcaaggagctgcagcagaagaagcaggagctgcaggatgagcgggacagcctggccgcccagctggagatcaccctgaccaaggctgacagcgagcagctggcccggagcattgctgaggagcagtacagcgacctggagaaggagaagatcatgaaggagctggagatcaaggagatgatggcccggcacaagcaggagctgacagagaaggatgccaccatcgccagcctggaggagaccaacagaaccctgaccagtgatgtggccaacctggccaatgagaaggaggagctgaacaacaagctgaaggatgtgcaggagcagctgagccggctgaaggatgaggagatctctgctgctgccatcaaggcccagtttgagaagcagctgctgacagagaggaccctgaagacccaggccgtgaacaagctggccgagatcatgaacaggaaggagcctgtgaagagaggaaatgacacagatgtgcggaggaaggagaaggagaacaggaagctgcacatggagctgaagtctgagcgggagaagctgacccagcagatgatcaagtaccagaaggagctgaatgagatgcaggcccagattgctgaggagagccagatcagaattgagctgcagatgaccctggacagcaaggacagcgacatcgagcagctgcggagccagctgcaggccctgcacatcggcctggacagcagcagcatcggcagcggccctggagatgctgaggctgatgatggcttccctgagagccggctggagggctggctgagcctgcctgtgaggaacaacaccaagaagtttggctgggtgaagaagtatgtgattgtgagcagcaagaagatcctcttctatgattctgagcaggacaaggagcagagcaacccctacatggtgctggacatcgacaagctgttccacgtgcggcctgtgacccagacagatgtgtacagagcagatgccaaggagatcccccgcatcttccagatcctgtatgccaatgaaggagagagcaagaaggagcaggagttccctgtggagcctgtgggggagaagagcaactacatctgccacaagggccacgagttcatccccaccctgtaccacttccccaccaactgtgaggcctgcatgaagcccctgtggcacatgttcaagcccccaccagccctggagtgccgccgctgccacatcaagtgccacaaggaccacatggacaagaaggaggagatcatcgccccctgcaaggtgtactatgacatcagcacagccaagaacctgctgctgctggccaacagcacagaggagcagcagaagtgggtgtcccggctggtgaagaagatccccaagaagcccccagccccagacccctttgcccggagcagccccaggacctccatgaagatccagcagaaccagagcatccggcggcccagccggcagctggcccccaacaagcccagctag

SEQ ID NO: 168023 - DNA, 2241 bp, synthetic construct
  misc_feature 1..2241: note = Description of Artificial Sequence: Synthetic coding sequence
  source 1..2241: mol_type = other DNA
atgatctacaaggtggagtgtggcctggaggaggacctgaagaatggcaagatcctgctggccaaggtggagctggagaagaggcagctgcaggagcgcttcacagacctggagaaggagaagagcaacatggagattgacatgacctaccagctgaaggtgatccagcagagcctggagcaggaggaggccgagcacaaggccaccaaggcccggctggccgacaagaacaagatctatgagagcattgaggaggccaagtctgaggccatgaaggagatggagaagaagctgctggaggagaggaccctgaagcagaaggtggagaacctgctgctggaggccgagaagcgctgcagcctgctggactgtgacctgaagcagagccagcagaagatcaatgagctgctgaagcagaaggatgtgctgaatgaagatgtgaggaacctgaccctgaagattgagcaggagacccagaagcgctgcctgacccagaatgacctgaagatgcagacccagcaggtgaacaccctgaagatgtctgagaagcagctgaagcaggagaacaaccacctgatggagatgaagatgaacctggagaagcagaatgctgagctgaggaaggagcggcaggatgctgatggccagatgaaggagctgcaggaccagctggaggccgagcagtacttcagcaccctgtacaagacccaggtgcgggagctgaaggaggagtgtgaggagaagaccaagctgggcaaggagctgcagcagaagaagcaggagctgcaggatgagcgggacagcctggccgcccagctggagatcaccctgaccaaggctgacagcgagcagctggcccggagcattgctgaggagcagtacagcgacctggagaaggagaagatcatgaaggagctggagatcaaggagatgatggcccggcacaagcaggagctgacagagaaggatgccaccatcgccagcctggaggagaccaacagaaccctgaccagtgatgtggccaacctggccaatgagaaggaggagctgaacaacaagctgaaggatgtgcaggagcagctgagccggctgaaggatgaggagatctctgctgctgccatcaaggcccagtttgagaagcagctgctgacagagaggaccctgaagacccaggccgtgaacaagctggccgagatcatgaacaggaaggagcctgtgaagagaggaaatgacacagatgtgcggaggaaggagaaggagaacaggaagctgcacatggagctgaagtctgagcgggagaagctgacccagcagatgatcaagtaccagaaggagctgaatgagatgcaggcccagattgctgaggagagccagatcagaattgagctgcagatgaccctggacagcaaggacagcgacatcgagcagctgcggagccagctgcaggccctgcacatcggcctggacagcagcagcatcggcagcggccctggagatgctgaggctgatgatggcttccctgagagccggctggagggctggctgagcctgcctgtgaggaacaacaccaagaagtttggctgggtgaagaagtatgtgattgtgagcagcaagaagatcctcttctatgattctgagcaggacaaggagcagagcaacccctacatggtgctggacatcgacaagctgttccacgtgcggcctgtgacccagacagatgtgtacagagcagatgccaaggagatcccccgcatcttccagatcctgtatgccaatgaaggagagagcaagaaggagcaggagttccctgtggagcctgtgggggagaagagcaactacatctgccacaagggccacgagttcatccccaccctgtaccacttccccaccaactgtgaggcctgcatgaagcccctgtggcacatgttcaagcccccaccagccctggagtgccgccgctgccacatcaagtgccacaaggaccacatggacaagaaggaggagatcatcgccccctgcaaggtgtactatgacatcagcacagccaagaacctgctgctgctggccaacagcacagaggagcagcagaagtgggtgtcccggctggtgaagaagatccccaagaagcccccagccccagacccctttgcccggagcagccccaggacctccatgaagatccagcagaaccagagcatccggcggcccagccggcagctggcccccaacaagcccagctag

SEQ ID NO: 168024 - DNA, 3438 bp, synthetic construct
  misc_feature 1..3438: note = Description of Artificial Sequence: Synthetic coding sequence
  source 1..3438: mol_type = other DNA
atggtgcactgtgacacagctgtgggcaccccagactacatcagccctgaggtgctgaagagccagggcggagatggcttctacggcagagaatgtgactggtggagcgtgggcgtcttcctgtatgagatgctggtgggggacacccccttctatgctgacagcctggtgggcacctacagcaagatcatggaccacaagaacagcctgtgcttcccagaagatgctgagatcagcaagcacgccaagaacctgatctgtgccttcctgacagaccgggaggtgcggctgggcagaaatggagtggaggagatccggcagcaccccttcttcaagaatgaccagtggcactgggacaacatccgggagacagctgcccctgtggtgcctgagctgagcagtgacatcgacagcagcaactttgatgacattgaagatgacaagggagatgtggagaccttccccatccccaaggcctttgtgggcaaccagctgcccttcatcggcttcacctactaccgggagaacctgctgctgagtgacagccccagctgccgggagacagacagcatccagagcaggaagaatgaggagagccaggagatccagaagaagctgtacaccctggaggagcacctgagcaatgagatgcaggccaaggaggagctggagcagaagtgcaagtctgtgaacacccggctggagaagacagccaaggagctggaggaggagatcaccctgaggaagtctgtggagagcgccctgcggcagctggagcgggagaaggccctgctgcagcacaagaatgctgagtaccagaggaaggctgaccacgaggccgacaagaagaggaacctggagaatgatgtgaacagcctgaaggaccagctggaggacctgaagaagaggaaccagaacagccagatcagcacagagaaggtgaaccagctgcagaggcagctggatgagaccaatgccctgctgaggacagaaagtgacacagctgcccggctgaggaagacccaggccgagagcagcaagcagatccagcagctggagagcaacaacagagacctgcaggacaagaactgcctgctggagacagccaagctgaagctggagaaggagttcatcaacctgcagagcgccctggagagcgagcggcgggacaggacccacggcagcgagatcatcaatgacctgcagggccgcatctgtggcctggaggaggacctgaagaatggcaagatcctgctggccaaggtggagctggagaagaggcagctgcaggagcgcttcacagacctggagaaggagaagagcaacatggagattgacatgacctaccagctgaaggtgatccagcagagcctggagcaggaggaggccgagcacaaggccaccaaggcccggctggccgacaagaacaagatctatgagagcattgaggaggccaagtctgaggccatgaaggagatggagaagaagctgctggaggagaggaccctgaagcagaaggtggagaacctgctgctggaggccgagaagcgctgcagcctgctggactgtgacctgaagcagagccagcagaagatcaatgagctgctgaagcagaaggatgtgctgaatgaagatgtgaggaacctgaccctgaagattgagcaggagacccagaagcgctgcctgacccagaatgacctgaagatgcagacccagcaggtgaacaccctgaagatgtctgagaagcagctgaagcaggagaacaaccacctgatggagatgaagatgaacctggagaagcagaatgctgagctgaggaaggagcggcaggatgctgatggccagatgaaggagctgcaggaccagctggaggccgagcagtacttcagcaccctgtacaagacccaggtgcgggagctgaaggaggagtgtgaggagaagaccaagctgggcaaggagctgcagcagaagaagcaggagctgcaggatgagcgggacagcctggccgcccagctggagatcaccctgaccaaggctgacagcgagcagctggcccggagcattgctgaggagcagtacagcgacctggagaaggagaagatcatgaaggagctggagatcaaggagatgatggcccggcacaagcaggagctgacagagaaggatgccaccatcgccagcctggaggagaccaacagaaccctgaccagtgatgtggccaacctggccaatgagaaggaggagctgaacaacaagctgaaggatgtgcaggagcagctgagccggctgaaggatgaggagatctctgctgctgccatcaaggcccagtttgagaagcagctgctgacagagaggaccctgaagacccaggccgtgaacaagctggccgagatcatgaacaggaaggagcctgtgaagagaggaaatgacacagatgtgcggaggaaggagaaggaaaataggaagctgcacatggagctgaagtctgagcgggagaagctgacccagcagatgatcaagtaccagaaggagctgaatgagatgcaggcccagattgctgaggagagccagatccgcatcgagctgcagatgaccctggacagcaaggacagcgacatcgagcagctgcggagccagctgcaggccctgcacatcggcctggacagcagcagcatcggcagcggccctggagatgctgaggctgatgatggcttccctgagagccggctggagggctggctgagcctgcctgtgaggaacaacaccaagaagtttggctgggtgaagaagtatgtgattgtgagcagcaagaagatcctcttctatgacagcgagcaggacaaggagcagagcaacccctacatggtgctggacatcgacaagctgttccacgtgcggcctgtgacccagacagatgtgtacagagcagatgccaaggagatcccccgcatcttccagatcctgtatgccaatgaaggagagagcaagaaggagcaggagttccctgtggagcctgtgggggagaagagcaactacatctgccacaagggccacgagttcatccccaccctgtaccacttccccaccaactgtgaggcctgcatgaagcccctgtggcacatgttcaagcccccaccagccctggagtgccgccgctgccacatcaagtgccacaaggaccacatggacaagaaggaggagatcatcgccccctgcaaggtgtactatgacatcagcacagccaagaacctgctgctgctggccaacagcacagaggagcagcagaagtgggtgtcccggctggtgaagaagatccccaagaagcccccagccccagacccctttgcccggagcagccccaggacctccatgaagatccagcagaaccagagcatcagaagacccagccggcagctggcccccaacaagcccagctag

SEQ ID NO: 168025 - DNA, 2568 bp, synthetic construct
  misc_feature 1..2568: note = Description of Artificial Sequence: Synthetic coding sequence
  source 1..2568: mol_type = other DNA
atgtctgaggcccggcgggacagcaccagcagcctgcagaggaagaagccaccctggctgaagctggacatccccagcgctgtgcccctgacagctgaggagcccagcttcctgcagcccctgcggcggcaggccttcctgcggtctgtgtccatgcctgctgagacagcccacatcagcagcccccaccacgagctgcggcggcctgtgctgcagaggcagaccagcatcacccagaccatccggcggggcacagctgactggtttggagtgtccaaggacagcgacagcacccagaagtggcagaggaagagcatccgccactgcagccagagatatggcaagctgaagccccaggtgctgcgggagctggacctgcccagccaggacaacgtgtccctgaccagcacagagaccccaccacccctgtatgtgggcccctgccagctgggcatgcagaagatcatcgaccccctggcccggggccgggccttccgggtggctgatgacacagctgagggcctgagcgccccccacacccctgtgacccctggggccgccagcctgtgcagcttcagcagcagccgcagcggcttccaccggctgcccaggaggaggaagcgggagagcgtggccaagatgtccttccgggctgctgctgccctgatgaagggccgctctgtgagagatggcaccttccggcgggcccagaggaggagcttcaccccagccagcttcctggaggaggacaccacagacttcccagatgagctggacaccagcttctttgcccgggagggcatcctgcacgaggagctgagcacctacccagatgaggtgtttgagagccccagcgaggccgccctgaaggactgggagaaggcccctgagcaggccgacctgaccggcggggccctggacagaagtgagctggagaggagccacctgatgctgcccctggagcggggctggaggaagcagaaggagggcgccgccgccccccagcccaaggtgcggctgcggcaggaggtggtgtccacagctggcccccggcggggccagagaattgctgtgcctgtgaggaagctgtttgcccgggagaagaggccctacggcctgggcatggtgggccgcctgaccaacagaacctacaggaagagaattgacagctttgtgaagaggcagatcgaggacatggatgaccaccggcccttcttcacctactggctgacctttgtgcacagcctggtgaccatcctggccgtgtgcatctatggaattgcccctgtgggcttcagccagcatgaaacagtggacagcgtgctgaggaacagaggagtgtatgaaaatgtgaagtatgtgcagcaggagaacttctggattggccccagcagcgaggccctgatccacctgggcgccaagttcagcccctgcatgaggcaggacccccaggtgcacagcttcatccgcagcgcccgggagcgggagaagcacagcgcctgctgcgtgagaaatgacaggagcggctgtgtgcagaccagcgaggaggagtgcagcagcaccctggccgtgtgggtgaagtggcccatccaccccagcgcccctgagctggccggccacaagaggcagtttggatctgtgtgccaccaggacccccgggtgtgtgatgagcccagcagcgaggacccccatgagtggccagaggacatcaccaagtggcccatctgcaccaagaacagcgctggcaaccacaccaaccacccccacatggactgtgtgatcaccggccggccctgctgcatcggcaccaagggccgctgtgagatcaccagccgggagtactgtgacttcatgaggggctacttccacgaggaggccaccctgtgcagccaggtgcactgcatggatgatgtgtgtggcctgctgcccttcctgaaccctgaggtgcctgaccagttctaccgcctgtggctgagcctcttcctgcacgccggcatcctgcactgcctggtgtccatctgcttccagatgacagtgctgcgggacctggagaagctggccggctggcaccgcatcgccatcatctacctgctgtctggagtgacaggcaacctggccagcgccatcttcctgccctacagagctgaggtgggccctgctggcagccagtttggcatcctggcctgcctgtttgtggagctgttccagagctggcagatcctggcccggccctggagggccttcttcaagctgctggccgtggtgctcttcctgttcaccttcggcctgctgccctggattgacaactttgcccacatcagcggcttcatcagcggcctcttcctgagctttgccttcctgccctacatcagctttgggaagtttgacctgtacaggaagcgctgccagatcatcatcttccaggtggtgttcctgggcctgctggccggcctggtggtgctcttctacgtgtaccctgtgcgctgtgagtggtgtgagttcctgacctgcatccccttcacagacaagttctgtgagaagtatgagctggatgcccagctgcactag

SEQ ID NO: 168026 - DNA, 573 bp, synthetic construct
  misc_feature 1..573: note = Description of Artificial Sequence: Synthetic coding sequence
  source 1..573: mol_type = other DNA
atgtctgaggcccggcgggacagcaccagcagcctgcagaggaagaagccaccctggctgaagctggacatccccagcgctgtgcccctgacagctgaggagcccagcttcctgcagcccctgcggcggcaggccttcctgcggtctgtgtccatgcctgctgagacagcccacatcagcagcccccaccacgagctgcggcggcctgtgctgcagaggcagaccagcatcacccagaccatccgcagcagccggcaggtgcgcttcggccgggtgcacaccctgcccctgctgggcccccgggccgcccggcgggccttcccccagaggcagagcctgtcctggagcctgctgcggggcacagctgactggtttggagtgtccaaggacagcgacagcacccagaagtggcagaggaagagcatccgccactgcagccagagatatggcaagctgaagccccaggtgctgcgggagctggacctgcccagccaggacaacgtgtccctgaccagcacagagaccccaccacccctgtatgtgggcccctgccagctgggcatgcagaagtag

SEQ ID NO: 168027 - DNA, 699 bp, synthetic construct
  misc_feature 1..699: note = Description of Artificial Sequence: Synthetic coding sequence
  source 1..699: mol_type = other DNA
tgaagaccctgctgcatcggcaccaagggccgctgtgagatcaccagccgggagtactgtgacttcatgaggggctacttccacgaggaggccaccctgtgcagccaggtgcactgcatggatgatgtgtgtggcctgctgcccttcctgaaccctgagatgacagtgctgcgggacctggagaagctggccggctggcacagaattgccatcatctacctgctgagcggcgtgactggaaacctggccagcgccatcttcctgccctacagagctgaggtgggccctgctggcagccagtttggcatcctggcctgcctgtttgtggagctgttccagagctggcagatcctggcccggccctggagggccttcttcaagctgctggccgtggtgctcttcctgttcaccttcggcctgctgccctggattgacaactttgcccacatcagcggcttcatcagcggcctcttcctgagctttgccttcctgccctacatcagctttgggaagtttgacctgtacaggaagcgctgccagatcatcatcttccaggtggtgttcctgggcctgctggccggcctggtggtgctcttctacgtgtaccctgtgcgctgtgagtggtgtgagttcctgacctgcatccccttcacagacaagttctgtgagaagtatgagctggatgcccagctgcactag

SEQ ID NO: 168028 - DNA, 492 bp, synthetic construct
  misc_feature 1..492: note = Description of Artificial Sequence: Synthetic coding sequence
  source 1..492: mol_type = other DNA
atgtctgaggcccggcgggacagcaccagcagcctgcagaggaagaagccaccctggctgaagctggacatccccagcgctgtgcccctgacagctgaggagcccagcttcctgcagcccctgcggcggcaggccttcctgcggtctgtgtccatgcctgctgagacagcccacatcagcagcccccaccacgagctgcggcggcctgtgctgcagaggcagaccagcatcacccagaccatccggcggggcacagctgactggtttggagtgtccaaggacagcgacagcacccagaagtggcagaggaagagcatccgccactgcagccagagatatggcaagctgaagccccaggtgctgcgggagctggacctgcccagccaggacaacgtgtccctgaccagcacagagaccccaccacccctgtatgtgggcccctgccagctgggcatgcagaagatcatcgaccccctggcccggggccgctag

SEQ ID NO: 168029 - DNA, 1740 bp, synthetic construct
  misc_feature 1..1740: note = Description of Artificial Sequence: Synthetic coding sequence
  source 1..1740: mol_type = other DNA
atgtctgaggcccggcgggacagcaccagcagcctgcagaggaagaagccaccctggctgaagctggacatccccagcgctgtgcccctgacagctgaggagcccagcttcctgcagcccctgcggcggcaggccttcctgcggtctgtgtccatgcctgctgagacagcccacatcagcagcccccaccacgagctgcggcggcctgtgctgcagaggcagaccagcatcacccagaccatccggcggggcacagctgactggtttggagtgtccaaggacagcgacagcacccagaagtggcagaggaagagcatccgccactgcagccagagatatggcaagctgaagccccaggtgctgcgggagctggacctgcccagccaggacaacgtgtccctgaccagcacagagaccccaccacccctgtatgtgggcccctgccagctgggcatgcagaagatcatcgaccccctggcccggggccgggccttccgggtggctgatgacacagctgagggcctgagcgccccccacacccctgtgacccctggggccgccagcctgtgcagcttcagcagcagccgcagcggcttccaccggctgcccaggaggaggaagcgggagagcgtggccaagatgtccttccgggctgctgctgccctgatgaagggccgctctgtgagagatggcaccttccggcgggcccagaggaggagcttcaccccagccagcttcctggaggaggacaccacagacttcccagatgagctggacaccagcttctttgcccgggagggcatcctgcacgaggagctgagcacctacccagatgaggtgtttgagagccccagcgaggccgccctgaaggactgggagaaggcccctgagcaggccgacctgaccggcggggccctggacagaagtgagctggagaggagccacctgatgctgcccctggagcggggctggaggaagcagaaggagggcgccgccgccccccagcccaaggtgcggctgcggcaggaggtggtgtccacagctggcccccggcggggccagagaattgctgtgcctgtgaggaagctgtttgcccgggagaagaggccctacggcctgggcatggtgggccgcctgaccaacagaacctacaggaagagaattgacagctttgtgaagaggcagatcgaggacatggatgaccaccggcccttcttcacctactggctgacctttgtgcacagcctggtgaccatcctggccgtgtgcatctatggaattgcccctgtgggcttcagccagcatgaaacagtggacagcgtgctgaggaacagaggagtgtatgaaaatgtgaagtatgtgcagcaggagaacttctggattggccccagctctgtgaggacaggcctgggcgccggccctgctggagctggccctggaggagcccggcggggccaggaggccccagactgtggccgcagcagccccagccctgctgggggcccccaccccccaggccggcaggtgtttgccctgcacgcccctggccctgctggggcccagctgcacagcctgggcgcccgggcccgggaggccctgcggctgctgcgggcccagaggcaggtgggcctgcgggctgacctgggcggcggcgtgctgggcgccttccccaggcctggcctgccccccagcagcgcccgctgcagcctcttccggccccagattgattctgctgagtag

SEQ ID NO: 168030 - DNA, 2571 bp, synthetic construct
  misc_feature 1..2571: note = Description of Artificial Sequence: Synthetic coding sequence
  source 1..2571: mol_type = other DNA
atggccagcgctgacaagaatggaggctctgtgtcctctgtgagcagcagccggctgcagagcaggaagccacccaacctgagcatcaccatccccccacctgagaaggagacccaggcccctggagagcaggacagcatgctgcctgagggcttccagaacagaaggctgaagaagagccagcccaggacctgggccgcccacaccacagcctgccccccatccttcctgcccaagaggaagaacccagcctacctgaagtctgtgtccctgcaggagcccaggagccgctggcaggagagcagcgagaagaggcctggcttccggcggcaggccagcctgagccagagcatcaggaagggggccgcccagtggtttggagtgtctggggactgggagggccagaggcagcagtggcagaggaggagcctgcaccactgcagcatgagatatggccgcctgaaggccagctgccagagggacctggagctgcccagccaggaggcccccagcttccagggcacagagagccccaagccctgcaagatgcccaagatcgtggaccccctggcccggggccgggccttccgccaccctgaggagatggaccggccccacgccccccacccccccctgaccccaggagtgctgagcctgaccagcttcacctctgtgcgcagcggctacagccacctgcccaggaggaagaggatgtctgtggcccacatgagcctgcaggccgctgctgccctgctgaagggccgctctgtgctggatgccaccggccagcgctgccgggtggtgaagaggagctttgccttccccagcttcctggaggaggatgtggtggatggagctgacacctttgacagcagcttcttcagcaaggaggagatgagctccatgccagatgatgtgtttgagagcccccccctgagcgccagctacttccggggcatcccccacagcgccagccctgtgtccccagatggagtgcagatccccctgaaggagtatggccgggcccctgtgcccggcccccggcggggcaagagaattgccagcaaggtgaagcactttgcctttgacaggaagaagaggcactacggcctgggcgtggtgggcaactggctgaacagaagctacagaagaagcatcagcagcacagtgcagaggcagctggagagctttgacagccaccggccctacttcacctactggctgacctttgtgcacgtgatcatcaccctgctggtgatctgcacctatggaattgcccctgtgggctttgcccagcacgtgaccacccagctggtgctgagaaataaaggagtgtatgagagcgtgaagtacatccagcaggagaacttctgggtgggccccagcagcattgacctgatccacctgggcgccaagttcagcccctgcatcaggaaggatggccagatcgagcagctggtgctgcgggagcgggacctggagcgggacagcggctgctgcgtgcagaatgaccacagcggctgcatccagacccagaggaaggactgcagcgagaccctggccacctttgtgaagtggcaggatgacaccggcccccccatggacaagagtgacctgggccagaagaggaccagcggggctgtgtgccaccaggaccccaggacctgtgaggagcccgccagcagcggggcccacatctggccagatgacatcaccaagtggcccatctgcacagagcaggcccggagcaaccacacaggcttcctgcacatggactgtgagatcaagggccggccctgctgcatcggcaccaagggcagctgtgagatcaccacccgggagtactgtgagttcatgcacggctacttccacgaggaggccaccctgtgcagccaggtgcactgcctggacaaggtgtgtggcctgctgcccttcctgaaccctgaggtgcctgaccagttctaccgcctgtggctgagcctcttcctgcatgctggggtggtgcactgcctggtgtctgtggtgttccagatgaccatcctgcgggacctggagaagctggccggctggcacagaattgccatcatcttcatcctgagcggcatcactggaaacctggccagcgccatcttcctgccctacagagctgaggtgggccctgctggcagccagtttggcctgctggcctgcctgtttgtggagctgttccagagctggcccctgctggagcggccctggaaggccttcctgaacctgagcgccatcgtgctcttcctgttcatctgtggcctgctgccctggattgacaacatcgcccacatcttcggcttcctgagcggcctgctgctggcctttgccttcctgccctacatcaccttcggcaccagtgacaagtacaggaagagggccctgatcctggtgtccctgctggcctttgctggcctgtttgctgccctggtgctgtggctgtacatctaccccatcaactggccctggattgagcacctgacctgcttccccttcaccagccgcttctgtgagaagtatgagctggaccaggtgctgcactag

SEQ ID NO: 168031 - DNA, 2484 bp, synthetic construct
  misc_feature 1..2484: note = Description of Artificial Sequence: Synthetic coding sequence
  source 1..2484: mol_type = other DNA
atggccagcgctgacaagaatggaggctctgtgtcctctgtgagcagcagccggctgcagagcaggaagccacccaacctgagcatcaccatccccccacctgagaaggagacccaggcccctggagagcaggacagcatgctgcctgagaggaagaacccagcctacctgaagtctgtgtccctgcaggagcccaggagccgctggcaggagagcagcgagaagaggcctggcttccggcggcaggccagcctgagccagagcatcagaaaaggagctgcccagtggtttggagtgtctggggactgggagggccagaggcagcagtggcagaggaggagcctgcaccactgcagcatgagatatggccgcctgaaggccagctgccagagggacctggagctgcccagccaggaggcccccagcttccagggcacagagagccccaagccctgcaagatgcccaagatcgtggaccccctggcccggggccgggccttccgccaccctgaggagatggaccggccccacgccccccacccccccctgaccccaggagtgctgagcctgaccagcttcacctctgtgcgcagcggctacagccacctgcccaggaggaagaggatgtctgtggcccacatgagcctgcaggccgccgccgccctgctgaagggccgctctgtgctggatgccaccggccagcgctgccgggtggtgaagaggagctttgccttccccagcttcctggaggaggatgtggtggatggagctgacacctttgacagcagcttcttcagcaaggaggagatgagctccatgccagatgatgtgtttgagagcccccccctgagcgccagctacttccggggcatcccccacagcgccagccctgtgtccccagatggagtgcagatccccctgaaggagtatggccgggcccctgtgcccggcccccggcggggcaagagaattgccagcaaggtgaagcactttgcctttgacaggaagaagaggcactacggcctgggcgtggtgggcaactggctgaacagaagctaccgccgcagcatcagcagcacagtgcagaggcagctggagagctttgacagccaccggccctacttcacctactggctgacctttgtgcacgtgatcatcaccctgctggtgatctgcacctacggcatcgcccctgtgggctttgcccagcacgtgaccacccagctggtgctgaggaacaagggcgtgtatgaatctgtgaagtacatccagcaggagaacttctgggtgggccccagcagcattgacctgatccacctgggcgccaagttcagcccctgcatcaggaaggatggccagatcgagcagctggtgctgcgggagcgggacctggagcgggacagcggctgctgcgtgcagaatgaccacagcggctgcatccagacccagaggaaggactgcagcgagaccctggccacctttgtgaagtggcaggatgacaccggcccccccatggacaagagtgacctgggccagaagaggaccagcggggctgtgtgccaccaggaccccaggacctgtgaggagcccgccagcagcggggcccacatctggccagatgacatcaccaagtggcccatctgcacagagcaggcccggagcaaccacacaggcttcctgcacatggactgtgagatcaagggccggccctgctgcatcggcaccaagggcagctgtgagatcaccacccgggagtactgtgagttcatgcacggctacttccacgaggaggccaccctgtgcagccaggtgcactgcctggacaaggtgtgtggcctgctgcccttcctgaaccctgaggtgcctgaccagttctaccgcctgtggctgagcctcttcctgcacgccggcgtggtgcactgcctggtgtctgtggtgttccagatgaccatcctgcgggacctggagaagctggccggctggcaccgcatcgccatcatcttcatcctgagcggcatcaccggcaacctggccagcgccatcttcctgccctacagagctgaggtgggccctgctggcagccagtttggcctgctggcctgcctgtttgtggagctgttccagagctggcccctgctggagcggccctggaaggccttcctgaacctgagcgccatcgtgctcttcctgttcatctgtggcctgctgccctggattgacaacatcgcccacatcttcggcttcctgagcggcctgctgctggcctttgccttcctgccctacatcaccttcggcaccagtgacaagtacaggaagagggccctgatcctggtgtccctgctggcctttgctggcctgtttgctgccctggtgctgtggctgtacatctaccccatcaactggccctggattgagcacctgacctgcttccccttcaccagccgcttctgtgagaagtatgagctggaccaggtgctgcactag

SEQ ID NO: 168032 - DNA, 2151 bp, synthetic construct
  misc_feature 1..2151: note = Description of Artificial Sequence: Synthetic coding sequence
  source 1..2151: mol_type = other DNA
cctggcagcagccgcagccgccaccccctgctgctgctgatctggagcctgggcagcagccagggcccccaccggcagatccggcccccaccaccctgcagacatgctggcacccacgtgcccagccccctgccccacacccaggtgcacagaagacggcaggcctatgcccacctgagcctggtgtgcttcagaagaggagctgcccagtggtttggagtgtctggggactgggagggccagaggcagcagtggcagaggaggagcctgcaccactgcagcatgagatatggccgcctgaaggccagctgccagagggacctggagctgcccagccaggaggcccccagcttccagggcacagagagccccaagccctgcaagatgcccaagatcgtggaccccctggcccggggccgggccttccgccaccctgaggagatggaccggccccacgccccccacccccccctgaccccaggagtgctgagcctgaccagcttcacctctgtgcgcagcggctacagccacctgcccaggaggaagaggatgtctgtggcccacatgagcctgcaggccgctgctgccctgctgaagggccgctctgtgctggatgccaccggccagcgctgccgggtggtgaagaggagctttgccttccccagcttcctggaggaggatgtggtggatggagctgacacctttgacagcagcttcttcagcaaggaggagatgagctccatgccagatgatgtgtttgagagcccccccctgagcgccagctacttccggggcatcccccacagcgccagccctgtgtccccagatggagtgcagatccccctgaaggagtatggccgggcccctgtgcccggcccccggcggggcaagagaattgccagcaaggtgaagcactttgcctttgacaggaagaagaggcactacggcctgggcgtggtgggcaactggctgaacagaagctacagaagaagcatcagcagcacagtgcagaggcagctggagagctttgacagccaccggccctacttcacctactggctgacctttgtgcacgtgatcatcaccctgctggtgatctgcacctatggaattgcccctgtgggctttgcccagcacgtgaccacccagctggtgctgagaaataaaggagtgtatgagagcgtgaagtacatccagcaggagaacttctgggtgggccccagcagcattgacctgatccacctgggcgccaagttcagcccctgcatcaggaaggatggccagatcgagcagctggtgctgcgggagcgggacctggagcgggacagcggctgctgcgtgcagaatgaccacagcggctgcatccagacccagaggaaggactgcagcgagaccctggccacctttgtgaagtggcaggatgacaccggcccccccatggacaagagtgacctgggccagaagaggaccagcggggctgtgtgccaccaggaccccaggacctgtgaggagcccgccagcagcggggcccacatctggccagatgacatcaccaagtggcccatctgcacagagcaggcccggagcaaccacacaggcttcctgcacatggactgtgagatcaagggccggccctgctgcatcggcaccaagggcagctgtgagatcaccacccgggagtactgtgagttcatgcacggctacttccacgaggaggccaccctgtgcagccaggtgcactgcctggacaaggtgtgtggcctgctgcccttcctgaaccctgaggtgcctgaccagttctaccgcctgtggctgagcctcttcctgcatgctggggtggtgcactgcctggtgtctgtggtgttccagatgaccatcctgcgggacctggagaagctggccggctggcacagaattgccatcatcttcatcctgagcggcatcactggaaacctggccagcgccatcttcctgccctacagagctgaggtgaggatgtggaggatgggccccctgccccacatcggcggccagccctgctgcagctacagcacccacctgggcagcgcccggggcacccgctgccccagctgcaccggcctgcacagcggcggcacagccaacctgggcgcctactggctggtgtcctag

SEQ ID NO: 168033 - DNA, 639 bp, synthetic construct
  misc_feature 1..639: note = Description of Artificial Sequence: Synthetic coding sequence
  source 1..639: mol_type = other DNA
atggcccagacagacaagcccacctgcatccccccagagctgcccaagatgctgaaggagtttgccaaggccgccatccgggtgcagccccaggacctgatccagtgggccgctgactactttgaggccctgagcagaggagagaccccacctgtgcgggagaggtctgagcgggtggccctgtgcaacagagctgagctgaccccagagctgctgaagatcctgcacagccaggtggccggccgcctcatcatccgggcagaggagctggcccagatgtggaaggtggtgaacctgcccacagacctcttcaacagcgtgatgaatgtgggccgcttcacagaggagattgagtggctgaagttcctggccctggcctgcagcgccctgggcgtgaccatcaccaagaccctgaagatcgtgtgtgaggtgctgagctgtgaccacaacggcggcagcccccgcatccccttcagcaccttccagttcctgtacacctacatcgccaaggtggatggagagatcagcgccagccacgtgtccaggatgctgaactacatggagcaggaggtgattggaccagatggcatcatcaccgtgaatgacttcacccagaacccccgggtgcagctggagtag

SEQ ID NO: 168034 - DNA, 639 bp, synthetic construct; identical to SEQ ID NO: 168033
  misc_feature 1..639: note = Description of Artificial Sequence: Synthetic coding sequence
  source 1..639: mol_type = other DNA

SEQ ID NO: 168035 - DNA, 351 bp, synthetic construct
  misc_feature 1..351: note = Description of Artificial Sequence: Synthetic coding sequence
  source 1..351: mol_type = other DNA
atggcccagacagacaagcccacctgcatccccccagagctgcccaagatgctgaaggagtttgccaaggccgccatccgggtgcagccccaggacctgatccagtgggccgctgactactttgaggccctgagcagaggagagaccccacctgtgcgggagaggtctgagcgggtggccctgtgcaacagagctgagctgaccccagagctgctgaagatcctgcacagccaggtggccggccgcctcatcatccgggcagaggagctggcccagatgtggaaggtggtgaacctgcccacagacctcttcaacagcgtgatgaatgtgggccgcttcacagaggagtag

SEQ ID NO: 168036 - DNA, 393 bp, synthetic construct
  misc_feature 1..393: note = Description of Artificial Sequence: Synthetic coding sequence
  source 1..393: mol_type = other DNA
atggcccagacagacaagcccacctgcatccccccagagctgcccaagatgctgaaggagtttgccaaggccgccatccgggtgcagccccaggacctgatccagtgggccgctgactactttgaggccctgagcagaggagagaccccacctgtgcgggagaggtctgagcgggtggccctgtgcaacagagctgagctgaccccagagctgctgaagatcctgcacagccaggtggccggccgcctcatcatccgggcagaggagctggcccagatgtggaaggtggtgaacctgcccacagacctcttcaacagcgtgatgaatgtgggccgcttcacagaggagattgagtggctgaagttcctggccctggcctgcagcgccctgtag

SEQ ID NO: 168037 - DNA, 312 bp, synthetic construct
  misc_feature 1..312: note = Description of Artificial Sequence: Synthetic coding sequence
  source 1..312: mol_type = other DNA
atggcccagacagacaagcccacctgcatccccccagagctgcccaagatgctgaaggagtttgccaaggccgccatccgggtgcagccccaggacctgatccagtgggccgctgactactttgaggccctgagcagaggagagaccccacctgtgcgggagaggtctgagcgggtggccctgtgcaacagagctgagctgaccccagagctgctgaagatcctgcacagccaggtggccggccgcctcatcatccgggcagaggagctggcccagatgtggaaggtggtgaacctgcccacagacctgtag

SEQ ID NO: 168038 - DNA, 234 bp, synthetic construct
  misc_feature 1..234: note = Description of Artificial Sequence: Synthetic coding sequence
  source 1..234: mol_type = other DNA
atggcccagacagacaagcccacctgcatccccccagagctgcccaagatgctgaaggagtttgccaaggccgccatccgggtgcagccccaggacctgatccagtgggccgctgactactttgaggccctgagcagaggagagaccccacctgtgcgggagaggtctgagcgggtggccctgtgcaacagagctgagctgaccccagagctgctgaagatcctgcacagctag

SEQ ID NO: 168039 - DNA, 693 bp, synthetic construct
  misc_feature 1..693: note = Description of Artificial Sequence: Synthetic coding sequence
  source 1..693: mol_type = other DNA
atgcccctgcctgacaccatgttctgtgcccagcagatccacatccccccagagctgcctgacatcctgaagcagttcaccaaggccgccatccgcacccagcctgcagatgtgctgcgctggagcgctggctacttcagcgccctgagcagaggagaccccctgcctgtgaaggacaggatggagatgcccacagccacccagaagacagacaccggcctgacccagggcctgctgaaggtgctgcacaagcagtgccaccacaagagatatgtggagctgacagacctggagcagaagtggaagaacctgtgcctgcccaaggagaagttcaaggccctgctgcagctggacccctgtgagaacaagatcaagtggatcaacttcctggccctgggctgcagcatgctgggcggcagcctgaacacagccctgaagcacctgtgtgagatcctgacagatgatcctgagggcggccctgcccgcatccccttcaagaccttctcctatgtgtaccgctacctggcccggctggacagtgatgtgagccccctggagacagagagctacctggccagcctgaaggagaacattgatgccaggaagaatggcatgattggcctgagtgacttcttcttccccaagaggaagctgctggagagcattgaaaattctgaagatgtgggccactag

SEQ ID NO: 168040 - DNA, 693 bp, synthetic construct; identical to SEQ ID NO: 168039
  misc_feature 1..693: note = Description of Artificial Sequence: Synthetic coding sequence
  source 1..693: mol_type = other DNA

SEQ ID NO: 168041 - DNA, 2091 bp, synthetic construct
  misc_feature 1..2091: note = Description of Artificial Sequence: Synthetic coding sequence
  source 1..2091: mol_type = other DNA
atggatgctgacatggactatgagcggcccaacgtggagaccatcaagtgtgtggtggtgggggacaatgctgtgggcaagaccaggctcatctgtgcccgggcctgcaacaccaccctgacccagtaccagctgctggccacccacgtgcccaccgtgtgggccatcgaccagtacagagtgtgccaggaggtgctggagaggagcagagatgtggtggatgaggtgtctgtgtccctgcggctgtgggacaccttcggggaccaccacaaggacagaagatttgcctacggccgcagtgatgtggtggtgctgtgcttcagcatcgccaaccccaacagcctgaaccacgtgaagtccatgtggtacccagagatcaagcacttctgccccaggacccctgtgatcctggtgggctgccagctggacctgcgctatgctgacctggaggccgtgaacagagcccggcggcccctggcccggcccatcaagagaggagacatcctgcccccagagaagggccgggaggtggccaaggagctgggcctgccctactatgagacctctgtgtttgaccagtttggcatcaaggatgtgtttgacaatgccatccgggccgccctgatcagcagaagacacctgcagttctggaagagccacctgaagaaggtgcagaagcccctgctgcaggcccccttcctgccccccaaggcccctcctcctgtgatcaagatcccagaatgtcccagcatgggcaccaatgaggccgcctgcctgctggacaaccccctgtgtgctgatgtgctcttcatcctgcaggaccaggagcacatctttgcccaccgcatctacctggccaccagcagcagcaagttctatgacctcttcctgatggagtgtgaggagagccccaatggaagtgaaggagcctgtgagaaggagaagcagagccgggacttccagggccgcatcctgtctgtggaccctgaggaggagcgggaggagggccccccacgcatcccccaggccgaccagtggaagagcagcaacaagagcctggtggaggccctgggcctggaggccgagggcgctgtgcctgagacccagaccctgaccggctggagcaagggcttcatcggcatgcaccgggagatgcaggtgaaccccatcagcaagaggatgggccccatgacagtggtgaggatggatgcctctgtgcagcccggccccttccgcaccctgctgcagttcctgtacacaggccagctggatgagaaggagaaggacctggtgggcctggcccagattgctgaggtgctggagatgtttgacctgaggatgatggtggagaacatcatgaacaaggaggccttcatgaaccaggagatcaccaaggccttccacgtgaggaaggccaaccgcatcaaggaatgtctgagcaagggcaccttcagtgatgtgaccttcaagctggatgatggagccatcagcgcccacaagcccctgctgatctgcagctgtgagtggatggccgccatgtttggaggcagctttgtggagagcgccaacagcgaggtgtacctgcccaacatcaacaagatctccatgcaggccgtgctggactacctgtacaccaagcagctgagccccaacctggacctggaccccctggagctgattgccctggccaaccgcttctgcctgccccacctggtggccctggccgagcagcacgctgtgcaggagctgaccaaggccgccaccagcggcgtgggcattgatggagaggtgctgagctacctggagctggcccagttccacaatgcccaccagctggccgcctggtgcctgcaccacatctgcaccaactacaacagcgtgtgcagcaagttcaggaaggagatcaagagcaagtctgctgacaaccaggagtactttgagcggcaccgctggccccctgtgtggtacctgaaggaggaggaccactaccagagggtgaagcgggagcgggagaaggaggacatcgccctgaacaagcacaggagcaggaggaagtggtgcttctggaacagcagccctgctgtggcctag

SEQ ID NO: 168042 - DNA, 2091 bp, synthetic construct; identical to SEQ ID NO: 168041
  misc_feature 1..2091: note = Description of Artificial Sequence: Synthetic coding sequence
  source 1..2091: mol_type = other DNA

SEQ ID NO: 168043 - DNA, 300 bp, synthetic construct
  misc_feature 1..300: note = Description of Artificial Sequence: Synthetic coding sequence
  source 1..300: mol_type = other DNA
atggatgctgacatggactatgagcggcccaacgtggagaccatcaagtgtgtggtggtgggggacaatgctgtgggcaagaccaggctcatctgtgcccgggcctgcaacaccaccctgacccagtaccagctgctggccacccacgtgcccaccgtgtgggccatcgaccagtacagagtgtgccaggaggtgctggagaggagcagagatgtggtggatgaggtgtctgtgtccctgcggctgtgggacaccttcggggaccaccacaaggacagaagatttgcctatggaagatag

SEQ ID NO: 168044 - DNA, 2184 bp, synthetic construct
  misc_feature 1..2184: note = Description of Artificial Sequence: Synthetic coding sequence
  source 1..2184: mol_type = other DNA
atggacagcgacatggactatgagcggcccaacgtggagaccatcaagtgtgtggtggtgggggacaatgctgtgggcaagaccaggctcatctgtgcccgggcctgcaatgccaccctgacccagtaccagctgctggccacccacgtgcccaccgtgtgggccatcgaccagtacagagtgtgccaggaggtgctggagaggagcagagatgtggtggatgatgtgtctgtgtccctgcggctgtgggacaccttcggggaccaccacaaggacagaagatttgcctacggccgcagtgatgtggtggtgctgtgcttcagcatcgccaaccccaacagcctgcaccacgtgaagaccatgtggtacccagagatcaagcacttctgcccccgggcccctgtgatcctggtgggctgccagctggacctgcgctatgctgacctggaggccgtgaacagagcccggcggcccctggcccggcccatcaagcccaatgagatcctgcccccagagaagggccgggaggtggccaaggagctgggcatcccctactatgagacctctgtggtggcccagtttggcatcaaggatgtgtttgacaatgccatccgggccgccctgatcagcagaagacacctgcagttctggaagagccacctgagaaatgtgcagaggcccctgctgcaggcccccttcctgccccccaagcccccaccacccatcatcgtggtgcctgacccccccagcagcagcgaggagtgcccagcccacctgctggaggaccccctgtgtgctgatgtgatcctggtgctgcaggagcgggtgcgcatctttgcccacaagatctacctgagcaccagcagcagcaagttctatgacctcttcctgatggacctgtctgagggggagctgggcggccccagcgagcccggcggcacccaccctgaggaccaccagggccacagcgaccagcaccaccaccaccaccaccaccaccacggccgggacttcctgctgcgggccgccagctttgatgtgtgtgagagcgtggatgaggccggcggcagcggccctgctggcctgcgggccagcaccagtgatggcatcctgcggggaaatggcaccggctacctgcccggccggggccgggtgctgagctcctggagccgggcctttgtgtccatccaggaggagatggccgaggaccccctgacctacaagagccggctgatggtggtggtgaagatggacagcagcatccagcccggccccttccgggctgtgctgaagtacctgtacacaggagagctggatgaaaatgaaagagacctgatgcacatcgcccacatcgccgagctgctggaggtgtttgacctgaggatgatggtggccaacatcctgaacaatgaggccttcatgaaccaggagatcaccaaggccttccacgtgcggaggaccaacagagtgaaggagtgcctggccaagggcaccttcagtgatgtgaccttcatcctggatgatggcaccatcagcgcccacaagcccctgctgatcagcagctgtgactggatggccgccatgtttggaggcccctttgtggagagcagcacccgggaggtggtgttcccctacaccagcaagagctgcatgagagctgtgctggagtacctgtacacaggcatgttcaccagcagcccagacctggatgacatgaagctgatcatcctggccaaccggctgtgcctgccccacctggtggccctgacagagcagtacacagtgacaggcctgatggaggccacccagatgatggtggacattgatggagatgtgctggtgttcctggagctggcccagttccactgtgcctaccagctggccgactggtgcctgcaccacatctgcaccaactacaacaacgtgtgcaggaagttcccccgggacatgaaggccatgagccctgagaaccaggagtactttgagaagcaccgctggccccctgtgtggtacctgaaggaggaggaccactaccagagggccaggaaggagcgggagaaggaggactacctgcacctgaagaggcagcccaagaggcgctggctgttctggaacagccccagcagccccagcagcagcgctgccagcagcagcagccccagcagcagcagcgctgtggtgtag

SEQ ID NO: 168045 - DNA, 2250 bp, synthetic construct
  misc_feature 1..2250: note = Description of Artificial Sequence: Synthetic coding sequence
  source 1..2250: mol_type = other DNA
atgcaggcctggaggaagggcccagatggcccccagaagaccagcagtgacagcatgagccggctgatggacagcgacatggactatgagcggcccaacgtggagaccatcaagtgtgtggtggtgggggacaatgctgtgggcaagaccaggctcatctgtgcccgggcctgcaatgccaccctgacccagtaccagctgctggccacccacgtgcccaccgtgtgggccatcgaccagtacagagtgtgccaggaggtgctggagaggagcagagatgtggtggatgatgtgtctgtgtccctgcggctgtgggacaccttcggggaccaccacaaggacagaagatttgcctacggccgcagtgatgtggtggtgctgtgcttcagcatcgccaaccccaacagcctgcaccacgtgaagaccatgtggtacccagagatcaagcacttctgcccccgggcccctgtgatcctggtgggctgccagctggacctgcgctatgctgacctggaggccgtgaacagagcccggcggcccctggcccggcccatcaagcccaatgagatcctgcccccagagaagggccgggaggtggccaaggagctgggcatcccctactatgagacctctgtggtggcccagtttggcatcaaggatgtgtttgacaatgccatccgggccgccctgatcagcagaagacacctgcagttctggaagagccacctgagaaatgtgcagaggcccctgctgcaggcccccttcctgccccccaagcccccaccacccatcatcgtggtgcctgacccccccagcagcagcgaggagtgcccagcccacctgctggaggaccccctgtgtgctgatgtgatcctggtgctgcaggagcgggtgcgcatctttgcccacaagatctacctgagcaccagcagcagcaagttctatgacctcttcctgatggacctgtctgagggggagctgggcggccccagcgagcccggcggcacccaccctgaggaccaccagggccacagcgaccagcaccaccaccaccaccaccaccaccacggccgggacttcctgctgcgggccgccagctttgatgtgtgtgagagcgtggatgaggccggcggcagcggccctgctggcctgcgggccagcaccagtgatggcatcctgcggggaaatggcaccggctacctgcccggccggggccgggtgctgagctcctggagccgggcctttgtgtccatccaggaggagatggccgaggaccccctgacctacaagagccggctgatggtggtggtgaagatggacagcagcatccagcccggccccttccgggctgtgctgaagtacctgtacacaggagagctggatgaaaatgaaagagacctgatgcacatcgcccacatcgccgagctgctggaggtgtttgacctgaggatgatggtggccaacatcctgaacaatgaggccttcatgaaccaggagatcaccaaggccttccacgtgcggaggaccaacagagtgaaggagtgcctggccaagggcaccttcagtgatgtgaccttcatcctggatgatggcaccatcagcgcccacaagcccctgctgatcagcagctgtgactggatggccgccatgtttggaggcccctttgtggagagcagcacccgggaggtggtgttcccctacaccagcaagagctgcatgagagctgtgctggagtacctgtacacaggcatgttcaccagcagcccagacctggatgacatgaagctgatcatcctggccaaccggctgtgcctgccccacctggtggccctgacagagcagtacacagtgacaggcctgatggaggccacccagatgatggtggacattgatggagatgtgctggtgttcctggagctggcccagttccactgtgcctaccagctggccgactggtgcctgcaccacatctgcaccaactacaacaacgtgtgcaggaagttcccccgggacatgaaggccatgagccctgagaaccaggagtactttgagaagcaccgctggccccctgtgtggtacctgaaggaggaggaccactaccagagggccaggaaggagcgggagaaggaggactacctgcacctgaagaggcagcccaagaggcgctggctgttctggaacagccccagcagccccagcagcagcgctgccagcagcagcagccccagcagcagcagcgctgtggtgtag

SEQ ID NO: 168046 - DNA, 2205 bp, synthetic construct
  misc_feature 1..2205: note = Description of Artificial Sequence: Synthetic coding sequence
  source 1..2205: mol_type = other DNA
atgaaggcccggagccggctgatggacagcgacatggactatgaaagacccaacgtggagaccatcaagtgtgtggtggtgggggacaatgctgtgggcaagaccaggctcatctgtgcccgggcctgcaatgccaccctgacccagtaccagctgctggccacccacgtgcccaccgtgtgggccatcgaccagtacagagtgtgccaggaggtgctggagaggagcagagatgtggtggatgatgtgtctgtgtccctgcggctgtgggacacctttggagaccaccacaaggacagaagatttgcctacggccgcagtgatgtggtggtgctgtgcttcagcatcgccaaccccaacagcctgcaccacgtgaagaccatgtggtacccagagatcaagcacttctgcccccgggcccctgtgatcctggtgggctgccagctggacctgcgctatgctgacctggaggccgtgaacagagcccggcggcccctggcccggcccatcaagcccaatgagatcctgcccccagagaagggccgggaggtggccaaggagctgggcatcccctactatgagacctctgtggtggcccagtttggcatcaaggatgtgtttgacaatgccatccgggccgccctgatcagccgccgccacctgcagttctggaagagccacctgagaaatgtgcagaggcccctgctgcaggcccccttcctgccccccaagcccccaccacccatcatcgtggtgcctgacccccccagcagcagtgaagaatgtcctgcccacctgctggaggaccccctgtgtgctgatgtgatcctggtgctgcaggagcgggtgcgcatctttgcccacaagatctacctgagcaccagcagcagcaagttctatgacctcttcctgatggacctgtctgagggggagctgggcggccccagcgagcccggcggcacccaccctgaggaccaccagggccacagcgaccagcaccaccaccaccaccaccaccaccacggccgggacttcctgctgcgggccgccagctttgatgtgtgtgagagcgtggatgaagctgggggcagcggccctgctggcctgcgggccagcaccagtgatggcatcctgcggggaaatggaacaggctacctgcccggccggggccgggtgctgagctcctggagccgggcctttgtgtccatccaggaggagatggccgaggaccccctgacctacaagagccggctgatggtggtggtgaagatggacagcagcatccagcccggccccttccgggctgtgctgaagtacctgtacaccggggagctggatgaaaatgaaagagacctgatgcacatcgcccacatcgccgagctgctggaggtgtttgacctgaggatgatggtggccaacatcctgaacaatgaggccttcatgaaccaggagatcaccaaggccttccacgtgcggaggaccaacagagtgaaggaatgtctggccaagggcaccttcagtgatgtgaccttcatcctggatgatggcaccatcagcgcccacaagcccctgctgatcagcagctgtgactggatggccgccatgtttggaggcccctttgtggagagcagcacccgggaggtggtgttcccctacaccagcaagagctgcatgagagctgtgctggagtacctgtacacaggcatgttcaccagcagcccagacctggatgacatgaagctgatcatcctggccaaccggctgtgcctgccccacctggtggccctgacagagcagtacacagtgacaggcctgatggaggccacccagatgatggtggacattgatggagatgtgctggtgttcctggagctggcccagttccactgtgcctaccagctggccgactggtgcctgcaccacatctgcaccaactacaacaacgtgtgcaggaagttcccccgggacatgaaggccatgagccctgagaaccaggagtactttgagaagcaccgctggccccctgtgtggtacctgaaggaggaggaccactaccagagggccaggaaggagcgggagaaggaggactacctgcacctgaagaggcagcccaagaggcgctggctgttctggaacagccccagcagccccagcagcagcgctgccagcagcagcagccccagcagcagcagcgctgtggtgtag

SEQ ID NO: 168047 - DNA, 1836 bp, synthetic construct
  misc_feature 1..1836: note = Description of Artificial Sequence: Synthetic coding sequence
  source 1..1836: mol_type = other DNA
atgagcatccacatcgtggccctgggcaatgaaggagacaccttccaccaggacaaccggcccagcggcctcatccgcacctacctgggccgcagccccctggtgtctggagatgagagcagcctgctgctgaatgctgccagcacagtggcccggcctgtgttcacagagtaccaggccagcgcctttggaaatgtgaagctggtggtgcatgactgccctgtgtgggacatctttgacagcgactggtacaccagcaggaacctgattggaggagctgacatcatcgtcatcaagtacaacgtgaatgacaagttctccttccacgaggtgaaggacaactacatccctgtgatcaagagggccctgaacagcgtgcctgtgatcatcgctgctgtgggcacccggcagaatgaggagctgccctgcacctgccccctgtgcaccagtgaccggggcagctgtgtgtccaccacagagggcatccagctggccaaggagctgggcgccacctacctggagctgcacagcctggatgacttctacatcggcaagtactttggaggagtgctggagtacttcatgatccaggccctgaaccagaagaccagcgagaagatgaagaagaggaagatgagcaacagcttccacggcatccggcccccccagctggagcagcctgagaagatgcctgtgctgaaggccgaggccagccactacaacagcgacctgaacaacctgctcttctgctgccagtgtgtggatgtggtgttctacaaccccaacctgaagaaggtggtggaggcccacaagatcgtgctgtgtgctgtgagccacgtgttcatgctgctcttcaacgtgaagagccccacagacatccaggacagcagcatcatccgcaccacccaggacctgtttgccatcaacagagacacagccttccctggggccagccatgagagcagcggcaacccccccctgcgggtcatcgtgaaggatgccctcttctgcagctgcctgagtgacatcctgcgcttcatctacagcggggccttccagtgggaggagctggaggaggacatcaggaagaagctgaaggacagcggagatgtgtccaatgtgattgagaaggtgaagtgcatcctgaagaccccaggcaagatcaactgcctgaggaactgcaagacctaccaggccaggaagcccctgtggttctacaacaccagcctgaagttcttcctgaacaagcccatgctggctgatgtggtgtttgagatccagggcaccaccgtgcctgcccaccgggccatcctggtggcccgctgtgaggtgatggccgccatgttcaacggcaactacatggaggccaagtctgtgctgatccctgtgtatggagtgtccaaggagaccttcctgtccttcctggagtacctgtacacagacagctgctgcccagctggcatcttccaggccatgtgcctgctgatctgtgccgagatgtaccaggtgtcccggctgcagcacatctgtgagctgttcatcatcacccagctgcagagcatgcccagccgggagctggcctccatgaacctggacatcgtggacctgctgaagaaggccaagttccaccacagcgactgcctgagcacctggctgctgcacttcatcgccaccaactacctgatcttcagccagaagccagagttccaggacctgtctgtggaggagaggagctttgtggagaagcaccgctggcccagcaacatgtacctgaagcagctggccgagtacaggaagtacatccacagcaggaaatgtcgctgcctggtgatgtag

SEQ ID NO: 168048 - DNA, 354 bp, synthetic construct
  misc_feature 1..354: note = Description of Artificial Sequence: Synthetic coding sequence
  source 1..354: mol_type = other DNA
tgagaaatgtaccaggtgtcccggctgcagcacatctgtgagctgttcatcatcacccagctgcagagcatgcccagccgggagctggcctccatgaacctggacatcgtggacctgctgaagaaggccaagttccaccacagcgactgcctgagcacctggctgctgcacttcatcgccaccaactacctgatcttcagccagaagccagagttccaggacctgtctgtggaggagaggagctttgtggagaagcaccgctggcccagcaacatgtacctgaagcagctggccgagtacaggaagtacatccacagcaggaagtgccgctgcctggtgatcaagaggcactag

SEQ ID NO: 168049 - DNA, 1692 bp, synthetic construct
  misc_feature 1..1692: note = Description of Artificial Sequence: Synthetic coding sequence
  source 1..1692: mol_type = other DNA
atgttcagcaggaaccacaggagccgggtgacagtggcccggggcagcgccctggagatggagttcaagaggggccgcttccggctgagcctcttcagtgacctgcctgaggacacagagctgcagaggaagctggaccacgagatccgcatgagggagggcgcctgcaagctgctggccgcctgcagccagcgggagcaggccctggaggccaccaagagcctgctggtgtgcaacagccgcatcctgagctacatgggagagctgcagaggaggaaggaggcccaggtgctgggcaagaccagcagaagacccagcgacagcggccccccagctgagaggagcccctgccggggccgggtgtgcatcagtgacctgcgcatccccctgatgtggaaggacacagagtacttcaagaacaagggggacctgcaccgctgggccgtgttcctgctgctgcagctgggggagcacatccaggacacagagatgatcctggtggacaggaccctgacagacatctccttccagagcaatgtgctgtttgctgaggccggccctgactttgagctgcggctggagctgtatggagcctgtgtggaggaggagggcgccctgactggaggccccaagaggctggccaccaagctgagcagcagcctgggccgcagcagtggaagaagagtgcgggccagcctggacagcgctgggggcagcggcagcagccccatcctgctgcccacccctgtggtgggcggcccccgctaccacctgctggcccacaccaccctgaccctggccgctgtgcaggacggcttccgcacccatgacctgaccctggccagccatgaagaaaatcctgcctggctgcccctgtatggctctgtgtgctgccgcctggccgcccagcccctgtgcatgacccagcccacagccagcggcaccctgcgggtgcagcaggccggggagatgcagaactgggcccaggtgcatggagtgctgaagggcaccaacctcttctgctaccggcagccagaagatgctgacaccggggaggagcccctgctgaccatcgctgtgaacaaggagaccagggtgcgggccggggagctggaccaggccctgggccggcccttcaccctgagcatcagcaaccagtatggagatgatgaggtgacccacaccctgcagacagagagccgggaggccctgcagagctggatggaggccctgtggcagctgttctttgacatgagccagtggaagcagtgctgtgatgagatcatgaagattgagaccccagcccccaggaagccaccccaggccctggccaagcagggcagcctgtaccacgagatggccatcgagcccctggatgacattgctgctgtgacagacatcctgacccagcgggagggcgcccggctggagaccccaccaccctggctggccatgttcacagaccagcctgccctgcccaacccctgcagccctgcctctgtggccccagccccagactggacccaccccctgccctggggccggcccaggaccttcagcctggatgctgtgcccccagaccacagcccccgggcccggtctgtggcccccctgcccccccagaggagccccaggacccggggcctgtgcagcaagggccagcccaggacctggctgcagagccctgtgtag

SEQ ID NO: 168050 - DNA, 1653 bp, synthetic construct
  misc_feature 1..1653: note = Description of Artificial Sequence: Synthetic coding sequence
  source 1..1653: mol_type = other DNA
atgcaggaccggctgcacatcctggaggacctgaacatgctgtacatccggcagatggccctgagcctggaggacacagagctgcagaggaagctggaccacgagatccgcatgagggagggcgcctgcaagctgctggccgcctgcagccagcgggagcaggccctggaggccaccaagagcctgctggtgtgcaacagccgcatcctgagctacatgggagagctgcagaggaggaaggaggcccaggtgctgggcaagaccagccggcggcccagcgacagcggccccccagctgagaggagcccctgccggggccgggtgtgcatcagtgacctgcgcatccccctgatgtggaaggacacagagtacttcaagaacaagggggacctgcaccgctgggccgtgttcctgctgctgcagctgggggagcacatccaggacacagagatgatcctggtggacaggaccctgacagacatctccttccagagcaatgtgctgtttgctgaggccggccctgactttgagctgcggctggagctgtatggagcctgtgtggaggaggagggcgccctgaccggcggccccaagaggctggccaccaagctgagcagcagcctgggccgcagcagcggccggcgggtgcgggccagcctggacagcgctgggggcagcggcagcagccccatcctgctgcccacccctgtggtgggcggcccccgctaccacctgctggcccacaccaccctgaccctggccgctgtgcaggacggcttccgcacccatgacctgaccctggccagccatgaggagaacccagcctggctgcccctgtatggctctgtgtgctgccgcctggccgcccagcccctgtgcatgacccagcccacagccagcggcaccctgcgggtgcagcaggccggggagatgcagaactgggcccaggtgcacggcgtgctgaagggcaccaacctcttctgctaccggcagccagaagatgctgacacaggagaggagcccctgctgaccatcgctgtgaacaaggagaccagggtgcgggccggggagctggaccaggccctgggccggcccttcaccctgagcatcagcaaccagtatggagatgatgaggtgacccacaccctgcagacagagagccgggaggccctgcagagctggatggaggccctgtggcagctgttctttgacatgagccagtggaagcagtgctgtgatgagatcatgaagattgagaccccagcccccaggaagccaccccaggccctggccaagcagggcagcctgtaccacgagatggccatcgagcccctggatgacattgctgctgtgacagacatcctgacccagcgggagggcgcccggctggagaccccaccaccctggctggccatgttcacagaccagcctgccctgcccaacccctgcagccctgcctctgtggccccagccccagactggacccaccccctgccctggggccggcccaggaccttcagcctggatgctgtgcccccagaccacagcccccgggcccggtctgtggcccccctgcccccccagaggagccccaggacccggggcctgtgcagcaagggccagcccaggacctggctgcagagccctgtgtag

SEQ ID NO: 168051 - DNA, 4635 bp, synthetic construct
  misc_feature 1..4635: note = Description of Artificial Sequence: Synthetic coding sequence
  source 1..4635: mol_type = other DNA
atggattctggccctgtgtaccacggggacagccggcagctgagcgccagcggcgtgcctgtgaatggagcccgggagcccgccggccccagcctgctgggcactggaggcccctggagggtggaccagaagccagactgggaggccgcccctggccctgcccacacagcccggctggaggatgcccatgacctggtggccttctctgctgtggccgaggccgtgtcctcctatggagccctgagcacccggctgtatgagaccttcaaccgggagatgagccgggaggccggcaacaacagccggggcccccggcccggccctgagggctgcagcgctggcagcgaggacctggacaccctgcagacagccctggccctggcccggcacggcatgaagccacccaactgcaactgtgatggcccagaatgtcctgactacctggagtggctggagggcaagatcaagtctgtggtgatggagggcggggaggagcggccccggctgcccggccccctgcccccaggagaggccggcctgcctgcccccagcacccggcccctgctgagcagcgaggtgccccagatcagcccccaggagggcctgcccctgagccagagcgccctgagcatcgccaaggagaagaacatcagcctgcagacagccatcgccatcgaggccctgacccagctgagcagcgccctgccccagcccagccacagcaccccccaggccagctgccccctgcctgaggccctgagccccccagcccccttccgcagcccccagagctacctgcgggcccccagctggcctgtggtgcccccagaggagcacagcagctttgccccagacagcagcgccttccccccagccacccccaggacagagttccctgaggcctggggcacagacaccccaccagccacccccaggagctcctggcccatgccccggcccagcccagaccccatggccgagctggagcagctgctgggcagcgccagtgactacatccagagcgtcttcaagaggcctgaggccctgcccaccaagcccaaggtgaaggtggaggcccccagcagcagccctgccccagcccccagccctgtgctgcagcgggaggcccccacccccagcagcgagccagacacccaccagaaggcccagacagccctgcagcagcacctgcaccacaagaggagcctcttcctggagcaggtgcatgacaccagcttccctgcccccagcgagcccagcgcccctggctggtggcccccacccagcagccctgtgccccggctgcctgacaggcctcccaaggagaagaagaagaagctgcccaccccagctgggggccctgtgggcacagagaaggccgcccctggcatcaagcccagcgtgaggaagcccatccagatcaagaagagccggccccgggaggcccagcccctcttcccccctgtgcggcagatcgtgctggagggcctgcggagccctgccagccaggaggtgcaggcccaccccccagcccccctgcctgccagccagggcagcgctgtgcccctgcccccagagcccagcctggccctgtttgcccccagccccagccgggacagcctgctgccccccacccaggagatgaggagccccagccccatgacagccctgcagcccggcagcacaggccccctgcccccagcagatgacaagctggaggagctgatccggcagtttgaagctgagtttggagacagctttggcctgcccggcccccccagcgtgcccatccaggaccctgagaaccagcagacctgcctgcctgcccctgagagcccctttgccaccaggagccccaagcagatcaagattgagagcagtggagctgtgacagtgctgagcaccacctgcttccacagcgaggagggcggccaggaggccacccccaccaaggccgagaaccccctgacccccaccctgagcggcttcctggagagccccctgaagtacctggacacccccaccaagagcctgctggacaccccagccaagagggcccaggccgagttccccacctgtgactgtgtggagcagatcgtggagaaggatgagggcccctactacacccacctgggcagcggccccaccgtggccagcatccgggagctgatggaggagcgctacggggagaagggcaaggccatcagaattgagaaggtgatctacacaggcaaggagggcaagagcagccggggctgccccatcgccaagtgggtgatcagaagacacaccctggaggagaagctgctgtgcctggtgcgccacagagctggccaccactgccagaatgctgtgattgtcatcctgatcctggcctgggagggcatccccaggagcctgggggacaccctgtaccaggagctgacagacaccctgaggaaatatggcaaccccaccagcagaagatgtggcctgaatgatgacaggacctgtgcctgccagggcaaggaccccaacacctgtggggccagcttctcctttggctgctcctggagcatgtacttcaacggctgcaagtatgcccggagcaagacccccaggaagttccggctggccggggacaaccccaaggaggaggaggtgctgaggaagagcttccaggacctggccacagaggtggcccccctgtacaagaggctggccccccaggcctaccagaaccaggtgaccaatgaggagatcgccatcgactgccgcctgggcctgaaggagggccggccctttgctggggtgacagcctgcatggacttctgtgcccacgcccacaaggaccagcacaacctgtacaacggctgcaccgtggtgtgcaccctgaccaaggaggacaacagatgtgtgggcaagatcccagaagatgagcagctgcacgtgctgcccctgtacaagatggccaacacagatgaatttggaagtgaggagaaccagaatgccaaggtgggcagcggggccatccaggtgctgacagccttcccccgggaggtgcggcggctgcctgagcccgccaagagctgccggcagaggcagctggaggccaggaaggctgctgctgagaagaagaagatccagaaggagaagctgagcaccccagagaagatcaagcaggaggccctggagctggccggcatcaccagtgaccccggcctgagcctgaagggcggcctgagccagcagggcctgaagcccagcctgaaggtggagccccagaaccacttcagcagcttcaagtacagcggaaatgctgtggtggagagctacagcgtgctgggcaactgccggcccagcgacccctacagcatgaacagcgtgtacagctaccacagctactatgcccagcccagcctgacctctgtgaatggcttccacagcaaatatgccctgcccagcttctcctactacggcttccccagcagcaaccctgtgttccccagccagttcctgggccctggggcctggggccacagcggcagcagcggcagctttgagaagaagccagacctgcacgccctgcacaacagcctgagccctgcctatggaggagctgagtttgctgagctgcccagccaggccgtgcccacagatgcccaccaccccaccccccaccaccagcagcctgcctacccaggccccaaggagtacctgctgcccaaggcccccctgctgcacagcgtgtcccgggaccccagcccctttgcccagagcagcaactgctacaacagaagcatcaagcaggagcctgtggaccccctgacccaggccgagcctgtgcccagagatgctgggaagatgggcaagacccccctgtctgaggtgtcccagaatggaggccccagccacctgtggggccagtacagcggcggccccagcatgagccccaagaggaccaatggagtgggcggctcctggggcgtcttcagcagcggggagagccctgccatcgtgcctgacaagctgagcagctttggagccagctgcctggcccccagccacttcacagatggccagtggggcctcttccctggagagggccagcaggccgccagccacagcggcggccgcctgcggggcaagccctggagcccctgcaagtttggaaacagcaccagcgccctggccggccccagcctgacagagaagccctgggccctgggcgctggggacttcaacagcgccctgaagggcagccctggcttccaggacaagctgtggaaccccatgaagggggaggagggccgcatcccagctgctggggccagccagctggtgttctaccagcacaagaacctgaaccagcccaaccacggcctggccctgtgggaggccaagatgaagcagctggccgagcgggcccgggcccggcaggaggaggccgcccggctgggcctgggccagcaggaggccaagctgtatggcaagaagaggaagtggggcggcaccgtggtggccgagccccagcagaaggagaagaagggcgtggtgcccacccggcaggccctggccgtgcccacagacagcgctgtgacagtgagcagctatgcctacaccaaggtgacaggcccctacagccgctggatctag

SEQ ID NO: 168052 - DNA, 468 bp, synthetic construct
  misc_feature 1..468: note = Description of Artificial Sequence: Synthetic coding sequence
  source 1..468: mol_type = other DNA
atgaggcacctgccctacttctgccggggccaggtggtgcggggcttcggccggggcagcaagcagctgggcatccccacagccaacttccctgagcaggtggtggacaacctgcctgctgacatcagcacaggcatctactacggctgggcctctgtgggcagcggagatgtgcacaagatggtggtgtccatcggctggaacccctactacaagaacaccaagaagtccatggagacccacatcatgcacaccttcaaggaggacttctatggagagatcctgaatgtggccatcgtgggctacctgcggcctgagaagaactttgacagcctggagagcctcatcagcgccatccagggcgacatcgaggaggccaagaagaggctggagctgcctgagcacctgaagatcaaggaggacaacttcttccaggtgtccaagagcaagatcatgaatggccactag

SEQ ID NO: 168053 - DNA, 969 bp, synthetic construct
  misc_feature 1..969: note = Description of Artificial Sequence: Synthetic coding sequence
  source 1..969: mol_type = other DNA
atggccgccagcggggagccccagaggcagtggcaggaggaggtggccgctgtggtggtggtgggcagctgcatgacagacctggtgtccctgaccagccggctgcccaagacaggagagaccatccacggccacaagttcttcatcggctttggaggcaagggggccaaccagtgtgtgcaggccgcccggctgggcgccatgacctccatggtgtgcaaggtgggcaaggacagctttggaaatgactacatcgagaacctgaagcagaatgacatcagcacagagttcacctaccagaccaaggatgctgccaccggcacagccagcatcatcgtgaacaatgaaggccagaacatcatcgtgattgtggccggggccaacctgctgctgaacacagaggacctgcgggctgctgccaacgtcatcagccgggccaaggtgatggtgtgccagctggagatcaccccagccaccagcctggaggccctgaccatggcccggcgcagcggcgtgaagaccctcttcaacccagccccagccatcgctgacctggacccccagttctacaccctgagtgatgtgttctgctgcaatgaaagtgaagctgagatcctgaccggcctgactgtgggcagcgctgctgatgctggggaggccgccctggtgctgctgaagaggggctgccaggtggtgatcatcaccctgggcgctgagggctgtgtggtgctgagccagacagagcctgagcccaagcacatccccacagagaaggtgaaggctgtggacaccactggagctggggacagctttgtgggcgccctggccttctacctggcctactaccccaacctgagcctggaggacatgctgaacagaagcaacttcatcgctgctgtgtctgtgcaggccgccggcacccagagcagctacccctacaagaaggacctgcccctgaccctcttctag

SEQ ID NO: 168054 - DNA, 861 bp, synthetic construct
  misc_feature 1..861: note = Description of Artificial Sequence: Synthetic coding sequence
  source 1..861: mol_type = other DNA
atggccgccagcggggagccccagaggcagtggcaggaggaggtggccgctgtggtggtggtgggcagctgcatgacagacctggtgtccctgaccagccggctgcccaagacaggagagaccatccacggccacaagttcttcatcggctttggaggcaagggggccaaccagtgtgtgcaggccgcccggctgggcgccatgacctccatggtgtgcaaggtgggcaaggacagctttggaaatgactacatcgagaacctgaagcagaatgacatcagcacagagttcacctaccagaccaaggatgctgccaccggcacagccagcatcatcgtgaacaatgaaggccagaacatcatcgtgattgtggccggggccaacctgctgctgaacacagaggacctgcgggctgctgccaacgtcatcagccgggccaaggtgatggtgtgccagctggagatcaccccagccaccagcctggaggccctgaccatggcccggcgcagcggcgtgaagaccctcttcaacccagccccagccatcgctgacctggacccccagttctacaccctgagtgatgtgttctgctgcaatgaaagtgaagctgagatcctgaccggcctgactgtgggcagcgctgctgatgctggggaggccgccctggtgctgctgaagaggggctgccaggtggtgatcatcaccctgggcgctgagggctgtgtggtgctgagccagacagagcctgagcccaagcacatccccacagagaaggtgaaggctgtggacaccacctgccggcccggcagccggcccaagtctgaggccgcctctgtgaagaagcagaagcactacaagtag

SEQ ID NO: 168055 - DNA, 861 bp, synthetic construct
  misc_feature 1..861: note = Description of Artificial Sequence: Synthetic coding sequence
  source 1..861: mol_type = other DNA
atgtcctggctgctcttcctggcccaccgggtggccctggccgccctgccctgcagaagaggcagccggggcttcggcatgttttatgctgtgcggcggggcaggaagacaggagtcttcctgacctggaatgaatgtcgggcccaggtggaccgcttccctgctgcccgcttcaagaagtttgccacagaagatgaggcctgggcctttgtgaggaagagcgccagccctgaggtgtctgagggccacgagaaccagcacggccaggagagcgaggccaaggccagcaagaggctgcgggagcccctggatggagatggccacgagagcgctgagccctatgccaagcacatgaagcccagcgtggagcccgcccctcctgtgtcccgggacaccttctcctacatgggagactttgtggtggtgtacacagatggctgctgcagcagcaatggaagaagaagaccccgggccggcatcggcgtgtactggggccctggccaccccctgaatgtgggcatccggctgcccggccggcagaccaaccagagagctgagatccatgctgcctgcaaggccatcgagcaggccaagacccagaacatcaacaagctggtgctgtacacagacagcatgttcaccatcaatggcatcaccaactgggtgcagggctggaagaagaatggctggaagaccagcgctgggaaggaggtgatcaacaaggaggactttgtggccctggagcggctgacccagggcatggacatccagtggatgcacgtgcccggccacagcggcttcatcggaaatgaggaggccgaccggctggcccgggagggcgccaagcagagtgaagattag

SEQ ID NO: 168056 - DNA, 1683 bp, synthetic construct
  misc_feature 1..1683: note = Description of Artificial Sequence: Synthetic coding sequence
  source 1..1683: mol_type = other DNA
atggagttccggcaggaggagttcaggaagctggccggccgggccctgggcaagctgcaccggctgctggagaagaggcaggagggcgctgagaccctggagctgtctgcagatggccggcctgtgaccacccagacccgggacccccctgtggtggactgcacctgcttcggcctgccccggcgctacatcatcgccatcatgagcggcctgggcttctgcatcagctttggcatccgctgcaacctgggcgtggccatcgtgtccatggtgaacaacagcaccacccacagaggaggccacgtggtggtgcagaaggcccagttctcctgggaccctgagaccgtgggcctcatccacggcagcttcttctggggctacatcgtgacccagatccctgggggcttcatctgccagaagtttgctgccaacagagtgtttggatttgccatcgtggccaccagcaccctgaacatgctgatccccagcgctgcccgggtgcactacggctgtgtgatctttgtgcgcatcctgcagggcctggtggagggcgtgacctacccagcctgccacggcatctggagcaagtgggccccacccctggagaggagccggctggccaccacagccttctgtggcagctatgctggagctgtggtggccatgcccctggccggcgtgctggtgcagtacagcggctggagcagcgtcttctacgtgtatggcagctttggcatcttctggtacctgttctggctgctggtgtcctatgagagccctgccctgcaccccagcatcagcgaggaggagaggaagtacattgaagatgccatcggggagagcgccaagctgatgaaccccctgaccaagttcagcaccccctggaggcgcttcttcacctccatgcctgtgtatgccatcatcgtggccaacttctgccgctcctggaccttctacctgctgctgatcagccagcctgcctactttgaggaggtgtttggatttgagatcagcaaggtgggcctggtgtctgccctgccccacctggtgatgaccatcatcgtgcccatcggcggccagattgctgacttcctgcggagccgccgcatcatgagcaccaccaacgtgaggaagctgatgaactgtggcggcttcggcatggaggccaccctgctgctggtggtgggctacagccacagcaaaggagtggccatctccttcctggtgctggccgtgggcttcagcggctttgccatcagcggcttcaacgtgaaccacctggacatcgcccccaggtatgccagcatcctgatgggcatcagcaatggagtgggcaccctgagcggcatggtgtgccccatcatcgtgggcgccatgaccaagcacaagacccgggaggagtggcagtatgtgttcctgattgccagcctggtgcactacggcggcgtcatcttctacggcgtgtttgccagcggggagaagcagccctgggccgagcctgaggagatgtctgaggagaagtgtggctttgtgggccatgaccagctggccggcagtgatgacagcgagatggaggatgaggccgagcccccaggggcccccccagcccccccacccagctatggagccacccacagcaccttccagccccccaggcctcctcctcctgtgcgggactactag

SEQ ID NO: 168057 - DNA, 939 bp, synthetic construct
  misc_feature 1..939: note = Description of Artificial Sequence: Synthetic coding sequence
  source 1..939: mol_type = other DNA
atggctgctggggtggactgtggagatggagtgggcgcccggcagcacgtgttcctggtgtctgagtacctgaaggatgccagcaagaagatgaagaatggcctgatgtttgtgaagctggtgaacccctgcagcggggagggcgccatctacctgttcaacatgtgcctgcagcagctgtttgaggtgaaggtgttcaaggagaagcaccacagctggttcatcaaccagagcgtgcagagcggcggcctgctgcactttgccacccctgtggaccccctcttcctgctgctgcactacctgatcaaggctgacaaggagggcaagttccagcccctggaccaggtggtggtggacaacgtgttccccaactgcatcctgctgctgaagctgcccggcctggagaagctgctgcaccacgtgacagaggagaagggcaaccctgagattgacaacaagaagtactacaagtacagcaaggagaagaccctgaagtggctggagaagaaggtgaaccagacagtggccgccctgaagaccaacaacgtgaatgtgagcagccgggtgcagagcacagccttcttcagcggggaccaggccagcacagacaaggaggaggactacatccgctatgcccacggcctcatcagtgactacatccccaaggagctgagtgatgacctgagcaagtacctgaagctgcctgagcccagcgccagcctgcccaacccccccagcaagaagatcaagctgagtgatgagcctgtggaggccaaggaggactacaccaagttcaacaccaaggacctgaagacagagaagaagaacagcaagatgacagctgcccagaaggccctggccaaggtggacaagagcggcatgaagagcattgacaccttctttggagtgaagaacaagaagaagattggcaaggtgtag

SEQ ID NO: 168058 - DNA, 774 bp, synthetic construct
  misc_feature 1..774: note = Description of Artificial Sequence: Synthetic coding sequence
  source 1..774: mol_type = other DNA
atggctgctggggtggactgtggagatggagtgggcgcccggcagcacgtgttcctggtgtctgagtacctgaaggatgccagcaagaagatgaagaatggcctgatgtttgtgaagctggtgaacccctgcagcggggagggcgccatctacctgttcaacatgtgcctgcagcagctgtttgaggtgaaggtgttcaaggagaagcaccacagctggttcatcaaccagagcgtgcagagcggcggcctgctgcactttgccacccctgtggaccccctcttcctgctgctgcactacctgatcaaggctgacaaggagggcaagttccagcccctggaccaggtggtggtggacaacgtgttccccaactgcatcctgctgctgaagctgcccggcctggagaagctgctgcaccacgtgacagaggagaagggcaaccctgagattgacaacaagaagtactacaagtacagcaaggagaagaccctgaagtggctggagaagaaggtgaaccagacagtggccgccctgaagaccaacaacgtgaatgtgagcagccgggtgcagagcacagccttcttcagcggggaccaggccagcacagacaaggaggaggactacatccgctatgcccacggcctcatcagtgactacatccccaaggagctgagtgatgacctgagcaagtacctgaagctgcctgagcccagcgccagcctgcccaacccccccagcaagatggccgcccagaggcagaagaggggcaagtag

SEQ ID NO: 168059 - DNA, 996 bp, synthetic construct
  misc_feature 1..996: note = Description of Artificial Sequence: Synthetic coding sequence
  source 1..996: mol_type = other DNA
atggctgctggggtggactgtggagatggagtgggcgcccggcagcacgtgttcctggtgtctgagtacctgaaggatgccagcaagaagatgaagaatggcctgatgtttgtgaagctggtgaacccctgcagcggggagggcgccatctacctgttcaacatgtgcctgcagcagctgtttgaggtgaaggtgttcaaggagaagcaccacagctggttcatcaaccagagcgtgcagagcggcggcctgctgcactttgccacccctgtggaccccctcttcctgctgctgcactacctgatcaaggctgacaaggagggcaagttccagcccctggaccaggtggtggtggacaacgtgttccccaactgcatcctgctgctgaagctgcccggcctggagaagctgctgcaccacgtgacagaggagaagggcaaccctgagattgacaacaagaagtactacaagtacagcaaggagaagaccctgaagtggctggagaagaaggtgaaccagacagtggccgccctgaagaccaacaacgtgaatgtgagcagccgggtgcagagcacagccttcttcagcggggaccaggccagcacagacaaggaggaggactacatccgctatgcccacggcctcatcagtgactacatccccaaggagctgagtgatgacctgagcaagtacctgaagctgcctgagcccagcgccagcctgcccaacccccccagcaagaagatcaagctgagtgatgagcctgtggaggccaaggaggactacaccaagttcaacaccaaggacctgaagacagagaagaagaacagcaagatgacagctgcccagaaggccctggccaaggtggacaagagcggcatgaagagcattgacaccttctttggagtgaagaagaagctggagagatttgagaccctgaagatcaagagcagcaagaacatctgcttcctgcacgtgtctgtgtgccccagctag

SEQ ID NO: 168060 - DNA, 495 bp, synthetic construct
  misc_feature 1..495: note = Description of Artificial Sequence: Synthetic coding sequence
  source 1..495: mol_type = other DNA
atggagagcggagatgaagctgccatcgagcggcaccgggtgcacctgcggagcgccaccctgagagatgctgtgcctgccaccctgcacctgctgccctgtgaggtggccgtggatggccctgcccctgtgggccgcttcttcaccccagccatccggcagggccctgagggcctggaggtgtccttccggggccgctgcctgcggggggaggaggtggccgtgcccccaggcctggtgggctacgtgatggtgacagaggagaagaaggtgtccatgggcaagccagaccccctgcgggacagcggcacagatgaccaggaggaggagcccctggagcgggactttgaccgcttcatcggggccacagccaacttcagccgcttcaccctgtggggcctggagaccatccctggcccagatgccaaggtgcggggggccctgacctggcccagcctggccgccgccatccacgcccaggtgcctgaagattag

SEQ ID NO: 168061 - DNA, 2226 bp, synthetic construct
  misc_feature 1..2226: note = Description of Artificial Sequence: Synthetic coding sequence
  source 1..2226: mol_type = other DNA
atggagagccgggaccacaacaacccccaggagggccccaccagcagcagtggaagaagagctgctgtggaggacaaccacctgctgatcaaggctgtgcagaatgaagatgtggacctggtgcagcagctgctggagggcggggccaacgtgaacttccaggaggaggagggcggctggacccccctgcacaatgctgtgcagatgagccgggaggacatcgtggagctgctgctgcggcatggagctgaccctgtgctgaggaagaagaatggagccacccccttcatcctggccgccatcgccggctctgtgaagctgctgaagctgttcctgagcaaaggagcagatgtgaatgaatgtgacttctacggcttcaccgccttcatggaggccgctgtgtatggcaaggtgaaggccctgaagttcctgtacaagagaggagccaacgtgaacctgcggaggaagaccaaggaggaccaggagcggctgaggaagggcggggccacagccctgatggatgctgctgagaagggccacgtggaggtgctgaagatcctgctggatgagatgggcgcagatgtgaatgcctgtgacaacatgggcagaaatgccctgatccacgccctgctgagcagtgatgacagtgatgtggaggccatcacccacctgctgctggaccacggggctgatgtgaatgtgcggggggagcggggcaagacccccctcatcctggccgtggagaagaagcacctgggcctggtgcagaggctgctggagcaggagcacatcgagatcaatgacacagacagtgatggcaagacagccctgctgctggccgtggagctgaagctgaagaagattgctgagctgctgtgcaagagaggagccagcacagactgtggggacctggtgatgacagcccggaggaactatgaccacagcctggtgaaggtgctgctgagccatggagccaaggaggacttccaccccccagctgaggactggaagccccagagcagccactggggcgccgccctgaaggacctgcaccgcatctaccggcccatgattggcaagctgaagttcttcattgatgagaagtacaagattgctgacaccagcgagggcggcatctacctgggcttctatgagaagcaggaggtggccgtgaagaccttctgtgagggcagcccccgggcccagcgggaggtgtcctgcctgcagagcagccgggagaacagccacctggtgaccttctacggcagcgagagccaccggggccacctgtttgtgtgtgtgaccctgtgtgagcagaccctggaggcctgcctggatgtgcacagaggagaagatgtggagaatgaagaagatgaatttgccagaaatgtgctgagcagcatcttcaaggctgtgcaggagctgcacctgagctgtggctacacccaccaggacctgcagccccagaacatcctgattgacagcaagaaggccgcccacctggccgactttgacaagagcatcaagtgggccggggacccccaggaggtgaagagggacctggaggacctgggccgcctggtgctgtatgtggtgaagaagggcagcatcagctttgaggacctgaaggcccagagcaatgaggaggtggtgcagctgagcccagatgaggagaccaaggacctgatccacaggctcttccaccctggagagcacgtgcgggactgcctgagtgacctgctgggccaccccttcttctggacctgggagagccgctaccgcaccctgagaaatgtgggcaatgaaagtgacatcaagaccaggaagtctgagagcgagatcctgcggctgctgcagcccggccccagcgagcacagcaagagctttgacaagtggaccaccaagatcaatgaatgtgtgatgaagaagatgaacaagttctatgagaagaggggcaacttctaccagaacacagtgggggacctgctgaagttcatccggaacctgggggagcacattgatgaggagaagcacaagaagatgaagctgaagattggagaccccagcctgtacttccagaagaccttcccagacctggtgatctacgtgtacaccaagctgcagaacacagagtacaggaagcacttcccccagacccacagccccaacaagccccagtgtgatggagctgggggcgccagcggcctggccagccctggctgctag

SEQ ID NO: 168062 - DNA, 2226 bp, synthetic construct; identical to SEQ ID NO: 168061
  misc_feature 1..2226: note = Description of Artificial Sequence: Synthetic coding sequence
  source 1..2226: mol_type = other DNA

SEQ ID NO: 168063 - DNA, 1959 bp, synthetic construct
  misc_feature 1..1959: note = Description of Artificial Sequence: Synthetic coding sequence
  source 1..1959: mol_type = other DNA
atggagagccgggaccacaacaacccccaggagggccccaccagcagcagtggaagaagagctgctgtggaggacaaccacctgctgatcaaggctgtgcagaatgaagatgtggacctggtgcagcagctgctggagggcggggccaacgtgaacttccaggaggaggagggcggctggacccccctgcacaatgctgtgcagatgagccgggaggacatcgtggagctgctgctgcggcatggagctgaccctgtgctgaggaagaagaatggagccacccccttcatcctggccgccatcgccggctctgtgaagctgctgaagctgttcctgagcaaaggagcagatgtgaatgaatgtgacttctacggcttcaccgccttcatggaggccgctgtgtatggcaaggtgaaggccctgaagttcctgtacaagagaggagccaacgtgaacctgcggaggaagaccaaggaggaccaggagcggctgaggaagggcggggccacagccctgatggatgctgctgagaagggccacgtggaggtgctgaagatcctgctggatgagatgggcgcagatgtgaatgcctgtgacaacatgggcagaaatgccctgatccacgccctgctgagcagtgatgacagtgatgtggaggccatcacccacctgctgctggaccacggggctgatgtgaatgtgcggggggagcggggcaagacccccctcatcctggccgtggagaagaagcacctgggcctggtgcagaggctgctggagcaggagcacatcgagatcaatgacacagacagtgatggcaagacagccctgctgctggccgtggagctgaagctgaagaagattgctgagctgctgtgcaagagaggagccagcacagactgtggggacctggtgatgacagcccggaggaactatgaccacagcctggtgaaggtgctgctgagccatggagccaaggaggacttccaccccccagctgaggactggaagccccagagcagccactggggcgccgccctgaaggacctgcaccgcatctaccggcccatgattggcaagctgaagttcttcattgatgagaagtacaagattgctgacaccagcgagggcggcatctacctgggcttctatgagaagcaggaggtggccgtgaagaccttctgtgagggcagcccccgggcccagcgggaggtgtcctgcctgcagagcagccgggagaacagccacctggtgaccttctacggcagcgagagccaccggggccacctgtttgtgtgtgtgaccctgtgtgagcagaccctggaggcctgcctggatgtgcacagaggagaagatgtggagaatgaagaagatgaatttgccagaaatgtgctgagcagcatcttcaaggctgtgcaggagctgcacctgagctgtggctacacccaccaggacctgcagccccagaacatcctgattgacagcaagaaggccgcccacctggccgactttgacaagagcatcaagtgggccggggacccccaggaggtgaagagggacctggaggacctgggccgcctggtgctgtatgtggtgaagaagggcagcatcagctttgaggacctgaaggcccagagcaatgaggaggtggtgcagctgagcccagatgaggagaccaaggacctgatccacaggctcttccaccctggagagcacgtgcgggactgcctgagtgacctgctgggccaccccttcttctggacctgggagagccgctaccgcaccctgagaaatgtgggcaatgaaagtgacatcaagaccaggaagtctgagagcgagatcctgcggctgctgcagcccggccccagcgagcacagcaagagctttgacaagtggaccaccaagatgagcaagctgcggcaccggcagatcatcttccccaccacccagaaccagtag

SEQ ID NO: 168064 - DNA, 465 bp, synthetic construct
  misc_feature 1..465: note = Description of Artificial Sequence: Synthetic coding sequence
  source 1..465: mol_type = other DNA
atgattggcaagctgaagttcttcattgatgagaagtacaagattgctgacaccagcgagggcggcatctacctgggcttctatgagaagcaggaggtggccgtgaagaccttctgtgagggcagcccccgggcccagcgggaggtgtcctgcctgcagagcagccgggagaacagccacctggtgaccttctacggcagcgagagccaccggggccacctgtttgtgtgtgtgaccctgtgtgagcagaccctggaggcctgcctggatgtgcacagaggagaagatgtggagaatgaagaagatgaatttgccagaaatgtgctgagcagcatcttcaaggctgtgcaggagctgcacctgagctgtggctacacccaccaggacctgcagccccagaacatcctgattggcccctggacagctggccccctgtgtgggaaggagggcaagcacctgatctag

SEQ ID NO: 168065 - DNA, 465 bp, synthetic construct
  misc_feature 1..465: note = Description of Artificial Sequence: Synthetic coding sequence
  source 1..465: mol_type = other DNA
atggccggccctgtgaaggaccgggaggccttccagaggctgaacttcctgtaccaggccgcccactgtgtgctggcccaggaccctgagaaccaggccctggcccgcttctactgctacacagagaggaccatcgccaagaggctggtgctgcggcgggaccccagcgtgaagaggaccctgtgccggggctgcagcagcctgctggtgcccggcctgacctgcacccagaggcagaggcgctgccggggccagcgctggacagtgcagacctgcctgacctgccagaggagccagcgcttcctgaatgaccccggccacctgctgtggggagacaggcctgaggcccagctgggcagccaggccgacagcaagcccctgcagcccctgcccaacacagcccacagcatcagtgaccggctgcctgaggagaagatgcagacccagggcagcagcaaccagtag

SEQ ID NO: 168066 - DNA, 489 bp, synthetic construct
  misc_feature 1..489: note = Description of Artificial Sequence: Synthetic coding sequence
  source 1..489: mol_type = other DNA
atggccggccctgtgaaggaccgggaggccttccagaggctgaacttcctgtaccaggccgcccactgtgtgctggcccaggaccctgagaaccaggccctggcccgcttctactgctacacagagaggaccatcgccaagaggctggtgctgcggcggcccctgagcagcagcgccccccgggaccccagcgtgaagaggaccctgtgccggggctgcagcagcctgctggtgcccggcctgacctgcacccagaggcagaggcgctgccggggccagcgctggacagtgcagacctgcctgacctgccagaggagccagcgcttcctgaatgaccccggccacctgctgtggggagacaggcctgaggcccagctgggcagccaggccgacagcaagcccctgcagcccctgcccaacacagcccacagcatcagtgaccggctgcctgaggagaagatgcagaccaagggcagcagcaaccagtag

SEQ ID NO: 168067 - DNA, 534 bp, synthetic construct
  misc_feature 1..534: note = Description of Artificial Sequence: Synthetic coding sequence
  source 1..534: mol_type = other DNA
atggccggccctgtgaaggaccgggaggccttccagaggctgaacttcctgtaccaggtgtccctgcggcagggcccccatggagatggagcccggcggccccgggtgacagcccccctgccccaggccgcccactgtgtgctggcccaggaccctgagaaccaggccctggcccgcttctactgctacacagagaggaccatcgccaagaggctggtgctgcggcgggaccccagcgtgaagaggaccctgtgccggggctgcagcagcctgctggtgcccggcctgacctgcacccagaggcagaggcgctgccggggccagcgctggacagtgcagacctgcctgacctgccagaggagccagcgcttcctgaatgaccccggccacctgctgtggggagacaggcctgaggcccagctgggcagccaggccgacagcaagcccctgcagcccctgcccaacacagcccacagcatcagtgaccggctgcctgaggagaagatgcagacccagggcagcagcaaccagtag

SEQ ID NO: 168068 - DNA, 489 bp, synthetic construct
  misc_feature 1..489: note = Description of Artificial Sequence: Synthetic coding sequence
  source 1..489: mol_type = other DNA
atggccggccctgtgaaggaccgggaggccttccagaggctgaacttcctgtaccaggccgcccactgtgtgctggcccaggaccctgagaaccaggccctggcccgcttctactgctacacagagaggaccatcgccaagaggctggtgctgcggcggcccctgagcagcagcgccccccgggaccccagcgtgaagaggaccctgtgccggggctgcagcagcctgctggtgcccggcctgacctgcacccaccggcagaggcgctgccggggccagcgctggacagtgcagacctgcctgacctgccagaggagccagcgcttcctgaatgaccccggccacctgctgtggggagacaggcctgaggcccagctgggcagccaggccgacagcaagcccctgcagcccctgcccaacacagcccacagcatcagtgaccggctgcctgaggagaagatgcagacccagggcagcagcaaccagtag

SEQ ID NO: 168069 - DNA, 534 bp, synthetic construct
  misc_feature 1..534: note = Description of Artificial Sequence: Synthetic coding sequence
  source 1..534: mol_type = other DNA
atggccggccctgtgaaggaccgggaggccttccagaggctgaacttcctgtaccaggtgtccctgcggcagggcccccatggagatggagcccggcggccccgggtgacagcccccctgccccaggccgcccactgtgtgctggcccaggaccctgagaaccaggccctggcccgcttctactgctacacagagaggaccatcgccaagaggctggtgctgcggcgggaccccagcgtgaagaggaccctgtgccggggctgcagcagcctgctggtgcccggcctgacctgcacccagaggcagaggcgctgccggggccagcgctggacagtgcagacctgcctgacctgccagaggagccagcgcttcctgaatgaccccggccacctgctgtggggagacaggcctgaggcccagctgggcagccaggccgacagcaagcccctgcagcccctgcccaacacagcccacagcatcagtgaccggctgcctgaggagaagatgcagaccaagggcagcagcaaccagtag

SEQ ID NO: 168070 - DNA, 465 bp, synthetic construct
  misc_feature 1..465: note = Description of Artificial Sequence: Synthetic coding sequence
  source 1..465: mol_type = other DNA
atggccggccctgtgaaggaccgggaggccttccagaggctgaacttcctgtaccaggccgcccactgtgtgctggcccaggaccctgagaaccaggccctggcccgcttctactgctacacagagaggaccatcgccaagaggctggtgctgcggcgggaccccagcgtgaagaggaccctgtgccggggctgcagcagcctgctggtgcccggcctgacctgcacccaccggcagaggcgctgccggggccagcgctggacagtgcagacctgcctgacctgccagaggagccagcgcttcctgaatgaccccggccacctgctgtggggagacaggcctgaggcccagctgggcagccaggccgacagcaagcccctgcagcccctgcccaacacagcccacagcatcagtgaccggctgcctgaggagaagatgcagacccagggcagcagcaaccagtag

SEQ ID NO: 168071 - DNA, 435 bp, synthetic construct
  misc_feature 1..435: note = Description of Artificial Sequence: Synthetic coding sequence
  source 1..435: mol_type = other DNA
atggccggccctgtgaaggaccgggaggccttccagaggctgaacttcctgtaccaggccgcccactgtgtgctggcccaggaccctgagaaccaggccctggcccgcttctactgctacacagagaggaccatcgccaagaggctggtgctgcggcgggaccccagcgtgaagaggaccctgtgccggggctgcagcagcctgctggtgcccggcctgacctgcacccagaggcagaggcgctgccggggccagcgctggacagtgcagacctgcctgacctgccagaggagccagcgcttcctgaatgaccccggccacctgctgtggggagacaggcctgaggcccagctgggcagccaggccggggagcgcttccagaccaccaccaccctggccaagcacagccccctgcacttccggccccccagctag

SEQ ID NO: 168072 - DNA, 465 bp, synthetic construct; identical to SEQ ID NO: 168070
  misc_feature 1..465: note = Description of Artificial Sequence: Synthetic coding sequence
  source 1..465: mol_type = other DNA

SEQ ID NO: 168073 - DNA, 465 bp, synthetic construct
  misc_feature 1..465: note = Description of Artificial Sequence: Synthetic coding sequence
  source 1..465: mol_type = other DNA
atggccggccctgtgaaggaccgggaggccttccagaggctgaacttcctgtaccaggccgcccactgtgtgctggcccaggaccctgagaaccaggccctggcccgcttctactgctacacagagaggaccatcgccaagaggctggtgctgcggcgggaccccagcgtgaagaggaccctgtgccggggctgcagcagcctgctggtgcccggcctgacctgcacccagaggcagaggcgctgccggggccagcgctggacagtgcagacctgcctgacctgccagaggagccagcgcttcctgaatgaccccggccacctgctgtggggagacaggcctgaggcccagctgggcagccaggccgacagcaagcccctgcagcccctgcccaacacagcccacagcatcagtgaccggctgcctgaggagaagatgcagaccaagggcagcagcaaccagtag

SEQ ID NO: 168074 - DNA, 534 bp, synthetic construct
  misc_feature 1..534: note = Description of Artificial Sequence: Synthetic coding sequence
  source 1..534: mol_type = other DNA
atggccggccctgtgaaggaccgggaggccttccagaggctgaacttcctgtaccaggtgtccctgcggcagggcccccatggagatggagcccggcggccccgggtgacagcccccctgccccaggccgcccactgtgtgctggcccaggaccctgagaaccaggccctggcccgcttctactgctacacagagaggaccatcgccaagaggctggtgctgcggcgggaccccagcgtgaagaggaccctgtgccggggctgcagcagcctgctggtgcccggcctgacctgcacccaccggcagaggcgctgccggggccagcgctggacagtgcagacctgcctgacctgccagaggagccagcgcttcctgaatgaccccggccacctgctgtggggagacaggcctgaggcccagctgggcagccaggccgacagcaagcccctgcagcccctgcccaacacagcccacagcatcagtgaccggctgcctgaggagaagatgcagacccagggcagcagcaaccagtag

SEQ ID NO: 168075 - DNA, 435 bp, synthetic construct
  misc_feature 1..435: note = Description of Artificial Sequence: Synthetic coding sequence
  source 1..435: mol_type = other DNA
atggccggccctgtgaaggaccgggaggccttccagaggctgaacttcctgtaccaggccgcccactgtgtgctggcccaggaccctgagaaccaggccctggcccgcttctactgctacacagagaggaccatcgccaagaggctggtgctgcggcgggaccccagcgtgaagaggaccctgtgccggggctgcagcagcctgctggtgcccggcctgacctgcacccaccggcagaggcgctgccggggccagcgctggacagtgcagacctgcctgacctgccagaggagccagcgcttcctgaatgaccccggccacctgctgtggggagacaggcctgaggcccagctgggcagccaggccggggagcgcttccagaccaccaccaccctggccaagcacagccccctgcacttccggccccccagctag

SEQ ID NO: 168076 - DNA, 465 bp, synthetic construct; identical to SEQ ID NO: 168065
  misc_feature 1..465: note = Description of Artificial Sequence: Synthetic coding sequence
  source 1..465: mol_type = other DNA

SEQ ID NO: 168077 - DNA, 489 bp, synthetic construct
  misc_feature 1..489: note = Description of Artificial Sequence: Synthetic coding sequence
  source 1..489: mol_type = other DNA
atggccggccctgtgaaggaccgggaggccttccagaggctgaacttcctgtaccaggccgcccactgtgtgctggcccaggaccctgagaaccaggccctggcccgcttctactgctacacagagaggaccatcgccaagaggctggtgctgcggcggcccctgagcagcagcgccccccgggaccccagcgtgaagaggaccctgtgccggggctgcagcagcctgctggtgcccggcctgacctgcacccagaggcagaggcgctgccggggccagcgctggacagtgcagacctgcctgacctgccagaggagccagcgcttcctgaatgaccccggccacctgctgtggggagacaggcctgaggcccagctgggcagccaggccgacagcaagcccctgcagcccctgcccaacacagcccacagcatcagtgaccggctgcctgaggagaagatgcagacccagggcagcagcaaccagtag

SEQ ID NO: 168078 - DNA, 435 bp, synthetic construct; identical to SEQ ID NO: 168075
  misc_feature 1..435: note = Description of Artificial Sequence: Synthetic coding sequence
  source 1..435: mol_type = other DNA

SEQ ID NO: 168079 - DNA, 534 bp, synthetic construct; identical to SEQ ID NO: 168067
  misc_feature 1..534: note = Description of Artificial Sequence: Synthetic coding sequence
  source 1..534: mol_type = other DNA

SEQ ID NO: 168080 - DNA, 489 bp, synthetic construct; identical to SEQ ID NO: 168068
  misc_feature 1..489: note = Description of Artificial Sequence: Synthetic coding sequence
  source 1..489: mol_type = other DNA

SEQ ID NO: 168081 - DNA, 534 bp, synthetic construct; identical to SEQ ID NO: 168067
  misc_feature 1..534: note = Description of Artificial Sequence: Synthetic coding sequence
  source 1..534: mol_type = other DNA

SEQ ID NO: 168082 - DNA, 489 bp, synthetic construct; identical to SEQ ID NO: 168077
  misc_feature 1..489: note = Description of Artificial Sequence: Synthetic coding sequence
  source 1..489: mol_type = other DNA

SEQ ID NO: 168083 - DNA, 465 bp, synthetic construct; identical to SEQ ID NO: 168070
  misc_feature 1..465: note = Description of Artificial Sequence: Synthetic coding sequence
  source 1..465: mol_type = other DNA

SEQ ID NO: 168084 - DNA, 435 bp, synthetic construct; identical to SEQ ID NO: 168071
  misc_feature 1..435: note = Description of Artificial Sequence: Synthetic coding sequence
  source 1..435: mol_type = other DNA

SEQ ID NO: 168085 - DNA, 435 bp, synthetic construct; identical to SEQ ID NO: 168071
  misc_feature 1..435: note = Description of Artificial Sequence: Synthetic coding sequence
  source 1..435: mol_type = other DNA

SEQ ID NO: 168086 - DNA, 435 bp, synthetic construct; identical to SEQ ID NO: 168071
  misc_feature 1..435: note = Description of Artificial Sequence: Synthetic coding sequence
  source 1..435: mol_type = other DNA

SEQ ID NO: 168087 - DNA, 534 bp, synthetic construct; identical to SEQ ID NO: 168074
  misc_feature 1..534: note = Description of Artificial Sequence: Synthetic coding sequence
  source 1..534: mol_type = other DNA

SEQ ID NO: 168088 - DNA, 435 bp, synthetic construct; identical to SEQ ID NO: 168075
  misc_feature 1..435: note = Description of Artificial Sequence: Synthetic coding sequence
  source 1..435: mol_type = other DNA

SEQ ID NO: 168089 - DNA, 465 bp, synthetic construct; identical to SEQ ID NO: 168065
  misc_feature 1..465: note = Description of Artificial Sequence: Synthetic coding sequence
  source 1..465: mol_type = other DNA

SEQ ID NO: 168090 - DNA, 534 bp, synthetic construct; identical to SEQ ID NO: 168074
  misc_feature 1..534: note = Description of Artificial Sequence: Synthetic coding sequence
  source 1..534: mol_type = other DNA

SEQ ID NO: 168091 - DNA, 489 bp, synthetic construct; identical to SEQ ID NO: 168077
  misc_feature 1..489: note = Description of Artificial Sequence: Synthetic coding sequence
  source 1..489: mol_type = other DNA

SEQ ID NO: 168092 - DNA, 489 bp, synthetic construct; identical to SEQ ID NO: 168068
  misc_feature 1..489: note = Description of Artificial Sequence: Synthetic coding sequence
  source 1..489: mol_type = other DNA

SEQ ID NO: 168093 - DNA, 765 bp, synthetic construct
  misc_feature 1..765: note = Description of Artificial Sequence: Synthetic coding sequence
  source 1..765: mol_type = other DNA
atggctgtgtttgctgacctggacctgcgggccggcagtgacctgaaggccctgcggggcctggtggagacagctgcccaccgggagctgccccggctgcgggcctggcccaccagctgccacccagaccaccgggccaccctgcgcatcggctacagcgtggtggccatcaaccacatcgtggacttcaaggagaagaagcaggagattgagaagcctgtggccgtgtctgagctgttcaccaccctgcccatcgtgcagggcaagagccggcccatcaagatcctgacccggctgaccatcatcgtgtctgaccccagccactgcaatgtgctgcgggccaccagcagccgggcccggctgtatgatgtggtggccgtgttccccaagacagagaagctgttccacatcgcctgcacccacctggatgtggacctggtgtgcatcaccgtgacagagaagctgcccttctacttcaagaggcctcccatcaacgtggccatcgaccggggcctggcctttgagctggtgtacagccctgccatcaaggacagcaccatgaggcgctacaccatcagcagcgccctgaacctgatgcagatctgcaagggcaagaatgtcatcatcagcagcgctgctgagcggcccctggagatccggggcccctatgatgtggccaacctgggcctgctgtttggcctgtctgagagtgatgccaaggctgctgtgtccaccaactgcagagctgccctgctgcatggatag

SEQ ID NO: 168094 - DNA, 807 bp, synthetic construct
  misc_feature 1..807: note = Description of Artificial Sequence: Synthetic coding sequence
  source 1..807: mol_type = other DNA
atggctgtgtttgctgacctggacctgcgggccggcagtgacctgaaggccctgcggggcctggtggagacagctgcccacctgggctacagcgtggtggccatcaaccacatcgtggacttcaaggagaagaagcaggagattgagaagcctgtggccgtgtctgagctgttcaccaccctgcccatcgtgcagggcaagagccggcccatcaagatcctgacccggctgaccatcatcgtgtctgaccccagccactgcaatgtgctgcgggccaccagcagccgggcccggctgtatgatgtggtggccgtgttccccaagacagagaagctgttccacatcgcctgcacccacctggatgtggacctggtgtgcatcaccgtgacagagaagctgcccttctacttcaagaggcctcccatcaacgtggccatcgaccggggcctggcctttgagctggtgtacagccctgccatcaaggacagcaccatgaggcgctacaccatcagcagcgccctgaacctgatgcagatctgcaagggcaagaatgtcatcatcagcagcgctgctgagcggcccctggagatccggggcccctatgatgtggccaacctgggcctgctgtttggcctgtctgagagtgatgccaaggctgctgtgtccaccaactgcagagctgccctgctgcatggagagaccaggaagacagccttcggcatcatcagcacagtgaagaagccccggcccagtgaaggagatgaggactgcctgcctgccagcaagaaggccaagtgtgagggctag

SEQ ID NO: 168095 - DNA, 768 bp, synthetic construct
  misc_feature 1..768: note = Description of Artificial Sequence: Synthetic coding sequence
  source 1..768: mol_type = other DNA
atggctgtgtttgctgacctggacctgcgggccggcagtgacctgaaggccctgcggggcctggtggagacagctgcccacctgggctacagcgtggtggccatcaaccacatcgtggacttcaaggagaagaagcaggagattgagaagcctgtggccgtgtctgagctgttcaccaccctgcccatcgtgcagggcaagagccggcccatcaagatcctgacccggctgaccatcatcgtgtctgaccccagccactgcaatgtgctgcgggccaccagcagccgggcccggctgtatgatgtggtggccgtgttccccaagacagagaagctgttccacatcgcctgcacccacctggatgtggacctggtgtgcatcaccgtgacagagaagctgcccttctacttcaagaggcctcccatcaacgtggccatcgaccggggcctggcctttgagctggtgtacagccctgccatcaaggacagcaccatgaggcgctacaccatcagcagcgccctgaacctgatgcagatctgcaagggcaagcccctggagatccggggcccctatgatgtggccaacctgggcctgctgtttggcctgtctgagagtgatgccaaggctgctgtgtccaccaactgcagagctgccctgctgcatggagagaccaggaagacagccttcggcatcatcagcacagtgaagaagccccggcccagtgaaggagatgaggactgcctgcctgccagcaagaaggccaagtag

SEQ ID NO: 168096 - DNA, 969 bp, synthetic construct
  misc_feature 1..969: note = Description of Artificial Sequence: Synthetic coding sequence
  source 1..969: mol_type = other DNA
atggctgtgtttgctgacctggacctgcgggccggcagtgacctgaaggccctgcggggcctggtggagacagctgcccacctgggctacagcgtggtggccatcaaccacatcgtggacttcaaggagaagaagcaggagattgagaagcctgtggccgtgtctgagctgttcaccaccctgcccatcgtgcagggcaagagccggcccatcaagatcctgacccggctgaccatcatcgtgtctgaccccagccactgcaatgtgctgcgggccaccagcagccgggcccggctgtatgatgtggtggccgtgttccccaagacagagaagctgttccacatcgcctgcacccacctggatgtggacctggtgtgcatcaccgtgacagagaagctgcccttctacttcaagaggcctcccatcaacgtggccatcgaccggggcctggcctttgagctggtgtacagccctgccatcaaggacagcaccatgaggcgctacaccatcagcagcgccctgaacctgatgcagatctgcaagggcaagaatgtcatcatcagcagcgctgctgagcggcccctggagatccggggcccctatgatgtggccaacctgggcctgctgtttggcctgtctgagagtgatgccaaggctgctgtgtccaccaactgcagagctgccctgctgcatggagagaccaggaagacagccttcggcatcatcagcacagtgaagaagccccggcccagtgaaggagatgaggactgcctgcctgccagcaagaaggccaagtggagccacagcgtgacccaggccggcgtgcagtggcacaacctgggcagcctgcagcccctgcccctgggcctgaagcccagcagccacctgagcctgcccaggacccgcatccagcagaggcagctgctgatcagccaccagagggaccacacccccaagaaccggctgtag

SEQ ID NO: 168097 - DNA, 639 bp, synthetic construct
  misc_feature 1..639: note = Description of Artificial Sequence: Synthetic coding sequence
  source 1..639: mol_type = other DNA
gagattgagaagcctgtggccgtgtctgagctgttcaccaccctgcccatcgtgcagggcaagagccggcccatcaagatcctgacccggctgaccatcatcgtgtctgaccccagccactgcaatgtgctgcgggccaccagcagccgggcccggctgtatgatgtggtggccgtgttccccaagacagagaagctgttccacatcgcctgcacccacctggatgtggacctggtgtgcatcaccgtgacagagaagctgcccttctacttcaagaggcctcccatcaacgtggccatcgaccggggcctggcctttgagctggtgtacagccctgccatcaaggacagcaccatgaggcgctacaccatcagcagcgccctgaacctgatgcagatctgcaagggcaagcccctggagatccggggcccctatgatgtggccaacctgggcctgctgtttggcctgtctgagagtgatgccaaggctgctgtgtccaccaactgcagagctgccctgctgcatggagagaccaggaagacagccttcggcatcatcagcacagtgaagaagccccggcccagtgaaggagatgaggactgcctgcctgccagcaagaaggccaagtgtgagggctag

SEQ ID NO: 168098 - DNA, 852 bp, synthetic construct
  misc_feature 1..852: note = Description of Artificial Sequence: Synthetic coding sequence
  source 1..852: mol_type = other DNA
atggctgctgccccccaggcccctggccggggcagcctgaggaagacccggcccctggtggtgaagaccagcctgaacaacccctacatcatccgctggagcgccctggagagcgaggacatgcacttcatcctgcagaccctggaggaccggctgaaggccatcggcctgcagaagattgaggacaagaagaagaagaacaagacccccttcctgaagaaggagagccgggagaagtgcagcattgctgtggacatcagcgagaacctgaaggagaagaagacagatgccaagcagcaggtgtctggctggaccccagcccacgtgaggaagcagctggccatcggcgtgaatgaggtgacccgggccctggagcggcgggagctgctgctggtgctggtgtgcaagtctgtgaagccagccatgatcaccagccacctgatccagctgagcctgagccgctctgtgcctgcctgccaggtgccccggctgtctgagcgcatcgcccctgtgattggcctgaagtgtgtgctggccctggccttcaagaagaacaccacagactttgtggatgaggtgcgggccatcatcccccgggtgcccagcctgtctgtgccctggctgcaggacagaattgaagattctggagagaacctggagacagagcccctggagagccaggaccgggagctgctggacaccagctttgaggacctgagcaagcccaagaggaagctggctgatggccggcaggcctctgtgaccctgcagcccctgaagatcaagaagctgatccccaaccccaacaagatcaggaagccacccaagagcaagaaggccacccccaagtag

SEQ ID NO: 168099 - DNA, 504 bp, synthetic construct
  misc_feature 1..504: note = Description of Artificial Sequence: Synthetic coding sequence
  source 1..504: mol_type = other DNA
atggctgctgccccccaggcccctggccggggcagcctgaggaagacccggcccctggtggtgaagaccagcctgaacaacccctacatcatccgctggagcgccctggagagcgaggacatgcacttcatcctgcagaccctggaggaccggctgaaggccatcggcctgcagaagattgaggacaagaagaagaagaacaagacccccttcctgaagaaggagagccgggagaagtgcagcattgctgtggacatcagcgagaacctgaaggagaagaagacagatgccaagcagcaggtgtctggctggaccccagcccacgtgaggaagcagctggccatcggcgtgaatgaggtgacccgggccctggagcggcgggagctgctgctggtgctggtgctgaccctgctgccccggctggagtgcagcggggtcatcccagcccactgcaacccagcctcctgggtgcaggccatcctgctgccccagcccccagagtag

SEQ ID NO: 168100 - DNA, 852 bp, synthetic construct; identical to SEQ ID NO: 168098
  misc_feature 1..852: note = Description of Artificial Sequence: Synthetic coding sequence
  source 1..852: mol_type = other DNA

SEQ ID NO: 168101 - DNA, 852 bp, synthetic construct; identical to SEQ ID NO: 168098
  misc_feature 1..852: note = Description of Artificial Sequence: Synthetic coding sequence
  source 1..852: mol_type = other DNA

SEQ ID NO: 168102 - DNA, 510 bp, synthetic construct
  misc_feature 1..510: note = Description of Artificial Sequence: Synthetic coding sequence
  source 1..510: mol_type = other DNA
atggctgctgccccccaggcccctggccggggcagcctgaggaagacccggcccctggtggtgaagaccagcctgaacaacccctacatcatccgctggagcgccctggagagcgaggacatgcacttcatcctgcagaccctggaggaccggctgaaggccatcggcctgcagaagattgaggacaagaagaagaagaacaagacccccttcctgaagaaggagagccgggagaagtgcagcattgctgtggacatcagcgagaacctgaaggagaagaagacagatgccaagcagcaggtgtctggctggaccccagcccacgtgaggaagcagctggccatcggcgtgaatgaggtgacccgggccctggagcggcgggagctgctgctggtgctggtgtgcaagtctgtgaagccagccatgatcaccagccacctgatccagctgagcctgagccgctctgtgcctgcctgccaggtgccccggctgtctgagcgcatcgcctag

SEQ ID NO: 168103 - DNA, 1092 bp, synthetic construct
  misc_feature 1..1092: note = Description of Artificial Sequence: Synthetic coding sequence
  source 1..1092: mol_type = other DNA
atggccaccctgcggcggctgcgggaggcccccaggcacctgctggtgtgtgagaagagcaactttggaaaccacaagagccgccaccgccacctggtgcagacccactactacaactacagagtgtccttcctgatcccagaatgtggcatcctgtctgaggagctgaagaacctggtgatgaacacaggcccctactactttgtgaagaacctgcccctgcacgagctgatcaccccagagttcatcagcaccttcatcaagaagggcagctgctacgccctgacctacaacacccacattgatgaggacaacacagtggccctgctgcccaacgggaagctgatcctgagcctggacaaggacacctatgaggagaccggcctgcagggccaccccagccagttcagcggcaggaagatcatgaagttcatcgtgtccattgacctgatggagctgagcctgaacctggacagcaagaagtatgaaagaatctcctggagcttcaaggagaagaagcccctgaagtttgacttcctgctggcctggcacaagacaggcagcgaggagagcaccatgatgagctacttcagcaagtaccagatccaggagcaccagcccaaggtggccctgagcaccctgcgggacctgcagtgccctgtgctgcagagcagcgagctggagggcaccccagaggtgtcctgccgggccctggagctgtttgactggctgggcgctgtgttcagcaatgtggacctgaacaatgagcccaacaacttcatcagcacctactgctgcccagagcccagcacagtggtggccaaggcctacctgtgcaccatcaccggcttcatcctgcctgagaagatctgcctgctgctggagcacctgtgccactactttgatgagcccaagctggccccctgggtgaccctgtctgtgcagggctttgctgacagccctgtgtcctgggagaagaatgaacatggcttcagaaaaggaggagagcacctgtacaactttgtgatcttcaacaaccaggactactggctgcagatggctgtgggcgccaatgaccactgccccccatag

SEQ ID NO: 168104 - DNA, 912 bp, synthetic construct
  misc_feature 1..912: note = Description of Artificial Sequence: Synthetic coding sequence
  source 1..912: mol_type = other DNA
atgaacacaggcccctactactttgtgaagaacctgcccctgcacgagctgatcaccccagagttcatcagcaccttcatcaagaagggcagctgctacgccctgacctacaacacccacattgatgaggacaacacagtggccctgctgcccaacgggaagctgatcctgagcctggacaaggacacctatgaggagaccggcctgcagggccaccccagccagttcagcggcaggaagatcatgaagttcatcgtgtccattgacctgatggagctgagcctgaacctggacagcaagaagtatgaaagaatctcctggagcttcaaggagaagaagcccctgaagtttgacttcctgctggcctggcacaagacaggcagcgaggagagcaccatgatgagctacttcagcaagtaccagatccaggagcaccagcccaaggtggccctgagcaccctgcgggacctgcagtgccctgtgctgcagagcagcgagctggagggcaccccagaggtgtcctgccgggccctggagctgtttgactggctgggcgctgtgttcagcaatgtggacctgaacaatgagcccaacaacttcatcagcacctactgctgcccagagcccagcacagtggtggccaaggcctacctgtgcaccatcaccggcttcatcctgcctgagaagatctgcctgctgctggagcacctgtgccactactttgatgagcccaagctggccccctgggtgaccctgtctgtgcagggctttgctgacagccctgtgtcctgggagaagaatgaacatggcttcagaaaaggaggagagcacctgtacaactttgtgatcttcaacaaccaggactactggctgcagatggctgtgggcgccaatgaccactgccccccatag

SEQ ID NO: 168105 - DNA, 717 bp, synthetic construct
  misc_feature 1..717: note = Description of Artificial Sequence: Synthetic coding sequence
  source 1..717: mol_type = other DNA
atgaggcctgctgccctgcggggggccctgctgggctgcctgtgcctggccctgctgtgcctgggcggcgctgacaagaggctgcgggacaaccacgagtggaagaagctgatcatggtgcagcactggccagagaccgtgtgtgagaagatccagaatgactgccgggaccccccagactactggaccatccacggcctgtggccagacaagtctgagggctgcaacagatcctggcccttcaacctggaggagatcaagaagaactggatggagatcacagacagcagcctgcccagccccagcatgggccctgccccaccccgctggatgaggagcaccccccggcgcagcaccctggccgaggcctggaacagcacaggctcctggaccagcactggaggctgtgccctgcccccagctgccctgcccagcggggacctgtgctgccggcccagcctgacagctggcagccggggcgtgggcgtggacctgacagccctgcagcagctgctgcacgtgcactacagcgccaccggcatcatcccagaagaatgttctgagcccaccaagcccttccagatcatcctgcaccacgaccacacagagtgggtgcagagcatcggcatgcccatctggaccatcagcagcagcgagagcgccatcggcaagaccaggacccagcctgcctgtgctgtgctgagccatgacagctag

SEQ ID NO: 168106 - DNA, 624 bp, synthetic construct
  misc_feature 1..624: note = Description of Artificial Sequence: Synthetic coding sequence
  source 1..624: mol_type = other DNA
atgaggcctgctgccctgcggggggccctgctgggctgcctgtgcctggccctgctgtgcctgggcggcgctgacaagaggctgcgggacaaccacgagtggaagaagctgatcatggtgcagcactggccagagaccgtgtgtgagaagatccagaatgactgccgggaccccccagactactggaccatccacggcctgtggccagacaagtctgagggctgcaacagatcctggcccttcaacctggaggagatcaagaagaactggatggagatcacagacagcagcctgcccagccccagcacagacctgctgcctgagatgagggcctactggccagatgtgatccacagcttccccaacagaagccgcttctgtggcacctgtgccgcccaggtggatgccctgaacagccagaagaagtacttcggccgcagcctggagctgtaccgggagctggacctgaaccgctgggtgcggcccagccctggctgcaccagccagtggggcagcctgctgagccccaagccagacagctggatccagggcagcggctgccggccccactgccccccagctgccagcgcctgtgccctgtttggctactgggaccacagctag

SEQ ID NO: 168107 - DNA, 921 bp, synthetic construct
  misc_feature 1..921: note = Description of Artificial Sequence: Synthetic coding sequence
  source 1..921: mol_type = other DNA
atgaggcctgctgccctgcggggggccctgctgggctgcctgtgcctggccctgctgtgcctgggcggcgctgacaagaggctgcgggacaaccacgagtggaagaagctgatcatggtgcagcactggccagagaccgtgtgtgagaagatccagaatgactgccgggaccccccagactactggaccatccacggcctgtggcaggtgagccacaccagcagaagaggcctgctcttcctgttcaagaacatcttcagcctgagcagcaggaacttctccttctacagcctgcagacctccatgaagaagccaccccagcccagcctcatcttcctgatcttctccttcaagccagacaagtctgagggctgcaacagatcctggcccttcaacctggaggagatcaaggacctgctgcctgagatgagggcctactggccagatgtgatccacagcttccccaacagaagccgcttctggaagcatgagtgggagaagcacggcacctgtgccgcccaggtggatgccctgaacagccagaagaagtacttcggccgcagcctggagctgtaccgggagctggacctgaacagcgtgctgctgaagctgggcatcaagcccagcatcaactactaccaggtggccgacttcaaggatgccctggcccgggtgtatggagtcatccccaagatccagtgcctgccccccagccaggatgaggaggtgcagaccatcggccagatcgagctgtgcctgaccaagcaggaccagcagctgcagaactgcacagagcccggggagcagcccagccccaagcaggaggtgtggctggccaacggggctgctgagagccggggcctgcgggtgtgtgaagatggccctgtgttctaccccccacccaagaagaccaagcactag

SEQ ID NO: 168108 - DNA, 771 bp, synthetic construct
  misc_feature 1..771: note = Description of Artificial Sequence: Synthetic coding sequence
  source 1..771: mol_type = other DNA
atgaggcctgctgccctgcggggggccctgctgggctgcctgtgcctggccctgctgtgcctgggcggcgctgacaagaggctgcgggacaaccacgagtggaagaagctgatcatggtgcagcactggccagagaccgtgtgtgagaagatccagaatgactgccgggaccccccagactactggaccatccacggcctgtggccagacaagtctgagggctgcaacagatcctggcccttcaacctggaggagatcaaggacctgctgcctgagatgagggcctactggccagatgtgatccacagcttccccaacagaagccgcttctggaagcatgagtgggagaagcacggcacctgtgccgcccaggtggatgccctgaacagccagaagaagtacttcggccgcagcctggagctgtaccgggagctggacctgaacagcgtgctgctgaagctgggcatcaagcccagcatcaactactaccaggtggccgacttcaaggatgccctggcccgggtgtatggagtcatccccaagatccagtgcctgccccccagccaggatgaggaggtgcagaccatcggccagatcgagctgtgcctgaccaagcaggaccagcagctgcagaactgcacagagcccggggagcagcccagccccaagcaggaggtgtggctggccaacggggctgctgagagccggggcctgcgggtgtgtgaagatggccctgtgttctaccccccacccaagaagaccaagcactag

SEQ ID NO: 168109 - DNA, 765 bp, synthetic construct
  misc_feature 1..765: note = Description of Artificial Sequence: Synthetic coding sequence
  source 1..765: mol_type = other DNA
atgaggcctgctgccctgcggggggccctgctgggctgcctgtgcctggccctgctgtgcctgggcggcgctgacaagaggctgcgggacaaccacgagtggaagaagctgatcatggtgcagcactggccagagaccgtgtgtgagaagatccagaatgactgccgggaccccccagactactggaccatccacggcctgtggccagacaagtctgagggctgcaacagatcctggcccttcaacctggaggagatcaaggacctgctgcctgagatgagggcctactggccagatgtgatccacagcttccccaacagaagccgcttctggaagcatgagtgggagaagcacggcacctgtgccgcccaggtggatgccctgaacagccagaagaagtacttcggccgcagcctggagctgtaccgggagctggacctgaacagcgtgctgctgaagctgggcatcaagcccagcatcaactactaccaggtggccgacttcaaggatgccctggcccgggtgtatggagtcatccccaagatccagtgcctgccccccagccaggatgaggaggtgcagaccatcggccagatcgagctgtgcctgaccaagcaggaccagcagctgcagaactgcacagagcccggggagcagcccagccccaagcaggaggtgtggctggccaacggggctgctgagagccggggcctgcgggtgtgtgaagatggccctgtgttctaccccccacccaagaagacctag

SEQ ID NO: 168110 - DNA, 771 bp, synthetic construct; identical to SEQ ID NO: 168108
  misc_feature 1..771: note = Description of Artificial Sequence: Synthetic coding sequence
  source 1..771: mol_type = other DNA

SEQ ID NO: 168111 - DNA, 471 bp, synthetic construct
  misc_feature 1..471: note = Description of Artificial Sequence: Synthetic coding sequence
  source 1..471: mol_type = other DNA
atggccctggagaagagcctggtgcggctgctgctgctggtgctgatcctgctggtgctgggctgggtgcagcccagcctgggcaaggagagccgggccaagaagttccagaggcagcacatggacagcgacagcagccccagcagcagcagcacctactgcaaccagatgatgagaagaagaaacatgacccagggccgctgcaagcctgtgaacacctttgtgcatgagcccctggtggatgtgcagaatgtgtgcttccaggagaaggtgacctgcaagaatggccagggcaactgctacaagagcaacagctccatgcacatcacagactgccgcctgaccaacggcagccgctaccccaactgtgcctaccgcaccagccccaaggagcggcacatcatcgtggcctgtgagggcagcccctacgtgcctgtgcactttgatgcctctgtggaggacagcacctag

SEQ ID NO: 168112 - DNA, 471 bp, synthetic construct; identical to SEQ ID NO: 168111
  misc_feature 1..471: note = Description of Artificial Sequence: Synthetic coding sequence
  source 1..471: mol_type = other DNA

SEQ ID NO: 168113 - DNA, 471 bp, synthetic construct; identical to SEQ ID NO: 168111
  misc_feature 1..471: note = Description of Artificial Sequence: Synthetic coding sequence
  source 1..471: mol_type = other DNA

SEQ ID NO: 168114 - DNA, 471 bp, synthetic construct; identical to SEQ ID NO: 168111
  misc_feature 1..471: note = Description of Artificial Sequence: Synthetic coding sequence
  source 1..471: mol_type = other DNA

SEQ ID NO: 168115 - DNA, 486 bp, synthetic construct
  misc_feature 1..486: note = Description of Artificial Sequence: Synthetic coding sequence
  source 1..486: mol_type = other DNA
atggtgcccaagctgttcaccagccagatctgcctgctgctgctgctgggcctgctggccgtggagggcagcctgcacgtgaagccaccccagttcacctgggcccagtggtttgagacccagcacatcaacatgaccagccagcagtgcaccaatgccatgcaggtgatcaacaactaccagaggcgctgcaagaaccagaacaccttcctgctgaccacctttgccaacgtggtgaatgtgtgtggcaaccccaacatgacctgccccagcaacaagaccaggaagaactgccaccacagcggcagccaggtgcccctcatccactgcaacctgaccacccccagcccccagaacatcagcaactgccgctatgcccagaccccagccaacatgttctacatcgtggcctgtgacaacagagaccagaggcgggaccccccccagtaccctgtggtgcctgtgcacctggaccgcatcatctag

SEQ ID NO: 168116 - DNA, 483 bp, synthetic construct
  misc_feature 1..483: note = Description of Artificial Sequence: Synthetic coding sequence
  source 1..483: mol_type = other DNA
atggtgcccaagctgttcaccagccagatctgcctgctgctgctgctgggcctgatgggcgtggagggcagcctgcacgcccggcccccccagttcacccgggcccagtggtttgccatccagcacatcagcctgaaccccccacgctgcaccatcgccatgagggccatcaacaactaccgctggcgctgcaagaaccagaacaccttcctgcggaccacctttgccaacgtggtgaatgtgtgtggcaaccagagcatccgctgcccccacaacagaaccctgaacaactgccacaggagccgcttccgggtgcccctgctgcactgtgacctgatcaaccctggggcccagaacatcagcaactgcacctacgccgacaggcctggaagacgcttctacgtggtggcctgtgacaacagagacccccgggacagcccccgctaccctgtggtgcctgtgcacctggacaccaccatctag

SEQ ID NO: 168117 - DNA, 444 bp, synthetic construct
  misc_feature 1..444: note = Description of Artificial Sequence: Synthetic coding sequence
  source 1..444: mol_type = other DNA
atggccctgcagaggacccacagcctgctgctgctgctgctgctgaccctgctgggcctgggcctggtgcagcccagctatggccaggacggcatgtaccagcgcttcctgcggcagcacgtgcaccctgaggagaccggcggcagtgaccgctactgcaacctgatgatgcagaggaggaagatgaccctgtaccactgcaagcgcttcaacaccttcatccacgaggacatctggaacatccgcagcatctgcagcaccaccaacatccagtgcaagaatggcaagatgaactgccacgagggcgtggtgaaggtgacagactgccgggacaccggcagcagccgggcccccaactgccgctaccgggccatcgccagcaccaggagagtggtgattgcctgtgagggcaacccccaggtgcctgtgcactttgatggatag

SEQ ID NO: 168118 - DNA, 444 bp, synthetic construct; identical to SEQ ID NO: 168117
  misc_feature 1..444: note = Description of Artificial Sequence: Synthetic coding sequence
  source 1..444: mol_type = other DNA

SEQ ID NO: 168119 - DNA, 444 bp, synthetic construct; identical to SEQ ID NO: 168117
  misc_feature 1..444: note = Description of Artificial Sequence: Synthetic coding sequence
  source 1..444: mol_type = other DNA

SEQ ID NO: 168120 - DNA, 465 bp, synthetic construct
  misc_feature 1..465: note = Description of Artificial Sequence: Synthetic coding sequence
  source 1..465: mol_type = other DNA
atggccccagcccgggccggctgctgccccctgctgctgctgctgctgggcctgtgggtggccgaggtgctggtgcgggccaagcccaaggacatgaccagcagccagtggttcaagacccagcacgtgcagcccagcccccaggcctgcaacagcgccatgagcatcatcaacaagtacacagagcgctgcaaggacctgaacaccttcctgcacgagcccttcagctctgtggccatcacctgccagacccccaacatcgcctgcaagaacagctgcaagaactgccaccagagccacggccccatgagcctgaccatgggagagctgaccagcggcaagtaccccaactgccgctacaaggagaagcacctgaacaccccctacatcgtggcctgtgaccccccccagcagggcgaccccggctaccccctggtgcctgtgcacctggacaaggtggtgtag

SEQ ID NO: 168121 - DNA, 453 bp, synthetic construct
  misc_feature 1..453: note = Description of Artificial Sequence: Synthetic coding sequence
  source 1..453: mol_type = other DNA
atggtgctgtgcttccccctgctgctgctgctgctggtgctgtggggccctgtgtgccccctgcacgcctggcccaagaggctgaccaaggcccactggtttgagatccagcacatccagcccagccccctgcagtgcaacagagccatgagcggcatcaacaactacacccagcactgcaagcaccagaacaccttcctgcatgacagcttccagaatgtggccgctgtgtgtgacctgctgagcatcgtgtgcaagaacagaagacacaactgccaccagagcagcaagcctgtgaacatgacagactgccgcctgaccagcggcaagtacccccagtgccgctacagcgctgctgcccagtacaagttcttcatcgtggcctgtgaccccccccagaagagtgaccccccctacaagctggtgcctgtgcacctggacagcatcctgtag

SEQ ID NO: 168122 - DNA, 2271 bp, synthetic construct
  misc_feature 1..2271: note = Description of Artificial Sequence: Synthetic coding sequence
  source 1..2271: mol_type = other DNA
atgcccctgcggcccggcagcctggtgcctgagggcgccggcttccccaagatggccgcagatgtgtctgtgacccaccggccccccctgagccccaagagcggggctgaggtggaggccggagatgctgctgagcggcgggcccctgaggaggagctgccccccctggaccctgaggagatcaggaagaggctggagcacacagagcggcagttcaggaacagaaggaagatcctgatccggggcctgcctggagatgtgaccaaccaggaggtgcatgacctgctgagtgactatgagctgaagtactgctttgtggacaagtacaagggcacagcctttgtgaccctgctgaatggagagcaggccgaggccgccatcaatgccttccaccagagccggctgcgggagcgggagctgtctgtgcagctgcagcccacagatgccctgctgtgtgtggccaacctgccccccagcctgacccagcagcagtttgaggagctggtgcggcccttcggcagcctggagcgctgcttcctggtgtacagcgagaggacaggccagagcaagggctacggctttgctgagtacatgaagaaggacagcgctgcccgggccaagagtgacctgctgggcaagcccctgggccccaggaccctgtatgtgcactggacagatgctggccagctgaccccagccctgctgcacagccgctgcctgtgtgtggaccggctgcccccaggcttcaatgatgtggatgccctgtgccgggccctgtctgctgtgcacagccccaccttctgccagctggcctgtggccaggacggccagctgaagggctttgctgtgctggagtatgaaacagctgagatggccgaggaggcccagcagcaggctgatggcctgagcctgggcggcagccacctgcgggtgtccttctgtgcccctggccccccaggccgctccatgctggccgccctgattgctgcccaggccacagccctgaacagaggcaagggcctgctgcctgagcccaacatcctgcagctgctgaacaacctgggccccagcgccagcctgcagctgctgctgaaccccctgctgcacggcagcgctgggggcaagcagggcctgctgggcgcccccccagccatgcccctgctgaatggacctgccctgagcacagccctgctgcagctggccctgcagacccagggccagaagaagccaggcatcctgggggacagccccctgggcgccctgcagcccggggcccagcctgccaaccccctgctgggggagctgcctgctgggggcggcctgcccccagagctgcccccccggcggggcaagcccccacccctgctgcccagcgtgctgggccctgctggaggagaccgggaggccctgggcctgggccccccagctgcccagctgaccccacctccagcccctgtgggcctgcggggcagcggcctgcggggcctgcagaaggacagcggccccctgcccaccccacctggggtgtccctgctgggggagccccccaaggactaccgcatccccctgaacccctacctgaacctgcacagcctgctgcctgccagcaacctggccggcaaggaggcccggggctggggcggggccggccgcagcagaagacctgctgagggcccccccaccaaccccccagcccctgggggcggcagcagcagcagcaaggccttccagctgaagagccggctgctgagccccctgagcagcgcccggctgcccccagagcccggcctgagtgacagctacagctttgactaccccagcgacatgggcccccggcggctcttcagccacccccgggagcccgccctgggcccccacggccccagccgccacaagatgagccccccacccagcggctttggagagaggagcagcggcggcagcggcggcggccccctgagccacttctacagcggcagccccaccagctacttcaccagcggcctgcaggccggcctgaagcagagccacctgagcaaggccatcggcagcagccccctgggcagcggggagggcctgctgggcctgagccctggccccaacggccacagccacctgctgaagacccccctgggcggccagaagaggagctttgcccacctgctgcccagccctgagcccagccctgagggcagctatgtgggccagcacagccagggcctgggcggccactacgccgacagctacctgaagaggaagaggatcttctag

SEQ ID NO: 168123 - DNA, 1821 bp, synthetic construct
  misc_feature 1..1821: note = Description of Artificial Sequence: Synthetic coding sequence
  source 1..1821: mol_type = other DNA
atggctgctgatgtgtctgtgacccacaggcctcccctgagccccaagtctggagctgaggtggaggccggagatgctgctgagcggcgggcccctgaggaggagctgccccccctggaccctgaggagatcaggaagaggctggagcacacagagcggcagttcaggaacagaaggaagatcctgatccggggcctgcctggagatgtgaccaaccaggaggtgcatgacctgctgagtgactatgagctgaagtactgctttgtggacaagtacaagggcacagcctttgtgaccctgctgaatggagagcaggccgaggccgccatcaatgccttccaccagagccggctgcgggagcgggagctgtctgtgcagctgcagcccacagatgccctgctgtgtgtggccaacctgccccccagcctgacccagcagcagtttgaggagctggtgcggcccttcggcagcctggagcgctgcttcctggtgtacagcgagaggacaggccagagcaagggctacggctttgctgagtacatgaagaaggacagcgctgcccgggccaagagtgacctgctgggcaagcccctgggccccaggaccctgtatgtgcactggacagatgctggccagctgaccccagccctgctgcacagccgctgcctgtgtgtggaccggctgcccccaggcttcaatgatgtggatgccctgtgccgggccctgtctgctgtgcacagccccaccttctgccagctggcctgtggccaggacggccagctgaagggctttgctgtgctggagtatgaaacagctgagatggccgaggaggcccagcagcaggctgatggcctgagcctgggcggcagccacctgcgggtgtccttctgtgcccctggccccccaggccgctccatgctggccgccctgattgctgcccaggccacagccctgaacagaggcaagggcctgctgcctgagcccaacatcctgcagctgctgaacaacctgggccccagcgccagcctgcagctgctgctgaaccccctgctgcacggcagcgctgggggcaagcagggcctgctgggcgcccccccagccatgcccctgctgaatggacctgccctgagcacagccctgctgcagctggccctgcagacccagggccagaagaagccaggcatcctgggggacagccccctgggcgccctgcagcccggggcccagcctgccaaccccctgctgggggagctgcctgctgggggcggcctgcccccagagctgcccccaagaagaggcaagcccccacccctgctgcccagcgtgctgggccctgctggaggagaccgggaggccctgggcctgggccccccagctgcccagctgaccccacctccagcccctgtgggcctgcggggcagcggcctgcggggccccctgagccacttctacagcggcagccccaccagctacttcaccagcggcctgcaggccggcctgaagcagagccacctgagcaaggccatcggcagcagccccctgggcagcggggagggcctgctgggcctgagccctggccccaacggccacagccacctgctgaaggtgcgggccggcggcggggacatgcagggctgggaggccccagccccccagaggcccctgaccaggcctgccctgcccagcgtgtcccggccccactgggccgccagaaatgctgccctgcccacctgctgcccccggcccagccctgcccagaaggccgccatgtgggccagcaccccccgggccagcgctgccaccaccaggacccccacctag

SEQ ID NO: 168124 - DNA, 2076 bp, synthetic construct
  misc_feature 1..2076: note = Description of Artificial Sequence: Synthetic coding sequence
  source 1..2076: mol_type = other DNA
atggctgctgctgctggagatggcggcggggagggcggggccggcctgggcagcgctgctggcctgggccctggccctggcctgcggggccagggccccagcgctgaggcccacgagggcgccccagaccccatgcctgctgccctgcaccctgaggaggtggccgcccggctgcagaggatgcagcgggagctgagcaacagaaggaagatcctggtgaagaacctgccccaggacagcaactgccaggaggtgcatgacctgctgaaggactatgacctgaagtactgctacgtggacaggaacaagaggacagcctttgtgaccctgctgaatggagagcaggcccagaatgccatccagatgttccaccagtacagcttccggggcaaggacctgattgtgcagctgcagcccacagatgccctgctgtgcatcaccaacgtgcccatctccttcaccagcgaggagtttgaggagctggtgcgggcctacggcaacatcgagcgctgcttcctggtgtacagcgaggtgacaggccacagcaagggctacggctttgtggagtacatgaagaaggactttgctgccaaggcccggctggagctgctgggccggcagctgggcgccagcgccctgtttgcccagtggatggatgtgaacctgctggccagcgagctgatccacagcaagtgcctgtgcatcgacaagctgcccagcgactacagagattctgaggagctgctgcagatcttcagctctgtgcacaagcctgtgttctgccagctggcccaggatgagggcagctatgtgggcggctttgctgtggtggagtacagcacagctgagcaggccgaggaggtgcagcaggccgcagatggcatgaccatcaagggcagcaaggtgcaggtgtccttctgtgcccctggggcccctggccgcagcaccctggccgccctgattgctgcccagagggtgatgcacagcaaccagaagggcctgctgcctgagcccaaccctgtgcagatcatgaagagcctgaacaacccagccatgctgcaggtgctgctgcagccccagctgtgtggccgggctgtgaagccagctgtgctgggcaccccccacagcctgccccacctgatgaaccccagcatcagccctgccttcctgcacctgaacaaggcccaccagagctctgtgatgggcaacaccagcaacctcttcctgcagaacctgagccacatccccctggcccagcagcagctgatgaagtttgagaacatccacaccaacaacaagccaggcctgctgggggagcccccagctgtggtgctgcagacagccctgggcatcggctctgtgctgcccctgaagaaggagctgggccaccaccacggggaggcccacaagaccagcagcctcatccccacccagaccaccatcacagctggcatgggcatgctgcccttcttccccaaccagcacatcgccggccaggccggccctggccacagcaacacccaggagaagcagcctgccaccgtgggcatggccgagggcaacttcagcggcagccagccctacctgcagagcttccccaacctggccgccggcagcctgctggtgggccaccacaagcagcagcagagccagcccaagggcacagagatcagcagtggagctgccagcaagaaccagaccagcctgctgggggagccccccaaggagatccggctgagcaagaacccctacctgaacctggcctctgtgctgcccagcgtgtgcctgagcagccctgccagcaagaccaccctgcacaagacaggcatcgccagcagcatcctggatgccatcagccagggcagcgagagccagcacgccctggagaagtgcatcgcctacagccccccatttggagactatgcccaggtgagcagcctgagaaatgagaagaggggcagcagctacctgatcagcgcccctgagggcggctctgtggagtgtgtggaccagcacagccagggcaccggggcctactacatggagacctacctgaagaagaagagggtgtactag

SEQ ID NO: 168125 - DNA, 2037 bp, synthetic construct
  misc_feature 1..2037: note = Description of Artificial Sequence: Synthetic coding sequence
  source 1..2037: mol_type = other DNA
atggctgctgctgctggagatggcggcggggagggcggggccggcctgggcagcgctgctggcctgggccctggccctggcctgcggggccagggccccagcgctgaggcccacgagggcgccccagaccccatgcctgctgccctgcaccctgaggaggtggccgcccggctgcagaggatgcagcgggagctgagcaacagaaggaagatcctggtgaagaacctgccccaggacagcaactgccaggaggtgcatgacctgctgaaggactatgacctgaagtactgctacgtggacaggaacaagaggacagcctttgtgaccctgctgaatggagagcaggcccagaatgccatccagatgttccaccagtacagcttccggggcaaggacctgattgtgcagctgcagcccacagatgccctgctgtgcatcaccaacgtgcccatctccttcaccagcgaggagtttgaggagctggtgcgggcctacggcaacatcgagcgctgcttcctggtgtacagcgaggtgacaggccacagcaagggctacggctttgtggagtacatgaagaaggactttgctgccaaggcccggctggagctgctgggccggcagctgggcgccagcgccctgtttgcccagtggatggatgtgaacctgctggccagcgagctgatccacagcaagtgcctgtgcatcgacaagctgcccagcgactacagagattctgaggagctgctgcagatcttcagctctgtgcacaagcctgtgttctgccagctggcccaggatgagggcagctatgtgggcggctttgctgtggtggagtacagcacagctgagcaggccgaggaggtgcagcaggccgcagatggcatgaccatcaagggcagcaaggtgcaggtgtccttctgtgcccctggggcccctggccgcagcaccctggccgccctgattgctgcccagagggtgatgcacagcaaccagaagggcctgctgcctgagcccaaccctgtgcagatcatgaagagcctgaacaacccagccatgctgcaggtgctgctgcagccccagctgtgtggccgggctgtgaagccagctgtgctgggcaccccccacagcctgccccacctgatgaaccccagcatcagccctgccttcctgcacctgaacaaggcccaccagaacctgagccacatccccctggcccagcagcagctgatgaagtttgagaacatccacaccaacaacaagccaggcctgctgggggagcccccagctgtggtgctgcagacagccctgggcatcggctctgtgctgcccctgaagaaggagctgggccaccaccacggggaggcccacaagaccagcagcctcatccccacccagaccaccatcacagctggcatgggcatgctgcccttcttccccaaccagcacatcgccggccaggccggccctggccacagcaacacccaggagaagcagcctgccaccgtgggcatggccgagggcaacttcagcggcagccagccctacctgcagagcttccccaacctggccgccggcagcctgctggtgggccaccacaagcagcagcagagccagcccaagggcacagagatcagcagcggggccgccagcaagaaccagaccagcctgctgggggagccccccaaggagatccggctgagcaagaacccctacctgaacctggcctctgtgctgcccagcgtgtgcctgagcagccctgccagcaagaccaccctgcacaagacaggaattgccagcagcatcctggatgccatcagccagggcagcgagagccagcacgccctggagaagtgcatcgcctacagccccccatttggagactatgcccaggtgagcagcctgagaaatgagaagaggggcagcagctacctgatcagcgcccctgagggcggctctgtggagtgtgtggaccagcacagccagggcactggagcctactacatggagacctacctgaagaagaagagggtgtactag

SEQ ID NO: 168126 - DNA, 693 bp, synthetic construct
  misc_feature 1..693: note = Description of Artificial Sequence: Synthetic coding sequence
  source 1..693: mol_type = other DNA
atgaccatcaagggcagcaaggtgcaggtgtccttctgtgcccctggggcccctggccgcagcaccctggccgccctgattgctgcccagagggtgatgcacagcaaccagaagggcctgctgcctgagcccaaccctgtgcagatcatgaagagcctgaacaacccagccatgctgcaggtgctgctgcagccccagctgtgtggccgggctgtgaagccagctgtgctgggcaccccccacagcctgccccacctgatgaaccccagcatcagccctgccttcctgcacctgaacaaggcccaccagaaccagaccagcctgctgggggagccccccaaggagatccggctgagcaagaacccctacctgaacctggcctctgtgctgcccagcgtgtgcctgagcagccctgccagcaagaccaccctgcacaagacaggaattgccagcagcatcctggatgccatcagccagggcagcgagagccagcacgccctggagaagtgcatcgcctacagccccccatttggagactatgcccaggtgagcagcctgagaaatgagaagaggggcagcagctacctgatcagcgcccctgagggcggctctgtggagtgtgtggaccagcacagccagggcactggagcctactacatggagacctacctgaagaagaagagggtgtactag

SEQ ID NO: 168127 - DNA, 2379 bp, synthetic construct
  misc_feature 1..2379: note = Description of Artificial Sequence: Synthetic coding sequence
  source 1..2379: mol_type = other DNA
atgcacgtgatcaagagagatggccggcaggagcgggtgatgtttgacaagatcaccagccgcatccagaagctgtgctacggcctgaacatggactttgtggaccctgcccagatcaccatgaaggtgatccagggcctgtacagcggcgtgaccaccgtggagctggacaccctggccgctgagacagctgccaccctgaccaccaagcacccagactatgccatcctggccgccagaattgctgtgagcaacctgcacaaggagaccaagaaggtgttcagtgatgtgatggaggacctgtacaactacatcaacccccacaacgggaagcacagccccatggtggccaagagcaccctggacatcgtgctggccaacaaggaccggctgaacagcgccatcatctatgaccgggacttctcctacaactacttcggcttcaagaccctggagaggagctacctgctgaagatcaacgggaaggtggccgagcggccccagcacatgctgatgagggtgtctgtgggcatccacaaggaggacattgatgctgccatcgagacctacaacctgctgtctgagcgctggttcacccacgccagccccaccctcttcaatgccggcaccaaccggccccagctgagcagctgcttcctgctgtccatgaaggatgacagcattgagggcatctatgacaccctgaagcagtgtgccctgatcagcaagtctgctgggggcatcggcgtggccgtgtcctgcatccgggccaccggcagctacatcgccggcaccaacggcaacagcaatggcctggtgcccatgctgcgggtgtacaacaacacagcccgctacgtggaccagggcggcaacaagaggcctggggcctttgccatctacctggagccctggcacctggacatctttgagttcctggacctgaagaagaacacaggcaaggaggagcagagggcccgggacctcttctttgccctgtggatcccagacctcttcatgaagagggtggagaccaaccaggactggagcctgatgtgccccaatgaatgtcctggcctggatgaggtgtggggcgaggagtttgagaagctgtatgccagctatgagaagcagggccgggtgaggaaggtggtgaaggcccagcagctgtggtacgccatcatcgagagccagacagagaccggcaccccctacatgctgtacaaggacagctgcaacaggaagagcaaccagcagaacctgggcaccatcaagtgcagcaacctgtgcacagagatcgtggagtacaccagcaaggatgaggtggccgtgtgcaacctggccagcctggccctgaacatgtatgtgaccagcgagcacacctatgacttcaagaagctggccgaggtgaccaaggtggtggtgaggaacctgaacaagatcatcgacatcaactactaccctgtgcctgaggcctgcctgagcaacaagaggcaccggcccatcggcattggagtgcagggcctggctgatgccttcatcctgatgagatacccctttgaatctgctgaggcccagctgctgaacaagcagatctttgagaccatctactatggagccctggaggccagctgtgacctggccaaggagcagggcccctatgagacctatgagggcagccctgtgtccaagggcatcctgcagtatgacatgtggaatgtgacccccacagacctgtgggactggaaggtgctgaaggagaagatcgccaagtatggcatccggaacagcctgctgattgcccccatgcccacagccagcacagcccagatcctgggcaacaatgaaagcattgagccctacaccagcaacatctacaccaggagagtgctgtctggagagttccagatcgtgaacccccacctgctgaaggacctgacagagcggggcctgtggcatgaggagatgaagaaccagatcatcgcctgcaatggcagcatccagagcatccctgagatcccagatgacctgaagcagctgtacaagacagtgtgggagatcagccagaagacagtgctgaagatggctgctgagcggggggccttcatcgaccagagccagagcctgaacatccacatcgccgagcccaactacggcaagctgacctccatgcacttctacggctggaagcagggcctgaagacaggcatgtactacctgcggaccaggcctgctgccaaccccatccagttcaccctgaacaaggagaagctgaaggacaaggagaaggtgtccaaggaggaggaggagaaggagaggaacacagctgccatggtgtgcagcctggagaacagagatgagtgcctgatgtgtggcagctag

SEQ ID NO: 168128 - DNA, 2088 bp, synthetic construct
  misc_feature 1..2088: note = Description of Artificial Sequence: Synthetic coding sequence
  source 1..2088: mol_type = other DNA
atggaggacctgtacaactacatcaacccccacaacgggaagcacagccccatggtggccaagagcaccctggacatcgtgctggccaacaaggaccggctgaacagcgccatcatctatgaccgggacttctcctacaactacttcggcttcaagaccctggagaggagctacctgctgaagatcaatggcaaggtggccgagcggccccagcacatgctgatgagggtgtctgtgggcatccacaaggaggacattgatgctgccatcgagacctacaacctgctgtctgagcgctggttcacccacgccagccccaccctcttcaatgccggcaccaaccggccccagctgagcagctgcttcctgctgtccatgaaggatgacagcattgagggcatctatgacaccctgaagcagtgtgccctgatcagcaagtctgctgggggcattggagtggccgtgtcctgcatccgggccaccggcagctacatcgccggcaccaatggaaacagcaatggcctggtgcccatgctgcgggtgtacaacaacacagcccgctacgtggaccagggcggcaacaagaggcctggggcctttgccatctacctggagccctggcacctggacatctttgagttcctggacctgaagaagaacacaggcaaggaggagcagagggcccgggacctcttctttgccctgtggatcccagacctcttcatgaagagggtggagaccaaccaggactggagcctgatgtgccccaatgaatgtcctggcctggatgaggtgtggggcgaggagtttgagaagctgtatgccagctatgagaagcagggccgggtgaggaaggtggtgaaggcccagcagctgtggtacgccatcatcgagagccagacagaaacaggcaccccctacatgctgtacaaggacagctgcaacaggaagagcaaccagcagaacctgggcaccatcaagtgcagcaacctgtgcacagaaattgtggagtacaccagcaaggatgaggtggccgtgtgcaacctggccagcctggccctgaacatgtatgtgaccagcgagcacacctatgacttcaagaagctggccgaggtgaccaaggtggtggtgaggaacctgaacaagatcatcgacatcaactactaccctgtgcctgaggcctgcctgagcaacaagaggcaccggcccatcggcatcggcgtgcagggcctggctgatgccttcatcctgatgagatacccctttgagagcgctgaggcccagctgctgaacaagcagatctttgagaccatctactacggggccctggaggccagctgtgacctggccaaggagcagggcccctatgagacctatgagggcagccctgtgtccaagggcatcctgcagtatgacatgtggaatgtgacccccacagacctgtgggactggaaggtgctgaaggagaagatcgccaagtatggcatccggaacagcctgctgattgcccccatgcccacagccagcacagcccagatcctgggcaacaatgaaagcattgagccctacaccagcaacatctacacccggcgggtgctgagcggggagttccagatcgtgaacccccacctgctgaaggacctgacagagcggggcctgtggcatgaggagatgaagaaccagatcatcgcctgcaatggcagcatccagagcatccctgagatcccagatgacctgaagcagctgtacaagacagtgtgggagatcagccagaagacagtgctgaagatggctgctgagcggggggccttcatcgaccagagccagagcctgaacatccacatcgccgagcccaactacggcaagctgacctccatgcacttctacggctggaagcagggcctgaagacaggcatgtactacctgcggaccaggcctgctgccaaccccatccagttcaccctgaacaaggagaagctgaaggacaaggagaaggtgtccaaggaggaggaggagaaggagaggaacacagctgccatggtgtgcagcctggagaacagagatgaatgtctgatgtgtggcagctag

SEQ ID NO: 168129 - DNA, 2118 bp, synthetic construct
  misc_feature 1..2118: note = Description of Artificial Sequence: Synthetic coding sequence
  source 1..2118: mol_type = other DNA
gatggccggcaggagcgggtgatgtttgacaagatcaccagccgcatccagaagctgtgctacggcctgaacatggactttgtggaccctgcccagatcaccatgaaggtgatccagggcctgtacagcggcgtgaccaccgtggagctggacaccctggccgctgagacagctgccaccctgaagaccctggagaggagctacctgctgaagatcaatggcaaggtggccgagcggccccagcacatgctgatgagggtgtctgtgggcatccacaaggaggacattgatgctgccatcgagacctacaacctgctgtctgagcgctggttcacccacgccagccccaccctcttcaatgccggcaccaaccggccccagctgagcagctgcttcctgctgtccatgaaggatgacagcattgagggcatctatgacaccctgaagcagtgtgccctgatcagcaagtctgctgggggcattggagtggccgtgtcctgcatccgggccaccggcagctacatcgccggcaccaatggaaacagcaatggcctggtgcccatgctgcgggtgtacaacaacacagcccgctacgtggaccagggcggcaacaagaggcctggggcctttgccatctacctggagccctggcacctggacatctttgagttcctggacctgaagaagaacacaggcaaggaggagcagagggcccgggacctcttctttgccctgtggatcccagacctcttcatgaagagggtggagaccaaccaggactggagcctgatgtgccccaatgaatgtcctggcctggatgaggtgtggggcgaggagtttgagaagctgtatgccagctatgagaagcagggccgggtgaggaaggtggtgaaggcccagcagctgtggtacgccatcatcgagagccagacagaaacaggcaccccctacatgctgtacaaggacagctgcaacaggaagagcaaccagcagaacctgggcaccatcaagtgcagcaacctgtgcacagaaattgtggagtacaccagcaaggatgaggtggccgtgtgcaacctggccagcctggccctgaacatgtatgtgaccagcgagcacacctatgacttcaagaagctggccgaggtgaccaaggtggtggtgaggaacctgaacaagatcatcgacatcaactactaccctgtgcctgaggcctgcctgagcaacaagaggcaccggcccatcggcatcggcgtgcagggcctggctgatgccttcatcctgatgagatacccctttgagagcgctgaggcccagctgctgaacaagcagatctttgagaccatctactacggggccctggaggccagctgtgacctggccaaggagcagggcccctatgagacctatgagggcagccctgtgtccaagggcatcctgcagtatgacatgtggaatgtgacccccacagacctgtgggactggaaggtgctgaaggagaagatcgccaagtatggcatccggaacagcctgctgattgcccccatgcccacagccagcacagcccagatcctgggcaacaatgaaagcattgagccctacaccagcaacatctacacccggcgggtgctgagcggggagttccagatcgtgaacccccacctgctgaaggacctgacagagcggggcctgtggcatgaggagatgaagaaccagatcatcgcctgcaatggcagcatccagagcatccctgagatcccagatgacctgaagcagctgtacaagacagtgtgggagatcagccagaagacagtgctgaagatggctgctgagcggggggccttcatcgaccagagccagagcctgaacatccacatcgccgagcccaactacggcaagctgacctccatgcacttctacggctggaagcagggcctgaagacaggcatgtactacctgcggaccaggcctgctgccaaccccatccagttcaccctgaacaaggagaagctgaaggacaaggagaaggtgtccaaggaggaggaggagaaggagaggaacacagctgccatggtgtgcagcctggagaacagagatgaatgtctgatgtgtggcagctag

SEQ ID NO: 168130 - DNA, 1365 bp, synthetic construct
  misc_feature 1..1365: note = Description of Artificial Sequence: Synthetic coding sequence
  source 1..1365: mol_type = other DNA
atgaagagggtggagaccaaccaggactggagcctgatgtgccccaatgaatgtcctggcctggatgaggtgtggggcgaggagtttgagaagctgtatgccagctatgagaagcagggccgggtgaggaaggtggtgaaggcccagcagctgtggtacgccatcatcgagagccagacagagaccggcaccccctacatgctgtacaaggacagctgcaacaggaagagcaaccagcagaacctgggcaccatcaagtgcagcaacctgtgcacagagatcgtggagtacaccagcaaggatgaggtggccgtgtgcaacctggccagcctggccctgaacatgtatgtgaccagcgagcacacctatgacttcaagaagctggccgaggtgaccaaggtggtggtgaggaacctgaacaagatcatcgacatcaactactaccctgtgcctgaggcctgcctgagcaacaagaggcaccggcccatcggcattggagtgcagggcctggctgatgccttcatcctgatgagatacccctttgaatctgctgaggcccagctgctgaacaagcagatctttgagaccatctactatggagccctggaggccagctgtgacctggccaaggagcagggcccctatgagacctatgagggcagccctgtgtccaagggcatcctgcagtatgacatgtggaatgtgacccccacagacctgtgggactggaaggtgctgaaggagaagatcgccaagtatggcatccggaacagcctgctgattgcccccatgcccacagccagcacagcccagatcctgggcaacaatgaaagcattgagccctacaccagcaacatctacaccaggagagtgctgtctggagagttccagatcgtgaacccccacctgctgaaggacctgacagagcggggcctgtggcatgaggagatgaagaaccagatcatcgcctgcaatggcagcatccagagcatccctgagatcccagatgacctgaagcagctgtacaagacagtgtgggagatcagccagaagacagtgctgaagatggctgctgagcggggggccttcatcgaccagagccagagcctgaacatccacatcgccgagcccaactacggcaagctgacctccatgcacttctacggctggaagcagggcctgaagacaggcatgtactacctgcggaccaggcctgctgccaaccccatccagttcaccctgaacaaggagaagctgaaggacaaggagaaggtgtccaaggaggaggaggagaaggagaggaacacagctgccatggtgtgcagcctggagaacagagatgagtgcctgatgtgtggcagctag

SEQ ID NO: 168131 - DNA, 1170 bp, synthetic construct
  misc_feature 1..1170: note = Description of Artificial Sequence: Synthetic coding sequence
  source 1..1170: mol_type = other DNA
atgctgagcctgcgggtgcccctggcccccatcacagacccccagcagctgcagctgagccccctgaagggcctgagcctggtggacaaggagaacaccccaccagccctgagcggcaccagggtgctggccagcaagacagcccggcgcatcttccaggagcccacagagcccaagaccaaggctgctgcccctggggtggaggatgagcccctgctgcgggagaacccccggcgcttcgtcatcttccccatcgagtaccatgacatctggcagatgtacaagaaggccgaggccagcttctggacagctgaggaggtggacctgagcaaggacatccagcactgggagagcctgaagccagaggagcgctacttcatcagccacgtgctggccttctttgctgccagtgatggcatcgtgaatgaaaacctggtggagcgcttcagccaggaggtgcagatcacagaggcccgctgcttctacggcttccagatcgccatggagaacatccacagcgagatgtacagcctgctgattgacacctacatcaaggaccccaaggagcgggagttcctgttcaatgccatcgagaccatgccctgtgtgaagaagaaggctgactgggccctgcgctggattggagacaaggaggccacctatggagagcgggtggtggcctttgctgctgtggagggcatcttcttcagcggcagctttgccagcatcttctggctgaagaagaggggcctgatgcctggcctgaccttcagcaatgaactcatcagcagagatgagggcctgcactgtgactttgcctgcctgatgttcaagcacctggtgcacaagcccagcgaggagcgggtgcgggagatcatcatcaatgctgtgagaattgagcaggagttcctgacagaggccctgcctgtgaagctgattggcatgaactgcaccctgatgaagcagtacatcgagtttgtggccgaccggctgatgctggagctgggcttcagcaaggtgttccgggtggagaacccctttgacttcatggagaacatcagcctggagggcaagaccaacttctttgagaagagggtgggggagtaccagaggatgggcgtgatgagcagccccacagagaacagcttcaccctggatgctgacttctag

SEQ ID NO: 168132 - DNA, 1350 bp, synthetic construct
  misc_feature 1..1350: note = Description of Artificial Sequence: Synthetic coding sequence
  source 1..1350: mol_type = other DNA
atgggccgggtgggcggcatggcccagcccatgggccgggccggggcccccaagcccatgggccgggccggcagcgcccggcggggccgcttcaagggctgctggagcgagggcagccctgtgcaccctgtgcctgctgtgctgtcctggctgctggccctgctgcgctgtgccagcaccatgctgagcctgcgggtgcccctggcccccatcacagacccccagcagctgcagctgagccccctgaagggcctgagcctggtggacaaggagaacaccccaccagccctgagcggcaccagggtgctggccagcaagacagcccggcgcatcttccaggagcccacagagcccaagaccaaggctgctgcccctggggtggaggatgagcccctgctgcgggagaacccccggcgcttcgtcatcttccccatcgagtaccatgacatctggcagatgtacaagaaggccgaggccagcttctggacagctgaggaggtggacctgagcaaggacatccagcactgggagagcctgaagccagaggagcgctacttcatcagccacgtgctggccttctttgctgccagtgatggcatcgtgaatgaaaacctggtggagcgcttcagccaggaggtgcagatcacagaggcccgctgcttctacggcttccagatcgccatggagaacatccacagcgagatgtacagcctgctgattgacacctacatcaaggaccccaaggagcgggagttcctgttcaatgccatcgagaccatgccctgtgtgaagaagaaggctgactgggccctgcgctggattggagacaaggaggccacctatggagagcgggtggtggcctttgctgctgtggagggcatcttcttcagcggcagctttgccagcatcttctggctgaagaagaggggcctgatgcctggcctgaccttcagcaatgaactcatcagcagagatgagggcctgcactgtgactttgcctgcctgatgttcaagcacctggtgcacaagcccagcgaggagcgggtgcgggagatcatcatcaatgctgtgagaattgagcaggagttcctgacagaggccctgcctgtgaagctgattggcatgaactgcaccctgatgaagcagtacatcgagtttgtggccgaccggctgatgctggagctgggcttcagcaaggtgttccgggtggagaacccctttgacttcatggagaacatcagcctggagggcaagaccaacttctttgagaagagggtgggggagtaccagaggatgggcgtgatgagcagccccacagagaacagcttcaccctggatgctgacttctag

SEQ ID NO: 168133 - DNA, 1056 bp, synthetic construct
  misc_feature 1..1056: note = Description of Artificial Sequence: Synthetic coding sequence
  source 1..1056: mol_type = other DNA
atgggagaccctgagaggcctgaggccgccggcctggaccaggatgagaggagcagcagtgacaccaatgaaagtgagatcaagagcaatgaggagcccctgctgaggaagagcagccgccgcttcgtcatcttccccatccagtacccagacatctggaagatgtacaagcaggcccaggccagcttctggacagctgaggaggtggacctgagcaaggacctgccccactggaacaagctgaaggcagatgagaagtacttcatcagccacatcctggccttctttgctgccagtgatggcatcgtgaatgaaaacctggtggagcgcttcagccaggaggtgcaggtgcctgaggcccgctgcttctacggcttccagatcctgattgaaaatgtgcacagcgagatgtacagcctgctgattgacacctacatccgggaccccaagaagcgggagttcctgttcaatgccatcgagaccatgccctacgtgaagaagaaggctgactgggccctgcgctggattgctgacaggaagagcacctttggagagcgggtggtggcctttgctgctgtggagggcgtcttcttcagcggcagctttgctgccatcttctggctgaagaagaggggcctgatgcctggcctgaccttcagcaatgaactcatcagcagagatgagggcctgcactgtgactttgcctgcctgatgttccagtacctggtgaacaagcccagcgaggagcgggtgcgggagatcatcgtggatgctgtgaagattgagcaggagttcctgacagaggccctgcctgtgggcctgattggcatgaactgcatcctgatgaagcagtacatcgagtttgtggccgaccggctgctggtggagctgggcttcagcaaggtgttccaggccgagaacccctttgacttcatggagaacatcagcctggagggcaagaccaacttctttgagaagagggtgtctgagtaccagagatttgctgtgatggccgagaccacagacaacgtgttcaccctggatgctgacttctag

SEQ ID NO: 168134 - DNA, 900 bp, synthetic construct
  misc_feature 1..900: note = Description of Artificial Sequence: Synthetic coding sequence
  source 1..900: mol_type = other DNA
atgggagaccctgagaggcctgaggccgccggcctggaccaggatgaggtggacctgagcaaggacctgccccactggaacaagctgaaggcagatgagaagtacttcatcagccacatcctggccttctttgctgccagtgatggcatcgtgaatgaaaacctggtggagcgcttcagccaggaggtgcaggtgcctgaggcccgctgcttctacggcttccagatcctgattgaaaatgtgcacagcgagatgtacagcctgctgattgacacctacatccgggaccccaagaagcgggagttcctgttcaatgccatcgagaccatgccctacgtgaagaagaaggctgactgggccctgcgctggattgctgacaggaagagcacctttggagagcgggtggtggcctttgctgctgtggagggcgtcttcttcagcggcagctttgctgccatcttctggctgaagaagaggggcctgatgcctggcctgaccttcagcaatgaactcatcagcagagatgagggcctgcactgtgactttgcctgcctgatgttccagtacctggtgaacaagcccagcgaggagcgggtgcgggagatcatcgtggatgctgtgaagattgagcaggagttcctgacagaggccctgcctgtgggcctgattggcatgaactgcatcctgatgaagcagtacatcgagtttgtggccgaccggctgctggtggagctgggcttcagcaaggtgttccaggccgagaacccctttgacttcatggagaacatcagcctggagggcaagaccaacttctttgagaagagggtgtctgagtaccagagatttgctgtgatggccgagaccacagacaacgtgttcaccctggatgctgacttctag

SEQ ID NO: 168135 - DNA, 420 bp, synthetic construct
  misc_feature 1..420: note = Description of Artificial Sequence: Synthetic coding sequence
  source 1..420: mol_type = other DNA
atgggagaccctgagaggcctgaggccgccggcctggaccaggatgagggcctgcactgtgactttgcctgcctgatgttccagtacctggtgaacaagcccagcgaggagcgggtgcgggagatcatcgtggatgctgtgaagattgagcaggagttcctgacagaggccctgcctgtgggcctgattggcatgaactgcatcctgatgaagcagtacatcgagtttgtggccgaccggctgctggtggagctgggcttcagcaaggtgttccaggccgagaacccctttgacttcatggagaacatcagcctggagggcaagaccaacttctttgagaagagggtgtctgagtaccagagatttgctgtgatggccgagaccacagacaacgtgttcaccctggatgctgacttctag

SEQ ID NO: 168136 - DNA, 201 bp, synthetic construct
  misc_feature 1..201: note = Description of Artificial Sequence: Synthetic coding sequence
  source 1..201: mol_type = other DNA
atgggagaccctgagaggcctgaggccgccggcctggaccaggatgaggtgttccaggccgagaacccctttgacttcatggagaacatcagcctggagggcaagaccaacttctttgagaagagggtgtctgagtaccagagatttgctgtgatggccgagaccacagacaacgtgttcaccctggatgctgacttctag

SEQ ID NO: 168137 - DNA, 132 bp, synthetic construct
  misc_feature 1..132: note = Description of Artificial Sequence: Synthetic coding sequence
  source 1..132: mol_type = other DNA
atgggagaccctgagaggcctgaggccgccggcctggaccaggatgagaggagcagcagtgacaccaatgaaagtgagatcaagagcaatgaggagcccctgctgaggaagagcagccgccgctccttctag

SEQ ID NO: 168138 - DNA, 894 bp, synthetic construct
  misc_feature 1..894: note = Description of Artificial Sequence: Synthetic coding sequence
  source 1..894: mol_type = other DNA
atgtacaagcaggcccaggccagcttctggacagctgaggaggtggacctgagcaaggacctgccccactggaacaagctgaaggcagatgagaagtacttcatcagccacatcctggccttctttgctgccagtgatggcatcgtgaatgaaaacctggtggagcgcttcagccaggaggtgcaggtgcctgaggcccgctgcttctacggcttccagatcctgattgaaaatgtgcacagcgagatgtacagcctgctgattgacacctacatccgggaccccaagaagcgggagttcctgttcaatgccatcgagaccatgccctacgtgaagaagaaggctgactgggccctgcgctggattgctgacaggaagagcacctttggagagcgggtggtggcctttgctgctgtggagggcgtcttcttcagcggcagctttgctgccatcttctggctgaagaagaggggcctgatgcctggcctgaccttcagcaatgaactcatcagcagagatgagggcctgcactgtgactttgcctgcctgatgttccagtacctggtgaacaagcccagcgaggagcgggtgcgggagatcatcgtggatgctgtgaagattgagcaggagttcctgacagaggccctgcctgtgggcctgattggcatgaactgcatcctgatgaagcagtacatcgagtttgtggccgaccggctgctggtggagctgggcttcagcaaggtgttccaggccgagaacccctttgacttcatggagaacatcagcctggagggcaagaccaacttctttgagaagagggtgtctgagtaccagagatttgctgtgatggccgagaccacagacaacgtgttcaccctggatgctgacttctag

SEQ ID NO: 168139 - DNA, 1824 bp, synthetic construct
  misc_feature 1..1824: note = Description of Artificial Sequence: Synthetic coding sequence
  source 1..1824: mol_type = other DNA
atggaggccccagctgctggcctcttcctgctgctgctgctgggcacctgggccccagcccctggcagcgccagcagcgaggcccctcctctcatcaatgaagatgtgaagaggacagtggacctgagcagccacctggccaaggtgacagctgaggtggtgctggcccacctgggcggcggcagcaccagccgggccaccagcttcctgctggccctggagcctgagctggaggcccggctggcccacctgggcgtgcaggtgaagggagaagatgaggaggagaacaacctggaggtgcgggagaccaagatcaagggcaagagcggccgcttcttcaccgtgaagctgcctgtggccctggaccccggggccaagatcagcgtcatcgtggagaccgtgtacacccacgtgctgcacccctaccccacccagatcacccagagcgagaagcagtttgtggtgtttgagggcaaccactacttctacagcccctaccccaccaagacccagaccatgagggtgaagctggccagcagaaatgtggagagctacaccaagctgggcaaccccaccaggtctgaggacctgctggactatggccccttcagagatgtgcctgcctacagccaggacaccttcaaggtgcactatgagaacaacagccccttcctgaccatcacctccatgaccagggtcatcgaggtgagccactggggcaacattgctgtggaggagaatgtggacctgaagcacactggagctgtgctgaagggccccttcagccgctatgactaccagaggcagcctgacagcggcatcagcagcatccgctccttcaagaccatcctgcctgctgctgcccaggatgtgtactacagagatgaaattggaaatgtgtccaccagccacctgctgatcctggatgattctgtggagatggagatccggccccgcttccccctgtttggaggctggaagacccactacatcgtgggctacaacctgcccagctatgagtacctgtacaacctgggggaccagtatgccctgaagatgagatttgtggaccacgtgtttgatgagcaggtgattgacagcctgactgtgaagatcatcctgcctgagggcgccaagaacattgaaattgacagcccctatgagatcagccgggccccagatgagctgcactacacctacctggacaccttcggccggcctgtgattgtggcctacaagaagaacctggtggagcagcacatccaggacatcgtggtgcactacaccttcaacaaggtgctgatgctgcaggagcccctgctggtggtggccgccttctacatcctcttcttcaccgtcatcatctacgtgcggctggacttcagcatcaccaaggaccctgctgctgaggccaggatgaaggtggcctgcatcacagagcaggtgctgaccctggtgaacaagagaattggcctgtaccgccactttgatgaaacagtgaaccgctacaagcagagccgggacatcagcaccctgaacagcggcaagaagagcctggagacagagcacaaggccctgaccagcgagatcgccctgctgcagagccggctgaagacagagggcagtgacctgtgtgacagagtgtctgagatgcagaagctggatgcccaggtgaaggagctggtgctgaagtctgctgtggaggccgagcggctggtggccggcaagctgaagaaggacacctacattgaaaatgagaagctgatcagcggcaagaggcaggagctggtgaccaagattgaccacatcctggatgccctgtag

SEQ ID NO: 168140 - DNA, 1308 bp, synthetic construct
  misc_feature 1..1308: note = Description of Artificial Sequence: Synthetic coding sequence
  source 1..1308: mol_type = other DNA
atgagggtgaagctggccagcagaaatgtggagagctacaccaagctgggcaaccccaccaggtctgaggacctgctggactatggccccttcagagatgtgcctgcctacagccaggacaccttcaaggtgcactatgagaacaacagccccttcctgaccatcacctccatgaccagggtcatcgaggtgagccactggggcaacattgctgtggaggagaatgtggacctgaagcacactggagctgtgctgaagggccccttcagccgctatgactaccagaggcagcctgacagcggcatcagcagcatccgctccttcaagaccatcctgcctgctgctgcccaggatgtgtactacagagatgaaattggaaatgtgtccaccagccacctgctgatcctggatgattctgtggagatggagatccggccccgcttccccctgtttggaggctggaagacccactacatcgtgggctacaacctgcccagctatgagtacctgtacaacctgggggaccagtatgccctgaagatgagatttgtggaccacgtgtttgatgagcaggtgattgacagcctgactgtgaagatcatcctgcctgagggcgccaagaacattgaaattgacagcccctatgagatcagccgggccccagatgagctgcactacacctacctggacaccttcggccggcctgtgattgtggcctacaagaagaacctggtggagcagcacatccaggacatcgtggtgcactacaccttcaacaaggtgctgatgctgcaggagcccctgctggtggtggccgccttctacatcctcttcttcaccgtcatcatctacgtgcggctggacttcagcatcaccaaggaccctgctgctgaggccaggatgaaggtggcctgcatcacagagcaggtgctgaccctggtgaacaagagaattggcctgtaccgccactttgatgaaacagtgaaccgctacaagcagagccgggacatcagcaccctgaacagcggcaagaagagcctggagacagagcacaaggccctgaccagcgagatcgccctgctgcagagccggctgaagacagagggcagtgacctgtgtgacagagtgtctgagatgcagaagctggatgcccaggtgaaggagctggtgctgaagtctgctgtggaggccgagcggctggtggccggcaagctgaagaaggacacctacattgaaaatgagaagctgatcagcggcaagaggcaggagctggtgaccaagattgaccacatcctggatgccctgtag

SEQ ID NO: 168141 - DNA, 1137 bp, synthetic construct
  misc_feature 1..1137: note = Description of Artificial Sequence: Synthetic coding sequence
  source 1..1137: mol_type = other DNA
atgaccagggtgattgaggtgagccactggggcaacattgctgtggaggagaatgtggacctgaagcacactggagctgtgctgaagggccccttcagccgctatgactaccagaggcagccagattctggcatcagcagcatccgctccttcaagaccatcctgcctgctgctgcccaggatgtgtactacagagatgaaattggaaatgtgtccaccagccacctgctgatcctggatgacagcgtggagatggagatccggccccgcttccccctgtttggaggctggaagacccactacatcgtgggctacaacctgcccagctatgagtacctgtacaacctgggggaccagtatgccctgaagatgagatttgtggaccacgtgtttgatgagcaggtgattgacagcctgactgtgaagatcatcctgcctgagggcgccaagaacatcgagattgacagcccctatgagatcagccgggccccagatgagctgcactacacctacctggacaccttcggccggcctgtgattgtggcctacaagaagaacctggtggagcagcacatccaggacatcgtggtgcactacaccttcaacaaggtgctgatgctgcaggagcccctgctggtggtggccgccttctacatcctcttcttcaccgtcatcatctacgtgcggctggacttcagcatcaccaaggaccctgctgctgaggccaggatgaaggtggcctgcatcacagagcaggtgctgaccctggtgaacaagagaattggcctgtaccgccactttgatgagaccgtgaaccgctacaagcagagccgggacatcagcaccctgaacagcggcaagaagagcctggagacagagcacaaggccctgaccagcgagatcgccctgctgcagagccggctgaagacagagggcagtgacctgtgtgacagagtgtctgagatgcagaagctggatgcccaggtgaaggagctggtgctgaagtctgctgtggaggccgagcggctggtggccggcaagctgaagaaggacacctacattgaaaatgagaagctgatcagcggcaagaggcaggagctggtgaccaagattgaccacatcctggatgccctgtag

SEQ ID NO: 168142 - DNA, 1746 bp, synthetic construct
  misc_feature 1..1746: note = Description of Artificial Sequence: Synthetic coding sequence
  source 1..1746: mol_type = other DNA
atggaggccccagctgctggcctcttcctgctgctgctgctgggcacctgggccccagcccctggcagcgccagcagcgaggcccctcctctcatcaatgaagatgtgaagaggacagtggacctgagcagccacctggccaaggtgacagctgaggtggtgctggcccacctgggcgtgcaggtgaagggagaagatgaggaggagaacaacctggaggtgcgggagaccaagatcaagggcaagagcggccgcttcttcaccgtgaagctgcctgtggccctggaccccggggccaagatcagcgtcatcgtggagaccgtgtacacccacgtgctgcacccctaccccacccagatcacccagagcgagaagcagtttgtggtgtttgagggcaaccactacttctacagcccctaccccaccaagacccagaccatgagggtgaagctggccagcagaaatgtggagagctacaccaagctgggcaaccccaccaggtctgaggacctgctggactatggccccttcagagatgtgcctgcctacagccaggacaccttcaaggtgcactatgagaacaacagccccttcctgaccatcacctccatgaccagggtcatcgaggtgagccactggggcaacattgctgtggaggagaatgtggacctgaagcacactggagctgtgctgaagggccccttcagccgctatgactaccagaggcagcctgacagcggcatcagcagcatccgctccttcaagaccatcctgcctgctgctgcccaggatgtgtactacagagatgaaattggaaatgtgtccaccagccacctgctgatcctggatgattctgtggagatggagatccggccccgcttccccctgtttggaggctggaagacccactacatcgtgggctacaacctgcccagctatgagtacctgtacaacctgggggaccagtatgccctgaagatgagatttgtggaccacgtgtttgatgagcaggtgattgacagcctgactgtgaagatcatcctgcctgagggcgccaagaacattgaaattgacagcccctatgagatcagccgggccccagatgagctgcactacacctacctggacaccttcggccggcctgtgattgtggcctacaagaagaacctggtggagcagcacatccaggacatcgtggtgcactacaccttcaacaaggtgctgatgctgcaggagcccctgctggtggtggccgccttctacatcctcttcttcaccgtcatcatctacgtgcggctggacttcagcatcaccaaggaccctgctgctgaggccaggatgaaggtggcctgcatcacagagcaggtgctgaccctggtgaacaagagaattggcctgtaccgccactttgatgaaacagtgaaccgctacaagcagagccgggacatcagcaccctgaacagcggcaagaagagcctggagacagagcacaaggccctgaccagcgagatcgccctgctgcagagccggctgaagacagagggcagtgacctgtgtgacagagtgtctgagatgcagaagctggatgcccaggtgaaggagctggtgctgaagtctgctgtggaggccgagcggctggtggccggcaagctgaagaaggacacctacattgaaaatgagaagctgatcagcggcaagaggcaggagctggtgaccaagattgaccacatcctggatgccctgtag

SEQ ID NO: 168143 - DNA, 1896 bp, synthetic construct
  misc_feature 1..1896: note = Description of Artificial Sequence: Synthetic coding sequence
  source 1..1896: mol_type = other DNA
atggcccctcctggcagcagcaccgtcttcctgctggccctgaccatcatcgccagcacctgggccctgacccccacccactacctgaccaagcatgatgtggagcggctgaaggccagcctggaccggcccttcaccaacctggagagcgccttctacagcatcgtgggcctgagcagcctgggcgcccaggtgcctgatgccaagaaggcctgcacctacatccgcagcaacctggaccccagcaatgtggacagcctcttctacgccgcccaggccagccaggccctgagcggctgtgagatcagcatcagcaatgagaccaaggacctgctgctggccgctgtgtctgaggacagctctgtgacccagatctaccacgctgtggccgccctgagcggcttcggcctgcccctggccagccaggaggccctgagcgccctgacagcccggctgagcaaggaggagaccgtgctggccaccgtgcaggccctgcagacagccagccacctgagccagcaggccgacctgcggagcatcgtggaggagattgaggacctggtggcccggctggatgagctgggcggcgtgtacctgcagtttgaggagggcctggagaccacagccctgtttgtggccgccacctacaagctgatggaccacgtgggcacagagcccagcatcaaggaggaccaggtgatccagctgatgaatgccatcttcagcaagaagaactttgagagcctgtctgaggccttctctgtggccagcgctgctgctgtgctgagccacaaccgctaccacgtgcctgtggtggtggtgcctgagggcagcgccagtgacacccatgagcaggccatcctgcggctgcaggtgaccaacgtgctgagccagcccctgacccaggccaccgtgaagctggagcacgccaagtctgtggccagccgggccaccgtgctgcagaagaccagcttcacccctgtgggagatgtgtttgagctgaacttcatgaatgtgaagttcagcagcggctactatgacttcctggtggaggtggagggggacaaccgctacatcgccaacacagtggagctgcgggtgaagatcagcacagaggtgggcatcaccaacgtggacctgagcacagtggacaaggaccagagcatcgcccccaagaccaccagggtgacctacccagccaaggccaagggcaccttcatcgctgacagccaccagaactttgccctcttcttccagctggtggatgtgaacacaggagctgagctgaccccccaccagacctttgtgcggctgcacaaccagaagacaggccaggaggtggtgtttgtggccgagccagacaacaagaatgtgtacaagtttgagctggacaccagcgagaggaagattgaatttgacagcgccagcggcacctacaccctgtacctgatcattggagatgccaccctgaagaaccccatcctgtggaatgtggctgatgtggtgatcaagtttcctgaggaggaggcccccagcacagtgctgagccagaacctcttcacccccaagcaggagatccagcacctgttccgggagcctgagaagaggcccccaacagtggtgagcaacaccttcaccgccctgatcctgagccccctgctgctgctgtttgccctgtggatcagaattggagccaacgtgagcaacttcacctttgcccccagcaccatcatcttccacctgggccacgccgccatgctgggcctgatgtatgtgtactggacccagctgaacatgttccagaccctgaagtacctggccatcctgggctctgtgaccttcctggccggcaacaggatgctggcccagcaggccgtgaagaggacagcccactag

SEQ ID NO: 168144 - DNA, 1038 bp, synthetic construct
  misc_feature 1..1038: note = Description of Artificial Sequence: Synthetic coding sequence
  source 1..1038: mol_type = other DNA
gtgagcccccagggcagcagcaccgtcttcctgctggccctgaccatcatcgccagcacctgggccctgacccccacccactacctgaccaagcatgatgtggagcggctgaaggccagcctggaccggcccttcaccaacctggagagcgccttctacagcatcgtgggcctgagcagcctgggcgcccaggtgcctgatgccaagaaggcctgcacctacatccgcagcaacctggaccccagcaatgtggacagcctcttctacgccgcccaggccagccaggccctgagcggctgtgagatcagcatcagcaatgagaccaaggacctgctgctggccgctgtgtctgaggacagctctgtgacccagatctaccacgctgtggccgccctgagcggcttcggcctgcccctggccagccaggaggccctgagcgccctgacagcccggctgagcaaggaggagaccgtgctggcccgggtgtggagcacagtgctggagagccgcagcctcttcagcaagaggacagtgcaggccctgcagacagccagccacctgagccagcaggccgacctgcggagcatcgtggaggagattgaggacctggtggcccggctggatgagctgggcggcgtgtacctgcagtttgaggagggcctggagaccacagccctgtttgtggccgccacctacaagctgatggaccacgtgggcacagagcccagcatcaaggaggaccaggtgatccagctgatgaatgccatcttcagcaagaagaactttgagagcctgtctgaggccttctctgtggccagcgctgctgctgtgctgagccacaaccgctaccacgtgcctgtggtggtggtgcctgagggcagcgccagtgacacccatgagcaggccatcctgcggctgcaggtgaccaacgtgctgagccagcccctgacccaggccaccgtgaagctggagcacgccaagtctgtggccagccgggccaccgtgctgcagaagaccagcttcacccctgtgggctag

SEQ ID NO: 168145 - DNA, 1848 bp, synthetic construct
  misc_feature 1..1848: note = Description of Artificial Sequence: Synthetic coding sequence
  source 1..1848: mol_type = other DNA
atggcccctcctggcagcagcaccgtcttcctgctggccctgaccatcatcgccagcacctgggccctgacccccacccactacctgaccaagcatgatgtggagcggctgaaggccagcctggaccggcccttcaccaacctggagagcgccttctacagcatcgtgggcctgagcagcctgggcgcccaggtgcctgatgccaagatcagcatcagcaatgagaccaaggacctgctgctggccgctgtgtctgaggacagctctgtgacccagatctaccacgctgtggccgccctgagcggcttcggcctgcccctggccagccaggaggccctgagcgccctgacagcccggctgagcaaggaggagaccgtgctggccaccgtgcaggccctgcagacagccagccacctgagccagcaggccgacctgcggagcatcgtggaggagattgaggacctggtggcccggctggatgagctgggcggcgtgtacctgcagtttgaggagggcctggagaccacagccctgtttgtggccgccacctacaagctgatggaccacgtgggcacagagcccagcatcaaggaggaccaggtgatccagctgatgaatgccatcttcagcaagaagaactttgagagcctgtctgaggccttctctgtggccagcgctgctgctgtgctgagccacaaccgctaccacgtgcctgtggtggtggtgcctgagggcagcgccagtgacacccatgagcaggccatcctgcggctgcaggtgaccaacgtgctgagccagcccctgacccaggccaccgtgaagctggagcacgccaagtctgtggccagccgggccaccgtgctgcagaagaccagcttcacccctgtgggagatgtgtttgagctgaacttcatgaatgtgaagttcagcagcggctactatgacttcctggtggaggtggagggggacaaccgctacatcgccaacacagtggagctgcgggtgaagatcagcacagaggtgggcatcaccaacgtggacctgagcacagtggacaaggaccagagcatcgcccccaagaccaccagggtgacctacccagccaaggccaagggcaccttcatcgctgacagccaccagaactttgccctcttcttccagctggtggatgtgaacacaggagctgagctgaccccccaccagacctttgtgcggctgcacaaccagaagacaggccaggaggtggtgtttgtggccgagccagacaacaagaatgtgtacaagtttgagctggacaccagcgagaggaagattgaatttgacagcgccagcggcacctacaccctgtacctgatcattggagatgccaccctgaagaaccccatcctgtggaatgtggctgatgtggtgatcaagtttcctgaggaggaggcccccagcacagtgctgagccagaacctcttcacccccaagcaggagatccagcacctgttccgggagcctgagaagaggcccccaacagtggtgagcaacaccttcaccgccctgatcctgagccccctgctgctgctgtttgccctgtggatcagaattggagccaacgtgagcaacttcacctttgcccccagcaccatcatcttccacctgggccacgccgccatgctgggcctgatgtatgtgtactggacccagctgaacatgttccagaccctgaagtacctggccatcctgggctctgtgaccttcctggccggcaacaggatgctggcccagcaggccgtgaagagaattgctgctgagcagagcagccggctggccaagtaccgcaccctgaggacagcccactag

SEQ ID NO: 168146 - DNA, 441 bp, synthetic construct
  misc_feature 1..441: note = Description of Artificial Sequence: Synthetic coding sequence
  source 1..441: mol_type = other DNA
ggcacctacaccctgtacctgatcattggagatgccaccctgaagaaccccatcctgtggaatgtggctgatgtggtgatcaagtttcctgaggaggaggcccccagcacagtgctgagccagaacctcttcacccccaagcaggagatccagcacctgttccgggagcctgagaagaggcccccaacagtggtgagcaacaccttcaccgccctgatcctgagccccctgctgctgctgtttgccctgtggatcagaattggagccaacgtgagcaacttcacctttgcccccagcaccatcatcttccacctgggccacgccgagcagcacatcagcagcaggaggaagatggagatcctgaagacagagtgccaggagaaggagagcaggaccatccacagcatgaggaggaagatggagaagaagaacttcatctag

SEQ ID NO: 168147 - DNA, 1038 bp, synthetic construct
  misc_feature 1..1038: note = Description of Artificial Sequence: Synthetic coding sequence
  source 1..1038: mol_type = other DNA
atggcccctcctggcagcagcaccgtcttcctgctggccctgaccatcatcgccagcacctgggccctgacccccacccactacctgaccaagcatgatgtggagcggctgaaggccagcctggaccggcccttcaccaacctggagagcgccttctacagcatcgtgggcctgagcagcctgggcgcccaggtgcctgatgccaagaaggcctgcacctacatccgcagcaacctggaccccagcaatgtggacagcctcttctacgccgcccaggccagccaggccctgagcggctgtgagatcagcatcagcaatgagaccaaggacctgctgctggccgctgtgtctgaggacagctctgtgacccagatctaccacgctgtggccgccctgagcggcttcggcctgcccctggccagccaggaggccctgagcgccctgacagcccggctgagcaaggaggagaccgtgctggcccgggtgtggagcacagtgctggagagccgcagcctcttcagcaagaggacagtgcaggccctgcagacagccagccacctgagccagcaggccgacctgcggagcatcgtggaggagattgaggacctggtggcccggctggatgagctgggcggcgtgtacctgcagtttgaggagggcctggagaccacagccctgtttgtggccgccacctacaagctgatggaccacgtgggcacagagcccagcatcaaggaggaccaggtgatccagctgatgaatgccatcttcagcaagaagaactttgagagcctgtctgaggccttctctgtggccagcgctgctgctgtgctgagccacaaccgctaccacgtgcctgtggtggtggtgcctgagggcagcgccagtgacacccatgagcaggccatcctgcggctgcaggtgaccaacgtgctgagccagcccctgacccaggccaccgtgaagctggagcacgccaagtctgtggccagccgggccaccgtgctgcagaagaccagcttcacccctgtgggctag

SEQ ID NO: 168148 - DNA, 417 bp, synthetic construct
  misc_feature 1..417: note = Description of Artificial Sequence: Synthetic coding sequence
  source 1..417: mol_type = other DNA
gagctggacaccagcgagaggaagattgaatttgattctgccagcggcacctacaccctgtacctgatcattggagatgccaccctgaagaaccccatcctgtggaatgtggctgatgtggtgatcaagtttcctgaggaggaggcccccagcacagtgctgagccagaacctcttcacccccaagcaggagatccagtggatccgcatcggggccaacgtgagcaacttcacctttgcccccagcaccatcatcttccacctgggccatgctgccatgctgggcctgatgtatgtgtactggacccagctgaacatgttccagaccctgaagtacctggccatcctgggctctgtgaccttcctggccggcaacaggatgctggcccagcaggccgtgaagaggacagctgagtag

SEQ ID NO: 168149 - DNA, 417 bp, synthetic construct
  misc_feature 1..417: note = Description of Artificial Sequence: Synthetic coding sequence
  source 1..417: mol_type = other DNA
gagctggacaccagcgagaggaagattgaatttgattctgccagcggcacctacaccctgtacctgatcattggagatgccaccctgaagaaccccatcctgtggaatgtggctgatgtggtgatcaagtttcctgaggaggaggcccccagcacagtgctgagccagaacctcttcacccccaagcaggagatccagtggatccgcatcggggccaacgtgagcaacttcacctttgcccccagcaccatcatcttccacctgggccatgctgccatgctgggcctgatgtatgtgtactggacccagctgaacatgttccagaccctgaagtacctggccatcctgggctctgtgaccttcctggccggcaacaggatgctggcccagcaggccgtgaagaggacagcccactag

SEQ ID NO: 168150 - DNA, 504 bp, synthetic construct
  misc_feature 1..504: note = Description of Artificial Sequence: Synthetic coding sequence
  source 1..504: mol_type = other DNA
atgcagaggacagtgcaggccctgcagacagccagccacctgagccagcaggccgacctgcggagcatcgtggaggagattgaggacctggtggcccggctggatgagctgggcggcgtgtacctgcagtttgaggagggcctggagaccacagccctgtttgtggccgccacctacaagctgatggaccacgtgggcacagagcccagcatcaaggaggaccaggtgatccagctgatgaatgccatcttcagcaagaagaactttgagagcctgtctgaggccttctctgtggccagcgctgctgctgtgctgagccacaaccgctaccacgtgcctgtggtggtggtgcctgagggcagcgccagtgacacccatgagcaggccatcctgcggctgcaggtgaccaacgtgctgagccagcccctgacccaggccaccgtgaagctggagcacgccaagtctgtggccagccgggccaccgtgctgcagaagaccagctag

SEQ ID NO: 168151 - DNA, 444 bp, synthetic construct
  misc_feature 1..444: note = Description of Artificial Sequence: Synthetic coding sequence
  source 1..444: mol_type = other DNA
tgaggaacctacaccctgtacctgatcattggagatgccaccctgaagaaccccatcctgtggaatgtggctgatgtggtgatcaagtttcctgaggaggaggcccccagcacagtgctgagccagaacctcttcacccccaagcaggagatccagcacctgttccgggagcctgagaagaggcctcccaccgtggtgagcaacaccttcaccgccctgatcctgagccccctgctgctgctgtttgccctgtggatccgcatcggggccaacgtgagcaacttcacctttgcccccagcaccatcatcttccacctgggccatgctgagcagcacatcagcagcaggaggaagatggagatcctgaagacagagtgccaggagaaggagagcaggaccatccacagcatgaggaggaagatggagaagaagaacttcatctag

SEQ ID NO: 168152 - DNA, 936 bp, synthetic construct
  misc_feature 1..936: note = Description of Artificial Sequence: Synthetic coding sequence
  source 1..936: mol_type = other DNA
atgcagaggcctggccccttcagcaccctgtatggccgggtgctggcccccctgcccggccgggccggcggggccgccagcggcggcggcggcaacagctgggacctgcccggcagccacgtgcggctgcccggccgggcccagagcggcacccggggcggggccggcaacaccagcaccagctgtggggacagcaacagcatctgcccagcccccagcaccatgagcaaggccgaggaggccaagaagctggccggccgggctgctgtggagaaccacgtgaggaacaaccaggtgctgggcatcggcagcggcagcaccatcgtgcatgctgtgcagagaattgctgagcgggtgaagcaggagaacctgaacctggtgtgcatccccaccagcttccaggcccggcagctgatcctgcagtatggcctgaccctgagtgacctggacagacaccctgagattgacctggccattgatggagcagatgaggtggatgctgacctgaacctgatcaagggcggcggcggctgcctgacccaggagaagatcgtggccggctacgccagccgcttcatcgtgattgctgacttcaggaaggacagcaagaacctgggggaccagtggcacaagggcatccccattgaagtcatccccatggcctacgtgcctgtgtccagagctgtgtcccagaagtttggaggagtggtggagctgaggatggctgtgaacaaggccggccctgtggtgacagacaatggaaacttcatcctggactggaagtttgacagagtgcacaagtggagcgaggtgaacacagccatcaagatgatccctggggtggtggacaccggcctcttcatcaacatggccgagcgggtgtacttcggcatgcaggacggctctgtgaacatgagggagaagcccttctgctag

SEQ ID NO: 168153 - DNA, 534 bp, synthetic construct
  misc_feature 1..534: note = Description of Artificial Sequence: Synthetic coding sequence
  source 1..534: mol_type = other DNA
gcccggcagctgatcctgcagtatggcctgaccctgagtgacctggacagacaccctgagattgacctggccattgatggagcagatgaggtggatgctgacctgaacctgatcaagggcggcggcggctgcctgacccaggagaagatcgtggccggctacgccagccgcttcatcgtgattgctgacttcaggaaggacagcaagaacctgggggaccagtggcacaagggcatccccattgaagtcatccccatggcctacgtgcctgtgtccagagctgtgtcccagaagtttggaggagtggtggagctgaggatggctgtgaacaaggccggccctgtggtgacagacaatggaaacttcatcctggactggaagtttgacagagtgcacaagtggagcgaggtgaacacagccatcaagatgatccctggggtggtggacaccggcctcttcatcaacatggccgagcgggtgtacttcggcatgcaggacggctctgtgaacatgagggagaagcccttctgctag

SEQ ID NO: 168154 - DNA, 492 bp, synthetic construct
  misc_feature 1..492: note = Description of Artificial Sequence: Synthetic coding sequence
  source 1..492: mol_type = other DNA
atgagaattgagaagtgctacttctgcagcggccccatctacccaggccacggcatgatgtttgtgagaaatgactgcaaggtgttccgcttctgcaagagcaagtgccacaagaacttcaagaagaagaggaaccccaggaaggtgcgctggaccaaggccttcaggaaggctgctgggaaggagctgactgtggacaacagctttgaatttgagaagagaagaaatgagcccatcaagtaccagcgggagctgtggaacaagaccattgatgccatgaagagggtggaggagatcaagcagaagaggcaggccaagttcatcatgaaccggctgaagaagaacaaggagctgcagaaggtgcaggacatcaaggaggtgaagcagaacatccacctgatccgggcccccctggccggcaagggcaagcagctggaggagaagatggtgcagcagctgcaggaggatgtggacatggaggatgccccctag

SEQ ID NO: 168155 - DNA, 1161 bp, synthetic construct
  misc_feature 1..1161: note = Description of Artificial Sequence: Synthetic coding sequence
  source 1..1161: mol_type = other DNA
atgtgcagctctgtggccgccaagctgtggttcctgacagaccggcgcatccgggaggactacccccagaaggagatcctgcgggccctgaaggccaagtgctgtgaggaggagctggacttccgggctgtggtgatggatgaggtggtgctgaccatcgagcagggcaacctgggcctgcgcatcaatggagagctgatcacagcctacccccaggtggtggtggtgcgggtgcccaccccctgggtgcagagcgacagcgacatcaccgtgctgcggcacctggagaagatgggctgccgcctgatgaaccggccccaggccatcctgaactgtgtgaacaagttctggaccttccaggagctggccggccatggagtgcccctgcctgacaccttctcctatggaggccatgaaaattttgccaagatgattgatgaggccgaggtgctggagttccccatggtggtgaagaacacccggggccaccggggcaaggctgtgttcctggcccgggacaagcaccacctggccgacctgagccacctgatcagacatgaggccccctacctgttccagaagtatgtgaaggagagccacggcagagatgtgcgggtgattgtggtgggcggccgggtggtgggcaccatgctgcgctgcagcacagatggccgcatgcagagcaactgcagcctgggcggcgtgggcatgatgtgcagcctgtctgagcagggcaagcagctggccatccaggtgagcaacatcctgggcatggatgtgtgtggcatcgacctgctgatgaaggatgatggcagcttctgtgtgtgtgaggccaatgccaacgtgggcttcatcgcctttgacaaggcctgcaacctggatgtggccggcatcatcgctgactatgctgccagcctgctgcccagcggccgcctgaccaggaggatgagcctgctgtctgtggtgtccacagccagcgagaccagcgagcctgagctgggccccccagccagcacagctgtggacaacatgtctgccagcagcagctctgtggacagcgaccctgagagcacagagcgggagctgctgaccaagctgcccggcggcctcttcaacatgaaccagctgctggccaatgagatcaagctgctggtggactag

SEQ ID NO: 168156 - DNA, 1161 bp, synthetic construct; identical to SEQ ID NO: 168155
  misc_feature 1..1161: note = Description of Artificial Sequence: Synthetic coding sequence
  source 1..1161: mol_type = other DNA

SEQ ID NO: 168157 - DNA, 1161 bp, synthetic construct; identical to SEQ ID NO: 168155
  misc_feature 1..1161: note = Description of Artificial Sequence: Synthetic coding sequence
  source 1..1161: mol_type = other DNA

SEQ ID NO: 168158 - DNA, 288 bp, synthetic construct
  misc_feature 1..288: note = Description of Artificial Sequence: Synthetic coding sequence
  source 1..288: mol_type = other DNA
atgtgcagctctgtggccgccaagctgtggttcctgacagaccggcgcatccgggaggactacccccagaaggagatcctgcgggccctgaaggccaagtgctgtgaggaggagctggacttccgggctgtggtgatggatgaggtggtgctgaccatcgagcagggcaacctgggcctgcgcatcaatggagagctgatcacagcctacccccaggtggtggtggtgcgggtgcccaccccctgggtgcagagcgacagcgacatcaccgtgctgcggcacctgtag

SEQ ID NO: 168159 - DNA, 345 bp, synthetic construct
  misc_feature 1..345: note = Description of Artificial Sequence: Synthetic coding sequence
  source 1..345: mol_type = other DNA
atgtgcagctctgtggccgccaagctgtggttcctgacagaccggcgcatccgggaggactacccccagaaggagatcctgcgggccctgaaggccaagtgctgtgaggaggagctggacttccgggctgtggtgatggatgaggtggtgctgaccatcgagcagggcaacctgggcctgcgcatcaatggagagctgatcacagcctacccccaggtggtggtggtgcgggtgcccaccccctgggtgcagagcgacagcgacatcaccgtgctgcggcacctggagaagatgggctgccgcctgatgaaccggccccaggccatcctgaactgtgtgaactag

SEQ ID NO: 168160 - DNA, 645 bp, synthetic construct
  misc_feature 1..645: note = Description of Artificial Sequence: Synthetic coding sequence
  source 1..645: mol_type = other DNA
atgggcagaagacctgcccgctgctaccgctactgcaagaacaagccctaccccaagagccgcttctgccggggcgtgcctgatgccaagatccgcatctttgacctgggcaggaagaaggccaaggtggatgagttccccctgtgtggccacatggtgtctgatgaatatgagcagctgagcagcgaggccctggaggccgcccgcatctgtgccaacaagtacatggtgaagagctgtgggaaggatggcttccacatccgggtgcggctgcaccccttccacgtgatccgcatcaacaagatgctgagctgtgccggggctgaccggctgcagacaggcatgagaggagccttcggcaagccccagggcaccgtggcccgggtgcacatcggccaggtgatcatgagcatccgcaccaagctgcagaacaaggagcacgtgattgaggccctgcggcgggccaagttcaagtttcctggccggcagaagatccacatcagcaagaagtggggcttcaccaagttcaatgctgatgaatttgaggacatggtggccgagaagaggctcatcccagatggctgcggcgtgaagtacatccccaacagaggccccctggacaagtggagggccctgcacagctag

SEQ ID NO: 168161 - DNA, 645 bp, synthetic construct; identical to SEQ ID NO: 168160
  misc_feature 1..645: note = Description of Artificial Sequence: Synthetic coding sequence
  source 1..645: mol_type = other DNA

SEQ ID NO: 168162 - DNA, 645 bp, synthetic construct; identical to SEQ ID NO: 168160
  misc_feature 1..645: note = Description of Artificial Sequence: Synthetic coding sequence
  source 1..645: mol_type = other DNA

SEQ ID NO: 168163 - DNA, 606 bp, synthetic construct
  misc_feature 1..606: note = Description of Artificial Sequence: Synthetic coding sequence
  source 1..606: mol_type = other DNA
atgggcagaagacctgcccgctgctaccgctactgcaagaacaagccctaccccaagagccgcttctgccggggcgtgcctgatgccaagatccgcatctttgacctgggcaggaagaaggccaaggtggatgagttccccctgtgtggccacatggtgtctgatgaatatgagcagctgagcagcgaggccctggaggccgcccgcatctgtgccaacaagtacatggtgaagagctgtgggaaggatggcttccacatccgggtgcggctgcaccccttccacgtgatccgcatcaacaagatgctgagctgtgccggggctgaccggctgcagacaggcatgagaggagccttcggcaagccccagggcaccgtggcccgggtgcacatcggccaggtgatcatgagcatccgcaccaagctgcagaacaaggagcacgtgattgaggccctgcggcgggccaagttcaagtttcctggccggcagaagatccacatcagcaagaagtggggcttcaccaagttcaatgctgatgaatttgaggacatggtggccgagaagaggctcatcccagatggctgcggcgtgaagtacatcccctag

SEQ ID NO: 168164 - DNA, 327 bp, synthetic construct
  misc_feature 1..327: note = Description of Artificial Sequence: Synthetic coding sequence
  source 1..327: mol_type = other DNA
cccaagagccgcttctgccggggcgtgcctgatgccaagatccgcatctttgacctgggcaggaagaaggccaaggtggatgagttccccctgtgtggccacatggtgtctgatgaatatgagcagctgagcagcgaggccctggaggccgcccgcatctgtgccaacaagtacatggtgaagagctgtgggaaggatggcttccacatccgggtgcggctgcaccccttccacgtgatccgcatcaacaagatgctgagctgtgccggggctgaccggcccaccctgctgtgccagtgctgggagaccagcaggaacaccagctag

SEQ ID NO: 168165 - DNA, 546 bp, synthetic construct
  misc_feature 1..546: note = Description of Artificial Sequence: Synthetic coding sequence
  source 1..546: mol_type = other DNA
atgggcagaagacctgcccgctgctaccgctactgcaagaacaagccctaccccaagagccgcttctgccggggcgtgcctgatgccaagatccgcatctttgacctgggcaggaagaaggccaaggtggatgagttccccctgtgtggccacatggtgtctgatgaatatgagcagctgagcagcgaggccctggaggccgcccgcatctgtgccaacaagtacatggtgaagagctgtgggaaggatggcttccacatccgggtgcggctgcaccccttccacgtgatccgcatcaacaagatgctgagctgtgccggggctgacaggagcaccagccagaggtctggggccagccccagctccatgctgatgaacctgaagacctggtggctgaagagcggcagcagccagatggctgtgggcagcagcaccagccccatcgtggccctgtggaccagcggcggcccctgcacccatgagggcttccagtgtgccgcccccctgctgatcctgaccaacaagttctacttcctgagcacctag

SEQ ID NO: 168166 - DNA, 537 bp, synthetic construct
  misc_feature 1..537: note = Description of Artificial Sequence: Synthetic coding sequence
  source 1..537: mol_type = other DNA
atggcccaggaccagggcgagaaggagaaccccatgagggagctgcgcatcaggaagctgtgcctgaacatctgtgtgggggagagcggggaccggctgacccgggccgccaaggtgctggagcagctgaccggccagacccctgtgttcagcaaggcccgctacacagtgcgcagctttggcatcagaagaaatgagaagattgctgtgcactgcaccgtgcggggggccaaggccgaggagatcctggagaagggcctgaaggtgcgggagtatgagctgaggaagaacaacttcagtgacaccggcaactttggatttggcatccaggagcacatcgacctgggcatcaagtatgaccccagcatcggcatctacggcctggacttctacgtggtgctgggccggcccggcttcagcattgctgacaagaagagaagaacaggctgcattggagccaagcaccgcatcagcaaggaggaggccatgcgctggttccagcagaagtatgatggcatcatcctgcccgggaagtag

SEQ ID NO: 168167 - DNA, 396 bp, synthetic construct
  misc_feature 1..396: note = Description of Artificial Sequence: Synthetic coding sequence
  source 1..396: mol_type = other DNA
caggaccagggcgagaaggagaaccccatgagggagctgcgcatcaggaagctgtgcctgaacatctgtgtgggggagagcggggaccggctgacccgggccgccaaggtgctggagcagctgaccggccagacccctgtgttcagcaaggcccgctacacagtgcgcagctttggcatcagaagaaatgagaagattgctgtgcactgcaccgtgcggggggccaaggccgaggagatcctggagaagggcctgaaggtgcgggagtatgagctgaggaagaacaacttcagtgacaccggcaactttggatttggcatccaggagcacatcgacctgggcatcaagtatgaccccagcatcggcatctacggcctggacttctacgtggtgtag

SEQ ID NO: 168168 - DNA, 525 bp, synthetic construct
  misc_feature 1..525: note = Description of Artificial Sequence: Synthetic coding sequence
  source 1..525: mol_type = other DNA
caggaccagggcgagaaggagaaccccatgagggagctgcgcatcaggaagctgtgcctgaacatctgtgtgggggagagcggggaccggctgacccgggccgccaaggtgctggagcagctgaccggccagacccctgtgttcagcaaggcccgctacacagtgcgcagctttggcatcagaagaaatgagaagattgctgtgcactgcaccgtgcggggggccaaggccgaggagatcctggagaagggcctgaaggtgcgggagtatgagctgaggaagaacaacttcagtgacaccggcaactttggatttggcatccaggagcacatcgacctgggcatcaagtatgaccccagcatcggcatctacggcctggacttctacgtggtgctgggccggcccggcttcagcattgctgacaagaagagaagaacaggctgcattggagccaagcaccgcatcagcaaggaggaggccatgcgctggttccagcagaaggtgaagctgatctacctgaagtag

SEQ ID NO: 168169 - DNA, 498 bp, synthetic construct
  misc_feature 1..498: note = Description of Artificial Sequence: Synthetic coding sequence
  source 1..498: mol_type = other DNA
atgccacccaagtttgaccccaatgagatcaaggtggtgtacctgcgctgcaccggcggggaggtgggcgccaccagcgccctggcccccaagattggccccctgggcctgagccccaagaaggtgggagatgacatcgccaaggccaccggggactggaagggcctgcgcatcaccgtgaagctgaccatccagaaccggcaggcccagatcgaggtggtgcccagcgccagcgccctgatcatcaaggccctgaaggagcccccccgggacaggaagaagcagaagaacatcaagcacagcggcaacatcacctttgatgaaattgtgaacatcgcccggcagatgaggcacaggagcctggcccgggagctgagcggcaccatcaaggagatcctgggcacagcccagagcgtgggctgcaatgtggatggccgccacccccatgacatcattgatgacatcaacagcggggctgtggagtgcccagccagctag

SEQ ID NO: 168170 - DNA, 399 bp, synthetic construct
  misc_feature 1..399: note = Description of Artificial Sequence: Synthetic coding sequence
  source 1..399: mol_type = other DNA
atgccacccaagtttgaccccaatgagatcaaggtggtgtacctgcgctgcaccggcggggaggtgggcgccaccagcgccctggcccccaagattggccccctgggcctcatcgaggtggtgcccagcgccagcgccctgatcatcaaggccctgaaggagcccccccgggacaggaagaagcagaagaacatcaagcacagcggcaacatcacctttgatgagatcgtgaacatcgcccggcagatgaggcacaggagcctggcccgggagctgagcggcaccatcaaggagatcctgggcacagcccagagcgtgggctgcaatgtggatggccgccacccccatgacatcattgatgacatcaacagcggggctgtggagtgcccagccagctag

SEQ ID NO: 168171 - DNA, 636 bp, synthetic construct
  misc_feature 1..636: note = Description of Artificial Sequence: Synthetic coding sequence
  source 1..636: mol_type = other DNA
atggcccccagcagaaatggcatggtgctgaagccccacttccacaaggactggcagaggagagtggccacctggttcaaccagcctgccaggaagatcagaagaaggaaggcccggcaggccaaggcccggcgcatcgcccccaggcctgccagcggccccatccggcccatcgtgcgctgccccaccgtgcgctaccacaccaaggtgcgggccggccggggcttcagcctggaggagctgcgggtggccggcatccacaagaaggtggcccggaccatcggcatctctgtggaccccaggagaagaaacaagagcacagagagcctgcaggccaacgtgcagaggctgaaggagtaccgcagcaagctgatcctcttccccaggaagcccagcgcccccaagaagggggacagcagcgctgaggagctgaagctggccacccagctgactggacctgtgatgcctgtgagaaatgtgtacaagaaggagaaggcccgggtcatcacagaggaggagaagaacttcaaggcctttgccagcctgaggatggcccgggccaatgcccggctgtttggcatccgggccaagagggccaaggaggccgctgagcaggatgtggagaagaagaagtag

SEQ ID NO: 168172 - DNA, 636 bp, synthetic construct; identical to SEQ ID NO: 168171
  misc_feature 1..636: note = Description of Artificial Sequence: Synthetic coding sequence
  source 1..636: mol_type = other DNA

SEQ ID NO: 168173 - DNA, 495 bp, synthetic construct
  misc_feature 1..495: note = Description of Artificial Sequence: Synthetic coding sequence
  source 1..495: mol_type = other DNA
atggcccccagcagaaatggcatggtgctgaagccccacttccacaaggactggcagaggagagtggccacctggttcaaccagcctgccaggaagatcagaagaaggaaggcccggcaggccaaggcccggcgcatcgcccccaggcctgccagcggccccatccggcccatcgtgcgctgccccaccgtgcgctaccacaccaaggtgcgggccggccggggcttcagcctggaggagctgcgggtggccggcatccacaagaagggggacagcagcgctgaggagctgaagctggccacccagctgaccggccctgtgatgcctgtgagaaatgtgtacaagaaggagaaggcccgggtcatcacagaggaggagaagaacttcaaggcctttgccagcctgaggatggcccgggccaatgcccggctgtttggcatccgggccaagagggccaaggaggccgctgagcaggatgtggagaagaagaagtag

SEQ ID NO: 168174 - DNA, 615 bp, synthetic construct
  misc_feature 1..615: note = Description of Artificial Sequence: Synthetic coding sequence
  source 1..615: mol_type = other DNA
atgggcgcctacaagtacatccaggagctgtggaggaagaagcagagtgatgtgatgaggttcctgctgcgggtgcgctgctggcagtaccggcagctgagcgccctgcaccgggccccccggcccaccaggccagacaaggcccggcggctgggctacaaggccaagcagggctacgtgatctaccgcatccgggtgagaagaggaggcaggaagaggcctgtgcccaagggggccacctacggcaagcctgtgcaccacggcgtgaaccagctgaagtttgcccggagcctgcagagcgtggccgaggagcgggccggccgccactgtggggccctgcgggtgctgaacagctactgggtgggggaggacagcacctacaagttctttgaggtgatcctgattgaccccttccacaaggccatcagaagaaatccagacacccagtggatcaccaagcctgtgcacaagcaccgggagatgaggggcctgaccagcgctggcaggaagagccggggcctgggcaagggccacaagttccaccacaccatcggcggcagccggcgggccgcctggaggagaagaaacaccctgcagctgcaccgctacagatag

SEQ ID NO: 168175 - DNA, 615 bp, synthetic construct; identical to SEQ ID NO: 168174
  misc_feature 1..615: note = Description of Artificial Sequence: Synthetic coding sequence
  source 1..615: mol_type = other DNA

SEQ ID NO: 168176 - DNA, 528 bp, synthetic construct
  misc_feature 1..528: note = Description of Artificial Sequence: Synthetic coding sequence
  source 1..528: mol_type = other DNA
atgggcgcctacaagtacatccaggagctgtggaggaagaagcagagtgatgtgatgaggttcctgctgcgggtgcgctgctggcagtaccggcagctgagcgccctgcaccgggccccccggcccaccaggccagacaaggcccggcggctgggctacaaggccaagcagggctacgtgatctaccgcatccgggtgagaagaggaggcaggaagaggcctgtgcccaagggggccacctacggcaagcctgtgcaccacggcgtgaaccagctgaagtttgcccggagcctgcagagcgtggccgaggtgaatgccggccgccactgtggggccctgcgggtgctgaacagctactgggtgggggaggacagcacctacaagttctttgaggtgatcctgattgaccccttccacaaggccatcagaagaaatccagacacccagtggatcaccaagcctgtgcacaagcaccgggagatgaggggcctgaccagcgctggcaggaagagccggggcctgggctag

SEQ ID NO: 168177 - DNA, 615 bp, synthetic construct; identical to SEQ ID NO: 168174
  misc_feature 1..615: note = Description of Artificial Sequence: Synthetic coding sequence
  source 1..615: mol_type = other DNA

SEQ ID NO: 168178 - DNA, 615 bp, synthetic construct; identical to SEQ ID NO: 168174
  misc_feature 1..615: note = Description of Artificial Sequence: Synthetic coding sequence
  source 1..615: mol_type = other DNA

SEQ ID NO: 168179 - DNA, 402 bp, synthetic construct
  misc_feature 1..402: note = Description of Artificial Sequence: Synthetic coding sequence
  source 1..402: mol_type = other DNA
atgggcgcctacaagtacatccaggagctgtggaggaagaagcagagtgatgtgatgaggttcctgctgcgggtgcgctgctggcagtaccggcagctgagcgccctgcaccgggccccccggcccaccaggccagacaaggcccggcggctgggctacaaggccaagcagggctacgtgatctaccgcatccgggtgagaagaggaggcaggaagaggcctgtgcccaagggggccacctacggcaagcctgtgcaccacggcgtgaaccagctgaagtttgcccggagcctgcagagcgtggccgaggagcgggccggccgccactgtggggccctgcgggtgctgaacagctactgggtgggggaggacagcacctacaagttctttgaggtgatctag

SEQ ID NO: 168180 - DNA, 525 bp, synthetic construct
  misc_feature 1..525: note = Description of Artificial Sequence: Synthetic coding sequence
  source 1..525: mol_type = other DNA
atgggcgcctacaagtacatccaggagctgtggaggaagaagcagagtgatgtgatgaggttcctgctgcgggtgcgctgctggcagtaccggcagctgagcgccctgcaccgggccccccggcccaccaggccagacaaggcccggcggctgggctacaaggccaagcagggctacgtgatctaccgcatccgggtgagaagaggaggcaggaagaggcctgtgcccaagggggccacctacggcaagcctgtgcaccacggcgtgaaccagctgaagtttgcccggagcctgcagagcgtggccgaggagcgggccggccgccactgtggggccctgcgggtgctgaacagctactgggtgggggaggacagcacctacaagttctttgaggtgatcctgattgaccccttccacaaggccatcagaagaaatccagacacccagtggatcaccaagcctgtgcacaagcaccgggagatgaggggcctgaccagcgctggcaggaagagccggggcctgtag

SEQ ID NO: 168181 - DNA, 615 bp, synthetic construct; identical to SEQ ID NO: 168174
  misc_feature 1..615: note = Description of Artificial Sequence: Synthetic coding sequence
  source 1..615: mol_type = other DNA

SEQ ID NO: 168182 - DNA, 180 bp, synthetic construct
  misc_feature 1..180: note = Description of Artificial Sequence: Synthetic coding sequence
  source 1..180: mol_type = other DNA
atgggcgcctacaagtacatccaggagctgtggaggaagaagcagagtgatgtgatgaggttcctgctgcgggtgcgctgctggcagtaccggcagctgagcgccctgcaccgggccccccggcccaccaggccagacaaggcccggcggctgggctacaaggccaagcagggcacctag

SEQ ID NO: 168183 - DNA, 438 bp, synthetic construct
  misc_feature 1..438: note = Description of Artificial Sequence: Synthetic coding sequence
  source 1..438: mol_type = other DNA
atgggcgcctacaagtacatccaggagctgtggaggaagaagcagagtgatgtgatgaggttcctgctgcgggtgcgctgctggcagtaccggcagctgagcgccctgcaccgggccccccggcccaccaggccagacaaggcccggcggctgggctacaaggccaagcagggctacgtgatctaccgcatccgggtgagaagaggaggcaggaagaggcctgtgcccaagggggccacctacggcaagcctgtgcaccacggcgtgaaccagctgaagtttgcccggagcctgcagagcgtggccgaggagcgggccggccgccactgtggggccctgcgggtgctgaacagctactggatggagagccacagccacagcggcggcagcgctgtgggccagagccggctgacagccacctctgtgtcccgggtgtag

SEQ ID NO: 168184 - DNA, 495 bp, synthetic construct
  misc_feature 1..495: note = Description of Artificial Sequence: Synthetic coding sequence
  source 1..495: mol_type = other DNA
atgggcgcctacaagtacatccaggagctgtggaggaagaagcagagtgatgtgatgaggttcctgctgcgggtgcgctgctggcagtaccggcagctgagcgccctgcaccgggccccccggcccaccaggccagacaaggcccggcggctgggctacaaggccaagcagggctacgtgatctaccgcatccgggtgagaagaggaggcaggaagaggcctgtgcccaagggggccacctacggcaagcctgtgcaccacggcgtgaaccagctgaagtttgcccggagcctgcagagcgtggccgaggagcgggccggccgccactgtggggccctgcgggtgcacaagcaccgggagatgaggggcctgaccagcgctggcaggaagagccggggcctgggcaagggccacaagttccaccacaccatcggcggcagccggcgggccgcctggaggagaagaaacaccctgcagctgcaccgctacagatag

SEQ ID NO: 168185 - DNA, 441 bp, synthetic construct
  misc_feature 1..441: note = Description of Artificial Sequence: Synthetic coding sequence
  source 1..441: mol_type = other DNA
atgcacatcaggaaggccaccaagtacctgaaggatgtgaccctgcagaagcagtgtgtgcccttccgccgctacaacggcggcgtgggccgctgtgcccaggccaagcagtggggctggacccagggccgctggcccaagaagtctgctgagttcctgctgcacatgctgaagaatgctgagagcaatgctgagctgaagggcctggatgtggacagcctggtgattgagcacatccaggtgaacaaggcccccaagatgagaagaaggacctaccgggcccacggccgcatcaacccctacatgagcagcccctgccacatcgagatgatcctgacagagaaggagcagatcgtgcccaagccagaggaggaggtggcccagaagaagaagatcagccagaagaagctgaagaagcagaagctgatggcccgggagtag

SEQ ID NO: 168186 - DNA, 555 bp, synthetic construct
  misc_feature 1..555: note = Description of Artificial Sequence: Synthetic coding sequence
  source 1..555: mol_type = other DNA
atggtgcgctacagcctggaccctgagaaccccaccaagagctgcaagagccggggcagcaacctgcgggtgcacttcaagaacacccgggagacagcccaggccatcaagggcatgcacatcaggaaggccaccaagtacctgaaggatgtgaccctgcagaagcagtgtgtgcccttccgccgctacaacggcggcgtgggccgctgtgcccaggccaagcagtggggctggacccagggccgctggcccaagaagtctgctgagttcctgctgcacatgctgaagaatgctgagagcaatgctgagctgaagggcctggatgtggacagcctggtgattgagcacatccaggtgaacaaggcccccaagatgagaagaaggacctaccgggcccacggccgcatcaacccctacatgagcagcccctgccacatcgagatgatcctgacagagaaggagcagatcgtgcccaagccagaggaggaggtggcccagaagaagaagatcagccagaagaagctgaagaagcagaagctgatggcccgggagtag

SEQ ID NO: 168187 - DNA, 555 bp, synthetic construct; identical to SEQ ID NO: 168186
  misc_feature 1..555: note = Description of Artificial Sequence: Synthetic coding sequence
  source 1..555: mol_type = other DNA

SEQ ID NO: 168188 - DNA, 573 bp, synthetic construct
  misc_feature 1..573: note = Description of Artificial Sequence: Synthetic coding sequence
  source 1..573: mol_type = other DNA
tgaccccagggcgtggacatccgccacaacaaggacaggaaggtgcggaggaaggagcccaagagccaggacatctacctgcggctgctggtgaagctgtaccgcttcctggcccggaggaccaacagcaccttcaaccaggtggtgctgaagaggctcttcatgagcaggaccaacagaccacccctgagcctgagcaggatgatcaggaagatgaagctgcccggccgggagaacaagacagctgtggtggtgggcaccatcacagatgatgtgcgggtgcaggaggtgcccaagctgaaggtgtgtgccctgcgggtgaccagccgggcccggagccgcatcctgcgggccggcggcaagatcctgacctttgaccagctggccctggacagccccaagggctgcggcaccgtgctgctgagcggccccaggaagggccgggaggtgtaccgccactttgggaaggcccctggcaccccccacagccacaccaagccctacgtgcgcagcaagggcaggaagtttgagcgggcccggggccggcgggccagccggggctacaagaactag

SEQ ID NO: 168189 - DNA, 408 bp, synthetic construct
  misc_feature 1..408: note = Description of Artificial Sequence: Synthetic coding sequence
  source 1..408: mol_type = other DNA
atgggcgtggacatccgccacaacaaggacaggaaggtgcggaggaaggagcccaagagccaggacatctacctgcggctgctggtgaagctgtaccgcttcctggcccggaggaccaacagcaccttcaaccaggtggtgctgaagaggctcttcatgagcaggaccaacagaccacccctgagcctgagcaggatgatcaggaagatgaagctgcccggccgggagaacaagacagctgtggtggtgggcaccatcacagatgatgtgcgggtgcaggaggtgcccaagctgaaggtgtcctggaggggcctgggccggcccatccggcccctgctgtactgtgctgtgctgtgctgtgctgtgctgtgctgcctggtgcacccccagagctgccaccgctggtag

SEQ ID NO: 168190 - DNA, 567 bp, synthetic construct
  misc_feature 1..567: note = Description of Artificial Sequence: Synthetic coding sequence
  source 1..567: mol_type = other DNA
atgggcgtggacatccgccacaacaaggacaggaaggtgcggaggaaggagcccaagagccaggacatctacctgcggctgctggtgaagctgtaccgcttcctggcccggaggaccaacagcaccttcaaccaggtggtgctgaagaggctcttcatgagcaggaccaacagaccacccctgagcctgagcaggatgatcaggaagatgaagctgcccggccgggagaacaagacagctgtggtggtgggcaccatcacagatgatgtgcgggtgcaggaggtgcccaagctgaaggtgtgtgccctgcgggtgaccagccgggcccggagccgcatcctgcgggccggcggcaagatcctgacctttgaccagctggccctggacagccccaagggctgcggcaccgtgctgctgagcggccccaggaagggccgggaggtgtaccgccactttgggaaggcccctggcaccccccacagccacaccaagccctacgtgcgcagcaagggcaggaagtttgagcgggcccggggccggcgggccagccggggctacaagaactag

SEQ ID NO: 168191 - DNA, 480 bp, synthetic construct
  misc_feature 1..480: note = Description of Artificial Sequence: Synthetic coding sequence
  source 1..480: mol_type = other DNA
atgctgtaccgcttcctggcccggaggaccaacagcaccttcaaccaggtggtgctgaagaggctcttcatgagcaggaccaaccggccccccctgagcctgagcaggatgatcaggaagatgaagctgcccggccgggagaacaagacagctgtggtggtgggcaccatcacagatgatgtgcgggtgcaggaggtgcccaagctgaaggtgtgtgccctgcgggtgaccagccgggcccggagccgcatcctgcgggccggcggcaagatcctgacctttgaccagctggccctggacagccccaagggctgcggcaccgtgctgctgagcggccccaggaagggccgggaggtgtaccgccactttgggaaggcccctggcaccccccacagccacaccaagccctacgtgcgcagcaaaggaaggaagtttgagcgggcccggggcagaagagccagccggggctacaagaactag

SEQ ID NO: 168192 - DNA, 795 bp, synthetic construct
  misc_feature 1..795: note = Description of Artificial Sequence: Synthetic coding sequence
  source 1..795: mol_type = other DNA
atgaacatcctgcccaagaagtcctggcacgtgaggaacaaggacaacgtggcccgggtgagaagagatgaggcccaggcccgggaggaggagaaggagcgggagcggcgggtgctgctggcccagcaggaggccaggacagagttcctgaggaagaaggcccggcaccagaacagcctgcctgagctggaggccgctgaggccggggcccctggcagcggccctgtggacctcttccgggagctgctggaggagggcaaaggagtcatccggggcaacaaggagtatgaggaggagaagaggcaggagaaggagcggcaggagaaggccctgggcatcctgacctacctgggccagagcgctgctgaggcccagacccagcccccctggtaccagctgcccccaggccggggcggccccccacctggccctgccccagatgagaagatcaagagccggctggaccccctgcgggagatgcagaagcacctgggcaagaagaggcagcacggcggagatgagggcagccgcagcaggaaggagaaggagggcagcgagaagcagaggcccaaggagccccccagcctggaccagctgcgggcagagcggctgcggcgggaggccgctgagaggagcagagctgaggccctgctggcccgggtgcagggccgggccctgcaggagggccagccagaagaagatgaaacagatgacagaagaagacgctacaacagccagttcaacccccagctggcccggcggccccggcagcaggacccccacctgacccactag

SEQ ID NO: 168193 - DNA, 465 bp, synthetic construct
  misc_feature 1..465: note = Description of Artificial Sequence: Synthetic coding sequence
  source 1..465: mol_type = other DNA
atgaaggccagcggcaccctgcgggagtacaaggtggtgggccgctgcctgcccacccccaagtgccacaccccacccctgtacaggatgaggatctttgcccccaaccacgtggtggccaagagccgcttctggtactttgtgtcccagctgaagaagatgaagaagagcagcggggagatcgtgtactgcggccaggtgtttgagaagagccccctgcgggtgaagaactttggcatctggctgcgctatgacagccgcagcggcacccacaacatgtaccgggagtacagagacctgaccacagctggagctgtgacccagtgctacagagacatgggcgcccggcaccgggcccgggcccacagcatccagatcatgaaggtggaggagattgctgccagcaagtgccggcggcagcacaagccccgcttcaccaccaagaggcccaacaccttcttctag

SEQ ID NO: 168194 - DNA, 1278 bp, synthetic construct
  misc_feature 1..1278: note = Description of Artificial Sequence: Synthetic coding sequence
  source 1..1278: mol_type = other DNA
atgggcggcggggacctgaacctgaagaagtcctggcacccccagaccctgagaaatgtggagaaggtgtggaaggccgagcagaagcatgaggccgagaggaagaagattgaggagctgcagcgggagctgcgggaggagcgggcccgggaggagatgcagagatatgcagaagatgtgggcgctgtgaagaagaaggaggagaagctggactggatgtaccagggccctgggggcatggtgaacagagatgagtacctgctgggccggcccatcgacaagtatgtgtttgagaagatggaggagaaggaggccggctgcagcagcgagaccggcctgctgcccggcagcatctttgcccccagcggggccaacagcctgctggacatggccagcaagatccgggaggaccccctcttcatcatcaggaagaaggaggaggagaagaagcgggaggtgctgaacaaccctgtgaagatgaagaagatcaaggagctgctgcagatgagcctggagaagaaggagaagaagaagaagaaggagaagaagaagaagcacaagaagcacaagcacaggagcagcagcagtgacaggagcagcagtgaagatgagcacagcgctggccgcagccagaagaagatggccaacagcagccctgtgctgagcaaggtgcccggctacggcctgcaggtgaggaacagcgacaggaaccagggcctgcagggccccctgacagctgagcagaagaggggccacggcatgaagaaccacagccgcagccgcagcagcagccacagccccccaagacatgccagcaagaagagcacccgggaggccggcagccgggaccggcgcagccgcagcctgggcagaagaagccgcagcccccggcccagcaagctgcacaacagcaaggtgaacagaagagaaacaggccagaccaggagccccagccccaagaaggaggtgtaccagaggagacatgcccctggctacaccaggaagctgtctgctgaggagctggagaggaagaggcaggagatgatggagaatgccaagtggagggaggaggagcggctgaacatcctgaagagacatgccaaggatgaggagcgggagcagaggctggagaagctggacagcagagatggcaagttcatccacaggatgaagctggagagcgccagcaccagcagcctggaggacagagtgaagaggaacatctacagcctgcagaggacctctgtggccctggagaagaacttcatgaagaggtag

SEQ ID NO: 168195 - DNA, 483 bp, synthetic construct
  misc_feature 1..483: note = Description of Artificial Sequence: Synthetic coding sequence
  source 1..483: mol_type = other DNA
atgaccaacaccaagggcaagaggcggggcacccgctacatgttcagccggcccttcaggaagcacggcgtggtgcccctggccacctacatgaggatctacaagaagggggacatcgtggacatcaagggcatgggcaccgtgcagaagggcatgccccacaagtgctaccacggcaagacaggccgggtgtacaacgtgacccagcacgctgtgggcatcgtggtgaacaagcaggtgaagggcaagatcctggccaagaggatcaacgtgagaattgagcacatcaagcacagcaagagccgggacagcttcctgaagagggtgaaggaaaatgaccagaagaagaaggaggccaaggagaagggcacctgggtgcagctgaagaggcagcctgccccaccccgggaggcccactttgtgaggaccaacgggaaggagcctgagctgctggagcccatcccctatgagttcatggcctag

SEQ ID NO: 168196 - DNA, 483 bp, synthetic construct; identical to SEQ ID NO: 168195
  misc_feature 1..483: note = Description of Artificial Sequence: Synthetic coding sequence
  source 1..483: mol_type = other DNA

SEQ ID NO: 168197 - DNA, 483 bp, synthetic construct; identical to SEQ ID NO: 168195
  misc_feature 1..483: note = Description of Artificial Sequence: Synthetic coding sequence
  source 1..483: mol_type = other DNA

SEQ ID NO: 168198 - DNA, 483 bp, synthetic construct; identical to SEQ ID NO: 168195
  misc_feature 1..483: note = Description of Artificial Sequence: Synthetic coding sequence
  source 1..483: mol_type = other DNA

SEQ ID NO: 168199 - DNA, 972 bp, synthetic construct
  misc_feature 1..972: note = Description of Artificial Sequence: Synthetic coding sequence
  source 1..972: mol_type = other DNA
atggccgcccccaagggcagcctgtgggtgaggacccagctgggcctgccccccctgctgctgctgaccatggccctggccggcggcagcggcacagccagcgctgaggcctttgacagcgtgctgggggacacagccagctgccaccgggcctgccagctgacctaccccctgcacacctaccccaaggaggaggagctgtatgcctgccagaggggctgccgcctcttcagcatctgccagtttgtggatgatggcatcgacctgaacagaaccaagctggagtgtgagagcgcctgcacagaggcctacagccagagtgatgagcagtatgcctgccacctgggctgccagaaccagctgccctttgctgagctgcggcaggagcagctgatgagcctgatgcccaagatgcacctgctcttccccctgaccctggtgcgctccttctggagcgacatgatggattctgcccagagcttcatcaccagctcctggaccttctacctgcaggctgatgatggcaagatcgtcatcttccagagcaagccagagatccagtatgccccccacctggagcaggagcccaccaacctgcgggagagcagcctgagcaagatgagctacctgcagatgaggaacagccaggcccacaggaacttcctggaggatggagagagtgatggcttcctgcgctgcctgagcctgaacagcggctggatcctgaccaccaccctggtgctgtctgtgatggtgctgctgtggatctgctgtgccaccgtggccacagctgtggagcagtatgtgcccagcgagaagctgagcatctatggagacctggagttcatgaatgagcagaagctgaaccgctacccagccagcagcctggtggtggtgcgcagcaagacagaggaccacgaggaggccggccccctgcccaccaaggtgaacctggcccacagcgagatctag

SEQ ID NO: 168200 - DNA, 276 bp, synthetic construct
  misc_feature 1..276: note = Description of Artificial Sequence: Synthetic coding sequence
  source 1..276: mol_type = other DNA
atggccggcagcagaagagaatgtagaagaggaggcagcagcggggccaagttccgcatcagcctgggcctgcctgtgggcgccgtcatcaactgtgccgacaacacaggagccaagaacctgtacatcatctctgtgaagggcatcaagggccgcctgaaccggctgcctgctgctggggtgggggacatggtgatggccaccgtgaagaagggcaagccagagctgaggaagaaggtgcaccctgctgtggtgatccggcagaggaagagctag

SEQ ID NO: 168201 - DNA, 423 bp, synthetic construct
  misc_feature 1..423: note = Description of Artificial Sequence: Synthetic coding sequence
  source 1..423: mol_type = other DNA
atgagcaagaggggccggggcggcagcagcggggccaagttccgcatcagcctgggcctgcctgtgggcgccgtcatcaactgtgccgacaacacaggagccaagaacctgtacatcatctctgtgaagggcatcaagggccgcctgaaccggctgcctgctgctggggtgggggacatggtgatggccaccgtgaagaagggcaagccagagctgaggaagaaggtgcaccctgctgtggtgatccggcagaggaagagctacagaaggaaggatggagtcttcctgtactttgaagataatgctggggtgattgtgaacaacaagggggagatgaagggcagcgccatcaccggccctgtggccaaggaatgtgccgacctgtggccccgcatcgccagcaatgccggcagcatcgcctag

SEQ ID NO: 168202 - DNA, 345 bp, synthetic construct
  misc_feature 1..345: note = Description of Artificial Sequence: Synthetic coding sequence
  source 1..345: mol_type = other DNA
atgagcaagaggggccggggcggcagcagcggggccaagttccgcatcagcctgggcctgcctgtgggcgccgtcatcaactgtgccgacaacacaggagccaagaacctgtacatcatctctgtgaagggcatcaagggccgcctgaaccggctgcctgctgctggggtgggggacatggtgatggccaccgtgaagaagggcaagccagagctgaggaagaaggtgctgctgtgccacacaggctggagcgctgtgacccccctgaagctgactgtgaccctgaactgctggacctggaaccccccagctgtggccttcaagggcctgcagctgcaggtgtag

SEQ ID NO: 168203 - DNA, 423 bp, synthetic construct; identical to SEQ ID NO: 168201
  misc_feature 1..423: note = Description of Artificial Sequence: Synthetic coding sequence
  source 1..423: mol_type = other DNA

SEQ ID NO: 168204 - DNA, 477 bp, synthetic construct
  misc_feature 1..477: note = Description of Artificial Sequence: Synthetic coding sequence
  source 1..477: mol_type = other DNA
tgactggtgggcgccccctgcccccgggccagccctgccccacccaaggccgaggccaaggccaaggccctgaaggccaagaaggctgtgctgaagggcgtgcacagccacaagaagaagaagatccgcaccagccccaccttcagaagacccaagaccctgcggctgcggcggcagcccaagtaccccaggaagagcgcccccaggaggaacaagctggaccactacgccatcatcaagttccccctgaccacagaaagtgccatgaagaagattgaggacaacaacaccctggtgttcatcgtggatgtgaaggccaacaagcaccagatcaagcaggccgtgaagaagctgtatgacattgatgtggccaaggtgaacaccctcatccggccagatggagagaagaaggcctacgtgcggctggccccagactatgatgccctggatgtggccaacaagattggcatcatctag

SEQ ID NO: 168205 - DNA, 477 bp, synthetic construct
  misc_feature 1..477: note = Description of Artificial Sequence: Synthetic coding sequence
  source 1..477: mol_type = other DNA
atgagccctggcctggtggtgctgcgctgggccccagccccacccaaggccgaggccaaggccaaggccctgaaggccaagaaggctgtgctgaagggcgtgcacagccacaagaagaagaagatccgcaccagccccaccttcagaagacccaagaccctgcggctgcggcggcagcccaagtaccccaggaagagcgcccccaggaggaacaagctggaccactacgccatcatcaagttccccctgaccacagaaagtgccatgaagaagattgaggacaacaacaccctggtgttcatcgtggatgtgaaggccaacaagcaccagatcaagcaggccgtgaagaagctgtatgacattgatgtggccaaggtgaacaccctcatccggccagatggagagaagaaggcctacgtgcggctggccccagactatgatgccctggatgtggccaacaagattggcatcatctag

SEQ ID NO: 168206 - DNA, 585 bp, synthetic construct
  misc_feature 1..585: note = Description of Artificial Sequence: Synthetic coding sequence
  source 1..585: mol_type = other DNA
atgcaccccctggtgggcgccccctgcccccgggcctgcaaggagctggtgcccagcgccctgaccatcttcctgctggtgcacgtgcagcccggctacatcacccggcccagcctgcggtctgtggtgctgcgctgggccccagccccacccaaggccgaggccaaggccaaggccctgaaggccaagaaggctgtgctgaagggcgtgcacagccacaagaagaagaagatccgcaccagccccaccttcagaagacccaagaccctgcggctgcggcggcagcccaagtaccccaggaagagcgcccccaggaggaacaagctggaccactacgccatcatcaagttccccctgaccacagaaagtgccatgaagaagattgaggacaacaacaccctggtgttcatcgtggatgtgaaggccaacaagcaccagatcaagcaggccgtgaagaagctgtatgacattgatgtggccaaggtgaacaccctcatccggccagatggagagaagaaggcctacgtgcggctggccccagactatgatgccctggatgtggccaacaagattggcatcatctag

SEQ ID NO: 168207 - DNA, 471 bp, synthetic construct
  misc_feature 1..471: note = Description of Artificial Sequence: Synthetic coding sequence
  source 1..471: mol_type = other DNA
atggcccccaaggccaagaaggaggccccagccccacccaaggccgaggccaaggccaaggccctgaaggccaagaaggctgtgctgaagggcgtgcacagccacaagaagaagaagatccgcaccagccccaccttcagaagacccaagaccctgcggctgcggcggcagcccaagtaccccaggaagagcgcccccaggaggaacaagctggaccactacgccatcatcaagttccccctgaccacagaaagtgccatgaagaagattgaggacaacaacaccctggtgttcatcgtggatgtgaaggccaacaagcaccagatcaagcaggccgtgaagaagctgtatgacattgatgtggccaaggtgaacaccctcatccggccagatggagagaagaaggcctacgtgcggctggccccagactatgatgccctggatgtggccaacaagattggcatcatctag

SEQ ID NO: 168208 - DNA, 474 bp, synthetic construct
  misc_feature 1..474: note = Description of Artificial Sequence: Synthetic coding sequence
  source 1..474: mol_type = other DNA
atgaaggtggagctgtgcagcttcagcggctacaagatctacccaggccatggaagaagatatgccaggacagatggcaaggtgttccagttcctgaatgccaagtgtgagagcgccttcctgagcaagaggaacccccggcagatcaactggacagtgctgtacagaaggaagcacaagaagggccagagcgaggagatccagaagaagaggaccaggagagctgtgaagttccagagggccatcactggagccagcctggccgacatcatggccaagaggaaccagaagccagaggtgaggaaggcccagcgggagcaggccatccgggccgccaaggaggccaagaaggccaagcaggccagcaagaagacagccatggctgctgccaaggcccccaccaaggccgcccccaagcagaagatcgtgaagcctgtgaaggtgtctgccccccgggtgggcggcaagaggtag

SEQ ID NO: 168209 - DNA, 453 bp, synthetic construct
  misc_feature 1..453: note = Description of Artificial Sequence: Synthetic coding sequence
  source 1..453: mol_type = other DNA
atgaaggtggagctgtgcagcttcagcggctacaagatctacccaggccatggaagaagatatgccaggacagatggcaaggtgttccagttcctgaatgccaagtgtgagagcgccttcctgagcaagaggaacccccggcagatcaactggacagtgctgtacagaaggaagcacaagaagggccagagcgaggagatccagaagaagaggaccaggagagctgtgaagttccagagggccatcactggagccagcctggccgacatcatggccaagaggaaccagaagccagaggtgaggaaggcccagcgggagcaggccatccgggccgccaaggaggccaagaaggccaagcaggccagcaagaagacagccatggctgctgccaaggtgatcatgggcttcctgtacttcctggagcagtacaacaggaagatcttcttcttctag

SEQ ID NO: 168210 - DNA, 438 bp, synthetic construct
  misc_feature 1..438: note = Description of Artificial Sequence: Synthetic coding sequence
  source 1..438: mol_type = other DNA
atgaagttcaacccctttgtgaccagtgacaggagcaagaacaggaagaggcacttcaatgcccccagccacatccggaggaagatcatgagcagccccctgagcaaggagctgcggcagaagtacaacgtgcgctccatgcccatcaggaaggatgatgaggtgcaggtggtgcggggccactacaagggccagcagatcggcaaggtggtgcaggtgtacaggaagaagtatgtgatctacatcgagcgggtgcagcgggagaaggccaacggcaccaccgtgcacgtgggcatccaccccagcaaggtggtgatcacccggctgaagctggacaaggacaggaagaagatcctggagaggaaggccaagagccggcaggtgggcaaggagaagggcaagtacaaggaggagaccatcgagaagatgcaggagtag

SEQ ID NO: 168211 - DNA, 411 bp, synthetic construct
  misc_feature 1..411: note = Description of Artificial Sequence: Synthetic coding sequence
  source 1..411: mol_type = other DNA
atgggcaagttcatgaagccaggcaaggtggtgctggtgctggccggccgctacagcggcaggaaggctgtgattgtgaagaacattgatgatggcaccagtgaccggccctacagccacgccctggtggccggcatcgaccgctaccccaggaaggtgacagctgccatgggcaagaagaagatcgccaagaggagcaagatcaagagctttgtgaaggtgtacaactacaaccacctgatgcccacccgctacagcgtggacatccccctggacaagacagtggtgaacaaggatgtgttccgggaccctgccctgaagaggaaggcccggcgggaggccaaggtgaagtttgaggagcgctacaagacaggcaagaacaagtggttcttccagaagctgcgcttctag

SEQ ID NO: 168212 - DNA, 447 bp, synthetic construct
  misc_feature 1..447: note = Description of Artificial Sequence: Synthetic coding sequence
  source 1..447: mol_type = other DNA
atgcccagccggctgaggaagaccaggaagctgcggggccacgtgagccacggccacggccgcatcggcaagcacaggaagcaccctgggggcagaggaaatgccggcggcctgcaccaccaccgcatcaactttgacaagtaccaccctggctactttgggaaggtgggcatgaagcactaccacctgaagaggaaccagagcttctgccccaccgtgaacctggacaagctgtggaccctggtgtctgagcagaccagggtgaatgctgccaagaacaagacaggagctgcccccatcattgatgtggtgcgcagcggctactacaaggtgctgggcaagggcaagctgcccaagcagcctgtgattgtgaaggccaagttcttcagcagaagagctgaggagaagatcaagtctgtgggcggggcctgtgtgctggtggcctag

SEQ ID NO: 168213 - DNA, 327 bp, synthetic construct
  misc_feature 1..327: note = Description of Artificial Sequence: Synthetic coding sequence
  source 1..327: mol_type = other DNA
atgcccagccggctgaggaagaccaggaagctgcggggccacgtgagccacggccacggccgcatcggcaagcacaggaagcaccctgggggcagaggaaatgccggcggcctgcaccaccaccgcatcaactttgacaagtaccaccctggctactttgggaaggtgggcatgaagcactaccacctgaagaggaaccagagcttctgccccaccgtgaacctggacaagctgtggaccctggtgtctgagcagaccagggtgaatgctgccaagaacaagacaggagctgcccccatcattgatgtggtgcgctctgtgtcctag

SEQ ID NO: 168214 - DNA, 414 bp, synthetic construct
  misc_feature 1..414: note = Description of Artificial Sequence: Synthetic coding sequence
  source 1..414: mol_type = other DNA
atgtctgcccacctgcagtggatggtggtgaggaactgcagcagcttcctgatcaagaggaacaagcagacctacagcacagagcccaacaacctgaaggccagaaattccttccgctacaacggcctcatccacaggaagacagtgggcgtggagcctgctgctgatggcaagggcgtggtggtggtgatcaagaggaggagcggccagaggaagccagccaccagctatgtgaggaccaccatcaacaagaatgcccgggccaccctgagcagcatccgccacatgatcaggaagaacaagtacagaccagacctgaggatggccgccatccggcgggccagcgccatcctgcggagccagaagcctgtgatggtgaagaggaagaggacccggcccaccaagagcagctag

SEQ ID NO: 168215 - DNA, 210 bp, synthetic construct
  misc_feature 1..210: note = Description of Artificial Sequence: Synthetic coding sequence
  source 1..210: mol_type = other DNA
atgtctgcccacctgcagtggatggtggtgaggaactgcagcagcttcctgatcaagaggaacaagcagacctacagcacagagcccaacaacctgaaggccagaaattccttccgctacaacggcctcatccacaggaagacagtgggcgtggagcctgctgctgatggcaagggcgtggtggtggtgatcaagagaagaagtgaatag

SEQ ID NO: 168216 - DNA, 264 bp, synthetic construct
  misc_feature 1..264: note = Description of Artificial Sequence: Synthetic coding sequence
  source 1..264: mol_type = other DNA
atgtctgcccacctgcagtggatggtggtgaggaactgcagcagcttcctgatcaagaggaacaagcagacctacagcacagagcccaacaacctgaaggccagaaattccttccgctacaacggcctcatccacaggaagacagtgggcgtggagcctgctgctgatggcaagggcgtggtggtggtgatcaagagaagaagtggagagttctgcctggtgtgggcccgggagcggcccctgagccgggtgtgggagctgtag

SEQ ID NO: 168217 - DNA, 510 bp, synthetic construct
  misc_feature 1..510: note = Description of Artificial Sequence: Synthetic coding sequence
  source 1..510: mol_type = other DNA
atgtctgcccacctgcagtggatggtggtgaggaactgcagcagcttcctgatcaagaggaacaagcagacctacagcacagagcccaacaacctgaaggccagaaattccttccgctacaacggcctcatccacaggaagacagtgggcgtggagcctgctgctgatggcaagggcgtggtggtggtgatcaagaggaggagcggccagaggaagccagccaccagctatgtgaggaccaccatcaacaagaatgcccgggccaccctgagcagcatccgccacatgatcaggaagaacaagtacagaccagacctgaggatggacatgctggccagcacaggcagcggcctgtgctgcagcgtggccgtgcagccctgggccagcagcagcaccagcctgtgcctgcggaccctcatctgcaacatgagggtggaccggccctactacagcggcctgatgaggcggctgaatgtgcagaacctgctggactgtgcccacaagagctag

SEQ ID NO: 168218 - DNA, 510 bp, synthetic construct; identical to SEQ ID NO: 168217
  misc_feature 1..510: note = Description of Artificial Sequence: Synthetic coding sequence
  source 1..510: mol_type = other DNA

SEQ ID NO: 168219 - DNA, 414 bp, synthetic construct; identical to SEQ ID NO: 168214
  misc_feature 1..414: note = Description of Artificial Sequence: Synthetic coding sequence
  source 1..414: mol_type = other DNA

SEQ ID NO: 168220 - DNA, 492 bp, synthetic construct
  misc_feature 1..492: note = Description of Artificial Sequence: Synthetic coding sequence
  source 1..492: mol_type = other DNA
atgtctgcccacctgcagtggatggtggtgaggaactgcagcagcttcctgatcaagaggaacaagcagacctacagcacagagcccaacaacctgaaggccagaaattccttccgctacaacggcctcatccacaggaagacagtgggcgtggagcctgctgctgatggcaagggcgtggtggtggtgatcaagaggaggagcggccagaggaagccagccaccagctatgtgaggaccaccatcaacaagaatgcccgggccaccctgagcagcatccgccacatgatcaggaagaacaagtacagaccagacctgaggatggtgtcctggggcctgggcatccggctgggggagaccggccagtgctgcggggagggcccccccaccaccggctgcaacatgggctggaggggcatggacagctgcttccagcccaccccccacacccagcactggccccggggccgcctggtggagtgcatgggctag

SEQ ID NO: 168221 - DNA, 480 bp, synthetic construct
  misc_feature 1..480: note = Description of Artificial Sequence: Synthetic coding sequence
  source 1..480: mol_type = other DNA
atggccaagagcaagaaccacaccacccacaaccagagcaggaagtggcacagaaatggcatcaagaagcccaggagccagagatatgagagcctgaagggcgtggaccccaagttcctgaggaacatgagatttgccaagaagcacaacaagaagggcctgaagaagatgcaggccaacaatgccaaggccatgtctgcccgggcagaggccatcaaggccctggtgaagcccaaggaggtgaagcccaagatccccaagggcgtgtccaggaagctggaccggctggcctacatcgcccaccccaagctgggcaagagggcccgggcccgcatcgccaagggcctgcggctgtgccggcccaaggccaaggccaaggccaaggccaaggaccagaccaaggcccaggccgccgccccagcctctgtgcctgcccaggcccccaagaggacccaggcccccaccaaggccagcgagtag

SEQ ID NO: 168222 - DNA, 480 bp, synthetic construct; identical to SEQ ID NO: 168221
  misc_feature 1..480: note = Description of Artificial Sequence: Synthetic coding sequence
  source 1..480: mol_type = other DNA

SEQ ID NO: 168223 - DNA, 480 bp, synthetic construct; identical to SEQ ID NO: 168221
  misc_feature 1..480: note = Description of Artificial Sequence: Synthetic coding sequence
  source 1..480: mol_type = other DNA

SEQ ID NO: 168224 - DNA, 480 bp, synthetic construct; identical to SEQ ID NO: 168221
  misc_feature 1..480: note = Description of Artificial Sequence: Synthetic coding sequence
  source 1..480: mol_type = other DNA

SEQ ID NO: 168225 - DNA, 480 bp, synthetic construct; identical to SEQ ID NO: 168221
  misc_feature 1..480: note = Description of Artificial Sequence: Synthetic coding sequence
  source 1..480: mol_type = other DNA

SEQ ID NO: 168226 - DNA, 480 bp, synthetic construct; identical to SEQ ID NO: 168221
  misc_feature 1..480: note = Description of Artificial Sequence: Synthetic coding sequence
  source 1..480: mol_type = other DNA

SEQ ID NO: 168227 - DNA, 648 bp, synthetic construct
  misc_feature 1..648: note = Description of Artificial Sequence: Synthetic coding sequence
  source 1..648: mol_type = other DNA
atgcccttccaccctgtgacagctgccctgatgtaccggggcatctacacagtgcccaacctgctgtctgagcagaggcctgtggacatcccagaagatgagctggaggagatccgggaggccttcaaggtgtttgacagagatggaaatggcttcatcagcaagcaggagctgggcacagccatgaggagcctgggctacatgcccaatgaggtggagctggaggtgatcatccagaggctggacatggatggagatggccaggtggactttgaggagtttgtgaccctgctgggccccaagctgagcaccagcggcatccctgagaagttccacggcacagactttgacaccgtcttctggaagtgtgacatgcagaagctgactgtggatgagctgaagaggctgctgtatgacaccttctgtgagcacctgtccatgaaggacatcgagaacatcatcatgacagaggaggagagccacctgggcacagcagaagaatgtcctgtggatgtggagacctgcagcaaccagcagatccggcagacctgtgtgaggaagagcctcatctgtgcctttgccatcgccttcatcatctctgtgatgctgattgctgccaaccaggtgctgcggagcggcatgaagtag

SEQ ID NO: 168228 - DNA, 1056 bp, synthetic construct
  misc_feature 1..1056: note = Description of Artificial Sequence: Synthetic coding sequence
  source 1..1056: mol_type = other DNA
atgacccacatcgtgcgggaggtggacaggcctggcagcaaggtgaacaagaaggaggtggtggaggccgtgaccatcgtggagaccccacccatggtggtggtgggcatcgtgggctacgtggagaccccccggggcctgcggaccttcaagacagtgtttgctgagcacatcagtgatgagtgcaagaggcgcttctacaagaactggcacaagagcaagaagaaggccttcaccaagtactgcaagaagtggcaggatgaagatggcaagaagcagctggagaaggacttcagctccatgaagaagtactgccaggtgatccgggtgattgcccacacccagatgaggctgctgcccctgcggcagaagaaggcccacctgatggagatccaggtgaatggaggcaccgtggccgagaagctggactgggcccgggagcggctggagcagcaggtgcctgtgaaccaggtgtttggccaggatgagatgattgatgtgattggagtgaccaagggcaagggctacaagggcgtgaccagccgctggcacaccaagaagctgcccaggaagacccaccggggcctgaggaaggtggcctgcatcggggcctggcacccagcccgggtggccttctctgtggcccgggccggccagaagggctaccaccacaggacagagatcaacaagaagatctacaagattggccagggctacctgatcaaggatggcaagctgatcaagaacaatgccagcacagattatgacctgagtgacaagagcatcaaccccctgggcggctttgtgcactatggagaggtgaccaatgactttgtgatgctgaagggctgtgtggtgggcaccaagaagagggtgctgaccctgaggaagagcctgctggtgcagaccaagagaagagccctggagaagattgacctgaagttcatcgacaccaccagcaagtttggccacggccgcttccagaccatggaggagaagaaggccttcatgggccccctgaagaaggacagaattgccaaggaggagggcgcctag

SEQ ID NO: 168229 - DNA, 348 bp, synthetic construct
  misc_feature 1..348: note = Description of Artificial Sequence: Synthetic coding sequence
  source 1..348: mol_type = other DNA
atggtggccgccaagaagaccaagaagagcctggagagcatcaacagccggctgcagctggtgatgaagagcggcaagtatgtgctgggctacaagcagaccctgaagatgatccggcagggcaaggccaagctggtgatcctggccaacaactgcccagccctgaggaagtcagaaattgagtactatgccatgctggccaagacaggagtgcaccactacagcggcaacaacatcgagctgggcacagcctgtgggaagtactacagagtgtgcaccctggccatcattgatcctggggacagcgacatcatccgctccatgcctgagcagacaggagagaagtag

SEQ ID NO: 168230 - DNA, 348 bp, synthetic construct; identical to SEQ ID NO: 168229
  misc_feature 1..348: note = Description of Artificial Sequence: Synthetic coding sequence
  source 1..348: mol_type = other DNA

SEQ ID NO: 168231 - DNA, 345 bp, synthetic construct
  misc_feature 1..345: note = Description of Artificial Sequence: Synthetic coding sequence
  source 1..345: mol_type = other DNA
atggtggccgccaagaagaccaagaagagcctggagagcatcaacagccggctgcagctggtgatgaagagcggcaagtatgtgctgggctacaagcagaccctgaagatgatccggcagggcaaggccaagctggtgatcctggccaacaactgcccagccctgaggaagtcagaaattgagtactatgccatgctggccaagacaggagtgcaccactacagcggcaacaacatcgagctgggcacagcctgtgggaagtactacagagtgtgcaccctggccatcattgatcctggggacagcgacatcatccgctccatgcctgagcagacaggagagtag

SEQ ID NO: 168232 - DNA, 285 bp, synthetic construct
  misc_feature 1..285: note = Description of Artificial Sequence: Synthetic coding sequence
  source 1..285: mol_type = other DNA
atgagcggccgcctgtggagcaaggccatctttgctggctacaagaggggcctgaggaaccagcgggagcacacagccctgctgaagattgagggcgtgtatgccagagatgaaacagagttctacctgggcaagagatgtgcctacgtgtacaaggccaagaacaacacagtgacccctgggggcaagcccaacaagaccagggtcatctggggcaaggtgacccgggcccacggcaacagcggcatggtgcgggccaagttccgcagcaacctgcctgcctag

SEQ ID NO: 168233 - DNA, 333 bp, synthetic construct
  misc_feature 1..333: note = Description of Artificial Sequence: Synthetic coding sequence
  source 1..333: mol_type = other DNA
atgagcggccgcctgtggagcaaggccatctttgctggctacaagaggggcctgaggaaccagcgggagcacacagccctgctgaagattgagggcgtgtatgccagagatgaaacagagttctacctgggcaagagatgtgcctacgtgtacaaggccaagaacaacacagtgacccctgggggcaagcccaacaagaccagggtcatctggggcaaggtgacccgggcccacggcaacagcggcatggtgcgggccaagttccgcagcaacctgcctgccaaggccatcggccaccgcatccgggtgatgctgtaccccagccgcatctag

SEQ ID NO: 168234 - DNA, 333 bp, synthetic construct; identical to SEQ ID NO: 168233
  misc_feature 1..333: note = Description of Artificial Sequence: Synthetic coding sequence
  source 1..333: mol_type = other DNA

SEQ ID NO: 168235 - DNA, 396 bp, synthetic construct
  misc_feature 1..396: note = Description of Artificial Sequence: Synthetic coding sequence
  source 1..396: mol_type = other DNA
tgactgccctttgccagccgcttcctgtccttccgggctgacagcgcccacgcctccatggtgaatgtgcccaagaccaggaggaccttctgcaagaagtgtgggaagcaccagccccacaaggtgacccagtacaagaagggcaaggacagcctgtatgcccagggcaagagaagatatgacaggaagcagagcggctatggaggccagaccaagcccatcttcaggaagaaggccaagaccaccaagaagatcgtgctgcggctggagtgtgtggagcccaactgccgcagcaagaggatgctggccatcaagcgctgcaagcactttgagctgggcggggacaagaagaggaaggtgtacaactacggctggaaggtgcagagcttctcctag

SEQ ID NO: 168236 - DNA, 429 bp, synthetic construct
  misc_feature 1..429: note = Description of Artificial Sequence: Synthetic coding sequence
  source 1..429: mol_type = other DNA
atgattgcccccacagacagccatgaggaggtgcgcagcggcaccagctacatcctgccctttgccagccgcttcctgtccttccgggctgacagcgcccacgcctccatggtgaatgtgcccaagaccaggaggaccttctgcaagaagtgtgggaagcaccagccccacaaggtgacccagtacaagaagggcaaggacagcctgtatgcccagggcaagagaagatatgacaggaagcagagcggctacggcggccagaccaagcccatcttcaggaagaaggccaagaccaccaagaagatcgtgctgcggctggagtgtgtggagcccaactgccgcagcaagaggatgctggccatcaagcgctgcaagcactttgagctgggcggggacaagaagaggaagggccaggtgatccagttctag

SEQ ID NO: 168237 - DNA, 321 bp, synthetic construct
  misc_feature 1..321: note = Description of Artificial Sequence: Synthetic coding sequence
  source 1..321: mol_type = other DNA
atggtgaatgtgcccaagaccaggaggaccttctgcaagaagtgtgggaagcaccagccccacaaggtgacccagtacaagaagggcaaggacagcctgtatgcccagggcaagagaagatatgacaggaagcagagcggctacggcggccagaccaagcccatcttcaggaagaaggccaagaccaccaagaagatcgtgctgcggctggagtgtgtggagcccaactgccgcagcaagaggatgctggccatcaagcgctgcaagcactttgagctgggcggggacaagaagaggaagggccaggtgatccagttctag

SEQ ID NO: 168238 - DNA, 321 bp, synthetic construct
  misc_feature 1..321: note = Description of Artificial Sequence: Synthetic coding sequence
  source 1..321: mol_type = other DNA
atggtgaatgtgcccaagaccaggaggaccttctgcaagaagtgtgggaagcaccagccccacaaggtgacccagtacaagaagggcaaggacagcctgtatgcccagggcagaagaagatatgacaggaagcagagcggctacggcggccagaccaagcccatcttcaggaagaaggccaagaccaccaagaagatcgtgctgcggctggagtgtgtggagcccaactgccgcagcaagaggatgctggccatcaagcgctgcaagcactttgagctgggcggggacaagaagaggaagggccaggtgatccagttctag

SEQ ID NO: 168239 - DNA, 294 bp, synthetic construct
  misc_feature 1..294: note = Description of Artificial Sequence: Synthetic coding sequence
  source 1..294: mol_type = other DNA
atgaccaagggcaccagcagctttgggaagagaagaaacaagacccacaccctgtgccgccgctgtggcagcaaggcctaccacctgcagaagagcacctgtgggaaatgtggctacccagccaagaggaagaggaagtacaactggagcgccaaggccaagagaagaaacaccactggaactggaaggatgaggcacctgaagatcgtgtaccgccgcttccgccacggcttccgggagggcaccacccccaagcccaagagagctgctgtggccgccagcagcagcagctag

SEQ ID NO: 168240 - DNA, 207 bp, synthetic construct
  misc_feature 1..207: note = Description of Artificial Sequence: Synthetic coding sequence
  source 1..207: mol_type = other DNA
atggtgaagaagattgagatcagccagcacgccaagtacacctgcagcttctgtgggaagaccaagatgaagagaagagctgtgggcatctggcactgcggcagctgcatgaagacagtggccggcggggcctggacctacaacaccaccagcgctgtgacagtgaagagcgccatccggcggctgaaggagctgaaggaccagtag

SEQ ID NO: 168241 - DNA, 279 bp, synthetic construct
  misc_feature 1..279: note = Description of Artificial Sequence: Synthetic coding sequence
  source 1..279: mol_type = other DNA
atggccaagaggaccaagaaggtgggcatcgtgggcaagtatggcacccgctacggggccagcctgaggaagatggtgaagaagattgagatcagccagcacgccaagtacacctgcagcttctgtgggaagaccaagatgaagagaagagctgtgggcatctggcactgcggcagctgcatgaagacagtggccggcggggcctggacctacaacaccaccagcgctgtgacagtgaagagcgccatccggcggctgaaggagctgaaggaccagtag

SEQ ID NO: 168242 - DNA, 213 bp, synthetic construct
  misc_feature 1..213: note = Description of Artificial Sequence: Synthetic coding sequence
  source 1..213: mol_type = other DNA
atgcccaggaagattgaggagatcaaggacttcctgctgacagcccggaggaaggatgccaagtctgtgaagatcaagaagaacaaggacaacgtgaagttcaaggtgcgctgcagccgctacctgtacaccctggtgatcacagacaaggagaaggccgagaagctgaagcagagcctgcccccaggcctggccgtgaaggagctgaagtag

SEQ ID NO: 168243 - DNA, 213 bp, synthetic construct; identical to SEQ ID NO: 168242
  misc_feature 1..213: note = Description of Artificial Sequence: Synthetic coding sequence
  source 1..213: mol_type = other DNA

SEQ ID NO: 168244 - DNA, 213 bp, synthetic construct; identical to SEQ ID NO: 168242
  misc_feature 1..213: note = Description of Artificial Sequence: Synthetic coding sequence
  source 1..213: mol_type = other DNA

SEQ ID NO: 168245 - DNA, 156 bp, synthetic construct
  misc_feature 1..156: note = Description of Artificial Sequence: Synthetic coding sequence
  source 1..156: mol_type = other DNA
atgagcagccacaagaccttcaccatcaagcgcttcctggccaagaagcagaagcagaaccggcccatcccccagtggatccagatgaagccaggcagcaagatccgctacaacagcaagagaagacactggaggaggaccaagctgggcctgtag

SEQ ID NO: 168246 - DNA, 156 bp, synthetic construct; identical to SEQ ID NO: 168245
  misc_feature 1..156: note = Description of Artificial Sequence: Synthetic coding sequence
  source 1..156: mol_type = other DNA

SEQ ID NO: 168247 - DNA, 156 bp, synthetic construct; identical to SEQ ID NO: 168245
  misc_feature 1..156: note = Description of Artificial Sequence: Synthetic coding sequence
  source 1..156: mol_type = other DNA

SEQ ID NO: 168248 - DNA, 1284 bp, synthetic construct
  misc_feature 1..1284: note = Description of Artificial Sequence: Synthetic coding sequence
  source 1..1284: mol_type = other DNA
atggcctgtgcccggcccctcatctctgtgtacagcgagaagggggagagcagcggcaagaatgtgaccctgcctgctgtgttcaaggcccccatccggccagacatcgtgaactttgtgcacaccaacctgaggaagaacaaccggcagccctatgctgtgtctgagctggccggccaccagaccagcgctgagagctggggcaccggccgggctgtggcccgcatcccccgggtgcggggcggcggcacccacaggagcggccagggcgccttcggcaacatgtgccggggcggccgcatgtttgcccccaccaagacctggaggcgctggcacagaagagtgaacaccacccagaagagatatgccatctgcagcgccctggccgccagcgccctgcctgccctggtgatgagcaagggccaccgcatcgaggaggtgcctgagctgcccctggtggtggaggacaaggtggagggctacaagaagaccaaggaggccgtgctgctgctgaagaagctgaaggcctggaatgacatcaagaaggtgtatgccagccagaggatgagagctgggaagggcaagatgaggaacagaagacgcatccagaggcggggcccctgcatcatctacaatgaagataatggcatcatcaaggccttcaggaacatccctggcatcaccctgctgaatgtgtccaagctgaacatcctgaagctggcccctgggggccacgtgggccgcttctgcatctggacagaaagtgccttcaggaagctggatgagctgtatggcacctggaggaaggccgccagcctgaagagcaactacaacctgcccatgcacaagatgatcaacacagacctgagccgcatcctgaagagccctgagatccagagggccctgcgggcccccaggaagaagatccacagaagagtgctgaagaagaaccccctgaagaacctgcgcatcatgctgaagctgaacccctatgccaagaccatgagaagaaacaccatcctgcggcaggccaggaaccacaagctgcgggtggacaaggctgctgctgctgctgctgccctgcaggccaagagtgatgagaaggctgctgtggccggcaagaagcctgtggtgggcaagaagggcaagaaggctgctgtgggcgtgaagaagcagaagaagcccctggtgggcaagaaggccgccgccaccaagaagccagcccctgagaagaagccagctgagaagaagcccaccacagaggagaagaagccagctgcctag

SEQ ID NO: 168249 - DNA, 1221 bp, synthetic construct
  misc_feature 1..1221: note = Description of Artificial Sequence: Synthetic coding sequence
  source 1..1221: mol_type = other DNA
atggcctgtgcccggcccctcatctctgtgtacagcgagaagggggagagcagcggcaagaatgtgaccctgcctgctgtgttcaaggcccccatccggccagacatcgtgaactttgtgcacaccaacctgaggaagaacaaccggcagccctatgctgtgtctgagctggccggccaccagaccagcgctgagagctggggcaccggccgggctgtggcccgcatcccccgggtgcggggcggcggcacccacaggagcggccagggcgccttcggcaacatgtgccggggcggccgcatgtttgcccccaccaagacctggaggcgctggcacagaagagtgaacaccacccagaagagatatgccatctgcagcgccctggccgccagcgccctgcctgccctggtgatgagcaagggccaccgcatcgaggaggtgcctgagctgcccctggtggtggaggacaaggtggagggctacaagaagaccaaggaggccgtgctgctgctgaagaagctgaaggcctggaatgacatcaagaaggtgtatgccagccagaggatgagagctgggaagggcaagatgaggaacagaagacgcatccagaggcggggcccctgcatcatctacaatgaagataatggcatcatcaaggccttcaggaacatccctggcatcaccctgctgaatgtgtccaagctgaacatcctgaagctggcccctgggggccacgtgggccgcttctgcatctggacagaaagtgccttcaggaagctggatgagctgtatggcacctggaggaaggccgccagcctgaagagcaactacaacctgcccatgcacaagatgatcaacacagacctgagccgcatcctgaagagccctgagatccagagggccctgcgggcccccaggaagaagatccacagaagagtgctgaagaagaaccccctgaagaacctgcgcatcatgctgaagctgaacccctatgccaagaccatgagaagaaacaccatcctgcggcaggccaggaaccacaagctgcgggtggacaaggctgctgctgctgctgctgccctgcaggccaagagtgatgagaaggctgctgtggccggcaagaagcctgtggtgggcaagaagggcaagaaggctgctgtgggggagaagaagccagctgagaagaagcccaccacagaggagaagaagccagctgcctag

SEQ ID NO: 168250 - DNA, 456 bp, synthetic construct
  misc_feature 1..456: note = Description of Artificial Sequence: Synthetic coding sequence
  source 1..456: mol_type = other DNA
atggcctgtgcccggcccctcatctctgtgtacagcgagaagggggagagcagcggcaagaatgtgaccctgcctgctgtgttcaaggcccccatccggccagacatcgtgaactttgtgcacaccaacctgaggaagaacaaccggcagccctatgctgtgtctgagctggccggccaccagaccagcgctgagagctggggcaccggccgggctgtggcccgcatcccccgggtgcggggcggcggcacccacaggagcggccagggcgccttcggcaacatgtgccggggcggccgcatgtttgcccccaccaagacctggaggcgctggcacagaagagtgaacaccacccagaagctggagaaccacgtggaggccaagcccatctgcaaggaccacgcccctgagcaccacagcagccctggccaggagagccaggcccctgggggctag

SEQ ID NO: 168251 - DNA, 78 bp, synthetic construct
  misc_feature 1..78: note = Description of Artificial Sequence: Synthetic coding sequence
  source 1..78: mol_type = other DNA
atgagggccaagtggaggaagaagaggatgaggcggctgaagaggaagaggaggaagatgaggcagaggagcaagtag

SEQ ID NO: 168252 - DNA, 78 bp, synthetic construct; identical to SEQ ID NO: 168251
  misc_feature 1..78: note = Description of Artificial Sequence: Synthetic coding sequence
  source 1..78: mol_type = other DNA

SEQ ID NO: 168253 - DNA, 381 bp, synthetic construct
  misc_feature 1..381: note = Description of Artificial Sequence: Synthetic coding sequence
  source 1..381: mol_type = other DNA
atgattgtgcgggtgaccaacagagacatcatctgccagatcgcctatgccagaattgaaggagacatgattgtgtgtgccgcctatgcccacgagctgcccaagtatggagtgaaggtgggcctgaccaactatgctgctgcctactgcaccggcctgctgctggcccggcggctgctgaacagatttggcatggacaagatctatgagggccaggtggaggtgactggagatgagtacaacgtggagagcattgatggccagcccggggccttcacctgctacctggatgctggcctggcccggaccaccactggaaacaaggtgtttggagccctgaagggagctgtggatggcggcctgagcatcccccacaggtag

SEQ ID NO: 168254 - DNA, 894 bp, synthetic construct
  misc_feature 1..894: note = Description of Artificial Sequence: Synthetic coding sequence
  source 1..894: mol_type = other DNA
atgggctttgtgaaggtggtgaagaacaaggcctacttcaagcgctaccaggtgaagttcagaagaagaagagagggcaagacagactactatgccaggaagaggctggtgatccaggacaagaacaagtacaacacccccaagtacaggatgattgtgcgggtgaccaacagagacatcatctgccagatcgcctatgccagaattgaaggagacatgattgtgtgtgccgcctatgcccacgagctgcccaagtatggagtgaaggtgggcctgaccaactatgctgctgcctactgcaccggcctgctgctggcccggcggctgctgaacagatttggcatggacaagatctatgagggccaggtggaggtgactggagatgagtacaacgtggagagcattgatggccagcccggggccttcacctgctacctggatgctggcctggcccggaccaccactggaaacaaggtgtttggagccctgaagggagctgtggatggcggcctgagcatcccccacagcaccaagcgcttccctggctatgattctgagagcaaggagttcaatgctgaggtgcacaggaagcacatcatgggccagaatgtggccgactacatgagatacctgatggaggaggatgaagatgcctacaagaagcagttcagccagtacatcaagaacagcgtgaccccagacatgatggaggagatgtacaagaaggcccatgctgccatcagagaaaatcctgtgtatgagaagaagcccaagaaggaggtgaagaagaagcgctggaaccggcccaagatgagcctggcccagaagaaggacagagtggcccagaagaaggccagcttcctgcgggcccaggagagagctgctgagagctag

SEQ ID NO: 168255 - DNA, 744 bp, synthetic construct
  misc_feature 1..744: note = Description of Artificial Sequence: Synthetic coding sequence
  source 1..744: mol_type = other DNA
atgattgtgcgggtgaccaacagagacatcatctgccagatcgcctatgccagaattgaaggagacatgattgtgtgtgccgcctatgcccacgagctgcccaagtatggagtgaaggtgggcctgaccaactatgctgctgcctactgcaccggcctgctgctggcccggcggctgctgaacagatttggcatggacaagatctatgagggccaggtggaggtgactggagatgagtacaacgtggagagcattgatggccagcccggggccttcacctgctacctggatgctggcctggcccggaccaccactggaaacaaggtgtttggagccctgaagggagctgtggatggcggcctgagcatcccccacagcaccaagcgcttccctggctatgattctgagagcaaggagttcaatgctgaggtgcacaggaagcacatcatgggccagaatgtggccgactacatgagatacctgatggaggaggatgaagatgcctacaagaagcagttcagccagtacatcaagaacagcgtgaccccagacatgatggaggagatgtacaagaaggcccatgctgccatcagagaaaatcctgtgtatgagaagaagcccaagaaggaggtgaagaagaagcgctggaaccggcccaagatgagcctggcccagaagaaggacagagtggcccagaagaaggccagcttcctgcgggcccaggagagagctgctgagagctag

SEQ ID NO: 168256 - DNA, 867 bp, synthetic construct
  misc_feature 1..867: note = Description of Artificial Sequence: Synthetic coding sequence
  source 1..867: mol_type = other DNA
atggccggggagaaggtggagaagccagacaccaaggagaagaagccagaggccaagaaggtggatgctgggggcaaggtgaagaagggcaacctgaaggccaagaagcccaagaagggcaagccccactgcagcaggaaccctgtgctggtgcggggcatcggccgctacagccgcagcgccatgtacagcaggaaggccatgtacaagaggaagtacagcgctgccaagagcaaggtggagaagaagaagaaggagaaggtgctggccaccgtgaccaagcctgtgggcggggacaagaatggaggcaccagggtggtgaagctgaggaagatgccccgctactaccccacagaagatgtgcccaggaagctgctgagccacggcaagaagcccttcagccagcacgtgaggaagctgcgggccagcatcaccccaggcaccatcctgatcatcctgaccggccgccaccggggcaagagggtggtgttcctgaagcagctggccagcggcctgctgctggtgacaggccccctggtgctgaacagagtgcccctgcggaggacccaccagaagtttgtgattgccaccagcaccaagattgacatcagcaatgtgaagatccccaagcacctgacagatgcctacttcaagaagaagaagctgaggaagcccaggcaccaggagggggagatctttgacacagagaaggagaagtatgagatcacagagcagaggaagattgaccagaaggctgtggacagccagatcctgcccaagatcaaggccatcccccagctgcagggctacctgcggtctgtgtttgccctgaccaacggcatctacccccacaagctggtgttctag

SEQ ID NO: 168257 - DNA, 867 bp, synthetic construct; identical to SEQ ID NO: 168256
  misc_feature 1..867: note = Description of Artificial Sequence: Synthetic coding sequence
  source 1..867: mol_type = other DNA

SEQ ID NO: 168258 - DNA, 318 bp, synthetic construct
  misc_feature 1..318: note = Description of Artificial Sequence: Synthetic coding sequence
  source 1..318: mol_type = other DNA
atggccggggagaaggtggagaagccagacaccaaggagaagaagccagaggccaagaaggtggatgctgggggcaaggtgaagaagggcaacctgaaggccaagaagcccaagaagggcaagccccactgcagcaggaaccctgtgctggtgcggggcatcggccgctacagccgcagcgccatgtacagcaggaaggccatgtacaagaggaagtacagcgctgccaagagcaaggtggagaagaagaagaaggagaaggtgctggccaccgtgaccaagcctgtgggcggggacaagaatggaggcaccaggtag

SEQ ID NO: 168259 - DNA, 219 bp, synthetic construct
  misc_feature 1..219: note = Description of Artificial Sequence: Synthetic coding sequence
  source 1..219: mol_type = other DNA
atggccggggagaaggtggagaagccagacaccaaggagaagaagccagaggccaagaaggtggatgctgggggcaaggtgaagaagggcaacctgaaggccaagaagcccaagaagggcaagccccactgcagcaggaaccctgtgctggtgcggggcatcggccgctacagccgcagcgccatgtacagcaggaaggccatgtacaagaggaagtag

SEQ ID NO: 168260 - DNA, 480 bp, synthetic construct
  misc_feature 1..480: note = Description of Artificial Sequence: Synthetic coding sequence
  source 1..480: mol_type = other DNA
atggccggggagaaggtggagaagccagacaccaaggagaagaagccagaggccaagaaggtggatgctgggggcaaggtgaagaagggcaacctgaaggccaagaagcccaagaagggcaagccccactgcagcaggaaccctgtgctggtgcggggcatcggccgctacagccgcagcgccatgtacagcaggaaggccatgtacaagaggaagtacagcgctgccaagagcaaggtggagaagaagaagaaggagaaggtgctggccaccgtgaccaagcctgtgggcggggacaagaatggaggcaccagggtggtgaagctgaggaagatgccccgctactaccccacagaagatgtgcccaggaagctgctgagccacggcaagaagcccttcagccagcacgtgaggaagctgcgggccagcatcaccccaggcaccatcctgatcatcctgaccggccgccaccggggctag

SEQ ID NO: 168261 - DNA, 345 bp, synthetic construct
  misc_feature 1..345: note = Description of Artificial Sequence: Synthetic coding sequence
  source 1..345: mol_type = other DNA
atggccggggagaaggtggagaagccagacaccaaggagaagaagccagaggccaagaaggtggatgctgggggcaaggtgaagaagggcaacctgaaggccaagaagcccaagaagggcaagccccactgcagcaggaaccctgtgctggtgcggggcatcggccgctacagccgcagcgccatgtacagcaggaaggccatgtacaagaggaagtacagcgctgccaagagcaaggtggagaagaagaagaaggagaaggtgctggccaccgtgaccaagcctgtgggcggggacaagaatggaggcaccagggtggtgaagctgaggaagatggtgaggtag

SEQ ID NO: 168262 - DNA, 345 bp, synthetic construct; identical to SEQ ID NO: 168261
  misc_feature 1..345: note = Description of Artificial Sequence: Synthetic coding sequence
  source 1..345: mol_type = other DNA

SEQ ID NO: 168263 - DNA, 747 bp, synthetic construct
  misc_feature 1..747: note = Description of Artificial Sequence: Synthetic coding sequence
  source 1..747: mol_type = other DNA
atggagggcgtggaggagaagaagaaggaggtgcctgctgtgcctgagaccctgaagaagaagagaagaaactttgctgagctgaagatcaagaggctgaggaagaagtttgcccagaagatgctgaggaaggcccggaggaagctgatctatgagaaggccaagcactaccacaaggagtaccggcagatgtacagaacagagatccgcatggccaggatggccaggaaggccggcaacttctacgtgcctgctgagcccaagctggcctttgtgatccgcatccggggcatcaatggagtgagccccaaggtgaggaaggtgctgcagctgctgcggctgcggcagatcttcaacggcacctttgtgaagctgaacaaggccagcatcaacatgctgagaattgtggagccctacatcgcctggggctaccccaacctgaagtctgtgaatgaactcatctacaagaggggctacggcaagatcaacaagaagagaattgccctgacagacaatgccctgattgcccggagcctgggcaagtatggcatcatctgcatggaggacctgatccacgagatctacacagtgggcaagcgcttcaaggaggccaacaacttcctgtggcccttcaagctgagcagcccccggggcggcatgaagaagaagaccacccactttgtggagggcggagatgctggcaaccgggaggaccagatcaacagactcatccggaggatgaactag

SEQ ID NO: 168264 - DNA, 456 bp, synthetic construct
  misc_feature 1..456: note = Description of Artificial Sequence: Synthetic coding sequence
  source 1..456: mol_type = other DNA
atggcccccctgtaccaggccgccgggaaaggagatgtgcccaccaagaggcctcctgtgctgcgggccggcgtgaacacagtgaccaccctggtggagaacaagaaggcccagctggtggtgattgcccatgatgtggaccccatcgagctggtggtgttcctgcctgccctgtgcaggaagatgggcgtgccctactgcatcatcaagggcaaggcccggctgggccgcctggtgcacaggaagacctgcaccaccgtggccttcacccaggtgaacagtgaagataaaggagccctggccaagctggtggaggccatccgcaccaactacaatgacagatatgatgagatcagaagacactggggcggcaatgtgctgggccccaagtctgtggccagaattgccaagctggagaaggccaaggccaaggagctggccaccaagctgggctag

SEQ ID NO: 168265 - DNA, 801 bp, synthetic construct
  misc_feature 1..801: note = Description of Artificial Sequence: Synthetic coding sequence
  source 1..801: mol_type = other DNA
atgcccaagggcaagaaggccaagggcaagaaggtggccccagccccagctgtggtgaagaagcaggaggccaagaaggtggtgaaccccctgtttgagaagaggcccaagaactttggaattggccaggacatccagcccaagagggacctgaccaggtttgtgaagtggccccgctacatccggctgcagaggcagagggccatcctgtacaagaggctgaaggtgcccccagccatcaaccagttcacccaggccctggaccggcagacagccacccagctgctgaagctggcccacaagtacagacctgagaccaagcaggagaagaagcagaggctgctggcccgggcagagaagaaggctgctggaaaaggagatgtgcccaccaagaggcctcctgtgctgcgggccggcgtgaacacagtgaccaccctggtggagaacaagaaggcccagctggtggtgattgcccatgatgtggaccccatcgagctggtggtgttcctgcctgccctgtgcaggaagatgggcgtgccctactgcatcatcaagggcaaggcccggctgggccgcctggtgcacaggaagacctgcaccaccgtggccttcacccaggtgaacagcgaggacaagggggccctggccaagctggtggaggccatccgcaccaactacaatgacagatatgatgagatccgccgccactggggcggcaatgtgctgggccccaagtctgtggcccgcatcgccaagctggagaaggccaaggccaaggagctggccaccaagctgggctag

SEQ ID NO: 168266 - DNA, 576 bp, synthetic construct
  misc_feature 1..576: note = Description of Artificial Sequence: Synthetic coding sequence
  source 1..576: mol_type = other DNA
atgctggtgcggctgaatgtgcgctgcagctgccggggcgtggtgctgggcggctgcaggaagctgctggccagcctggtgcagcccaagggcaagaaggccaagggcaagaaggtggccccagccccagctgtggtgaagaagcaggaggccaagaaggtggtgaaccccctgtttgagaagaggcccaagaactttggcatcggccaggacatccagcccaagagggacctgaccaggtttgtgaagtggccccgctacatccggctgcagaggcagagggccatcctgtacaagaggctgaaggtgcccccagccatcaaccagttcacccaggccctggaccggcagacagccacccagctgctgaagctggcccacaagtacagacctgagaccaagcaggagaagaagcagaggctgctggcccgggcagagaagaaggccgccgggaaaggagatgtgcccaccaagaggcctcctgtgctgcgggccggcgtgaacacagtgaccaccctggtggagaacaagaaggcccagctggtggtgattgcccatgatgtggaccccatctag

SEQ ID NO: 168267 - DNA, 774 bp, synthetic construct
  misc_feature 1..774: note = Description of Artificial Sequence: Synthetic coding sequence
  source 1..774: mol_type = other DNA
atgggccgggtcatccggggccagaggaagggggccggcagcgtcttccgggcccacgtgaagcacaggaagggggccgcccggctgcgggctgtggactttgctgagcggcacggctacatcaagggcatcgtgaaggacatcatccatgaccccggccgcggggcccccctggccaaggtggtgttccgggacccctaccgcttcaagaagaggacagagctgttcatcgctgctgagggcatccacacaggccagtttgtgtactgtgggaagaaggcccagctgaacattggaaatgtgctgcctgtgggcaccatgcctgagggcaccatcgtgtgctgcctggaggagaagccaggggaccggggcaagctggcccgggccagcggcaactatgccaccgtcatcagccacaaccctgagaccaagaagaccagggtgaagctgcccagcggcagcaagaaggtgatcagcagcgccaacagagctgtggtgggcgtggtggccggcggcggcagaattgacaagcccatcctgaaggccggccgggcctaccacaagtacaaggccaagaggaactgctggccccgggtgcggggcgtggccatgaaccctgtggagcacccctttggaggcggcaaccaccagcacatcggcaagcccagcaccatcagaagagatgccccagctggcaggaaggtgggcctgattgctgccaggagaacaggccgcctgcggggcaccaagacagtgcaggagaaggagaactag

SEQ ID NO: 168268 - DNA, 774 bp, synthetic construct; identical to SEQ ID NO: 168267
  misc_feature 1..774: note = Description of Artificial Sequence: Synthetic coding sequence
  source 1..774: mol_type = other DNA

SEQ ID NO: 168269 - DNA, 579 bp, synthetic construct
  misc_feature 1..579: note = Description of Artificial Sequence: Synthetic coding sequence
  source 1..579: mol_type = other DNA
atgaagaccatcctgagcaaccagacagtggacatcccagaaaatgtggacatcaccctgaagggccgcaccgtcatcgtgaagggcccccggggcaccctgcggcgggacttcaaccacatcaacgtggagctgagcctgctgggcaagaagaagaagaggctgcgggtggacaagtggtggggcaacaggaaggagctggccaccgtgaggaccatctgcagccacgtgcagaacatgatcaagggcgtgaccctgggcttccgctacaagatgaggtctgtgtatgcccacttccccatcaacgtggtgatccaggagaatggcagcctggtggagatccggaacttcctgggggagaagtacatccggcgggtgaggatgaggcctggggtggcctgcagcgtgtcccaggcccagaaggatgagctgatcctggagggcaatgacatcgagctggtgagcaacagcgctgccctgatccagcaggccaccaccgtgaagaacaaggacatcaggaagttcctggatggcatctacgtgtctgagaagggcaccgtgcagcaggctgatgaatag

SEQ ID NO: 168270 - DNA, 444 bp, synthetic construct
  misc_feature 1..444: note = Description of Artificial Sequence: Synthetic coding sequence
  source 1..444: mol_type = other DNA
atgaagaccatcctgagcaaccagacagtggacatcccagaaaatgtggacatcaccctgaagggccgcaccgtcatcgtgaagggcccccggggcaccctgcggcgggacttcaaccacatcaacgtggagctgagcctgctgggcaagaagaagaagaggctgcgggtggacaagtggtggggcaacaggaaggagctggccaccgtgaggaccatctgcagccacgtgcagaacatgatcaagggcgtgaccctgggcttccgctacaagatgaggtctgtgtatgcccacttccccatcaacgtggtgatccaggagaatggcagcctggtggagatccggaacttcctgggggagaagtacatccggcgggtgaggatgaggcctggggtggcctgcttcaagttcagcggctttgacagcgccagccacaacagctag

SEQ ID NO: 168271 - DNA, 579 bp, synthetic construct; identical to SEQ ID NO: 168269
  misc_feature 1..579: note = Description of Artificial Sequence: Synthetic coding sequence
  source 1..579: mol_type = other DNA

SEQ ID NO: 168272 - DNA, 501 bp, synthetic construct
  misc_feature 1..501: note = Description of Artificial Sequence: Synthetic coding sequence
  source 1..501: mol_type = other DNA
atgaagaccatcctgagcaaccagacagtggacatcccagaaaatgtggacatcaccctgaagggccgcaccgtcatcgtgaagggcccccggggcaccctgcggcgggacttcaaccacatcaacgtggagctgagcctgctgggcaagaagaagaagaggctgcgggtggacaagtggtggggcaacaggaaggagctggccaccgtgaggaccatctgcagccacgtgcagaacatgatcaagggcgtgaccctgggcttccgctacaagatgaggtctgtgtatgcccacttccccatcaacgtggtgatccaggagaatggcagcctggtggagatccggaacttcctgggggagaagtacatccggcgggtgaggatgaggcctggggtggcctgcagcgtgtcccaggcccagaaggatgagctgatcctggagggcaatgacatcgagctggtgagcaacagcgctgccctgatccagcaggccaccacctag

SEQ ID NO: 168273 - DNA, 498 bp, synthetic construct
  misc_feature 1..498: note = Description of Artificial Sequence: Synthetic coding sequence
  source 1..498: mol_type = other DNA
atgctgatgcccaagaagaacagaattgccatctatgagctgctcttcaaggagggcgtgatggtggccaagaaggatgtgcacatgcccaagcaccctgagctggccgacaagaatgtgcccaacctgcacgtgatgaaggccatgcagagcctgaagagccggggctacgtgaaggagcagtttgcctggaggcacttctactggtacctgaccaatgaaggcatccagtacctgcgggactacctgcacctgcccccagaaattgtgcctgccaccctgcggcgcagcaggcctgagaccggccggccccggcccaagggcctggagggggagaggcctgcccggctgaccagaggagaggccgaccgggacacctaccgccgctctgctgtgcccccaggagctgacaagaaggccgaggccggggccggcagcgccacagagttccagttccggggcggcttcggccggggccggggccagcccccccagtag

SEQ ID NO: 168274 - DNA, 477 bp, synthetic construct
  misc_feature 1..477: note = Description of Artificial Sequence: Synthetic coding sequence
  source 1..477: mol_type = other DNA
atggctgacatccagacagagcgggcctaccagaagcagcccaccatcttccagaacaagaagagggtgctgctgggggagaccgggaaggagaagctgccccgctactacaagaacatcggcctgggcttcaagacccccaaggaggccatcgagggcacctacatcgacaagaagtgccccttcaccggaaatgtgtccatccggggccgcatcctgagcggcgtggtgaccaagatgaagatgcagaggaccatcgtcatcagaagagactacctgcactacatcaggaagtacaacagatttgagaagaggcacaagaacatgtctgtgcacctgagcccctgcttcagagatgtgcagatcggggacatcgtgacagtgggggagtgccggcccctgagcaagacagtgcgcttcaacgtgctgaaggtgaccaaggctgctggcaccaagaagcagttccagaagttctag

SEQ ID NO: 168275 - DNA, 423 bp, synthetic construct
  misc_feature 1..423: note = Description of Artificial Sequence: Synthetic coding sequence
  source 1..423: mol_type = other DNA
atgacctccatgacccagagcctgcgggaggtgatcaaggccatgaccaaggccaggaactttgagcgggtgctgggcaagatcaccctggtgtctgctgcccctgggaaggtgatctgtgagatgaaggtggaggaggagcacaccaatgccatcggcaccctgcacggcggcctgacagccaccctggtggacaacatcagcaccatggccctgctgtgcacagagcggggggcccctggggtgtctgtggacatgaacatcacctacatgagccctgccaagctgggggaggacatcgtcatcacagcccacgtgctgaagcagggcaagaccctggccttcacctctgtggacctgaccaacaaggccaccgggaagctgattgcccagggccgccacaccaagcacctgggcaactag

SEQ ID NO: 168276 - DNA, 456 bp, synthetic construct
  misc_feature 1..456: note = Description of Artificial Sequence: Synthetic coding sequence
  source 1..456: mol_type = other DNA
atgggccgcatgcacgcccctgggaagggcctgagccagagcgccctgccctacagaagatctgtgcccacctggctgaagctgaccagtgatgatgtgaaggagcagatctacaagctggccaagaagggcctgacccccagccagatcggggtcatcctgcgggacagccacggcgtggcccaggtgcgctttgtgactggaaacaagatcctgcgcatcctgaagagcaagggcctggccccagacctgcctgaggacctgtaccacctgatcaagaaggctgtggccgtgaggaagcacctggagaggaacaggaaggacaaggatgccaagttccgcctcatcctgattgagagccgcatccaccggctggcccgctactacaagaccaagagggtgctgccccccaactggaagtatgagagcagcacagccagcgccctggtggcctag

SEQ ID NO: 168277 - DNA, 456 bp, synthetic construct
  misc_feature 1..456: note = Description of Artificial Sequence: Synthetic coding sequence
  source 1..456: mol_type = other DNA
atggcccccaggaagggcaaggagaagaaggaggagcaggtgatcagcctgggcccccaggtggccgagggagaaaatgtgtttggagtgtgccacatctttgccagcttcaatgacacctttgtgcacgtgacagacctgagcggcaaggagaccatctgccgggtgactggaggcatgaaggtgaaggctgacagagatgagagcagcccctatgctgccatgctggccgcccaggatgtggcccagcgctgcaaggagctgggcatcacagccctgcacatcaagctgcgggccaccggcggcaacagaaccaagaccccaggccctggggcccagagcgccctgcgggccctggcccggagcggcatgaagattggaagaattgaagatgtgacccccatccccagcgacagcaccaggaggaaaggaggccggcggggccgccgcctgtag

SEQ ID NO: 168278 - DNA, 456 bp, synthetic construct; identical to SEQ ID NO: 168277
  misc_feature 1..456: note = Description of Artificial Sequence: Synthetic coding sequence
  source 1..456: mol_type = other DNA

SEQ ID NO: 168279 - DNA, 456 bp, synthetic construct; identical to SEQ ID NO: 168277
  misc_feature 1..456: note = Description of Artificial Sequence: Synthetic coding sequence
  source 1..456: mol_type = other DNA

SEQ ID NO: 168280 - DNA, 456 bp, synthetic construct; identical to SEQ ID NO: 168277
  misc_feature 1..456: note = Description of Artificial Sequence: Synthetic coding sequence
  source 1..456: mol_type = other DNA

SEQ ID NO: 168281 - DNA, 6912 bp, synthetic construct; identical to SEQ ID NO: 142804
  misc_feature 1..6912: note = Description of Artificial Sequence: Synthetic coding sequence
  source 1..6912: mol_type = other DNA

SEQ ID NO: 168282 - DNA, 438 bp, synthetic construct
  misc_feature 1..438: note = Description of Artificial Sequence: Synthetic coding sequence
  source 1..438: mol_type = other DNA
atggccgaggtggagcagaagaagaagaggaccttcaggaagttcacctacagaggagtggacctggaccagctgctggacatgtcctatgagcagctgatgcagctgtacagcgcccggcagaggcggcggctgaacagaggcctgcggaggaagcagcacagcctgctgaagaggctgaggaaggccaagaaggaggccccacccatggagaagccagaggtggtgaagacccacctgcgggacatgatcatcctgcctgagatggtgggctccatggtgggcgtgtacaacgggaagaccttcaaccaggtggagatcaagccagagatgattggccactacctgggggagttcagcatcacctacaagcctgtgaagcacggccggcccggcattggagccacccacagcagccgcttcatccccctgaagtag

SEQ ID NO: 168283 - DNA, 393 bp, synthetic construct
  misc_feature 1..393: note = Description of Artificial Sequence: Synthetic coding sequence
  source 1..393: mol_type = other DNA
atggtgaggatgaatgtgctggctgatgccctgaagagcatcaacaatgctgagaagaggggcaagaggcaggtgctgatccggccctgcagcaaggtgattgtgcgcttcctgactgtgatgatgaagcacggctacatcggggagtttgagatcattgatgaccaccgggccggcaagatcgtggtgaacctgaccggccgcctgaacaagtgtggggtcatcagccccaggtttgatgtgcagctgaaggacctggagaagtggcagaacaacctgctgcccagccggcagtttggcttcatcgtgctgaccaccagcgctggcatcatggaccacgaggaggcccggaggaagcacactggaggcaagatcctgggcttcttcttctag

SEQ ID NO: 168284 - DNA, 393 bp, synthetic construct; identical to SEQ ID NO: 168283
  misc_feature 1..393: note = Description of Artificial Sequence: Synthetic coding sequence
  source 1..393: mol_type = other DNA

SEQ ID NO: 168285 - DNA, 441 bp, synthetic construct
  misc_feature 1..441: note = Description of Artificial Sequence: Synthetic coding sequence
  source 1..441: mol_type = other DNA
atgcccagcaagggccccctgcagagcgtgcaggtgtttggaaggaagaagacagccacagctgtggcccactgcaagagaggaaatggcctcatcaaggtgaatggccggcccctggagatgattgagcccaggaccctgcagtacaagctgctggagcctgtgctgctgctgggcaaggagagatttgctggggtggacatccgggtgcgggtgaagggcggcggccacgtggcccagatctatgccatccggcagagcatcagcaaggccctggtggcctactaccagaagtatgtggatgaggccagcaagaaggagatcaaggacatcctgatccagtatgacaggaccctgctggtggccgacccccggcgctgtgagagcaagaagtttggaggccctggggcccgggcccgctaccagaagagctacagatag

SEQ ID NO: 168286 - DNA, 459 bp, synthetic construct
  misc_feature 1..459: note = Description of Artificial Sequence: Synthetic coding sequence
  source 1..459: mol_type = other DNA
atgcccagcaagggccccctgcagagcgtgcaggtgtttggaaggaagaagacagccacagctgtggcccactgcaagagaggaaatggcctcatcaaggtgaatggccggcccctggagatgattgagcccaggaccctgcagtacaagctgctggagcctgtgctgctgctgggcaaggagagatttgctggggtggacatccgggtgcgggtgaagggcggcggccacgtggcccagatctacggggagagccaggagctgggcgcctggaggcgctggctgtgggagggcggcctgcacagcgcccctgtgcccttcaactgtgtgtccttcagccagctgtctgtgagccccagccccaagccctggtggcccatcaccaggaacatgtggatgaggctgccccggcggcgcagcaagaccagcagcagctccatgacaggcccctgctggtag

SEQ ID NO: 168287 - DNA, 408 bp, synthetic construct
  misc_feature 1..408: note = Description of Artificial Sequence: Synthetic coding sequence
  source 1..408: mol_type = other DNA
atgggccgggtgaggaccaagacagtgaagaaggccgcccgggtcatcatcgagaagtactacacccggctgggcaatgacttccacaccaacaagagggtgtgtgaggagatcgccatcatccccagcaagaagctgaggaacaagattgctggctacgtgacccacctgatgaagaggatccagaggggccctgtgcggggcatcagcatcaagctgcaggaggaggagcgggagcggcgggacaactacgtgcctgaggtgtctgccctggaccaggagatcatcgaggtggaccctgacaccaaggagatgctgaagctgctggactttggcagcctgagcaacctgcaggtgacccagcccaccgtgggcatgaacttcaagaccccccggggccctgtgtag

SEQ ID NO: 168288 - DNA, 300 bp, synthetic construct
  misc_feature 1..300: note = Description of Artificial Sequence: Synthetic coding sequence
  source 1..300: mol_type = other DNA
atggacctgattggcttcggctatgctgccctggtgaccttcggcagcatcttcggctacaagaggcggggcggcgtgcccagcctgattgctggcctgtttgtgggctgcctggccggctatggagcctacagagtgtccaatgacaagagagatgtgaaggtgtccctcttcaccgccttcttcctggccaccatcatgggcgtgcgcttcaagaggagcaagaagatcatgcctgctggcctggtggccggcctgagcctgatgatgatcctgcggctggtgctgctgctgctgtag

SEQ ID NO: 168289 - DNA, 459 bp, synthetic construct; identical to SEQ ID NO: 153061
  misc_feature 1..459: note = Description of Artificial Sequence: Synthetic coding sequence
  source 1..459: mol_type = other DNA

SEQ ID NO: 168290 - DNA, 459 bp, synthetic construct; identical to SEQ ID NO: 153061
  misc_feature 1..459: note = Description of Artificial Sequence: Synthetic coding sequence
  source 1..459: mol_type = other DNA

SEQ ID NO: 168291 - DNA, 105 bp, synthetic construct
  misc_feature 1..105: note = Description of Artificial Sequence: Synthetic coding sequence
  source 1..105: mol_type = other DNA
atgagcctggtgattcctgagaagttccagcacatcctgcgggtgctgaacaccaacattgatggaagaaggaagatcgcctttgccatcacagccatcaagtag

SEQ ID NO: 168292 - DNA, 459 bp, synthetic construct; identical to SEQ ID NO: 153061
  misc_feature 1..459: note = Description of Artificial Sequence: Synthetic coding sequence
  source 1..459: mol_type = other DNA

SEQ ID NO: 168293 - DNA, 459 bp, synthetic construct; identical to SEQ ID NO: 153061
  misc_feature 1..459: note = Description of Artificial Sequence: Synthetic coding sequence
  source 1..459: mol_type = other DNA

SEQ ID NO: 168294 - DNA, 249 bp, synthetic construct
  misc_feature 1..249: note = Description of Artificial Sequence: Synthetic coding sequence
  source 1..249: mol_type = other DNA
atgcagaacccccggcagtacaagatcccagactggttcctgaaccggcagaaggatgtgaaggatggcaagtacagccaggtgctggccaacggcctggacaacaagctgcgggaggacctggagcggctgaagaagatccgggcccaccggggcctgcggcacttctggggcctgcgggtgcggggccagcacaccaagaccactggaagaagaggccgcacagtgggcgtgtccaagaagaagtag

SEQ ID NO: 168295 - DNA, 249 bp, synthetic construct; identical to SEQ ID NO: 168294
  misc_feature 1..249: note = Description of Artificial Sequence: Synthetic coding sequence
  source 1..249: mol_type = other DNA

SEQ ID NO: 168296 - DNA, 249 bp, synthetic construct; identical to SEQ ID NO: 168294
  misc_feature 1..249: note = Description of Artificial Sequence: Synthetic coding sequence
  source 1..249: mol_type = other DNA

SEQ ID NO: 168297 - DNA, 249 bp, synthetic construct; identical to SEQ ID NO: 168294
  misc_feature 1..249: note = Description of Artificial Sequence: Synthetic coding sequence
  source 1..249: mol_type = other DNA

SEQ ID NO: 168298 - DNA, 249 bp, synthetic construct; identical to SEQ ID NO: 168294
  misc_feature 1..249: note = Description of Artificial Sequence: Synthetic coding sequence
  source 1..249: mol_type = other DNA

SEQ ID NO: 168299 - DNA, 648 bp, synthetic construct
  misc_feature 1..648: note = Description of Artificial Sequence: Synthetic coding sequence
  source 1..648: mol_type = other DNA
atgtacagcttcatgggcggcggcctcttctgtgcctgggtgggcaccatcctgctggtggtggccatggccacagaccactggatgcagtaccgcctgagcggcagctttgcccaccagggcctgtggagatactgcctgggcaacaagtgctacctgcagacagacagcatcggggagcccccaggccagggccctggccgggcctggggcaagagcagagctgacctgggcgcccagggccacctgtacagccgctggaggaccctgcggctgaaggagggcaagggggccacccaggcctactggaatgccacccgggccttcatgatcctgagcgccctgtgtgccatcagcggcatcatcatgggcatcatggcctttgcccaccagcccaccttcagccgcatcagccggcccttctctgctggcatcatgttcttcagcagcaccctgtttgtggtgctggccctggccatctacacaggagtgacagtgtccttcctgggcagaagatttggagactggaggttctcctggagctacatcctgggctgggtggccgtgctgatgaccttctttgctggcatcttctacatgtgtgcctacagagtgcatgaatgtagaaggctgagcaccccaagatag

SEQ ID NO: 168300 - DNA, 438 bp, synthetic construct
  misc_feature 1..438: note = Description of Artificial Sequence: Synthetic coding sequence
  source 1..438: mol_type = other DNA
atgcctggggtgacagtgaaggatgtgaaccagcaggagtttgtgcgggccctggccgccttcctgaagaagagcggcaagctgaaggtgcctgagtgggtggacacagtgaagctggccaagcacaaggagctggccccctatgatgagaactggttctacaccagggctgccagcacagcccggcacctgtacctgcggggcggggccggcgtgggctccatgaccaagatctatggaggccggcagagaaatggagtgatgcccagccacttcagccggggcagcaagtctgtggccaggagagtgctgcaggccctggagggcctgaagatggtggagaaggaccaggacggcggcaggaagctgaccccccagggccagagggacctggacagaattgctggccaggtggccgccgccaacaagaagcactag

SEQ ID NO: 168301 - DNA, 411 bp, synthetic construct
  misc_feature 1..411: note = Description of Artificial Sequence: Synthetic coding sequence
  source 1..411: mol_type = other DNA
atgtctgctgccctgctgcggcggggcctggagctgctggccgccagcgaggccccccgggaccccccaggccaggccaagcccaggggggcccctgtgaagaggcccaggaagaccaaggccatccaggcccagaagctgaggaacagcgccaagggcaaggtgcccaagagcgccctggatgagtacaggaagagagaatgtcgggaccacctgcgggtgaacctgaagttcctgaccaggaccaggagcacagtggccgagagcgtgtcccagcagatcctgcggcagaacagaggaaggaaggcctgtgacaggcctgtggccaagaccaagaagaagaaggccgagggcaccgtcttcacagaggaggacttccagaagttccagcaggagtacttcggcagctag

SEQ ID NO: 168302 - DNA, 882 bp, synthetic construct
  misc_feature 1..882: note = Description of Artificial Sequence: Synthetic coding sequence
  source 1..882: mol_type = other DNA
atggctgatgatgctggagctgctgggggccctgggggccctgggggccctggcatgggcaacagaggaggcttccggggcggctttggaagtggcatccggggccggggccggggccggggccggggccggggccggggccgcggggcccggggcggcaaggccgaggacaaggagtggatgcctgtgaccaagctgggccgcctggtgaaggacatgaagatcaagagcctggaggagatctacctgttcagcctgcccatcaaggagagcgagatcatcgacttcttcctgggcgccagcctgaaggatgaggtgctgaagatcatgcctgtgcagaagcagacccgggccggccagaggacccgcttcaaggcctttgtggccatcggggactacaacggccacgtgggcctgggcgtgaagtgcagcaaggaggtggccacagccatccggggggccatcatcctggccaagctgagcatcgtgcctgtgcggcggggctactggggcaacaagattggcaagccccacacagtgccctgcaaggtgacaggccgctgtggctctgtgctggtgcggctcatcccagccccccggggcaccggcatcgtgtctgcccctgtgcccaagaagctgctgatgatggccggcattgatgactgctacaccagcgcccggggctgcacagccaccctgggcaactttgccaaggccacctttgatgccatcagcaagacctacagctacctgaccccagacctgtggaaggagaccgtcttcaccaagagcccctaccaggagttcacagaccacctggtgaagacccacaccagggtgtctgtgcagaggacccaggccccagctgtggccaccacctag

SEQ ID NO: 168303 - DNA, 708 bp, synthetic construct
  misc_feature 1..708: note = Description of Artificial Sequence: Synthetic coding sequence
  source 1..708: mol_type = other DNA
atggctgatgatgctggagctgctgggggccctgggggccctgggggccctggcatgggcaacagaggaggcttccggggcggctttggaagtggcatccggggccggggccggggccggggccggggccggggccggggccgcggggcccggggcggcaaggccgaggacaaggagtggatgcctgtgaccaagctgggccgcctggtgaaggacatgaagatcaagagcctggaggagatctacctgttcagcctgcccatcaaggagagcgagatcatcgacttcttcctgggcgccagcctgaaggatgaggtgctgaagatcatgcctgtgcagaagcagacccgggccggccagaggacccgcttcaaggtgacaggccgctgtggctctgtgctggtgcggctcatcccagccccccggggcaccggcatcgtgtctgcccctgtgcccaagaagctgctgatgatggccggcattgatgactgctacaccagcgcccggggctgcacagccaccctgggcaactttgccaaggccacctttgatgccatcagcaagacctacagctacctgaccccagacctgtggaaggagaccgtcttcaccaagagcccctaccaggagttcacagaccacctggtgaagacccacaccagggtgtctgtgcagaggacccaggccccagctgtggccaccacctag

SEQ ID NO: 168304 - DNA, 537 bp, synthetic construct
  misc_feature 1..537: note = Description of Artificial Sequence: Synthetic coding sequence
  source 1..537: mol_type = other DNA
atggctgatgatgctggagctgctgggggccctgggggccctgggggccctggcatgggcaacagaggaggcttccggggcggctttggaagtggcatccggggccggggccggggccggggccggggccggggccggggccgcggggcccggggcggcaaggccgaggacaaggagtggatgcctgtgaccaagctgggccgcctggtgaaggacatgaagatcaagagcctggaggagatctacctgttcagcctgcccatcaaggagagcgagatcatcgacttcttcctgggcgccagcctgaaggatgaggtgctgaagatcatgcctgtgcagaagcagacccgggccggccagaggacccgcttcaaggtgcccggctgccctgggggcggctgtgccggcctggccggcaccctgagcgccctgcacagctgcacctggctgcacccctgtgacttcagaaatggagagcgggagaagaggagcccccaggacctgggctgggccctgctgtggcccctcttcccctag

SEQ ID NO: 168305 - DNA, 588 bp, synthetic construct
  misc_feature 1..588: note = Description of Artificial Sequence: Synthetic coding sequence
  source 1..588: mol_type = other DNA
gtcaccaagctgggccgcctggtgaaggacatgaagatcaagagcctggaggagatctacctgttcagcctgcccatcaaggcctttgtggccatcggggactacaacggccacgtgggcctgggcgtgaagtgcagcaaggaggtggccacagccatccggggggccatcatcctggccaagctgagcatcgtgcctgtgcggcggggctactggggcaacaagattggcaagccccacacagtgccctgcaaggtgacaggccgctgtggctctgtgctggtgcggctcatcccagccccccggggcaccggcatcgtgtctgcccctgtgcccaagaagctgctgatgatggccggcattgatgactgctacaccagcgcccggggctgcacagccaccctgggcaactttgccaaggccacctttgatgccatcagcaagacctacagctacctgaccccagacctgtggaaggagaccgtcttcaccaagagcccctaccaggagttcacagaccacctggtgaagacccacaccagggtgtctgtgcagaggacccaggccccagctgtggccaccacctag

SEQ ID NO: 168306 - DNA, 360 bp, synthetic construct
  misc_feature 1..360: note = Description of Artificial Sequence: Synthetic coding sequence
  source 1..360: mol_type = other DNA
atggccttcaaggacaccgggaagacccctgtggagcctgaggtggccatccaccgcatccgcatcaccctgaccagcagaaatgtgaagagcctggagaaggtgtgtgccgacctgatccggggggccaaggagaagaacctgaaggtgaagggccctgtgaggatgcccaccaagaccctgcgcatcaccaccaggaagaccccctgtggggagggcagcaagacctgggaccgcttccagatgaggatccacaagaggctgattgacctgcacagccccagcgagatcgtgaagcagatcaccagcatcagcattgagcccggggtggaggtggaggtgaccatcgcagatgcctag

SEQ ID NO: 168307 - DNA, 429 bp, synthetic construct
  misc_feature 1..429: note = Description of Artificial Sequence: Synthetic coding sequence
  source 1..429: mol_type = other DNA
atggccttcaaggacaccgggaagacccctgtggagcctgaggtggccatccaccgcatccgcatcaccctgaccagcagaaatgtgaagagcctggagaaggtgtgtgccgacctgatccggggggccaaggagaagaacctgaaggtgaagggccctgtgaggatgcccaccaagaccctgcgcatcaccaccaggaagaccccctgtggggagggcagcaagacctgggaccgcttccagatgaggatccacaagaggctgattgacctgcacagccccagcgagatcgtgaagcagatcaccagcatcagcattgagcccggggtggagctgattgagagcacagatgctgagcccatggacacagagggccagcagtacaccctgcggtctgtgtttgagagccctggcacctgccccttctag

SEQ ID NO: 168308 - DNA, 360 bp, synthetic construct; identical to SEQ ID NO: 168306
  misc_feature 1..360: note = Description of Artificial Sequence: Synthetic coding sequence
  source 1..360: mol_type = other DNA

SEQ ID NO: 168309 - DNA, 252 bp, synthetic construct
  misc_feature 1..252: note = Description of Artificial Sequence: Synthetic coding sequence
  source 1..252: mol_type = other DNA
atgcagaatgatgctggggagtttgtggacctgtatgtgcccaggaagtgcagcgccagcaaccgcatcatcggggccaaggaccacgccagcatccagatgaatgtggccgaggtggacaaggtgacaggccgcttcaacggccagttcaagacctacgccatctgtggggccatccggaggatgggagagagtgatgacagcatcctgcggctggccaaggcagatggcatcgtgtccaagaacttctag

SEQ ID NO: 168310 - DNA, 294 bp, synthetic construct
  misc_feature 1..294: note = Description of Artificial Sequence: Synthetic coding sequence
  source 1..294: mol_type = other DNA
atgcagaatgatgctggggagtttgtggacctgtatgtgcccaggaagtgcagcgccagcaaccgcatcatcggggccaaggaccacgccagcatccagatgaatgtggcccggctgaccaggagccaggccggcctgatggccagcctgaagctgatgctgtctgctggcccctttgtgggctgggtgtcccagatgatccccttcagtgactggccccggcgctggcaccggctgaaggagctgctgaccggggagaaccaccgctgtggcatctttgtgatcaacaagtag

SEQ ID NO: 168311 - DNA, 252 bp, synthetic construct; identical to SEQ ID NO: 168309
  misc_feature 1..252: note = Description of Artificial Sequence: Synthetic coding sequence
  source 1..252: mol_type = other DNA

SEQ ID NO: 168312 - DNA, 201 bp, synthetic construct
  misc_feature 1..201: note = Description of Artificial Sequence: Synthetic coding sequence
  source 1..201: mol_type = other DNA
atgcagaatgatgctggggagtttgtggacctgtatgtgcccaggaagtgcagcgccagcaaccgcatcatcggggccaaggaccacgccagcatccagatgaatgtggccgaggtgtcctgggagcctggaagaagagagggctgtgacatctgtgccggcaaggccggctgccccatcgtggaggagcccctgggctag

SEQ ID NO: 168313 - DNA, 273 bp, synthetic construct
  misc_feature 1..273: note = Description of Artificial Sequence: Synthetic coding sequence
  source 1..273: mol_type = other DNA
atgcagaatgatgctggggagtttgtggacctgtatgtgcccaggaagtgcagcgccagcaaccgcatcatcggggccaaggaccacgccagcatccagatgaatgtggccgaggtggacaaggtgacaggccgcttcaacggccagttcaagacctacgccatctgtggggccatccggaggatggtgtctgtgtccctgggctttgcccaccacttcggcacctcctggaccctgccctgtgccctggagtgtgtgatggtgcctgagtag

SEQ ID NO: 168314 - DNA, 246 bp, synthetic construct
  misc_feature 1..246: note = Description of Artificial Sequence: Synthetic coding sequence
  source 1..246: mol_type = other DNA
atgcagaatgatgctggggagtttgtggacctgtatgtgcccaggaagtgcagcgccagcaaccgcatcatcggggccaaggaccacgccagcatccagatgaatgtggccgaggtggacaaggtgacaggccgcttcaacggccagttcaagacctacgccatctgtggggccatccggaggatgggagagagtgatgacagcatcctgcggctggccaaggcagatggcatcgtgtccaagtag

SEQ ID NO: 168315 - DNA, 432 bp, synthetic construct
  misc_feature 1..432: note = Description of Artificial Sequence: Synthetic coding sequence
  source 1..432: mol_type = other DNA
atgggcaaatgtcggggcctgaggacagccaggaagctgcggagccacagaagagaccagaagtggcatgacaagcagtacaagaaggcccacctgggcacagccctgaaggccaacccctttggaggagccagccacgccaagggcatcgtgctggagaaggtgggcgtggaggccaagcagcccaacagcgccatcagaaaatgtgtgcgggtgcagctgatcaagaatggcaagaagatcacagcctttgtgcccaatgatggctgcctgaacttcatcgaggagaatgatgaggtgctggtggccggctttggaaggaagggccatgctgtgggggacatccctggggtgcgcttcaaggtggtgaaggtggccaacgtgtccctgctggccctgtacaagggcaagaaggagcggcccaggagctag

SEQ ID NO: 168316 - DNA, 393 bp, synthetic construct
  misc_feature 1..393: note = Description of Artificial Sequence: Synthetic coding sequence
  source 1..393: mol_type = other DNA
atgaatgacacagtgaccatccgcaccaggaagttcatgaccaaccggctgctgcagaggaagcagatggtgattgatgtgctgcaccctgggaaggccaccgtgcccaagacagagatccgggagaagctggccaagatgtacaagaccaccccagatgtgatctttgtgtttggcttccgcacccactttggaggcggcaagaccaccggcttcggcatgatctatgacagcctggactatgccaagaagaatgagcccaagcaccggctggcccggcacggcctgtatgagaagaagaagaccagcaggaagcagaggaaggagaggaagaacaggatgaagaaggtgcggggcacagccaaggccaacgtgggcgccggcaagaagtag

SEQ ID NO: 168317 - DNA, 402 bp, synthetic construct
  misc_feature 1..402: note = Description of Artificial Sequence: Synthetic coding sequence
  source 1..402: mol_type = other DNA
atgaatgacacagtgaccatccgcaccaggaagttcatgaccaaccggctgctgcagaggaagcagatggtgattgatgtgctgcaccctgggaaggccaccgtgcccaagacagagatccgggagaagctggccaagatgtacaagaccaccccagatgtgatctttgtgtttggcttccgcacccactttggaggcggcaagaccaccggcttcggcatgatctatgacagcctggactatgccaagaagaatgagcccaagcaccggctggcccggcacggcctgtatgagaagaagaagaccagcaggaagcagaggaaggagaggaagaacaggatgaagaaggtgcggggcacagccaaggccaacgtgggcgccggcaagaagcccaaggagtag

SEQ ID NO: 168318 - DNA, 399 bp, synthetic construct
  misc_feature 1..399: note = Description of Artificial Sequence: Synthetic coding sequence
  source 1..399: mol_type = other DNA
atgaatgacacagtgaccatccgcaccaggaagttcatgaccaaccggctgctgcagaggaagcagatggtgattgatgtgctgcaccctgggaaggccaccgtgcccaagacagagatccgggagaagctggccaagatgtacaagaccaccccagatgtgatctttgtgtttggcttccgcacccactttggaggcggcaagaccaccggcttcggcatgatctatgacagcctggactatgccaagaagaatgagcccaagcaccggctggcccggcacggcctgtatgagaagaagaagaccagcaggaagcagaggaaggagaggaagaacaggatgaagaaggtgcggggcacagccaaggccaacgtgggcgccggcaagaagcagaagtag

SEQ ID NO: 168319 - DNA, 396 bp, synthetic construct
  misc_feature 1..396: note = Description of Artificial Sequence: Synthetic coding sequence
  source 1..396: mol_type = other DNA
atgaatgacacagtgaccatccgcaccaggaagttcatgaccaaccggctgctgcagaggaagcagatggtgattgatgtgctgcaccctgggaaggccaccgtgcccaagacagagatccgggagaagctggccaagatgtacaagaccaccccagatgtgatctttgtgtttggcttccgcacccactttggaggcggcaagaccaccggcttcggcatgatctatgacagcctggactatgccaagaagaatgagcccaagcaccggctggcccggcacggcctgtatgagaagaagaagaccagcaggaagcagaggaaggagaggaagaacaggatgaagaaggtgcggggcacagccaaggccaacgtgggcgccggcaagaagcagtag

SEQ ID NO: 168320 - DNA, 870 bp, synthetic construct
  misc_feature 1..870: note = Description of Artificial Sequence: Synthetic coding sequence
  source 1..870: mol_type = other DNA
atgaatgacacagtgaccatccgcaccaggaagttcatgaccaaccggctgctgcagaggaagcagatggtgattgatgtgctgcaccctgggaaggccaccgtgcccaagacagagatccgggagaagctggccaagatgtacaagaccaccccagatgtgatctttgtgtttggcttccgcacccactttggaggcggcaagaccaccggcttcggcatgatctatgacagcctggactatgccaagaagaatgagcccaagcaccggctggcccggcacggcctgtatgagaagaagaagaccagcaggaagcagaggaaggagaggaagaacaggatgaagaaggtgcggggcacagccaaggccaacgtgggcgccggcaagaagatgagggagctgggcctgggcgtgcaggccctgggccgcatcagccaggaggagcgctgcacagatgtgaagaacagcaaggcccgggagagcagaggagtggtgtggcaggtggaggtgcccggcccctggagcgtgtggacctgtggccgcctgcggcggggctgtgggaagtacctgcaggtggccgtgacctggaggaagacagagaaccgggagcagtgctgccaggcctgcctgctggagcgggccctggtgagaaatggagccttcatgagccctgccagccctgccccagctggcagcccccaccctgtggatggagacctggtgctgcacctgcctgaggccctgagcgccaccctgaccctgagcccccacatccaggccatcaacaagagctttggccccttctttgagatccaccaggagagcagctgcttcagcccccccagctgcctgagcggcctgggccactag

SEQ ID NO: 168321 - DNA, 378 bp, synthetic construct
  misc_feature 1..378: note = Description of Artificial Sequence: Synthetic coding sequence
  source 1..378: mol_type = other DNA
atgccacccaaggatgacaagaagaagaaggatgctgggaagagcgccaagaaggacaaggaccctgtgaacaagagcggcggcaaggccaagaagaagaagtggagcaagggcaaggtgcgggacaagctgaacaacctggtgctgtttgacaaggccacctatgacaagctgtgcaaggaggtgcccaactacaagctgatcaccccagctgtggtgtctgagcggctgaagatccggggcagcctggcccgggccgccctgcaggagctgctgagcaagggcctcatcaagctggtgtccaagcaccgggcccaggtgatctacaccaggaacaccaagggaggagatgccccagctgctggagaagatgcctag

SEQ ID NO: 168322 - DNA, 348 bp, synthetic construct
  misc_feature 1..348: note = Description of Artificial Sequence: Synthetic coding sequence
  source 1..348: mol_type = other DNA
atgaccaagaagagaagaaacaacggccgggccaagaagggccggggccacgtgcagcccatccgctgcaccaactgtgcccgctgtgtgcccaaggacaaggccatcaagaagtttgtgatccggaacatcgtggaggccgctgctgtgcgggacatcagcgaggcctctgtgtttgatgcctacgtgctgcccaagctgtatgtgaagctgcactactgtgtgtcctgtgccatccacagcaaggtggtgaggaacagaagccgggaggccaggaaggacaggaccccaccaccccgcttccggcctgctggggccgccccccggcccccacccaagcccatgtag

SEQ ID NO: 168323 - DNA, 348 bp, synthetic construct; identical to SEQ ID NO: 168322
  misc_feature 1..348: note = Description of Artificial Sequence: Synthetic coding sequence
  source 1..348: mol_type = other DNA

SEQ ID NO: 168324 - DNA, 255 bp, synthetic construct
  misc_feature 1..255: note = Description of Artificial Sequence: Synthetic coding sequence
  source 1..255: mol_type = other DNA
atgcccctggccaaggacctgctgcaccccagccctgaggaggagaagaggaagcacaagaagaagaggctggtgcagagccccaacagctacttcatggatgtgaagtgccccggctgctacaagatcaccaccgtcttcagccacgcccagacagtggtgctgtgtgtgggctgcagcacagtgctgtgccagcccactggaggcaaggcccggctgacagagggctgcagcttccggaggaagcagcactag

SEQ ID NO: 168325 - DNA, 201 bp, synthetic construct
  misc_feature 1..201: note = Description of Artificial Sequence: Synthetic coding sequence
  source 1..201: mol_type = other DNA
atgcccctggccaaggacctgctgcaccccagccctgaggaggagaagaggaagcacaagaagaagaggctggtgcagagccccaacagctacttcatggatgtgaagtgccctggagaggagacagcctgctgcagcggggagagcacaggcccccagcagctggagaatgtggtggtgctggccgtgtcctacccctag

SEQ ID NO: 168326 - DNA, 255 bp, synthetic construct
  misc_feature 1..255: note = Description of Artificial Sequence: Synthetic coding sequence
  source 1..255: mol_type = other DNA
atgcccctggcccgggacctgctgcaccccagcctggaggaggagaagaagaagcacaagaagaagaggctggtgcagagccccaacagctacttcatggatgtgaagtgccccggctgctacaagatcaccaccgtcttcagccacgcccagacagtggtgctgtgtgtgggctgcagcacagtgctgtgccagcccactggaggcaaggcccggctgacagagggctgcagcttccggaggaagcagcactag

SEQ ID NO: 168327 - DNA, 159 bp, synthetic construct
  misc_feature 1..159: note = Description of Artificial Sequence: Synthetic coding sequence
  source 1..159: mol_type = other DNA
atggatgtgaagtgccccggctgctacaagatcaccaccgtcttcagccacgcccagacagtggtgctgtgtgtgggctgcagcacagtgctgtgccagcccactggaggcaaggcccggctgacagagggctgcagcttccggaggaagcagcactag

SEQ ID NO: 168328 - DNA, 159 bp, synthetic construct; identical to SEQ ID NO: 168327
  misc_feature 1..159: note = Description of Artificial Sequence: Synthetic coding sequence
  source 1..159: mol_type = other DNA

SEQ ID NO: 168329 - DNA, 303 bp, synthetic construct
  misc_feature 1..303: note = Description of Artificial Sequence: Synthetic coding sequence
  source 1..303: mol_type = other DNA
atgtgccagagatgtggcctgaagctgattgtcatcatctgcttctttgtgcagctggcccgggacctgctgcaccccagcctggaggaggagaagaagaagcacaagaagaagaggctggtgcagagccccaacagctacttcatggatgtgaagtgccccggctgctacaagatcaccaccgtcttcagccacgcccagacagtggtgctgtgtgtgggctgcagcacagtgctgtgccagcccactggaggcaaggcccggctgacagagggctgcagcttccggaggaagcagcactag

SEQ ID NO: 168330 - DNA, 210 bp, synthetic construct
  misc_feature 1..210: note = Description of Artificial Sequence: Synthetic coding sequence
  source 1..210: mol_type = other DNA
atggacaccagccgggtgcagcccatcaagctggcccgggtgaccaaggtgctgggccgcacaggcagccagggccagtgcacccaggtgcgggtggagttcatggatgacaccagccgcagcatcatcagaaatgtgaagggccctgtgcgggagggagatgtgctgaccctgctggagagcgagcgggaggcccggcggctgaggtag

SEQ ID NO: 168331 - DNA, 366 bp, synthetic construct
  misc_feature 1..366: note = Description of Artificial Sequence: Synthetic coding sequence
  source 1..366: mol_type = other DNA
atggtgcccttcaatgacctgtacagcggccctgacaccttcagcgagttcatcagcgccagccacagcgctgtgcccttccggggcccccccctgctgctgccccccctgcgctggggccctgtgggcgcccggggcatccacggcagacatgagcccatccaccacccccagtgcaagaggccccgggcccggggcagaagagcccaccccttcggcgtgcgggcccggagccctgaggtggccctgagcctggccgcccgctgggtgctggatgtgggctttgaccacctggctgatggaaatggcctgagccagagcgcccccttcttctgcccccctcatgtgacagagatgctgctgtag

SEQ ID NO: 168332 - DNA, 210 bp, synthetic construct; identical to SEQ ID NO: 168330
  misc_feature 1..210: note = Description of Artificial Sequence: Synthetic coding sequence
  source 1..210: mol_type = other DNA

SEQ ID NO: 168333 - DNA, 171 bp, synthetic construct
  misc_feature 1..171: note = Description of Artificial Sequence: Synthetic coding sequence
  source 1..171: mol_type = other DNA
atgggccaccagcagctgtactggagccaccccaggaagtttggccagggcagccgcagctgccgggtgtgcagcaacagacatggcctcatcagaaaatatggcctgaacatgtgccggcagtgcttccggcagtatgccaaggacatcggcttcatcaagctggactag

SEQ ID NO: 168334 - DNA, 204 bp, synthetic construct
  misc_feature 1..204: note = Description of Artificial Sequence: Synthetic coding sequence
  source 1..204: mol_type = other DNA
atgggccaccagcagctgtactggagccaccccaggaagtttggccagggcagccgcagctgccgggtgtgcagcaacagacatggcctcatcagaaaatatggcctgaacatgtgccggcagtgcttccggcagtatgccaaggacatcggcttcatcaagaaggacctgagctgcctgccctggcactgcctgtggaggtag

SEQ ID NO: 168335 - DNA, 780 bp, synthetic construct
  misc_feature 1..780: note = Description of Artificial Sequence: Synthetic coding sequence
  source 1..780: mol_type = other DNA
atggctgtgcagatcagcaagaagaggaagtttgtggctgatggcatcttcaaggccgagctgaatgagttcctgacccgggagctggctgaagatggctacagcggcgtggaggtgcgggtgacccccaccaggacagagatcatcatcctggccaccaggacccagaatgtgctgggggagaagggccgccgcatccgggagctgacagctgtggtgcagaagagatttggcttccctgagggctctgtggagctgaagatcatggtgatggtgacaggctaccccctgctgcccctgaagctgtatgcagagaaggtggccacccggggcctgtgtgccatcgcccaggccgagagcctgcgctacaagctgctgggcggcctggccgtgcggcgggcctgctacggcgtgctgcgcttcatcatggagagcggggccaagggctgtgaggtggtggtgtctgggaagctgcggggccagagggccaagtccatgaagtttgtggatggcctgatgatccacagcggggaccctgtgaactactacgtggacacagctgtgcgccacgtgctgctgcggcagggcgtgctgggcatcaaggtgaagatcatgctgccctgggaccccaccgggaagattggccccaagaagcccctgcctgaccacgtgtccatcgtggagcccaaggatgagatcctgcccaccacccccatcagcgagcagaagggcggcaagccagagcccccagccatgccccagcctgtgcccacagcctag

SEQ ID NO: 168336 - DNA, 732 bp, synthetic construct
  misc_feature 1..732: note = Description of Artificial Sequence: Synthetic coding sequence
  source 1..732: mol_type = other DNA
atggctgtgcagatcagcaagaagaggaagtttgtggctgatggcatcttcaaggccgagctgaatgagttcctgacccgggagctggctgaagatggctacagcggcgtggaggtgcgggtgacccccaccaggacagagatcatcatcctggccaccaggacccagaatgtgctgggggagaagggccgccgcatccgggagctgacagctgtggtgcagaagagatttggcttccctgagggctctgtggagctgtatgcagagaaggtggccacccggggcctgtgtgccatcgcccaggccgagagcctgcgctacaagctgctgggcggcctggccgtgcggcgggcctgctacggcgtgctgcgcttcatcatggagagcggggccaagggctgtgaggtggtggtgtctgggaagctgcggggccagagggccaagtccatgaagtttgtggatggcctgatgatccacagcggggaccctgtgaactactacgtggacacagctgtgcgccacgtgctgctgcggcagggcgtgctgggcatcaaggtgaagatcatgctgccctgggaccccaccgggaagattggccccaagaagcccctgcctgaccacgtgtccatcgtggagcccaaggatgagatcctgcccaccacccccatcagcgagcagaagggcggcaagccagagcccccagccatgccccagcctgtgcccacagcctag

SEQ ID NO: 168337 - DNA, 732 bp, synthetic construct; identical to SEQ ID NO: 168336
  misc_feature 1..732: note = Description of Artificial Sequence: Synthetic coding sequence
  source 1..732: mol_type = other DNA

SEQ ID NO: 168338 - DNA, 732 bp, synthetic construct; identical to SEQ ID NO: 168336
  misc_feature 1..732: note = Description of Artificial Sequence: Synthetic coding sequence
  source 1..732: mol_type = other DNA

SEQ ID NO: 168339 - DNA, 795 bp, synthetic construct
  misc_feature 1..795: note = Description of Artificial Sequence: Synthetic coding sequence
  source 1..795: mol_type = other DNA
atggctgtgggcaagaacaagaggctgaccaagggcggcaagaagggggccaagaagaaggtggtggaccccttcagcaagaaggactggtatgatgtgaaggccccagccatgttcaacatccggaacatcggcaagaccctggtgaccaggacccagggcaccaagatcgccagtgatggcctgaagggccgggtgtttgaggtgtccctggccgacctgcagaatgatgaggtggccttcaggaagttcaagctgatcacagaagatgtgcagggcaagaactgcctgaccaacttccacggcatggacctgacccgggacaagatgtgcagcatggtgaagaagtggcagaccatgattgaggcccacgtggatgtgaagaccacagatggctacctgctgcggctcttctgtgtgggcttcaccaagaagaggaacaaccagatcaggaagaccagctatgcccagcaccagcaggtgcggcagatcaggaagaagatgatggagatcatgacccgggaggtgcagaccaatgacctgaaggaggtggtgaacaagctgatcccagacagcatcggcaaggacatcgagaaggcctgccagagcatctaccccctgcatgatgtgtttgtgaggaaggtgaagatgctgaagaagcccaagtttgagctgggcaagctgatggagctgcacggggagggcagcagcagcggcaaggccactggagatgagaccggggccaaggtggagcgggcagatggctatgagccccctgtgcaggagagcgtgtag

SEQ ID NO: 168340 - DNA, 528 bp, synthetic construct
  misc_feature 1..528: note = Description of Artificial Sequence: Synthetic coding sequence
  source 1..528: mol_type = other DNA
atggctgtggccaagaagaaggtggtggaccccttcagcaagaaggactggtatgatgtgaaggccccagccatgttcaacatcagaaatattggcaagaccctggtgaccaggacccagggcaccaagatcgccagtgatggcctgaagggccgggtgtttgaggtgtccctggccgacctgcagaatgatgaggtggccttcaggaagttcaagctgatcacagaagatgtgcagggcaagaactgcctgaccaacttccacggcatggacctgacccgggacaagatgtgcagcatggtgaagaagtggcagaccatgattgaggcccacgtggatgtgaagaccacagatggctacctgctgcggctcttctgtgtgggcttcaccaagaagaggaacaaccagatcaggaagaccagctatgcccagcaccagcaggtgcggcagatcaggaagaagatgatggagatcatgacccgggaggtgcagaccaatgacctgaaggaggtggtgaacaagctgtag

SEQ ID NO: 168341 - DNA, 684 bp, synthetic construct
  misc_feature 1..684: note = Description of Artificial Sequence: Synthetic coding sequence
  source 1..684: mol_type = other DNA
atgttcaacatcagaaatattggcaagaccctggtgaccaggacccagggcaccaagatcgccagtgatggcctgaagggccgggtgtttgaggtgtccctggccgacctgcagaatgatgaggtggccttcaggaagttcaagctgatcacagaagatgtgcagggcaagaactgcctgaccaacttccacggcatggacctgacccgggacaagatgtgcagcatggtgaagaagtggcagaccatgattgaggcccacgtggatgtgaagaccacagatggctacctgctgcggctcttctgtgtgggcttcaccaagaagaggaacaaccagatcaggaagaccagctatgcccagcaccagcaggtgcggcagatcaggaagaagatgatggagatcatgacccgggaggtgcagaccaatgacctgaaggaggtggtgaacaagctgatcccagacagcatcggcaaggacatcgagaaggcctgccagagcatctaccccctgcatgatgtgtttgtgaggaaggtgaagatgctgaagaagcccaagtttgagctgggcaagctgatggagctgcatggagagggcagcagcagcggcaaggccactggagatgaaacaggagccaaggtggagcgggcagatggctatgagccccctgtgcaggagagcgtgtag

SEQ ID NO: 168342 - DNA, 438 bp, synthetic construct
  misc_feature 1..438: note = Description of Artificial Sequence: Synthetic coding sequence
  source 1..438: mol_type = other DNA
atgattgaggcccacgtggatgtgaagaccacagatggctacctgctgcggctcttctgtgtgggcttcaccaagaagaggaacaaccagatcaggaagaccagctatgcccagcaccagcaggtgcggcagatcaggaagaagatgatggagatcatgacccgggaggtgcagaccaatgacctgaaggaggtggtgaacaagctgatcccagacagcatcggcaaggacatcgagaaggcctgccagagcatctaccccctgcatgatgtgtttgtgaggaaggtgaagatgctgaagaagcccaagtttgagctgggcaagctgatggagctgcatggagagggcagcagcagcggcaaggccactggagatgaaacaggagccaaggtggagcgggcagatggctatgagccccctgtgcaggagagcgtgtag

SEQ ID NO: 168343 - DNA, 684 bp, synthetic construct; identical to SEQ ID NO: 168341
  misc_feature 1..684: note = Description of Artificial Sequence: Synthetic coding sequence
  source 1..684: mol_type = other DNA

SEQ ID NO: 168344 - DNA, 627 bp, synthetic construct
  misc_feature 1..627: note = Description of Artificial Sequence: Synthetic coding sequence
  source 1..627: mol_type = other DNA
aagaggctgaccaagggcggcaagaagggggccaagaagaaggtggtggaccccttcagcaagaaggactggtatgatgtgaaggccccagccatgttcaacatccggaacatcggcaagaccctggtgaccaggacccagggcaccaagatcgccagtgatggcctgaagggccgggtgtttgagaccatgattgaggcccacgtggatgtgaagaccacagatggctacctgctgcggctcttctgtgtgggcttcaccaagaagaggaacaaccagatcaggaagaccagctatgcccagcaccagcaggtgcggcagatcaggaagaagatgatggagatcatgacccgggaggtgcagaccaatgacctgaaggaggtggtgaacaagctgatcccagacagcatcggcaaggacatcgagaaggcctgccagagcatctaccccctgcatgatgtgtttgtgaggaaggtgaagatgctgaagaagcccaagtttgagctgggcaagctgatggagctgcacggggagggcagcagcagcggcaaggccactggagatgagaccggggccaaggtggagcgggcagatggctatgagccccctgtgcaggagagcgtgtag

SEQ ID NO: 168345 - DNA, 792 bp, synthetic construct
  misc_feature 1..792: note = Description of Artificial Sequence: Synthetic coding sequence
  source 1..792: mol_type = other DNA
atggcccggggccccaagaagcacctgaagagggtggccgcccccaagcactggatgctggacaagctgactggagtgtttgccccccggcccagcacaggcccccacaagctgcgggagtgcctgcccctcatcatcttcctgaggaaccggctgaagtatgccctgactggagatgaggtgaagaagatctgcatgcagcgcttcatcaagattgatggcaaggtgaggacagacatcacctacccagctggcttcatggatgtgatcagcattgacaagacaggagagaacttccgcctcatctatgacaccaagggccgctttgctgtgcaccgcatcaccccagaggaggccaagtacaagctgtgcaaggtgaggaagatctttgtgggcaccaagggcatcccccacctggtgacccatgatgcccggaccatccgctacccagaccccctcatcaaggtgaatgacaccatccagattgacctggagaccgggaagatcacagacttcatcaagtttgacaccggcaacctgtgcatggtgactggaggagccaacctgggccgcatcggggtcatcaccaaccgggagcggcaccctggcagctttgatgtggtgcacgtgaaggatgccaacggcaacagctttgccacccggctgagcaacatcttcgtcatcggcaagggcaacaagccctggatcagcctgccccggggcaagggcatccggctgaccatcgccgaggagcgggacaagaggctggccgccaagcagagcagcggctag

SEQ ID NO: 168346 - DNA, 369 bp, synthetic construct
  misc_feature 1..369: note = Description of Artificial Sequence: Synthetic coding sequence
  source 1..369: mol_type = other DNA
atggcccggggccccaagaagcacctgaagagggtggccgcccccaagcactggatgctggacaagctgactggagtgtttgccccccggcccagcacaggcccccacaagctgcgggagtgcctgcccctcatcatcttcctgaggaaccggctgaagtatgccctgactggagatgaggtgaagaagatctgcatgcagcgcttcatcaagattgatggcaaggtgaggacagacatcacctacccagctggcttcatggatgtgatcagcattgacaagacaggagagaacttccgcctcatctatgacaccaagggccgctttgctgtgcaccgcatcaccccagaggaggccaagccctgctag

SEQ ID NO: 168347 - DNA, 792 bp, synthetic construct
  misc_feature 1..792: note = Description of Artificial Sequence: Synthetic coding sequence
  source 1..792: mol_type = other DNA
atggcccggggccccaagaagcacctgaagagggtggccgcccccaagcactggatgctggacaagctgactggagtgtttgccccccggcccagcacaggcccccacaagctgcgggagtgcctgcccctgattgtgttcctgaggaaccggctgaagtatgccctgactggagatgaggtgaagaagatctgcatgcagcgcttcatcaagattgatggcaaggtgcgggtggatgtgacctacccagctggcttcatggatgtgatcagcattgagaagacaggagagcacttccggctggtgtatgacaccaagggccgctttgctgtgcaccgcatcaccgtggaggaggccaagtacaagctgtgcaaggtgaggaagatcaccgtgggcgtgaagggcatcccccacctggtgacccatgatgcccggaccatccgctacccagaccccgtcatcaaggtgaatgacacagtgcagattgacctgggcaccgggaagatcatcaacttcatcaagtttgacaccggcaacctgtgcatggtgattggaggagccaacctgggccgggtgggcgtcatcaccaaccgggagcggcaccctggcagctttgatgtggtgcacgtgaaggatgccaacggcaacagctttgccacccggctgagcaacatctttgtgattggaaatggaaacaagccctggatcagcctgccccggggcaagggcatccggctgactgtggccgaggagcgggacaagaggctggccaccaagcagagcagcggctag

SEQ ID NO: 168348 - DNA, 789 bp, synthetic construct
  misc_feature 1..789: note = Description of Artificial Sequence: Synthetic coding sequence
  source 1..789: mol_type = other DNA
atgctgggccgcccagccaagttcagcaaggcccggggccccaagaagcacctgaagagggtggccgcccccaagcactggatgctggacaagctgactggagtgtttgccccccggcccagcacaggcccccacaagctgagagaatgtctgcccctcatcgtgttcctgaggaaccggctgaagtatgccctgactggagatgaggtgaagaagatctgcatgcagcgcttcatcaagattgatggcaaggtgcgggtggatgtgacctacccagctggcttcatggatgtgatcagcattgagaagacaggagagcacttccggctggtgtatgacaccaagggccgctttgctgtgcaccgcatcaccgtggaggaggccaagtacaagctgtgcaaggtgaggaagatcaccgtgggcgtgaagggcatcccccacctggtgacccatgatgcccggaccatccgctacccagaccctgtgatcaaggtgaatgacacagtgcagattgacctgggcaccgggaagatcatcaacttcatcaagtttgacaccggcaacctgtgcatggtgattggaggagccaacctgggccgggtgggcgtcatcaccaaccgggagcggcaccctggcagctttgatgtggtgcacgtgaaggatgccaatggaaacagctttgccacccggctgagcaacatctttgtgattggaaatggaaacaagccctggatcagcctgccccggggcaagggcatccggctgactgtggccgaggagcgggactag

SEQ ID NO: 168349 - DNA, 792 bp, synthetic construct
  misc_feature 1..792: note = Description of Artificial Sequence: Synthetic coding sequence
  source 1..792: mol_type = other DNA
atggcccggggccccaagaagcacctgaagagggtggccgcccccaagcactggatgctggacaagctgactggagtgtttgccccccggcccagcacaggcccccacaagctgcgggagtgcctgcccctgattgtgttcctgaggaaccggctgaagtatgccctgactggagatgaggtgaagaagatctgcatgcagcacttcctgaagattgatggcaaggtgcgggtggacatcacctacccagctggcttcattgatgtgatcagcattgagaagacaggagagcacttccggctggtgtacaacaccaagggctgctttgctgtgcaccgcatcaccgtggaggaggccaagtacaagctgtgcaaggtgaggaagatcaccgtgggcaccaagggcatcccccacctggtgacccatgatgcccggaccatccgctacccagaccccctcatcaaggtgaatgacacagtgcagattgacctgggcaccgggaagatcaccagcttcatcaagtttgacacaggaaatgtgtgcatggtgattgctggggccaacctgggccgggtgggcgtcatcaccaaccgggagcggcaccctggcagctgtgatgtggtgcacgtgaaggatgccaacggcaacagctttgccacccgcatcagcaacatctttgtgattggaaatggaaacaagccctggatcagcctgccccggggcaagggcatccggctgaccatcgccgaggagcgggacaagaggctggccgccaagcagagcagcggctag

SEQ ID NO: 168350 - DNA, 615 bp, synthetic construct
  misc_feature 1..615: note = Description of Artificial Sequence: Synthetic coding sequence
  source 1..615: mol_type = other DNA
atgacagagtgggagacagctgccccagctgtggccgagaccccagacatcaagctgtttgggaagtggagcacagatgatgtgcagatcaatgacatcagcctgcaggactacatcgctgtgaaggagaagtatgccaagtacctgccccacagcgctggccgctatgctgccaagcgcttcaggaaggcccagtgccccatcgtggagcggctgaccaacagcatgatgatgcatggaagaaataatggcaagaagctgatgacagtgcgcatcgtgaagcacgcctttgagatcatccacctgctgaccggggagaaccccctgcaggtgctggtgaatgccatcatcaacagcggcccccgggaggacagcacccgcatcggccgggccggcaccgtgcggcggcaggccgtggatgtgagccccctgcggcgggtgaaccaggccatctggctgctgtgcaccggggcccgggaggccgccttcaggaacatcaagaccatcgcagaatgtctggctgatgagctgatcaatgctgccaagggcagcagcaacagctatgccatcaagaagaaggatgagctggagcgggtggccaagagcaacagatag

SEQ ID NO: 168351 - DNA, 615 bp, synthetic construct; identical to SEQ ID NO: 168350
  misc_feature 1..615: note = Description of Artificial Sequence: Synthetic coding sequence
  source 1..615: mol_type = other DNA

SEQ ID NO: 168352 - DNA, 657 bp, synthetic construct
  misc_feature 1..657: note = Description of Artificial Sequence: Synthetic coding sequence
  source 1..657: mol_type = other DNA
atggccacagaggtggccgcagatgccctgggggaggagtggaagggctacgtggtgcgcatcagcggcggcaatgacaagcagggcttccccatgaagcagggcgtgctgacccacggccgggtgcggctgctgctgagcaagggccacagctgctaccggcccaggagaactggagagaggaagaggaagtctgtgcggggctgcatcgtggatgccaacctgtctgtgctgaacctggtgattgtgaagaagggggagaaggacatccctggcctgacagacaccaccgtgccccggcggctgggccccaagagggccagccgcatcaggaagctgttcaacctgagcaaagaagatgatgtgcggcagtatgtggtgaggaagcccctgaacaaggagggcaagaagcccaggaccaaggcccccaagatccagaggctggtgaccccccgggtgctgcagcacaagagaagaagaattgccctgaagaagcagaggaccaagaagaacaaggaggaggccgcagaatatgccaagctgctggccaagaggatgaaggaggccaaggagaagaggcaggagcagatcgccaagagaagaaggctgagcagcctgcgggccagcaccagcaagtctgagagcagccagaagtag

SEQ ID NO: 168353 - DNA, 276 bp, synthetic construct
  misc_feature 1..276: note = Description of Artificial Sequence: Synthetic coding sequence
  source 1..276: mol_type = other DNA
atgaagctgaacatctccttccctgccaccggctgccagaagctgattgaggtggatgatgagaggaagctgcggaccttctatgagaagaggatggccacagaggtggccgcagatgccctgggggaggagtggaaggtgaaggtggacaagctgctgcaggtgttcaagtctgagaccgtgaatgccatcggcaactggtacctggagtggggcagtgacagcggcttctggctgctgaccttcggcaagctgctgcccaatgccaccctgtag

SEQ ID NO: 168354 - DNA, 657 bp, synthetic construct; identical to SEQ ID NO: 168352
  misc_feature 1..657: note = Description of Artificial Sequence: Synthetic coding sequence
  source 1..657: mol_type = other DNA

SEQ ID NO: 168355 - DNA, 750 bp, synthetic construct
  misc_feature 1..750: note = Description of Artificial Sequence: Synthetic coding sequence
  source 1..750: mol_type = other DNA
atgaagctgaacatctccttccctgccaccggctgccagaagctgattgaggtggatgatgagaggaagctgcggaccttctatgagaagaggatggccacagaggtggccgcagatgccctgggggaggagtggaagggctacgtggtgcgcatcagcggcggcaatgacaagcagggcttccccatgaagcagggcgtgctgacccacggccgggtgcggctgctgctgagcaagggccacagctgctaccggcccaggagaactggagagaggaagaggaagtctgtgcggggctgcatcgtggatgccaacctgtctgtgctgaacctggtgattgtgaagaagggggagaaggacatccctggcctgacagacaccaccgtgccccggcggctgggccccaagagggccagccgcatcaggaagctgttcaacctgagcaaggaggatgatgtgcggcagtatgtggtgaggaagcccctgaacaaggagggcaagaagcccaggaccaaggcccccaagatccagaggctggtgaccccccgggtgctgcagcacaagagaagacgcatcgccctgaagaagcagaggaccaagaagaacaaggaggaggccgcagaatatgccaagctgctggccaagaggatgaaggaggccaaggagaagaggcaggagcagatcgccaagagaagaaggctgagcagcctgcgggccagcaccagcaagtctgagagcagccagaagtag

SEQ ID NO: 168356 - DNA, 585 bp, synthetic construct
  misc_feature 1..585: note = Description of Artificial Sequence: Synthetic coding sequence
  source 1..585: mol_type = other DNA
atgttcagcagcagcgccaagatcgtgaagcccaacggggagaagccagatgaatttgaaagtggcatcagccaggccctgctggagctggagatgaacagcgacctgaaggcccagctgcgggagctgaacatcacagctgccaaggagattgaggtgggcggcggcaggaaggccatcatcatctttgtgcctgtgccccagctgaagagcttccagaagatccaggtgcggctggtgcgggagctggagaagaagttcagcggcaagcacgtggtgttcatcgcccagaggcgcatcctgcccaagcccaccaggaagagcaggaccaagaacaagcagaagaggcccaggagcaggaccctgacagctgtgcatgatgccatcctggaggacctggtgttccccagcgagatcgtgggcaagaggatccgggtgaagctggatggcagccgcctcatcaaggtgcacctggacaaggcccagcagaacaacgtggagcacaaggtggagaccttcagcggcgtgtacaagaagctgaccgggaaggatgtgaactttgagttccctgagttccagctgtag

SEQ ID NO: 168357 - DNA, 585 bp, synthetic construct; identical to SEQ ID NO: 168356
  misc_feature 1..585: note = Description of Artificial Sequence: Synthetic coding sequence
  source 1..585: mol_type = other DNA

SEQ ID NO: 168358 - DNA, 585 bp, synthetic construct; identical to SEQ ID NO: 168356
  misc_feature 1..585: note = Description of Artificial Sequence: Synthetic coding sequence
  source 1..585: mol_type = other DNA

SEQ ID NO: 168359 - DNA, 567 bp, synthetic construct
  misc_feature 1..567: note = Description of Artificial Sequence: Synthetic coding sequence
  source 1..567: mol_type = other DNA
atgggcatcagccgggacaactggcacaagaggaggaagacaggaggcaagaggaagccctaccacaagaagaggaaatatgagctgggccggcctgctgccaacaccaagattggcccccggcgcatccacacagtgcgggtgcggggcggctgcaccaggaagacccgcatcattgatgtggtgtacaatgccagcaacaatgagctggtgaggaccaagaccctggtgaagaactgcatcgtgctgattgacagcaccccctaccggcagtggtatgagagccactacgccctgcccctgggcaggaagaagggggccaagctgaccccagaggaggaggagatcctgaacaagaagaggagcaagaagatccagaagaagtatgatgagaggaagaagaatgccaagatcagcagcctgctggaggagcagttccagcagggcaagctgctggcctgcatcgccagcaggcctggccagtgtggccgggcagatggctacgtgctggagggcaaggagctggagttctacctgaggaagatcaaggccaggaagggcaagtag

SEQ ID NO: 168360 - DNA, 627 bp, synthetic construct
  misc_feature 1..627: note = Description of Artificial Sequence: Synthetic coding sequence
  source 1..627: mol_type = other DNA
atgggcatcagccgggacaactggcacaagaggaggaagacaggaggcaagaggaagccctaccacaagaagaggaaatatgagctgggccggcctgctgccaacaccaagattggcccccggcgcatccacacagtgcgggtgcggggcggcaacaagaagtaccgggccctgcggctggatgtgggcaacttctcctggggcagcgagtgctgcaccaggaagacccgcatcattgatgtggtgtacaatgccagcaacaatgagctggtgaggaccaagaccctggtgaagaactgcatcgtgctgattgacagcaccccctaccggcagtggtatgagagccactacgccctgcccctgggcaggaagaagggggccaagctgaccccagaggaggaggagatcctgaacaagaagaggagcaagaagatccagaagaagtatgatgagaggaagaagaatgccaagatcagcagcctgctggaggagcagttccagcagggcaagctgctggcctgcatcgccagcaggcctggccagtgtggccgggcagatggctacgtgctggagggcaaggagctggagttctacctgaggaagatcaaggccaggaagggcaagtag

SEQ ID NO: 168361 - DNA, 585 bp, synthetic construct
  misc_feature 1..585: note = Description of Artificial Sequence: Synthetic coding sequence
  source 1..585: mol_type = other DNA
atgcctgtggcccgctcctgggtgtgcaggaagacctacgtgaccccaagaagaccatttgagaagagccggctggaccaggagctgaagctgattggagaatatggcctgaggaacaagcgggaggtgtggagggtgaagttcaccctggccaagatcaggaaggccgcccgggagctgctgaccctggatgagaaggacccccggcggctgtttgagggcaatgccctgctgcggcggctggtgcgcatcggcgtgctggatgagggcaagatgaagctggactacatcctgggcctgaagattgaggacttcctggagcggcggctgcagacccaggtgttcaagctgggcctggccaagagcatccaccacgcccgggtgctgatccggcagaggcacatccgggtgaggaagcaggtggtgaacatccccagcttcatcgtgcggctggacagccagaagcacatcgacttcagcctgcggagcccctatggaggcggccggcccggccgggtgaagaggaagaatgccaagaagggccagggcggggccggggctggagatgatgaggaggaggactag

SEQ ID NO: 168362 - DNA, 585 bp, synthetic construct; identical to SEQ ID NO: 168361
  misc_feature 1..585: note = Description of Artificial Sequence: Synthetic coding sequence
  source 1..585: mol_type = other DNA

SEQ ID NO: 168363 - DNA, 585 bp, synthetic construct; identical to SEQ ID NO: 168361
  misc_feature 1..585: note = Description of Artificial Sequence: Synthetic coding sequence
  source 1..585: mol_type = other DNA

SEQ ID NO: 168364 - DNA, 420 bp, synthetic construct
  misc_feature 1..420: note = Description of Artificial Sequence: Synthetic coding sequence
  source 1..420: mol_type = other DNA
atgcctgtggcccgctcctgggtgtgcaggaagacctacgtgaccccaagaagaccatttgagaagagccggctggaccaggagctgaagctgattggagaatatggcctgaggaacaagcgggaggtgtggagggtgaagttcaccctggccaagatcaggaaggccgcccgggagctgctgaccctggatgagaaggacccccggcggctgtttgagggcaatgccctgctgcggcggctggtgcgcatcggcgtgctggatgagggcaagatgaagctggactacatcctgggcctgaagattgaggacttcctggagcggcggctgcagacccaggtgttcaagctgggcctggccaagagcatccaccacgcccgggtgctgatccggcagaggcacatcagccccaggaggtag

SEQ ID NO: 168365 - DNA, 420 bp, synthetic construct; identical to SEQ ID NO: 168364
  misc_feature 1..420: note = Description of Artificial Sequence: Synthetic coding sequence
  source 1..420: mol_type = other DNA

SEQ ID NO: 168366 - DNA, 471 bp, synthetic construct
  misc_feature 1..471: note = Description of Artificial Sequence: Synthetic coding sequence
  source 1..471: mol_type = other DNA
atgcctgtggcccgctcctgggtgtgcaggaagacctacgtgaccccaagaagaccatttgagaagagccggctggaccaggagctgaagctgattggagaatatggcctgaggaacaagcgggaggtgtggagggtgaagttcaccctggccaagatcaggaaggccgcccgggagctgctgaccctggatgagaaggacccccggcggctgtttgagggcaatgccctgctgcggcggctggtgcgcatcggcgtgctggatgagggcaagatgaagctggactacatcctgggcctgaagattgaggacttcctggagcggcggctgcagacccaggtgttcaagctgggcctggccaagagcatccaccacgcccgggtgctgatccggcagaggcacatccgctaccacctgggctgggcccctgagagcagcagcacctgccccagtgatggctgcccccactag

SEQ ID NO: 168367 - DNA, 420 bp, synthetic construct; identical to SEQ ID NO: 168364
  misc_feature 1..420: note = Description of Artificial Sequence: Synthetic coding sequence
  source 1..420: mol_type = other DNA

SEQ ID NO: 168368 - DNA, 2844 bp, synthetic construct
  misc_feature 1..2844: note = Description of Artificial Sequence: Synthetic coding sequence
  source 1..2844: mol_type = other DNA
atggccaccagggtgaggacagccagcatctgggtgccccccctgcaggagaggaacagctcctgggaccgcatcaggaagctgcagggccaggagagcatcctgggccagggcaccccaggcctgcagcccctgcccggcaccccccggcagaagcagaagagccgccgcatcgagaaggtgctggagtggctgttcatcagccaggagcagcccaagatcaccaagtcctggggccccctgtccttcatggatgtgtttgtggacttcacctgggaggagtggcagctgctggaccctgcccagaagtgcctgtacagatctgtgatgctggagaactacagcaacctggtgtccctgggctaccagcacaccaagccagacatcatcttcaagctggagcagggcgaggagctgtgcatggtgcaggcccaggtgcccaaccagacctgccccaacacagtgtggaagattgatgacctgatggactggcaccaggagaacaaggacaagctgggcagcacagccaagagctttgagtgcaccaccttcggcaagctgtgcctgctgagcaccaagtacctgagccggcagaagccccacaagtgtggcacccacggcaagagcctgaagtacatcgacttcaccagtgactatgccaggaacaaccccaacggcttccaggtgcacggcaagagcttcttccacagcaagcatgagcagaccgtcatcggcatcaagtactgtgagagcattgagagcggcaagacagtgaacaagaagagccagctgatgtgccagcagatgtacatgggagagaagcccttcggctgcagctgctgtgagaaggccttcagcagcaagagctacctgctggtgcaccagcagacccatgctgaggagaagccctacggctgcaatgaatgtgggaaggacttcagcagcaagagctacctgattgtgcaccagaggatccacactggagagaagctgcatgaatgttctgagtgcaggaagaccttctccttccacagccagctggtgatccaccagaggatccacactggagagaacccctatgagtgctgtgaatgtgggaaggtgttcagcaggaaggaccagctggtgagccaccagaagacccacagcggccagaagccctacgtgtgcaatgaatgtgggaaggccttcggcctgaagagccagctgatcatccacgagcgcatccacactggagagaagccctatgaatgtaatgaatgccagaaggccttcaacaccaagagcaacctgatggtgcaccagaggacccacactggagagaagccctacgtgtgcagcgactgtgggaaggccttcaccttcaagagccagctgattgtgcaccagggcatccacactggagtgaagccctacggctgcatccagtgtgggaagggcttcagcctgaagagccagctgattgtgcaccagaggagccacacaggcatgaagccctacgtgtgcaatgaatgtgggaaggccttccgcagcaagagctacctgatcatccacaccaggacccacactggagagaagctgcacgagtgcaacaactgtgggaaggccttctccttcaagagccagctgatcatccaccagaggatccacactggagagaacccctatgaatgtcatgaatgtgggaaggccttcagcaggaagtaccagctgatcagccaccagaggacccatgctggggagaagccctatgaatgtacagactgtgggaaggccttcggcctgaagagccagctgatcatccaccagaggacccacactggagagaagccctttgaatgttctgagtgccagaaggccttcaacaccaagagcaacctgattgtgcaccagaggacccacactggagagaagccctacagctgcaatgaatgtgggaaggccttcaccttcaagagccagctgattgtgcacaagggcgtgcacactggagtgaagccctacggctgcagccagtgtgccaagaccttcagcctgaagagccagctgattgtgcaccagaggagccacactggagtgaagccctacggctgcagtgaatgtgggaaggccttccgcagcaagagctacctgatcatccacatgaggacccacactggagagaagccccatgaatgtcgggagtgtgggaagagcttctccttcaacagccagctgattgtgcaccagaggatccacactggagagaacccctatgaatgttctgaatgtgggaaggccttcaacaggaaggaccagctgatcagccaccagaggacccatgctggggagaagccctacggctgcagtgaatgtgggaaggccttcagcagcaagagctacctgatcatccacatgaggacccacagcggggagaagccctatgaatgtaatgaatgtgggaaggccttcatctggaagagcctgctgattgtgcatgagaggacccatgctggggtgaacccctacaagtgcagccagtgtgagaagagcttcagcggcaagctgcggctgctggtgcaccagaggatgcacacccgggagaagccctatgaatgttctgaatgtgggaaggccttcatccggaacagccagctgattgtgcaccagaggacccacagcggggagaagccctacggctgcaatgaatgtgggaagaccttcagccagaagagcatcctgagcgcccaccagaggacccacactggagagaagccctgcaagtgcacagaatgtgggaaggccttctgctggaagagccagctgatcatgcaccagaggacccacgtggatgacaagcactag

SEQ ID NO: 168369 - DNA, 768 bp, synthetic construct
  misc_feature 1..768: note = Description of Artificial Sequence: Synthetic coding sequence
  source 1..768: mol_type = other DNA
atgccccgggaggaccgggccacctggaagagcaactacttcctgaagatcatccagctgctggatgactaccccaagtgcttcatcgtgggcgctgacaacgtgggcagcaagcagatgcagcagatccgcatgagcctgcggggcaaggctgtggtgctgatgggcaagaacaccatgatgaggaaggccatccggggccacctggagaacaacccagccctggagaagctgctgccccacatcagaggaaatgtgggctttgtgttcaccaaggaggacctgacagagatccgggacatgctgctggccaacaaggtgcctgctgctgcccgggccggggccatcgccccctgtgaggtgacagtgcctgcccagaacacaggcctgggccctgagaagaccagcttcttccaggccctgggcatcaccaccaagatcagccggggcaccatcgagatcctgggcgtgagaaatgtggcctctgtgtgcctgcagatcggctaccccaccgtggcctctgtgccccacagcatcatcaatggctacaagagggtgctggccctgtctgtggagacagactacaccttccccctggccgagaaggtgaaggccttcctggccgaccccagcgcctttgtggccgccgcccctgtggccgccgccaccacagctgccccagctgctgctgctgccccagccaaggtggaggccaaggaggagagcgaggagagtgatgaggacatgggcttcggcctgtttgattag

SEQ ID NO: 168370 - DNA, 954 bp, synthetic construct
  misc_feature 1..954: note = Description of Artificial Sequence: Synthetic coding sequence
  source 1..954: mol_type = other DNA
atgccccgggaggaccgggccacctggaagagcaactacttcctgaagatcatccagctgctggatgactaccccaagtgcttcatcgtgggcgctgacaacgtgggcagcaagcagatgcagcagatccgcatgagcctgcggggcaaggctgtggtgctgatgggcaagaacaccatgatgaggaaggccatccggggccacctggagaacaacccagccctggagaagctgctgccccacatcagaggaaatgtgggctttgtgttcaccaaggaggacctgacagagatccgggacatgctgctggccaacaaggtgcctgctgctgcccgggccggggccatcgccccctgtgaggtgacagtgcctgcccagaacacaggcctgggccctgagaagaccagcttcttccaggccctgggcatcaccaccaagatcagccggggcaccatcgagatcctgagtgatgtgcagctgatcaagacaggagacaaggtgggcgccagcgaggccaccctgctgaacatgctgaacatcagccccttctcctttggcctggtgatccagcaggtgtttgacaatggcagcatctacaaccctgaggtgctggacatcacagaggagaccctgcacagccgcttcctggagggcgtgagaaatgtggcctctgtgtgcctgcagatcggctaccccaccgtggcctctgtgccccacagcatcatcaatggctacaagagggtgctggccctgtctgtggagacagactacaccttccccctggccgagaaggtgaaggccttcctggccgaccccagcgcctttgtggccgccgcccctgtggccgccgccaccacagctgccccagctgctgctgctgccccagccaaggtggaggccaaggaggagagcgaggagagtgatgaggacatgggcttcggcctgtttgattag

SEQ ID NO: 168371 - DNA, 954 bp, synthetic construct; identical to SEQ ID NO: 168370
  misc_feature 1..954: note = Description of Artificial Sequence: Synthetic coding sequence
  source 1..954: mol_type = other DNA

SEQ ID NO: 168372 - DNA, 345 bp, synthetic construct
  misc_feature 1..345: note = Description of Artificial Sequence: Synthetic coding sequence
  source 1..345: mol_type = other DNA
atggcctctgtgtctgagctggcctgcatctacagcgccctgatcctgcatgatgatgaggtgacagtgacagaggacaagatcaatgccctgatcaaggctgctggggtgaatgtggagcccttctggccaggcctgtttgccaaggccctggccaacgtgaacatcggcagcctcatctgcaatgtgggcgccggcggccctgccccagctgctggggccgccccagctgggggccctgcccccagcacagctgctgccccagctgaggagaagaaggtggaggccaagaaggaggagagcgaggagagtgatgatgacatgggcttcggcctgtttgattag

SEQ ID NO: 168373 - DNA, 270 bp, synthetic construct
  misc_feature 1..270: note = Description of Artificial Sequence: Synthetic coding sequence
  source 1..270: mol_type = other DNA
atggcctctgtgtctgagctggcctgcatctacagcgccctgatcctgcatgatgatgaggtgacagtgacagccctggccaacgtgaacatcggcagcctcatctgcaatgtgggcgctgggggccctgccccagctgctggagctgccccagctgggggccctgcccccagcacagctgctgccccagctgaggagaagaaggtggaggccaagaaggaggagagcgaggagagtgatgatgacatgggcttcggcctgtttgattag

SEQ ID NO: 168374 - DNA, 2277 bp, synthetic construct
  misc_feature 1..2277: note = Description of Artificial Sequence: Synthetic coding sequence
  source 1..2277: mol_type = other DNA
atggccccagccatgcagcctgctgagatccagtttgcccagaggctggccagcagcgagaagggcatccgggacagagctgtgaagaagctgcggcagtacatctctgtgaagacccagcgggagactggaggcttcagccaggaggagctgctgaagatctggaagggcctcttctactgcatgtgggtgcaggatgagcccctgctgcaggaggagctggccaacaccatcgcccagctggtgcatgctgtgaacaacagcgctgcccagcacctgttcatccagaccttctggcagaccatgaaccgggagtggaagggcatcgaccggctgcggctggacaagtactacatgctgatccggctggtgctgcggcagagctttgaggtgctgaagagaaatggctgggaggagagccgcatcaaggtgttcctggatgtgctgatgaaggaggtgctgtgcccagagagccagagccccaacggggtgcgcttccacttcatcgacatctacctggatgagctgagcaaggtgggcggcaaggagctgctggccgaccagaacctgaagttcatcgaccccttctgcaagattgctgccaagaccaaggaccacaccctggtgcagaccatcgcccggggcgtgtttgaggccatcgtggaccagagcccctttgtgcctgaggagaccatggaggagcagaagaccaaggtgggagatggagacctgtctgctgaggagatcccagaaaatgaggtgtccctgcggcgggctgtgtccaagaagaagacagccctgggcaagaaccacagcaggaaggatggcctgagtgatgagcggggcagagatgactgtggcacctttgaggacaccggccccctgctgcagtttgactacaaggctgtggccgaccggctgctggagatgaccagcaggaagaacaccccccacttcaacaggaagaggctgagcaagctgatcaagaagttccaggacctgtctgagggcagcagcatcagccagctgagctttgctgaggacatctctgcagatgaagatgaccagatcctgagccagggcaagcacaagaagaagggcaacaagctgctggagaagaccaacctggagaaggagaagggcagcagggtcttctgtgtggaggaggaggacagcgagagcagcctgcagaagagaagaaggaagaagaagaagaagcaccacctgcagcctgagaaccctggccctgggggcgccgcccccagcctggagcagaacagaggccgggagcctgaggccagcggcctgaaggccctgaaggcccgggtggccgagcccggggctgaggccaccagcagcactggagaggagagcggcagcgagcaccccccagctgtgcccatgcacaacaagaggaagaggcccaggaagaagagcccccgggcccaccgggagatgctggagagcgctgtgctgcccccagaggacatgagccagagcggccccagcggcagccacccccagggcccccggggcagccccactggaggagcccagctgctgaagaggaagaggaagctgggcgtggtgcctgtgaatggaagtggcctgagcaccccagcctggccacccctgcagcaggagggcccccccaccggccctgctgagggcgccaacagccacaccaccctgccccagaggcggcggctgcagaagaagaaggccggccctggcagcctggagctgtgtggcctgcccagccagaagacagccagcctgaagaagaggaagaagatgagggtgatgagcaacctggtggagcacaatggagtgctggagagcgaggccggccagccccaggccctgggcagcagcggcacctgcagcagcctgaagaagcagaagctgcgggcagagagtgactttgtgaagtttgacacccccttcctgcccaagcccctcttcttcagaagagccaagagcagcacagccacccaccccccaggccctgctgtgcagctgaacaagacccccagcagcagcaagaaggtgaccttcggcctgaacagaaacatgacagctgagttcaagaagacagacaagagcatcctggtgagccccaccggccccagccgggtggcctttgatcctgagcagaagcccctgcatggagtgctgaagacccccaccagcagccctgccagcagccccctggtggccaagaagcccctgaccaccaccccaagaagaagaccccgggccatggacttcttctag

SEQ ID NO: 168375 - DNA, 780 bp, synthetic construct
  misc_feature 1..780: note = Description of Artificial Sequence: Synthetic coding sequence
  source 1..780: mol_type = other DNA
atgcctggggccaactaccgggccggggccggggccggggccggggcccggcggcccaggggggcccgggaccgggaggaggatggcggcggcctggagcctgctgctgtggcccgggacctgctgcggggcaccagcaacatgagctttgaggagctgctggagctgcagagccaggtgggcaccaagacctacaagcagctggtggccggcaacagccccaagaagcaggccagcaggcctcccatccagaatgcctgtgtggccgacaagcaccggcccctggagatgtctgccaagatccgggtgcccttcctgcggcaggtggtgcccatcagcaagaaggtggcccgggaccccaggtttgatgacctgagcggggagtacaaccctgaggtgtttgacaagacctaccagttcctgaatgacatccgggccaaggagaaggagctggtgaagaagcagctgaagaagcacctgtctggagaggagcacgagaagctgcagcagctgctgcagaggatggagcagcaggagatggcccagcaggagaggaagcagcagcaggagctgcacctggccctgaagcaggagcggcgggcccaggcccagcagggccaccggccctacttcctgaagaagtctgagcagaggcagctggccctggccgagaagttcaaggagctgaagaggagcaagaagctggagaacttcctgagcaggaagagaagaagaaatgccggcaaggacagaagacacctgcccctgagcaaggagtag

SEQ ID NO: 168376 - DNA, 4233 bp, synthetic construct
  misc_feature 1..4233: note = Description of Artificial Sequence: Synthetic coding sequence
  source 1..4233: mol_type = other DNA
atggacatctatgacacccagaccctgggcgtggtggtgtttggaggcttcatggtggtgtctgccatcggcatcttcctggtgtccaccttctccatgaaggagaccagctatgaggaggccctggccaaccagaggaaggagatggccaagacccaccaccagaaggtggagaagaagaagaaggagaagacagtggagaagaagggcaagaccaagaagaaggaggagaagcccaacgggaagatcccagaccatgaccctgccccaaatgtgacagtgctgctgcgggagcctgtgcgggccccagctgtggccgtggcccccacccctgtgcagccccccatcatcgtggcccctgtggccaccgtgcctgccatgccccaggagaagctggccagcagccccaaggacaagaagaagaaggagaagaaggtggccaaggtggagcctgctgtgtcctctgtggtgaacagcatccaggtgctgaccagcaaggccgccatcctggagacagcccccaaggaggtgcccatggtggtggtgccccctgtgggcgccaagggcaacaccccagccaccggcaccacccagggcaagaaggccgagggcacccagaaccagagcaagaaggccgagggcgcccccaaccagggcaggaaggccgagggcacccccaaccagggcaagaagacagagggcacccccaaccagggcaagaaggccgagggcacccccaaccagggcaagaaggccgagggcacccccaaccagggcaagaaggccgagggcgcccagaaccagggcaagaaggtggacaccacccccaaccagggcaagaaggtggagggcgcccccacccagggcaggaaggccgagggcgcccagaaccaggccaagaaggtggagggcgcccagaaccagggcaagaaggccgagggcgcccagaaccagggcaagaagggggagggcgcccagaaccagggcaagaaggccgagggcgcccagaaccagggcaagaaggccgagggcgcccagaaccagggcaagaaggccgagggcgcccagaaccagggcaagaaggccgagggcgcccagaaccagggcaagaaggccgagggcgcccagaaccagggcaagaagtctgagggcgcccagaaccagggcaagaaggtggagggcgcccagaaccagggcaagaaggccgagggcgcccagaaccagggcaagaaggccgagggcgcccagaaccagggcaagaaggccgagggcgcccagaaccagggcaagaaggccgagggcgcccagaaccagggcaagaaggccgagggcgcccagaaccagggcaagaaggccgagggcgcccagaaccagggcaagaaggccgagggcgcccagaaccagggcaagaaggtggagggcgcccagaaccagggcaagaaggccgagggcgcccagaaccagggcaagaaggccgagggcgcccagaaccagggcaagaaggccgagggcgcccagaaccagggccagaagggggagggcgcccagaaccagggcaagaagacagagggcgcccagggcaagaaggccgagaggagccccaaccagggcaagaagggggagggcgcccccatccagggcaagaaggctgacagcgtggccaaccagggcaccaaggtggagggcatcaccaaccagggcaagaaggccgagggcagccccagcgagggcaagaaggccgagggcagccccaaccagggcaagaaggcagatgctgctgccaaccagggcaagaagacagagagcgcctctgtgcagggcaggaacacagatgtggcccagagccctgaggcccccaagcaggaggccccagccaagaagaagagcggcagcaagaagaagggggagcccggccccccagatgctgatggccccctgtacctgccctacaagaccctggtgtccacagtgggctccatggtgttcaatgaaggagaggcccagaggctgattgagatcctgtctgagaaggccggcatcatccaggacacctggcacaaggccacccagaagggggaccctgtggccatcctgaagaggcagctggaggagaaggagaagctgctggccacagagcaggaggatgctgctgtggccaagagcaagctgcgggagctgaacaaggagatggctgctgagaaggccaaggctgctgctggggaggccaaggtgaagaagcagctggtggcccgggagcaggagatcacagctgtgcaggccaggatgcaggccagctaccgggagcacgtgaaggaggtgcagcagctgcagggcaagatccgcaccctgcaggagcagctggagaatggccccaacacccagctggcccggctgcagcaggagaacagcatcctgagagatgccctgaaccaggccaccagccaggtggagagcaagcagaatgctgagctggccaagctgcggcaggagctgagcaaggtgtccaaggagctggtggagaagtctgaggccgtgcggcaggatgagcagcagaggaaggccctggaggccaaggccgccgcctttgagaagcaggtgctgcagctgcaggccagccaccgggagagcgaggaggccctgcagaagaggctggatgaggtgtcccgggagctgtgccacacccagagcagccacgccagcctgcgggcagatgctgagaaggcccaggagcagcagcagcagatggccgagctgcacagcaagctgcagagcagcgaggccgaggtgcgcagcaaatgtgaggagctgagcggcctgcacggccagctgcaggaggcccgggcagagaacagccagctgacagagcgcatccgcagcattgaggccctgctggaggccggccaggccagagatgcccaggatgtgcaggccagccaggccgaggccgaccagcagcagacccggctgaaggagctggagagccaggtgtctggcctggagaaggaggccatcgagctgcgggaggccgtggagcagcagaaggtgaagaacaatgacctgcgggagaagaactggaaggccatggaggccctggccacagctgagcaggcctgcaaggagaagctgctgagcctgacccaggccaaggaggagagcgagaagcagctgtgcctgattgaggcccagaccatggaggccctgctggccctgctgcctgagctgtctgtgctggcccagcagaactacacagagtggctgcaggacctgaaggagaagggccccaccctgctgaagcaccccccagccccagctgagcccagcagtgacctggccagcaagctgcgggaggccgaggagacccagagcaccctgcaggctgaatgtgaccagtaccgcagcatcctggccgagacagagggcatgctgcgggacctgcagaagtctgtggaggaggaggagcaggtgtggagggccaaggtgggcgctgctgaggaggagctgcagaagagccgggtgacagtgaagcacctggaggagatcgtggagaagctgaagggggagctggagagcagtgaccaggtgcgggagcacaccagccacctggaggccgagctggagaagcacatggctgctgccagcgctgagtgccagaactatgccaaggaggtggccggcctgcggcagctgctgctggagagccagagccagctggatgctgccaagtctgaggcccagaagcagagtgatgagctggccctggtgcggcagcagctgtctgagatgaagagccacgtggaggatggagacattgctggggccccagccagcagccctgaggcccctcctgctgagcaggaccctgtgcagctgaagacccagctggagtggacagaggccatcctggaggatgagcagacccagaggcagaagctgacagctgagtttgaggaggcccagaccagcgcctgccgcctgcaggaggagctggagaagctgaggacagctggccccctggagagcagcgagacagaggaggccagccagctgaaggagcggctggagaaggagaagaagctgaccagtgacctgggccgggccgccacccggctgcaggagctgctgaagaccacccaggagcagctggcccgggagaaggacacagtgaagaagctgcaggagcagctggagaaggcagaagatggcagcagcagcaaggagggcacctctgtgtag

SEQ ID NO: 168377 - DNA, 2934 bp, synthetic construct
  misc_feature 1..2934: note = Description of Artificial Sequence: Synthetic coding sequence
  source 1..2934: mol_type = other DNA
atggacatctatgacacccagaccctgggcgtggtggtgtttggaggcttcatggtggtgtctgccatcggcatcttcctggtgtccaccttctccatgaaggagaccagctatgaggaggccctggccaaccagaggaaggagatggccaagacccaccaccagaaggtggagaagaagaagaaggagaagacagtggagaagaagggcaagaccaagaagaaggaggagaagcccaacgggaagatcccagaccatgaccctgccccaaatgtgacagtgctgctgcgggagcctgtgcgggccccagctgtggccgtggcccccacccctgtgcagccccccatcatcgtggcccctgtggccaccgtgcctgccatgccccaggagaagctggccagcagccccaaggacaagaagaagaaggagaagaaggtggccaaggtggagcctgctgtgtcctctgtggtgaacagcatccaggtgctgaccagcaaggccgccatcctggagacagcccccaaggagggcaggaacacagatgtggcccagagccctgaggcccccaagcaggaggccccagccaagaagaagagcggcagcaagaagaagggccccccagatgctgatggccccctgtacctgccctacaagaccctggtgtccacagtgggctccatggtgttcaatgaaggagaggcccagaggctcatcgagatcctgtctgagaaggccggcatcatccaggacacctggcacaaggccacccagaagggggaccctgtggccatcctgaagaggcagctggaggagaaggagaagctgctggccacagagcaggaggatgctgctgtggccaagagcaagctgcgggagctgaacaaggagatggctgctgagaaggccaaggctgctgctggggaggccaaggtgaagaagcagctggtggcccgggagcaggagatcacagctgtgcaggccaggatgcaggccagctaccgggagcacgtgaaggaggtgcagcagctgcagggcaagatccgcaccctgcaggagcagctggagaatggccccaacacccagctggcccggctgcagcaggagaacagcatcctgagagatgccctgaaccaggccaccagccaggtggagagcaagcagaatgctgagctggccaagctgcggcaggagctgagcaaggtgtccaaggagctggtggagaagtctgaggccgtgcggcaggatgagcagcagaggaaggccctggaggccaaggctgctgcctttgagaagcaggtgctgcagctgcaggccagccaccgggagagcgaggaggccctgcagaagaggctggatgaggtgtcccgggagctgtgccacacccagagcagccacgccagcctgcgggcagatgctgagaaggcccaggagcagcagcagcagatggccgagctgcacagcaagctgcagagcagcgaggccgaggtgcgcagcaaatgtgaggagctgagcggcctgcacggccagctgcaggaggcccgggcagagaacagccagctgacagagcgcatccgcagcattgaggccctgctggaggccggccaggccagagatgcccaggatgtgcaggccagccaggccgaggccgaccagcagcagacccggctgaaggagctggagagccaggtgtctggcctggagaaggaggccatcgagctgcgggaggccgtggagcagcagaaggtgaagaacaatgacctgcgggagaagaactggaaggccatggaggccctggccacagctgagcaggcctgcaaggagaagctgctgagcctgacccaggccaaggaggagagcgagaagcagctgtgcctgattgaggcccagaccatggaggccctgctggccctgctgcctgagctgtctgtgctggcccagcagaactacacagagtggctgcaggacctgaaggagaagggccccaccctgctgaagcaccccccagccccagctgagcccagcagtgacctggccagcaagctgcgggaggccgaggagacccagagcaccctgcaggccgagtgtgaccagtaccgcagcatcctggccgagacagagggcatgctgcgggacctgcagaagtctgtggaggaggaggagcaggtgtggagggccaaggtgggcgctgctgaggaggagctgcagaagagccgggtgacagtgaagcacctggaggagatcgtggagaagctgaagggggagctggagagcagtgaccaggtgcgggagcacaccagccacctggaggccgagctggagaagcacatggccgccgccagcgctgagtgccagaactatgccaaggaggtggccggcctgcggcagctgctgctggagagccagagccagctggatgctgccaagtctgaggcccagaagcagagtgatgagctggccctggtgcggcagcagctgtctgagatgaagagccacgtggaggatggagacattgctggggccccagccagcagccctgaggcccccccagctgagcaggaccctgtgcagctgaagacccagctggagtggacagaggccatcctggaggatgagcagacccagaggcagaagctgacagctgagtttgaggaggcccagaccagcgcctgccgcctgcaggaggagctggagaagctgaggacagctggccccctggagagcagcgagacagaggaggccagccagctgaaggagcggctggagaaggagaagaagctgaccagtgacctgggccgggccgccacccggctgcaggagctgctgaagaccacccaggagcagctggcccgggagaaggacacagtgaagaagctgcaggagcagctggagaaggccgaggatggcagcagcagcaaggagggcacctctgtgtag

SEQ ID NO: 168378 - DNA, 2934 bp, synthetic construct; identical to SEQ ID NO: 168377
  misc_feature 1..2934: note = Description of Artificial Sequence: Synthetic coding sequence
  source 1..2934: mol_type = other DNA

SEQ ID NO: 168379 - DNA, 4233 bp, synthetic construct; identical to SEQ ID NO: 168376
  misc_feature 1..4233: note = Description of Artificial Sequence: Synthetic coding sequence
  source 1..4233: mol_type = other DNA

SEQ ID NO: 168380 - DNA, 903 bp, synthetic construct
  misc_feature 1..903: note = Description of Artificial Sequence: Synthetic coding sequence
  source 1..903: mol_type = other DNA
atggacatctatgacacccagaccctgggcgtggtggtgtttggaggcttcatggtggtgtctgccatcggcatcttcctggtgtccaccttctccatgaaggagaccagctatgaggaggccctggccaaccagaggaaggagatggccaagacccaccaccagaaggtggagaagaagaagaaggagaagacagtggagaagaagggcaagaccaagaagaaggaggagaagcccaacgggaagatcccagaccatgaccctgccccaaatgtgacagtgctgctgcgggagcctgtgcgggccccagctgtggccgtggcccccacccctgtgcagccccccatcatcgtggcccctgtggccaccgtgcctgccatgccccaggagaagctggccagcagccccaaggacaagaagaagaaggagaagaaggtggccaaggtggagcctgctgtgtcctctgtggtgaacagcatccaggtgctgaccagcaaggccgccatcctggagacagcccccaaggaggtgcccatggtggtggtgccccctgtgggcgccaagggcaacaccccagccaccggcaccacccagggcaagaaggccgagggcacccagaaccagagcaagaaggccgagggcgcccccaaccagggcaggaaggccgagggcacccccaaccagggcaagaagacagagggcacccccaaccagggcaagaaggccgagggcacccccaaccagggcaagaaggccgagggcacccccaaccagggcaagaaggccgagggcgcccagaaccagggcaagaaggtggacaccacccccaaccagggcaagaaggtggagggcgcccccacccagggcaggaaggccgagggcgcccagaaccaggccaagtag

SEQ ID NO: 168381 - DNA, 2256 bp, synthetic construct
  misc_feature 1..2256: note = Description of Artificial Sequence: Synthetic coding sequence
  source 1..2256: mol_type = other DNA
atggtgttcaatgaaggagaggcccagaggctcatcgagatcctgtctgagaaggccggcatcatccaggacacctggcacaaggccacccagaagggggaccctgtggccatcctgaagaggcagctggaggagaaggagaagctgctggccacagagcaggaggatgctgctgtggccaagagcaagctgcgggagctgaacaaggagatggctgctgagaaggccaaggctgctgctggggaggccaaggtgaagaagcagctggtggcccgggagcaggagatcacagctgtgcaggccaggatgcaggccagctaccgggagcacgtgaaggaggtgcagcagctgcagggcaagatccgcaccctgcaggagcagctggagaatggccccaacacccagctggcccggctgcagcaggagaacagcatcctgagagatgccctgaaccaggccaccagccaggtggagagcaagcagaatgctgagctggccaagctgcggcaggagctgagcaaggtgtccaaggagctggtggagaagtctgaggccgtgcggcaggatgagcagcagaggaaggccctggaggccaaggctgctgcctttgagaagcaggtgctgcagctgcaggccagccaccgggagagcgaggaggccctgcagaagaggctggatgaggtgtcccgggagctgtgccacacccagagcagccacgccagcctgcgggcagatgctgagaaggcccaggagcagcagcagcagatggccgagctgcacagcaagctgcagagcagcgaggccgaggtgcgcagcaaatgtgaggagctgagcggcctgcacggccagctgcaggaggcccgggcagagaacagccagctgacagagcgcatccgcagcattgaggccctgctggaggccggccaggccagagatgcccaggatgtgcaggccagccaggccgaggccgaccagcagcagacccggctgaaggagctggagagccaggtgtctggcctggagaaggaggccatcgagctgcgggaggccgtggagcagcagaaggtgaagaacaatgacctgcgggagaagaactggaaggccatggaggccctggccacagctgagcaggcctgcaaggagaagctgctgagcctgacccaggccaaggaggagagcgagaagcagctgtgcctgattgaggcccagaccatggaggccctgctggccctgctgcctgagctgtctgtgctggcccagcagaactacacagagtggctgcaggacctgaaggagaagggccccaccctgctgaagcaccccccagccccagctgagcccagcagtgacctggccagcaagctgcgggaggccgaggagacccagagcaccctgcaggccgagtgtgaccagtaccgcagcatcctggccgagacagagggcatgctgcgggacctgcagaagtctgtggaggaggaggagcaggtgtggagggccaaggtgggcgctgctgaggaggagctgcagaagagccgggtgacagtgaagcacctggaggagatcgtggagaagctgaagggggagctggagagcagtgaccaggtgcgggagcacaccagccacctggaggccgagctggagaagcacatggccgccgccagcgctgagtgccagaactatgccaaggaggtggccggcctgcggcagctgctgctggagagccagagccagctggatgctgccaagtctgaggcccagaagcagagtgatgagctggccctggtgcggcagcagctgtctgagatgaagagccacgtggaggatggagacattgctggggccccagccagcagccctgaggcccccccagctgagcaggaccctgtgcagctgaagacccagctggagtggacagaggccatcctggaggatgagcagacccagaggcagaagctgacagctgagtttgaggaggcccagaccagcgcctgccgcctgcaggaggagctggagaagctgaggacagctggccccctggagagcagcgagacagaggaggccagccagctgaaggagcggctggagaaggagaagaagctgaccagtgacctgggccgggccgccacccggctgcaggagctgctgaagaccacccaggagcagctggcccgggagaaggacacagtgaagaagctgcaggagcagctggagaaggccgaggatggcagcagcagcaaggagggcacctctgtgtag

SEQ ID NO: 168382 - DNA, 663 bp, synthetic construct
  misc_feature 1..663: note = Description of Artificial Sequence: Synthetic coding sequence
  source 1..663: mol_type = other DNA
atggccagcggctgcaagattggccccagcatcctgaacagcgacctggccaacctgggcgctgagtgcctgaggatgctggacagcggggctgactacctgcacctggatgtgatggatggctacatgcacatgatggtgtccaagccagagcagtgggtgaagcccatggctgtggccggggccaaccagtacaccttccacctggaggccacagaaaatcctggggccctgatcaaggacatccgggagaatggcatgaagagctgcagcgtgacccaggccgaggtgcagtggcacagccagggccccctgcaggtgggcctggccatcaagccaggcacctctgtggagtacctggccccctgggccaaccagattgacatggccctggtgatgacagtggagcccggctttggaggccagaagttcatggaggacatgatgcccaaggtgcactggctgcggacccagttccccagcctggacatcgaggtggatggaggagtgggccctgacacagtgcacaagtgtgccgaggccggggccaacatgattgtgtctggcagcgccatcatgaggtctgaggaccccaggagcgtcatcaacctgctgagaaatgtgtgcagcgaggccgcccagaagaggagcctggacagatag

SEQ ID NO: 168383 - DNA, 687 bp, synthetic construct
  misc_feature 1..687: note = Description of Artificial Sequence: Synthetic coding sequence
  source 1..687: mol_type = other DNA
atggccagcggctgcaagattggccccagcatcctgaacagcgacctggccaacctgggcgctgagtgcctgaggatgctggacagcggggctgactacctgcacctggatgtgatggatggccactttgtgcccaacatcaccttcggccaccctgtggtggagagcctgaggaagcagctgggccaggaccccttctttgacatgcacatgatggtgtccaagccagagcagtgggtgaagcccatggctgtggccggggccaaccagtacaccttccacctggaggccacagaaaatcctggggccctgatcaaggacatccgggagaatggcatgaaggtgggcctggccatcaagccaggcacctctgtggagtacctggccccctgggccaaccagattgacatggccctggtgatgacagtggagcccggctttggaggccagaagttcatggaggacatgatgcccaaggtgcactggctgcggacccagttccccagcctggacatcgaggtggatggaggagtgggccctgacacagtgcacaagtgtgccgaggccggggccaacatgattgtgtctggcagcgccatcatgaggtctgaggaccccaggagcgtcatcaacctgctgagaaatgtgtgcagcgaggccgcccagaagaggagcctggacagatag

SEQ ID NO: 168384 - DNA, 537 bp, synthetic construct
  misc_feature 1..537: note = Description of Artificial Sequence: Synthetic coding sequence
  source 1..537: mol_type = other DNA
atgcacatgatggtgtccaagccagagcagtgggtgaagcccatggctgtggccggggccaaccagtacaccttccacctggaggccacagaaaatcctggggccctgatcaaggacatccgggagaatggcatgaagagctgcagcgtgacccaggccgaggtgcagtggcacagccagggccccctgcaggtgggcctggccatcaagccaggcacctctgtggagtacctggccccctgggccaaccagattgacatggccctggtgatgacagtggagcccggctttggaggccagaagttcatggaggacatgatgcccaaggtgcactggctgcggacccagttccccagcctggacatcgaggtggatggaggagtgggccctgacacagtgcacaagtgtgccgaggccggggccaacatgattgtgtctggcagcgccatcatgaggtctgaggaccccaggagcgtcatcaacctgctgagaaatgtgtgcagcgaggccgcccagaagaggagcctggacagatag

SEQ ID NO: 168385 - DNA, 537 bp, synthetic construct; identical to SEQ ID NO: 168384
  misc_feature 1..537: note = Description of Artificial Sequence: Synthetic coding sequence
  source 1..537: mol_type = other DNA

SEQ ID NO: 168386 - DNA, 285 bp, synthetic construct
  misc_feature 1..285: note = Description of Artificial Sequence: Synthetic coding sequence
  source 1..285: mol_type = other DNA
atgcacatgatggtgtccaagccagagcagtgggtgaagcccatggctgtggccggggccaaccagtacaccttccacctggaggccacagaaaatcctggggccctgatcaaggacatccgggagaatggcatgaagagctgcagcgtgacccaggccgaggtgcagtggcacagccagggccccctgcaggtgggcctggccatcaagccaggcacctctgtggagtacctggccccctgggccaaccagattgacatggccctggtgatgacagtggagtag

SEQ ID NO: 168387 - DNA, 537 bp, synthetic construct; identical to SEQ ID NO: 168384
  misc_feature 1..537: note = Description of Artificial Sequence: Synthetic coding sequence
  source 1..537: mol_type = other DNA

SEQ ID NO: 168388 - DNA, 600 bp, synthetic construct
  misc_feature 1..600: note = Description of Artificial Sequence: Synthetic coding sequence
  source 1..600: mol_type = other DNA
atggccagcggctgcaagattggccccagcatcctgaacagcgacctggccaacctgggcgctgagtgcctgaggatgctggacagcggggctgactacctgcacctggatgtgatggatggccactttgtgcccaacatcaccttcggccaccctgtggtggagagcctgaggaagcagctgggccaggaccccttctttgacatgcacatgatggtgtccaagccagagcagtgggtgaagcccatggctgtggccggggccaaccagtacaccttccacctggaggccacagaaaatcctggggccctgatcaaggacatccgggagaatggcatgaaggtgggcctggccatcaagccaggcacctctgtggagtacctggccccctgggccaaccagattgacatggccctggtgatgacagtggagcccggctttggaggccagaagttcatggaggacatgatgcccaaggccggggccaacatgattgtgtctggcagcgccatcatgagaagtgaggaccccaggagcgtcatcaacctgctgagaaatgtgtgcagcgaggccgcccagaagaggagcctggacagatag

SEQ ID NO: 168389 - DNA, 3159 bp, synthetic construct
  misc_feature 1..3159: note = Description of Artificial Sequence: Synthetic coding sequence
  source 1..3159: mol_type = other DNA
atgagggaggccgctgagcggcggcagcagctgcagctggagcatgaccaggccctggccgtgctgagcgccaagcagcaggagattgacctgctgcagaagagcaaggtgcgggagctggaggagaagtgcaggacccagagcgagcagttcaacctgctgagccgggacctggagaagttccggcagcacgccggcaagattgacctgctgggcggcagcgctgtggcccccctggacatcagcacagcccccagcaagcccttcccccagttcatgaatggcctggccaccagcctgggcaagggccaggagagcgccatcggcggcagcagcgccatcggggagtacatccggcccctgccccagcccggggacaggcctgagcccctgagcgccaagcccaccttcctgagccgcagcggcagcgcccgctgccgctctgagagtgacatggagaatgaaagaaacagcaacaccagcaagcagcgctacagcggcaaggtgcacctgtgtgtggcccgctacagctacaacccctttgatggccccaatgaaaatcctgaggccgagctgcccctgacagctgggaagtacctgtatgtgtatggagacatggatgaagatggcttctatgaaggagagctgctggatggccagaggggcctggtgcccagcaactttgtggactttgtgcaggacaatgaaagccggctggccagcaccctgggcaatgagcaggaccagaacttcatcaaccacagcggcatcggcctggagggggagcacatcctggacctgcacagccccacccacattgatgctggcatcacagacaacagcgctggcaccctggatgtgaacattgatgacatcggggaggacatcgtgccctaccccaggaagatcaccctcatcaagcagctggccaagagcgtcatcgtgggctgggagcccccagctgtgcccccaggctggggcaccgtgtcctcctacaacgtgctggtggacaaggagaccaggatgaacctgaccctgggcagcaggaccaaggccctgattgagaagctgaacatggccgcctgcacctaccgcatctctgtgcagtgtgtgaccagccggggcagcagtgatgagctgcagtgcaccctgctggtgggcaaggatgtggtggtggcccccagccacctgcgggtggacaacatcacccagatcagcgcccagctgtcctggctgcccaccaacagcaactacagccacgtgatcttcctgaatgaggaggagtttgatattgtgaaggccgcccgctacaagtaccagttcttcaacctgcggcccaacatggcctacaaggtgaaggtgctggccaagccccaccagatgccctggcagctgcccctggagcagcgggagaagaaggaggcctttgtggagttcagcaccctgcctgctggccccccagccccaccccaggatgtgacagtgcaggccggcgtgaccccagccaccatccgggtgtcctggaggcctcctgtgctgacccccaccggcctgagcaatggagccaacgtgacaggctatggagtgtatgccaagggccagagggtggccgaggtgatcttccccacagctgacagcacagctgtggagctggtgcggctgcggagcctggaggccaagggcgtgacagtgaggaccctgagcgcccagggcgagagcgtggacagcgctgtggccgctgtgcccccagagctgctggtgccccccaccccccaccccaggcctgccccccagagcaagcccctggccagcagtggagtgcctgagaccaaggatgagcacctgggcccccacgccaggatggatgaggcctgggagcagagccgggcccctggccctgtgcacggccacatgctggagccccctgtgggccctggaagaagaagccccagccccagccgcatcctgccccagccccagggcacccctgtgtccaccaccgtggccaaggccatggcccgggaggccgcccagagggtggccgagagcagccggctggagaagaggagcgtcttcctggagaggagcagcgctggccagtatgctgccagtgatgaagaagatgcctatgacagcccagacttcaagagaagaggagcctctgtggatgacttcctgaagggcagcgagctgggcaagcagccccactgctgccacggagatgagtaccacacagagagcagccggggcagtgacctgagtgacatcatggaggaggatgaggaggagctgtacagcgagatgcagctggaggatggcggcagaagaagaccttctggcaccagccacaatgccctgaagatcctgggcaacccagccagcgctggccgggtggaccacatgggccgccgcttcccccggggcagcgctggcccccagaggagcaggcctgtgacagtgcccagcattgatgattatggccgggaccggctgagcccagacttctatgaggagagcgagacagatcctggagctgaggagctgcctgcccgcatctttgtggccctgtttgattatgaccccctgaccatgagccccaacccagatgctgctgaggaggagctgcccttcaaggagggccagatcatcaaggtgtatggagacaaggatgctgatggcttctacagaggagagacctgtgcccggctgggcctcatcccctgcaacatggtgtctgagatccaggctgatgatgaggagatgatggaccagctgctgcggcagggcttcctgcccctgaacacccctgtggagaagattgaaagaagccgccgcagcggccgccgccacagcgtgtccaccaggaggatggtggccctgtatgactatgacccccgggagagcagccccaacgtggatgtggaggccgagctgaccttctgcaccggggacatcatcaccgtgtttggagaaattgatgaagatggcttctactatggagagctgaatggccagaagggcctggtgcccagcaacttcctggaggaggtgcctgatgatgtggaggtgtacctgagtgatgcccccagccactacagccaggacacccccatgaggagcaaggccaagaggaagaagtctgtgcacttcaccccctag

SEQ ID NO: 168390 - DNA, 1938 bp, synthetic construct
  misc_feature 1..1938: note = Description of Artificial Sequence: Synthetic coding sequence
  source 1..1938: mol_type = other DNA
atgaatggcctggccaccagcctgggcaagggccaggagagcgccatcggcggcagcagcgccatcggggagtacatccggcccctgccccagcccggggacaggcctgagcccctgagcgccaagcccaccttcctgagccgcagcggcagcgcccgctgccgctctgagagtgacatggagaatgaaagaaacagcaacaccagcaagcagcgctacagcggcaaggtgcacctgtgtgtggcccgctacagctacaacccctttgatggccccaatgaaaatcctgaggccgagctgcccctgacagctgggaagtacctgtatgtgtatggagacatggatgaagatggcttctatgaaggagagctgctggatggccagaggggcctggtgcccagcaactttgtggactttgtgcaggacaatgaaagccggctggccagcaccctgggcaatgagcaggaccagaacttcatcaaccacagcggcatcggcctggagggggagcacatcctggacctgcacagccccacccacattgatgctggcatcacagacaacagcgctggcaccctggatgtgaacattgatgacatcggggaggacatcgtgccctaccccaggaagatcaccctcatcaagcagctggccaagagcgtcatcgtgggctgggagcccccagctgtgcccccaggctggggcaccgtgtcctcctacaacgtgctggtggacaaggagaccaggatgaacctgaccctgggcagcaggaccaaggccctgattgagaagctgaacatggccgcctgcacctaccgcatctctgtgcagtgtgtgaccagccggggcagcagtgatgagctgcagtgcaccctgctggtgggcaaggatgtggtggtggcccccagccacctgcgggtggacaacatcacccagatcagcgcccagctgtcctggctgcccaccaacagcaactacagccacgtgatcttcctgaatgaggaggagtttgatattgtgaaggccgcccgctacaagtaccagttcttcaacctgcggcccaacatggcctacaaggtgaaggtgctggccaagccccaccagatgccctggcagctgcccctggagcagcgggagaagaaggaggcctttgtggagttcagcaccctgcctgctggccccccagccccaccccaggatgtgacagtgcaggccggcgtgaccccagccaccatccgggtgtcctggaggcctcctgtgctgacccccaccggcctgagcaatggagccaacgtgacaggctatggagtgtatgccaagggccagagggtggccgaggtgatcttccccacagctgacagcacagctgtggagctggtgcggctgcggagcctggaggccaagggcgtgacagtgaggaccctgagcgcccagggcgagagcgtggacagcgctgtggccgctgtgcccccagagctgctggtgccccccaccccccaccccaggcctgccccccagagcaagcccctggccagcagtggagtgcctgagaccaaggatgagcacctgggcccccacgccaggatggatgaggcctgggagcagagccgggcccctggccctgtgcacggccacatgctggagccccctgtgggccctggaagaagaagccccagccccagccgcatcctgccccagccccagggcacccctgtgtccaccaccgtggccaaggccatggcccgggaggccgcccagagggtggccgagagcagccggctggagaagaggagcgtcttcctggagaggagcagcgctggccagtatgctgccagtgatgaagaagatgcctatgacagcccagacttcaagagaagaggagcctctgtggatgacttcctgaagggcagcgagctgggcaagcagatggccagctag

SEQ ID NO: 168391 - DNA, 1938 bp, synthetic construct
  misc_feature 1..1938: note = Description of Artificial Sequence: Synthetic coding sequence
  source 1..1938: mol_type = other DNA
atgaatggcctggccaccagcctgggcaagggccaggagagcgccatcggcggcagcagcgccatcggggagtacatccggcccctgccccagcccggggacaggcctgagcccctgagcgccaagcccaccttcctgagccgcagcggcagcgcccgctgccgctctgagagtgacatggagaatgaaagaaacagcaacaccagcaagcagcgctacagcggcaaggtgcacctgtgtgtggcccgctacagctacaacccctttgatggccccaatgaaaatcctgaggccgagctgcccctgacagctgggaagtacctgtatgtgtatggagacatggatgaagatggcttctatgaaggagagctgctggatggccagaggggcctggtgcccagcaactttgtggactttgtgcaggacaatgaaagccggctggccagcaccctgggcaatgagcaggaccagaacttcatcaaccacagcggcatcggcctggagggggagcacatcctggacctgcacagccccacccacattgatgctggcatcacagacaacagcgctggcaccctggatgtgaacattgatgacatcggggaggacatcgtgccctaccccaggaagatcaccctcatcaagcagctggccaagagcgtcatcgtgggctgggagcccccagctgtgcccccaggctggggcaccgtgtcctcctacaacgtgctggtggacaaggagaccaggatgaacctgaccctgggcagcaggaccaaggccctgattgagaagctgaacatggccgcctgcacctaccgcatctctgtgcagtgtgtgaccagccggggcagcagtgatgagctgcagtgcaccctgctggtgggcaaggatgtggtggtggcccccagccacctgcgggtggacaacatcacccagatcagcgcccagctgtcctggctgcccaccaacagcaactacagccacgtgatcttcctgaatgaggaggagtttgatattgtgaaggccgcccgctacaagtaccagttcttcaacctgcggcccaacatggcctacaaggtgaaggtgctggccaagccccaccagatgccctggcagctgcccctggagcagcgggagaagaaggaggcctttgtggagttcagcaccctgcctgctggccccccagccccaccccaggatgtgacagtgcaggccggcgtgaccccagccaccatccgggtgtcctggaggcctcctgtgctgacccccaccggcctgagcaatggagccaacgtgacaggctatggagtgtatgccaagggccagagggtggccgaggtgatcttccccacagctgacagcacagctgtggagctggtgcggctgcggagcctggaggccaagggcgtgacagtgaggaccctgagcgcccagggcgagagcgtggacagcgctgtggccgctgtgcccccagagctgctggtgccccccaccccccaccccaggcctgccccccagagcaagcccctggccagcagtggagtgcctgagaccaaggatgagcacctgggcccccacgccaggatggatgaggcctgggagcagagccgggcccctggccctgtgcacggccacatgctggagccccctgtgggccctggaagaagaagccccagccccagccgcatcctgccccagccccagggcacccctgtgtccaccaccgtggccaaggccatggcccgggaggccgcccagagggtggccgagagcagccggctggagaagaggagcgtcttcctggagaggagcagcgctggccagtatgctgccagtgatgaagaagatgcctatgacagcccagacttcaagagaagaggagcctctgtggatgacttcctgaagggcagcgagctgggcaagcagatggtgtcctag

SEQ ID NO: 168392 - DNA, 4638 bp, synthetic construct
  misc_feature 1..4638: note = Description of Artificial Sequence: Synthetic coding sequence
  source 1..4638: mol_type = other DNA
atgcagcgggagcgggaggccgagatccggcagctgctgcgctggaaggaggccgagcagaggcagctgcagcagctgctgcaccgggagagagatggagtggtgcggcaggcccgggagctgcagaggcagctggccgaggagctggtgaacagaggccactgcagcaggcctggggccagcgaggtgtctgctgcccagtgccgctgccgcctgcaggaggtgctggcccagctgcgctggcagacagatggagagcaggccgcccgcatccgctacctgcaggccgccctggaggtggagcggcagctgttcctgaagtacatcctggcccacttccggggccacccagccctgagcggcagcccagacccccaggccgtgcacagcctggaggagcccctgccccagaccagcagcggcagctgccacgcccccaagccagcctgccagctgggcagcctggacagcctgtctgctgaggtgggcgtgcgcagccgcagcctgggcctggtgagcagcgcctgcagcagcagcccagatggcctgctgagcacccacgccagcagcctggactgctttgccccagcctgcagccgcagcctggacagcaccaggagcctgcccaaggccagcaagtctgaggagcggcccagcagcccagacaccagcaccccaggcagccggcggctgagccccccacccagccccctgcccccacctcctcctccttctgcccacaggaagctgagcaacccccggggcggggagggcagcgagagccagccctgtgaggtgctgacccccagccccccaggcctgggccaccacgagctgatcaagctgaactggctgctggccaaggccctgtgggtgctggcccggcgctgctacaccctgcaggccgagaacaagcagctgcggcgggccggctgcccctaccaggctgatgagaaggtgaagaggctgaaggtgaagagagctgagctgaccggcctggcccggcggctggccgaccgggccaggaagctgcaggagaccaacctgcgggctgtgtctgcccccatccctggagagagctgtgccggcctggagctgtgccaggtgtttgcccggcagagggcccgggacctgtctgagcaggccagcgcccccctggccaaggacaagcagatcgaggagctgcggcaggagtgccacctgctgcaggcccgggtggccagcggcccctgcagcgacctgcacacaggccggggcggcccctgcacccagtggctgaatgtgcgggacctggaccggctgcagcgggagagccagcgggaggtgctgcggctgcagaggcagctgatgctgcagcagggcaatggaggagcctggccagaggccggcggccagagcgccacctgtgaggaggtgcggcggcagatgctggccctggagcgggagctggaccagaggagaagagagtgccaggagctgggcgcccaggccgccccagcccggcggcggggggaggaggccgagacccagctgcaggccgccctgctgaagaatgcctggctggccgaggagaatggccgcctgcaggccaagacagactgggtgaggaaggtggaggctgaaaattctgaggtgcggggccacctgggccgggcctgccaggagagagatgccagcggcctgattgctgagcagctgctgcagcaggccgcccggggccaggaccggcagcagcagctgcagagggacccccagaaggccctgtgtgacctgcaccccagctggaaggagatccaggccctgcagtgcaggcctggccaccccccagagcagccctgggagaccagccagatgcctgagagccaggtgaagggcagcagaagacccaagttccacgcccggcctgaggactatgctgtgtcccagcccaacagagacatccaggagaagcgggaggccagcctggaggagagccctgtggccctgggggagagcgcctctgtgccccaggtgtctgagaccgtgcctgccagccagcccctgagcaagaagaccagcagccagagcaacagcagcagcgagggctccatgtgggccaccgtgcccagcagccccaccctggaccgggacacagccagcgaggtggatgacctggagccagacagcgtgtccctggccctggagatgggcggcagcgctgccccagctgcccccaagctgaagatcttcatggcccagtacaactacaacccctttgagggccccaatgaccaccctgagggggagctgcccctgacagctggggactacatctacatctttggagacatggatgaagatggcttctatgaaggagagctggaggatggaagaagaggcctggtgcccagcaactttgtggagcagatcccagacagctacatccctggctgcctgcctgccaagagcccagacctgggccccagccagctgcctgctggccaggatgaggccctggaggaggacagcctgctgagcggcaaggcccagggcgtggtggaccggggcctgtgccagatggtgcgggtgggcagcaagacagaggtggccacagagatcctggacaccaagacagaggcctgccagctgggcctgctgcagagcatgggcaagcagggcctgagccggcccctgctgggcaccaagggcgtgctgaggatggcccccatgcagctgcacctgcagaatgtgacagccaccagcgccaacatcacctgggtgtacagcagccaccgccacccccacgtggtgtacctggatgaccgggagcacgccctgaccccagctggggtgtcctgctacaccttccagggcctgtgccccggcacccactaccgggcccgggtggaggtgcggctgccccgggacctgctgcaggtgtactggggcaccatgagcagcacagtgacctttgacaccctgctggccggccccccctacccacccctggatgtgctggtggagagacatgccagccctggggtgctggtggtgtcctggctgcctgtgaccatcgacagcgctggcagcagcaatggagtgcaggtgacaggctatgctgtgtatgcagatggcctgaaggtgtgtgaggtggctgatgccacagctggcagcaccctgctggagttcagccagctgcaggtgcccctgacctggcagaaggtgtctgtgaggaccatgagcctgtgtggggagagcctggacagcgtgcctgcccagatccctgaggacttcttcatgtgccaccgctggccagagaccccacccttctcctacacctgtggggaccccagcacctacagagtgaccttccctgtgtgcccccagaagctgagcctggccccacccagcgccaaggccagcccccacaaccctggcagctgtggggagccccaggccaagttcctggaggccttctttgaggagcccccccggcggcagagccctgtgagcaacctgggctctgaaggagaatgtcccagcagtggagctggcagccaggcccaggagctggccgaggcctgggagggctgcaggaaggacctgctcttccagaagagcccccagaaccaccggccccccagcgtgtctgaccagcctggagagaaggagaactgcagccagcacatgggcaccagcaagagccctgcccctggcttcatccacctgaggacagaatgtggccccaggaaggagccctgccaggagaaggccgccctggagcgggtgctgcggcagaagcaggatgcccagggcttcaccccaccccagctgggcgccagccagcagtatgccagtgacttccacaacgtgctgaaggaggagcaggaggccctgtgcctggacctgtggggcacagaaagaagagaggagcggcgggagcctgagccccacagccggcagggccaggccctgggcgtgaagaggggctgccagctgcacgagcccagcagcgccctgtgcccagcccccagcgccaaggtgatcaagatgccccggggcggcccccagcagctgggcaccggggccaacaccccagcccgggtgtttgtggccctgagtgactacaaccccctggtgatgtctgccaacctgaaggctgctgaggaggagctggtgttccagaagaggcagctgctgcgggtgtggggcagccaggacacccatgacttctacctgtctgagtgcaaccggcaggtgggcaacatccctggccgcctggtggccgagatggaggtgggcacagagcagacagaccggcgctggaggagccctgcccagggcaacctgcccagcgtggcccacctggaggacttccagggcctgaccatcccccagggcagcagcctggtgctgcagggcaacagcaagaggctgcccctgtggacccccaagatcatgattgctgccctggactatgaccctggagatggccagatgggcggccagggcaagggccgcctggccctgcgggctggagatgtggtgatggtgtatggccccatggatgaccagggcttctactacggggagctgggcggccaccggggcctggtgcctgcccacctgctggaccacatgagcctgcacggccactag

SEQ ID NO: 168393 - DNA, 4920 bp, synthetic construct
  misc_feature 1..4920: note = Description of Artificial Sequence: Synthetic coding sequence
  source 1..4920: mol_type = other DNA
atggccaaggacagccccagccccctgggcgccagccccaagaagccaggctgcagcagccctgctgctgctgtgctggagaaccagaggcgggagctggagaagctgcgggcagagctggaggccgagagagctggctggagggctgagaggagaagatttgctgcccgggagcggcagctgcgggaggaggccgagcgggagcggcggcagctggccgaccggctgcggagcaagtgggaggcccagaggagccgggagctgcggcagctgcaggaggagatgcagcgggagcgggaggccgagatccggcagctgctgcgctggaaggaggccgagcagaggcagctgcagcagctgctgcaccgggagagagatggagtggtgcggcaggcccgggagctgcagaggcagctggccgaggagctggtgaacagaggccactgcagcaggcctggggccagcgaggtgtctgctgcccagtgccgctgccgcctgcaggaggtgctggcccagctgcgctggcagacagatggagagcaggccgcccgcatccgctacctgcaggccgccctggaggtggagcggcagctgttcctgaagtacatcctggcccacttccggggccacccagccctgagcggcagcccagacccccaggccgtgcacagcctggaggagcccctgccccagaccagcagcggcagctgccacgcccccaagccagcctgccagctgggcagcctggacagcctgtctgctgaggtgggcgtgcgcagccgcagcctgggcctggtgagcagcgcctgcagcagcagcccagatggcctgctgagcacccacgccagcagcctggactgctttgccccagcctgcagccgcagcctggacagcaccaggagcctgcccaaggccagcaagtctgaggagcggcccagcagcccagacaccagcaccccaggcagccggcggctgagccccccacccagccccctgcccccacctcctcctccttctgcccacaggaagctgagcaacccccggggcggggagggcagcgagagccagccctgtgaggtgctgacccccagccccccaggcctgggccaccacgagctgatcaagctgaactggctgctggccaaggccctgtgggtgctggcccggcgctgctacaccctgcaggccgagaacaagcagctgcggcgggccggctgcccctaccaggctgatgagaaggtgaagaggctgaaggtgaagagagctgagctgaccggcctggcccggcggctggccgaccgggccaggaagctgcaggagaccaacctgcgggctgtgtctgcccccatccctggagagagctgtgccggcctggagctgtgccaggtgtttgcccggcagagggcccgggacctgtctgagcaggccagcgcccccctggccaaggacaagcagatcgaggagctgcggcaggagtgccacctgctgcaggcccgggtggccagcggcccctgcagcgacctgcacacaggccggggcggcccctgcacccagtggctgaatgtgcgggacctggaccggctgcagcgggagagccagcgggaggtgctgcggctgcagaggcagctgatgctgcagcagggcaatggaggagcctggccagaggccggcggccagagcgccacctgtgaggaggtgcggcggcagatgctggccctggagcgggagctggaccagaggagaagagagtgccaggagctgggcgcccaggccgccccagcccggcggcggggggaggaggccgagacccagctgcaggccgccctgctgaagaatgcctggctggccgaggagaatggccgcctgcaggccaagacagactgggtgaggaaggtggaggctgaaaattctgaggtgcggggccacctgggccgggcctgccaggagagagatgccagcggcctgattgctgagcagctgctgcagcaggccgcccggggccaggaccggcagcagcagctgcagagggacccccagaaggccctgtgtgacctgcaccccagctggaaggagatccaggccctgcagtgcaggcctggccaccccccagagcagccctgggagaccagccagatgcctgagagccaggtgaagggcagcagaagacccaagttccacgcccggcctgaggactatgctgtgtcccagcccaacagagacatccaggagaagcgggaggccagcctggaggagagccctgtggccctgggggagagcgcctctgtgccccaggtgtctgagaccgtgcctgccagccagcccctgagcaagaagaccagcagccagagcaacagcagcagcgagggctccatgtgggccaccgtgcccagcagccccaccctggaccgggacacagccagcgaggtggatgacctggagccagacagcgtgtccctggccctggagatgggcggcagcgctgccccagctgcccccaagctgaagatcttcatggcccagtacaactacaacccctttgagggccccaatgaccaccctgagggggagctgcccctgacagctggggactacatctacatctttggagacatggatgaagatggcttctatgaaggagagctggaggatggaagaagaggcctggtgcccagcaactttgtggagcagatcccagacagctacatccctggctgcctgcctgccaagagcccagacctgggccccagccagctgcctgctggccaggatgaggccctggaggaggacagcctgctgagcggcaaggcccagggcgtggtggaccggggcctgtgccagatggtgcgggtgggcagcaagacagaggtggccacagagatcctggacaccaagacagaggcctgccagctgggcctgctgcagagcatgggcaagcagggcctgagccggcccctgctgggcaccaagggcgtgctgaggatggcccccatgcagctgcacctgcagaatgtgacagccaccagcgccaacatcacctgggtgtacagcagccaccgccacccccacgtggtgtacctggatgaccgggagcacgccctgaccccagctggggtgtcctgctacaccttccagggcctgtgccccggcacccactaccgggcccgggtggaggtgcggctgccccgggacctgctgcaggtgtactggggcaccatgagcagcacagtgacctttgacaccctgctggccggccccccctacccacccctggatgtgctggtggagagacatgccagccctggggtgctggtggtgtcctggctgcctgtgaccatcgacagcgctggcagcagcaatggagtgcaggtgacaggctatgctgtgtatgcagatggcctgaaggtgtgtgaggtggctgatgccacagctggcagcaccctgctggagttcagccagctgcaggtgcccctgacctggcagaaggtgtctgtgaggaccatgagcctgtgtggggagagcctggacagcgtgcctgcccagatccctgaggacttcttcatgtgccaccgctggccagagaccccacccttctcctacacctgtggggaccccagcacctacagagtgaccttccctgtgtgcccccagaagctgagcctggccccacccagcgccaaggccagcccccacaaccctggcagctgtggggagccccaggccaagttcctggaggccttctttgaggagcccccccggcggcagagccctgtgagcaacctgggctctgaaggagaatgtcccagcagtggagctggcagccaggcccaggagctggccgaggcctgggagggctgcaggaaggacctgctcttccagaagagcccccagaaccaccggccccccagcgtgtctgaccagcctggagagaaggagaactgcagccagcacatgggcaccagcaagagccctgcccctggcttcatccacctgaggacagaatgtggccccaggaaggagccctgccaggagaaggccgccctggagcgggtgctgcggcagaagcaggatgcccagggcttcaccccaccccagctgggcgccagccagcagtatgccagtgacttccacaacgtgctgaaggaggagcaggaggccctgtgcctggacctgtggggcacagaaagaagagaggagcggcgggagcctgagccccacagccggcagggccaggccctgggcgtgaagaggggctgccagctgcacgagcccagcagcgccctgtgcccagcccccagcgccaaggtgatcaagatgccccggggcggcccccagcagctgggcaccggggccaacaccccagcccgggtgtttgtggccctgagtgactacaaccccctggtgatgtctgccaacctgaaggctgctgaggaggagctggtgttccagaagaggcagctgctgcgggtgtggggcagccaggacacccatgacttctacctgtctgagtgcaaccggcaggtgggcaacatccctggccgcctggtggccgagatggaggtgggcacagagcagacagaccggcgctggaggagccctgcccagggcaacctgcccagcgtggcccacctggaggacttccagggcctgaccatcccccagggcagcagcctggtgctgcagggcaacagcaagaggctgcccctgtggacccccaagatcatgattgctgccctggactatgaccctggagatggccagatgggcggccagggcaagggccgcctggccctgcgggctggagatgtggtgatggtgtatggccccatggatgaccagggcttctactacggggagctgggcggccaccggggcctggtgcctgcccacctgctggaccacatgagcctgcacggccactag

SEQ ID NO: 168394 - DNA, 4638 bp, synthetic construct
  misc_feature 1..4638: note = Description of Artificial Sequence: Synthetic coding sequence
  source 1..4638: mol_type = other DNA
atgcagcgggagcgggaggccgagatccggcagctgctgcgctggaaggaggccgagcagaggcagctgcagcagctgctgcaccgggagagagatggagtggtgcggcaggcccgggagctgcagaggcagctggccgaggagctggtgaacagaggccactgcagcaggcctggggccagcgaggtgtctgctgcccagtgccgctgccgcctgcaggaggtgctggcccagctgcgctggcagacagatggagagcaggccgcccgcatccgctacctgcaggccgccctggaggtggagcggcagctgttcctgaagtacatcctggcccacttccggggccacccagccctgagcggcagcccagacccccaggccgtgcacagcctggaggagcccctgccccagaccagcagcggcagctgccacgcccccaagccagcctgccagctgggcagcctggacagcctgtctgctgaggtgggcgtgcgcagccgcagcctgggcctggtgagcagcgcctgcagcagcagcccagatggcctgctgagcacccacgccagcagcctggactgctttgccccagcctgcagccgcagcctggacagcaccaggagcctgcccaaggccagcaagtctgaggagcggcccagcagcccagacaccagcaccccaggcagccggcggctgagccccccacccagccccctgcccccacctcctcctccttctgcccacaggaagctgagcaacccccggggcggggagggcagcgagagccagccctgtgaggtgctgacccccagccccccaggcctgggccaccacgagctgatcaagctgaactggctgctggccaaggccctgtgggtgctggcccggcgctgctacaccctgcaggaggagaacaagcagctgcggcgggccggctgcccctaccaggctgatgagaaggtgaagaggctgaaggtgaagagagctgagctgaccggcctggcccggcggctggccgaccgggcccgggagctgcaggagaccaacctgcgggctgtgtctgcccccatccctggagagagctgtgccggcctggagctgtgccaggtgtttgcccggcagagggcccgggacctgtctgagcaggccagcgcccccctggccaaggacaagcagatcgaggagctgcggcaggagtgccacctgctgcaggcccgggtggccagcggcccctgcagcgacctgcacacaggccggggcggcccctgcacccagtggctgaatgtgcgggacctggaccggctgcagcgggagagccagcgggaggtgctgcggctgcagaggcagctgatgctgcagcagggcaatggaggagcctggccagaggccggcggccagagcgccacctgtgaggaggtgcggcggcagatgctggccctggagcgggagctggaccagaggagaagagagtgccaggagctgggcacccaggccgccccagcccggcggcggggggaggaggccgagacccagctgcaggccgccctgctgaagaatgcctggctggccgaggagaatggccgcctgcaggccaagacagactgggtgaggaaggtggaggctgaaaattctgaggtgcggggccacctgggccgggcctgccaggagagagatgccagcggcctgattgctgagcagctgctgcagcaggccgcccggggccaggaccggcagcagcagctgcagagggacccccagaaggccctgtgtgacctgcaccccagctggaaggagatccaggccctgcagtgcaggcctggccaccccccagagcagccctgggagaccagccagatgcctgagagccaggtgaagggcagcagaagacccaagttccacgcccggcctgaggactatgctgtgtcccagcccaacagagacatccaggagaagcgggaggccagcctggaggagagccctgtggccctgggggagagcgcctctgtgccccaggtgtctgagaccgtgcctgccagccagcccctgagcaagaagaccagcagccagagcaacagcagcagcgagggctccatgtgggccaccgtgcccagcagccccaccctggaccgggacacagccagcgaggtggatgacctggagccagacagcgtgtccctggccctggagatgggcggcagcgctgccccagctgcccccaagctgaagatcttcatggcccagtacaactacaacccctttgagggccccaatgaccaccctgagggggagctgcccctgacagctggggactacatctacatctttggagacatggatgaagatggcttctatgaaggagagctggatgatggaagaagaggcctggtgcccagcaactttgtggagcagatcccagacagctacatccctggctgcctgcctgccaagagcccagacctgggccccagccagctgcctgctggccaggatgaggccctggaggaggacagcctgctgagcggcaaggcccagggcatggtggaccggggcctgtgccagatggtgcgggtgggcagcaagacagaggtggccacagagatcctggacaccaagacagaggcctgccagctgggcctgctgcagagcatgggcaagcagggcctgagccggcccctgctgggcaccaagggcgtgctgaggatggcccccatgcagctgcacctgcagaatgtgacagccaccagcgccaacatcacctgggtgtacagcagccaccgccacccccacgtggtgtacctggatgaccgggagcacgccctgaccccagctggggtgtcctgctacaccttccagggcctgtgccccggcacccactacagagtgcgggtggaggtgcggctgccctgggacctgctgcaggtgtactggggcaccatgagcagcacagtgacctttgacaccctgctggccggccccccctacccacccctggaggtgctggtggagagacatgccagccctggggtgctggtggtgtcctggctgcctgtgaccatcgacagcgctggcagcagcaatggagtgcaggtgacaggctatgctgtgtatgcagatggcctgaaggtgtgtgaggtggctgatgccacagctggcagcacagtgctggagttcagccagctgcaggtgcccctgacctggcagaaggtgtctgtgaggaccatgagcctgtgtggggagagcctggacagcgtgcctgcccagatccctgaggacttcttcatgtgccaccgctggccagagaccccacccttctcctacacctgtggggaccccagcacctacagagtgaccttccctgtgtgcccccagaagctgagcctggccccacccagcgccaaggccagcccccacaaccctggcagctgtggggagccccaggccaagttcctggaggccttctttgaggagcccccccggcggcagagccctgtgagcaacctgggctctgaaggagaatgtcccagcagtggagctggcagccaggcccaggagctggccgaggcctgggagggctgcaggaaggacctgctcttccagaagagcccccagaaccaccggccccccagcgtgtctgaccagcctggagagaaggagaactgctaccagcacatgggcaccagcaagagccctgcccctggcttcatccacctgaggacagaatgtggccccaggaaggagccctgccaggagaaggccgccctggagcgggtgctgcggcagaagcaggatgcccagggcttcaccccaccccagctgggcgccagccagcagtatgccagtgacttccacaacgtgctgaaggaggagcaggaggccctgtgcctggacctgcggggcacagaaagaagagaggagcggcgggagcctgagccccacagccggcagggccaggccctgggcgtgaagaggggctgccagctgcacgagcccagcagcgccctgtgcccagcccccagcgccaaggtgatcaagatgccccggggcggcccccagcagctgggcaccggggccaacaccccagcccgggtgtttgtggccctgagtgactacaaccccctggtgatgtctgccaacctgaaggctgctgaggaggagctggtgttccagaagaggcagctgctgcgggtgtggggcagccaggacacccatgacttctacctgtctgagtgcaaccggcaggtgggcaacatccctggccgcctggtggccgagatggaggtgggcacagagcagacagaccggcgctggaggagccctgcccagggccacctgcccagcgtggcccacctggaggacttccagggcctgaccatcccccagggcagcagcctggtgctgcagggcaacagcaagaggctgcccctgtggacccccaagatcatgattgctgccctggactatgaccctggagatggccagatgggcggccagggcaagggccgcctggccctgcgggctggagatgtggtgatggtgtatggccccatggatgaccagggcttctactacggggagctgggcggccaccggggcctggtgcctgcccacctgctggaccacatgagcctgcacggccactag

SEQ ID NO: 168395 - DNA, 4920 bp, synthetic construct
  misc_feature 1..4920: note = Description of Artificial Sequence: Synthetic coding sequence
  source 1..4920: mol_type = other DNA
atggccaaggacagccccagccccctgggcgccagccccaagaagccaggctgcagcagccctgctgctgctgtgctggagaaccagaggcgggagctggagaagctgcgggcagagctggaggccgagagagctggctggagggctgagaggagaagatttgctgcccgggagcggcagctgcgggaggaggccgagcgggagcggcggcagctggccgaccggctgcggagcaagtgggaggcccagaggagccgggagctgcggcagctgcaggaggagatgcagcgggagcgggaggccgagatccggcagctgctgcgctggaaggaggccgagcagaggcagctgcagcagctgctgcaccgggagagagatggagtggtgcggcaggcccgggagctgcagaggcagctggccgaggagctggtgaacagaggccactgcagcaggcctggggccagcgaggtgtctgctgcccagtgccgctgccgcctgcaggaggtgctggcccagctgcgctggcagacagatggagagcaggccgcccgcatccgctacctgcaggccgccctggaggtggagcggcagctgttcctgaagtacatcctggcccacttccggggccacccagccctgagcggcagcccagacccccaggccgtgcacagcctggaggagcccctgccccagaccagcagcggcagctgccacgcccccaagccagcctgccagctgggcagcctggacagcctgtctgctgaggtgggcgtgcgcagccgcagcctgggcctggtgagcagcgcctgcagcagcagcccagatggcctgctgagcacccacgccagcagcctggactgctttgccccagcctgcagccgcagcctggacagcaccaggagcctgcccaaggccagcaagtctgaggagcggcccagcagcccagacaccagcaccccaggcagccggcggctgagccccccacccagccccctgcccccacctcctcctccttctgcccacaggaagctgagcaacccccggggcggggagggcagcgagagccagccctgtgaggtgctgacccccagccccccaggcctgggccaccacgagctgatcaagctgaactggctgctggccaaggccctgtgggtgctggcccggcgctgctacaccctgcaggaggagaacaagcagctgcggcgggccggctgcccctaccaggctgatgagaaggtgaagaggctgaaggtgaagagagctgagctgaccggcctggcccggcggctggccgaccgggcccgggagctgcaggagaccaacctgcgggctgtgtctgcccccatccctggagagagctgtgccggcctggagctgtgccaggtgtttgcccggcagagggcccgggacctgtctgagcaggccagcgcccccctggccaaggacaagcagatcgaggagctgcggcaggagtgccacctgctgcaggcccgggtggccagcggcccctgcagcgacctgcacacaggccggggcggcccctgcacccagtggctgaatgtgcgggacctggaccggctgcagcgggagagccagcgggaggtgctgcggctgcagaggcagctgatgctgcagcagggcaatggaggagcctggccagaggccggcggccagagcgccacctgtgaggaggtgcggcggcagatgctggccctggagcgggagctggaccagaggagaagagagtgccaggagctgggcacccaggccgccccagcccggcggcggggggaggaggccgagacccagctgcaggccgccctgctgaagaatgcctggctggccgaggagaatggccgcctgcaggccaagacagactgggtgaggaaggtggaggctgaaaattctgaggtgcggggccacctgggccgggcctgccaggagagagatgccagcggcctgattgctgagcagctgctgcagcaggccgcccggggccaggaccggcagcagcagctgcagagggacccccagaaggccctgtgtgacctgcaccccagctggaaggagatccaggccctgcagtgcaggcctggccaccccccagagcagccctgggagaccagccagatgcctgagagccaggtgaagggcagcagaagacccaagttccacgcccggcctgaggactatgctgtgtcccagcccaacagagacatccaggagaagcgggaggccagcctggaggagagccctgtggccctgggggagagcgcctctgtgccccaggtgtctgagaccgtgcctgccagccagcccctgagcaagaagaccagcagccagagcaacagcagcagcgagggctccatgtgggccaccgtgcccagcagccccaccctggaccgggacacagccagcgaggtggatgacctggagccagacagcgtgtccctggccctggagatgggcggcagcgctgccccagctgcccccaagctgaagatcttcatggcccagtacaactacaacccctttgagggccccaatgaccaccctgagggggagctgcccctgacagctggggactacatctacatctttggagacatggatgaagatggcttctatgaaggagagctggatgatggaagaagaggcctggtgcccagcaactttgtggagcagatcccagacagctacatccctggctgcctgcctgccaagagcccagacctgggccccagccagctgcctgctggccaggatgaggccctggaggaggacagcctgctgagcggcaaggcccagggcatggtggaccggggcctgtgccagatggtgcgggtgggcagcaagacagaggtggccacagagatcctggacaccaagacagaggcctgccagctgggcctgctgcagagcatgggcaagcagggcctgagccggcccctgctgggcaccaagggcgtgctgaggatggcccccatgcagctgcacctgcagaatgtgacagccaccagcgccaacatcacctgggtgtacagcagccaccgccacccccacgtggtgtacctggatgaccgggagcacgccctgaccccagctggggtgtcctgctacaccttccagggcctgtgccccggcacccactacagagtgcgggtggaggtgcggctgccctgggacctgctgcaggtgtactggggcaccatgagcagcacagtgacctttgacaccctgctggccggccccccctacccacccctggaggtgctggtggagagacatgccagccctggggtgctggtggtgtcctggctgcctgtgaccatcgacagcgctggcagcagcaatggagtgcaggtgacaggctatgctgtgtatgcagatggcctgaaggtgtgtgaggtggctgatgccacagctggcagcacagtgctggagttcagccagctgcaggtgcccctgacctggcagaaggtgtctgtgaggaccatgagcctgtgtggggagagcctggacagcgtgcctgcccagatccctgaggacttcttcatgtgccaccgctggccagagaccccacccttctcctacacctgtggggaccccagcacctacagagtgaccttccctgtgtgcccccagaagctgagcctggccccacccagcgccaaggccagcccccacaaccctggcagctgtggggagccccaggccaagttcctggaggccttctttgaggagcccccccggcggcagagccctgtgagcaacctgggctctgaaggagaatgtcccagcagtggagctggcagccaggcccaggagctggccgaggcctgggagggctgcaggaaggacctgctcttccagaagagcccccagaaccaccggccccccagcgtgtctgaccagcctggagagaaggagaactgctaccagcacatgggcaccagcaagagccctgcccctggcttcatccacctgaggacagaatgtggccccaggaaggagccctgccaggagaaggccgccctggagcgggtgctgcggcagaagcaggatgcccagggcttcaccccaccccagctgggcgccagccagcagtatgccagtgacttccacaacgtgctgaaggaggagcaggaggccctgtgcctggacctgcggggcacagaaagaagagaggagcggcgggagcctgagccccacagccggcagggccaggccctgggcgtgaagaggggctgccagctgcacgagcccagcagcgccctgtgcccagcccccagcgccaaggtgatcaagatgccccggggcggcccccagcagctgggcaccggggccaacaccccagcccgggtgtttgtggccctgagtgactacaaccccctggtgatgtctgccaacctgaaggctgctgaggaggagctggtgttccagaagaggcagctgctgcgggtgtggggcagccaggacacccatgacttctacctgtctgagtgcaaccggcaggtgggcaacatccctggccgcctggtggccgagatggaggtgggcacagagcagacagaccggcgctggaggagccctgcccagggccacctgcccagcgtggcccacctggaggacttccagggcctgaccatcccccagggcagcagcctggtgctgcagggcaacagcaagaggctgcccctgtggacccccaagatcatgattgctgccctggactatgaccctggagatggccagatgggcggccagggcaagggccgcctggccctgcgggctggagatgtggtgatggtgtatggccccatggatgaccagggcttctactacggggagctgggcggccaccggggcctggtgcctgcccacctgctggaccacatgagcctgcacggccactag

SEQ ID NO: 168396 - DNA, 4638 bp, synthetic construct
  misc_feature 1..4638: note = Description of Artificial Sequence: Synthetic coding sequence
  source 1..4638: mol_type = other DNA
atgcagcgggagcgggaggccgagatccggcagctgctgcgctggaaggaggccgagcagaggcagctgcagcagctgctgcaccgggagagagatggagtggtgcggcaggcccgggagctgcagaggcagctggccgaggagctggtgaacagaggccactgcagcaggcctggggccagcgaggtgtctgctgcccagtgccgctgccgcctgcaggaggtgctggcccagctgcgctggcagacagatggagagcaggccgcccgcatccgctacctgcaggccgccctggaggtggagcggcagctgttcctgaagtacatcctggcccacttccggggccacccagccctgagcggcagcccagacccccaggccgtgcacagcctggaggagcccctgccccagaccagcagcggcagctgccacgcccccaagccagcctgccagctgggcagcctggacagcctgtctgctgaggtgggcgtgcgcagccgcagcctgggcctggtgagcagcgcctgcagcagcagcccagatggcctgctgagcacccacgccagcagcctggactgctttgccccagcctgcagccgcagcctggacagcaccaggagcctgcccaaggccagcaagtctgaggagcggcccagcagcccagacaccagcaccccaggcagccggcggctgagccccccacccagccccctgcccccacctcctcctccttctgcccacaggaagctgagcaacccccggggcggggagggcagcgagagccagccctgtgaggtgctgacccccagccccccaggcctgggccaccacgagctgatcaagctgaactggctgctggccaaggccctgtgggtgctggcccggcgctgctacaccctgcaggaggagaacaagcagctgcggcgggccggctgcccctaccaggctgatgagaaggtgaagaggctgaaggtgaagagagctgagctgaccggcctggcccggcggctggccgaccgggcccgggagctgcaggagaccaacctgcgggctgtgtctgcccccatccctggagagagctgtgccggcctggagctgtgccaggtgtttgcccggcagagggcccgggacctgtctgagcaggccagcgcccccctggccaaggacaagcagatcgaggagctgcggcaggagtgccacctgctgcaggcccgggtggccagcggcccctgcagcgacctgcacacaggccggggcggcccctgcacccagtggctgaatgtgcgggacctggaccggctgcagcgggagagccagcgggaggtgctgcggctgcagaggcagctgatgctgcagcagggcaatggaggagcctggccagaggccggcggccagagcgccacctgtgaggaggtgcggcggcagatgctggccctggagcgggagctggaccagaggagaagagagtgccaggagctgggcacccaggccgccccagcccggcggcggggggaggaggccgagacccagctgcaggccgccctgctgaagaatgcctggctggccgaggagaatggccgcctgcaggccaagacagactgggtgaggaaggtggaggctgaaaattctgaggtgcggggccacctgggccgggcctgccaggagagagatgccagcggcctgattgctgagcagctgctgcagcaggccgcccggggccaggaccggcagcagcagctgcagagggacccccagaaggccctgtgtgacctgcaccccagctggaaggagatccaggccctgcagtgcaggcctggccaccccccagagcagccctgggagaccagccagatgcctgagagccaggtgaagggcagcagaagacccaagttccacgcccggcctgaggactatgctgtgtcccagcccaacagagacatccaggagaagcgggaggccagcctggaggagagccctgtggccctgggggagagcgcctctgtgccccaggtgtctgagaccgtgcctgccagccagcccctgagcaagaagaccagcagccagagcaacagcagcagcgagggctccatgtgggccaccgtgcccagcagccccaccctggaccgggacacagccagcgaggtggatgacctggagccagacagcgtgtccctggccctggagatgggcggcagcgctgccccagctgcccccaagctgaagatcttcatggcccagtacaactacaacccctttgagggccccaatgaccaccctgagggggagctgcccctgacagctggggactacatctacatctttggagacatggatgaagatggcttctatgaaggagagctggatgatggaagaagaggcctggtgcccagcaactttgtggagcagatcccagacagctacatccctggctgcctgcctgccaagagcccagacctgggccccagccagctgcctgctggccaggatgaggccctggaggaggacagcctgctgagcggcaaggcccagggcatggtggaccggggcctgtgccagatggtgcgggtgggcagcaagacagaggtggccacagagatcctggacaccaagacagaggcctgccagctgggcctgctgcagagcatgggcaagcagggcctgagccggcccctgctgggcaccaagggcgtgctgaggatggcccccatgcagctgcacctgcagaatgtgacagccaccagcgccaacatcacctgggtgtacagcagccaccgccacccccacgtggtgtacctggatgaccgggagcacgccctgaccccagctggggtgtcctgctacaccttccagggcctgtgccccggcacccactacagagtgcgggtggaggtgcggctgccctgggacctgctgcaggtgtactggggcaccatgagcagcacagtgacctttgacaccctgctggccggccccccctacccacccctggatgtgctggtggagagacatgccagccctggggtgctggtggtgtcctggctgcctgtgaccatcgacagcgctggcagcagcaatggagtgcaggtgacaggctatgctgtgtatgcagatggcctgaaggtgtgtgaggtggctgatgccacagctggcagcacagtgctggagttcagccagctgcaggtgcccctgacctggcagaaggtgtctgtgaggaccatgagcctgtgtggggagagcctggacagcgtgcctgcccagatccctgaggacttcttcatgtgccaccgctggccagagaccccacccttctcctacacctgtggggaccccagcacctacagagtgaccttccctgtgtgcccccagaagctgagcctggccccacccagcgccaaggccagcccccacaaccctggcagctgtggggagccccaggccaagttcctggaggccttctttgaggagcccccccggcggcagagccctgtgagcaacctgggctctgaaggagaatgtcccagcagtggagctggcagccaggcccaggagctggccgaggcctgggagggctgcaggaaggacctgctcttccagaagagcccccagaaccaccggccccccagcgtgtctgaccagcctggagagaaggagaactgctaccagcacatgggcaccagcaagagccctgcccctggcttcatccacctgaggacagaatgtggccccaggaaggagccctgccaggagaaggccgccctggagcgggtgctgcggcagaagcaggatgcccagggcttcaccccaccccagctgggcgccagccagcagtatgccagtgacttccacaacgtgctgaaggaggagcaggaggccctgtgcctggacctgcggggcacagaaagaagagaggagcggcgggagcctgagccccacagccggcagggccaggccctgggcgtgaagaggggctgccagctgcacgagcccagcagcgccctgtgcccagcccccagcgccaaggtgatcaagatgccccggggcggcccccagcagctgggcaccggggccaacaccccagcccgggtgtttgtggccctgagtgactacaaccccctggtgatgtctgccaacctgaaggctgctgaggaggagctggtgttccagaagaggcagctgctgcgggtgtggggcagccaggacacccatgacttctacctgtctgagtgcaaccggcaggtgggcaacatccctggccgcctggtggccgagatggaggtgggcacagagcagacagaccggcgctggaggagccctgcccagggccacctgcccagcgtggcccacctggaggacttccagggcctcatcatcccccagggcagcagcctggtgctgcagggcaacagcaagaggctgcccctgtggacccccaagatcatgattgctgccctggactatgaccctggagatggccagatgggcggccagggcaagggccgcctggccctgcgggctggagatgtggtgatggtgtatggccccatggatgaccagggcttctactacggggagctgggcggccaccggggcctggtgcctgcccacctgctggaccacatgagcctgcacggccactag

SEQ ID NO: 168397 - DNA, 4920 bp, synthetic construct
  misc_feature 1..4920: note = Description of Artificial Sequence: Synthetic coding sequence
  source 1..4920: mol_type = other DNA
atggccaaggacagccccagccccctgggcgccagccccaagaagccaggctgcagcagccctgctgctgctgtgctggagaaccagaggcgggagctggagaagctgcgggcagagctggaggccgagagagctggctggagggctgagaggagaagatttgctgcccgggagcggcagctgcgggaggaggccgagcgggagcggcggcagctggccgaccggctgcggagcaagtgggaggcccagaggagccgggagctgcggcagctgcaggaggagatgcagcgggagcgggaggccgagatccggcagctgctgcgctggaaggaggccgagcagaggcagctgcagcagctgctgcaccgggagagagatggagtggtgcggcaggcccgggagctgcagaggcagctggccgaggagctggtgaacagaggccactgcagcaggcctggggccagcgaggtgtctgctgcccagtgccgctgccgcctgcaggaggtgctggcccagctgcgctggcagacagatggagagcaggccgcccgcatccgctacctgcaggccgccctggaggtggagcggcagctgttcctgaagtacatcctggcccacttccggggccacccagccctgagcggcagcccagacccccaggccgtgcacagcctggaggagcccctgccccagaccagcagcggcagctgccacgcccccaagccagcctgccagctgggcagcctggacagcctgtctgctgaggtgggcgtgcgcagccgcagcctgggcctggtgagcagcgcctgcagcagcagcccagatggcctgctgagcacccacgccagcagcctggactgctttgccccagcctgcagccgcagcctggacagcaccaggagcctgcccaaggccagcaagtctgaggagcggcccagcagcccagacaccagcaccccaggcagccggcggctgagccccccacccagccccctgcccccacctcctcctccttctgcccacaggaagctgagcaacccccggggcggggagggcagcgagagccagccctgtgaggtgctgacccccagccccccaggcctgggccaccacgagctgatcaagctgaactggctgctggccaaggccctgtgggtgctggcccggcgctgctacaccctgcaggaggagaacaagcagctgcggcgggccggctgcccctaccaggctgatgagaaggtgaagaggctgaaggtgaagagagctgagctgaccggcctggcccggcggctggccgaccgggcccgggagctgcaggagaccaacctgcgggctgtgtctgcccccatccctggagagagctgtgccggcctggagctgtgccaggtgtttgcccggcagagggcccgggacctgtctgagcaggccagcgcccccctggccaaggacaagcagatcgaggagctgcggcaggagtgccacctgctgcaggcccgggtggccagcggcccctgcagcgacctgcacacaggccggggcggcccctgcacccagtggctgaatgtgcgggacctggaccggctgcagcgggagagccagcgggaggtgctgcggctgcagaggcagctgatgctgcagcagggcaatggaggagcctggccagaggccggcggccagagcgccacctgtgaggaggtgcggcggcagatgctggccctggagcgggagctggaccagaggagaagagagtgccaggagctgggcacccaggccgccccagcccggcggcggggggaggaggccgagacccagctgcaggccgccctgctgaagaatgcctggctggccgaggagaatggccgcctgcaggccaagacagactgggtgaggaaggtggaggctgaaaattctgaggtgcggggccacctgggccgggcctgccaggagagagatgccagcggcctgattgctgagcagctgctgcagcaggccgcccggggccaggaccggcagcagcagctgcagagggacccccagaaggccctgtgtgacctgcaccccagctggaaggagatccaggccctgcagtgcaggcctggccaccccccagagcagccctgggagaccagccagatgcctgagagccaggtgaagggcagcagaagacccaagttccacgcccggcctgaggactatgctgtgtcccagcccaacagagacatccaggagaagcgggaggccagcctggaggagagccctgtggccctgggggagagcgcctctgtgccccaggtgtctgagaccgtgcctgccagccagcccctgagcaagaagaccagcagccagagcaacagcagcagcgagggctccatgtgggccaccgtgcccagcagccccaccctggaccgggacacagccagcgaggtggatgacctggagccagacagcgtgtccctggccctggagatgggcggcagcgctgccccagctgcccccaagctgaagatcttcatggcccagtacaactacaacccctttgagggccccaatgaccaccctgagggggagctgcccctgacagctggggactacatctacatctttggagacatggatgaagatggcttctatgaaggagagctggatgatggaagaagaggcctggtgcccagcaactttgtggagcagatcccagacagctacatccctggctgcctgcctgccaagagcccagacctgggccccagccagctgcctgctggccaggatgaggccctggaggaggacagcctgctgagcggcaaggcccagggcatggtggaccggggcctgtgccagatggtgcgggtgggcagcaagacagaggtggccacagagatcctggacaccaagacagaggcctgccagctgggcctgctgcagagcatgggcaagcagggcctgagccggcccctgctgggcaccaagggcgtgctgaggatggcccccatgcagctgcacctgcagaatgtgacagccaccagcgccaacatcacctgggtgtacagcagccaccgccacccccacgtggtgtacctggatgaccgggagcacgccctgaccccagctggggtgtcctgctacaccttccagggcctgtgccccggcacccactacagagtgcgggtggaggtgcggctgccctgggacctgctgcaggtgtactggggcaccatgagcagcacagtgacctttgacaccctgctggccggccccccctacccacccctggatgtgctggtggagagacatgccagccctggggtgctggtggtgtcctggctgcctgtgaccatcgacagcgctggcagcagcaatggagtgcaggtgacaggctatgctgtgtatgcagatggcctgaaggtgtgtgaggtggctgatgccacagctggcagcacagtgctggagttcagccagctgcaggtgcccctgacctggcagaaggtgtctgtgaggaccatgagcctgtgtggggagagcctggacagcgtgcctgcccagatccctgaggacttcttcatgtgccaccgctggccagagaccccacccttctcctacacctgtggggaccccagcacctacagagtgaccttccctgtgtgcccccagaagctgagcctggccccacccagcgccaaggccagcccccacaaccctggcagctgtggggagccccaggccaagttcctggaggccttctttgaggagcccccccggcggcagagccctgtgagcaacctgggctctgaaggagaatgtcccagcagtggagctggcagccaggcccaggagctggccgaggcctgggagggctgcaggaaggacctgctcttccagaagagcccccagaaccaccggccccccagcgtgtctgaccagcctggagagaaggagaactgctaccagcacatgggcaccagcaagagccctgcccctggcttcatccacctgaggacagaatgtggccccaggaaggagccctgccaggagaaggccgccctggagcgggtgctgcggcagaagcaggatgcccagggcttcaccccaccccagctgggcgccagccagcagtatgccagtgacttccacaacgtgctgaaggaggagcaggaggccctgtgcctggacctgcggggcacagaaagaagagaggagcggcgggagcctgagccccacagccggcagggccaggccctgggcgtgaagaggggctgccagctgcacgagcccagcagcgccctgtgcccagcccccagcgccaaggtgatcaagatgccccggggcggcccccagcagctgggcaccggggccaacaccccagcccgggtgtttgtggccctgagtgactacaaccccctggtgatgtctgccaacctgaaggctgctgaggaggagctggtgttccagaagaggcagctgctgcgggtgtggggcagccaggacacccatgacttctacctgtctgagtgcaaccggcaggtgggcaacatccctggccgcctggtggccgagatggaggtgggcacagagcagacagaccggcgctggaggagccctgcccagggccacctgcccagcgtggcccacctggaggacttccagggcctcatcatcccccagggcagcagcctggtgctgcagggcaacagcaagaggctgcccctgtggacccccaagatcatgattgctgccctggactatgaccctggagatggccagatgggcggccagggcaagggccgcctggccctgcgggctggagatgtggtgatggtgtatggccccatggatgaccagggcttctactacggggagctgggcggccaccggggcctggtgcctgcccacctgctggaccacatgagcctgcacggccactag

SEQ ID NO: 168398 - DNA, 3402 bp, synthetic construct
  misc_feature 1..3402: note = Description of Artificial Sequence: Synthetic coding sequence
  source 1..3402: mol_type = other DNA
atgcctgtgcaggccccccagtggacagacttcctgagctgccccatctgcacccagacctttgatgagaccatcaggaagcccatcagcctgggctgcggccacacagtgtgcaagatgtgcctgaacaagctgcacaggaaggcctgcccctttgaccagaccaccatcaacacagacatcgagctgctgcctgtgaacagcgccctgctgcagctggtgggcgcccaggtgcctgagcagcagcccatcaccctgtgcagcggcgtggaggacaccaagcactatgaggaggccaagaagtgtgtggaggagctggccctgtacctgaagcccctgagcagcgcccggggcgtgggcctgaacagcaccacccagagcgtgctgagccggcccatgcagaggaagctggtgaccctggtgcactgccagctggtggaggaggagggccgcatccgggccatgagagctgcccggagcctgggggagaggacagtgacagagctgatcctgcagcaccagaacccccagcagctgagcagcaacctgtgggccgctgtgcgggcccggggctgccagttcctgggccctgccatgcaggaggaggccctgaagctggtgctgctggccctggaggatggcagcgccctgagcaggaaggtgctggtgctgtttgtggtgcagaggctggagccccgcttcccccaggccagcaagaccagcatcggccacgtggtgcagctgctgtaccgggccagctgcttcaaggtgaccaagagagatgaggacagcagcctgatgcagctgaaggaggagttccgcacctatgaggccctgcggcgggagcatgacagccagatcgtgcagatcgccatggaggccggcctgcgcatcgccccagaccagtggagcagcctgctgtatggagaccagagccacaagagccacatgcagagcatcatcgacaagctgcagaccccagccagctttgcccagagcgtgcaggagctgaccatcgccctgcagaggactggagaccctgccaacctgaaccggctgcggccccacctggagctgctggccaacatcgaccccagcccagatgcccccccacccacctgggagcagctggagaatggcctggtggccgtgaggacagtggtgcacggcctggtggactacatccagaaccacagcaagaagggagctgaccagcagcagcccccccagcacagcaagtacaagacctacatgtgccgggacatgaagcagaggggcggctgccccaggggggccagctgcacctttgcccacagccaggaggagctggagaagttcaggaagatgaacaagaggctggtgccccggcggcccctgagcgccagcctgggccagctgaatgaggtgggcctgcccagcgctgccatcctgcctgatgaaggagctgtggacctgcccagcaggaagcccccagccctgcccaatggaattgtgtccacaggcaacacagtgacccagctgatcccccggggcacagaccccagctatgacagcagcctgaagccaggcaagattgaccacctgagcagcagcgcccctggcagccccccagacctgctggagagcgtgcccaagagcatcagcgccctgcctgtgaacccccacagcatccccccccggggccctgctgacctgccccccatgcctgtgaccaagcccctgcagatggtgccccggggcagccagctgtacccagcccagcagacagatgtgtactaccaggaccccagaggagctgcccccccatttgagcccgccccctaccagcagggcatgtactacaccccaccaccccagtgtgtgtccagatttgtgcggcccccacccagcgcccctgagcccgccccaccctacctggaccactacccaccctacctgcaggagcgggtggtgaacagccagtatggcacccagccccagcagtacccacccatctaccccagccactatgatggaagaagagtgtacccagcccccagctacacccgggaggagatcttccgggagagccccatccccatcgagatccccccagctgctgtgcccagctatgtgcctgagagccgggagcgctaccagcagatcgagagctactaccctgtggccccccaccccacccagatccggcccagctacctgcgggagcccccctacagccggctgcccccaccaccccagccccaccccagcctggatgagctgcacagaagaaggaaggagatcatggcccagctggaggagaggaaggtgatcagccccccaccatttgcccccagccccaccctgccccccaccttccaccctgaggagttcctggatgaggacctgaaggtggccggcaagtacaagggaaatgactacagccagtacagcccctggagctgtgacaccatcggcagctacatcggcaccaaggatgccaagcccaaggatgtggtggccgccggctctgtggagatgatgaatgtggagagcaagggcatgagggaccagaggctggacctgcagaggagagctgctgagaccagtgatgatgacctgatcccctttggagaccggcccaccgtgtccagatttggagccatcagcaggaccagcaagaccatctaccagggcgccggccccatgcaggccatggccccccagggcgcccccaccaagagcatcaacatcagtgactacagcccctacggcacccacggcggctggggcgccagcccctacagcccccaccagaacatccccagccagggccacttcagcgagcgggagcgcatctccatgtctgaggtggccagccacggcaagcccctgcccagcgctgagcgggagcagctgcggctggagctgcagcagctgaaccaccagatcagccagcagacccagctgcggggcctggaggccgtgagcaaccggctggtgctgcagcgggaggccaacaccctggccggccagagccagcccccacctcctcctccacccaagtggccaggcatgatcagcagcgagcagctgagcctggagctgcaccaggtggagcgggagatcggcaagaggacccgggagctgtccatggagaaccagtgcagcctggacatgaagagcaagctgaacaccagcaagcaggccgagaatggccagcctgagccccagaacaaggtgcctgctgaggacctgaccctgaccttcagtgatgtgcccaacggcagcgccctgacccaggagaacatcagcctgctgagcaacaagaccagcagcctgaacctgtctgaagatcctgagggcggcggggacaacaatgacagccagaggtctggagtgacccccagcagcgccccctag

SEQ ID NO: 168399 - DNA, 3378 bp, synthetic construct
  misc_feature 1..3378: note = Description of Artificial Sequence: Synthetic coding sequence
  source 1..3378: mol_type = other DNA
atgcctgtgcaggccccccagtggacagacttcctgagctgccccatctgcacccagacctttgatgagaccatcaggaagcccatcagcctgggctgcggccacacagtgtgcaagatgtgcctgaacaagctgcacaggaaggcctgcccctttgaccagaccaccatcaacacagacatcgagctgctgcctgtgaacagcgccctgctgcagctggtgggcgcccaggtgcctgagcagcagcccatcaccctgtgcagcggcgtggaggacaccaagcactatgaggaggccaagaagtgtgtggaggagctggccctgtacctgaagcccctgagcagcgcccggggcgtgggcctgaacagcaccacccagagcgtgctgagccggcccatgcagaggaagctggtgaccctggtgcactgccagctggtggaggaggagggccgcatccgggccatgagagctgcccggagcctgggggagaggacagtgacagagctgatcctgcagcaccagaacccccagcagctgagcagcaacctgtgggccgctgtgcgggcccggggctgccagttcctgggccctgccatgcaggaggaggccctgaagctggtgctgctggccctggaggatggcagcgccctgagcaggaaggtgctggtgctgtttgtggtgcagaggctggagccccgcttcccccaggccagcaagaccagcatcggccacgtggtgcagctgctgtaccgggccagctgcttcaaggtgaccaagagagatgaggacagcagcctgatgcagctgaaggaggagttccgcacctatgaggccctgcggcgggagcatgacagccagatcgtgcagatcgccatggaggccggcctgcgcatcgccccagaccagtggagcagcctgctgtatggagaccagagccacaagagccacatgcagagcatcatcgacaagctgcagaccccagccagctttgcccagagcgtgcaggagctgaccatcgccctgcagaggactggagaccctgccaacctgaaccggctgcggccccacctggagctgctggccaacatcgaccccagcccagatgcccccccacccacctgggagcagctggagaatggcctggtggccgtgaggacagtggtgcacggcctggtggactacatccagaaccacagcaagaagggagctgaccagcagcagcccccccagcacagcaagtacaagacctacatgtgccgggacatgaagcagaggggcggctgccccaggggggccagctgcacctttgcccacagccaggaggagctggagaagttcaggaagatgaacaagaggctggtgccccggcggcccctgagcgccagcctgggccagctgaatgaggtgggcctgcccagcgctgccatcctgcctgatgaaggagctgtggacctgcccagcaggaagcccccagccctgcccaatggaattgtgtccacaggcaacacagtgacccagctgatcccccggggcacagaccccagctatgacagcagcctgaagccaggcaagattgaccacctgagcagcagcgcccctggcagccccccagacctgctggagagcgtgcccaagagcatcagcgccctgcctgtgaacccccacagcatccccccccggggccctgctgacctgccccccatgcctgtgaccaagcccctgcagatggtgccccggggcagccagctgtacccagcccagcagacagatgtgtactaccaggaccccagaggagctgcccccccatttgagcccgccccctaccagcagggcatgtactacaccccaccaccccagtgtgtgtccagatttgtgcggcccccacccagcgcccctgagcccgccccaccctacctggaccactacccaccctacctgcaggagcgggtggtgaacagccagtatggcacccagccccagcagtacccacccatctaccccagccactatgatggaagaagagtgtacccagcccccagctacacccgggaggagatcttccgggagagccccatccccatcgagatccccccagctgctgtgcccagctatgtgcctgagagccgggagcgctaccagcagatcgagagctactaccctgtggccccccaccccacccagatccggcccagctacctgcgggagcccccctacagccggctgcccccaccaccccagccccaccccagcctggatgagctgcacagaagaaggaaggagatcatggcccagctggaggagaggaaggtgatcagccccccaccatttgcccccagccccaccctgccccccaccttccaccctgaggagttcctggatgaggacctgaaggtggccggcaagtacaagggaaatgactacagccagtacagcccctggagctgtgacaccatcggcagctacatcggcaccaaggatgccaagcccaaggatgtggtggccgccggctctgtggagatgatgaatgtggagagcaagggcatgagggaccagaggctggacctgcagaggagagctgctgagaccagtgatgatgacctgatcccctttggagaccggcccaccgtgtccagatttggagccatcagcaggaccagcaagaccatctaccagggcgccggccccatgcaggccatggccccccagggcgcccccaccaagagcatcaacatcagtgactacagcccctacggcacccacggcggctggggcgccagcccctacagcccccaccagaacatccccagccagggccacttcagcgagcgggagcgcatctccatgtctgaggtggccagccacggcaagcccctgcccagcgctgagcgggagcagctgcggctggagctgcagcagctgaaccaccagatcagccagcagacccagctgcggggcctggagcgggaggccaacaccctggccggccagagccagcccccacctcctcctccacccaagtggccaggcatgatcagcagcgagcagctgagcctggagctgcaccaggtggagcgggagatcggcaagaggacccgggagctgtccatggagaaccagtgcagcctggacatgaagagcaagctgaacaccagcaagcaggctgaaaatggccagcctgagccccagaacaaggtgcctgctgaggacctgaccctgaccttcagcagtgatgtgcccaacggcagcgccctgacccaggagaacatcagcctgctgagcaacaagaccagcagcctgaacctgtctgaagatcctgagggcggcggggacaacaatgacagccagaggtctggagtgacccccagcagcgccccctag

SEQ ID NO: 168400 - DNA, 3402 bp, synthetic construct; identical to SEQ ID NO: 168398
  misc_feature 1..3402: note = Description of Artificial Sequence: Synthetic coding sequence
  source 1..3402: mol_type = other DNA

SEQ ID NO: 168401 - DNA, 984 bp, synthetic construct
  misc_feature 1..984: note = Description of Artificial Sequence: Synthetic coding sequence
  source 1..984: mol_type = other DNA
atgtgggccacctgctgcaactggttctgcctggatggccagcctgaggaggtgcccccaccccagggcgccaggatgcaggcctacagcaaccctggctacagcagcttccccagccccaccggcctggagcccagctgcaagagctgtggggcccactttgccaacacagccaggaagcagacctgcctggactgcaagaagaacttctgcatgacctgcagcagccaggtgggcaatggcccccggctgtgcctgctgtgccagcgcttccgggccacagccttccagcgggaggagctgatgaagatgaaggtgaaggacctgcgggactacctgagcctgcatgacatcagcacagagatgtgccgggagaaggaggagctggtgctgctggtgctgggccagcagcccgtcatcagccaggaggacaggacccgggccagcaccctgagcccagacttccctgagcagcaggccttcctgacccagccccacagctccatggtgccccccaccagccccaacctgcccagcagcagcgcccaggccacctctgtgcccccagcccaggtgcaggagaaccagcagagcattgattctgaggacagctttgtgcctggaagaagagccagcctgagtgacctgacagacctggaggacatcgagggcctgactgtgcggcagctgaaggagatcctggccaggaactttgtgaactacaagggctgctgtgagaagtgggagctgatggagcgggtgacccggctgtacaaggaccagaagggcctgcagcacctgggcggcgctgtgcccagcggcctggaggagaacctgtgcaagatctgcatggacagccccatcgactgtgtgctgctggagtgtggccacatggtgacctgcaccaagtgtgggaagaggatgaatgaatgtcccatctgccggcagtatgtgatccgggctgtgcacgtgttccgctcctag

SEQ ID NO: 168402 - DNA, 1092 bp, synthetic construct
  misc_feature 1..1092: note = Description of Artificial Sequence: Synthetic coding sequence
  source 1..1092: mol_type = other DNA
atgtgggccacctgctgcaactggttctgcctggatggccagcctgaggaggtgcccccaccccagggcgccaggatgcaggcctacagcaaccctggctacagcagcttccccagccccaccggcctggagcccagctgcaagagctgtggggcccactttgccaacacagccaggaagcagacctgcctggactgcaagaagaacttctgcatgacctgcagcagccaggtgggcaatggcccccggctgtgcctgctgtgccagcgcttccgggccacagccttccagcgggaggagctgatgaagatgaaggtgaaggacctgcgggactacctgagcctgcatgacatcagcacagagatgtgccgggagaaggaggagctggtgctgctggtgctgggccagcagcccgtcatcagccaggaggacaggacccgggccagcaccctgagcccagacttccctgagcagcaggccttcctgacccagccccacagctccatggtgccccccaccagccccaacctgcccagcagcagcgcccaggccacctctgtgcccccagcccaggtgcaggagaaccagcaggccaatggacatgtgtcccaggaccaggaggagcctgtgtacctggagagcgtggcccgggtgcctgcagaagatgagacccagagcattgattctgaggacagctttgtgcctggaagaagagccagcctgagtgacctgacagacctggaggacatcgagggcctgactgtgcggcagctgaaggagatcctggccaggaactttgtgaactacaagggctgctgtgagaagtgggagctgatggagcgggtgacccggctgtacaaggaccagaagggcctgcagcacctggtgtctggagctgaggaccagaatggaggagctgtgcccagcggcctggaggagaacctgtgcaagatctgcatggacagccccatcgactgtgtgctgctggagtgtggccacatggtgacctgcaccaagtgtgggaagaggatgaatgaatgtcccatctgccggcagtatgtgatccgggctgtgcacgtgttccgctcctag

SEQ ID NO: 168403 - DNA, 1068 bp, synthetic construct
  misc_feature 1..1068: note = Description of Artificial Sequence: Synthetic coding sequence
  source 1..1068: mol_type = other DNA
atgtgggccacctgctgcaactggttctgcctggatggccagcctgaggaggtgcccccaccccagggcgccaggatgcaggcctacagcaaccctggctacagcagcttccccagccccaccggcctggagcccagctgcaagagctgtggggcccactttgccaacacagccaggaagcagacctgcctggactgcaagaagaacttctgcatgacctgcagcagccaggtgggcaatggcccccggctgtgcctgctgtgccagcgcttccgggccacagccttccagcgggaggagctgatgaagatgaaggtgaaggacctgcgggactacctgagcctgcatgacatcagcacagagatgtgccgggagaaggaggagctggtgctgctggtgctgggccagcagcccgtcatcagccaggaggacaggacccgggccagcaccctgagcccagacttccctgagcagcaggccttcctgacccagccccacagctccatggtgccccccaccagccccaacctgcccagcagcagcgcccaggccacctctgtgcccccagcccaggtgcaggagaaccagcaggccaatggacatgtgtcccaggaccaggaggagcctgtgtacctggagagcgtggcccgggtgcctgcagaagatgagacccagagcattgattctgaggacagctttgtgcctggaagaagagccagcctgagtgacctgacagacctggaggacatcgagggcctgactgtgcggcagctgaaggagatcctggccaggaactttgtgaactacaagggctgctgtgagaagtgggagctgatggagcgggtgacccggctgtacaaggaccagaagggcctgcagcacctgggcggcgctgtgcccagcggcctggaggagaacctgtgcaagatctgcatggacagccccatcgactgtgtgctgctggagtgtggccacatggtgacctgcaccaagtgtgggaagaggatgaatgaatgtcccatctgccggcagtatgtgatccgggctgtgcacgtgttccgctcctag

SEQ ID NO: 168404 - DNA, 1092 bp, synthetic construct; identical to SEQ ID NO: 168402
  misc_feature 1..1092: note = Description of Artificial Sequence: Synthetic coding sequence
  source 1..1092: mol_type = other DNA

SEQ ID NO: 168405 - DNA, 816 bp, synthetic construct
  misc_feature 1..816: note = Description of Artificial Sequence: Synthetic coding sequence
  source 1..816: mol_type = other DNA
atgtgggccacctgctgcaactggttctgcctggatggccagcctgaggaggtgcccccaccccagggcgccaggatgcaggcctacagcaaccctggctacagcagcttccccagccccaccggcctggagcccagctgcaagagctgtggggcccactttgccaacacagccaggaagcagacctgcctggactgcaagaagaacttctgcatgacctgcagcagccaggtgggcaatggcccccggctgtgcctgctgtgccagcgcttccgggccacagccttccagcgggaggagctgatgaagatgaaggtgaaggacctgcgggactacctgagcctgcatgacatcagcacagagatgtgccgggagaaggaggagctggtgctgctggtgctgggccagcagcccgtcatcagccaggaggacaggacccgggccagcaccctgagcccagacttccctgagcagcaggccttcctgacccagccccacagctccatggtgccccccaccagccccaacctgcccagcagcagcgcccaggccacctctgtgcccccagcccaggtgcaggagaaccagcaggccaatggacatgtgtcccaggaccaggaggagcctgtgtacctggagagcgtggcccgggtgcctgcagaagatgagacccagagcattgattctgaggacagctttgtgcctggaagaagagccagcctgagtgacctgacagacctggaggacatcgagggcctgactgtgcggcagctgaaggagatcctggccaggaactttgtgaactacaagggctag

SEQ ID NO: 168406 - DNA, 402 bp, synthetic construct
  misc_feature 1..402: note = Description of Artificial Sequence: Synthetic coding sequence
  source 1..402: mol_type = other DNA
atgtgggccacctgctgcaactggttctgcctggatggccagcctgaggaggtgcccccaccccagggcgccaggatgcaggcctacagcaaccctggctacagcagcttccccagccccaccggcctggagcccagctgcaagagctgtggggcccactttgccaacacagccaggaagcagacctgcctggactgcaagaagaacttctgcatgacctgcagcagccaggtgggcaatggcccccggctgtgcctgctgtgccagcgcttccgggccacagccttccagcgggaggagctgatgaagatgaaggtgaaggacctgcgggactacctgagcctgcatgacatcagcacagagatgtgccgggagaaggaggagctggtgctgctggtgtag

SEQ ID NO: 168407 - DNA, 570 bp, synthetic construct
  misc_feature 1..570: note = Description of Artificial Sequence: Synthetic coding sequence
  source 1..570: mol_type = other DNA
atgtgggccacctgctgcaactggttctgcctggatggccagcctgaggaggtgcccccaccccagggcgccaggatgcaggcctacagcaaccctggctacagcagcttccccagccccaccggcctggagcccagctgcaagagctgtggggcccactttgccaacacagccaggaagcagacctgcctggactgcaagaagaacttctgcatgacctgcagcagccaggtgggcaatggcccccggctgtgcctgctgtgccagcgcttccgggccacagccttccagcgggaggagctgatgaagatgaaggtgaaggacctgcgggactacctgagcctgcatgacatcagcacagagatgtgccgggagaaggaggagctggtgctgctggtgctgggccagcagcccgtcatcagccaggaggacaggacccgggccagcaccctgagcccagacttccctgagcagcaggccttcctgacccagccccacagctccatggtgccccccaccagccccaacctgcccagcagcagcgcccaggccacctctgtgcccccatag

SEQ ID NO: 168408 - DNA, 138 bp, synthetic construct
  misc_feature 1..138: note = Description of Artificial Sequence: Synthetic coding sequence
  source 1..138: mol_type = other DNA
atgtgggccacctgctgcaactggttctgcctggatggccagcctgaggaggtgcccccaccccagggcgccaggatgcaggcctacagcaaccctggctacagcagcttccccagccccaccggcctggagccctag

SEQ ID NO: 168409 - DNA, 2124 bp, synthetic construct
  misc_feature 1..2124: note = Description of Artificial Sequence: Synthetic coding sequence
  source 1..2124: mol_type = other DNA
atgagcggcagccggcaggccggcagcggcagcgctggcaccagccctggcagcagcgctgccagctctgtgaccagcgccagcagcagcctgagcagcagccccagccccccatctgtggccgtgtctgctgctgccctggtgtctggaggagtggcccaggccgccggcagcggcggcctgggcggccctgtgcggcctgtgctggtggccccagctgtgtctggcagcggcggcggcgctgtgtccacaggcctgagccgccacagctgtgccgcccggcccagcgctggggtgggcggcagcagcagcagcctgggcagcggcagcaggaagaggcccctgctggcccccctgtgcaatggcctcatcaacagctatgaggacaagagcaatgactttgtgtgccccatctgctttgacatgattgaggaggcctacatgaccaagtgtggccacagcttctgctacaagtgcatccaccagagcctggaggacaacaaccgctgccccaagtgcaactacgtggtggacaacatcgaccacctgtaccccaacttcctggtgaatgagctgatcctgaagcagaagcagagatttgaggagaagcgcttcaagctggaccacagcaatggccaccgctggcagatcttccaggactggctgggcacagaccaggacaacctggacctggccaacgtgaacctgatgctggagctgctggtgcagaagaagaagcagctggaggccgagagccacgccgcccagctgcagatcctgatggagttcctgaaggtggcccggaggaacaagcgggaggagatgagcggcctgtacagccctgtgtctgaggacagcacagtgccccagtttgaggcccccagccccagccacagcagcatcatcgacagcacagagtacagccagcccccaggcttcagcggcagcagccagaccaagaagcagccctggtacaacagcaccctggccagcaggaggaagaggctgacagcccactttgaggacctggagcagtgctacttcagcaccaggatgagccgcatcagtgatgacagcaggacagccagccagctggatgagttccaggagtgcctgagcaagttcacccgctacaacagcgtgcggcccctggccaccctgtcctatgccagtgacctgtacaacggcagcagcatcgtgagcagcattgaatttgaccgggactgtgactactttgccatcgccggcgtgaccaagaagatcaaggtgtatgaatatgacaccgtcatccaggatgctgtggacatccactacccagaaaatgagatgacctgcaacagcaagatcagctgcatctcctggagcagctaccacaagaacctgctggccagcagtgactatgagggcaccgtcatcctgtgggatggcttcaccggccagaggagcaaggtgtaccaggagcacgagaagcgctgctggagcgtggacttcaacctgatggaccccaagctgctggccagcggcagtgatgatgccaaggtgaagctgtggagcaccaacctggacaacagcgtggccagcattgaggccaaggccaacgtgtgctgcgtgaagttcagccccagcagccgctaccacctggccttcggctgtgccgaccactgtgtgcactactatgacctgaggaacaccaagcagcccatcatggtgttcaagggccacaggaaggctgtgtcctatgccaagtttgtgtctggagaggagatcgtgtctgccagcacagacagccagctgaagctgtggaatgtgggcaagccctactgcctgcgctccttcaagggccacatcaatgagaagaactttgtgggcctggccagcaatggagactacatcgcctgtggcagcgagaacaacagcctgtacctgtactacaagggcctgagcaagaccctgctgaccttcaagtttgacacagtgaagtctgtgctggacaaggacagaaaagaagatgacaccaatgaatttgtgtctgctgtgtgctggagggccctgcctgatggagagagcaatgtgctgattgctgccaacagccagggcaccatcaaggtgctggagctggtgtag

SEQ ID NO: 168410 - DNA, 1521 bp, synthetic construct
  misc_feature 1..1521: note = Description of Artificial Sequence: Synthetic coding sequence
  source 1..1521: mol_type = other DNA
atggagttcctgaaggtggcccggaggaacaagcgggagcagctggagcagatccagaaggagctgtctgtgctggaggaggacatcaagagggtggaggagatgagcggcctgtacagccctgtgtctgaggacagcacagtgccccagtttgaggcccccagccccagccacagcagcatcatcgacagcacagagtacagccagcccccaggcttcagcggcagcagccaggccggcgtgcagtggagatacctgggcagcctgcagcccccaccaccccgctacaagcgcttcagctgcctgaccctgcccagctcctgggactacagaaggctgcccccccacctgaccaagaagcagccctggtacaacagcaccctggccagcaggaggaagaggctgacagcccactttgaggacctggagcagtgctacttcagcaccaggatgagccgcatcagtgatgacagcaggacagccagccagctggatgagttccaggagtgcctgagcaagttcacccgctacaacagcgtgcggcccctggccaccctgtcctatgccagtgacctgtacaacggcagcagcatcgtgagcagcattgaatttgaccgggactgtgactactttgccatcgccggcgtgaccaagaagatcaaggtgtatgaatatgacaccgtcatccaggatgctgtggacatccactacccagaaaatgagatgacctgcaacagcaagatcagctgcatctcctggagcagctaccacaagaacctgctggccagcagtgactatgagggcaccgtcatcctgtgggatggcttcaccggccagaggagcaaggtgtaccaggagcacgagaagcgctgctggagcgtggacttcaacctgatggaccccaagctgctggccagcggcagtgatgatgccaaggtgaagctgtggagcaccaacctggacaacagcgtggccagcattgaggccaaggccaacgtgtgctgcgtgaagttcagccccagcagccgctaccacctggccttcggctgtgccgaccactgtgtgcactactatgacctgaggaacaccaagcagcccatcatggtgttcaagggccacaggaaggctgtgtcctatgccaagtttgtgtctggagaggagatcgtgtctgccagcacagacagccagctgaagctgtggaatgtgggcaagccctactgcctgcggagcttcaagggccacatcaatgagaagaactttgtgggcctggccagcaatggagactacatcgcctgtggcagcgagaacaacagcctgtacctgtactacaagggcctgagcaagaccctgctgaccttcaagtttgacacagtgaagtctgtgctggacaaggacaggaaggaggatgacaccaatgaatttgtgtctgctgtgtgctggagggccctgcctgatggagagagcaatgtgctgattgctgccaacagccagggcaccatcaaggtgctggccctgctgtag

SEQ ID NO: 168411 - DNA, 2196 bp, synthetic construct
  misc_feature 1..2196: note = Description of Artificial Sequence: Synthetic coding sequence
  source 1..2196: mol_type = other DNA
atgagcggcagccggcaggccggcagcggcagcgctggcaccagccctggcagcagcgctgccagctctgtgaccagcgccagcagcagcctgagcagcagccccagccccccatctgtggccgtgtctgctgctgccctggtgtctggaggagtggcccaggccgccggcagcggcggcctgggcggccctgtgcggcctgtgctggtggccccagctgtgtctggcagcggcggcggcgctgtgtccacaggcctgagccgccacagctgtgccgcccggcccagcgctggggtgggcggcagcagcagcagcctgggcagcggcagcaggaagaggcccctgctggcccccctgtgcaatggcctcatcaacagctatgaggacaagagcaatgactttgtgtgccccatctgctttgacatgattgaggaggcctacatgaccaagtgtggccacagcttctgctacaagtgcatccaccagagcctggaggacaacaaccgctgccccaagtgcaactacgtggtggacaacatcgaccacctgtaccccaacttcctggtgaatgagctgatcctgaagcagaagcagagatttgaggagaagcgcttcaagctggaccacagcgtgagcagcaccaacggccaccgctggcagatcttccaggactggctgggcacagaccaggacaacctggacctggccaacgtgaacctgatgctggagctgctggtgcagaagaagaagcagctggaggccgagagccacgccgcccagctgcagatcctgatggagttcctgaaggtggcccggaggaacaagcgggagcagctggagcagatccagaaggagctgtctgtgctggaggaggacatcaagagggtggaggagatgagcggcctgtacagccctgtgtctgaggacagcacagtgccccagtttgaggcccccagccccagccacagcagcatcatcgacagcacagagtacagccagcccccaggcttcagcggcagcagccagaccaagaagcagccctggtacaacagcaccctggccagcaggaggaagaggctgacagcccactttgaggacctggagcagtgctacttcagcaccaggatgagccgcatcagtgatgacagcaggacagccagccagctggatgagttccaggagtgcctgagcaagttcacccgctacaacagcgtgcggcccctggccaccctgtcctatgccagtgacctgtacaacggcagcagcatcgtgagcagcattgaatttgaccgggactgtgactactttgccatcgccggcgtgaccaagaagatcaaggtgtatgaatatgacaccgtcatccaggatgctgtggacatccactacccagaaaatgagatgacctgcaacagcaagatcagctgcatctcctggagcagctaccacaagaacctgctggccagcagtgactatgagggcaccgtcatcctgtgggatggcttcaccggccagaggagcaaggtgtaccaggagcacgagaagcgctgctggagcgtggacttcaacctgatggaccccaagctgctggccagcggcagtgatgatgccaaggtgaagctgtggagcaccaacctggacaacagcgtggccagcattgaggccaaggccaacgtgtgctgcgtgaagttcagccccagcagccgctaccacctggccttcggctgtgccgaccactgtgtgcactactatgacctgaggaacaccaagcagcccatcatggtgttcaagggccacaggaaggctgtgtcctatgccaagtttgtgtctggagaggagatcgtgtctgccagcacagacagccagctgaagctgtggaatgtgggcaagccctactgcctgcgctccttcaagggccacatcaatgagaagaactttgtgggcctggccagcaatggagactacatcgcctgtggcagcgagaacaacagcctgtacctgtactacaagggcctgagcaagaccctgctgaccttcaagtttgacacagtgaagtctgtgctggacaaggacagaaaagaagatgacaccaatgaatttgtgtctgctgtgtgctggagggccctgcctgatggagagagcaatgtgctgattgctgccaacagccagggcaccatcaaggtgctggagctggtgtag

SEQ ID NO: 168412 - DNA, 774 bp, synthetic construct
  misc_feature 1..774: note = Description of Artificial Sequence: Synthetic coding sequence
  source 1..774: mol_type = other DNA
atgagcggcagccggcaggccggcagcggcagcgctggcaccagccctggcagcagcgctgccagctctgtgaccagcgccagcagcagcctgagcagcagccccagccccccatctgtggccgtgtctgctgctgccctggtgtctggaggagtggcccaggccgccggcagcggcggcctgggcggccctgtgcggcctgtgctggtggccccagctgtgtctggcagcggcggcggcgctgtgtccacaggcctgagccgccacagctgtgccgcccggcccagcgctggggtgggcggcagcagcagcagcctgggcagcggcagcaggaagaggcccctgctggcccccctgtgcaatggcctcatcaacagctatgaggacaagagcaatgactttgtgtgccccatctgctttgacatgattgaggaggcctacatgaccaagtgtggccacagcttctgctacaagtgcatccaccagagcctggaggacaacaaccgctgccccaagtgcaactacgtggtggacaacatcgaccacctgtaccccaacttcctggtgaatgagctgatcctgaagcagaagcagagatttgaggagaagcgcttcaagctggaccacagcgtgagcagcaccaacggccaccgctggcagatcttccaggactggctgggcacagaccaggacaacctggacctggccaacgtgaacctgatgctggagctgctggtgcagaagaacaagaagaagaagaagaagaagaagtag

SEQ ID NO: 168413 - DNA, 2325 bp, synthetic construct
  misc_feature 1..2325: note = Description of Artificial Sequence: Synthetic coding sequence
  source 1..2325: mol_type = other DNA
atggcccacgaggccatggagtatgatgtgcaggtgcagctgaaccacgccgagcagcagcctgccccagctggcatggccagcagccagggcggccctgccctgctgcagcctgtgcctgcagatgtggtgagcagccagggcgtgcccagcatcctgcagcctgccccagctgaggtgatcagcagccaggccaccccacccctgctgcagcctgccccccagctgtctgtggacctgacagaggtggaggtgctgggggaggacacagtggagaacatcaaccccaggaccagcgagcagcaccggcagggcagtgatggcaaccacaccatcccagccagcagcctgcacagcatgaccaacttcatcagcggcctgcagaggctgcacggcatgctggagttcctgcggcccagcagcagcaaccacagcgtgggccccatgaggaccaggagaagagtgtctgccagcagaagagcccgggccggcggcagccagaggacagattctgcccggctgcgggcccccctggatgcctacttccaggtgtccaggacccagcctgacctgcctgccaccacctatgacagcgagaccagaaatcctgtgtctgaggagctgcaggtgagcagcagcagtgacagcgacagcgacagcagcgcagaatatggaggagtggtggaccaggccgaggagagcggggccgtcatcctggaggagcagctggccggcgtgtctgctgagcaggaggtgacctgcattgatggcggcaagaccctgcccaagcagcccagcccccagaagtctgagcccctgctgcccagcgcctccatggatgaggaggagggggacacctgcaccatctgcctggagcagtggaccaatgctggggaccaccggctgagcgccctgcgctgtggccacctgtttggctaccgctgcatcagcacctggctgaagggccaggtgaggaagtgcccccagtgcaacaagaaggcccggcacagcgacatcgtggtgctgtatgcccggaccctgcgggccctggacaccagcgagcaggagaggatgaagagcagcctgctgaaggagcagatgctgaggaagcaggccgagctggagagcgcccagtgccgcctgcagctgcaggtgctgacagacaagtgcacccggctgcagaggagagtgcaggacctgcagaagctgaccagccaccagagccagaacctgcagcagccccggggcagccaggcctgggtgctgagctgcagccccagcagccagggccagcacaagcacaagtaccacttccagaagaccttcaccgtgtcccaggccggcaactgccgcatcatggcctactgtgatgccctgagctgcctggtgatcagccagcccagcccccaggccagcttcctgcccggctttggagtgaagatgctgagcacagccaacatgaagagcagccagtacatccccatgcacggcaagcagatccggggcctggccttcagcagctacctgcggggcctgctgctgagcgccagcctggacaacaccatcaagctgaccagcctggagaccaacacagtggtgcagacctacaatgccggccggcctgtgtggagctgctgctggtgcctggatgaggccaactacatctatgccggcctggccaacggcagcatcctggtgtatgatgtgaggaacaccagcagccacgtgcaggagctggtggcccagaaggcccgctgccccctggtgtccctgagctacatgcccagggctgccagcgctgccttcccctacggcggcgtgctggccggcaccctggaggatgccagcttctgggagcagaagatggacttcagccactggccccacgtgctgcccctggagcccggcggctgcatcgacttccagacagagaacagcagccgccactgcctggtgacctacagaccagacaagaaccacaccaccatccgctctgtgctgatggagatgagctaccgcctggatgacaccggcaaccccatctgcagctgccagcctgtgcacaccttctttggaggccccacctgcaagctgctgaccaagaatgccatcttccagagcccagaaaatgatggcaacatcctggtgtgcacaggagatgaggccgccaacagcgccctgctgtgggatgctgccagcggcagcctgctgcaggacctgcagacagaccagcctgtgctggacatctgcccctttgaggtgaacagaaacagctacctggccaccctgacagagaagatggtgcacatctacaagtgggagtag

SEQ ID NO: 168414 - DNA, 792 bp, synthetic construct
  misc_feature 1..792: note = Description of Artificial Sequence: Synthetic coding sequence
  source 1..792: mol_type = other DNA
atggcccacgaggccatggagtatgatgtgcaggtgcagctgaaccacgccgagcagcagcctgccccagctggcatggccagcagccagggcggccctgccctgctgcagcctgtgcctgcagatgtggtgagcagccagggcgtgcccagcatcctgcagcctgccccagctgaggtgatcagcagccaggccaccccacccctgctgcagcctgccccccagctgtctgtggacctgacagaggtggaggtgctgggggaggacacagtggagaacatcaaccccaggaccagcgagcagcaccggcagggcagtgatggcaaccacaccatcccagccagcagcctgcacagcatgcccctggagcccggcggctgcatcgacttccagacagagaacagcagccgccactgcctggtgacctacagaccagacaagaaccacaccaccatccgctctgtgctgatggagatgagctaccgcctggatgacaccggcaaccccatctgcagctgccagcctgtgcacaccttcttcggcggccccacctgcaagctgctgaccaagaatgccatcttccagagcccagaaaatgatggcaacatcctggtgtgcacaggagatgaagctgccaacagcgccctgctgtgggatgctgccagcggcagcctgctgcaggacctgcagacagaccagcctgtgctggacatctgcccctttgaggtgaacagaaattcctacctggccaccctgacagagaagatggtgcacatctacaagtgggagtag

SEQ ID NO: 168415 - DNA, 2058 bp, synthetic construct
  misc_feature 1..2058: note = Description of Artificial Sequence: Synthetic coding sequence
  source 1..2058: mol_type = other DNA
atgaaccagagccgcagcagaagtgatggcggcagcgaggagaccctgccccaggaccacaaccaccatgaaaatgaaagacgctggcagcaggagcggctgcaccgggaggaggcctactaccagttcatcaatgagctgaatgatgaggactaccgcctgatgagggaccacaacctgctgggcaccccaggagagatcaccagcgaggagctgcagcagaggctggatggagtgaaggagcagctggccagccagcctgacctgagagatggcaccaactacagagacagcgaggtgccccgggagagcagccatgaggacagcctgctggagtggctgaacaccttccggaggactggaaatgccaccaggagcggccagaatggaaaccagacctggagggctgtgtccaggaccaaccccaacaacggggagttccgcttcagcctggagatccacgtgaaccacgagaacagaggatttgagatccatggagaggactacacagacatccccctgagtgacagcaacagagaccacacagccaaccggcagcagaggagcaccagccctgtggcccggaggaccaggagccagacctctgtgaacttcaacggcagcagcagcaacatccccaggacccggctggccagccggggccagaacccagctgagggcagcttcagcaccctgggccgcctgagaaatggaattggaggagctgctggcatcccccgggccaatgccagcaggaccaacttcagcagccacaccaaccagagcggcggcagcgagctgcggcagcgggagggccagagatttggagctgcccacgtgtgggagaatggagcccggagcaatgtgacagtgaggaacaccaaccagaggctggagcccatccggctgcggagcaccagcaacagccgcagccgcagccccatccagaggcagagcggcaccgtgtaccacaacagccagcgggagagcaggcctgtgcagcagaccacccggcgctctgtgagaagaagaggccgcaccagggtcttcctggagcaggaccgggagcgggagcggcggggcacagcctacacccccttcagcaacagccggctggtgagccgcatcaccgtggaggagggggaggagagcagccgcagcagcacagctgtgcggcggcaccccaccatcaccctggacctgcaggtgcggcgcatccggcctggagagaacagagaccgggacagcatcgccaacagaaccaggagccgggtgggcctggctgaaaatacagtgaccatcgagagcaacagcggcggcttccggaggaccatcagccggctggagaggagcggcatccgcacctacgtgtccaccatcaccgtgcccctgcggcgcatcagtgaaaatgagctggtggagcccagctctgtggccctgcggagcatcctgcggcagatcatgactggatttggagagctgagcagcctgatggaggccgacagcgagagcgagctgcagagaaatggccagcacctgcctgacatgcacagcgagctgagcaacctgggcacagacaacaacagaagccagcaccgggagggcagcagccaggaccggcaggcccagggcgacagcacagagatgcacggggagaatgagaccacccagccccacaccaggaacagcgacagcagaggaggccggcagctgaggaaccccaacaacctggtggagaccggcaccctgcccatcctgcggctggcccacttcttcctgctgaatgaaagtgatgatgatgaccgcatccggggcctgaccaaggagcagattgacaacctgagcaccaggcactatgagcacaacagcattgacagcgagctgggcaagatctgcagcgtgtgcatcagtgactatgtgactggaaacaagctgcggcagctgccctgcatgcatgagttccacatccactgcatcgaccgctggctgtctgagaactgcacctgccccatctgccggcagcctgtgctgggcagcaacatcgccaacaacggctag

SEQ ID NO: 168416 - DNA, 2058 bp, synthetic construct; identical to SEQ ID NO: 168415
  misc_feature 1..2058: note = Description of Artificial Sequence: Synthetic coding sequence
  source 1..2058: mol_type = other DNA

SEQ ID NO: 168417 - DNA, 2058 bp, synthetic construct; identical to SEQ ID NO: 168415
  misc_feature 1..2058: note = Description of Artificial Sequence: Synthetic coding sequence
  source 1..2058: mol_type = other DNA

SEQ ID NO: 168418 - DNA, 990 bp, synthetic construct
  misc_feature 1..990: note = Description of Artificial Sequence: Synthetic coding sequence
  source 1..990: mol_type = other DNA
atgcagctggaggtggacaagatgggcaccaagctgggggagctgctggtgagccgcatcaccgtggaggagggggaggagagcagccgcagcagcacagctgtgcggcggcaccccaccatcaccctggacctgcaggtgcggcgcatccggcctggagagaacagagaccgggacagcatcgccaacagaaccaggagccgggtgggcctggctgaaaatacagtgaccatcgagagcaacagcggcggcttccggaggaccatcagccggctggagaggagcggcatccgcacctacgtgtccaccatcaccgtgcccctgcggcgcatcagtgaaaatgagctggtggagcccagctctgtggccctgcggagcatcctgcggcagatcatgactggatttggagagctgagcagcctgatggaggccgacagcgagagcgagctgcagagaaatggccagcacctgcctgacatgcacagcgagctgagcaacctgggcacagacaacaacagaagccagcaccgggagggcagcagccaggaccggcaggcccagggcgacagcacagagatgcacggggagaatgagaccacccagccccacaccaggaacagcgacagcagaggaggccggcagctgaggaaccccaacaacctggtggagaccggcaccctgcccatcctgcggctggcccacttcttcctgctgaatgaaagtgatgatgatgaccgcatccggggcctgaccaaggagcagattgacaacctgagcaccaggcactatgagcacaacagcattgacagcgagctgggcaagatctgcagcgtgtgcatcagtgactatgtgactggaaacaagctgcggcagctgccctgcatgcatgagttccacatccactgcatcgaccgctggctgtctgagaactgcacctgccccatctgccggcagcctgtgctgggcagcaacatcgccaacaacggctag

SEQ ID NO: 168419 - DNA, 1221 bp, synthetic construct
  misc_feature 1..1221: note = Description of Artificial Sequence: Synthetic coding sequence
  source 1..1221: mol_type = other DNA
atgaccaccccagccaatgcccagaatgccagcaagacctgggagctgagcctgtatgagctgcacaggaccccccaggaggccatcatggatggaacagaaattgctgtgagccccaggagcctgcacagcgagctgatgtgccccatctgcctggacatgctgaagaacaccatgaccaccaaggaatgtctgcaccgcttctgcagcgactgcatcgtgacagccctgcggagcggcaacaaggaatgtcccacctgcaggaagaagctggtgtccaagaggagcctgcggccagaccccaactttgatgccctgatcagcaagatctaccccagccgggaggagtatgaggcccaccaggacagagtgctgatccggctgagccggctgcacaaccagcaggccctgagcagcagcattgaggagggcctgaggatgcaggccatgcaccgggcccagagggtgagaagacccatccctggcagtgaccagaccaccaccatgtctggaggagagggggagcccggggagggggagggagatggagaagatgtgtccagtgacagcgccccagacagcgcccctggccctgcccccaagaggccccggggcggcggggccggcggcagctctgtgggcactggaggcggcggcaccggcggcgtgggcggcggggccggcagcgaggacagcggggaccggggcggcaccctgggcggcggcaccctgggcccccccagccccccaggggcccccagccccccagagcccggcggggagattgagctggtgttccggccccaccccctgctggtggagaagggggagtactgccagaccaggtatgtgaagaccactggaaatgccaccgtggaccacctgagcaagtacctggccctgagaattgccctggagcggcggcagcagcaggaggccggggagcccggcggccctgggggcggggccagtgacaccggcggcccagatggctgcggcggggagggcggcggggccggcggcggagatggccctgaggagcccgccctgcccagcctggagggcgtgtctgagaagcagtacaccatctacatcgcccctgggggcggggccttcaccaccctgaatggcagcctgaccctggagctggtgaatgagaagttctggaaggtgtcccggcccctggagctgtgctacgcccccaccaaggaccccaagtag

SEQ ID NO: 168420 - DNA, 1221 bp, synthetic construct; identical to SEQ ID NO: 168419
  misc_feature 1..1221: note = Description of Artificial Sequence: Synthetic coding sequence
  source 1..1221: mol_type = other DNA

SEQ ID NO: 168421 - DNA, 1221 bp, synthetic construct; identical to SEQ ID NO: 168419
  misc_feature 1..1221: note = Description of Artificial Sequence: Synthetic coding sequence
  source 1..1221: mol_type = other DNA

SEQ ID NO: 168422 - DNA, 1221 bp, synthetic construct; identical to SEQ ID NO: 168419
  misc_feature 1..1221: note = Description of Artificial Sequence: Synthetic coding sequence
  source 1..1221: mol_type = other DNA

SEQ ID NO: 168423 - DNA, 1221 bp, synthetic construct; identical to SEQ ID NO: 168419
  misc_feature 1..1221: note = Description of Artificial Sequence: Synthetic coding sequence
  source 1..1221: mol_type = other DNA

SEQ ID NO: 168424 - DNA, 1221 bp, synthetic construct; identical to SEQ ID NO: 168419
  misc_feature 1..1221: note = Description of Artificial Sequence: Synthetic coding sequence
  source 1..1221: mol_type = other DNA

SEQ ID NO: 168425 - DNA, 465 bp, synthetic construct
  misc_feature 1..465: note = Description of Artificial Sequence: Synthetic coding sequence
  source 1..465: mol_type = other DNA
atgggcaactgcctgaagagccccaccagtgatgacatcagcctgctgcacgagagccagagcgaccgggccagctttggagagggcacagagccagaccaggagcccccaccaccctaccaggagcaggtgcctgtgcctgtgtaccaccccacccccagccagacccggctggccacccagctgacagaggaggagcagatccgcatcgcccagagaattggcctcatccagcacctgcccaagggcgtgtatgaccccggcagagatggcagcgagaagaagatccgggagtgtgtgatctgcatgatggactttgtgtatggagaccccatccgcttcctgccctgcatgcacatctaccacctggactgcattgatgactggctgatgaggagcttcacctgccccagctgcatggagcctgtggatgctgccctgctgagcagctatgagaccaactag

SEQ ID NO: 168426 - DNA, 1896 bp, synthetic construct
  misc_feature 1..1896: note = Description of Artificial Sequence: Synthetic coding sequence
  source 1..1896: mol_type = other DNA
atgcccaggcctgccctgtctgtgaccagcttctgccaccggctgggcaagcgggagaggaagcagagcttcatgggcaacagcggcaacagctggagccacacccccttccccaagctggagctgggcctgggcccccagcccatggccccccgggagctgcccacctgcagcatctgcctggagcggctgcgggaccccatcagcctggactgtggccatgacttctgcatccgctgcttcagcacccaccggctgcccggctgtgagcccccctgctgcccagagtgcaggaagatctgcaagcagaagaggggcctgcggagcctgggggagaagatgaagctgctgccccagaggcccctgcccccagccctgcaggagacctgccctgtgcgggcagagcccctgctgctggtgcgcatcaatgccagcggcggcctcatcctgaggatgggcgccatcaaccgctgcctgaagcaccccctggcccgggacacccctgtgtgcctgctggccgtgctgggggagcagcacagcggcaagagcttcctgctgaaccacctgctgcagggcctgcccggcctggagagcggggagggcggccggccccggggcggggaggccagcctgcagggctgccgctggggcgccaacggcctggcccggggcatctggatgtggagccaccccttcctgctgggcaaggagggcaagaaggtggccgtgttcctggtggacacaggagatgccatgagccctgagctgagccgggagacccgcatcaagctgtgtgccctgaccaccatgctgagcagctaccagatcctgagcaccagccaggagctgaaggacacagacctggactacctggagatgtttgtgcacgtggccgaggtgatgggcaagcactacggcatggtgcccatccagcacctggacctgctggtgcgggacagcagccaccccaacaaggccggccagggccacgtgggcaacatcttccagaggctgagcggccgctaccccaaggtgcaggagctgctgcagggcaagagggcccgctgctgcctgctgcctgcccctggaagaagaaggatgaaccagggccacgccagccctggggacacagatgatgacttccgccacctgctgggcgcctacgtgtctgatgtgctgtctgctgccccccagcacgccaagagccgctgccagggctactggaatgaaggccgggctgtggcccggggggaccggcggctgctgaccggccagcagctggcccaggagatcaagaacctgagcggctggatgggccgcactggacctggcttcaccagcccagatgagatggccgcccagctgcatgacctgaggaaggtggaggccgccaagcgggagtttgaggagtatgtgcggcagcaggatgtggccaccaagaggatcttcagcgccctgcgggtgctgcctgacaccatgaggaacctgctgagcacccagaaggatgccatcctggcccggcatggagtggccctgctgtgcaagggccgggaccagaccctggaggccctggaggccgagctgcaggccacagccaaggccttcatggacagctacaccatgaggttctgtggccacctggccgctgtgggcggcgctgtgggcgccggcctgatgggcctggccggcggcgtggtgggcgccggcatggctgctgctgccctggccgctgaggccggcatggtggccgccggggctgctgtgggcgccactggagctgctgtggtgggcggcggcgtgggcgccggcctggccgccaccgtgggctgcatggagaaggaggaggatgagcggctgctggagggggaccgggagcccctgctgcaggaggagtag

SEQ ID NO: 168427 - DNA, 687 bp, synthetic construct
  misc_feature 1..687: note = Description of Artificial Sequence: Synthetic coding sequence
  source 1..687: mol_type = other DNA
atggccgcccagcagagggactgtggcggggccgcccagctggccggccctgctgctgaggccgaccccctgggccgcttcacctgccctgtgtgcctggaggtgtatgagaagcctgtgcaggtgccctgtggccacgtgttctgcagcgcctgcctgcaggagtgcctgaagcccaagaagcctgtgtgtggggtgtgccgcagcgccctggcccctggggtgcgggctgtggagctggagcggcagatcgagagcacagagaccagctgccacggctgcaggaagaacttcttcctgagcaagatccgcagccacgtggccacctgcagcaagtaccagaactacatcatggagggcgtgaaggccaccatcaaggatgccagcctgcagcccagaaatgtgcccaaccgctacaccttcccctgcccctactgcccagagaagaactttgaccaggagggcctggtggagcactgcaagctgttccacagcacagacaccaagtctgtggtgtgccccatctgtgcctccatgccctggggagaccccaactaccgcagcgccaacttccgggagcacatccagaggaggcaccgcttctcctatgacacctttgtggactatgatgtggatgaggaggacatgatgaaccaggtgctgcagaggagcatcatcgaccagtag

SEQ ID NO: 168428 - DNA, 576 bp, synthetic construct
  misc_feature 1..576: note = Description of Artificial Sequence: Synthetic coding sequence
  source 1..576: mol_type = other DNA
atggccgcccagcagagggactgtggcggggccgcccagctggccggccctgctgctgaggccgaccccctgggccgcttcacctgccctgtgtgcctggaggtgtatgagaagcctgtgcaggtgccctgtggccacgtgttctgcagcgcctgcctgcaggagtgcctgaagcccaagaagcctgtgtgtggggtgtgccgcagcgccctggcccctggggtgcgggctgtggagctggagcggcagatcgagagcacagagaccagctgccacggctgcaggaagaacttcttcctgagcaagatccgcagccacgtggccacctgcagcaagtaccagaactacatcatggagggcgtgaaggccaccatcaaggatgccagcctgcagcccagaaatgtgcccaaccgctacaccttcccctgcccctactgcccagagaagaactttgaccaggagggcctggtggagcactgcaagctgttccacagcacagacaccaagtctgtgaccagcgagcagagcccctgcctgctgtctgtgtcctgctaccgggccagcatcacctactag

SEQ ID NO: 168429 - DNA, 1287 bp, synthetic construct
  misc_feature 1..1287: note = Description of Artificial Sequence: Synthetic coding sequence
  source 1..1287: mol_type = other DNA
atgggccccccacctggagctggggtgtcctgccggggcggctgcggcttcagccggctgctggcctggtgcttcctgctggccctgagcccccaggcccctggcagcagaggagctgaggccgtgtggacagcctacctgaatgtgtcctggagggtgccccacactggagtgaacagaacagtgtgggagctgtctgaggagggcgtgtatggccaggacagccccctggagcctgtggccggcgtgctggtgcccccagatggccctggggccctgaatgcctgcaacccccacaccaacttcaccgtgcccaccgtgtggggcagcacagtgcaggtgtcctggctggccctgatccagagaggaggcggctgcacctttgctgacaagatccacctggcctatgaaagaggagccagcggggctgtgatcttcaacttccctggcaccagaaatgaagtcatccccatgagccaccctggagctgtggacatcgtggccatcatgattggcaacctgaagggcaccaagatcctgcagagcatccagaggggcatccaggtgaccatggtgattgaggtgggcaagaagcacggcccctgggtgaaccactacagcatcttctttgtgtctgtgtccttcttcatcatcacagctgccaccgtgggctacttcatcttctacagcgcccggcggctgagaaatgcccgggcccagagcaggaagcagaggcagctgaaggcagatgccaagaaggccatcggccgcctgcagctgcggaccctgaagcagggcgacaaggagatcggcccagatggagacagctgtgctgtgtgcatcgagctgtacaagcccaatgacctggtgcgcatcctgacctgcaaccacatcttccacaagacctgtgtggacccctggctgctggagcacaggacctgccccatgtgcaagtgtgacatcctgaaggccctgggcatcgaggtggatgtggaggatggctctgtgtccctgcaggtgcctgtgtccaatgagatcagcaacagcgccagcagccatgaggaggacaacagaagtgaaacagccagcagcggctacgcctctgtgcagggcacagatgagccccccctggaggagcacgtgcagagcaccaatgaaagcctgcagctggtgaaccacgaggccaacagcgtggccgtggatgtgatcccccacgtggacaaccccacctttgaagaagatgagacccccaaccaggagacagctgtgcgggagatcaagagctag

SEQ ID NO: 168430 - DNA, 1209 bp, synthetic construct
  misc_feature 1..1209: note = Description of Artificial Sequence: Synthetic coding sequence
  source 1..1209: mol_type = other DNA
atgaaccaggagaacagaagcagcttcttctggctgctggtgatcttcaccttcctgctgaagatcacagccagcttctccatgtctgcctacgtgacagtgacctactacaatgagaccagcaactacacagccatcgagacctgtgaatgtggggtgtatggcctggccagccctgtggccaatgccatgggcgtggtgggcatccccaagaacaacaactaccaggcctgtgaccacaacacagagttcagcaacaccaagaagccctggatcgccctgattgagcggggcaactgcaccttcagcgagaagatccagacagctggaagaagaaatgctgatgctgtggtgatctacaatgcccctgagactggaaaccagaccatccagatggccaactttggagctgtggacatcgtggccatcatgattggcaacctgaagggcaccaagatcctgcagagcatccagaggggcatccaggtgaccatggtgattgaggtgggcaagaagcacggcccctgggtgaaccactacagcatcttctttgtgtctgtgtccttcttcatcatcacagctgccaccgtgggctacttcatcttctacagcgcccggcggctgagaaatgcccgggcccagagcaggaagcagaggcagctgaaggcagatgccaagaaggccatcggccgcctgcagctgcggaccctgaagcagggcgacaaggagatcggcccagatggagacagctgtgctgtgtgcatcgagctgtacaagcccaatgacctggtgcgcatcctgacctgcaaccacatcttccacaagacctgtgtggacccctggctgctggagcacaggacctgccccatgtgcaagtgtgacatcctgaaggccctgggcatcgaggtggatgtggaggatggctctgtgtccctgcaggtgcctgtgtccaatgagatcagcaacagcgccagcagccatgaggaggacaacagaagtgaaacagccagcagcggctacgcctctgtgcagggcacagatgagccccccctggaggagcacgtgcagagcaccaatgaaagcctgcagctggtgaaccacgaggccaacagcgtggccgtggatgtgatcccccacgtggacaaccccacctttgaagaagatgagacccccaaccaggagacagctgtgcgggagatcaagagctag

SEQ ID NO: 168431 - DNA, 750 bp, synthetic construct
  misc_feature 1..750: note = Description of Artificial Sequence: Synthetic coding sequence
  source 1..750: mol_type = other DNA
atgtctgcctacgtgacagtgacctactacaatgagaccagcaactacacagccatcgagacctgtgaatgtggggtgtatggcctggccagccctgtggccaatgccatgggcgtggtgggcatccccaagaacaacaactaccaggcctgtgaccacaacacagagttcagcaacaccaagaagccctggatcgccctgattgaaagaggcaactgcaccttcagcgagaagatccagacagctggaagaagaaatgctgatgctgtggtgatctacaatgcccctgagaccggcaaccagaccatccagatggccaactttggagctgtggacatcgtggccatcatgattggcaacctgaagggcaccaagatcctgcagagcatccagaggggcatccaggtgaccatggtgattgaggtgggcaagaagcacggcccctgggtgaaccactacagcatcttctttgtgtctgtgtccttcttcatcatcacagctgccaccgtgggctacttcatcttctacagcgcccggcggctgagaaatgcccgggcccagagcaggaagcagaggcagctgaaggcagatgccaagaaggccatcggccgcctgcagctgcggaccctgaagcagggcgacaaggagattggaccagatggagacagctgtgctgtgtgcatcgagctgtacaagcccaatgacctggtgcgcatcctgacctgcaaccacatcttccacaagacctag

SEQ ID NO: 168432 - DNA, 633 bp, synthetic construct
  misc_feature 1..633: note = Description of Artificial Sequence: Synthetic coding sequence
  source 1..633: mol_type = other DNA
atggccggcctgggcctgggcagcgctgtgcctgtgtggctggccgaggatgacctgggctgcatcatctgccagggcctgctggactggccagccaccctgccctgtggccacagcttctgccgccactgcctggaggccctgtggggcgccagagatgcccggcgctgggcctgccccacctgccggcagggcgccgcccagcagccccacctgaggaagaacaccctgctgcaggacctggccgacaagtaccgccgggccgcccgggagatccaggccggcagtgaccctgcccactgcccctgccccggcagcagcagcctgagcagcgctgctgcccggccccggcggcggcctgagctgcagagggtggccgtggagaagagcatcacagaggtggcccaggagctgacagagctggtggagcacctggtggacatcgtgcgcagcctgcagaaccagaggcccctgtctgagagcggccctgacaatgagctgagcatcctgggcaaggaaaattcctggaagccccggctgccccctcatgcccactgcctgacccgggccaccctgcacagcggggagctgctgggcctgctgagcggccccagcatccagcccctgacctag

SEQ ID NO: 168433 - DNA, 1299 bp, synthetic construct
  misc_feature 1..1299: note = Description of Artificial Sequence: Synthetic coding sequence
  source 1..1299: mol_type = other DNA
atggccggcctgggcctgggcagcgctgtgcctgtgtggctggccgaggatgacctgggctgcatcatctgccagggcctgctggactggccagccaccctgccctgtggccacagcttctgccgccactgcctggaggccctgtggggcgccagagatgcccggcgctgggcctgccccacctgccggcagggcgccgcccagcagccccacctgaggaagaacaccctgctgcaggacctggccgacaagtaccgccgggccgcccgggagatccaggccggcagtgaccctgcccactgcccctgccccggcagcagcagcctgagcagcgctgctgcccggccccggcggcggcctgagctgcagagggtggccgtggagaagagcatcacagaggtggcccaggagctgacagagctggtggagcacctggtggacatcgtgcgcagcctgcagaaccagaggcccctgtctgagagcggccctgacaatgagctgagcatcctgggcaaggccttcagcagcggcgtggacctgtccatggccagccccaagctggtgaccagtgacacagctgctgggaagatccgggacatcctgcatgacctggaggagatccaggagaagctgcaggagagcgtgacctggaaggaggcccctgaggcccagatgcagggcgagctgctggaggcccccagcagcagcagctgccccctgcctgaccagagccacccagccctgcggcgggccagcagatttgcccagtgggccatccaccccaccttcaacctgaagagcctgagctgcagcctggaggtgtccaaggacagcaggacagtgacagtgagccaccggccccagccctaccgctggagctgtgagcgcttcagcaccagccaggtgctgtgcagccaggccctgagcagcggcaagcactactgggaggtggacaccaggaactgcagccactgggccgtgggcgtggcctcctgggagatgagccgggaccaggtgctgggccgcaccatggacagctgctgcgtggagtggaagggcaccagccagctgagcgcctggcacatggtgaaggagaccgtgctgggcagtgacaggcctggggtggtgggcatctggctgaacctggaggagggcaagctggccttctacagcgtggacaaccaggagaagctgctgtatgaatgtaccatcagcgccagcagccccctgtacccagccttctggctgtatggcctgcaccctggcaactacctgatcatcaagcaggtgaaggtgtag

SEQ ID NO: 168434 - DNA, 255 bp, synthetic construct
  misc_feature 1..255: note = Description of Artificial Sequence: Synthetic coding sequence
  source 1..255: mol_type = other DNA
tgaaaggaggcccctgaggcccagatgcagggcagcctgctgccccggctggagtgcagcggcaccatcacagctgccagcatcagccaggcccaggagaacagctggaagccccggctgccccctcatgcccactgcctgacccgggccaccctgcacagcggggagctgctgggcctgctgtctgtgcccccaagaggagagctgattgccaaggccaagcaggtggagaccctggacccccgggccctgtag

SEQ ID NO: 168435 - DNA, 291 bp, synthetic construct
  misc_feature 1..291: note = Description of Artificial Sequence: Synthetic coding sequence
  source 1..291: mol_type = other DNA
gcccagcagccccacctgaggaagaacaccctgctgcaggacctggccgacaagtaccgccgggccgcccgggagatccaggccggcagtgaccctgcccactgcccctgccccggcagcagcagcctgagcagcgctgctgcccggccccggcggcggcctgagctgcagagagaaaattcctggaagccccggctgccccctcatgcccactgcctgacccgggccaccctgcacagcggggagctgctgggcctgctgagcggccccagcatccagcccctgacctag

SEQ ID NO: 168436 - DNA, 861 bp, synthetic construct
  misc_feature 1..861: note = Description of Artificial Sequence: Synthetic coding sequence
  source 1..861: mol_type = other DNA
atggccggcctgggcctgggcagcgctgtgcctgtgtggctggccgaggatgacctgggctgcatcatctgccagggcctgctggactggccagccaccctgccctgtggccacagcttctgccgccactgcctggaggccctgtggggcgccagagatgcccggcgctgggcctgccccacctgccggcagggcgccgcccagcagccccacctgaggaagaacaccctgctgcaggacctggccgacaagtaccgccgggccgcccgggagatccaggccggcagtgaccctgcccactgcccctgccccggcagcagcagcctgagcagcgctgctgcccggccccggcggcggcctgagctgcagagggtggccgtggagaagagcatcacagaggtggcccaggagctgacagagctggtggagcacctggtggacatcgtgcgcagcctgcagaaccagaggcccctgtctgagagcggccctgacaatgagctgagcatcctgggcaaggccttcagcagcggcgtggacctgtccatggccagccccaagctggtgaccagtgacacagctgctgggaagatccgggacatcctgcatgacctggaggagatccaggagaagctgcaggagagcgtgacctggaaggaggcccctgaggcccagatgcagggcagcctgctgccccggctggagtgcagcggcaccatcacagctgccagcatcagccaggcccaggagaacagctggaagccccggctgccccctcatgcccactgcctgacccgggccaccctgcacagcggggagctgctgggcctgctgagcggccccagcatccagcccctgacctag

SEQ ID NO: 168437 - DNA, 756 bp, synthetic construct
  misc_feature 1..756: note = Description of Artificial Sequence: Synthetic coding sequence
  source 1..756: mol_type = other DNA
atggccagccccaagctggtgaccagtgacacagctgctgggaagatccgggacatcctgcatgacctggaggagatccaggagaagctgcaggagagcgtgacctggaaggaggcccctgaggcccagatgcagggcgagctgctggaggcccccagcagcagcagctgccccctgcctgaccagagccacccagccctgcggcgggccagcagatttgcccagtgggccatccaccccaccttcaacctgaagagcctgagctgcagcctggaggtgtccaaggacagcaggacagtgacagtgagccaccggccccagccctaccgctggagctgtgagcgcttcagcaccagccaggtgctgtgcagccaggccctgagcagcggcaagcactactgggaggtggacaccaggaactgcagccactgggccgtgggcgtggcctcctgggagatgagccgggaccaggtgctgggccgcaccatggacagctgctgcgtggagtggaagggcaccagccagctgagcgcctggcacatggtgaaggagaccgtgctgggcagtgacaggcctggggtggtgggcatctggctgaacctggaggagggcaagctggccttctacagcgtggacaaccaggagaagctgctgtatgagtgcaccatcagcgccagcagccccctgtacccagccttctggctgtatggcctgcaccctggcaactacctgatcatcaagcaggtgaaggtgtag

SEQ ID NO: 168438 - DNA, 1995 bp, synthetic construct
  misc_feature 1..1995: note = Description of Artificial Sequence: Synthetic coding sequence
  source 1..1995: mol_type = other DNA
atggctgctgtgggccccccccagcagcaggtgaggatggcccaccagcaggtgtgggccgccctggaggtggccctgcgggtgccctgcctgtacatcattgatgccatcttcaacagctacccagacagcagccagagccgcttctgcatcgtgctgcagatcttcctgcggctgtttggagtgtttgccagcagcatcgtgctgatcctgagccagaggagcctcttcaagttctacacctacagcagcgccttcctgctggccgccacctctgtgctggtgaactactatgccagcctgcacatcgacttctacggggcctacaacaccagcgccttcggcatcgagctgctgcccaggaagggccccagcctgtggatggccctgattgtgctgcagctgacctttggaattggctacgtgaccctgctgcagatccacagcatctacagccagctgatcatcctggacctgctggtgcctgtgattggcctcatcacagagctgcccctgcacatccgggagaccctgctcttcaccagcagcctcatcctgaccctgaacacagtgtttgtgctggccgtgaagctgaagtggttctactacagcaccaggtatgtgtacctgctggtgcgccacatgtaccgcatctacggcctgcagctgctgatggaggacacctggaagaggatccgcttcccagacatcctgcgggtcttctggctgaccagggtgacagcccaggccaccgtgctgatgtacatcctgaggatggccaatgaaacagacagcttcttcatctcctgggatgacttctgggacctgatctgcaacctgatcatcagcggctgtgacagcaccctgactgtgctgggcatgtctgctgtgatcagctctgtggcccactacctgggcctgggcatcctggccttcatcggcagcacagaggaggatgaccggcggctgggctttgtggcccctgtgctcttcttcatcctggccctgcagacaggcctgagcggcctgcggcctgaggagcggctcatccggctgagcaggaacatgtgcctgctgctgacagctgtgctgcacttcatccacggcatgacagatcctgtgctgatgagcctgagcgccagccacgtgtcctccttcagaagacacttccctgtgctgtttgtgtctgcctgcctcttcatcctgcctgtgctgctgtcctatgtgctgtggcaccactacgccctgaacacctggctgtttgctgtgacagccttctgtgtggagctgtgcctgaaggtgattgtgtccctgactgtgtacaccctcttcatgattgatggctactacaacgtgctgtgggagaagctggatgattatgtgtactacgtgcgcagcacaggcagcatcatcgagttcatctttggagtggtgatgtttggaaatggagcctacaccatgatgtttgaaagtggcagcaagatccgggccttcatgatgtgcctgcacgcctacttcaacatctacctgcaggccaagaatggctggaagaccttcatgaacagaagaacagctgtgaagaagatcaacagcctgcctgagatcaagggcagccggctgcaggagatcaatgatgtgtgtgccatctgctaccacgagttcaccaccagcgcccgcatcaccccctgcaaccactacttccacgccctgtgcctgaggaagtggctgtacatccaggacacctgccccatgtgccaccagaaggtgtacattgaagatgacatcaaggacaacagcaatgtgagcaacaacaacggcttcatccccccaaatgagaccccagaggaggccgtgcgggaggccgctgctgagagtgaccgggagctgaatgaagatgacagcacagactgtgatgatgatgtgcagcgggagagaaatggagtcatccagcacactggagctgctgctgaggagttcaatgatgacacagactag

SEQ ID NO: 168439 - DNA, 1425 bp, synthetic construct
  misc_feature 1..1425: note = Description of Artificial Sequence: Synthetic coding sequence
  source 1..1425: mol_type = other DNA
atgagcagcgaggaccgggaggcccaggaggatgagctgctggccctggccagcatctatgatggagatgagttcaggaaggccgagagcgtgcagggcggggagacccgcatctacctggacctgccccagaacttcaagatctttgtgtctggcaacagcaatgaatgtctgcagaacagcggctttgagtacaccatctgcttcctgccccccctggtgctgaactttgagctgcccccagactaccccagcagcagcccccccagcttcaccctgagcggcaagtggctgagccccacccagctgagcgccctgtgcaagcacctggacaacctgtgggaggagcaccggggctctgtggtgctgtttgcctggatgcagttcctgaaggaggagaccctggcctacctgaacatcgtgagcccctttgagctgaagattggcagccagaagaaggtgcagaggagaacagcccaggccagccccaacacagagctggactttggaggagctgctggcagtgatgtggaccaggaggagatcgtggatgaaagagctgtgcaggatgtggagagcctgagcaacctgatccaggagatcctggactttgaccaggcccagcagatcaagtgcttcaacagcaagctgttcctgtgcagcatctgcttctgtgagaagctgggcagcgagtgcatgtacttcctggagtgccgccacgtgtactgcaaggcctgcctgaaggactactttgagatccagatcagagatggccaggtgcagtgcctgaactgcccagagcccaagtgccccagcgtggccaccccaggccaggtgaaggagctggtggaggccgagctgtttgcccgctatgaccggctgctgctgcagagcagcctggacctgatggctgatgtggtgtactgcccccggccctgctgccagctgcctgtgatgcaggagcccggctgcaccatgggcatctgcagcagctgcaactttgccttctgcaccctgtgccgcctgacctaccatggagtgagcccctgcaaggtgacagctgagaagctgatggacctgagaaatgagtacctgcaggctgatgaggccaacaagaggctgctggaccagagatatggcaagagggtcatccagaaggccctggaggagatggagagcaaggagtggctggagaagaacagcaagagctgcccctgctgcggcacccccatcgagaagctggatggctgcaacaagatgacctgcaccggctgcatgcagtacttctgctggatctgcatgggcagcctgagccgggccaacccctacaagcacttcaatgaccccggcagcccctgcttcaacagactcttctatgctgtggatgtggatgatgacatctgggaggatgaggtggaggactag

SEQ ID NO: 168440 - DNA, 1425 bp, synthetic construct; identical to SEQ ID NO: 168439
  misc_feature 1..1425: note = Description of Artificial Sequence: Synthetic coding sequence
  source 1..1425: mol_type = other DNA

SEQ ID NO: 168441 - DNA, 1047 bp, synthetic construct
  misc_feature 1..1047: note = Description of Artificial Sequence: Synthetic coding sequence
  source 1..1047: mol_type = other DNA
atgcagttcctgaaggaggagaccctggcctacctgaacatcgtgagcccctttgagctgaagattggcagccagaagaaggtgcagaggagaacagcccaggccagccccaacacagagctggactttggaggagctgctggcagtgatgtggaccaggaggagatcgtggatgaaagagctgtgcaggatgtggagagcctgagcaacctgatccaggagatcctggactttgaccaggcccagcagatcaagtgcttcaacagcaagctgttcctgtgcagcatctgcttctgtgagaagctgggcagcgagtgcatgtacttcctggagtgccgccacgtgtactgcaaggcctgcctgaaggactactttgagatccagatcagagatggccaggtgcagtgcctgaactgcccagagcccaagtgccccagcgtggccaccccaggccaggtgaaggagctggtggaggccgagctgtttgcccgctatgaccggctgctgctgcagagcagcctggacctgatggctgatgtggtgtactgcccccggccctgctgccagctgcctgtgatgcaggagcccggctgcaccatgggcatctgcagcagctgcaactttgccttctgcaccctgtgccgcctgacctaccatggagtgagcccctgcaaggtgacagctgagaagctgatggacctgagaaatgagtacctgcaggctgatgaggccaacaagaggctgctggaccagagatatggcaagagggtcatccagaaggccctggaggagatggagagcaaggagtggctggagaagaacagcaagagctgcccctgctgcggcacccccatcgagaagctggatggctgcaacaagatgacctgcaccggctgcatgcagtacttctgctggatctgcatgggcagcctgagccgggccaacccctacaagcacttcaatgaccccggcagcccctgcttcaacagactcttctatgctgtggatgtggatgatgacatctgggaggatgaggtggaggactag

SEQ ID NO: 168442 - DNA, 897 bp, synthetic construct
  misc_feature 1..897: note = Description of Artificial Sequence: Synthetic coding sequence
  source 1..897: mol_type = other DNA
atgagcagcgaggaccgggaggcccaggaggatgagctgctggccctggccagcatctatgatggagatgagttcaggaaggccgagagcgtgcagggcggggagacccgcatctacctggacctgccccagaacttcaagatctttgtgtctggcaacagcaatgaatgtctgcagaacagcggctttgagtacaccatctgcttcctgccccccctggtgctgaactttgagctgcccccagactaccccagcagcagcccccccagcttcaccctgagcggcaagtggctgagccccacccaggtgaaggagctggtggaggccgagctgtttgcccgctatgaccggctgctgctgcagagcagcctggacctgatggctgatgtggtgtactgcccccggccctgctgccagctgcctgtgatgcaggagcccggctgcaccatgggcatctgcagcagctgcaactttgccttctgcaccctgtgccgcctgacctaccatggagtgagcccctgcaaggtgacagctgagaagctgatggacctgagaaatgagtacctgcaggctgatgaggccaacaagaggctgctggaccagagatatggcaagagggtcatccagaaggccctggaggagatggagagcaaggagtggctggagaagaacagcaagagctgcccctgctgcggcacccccatcgagaagctggatggctgcaacaagatgacctgcaccggctgcatgcagtacttctgctggatctgcatgggcagcctgagccgggccaacccctacaagcacttcaatgaccccggcagcccctgcttcaacagactcttctatgctgtggatgtggatgatgacatctgggaggatgaggtggaggactag

SEQ ID NO: 168443 - DNA, 1425 bp, synthetic construct; identical to SEQ ID NO: 168439
  misc_feature 1..1425: note = Description of Artificial Sequence: Synthetic coding sequence
  source 1..1425: mol_type = other DNA

SEQ ID NO: 168444 - DNA, 1425 bp, synthetic construct; identical to SEQ ID NO: 168439
  misc_feature 1..1425: note = Description of Artificial Sequence: Synthetic coding sequence
  source 1..1425: mol_type = other DNA

SEQ ID NO: 168445 - DNA, 48 bp, synthetic construct
  misc_feature 1..48: note = Description of Artificial Sequence: Synthetic coding sequence
  source 1..48: mol_type = other DNA
atgagcagcgaggaccgggaggcccaggaggatgagctgctggcctag

SEQ ID NO: 168446 - DNA, 399 bp, synthetic construct
  misc_feature 1..399: note = Description of Artificial Sequence: Synthetic coding sequence
  source 1..399: mol_type = other DNA
atgagcagcgaggaccgggaggcccaggaggatgagctgctggccctggccagcatctatgatggagatgagttcaggaaggccgagagcgtgcagggcggggagacccgcatctacctggacctgccccagaacttcaagatctttgtgtctggcaacagcaatgaatgtctgcagaacagcggctttgagtacaccatctgcttcctgccccccctggtgctgaactttgagctgcccccagactaccccagcagcagcccccccagcttcaccctgagcggcaagtggctgagccccacccagctgagcgccctgtgcaagcacctggacaacctgtgggaggagcaccggggctctgtggtgctgtttgcctggatgcagttcctgaaggagtag

SEQ ID NO: 168447 - DNA, 516 bp, synthetic construct
  misc_feature 1..516: note = Description of Artificial Sequence: Synthetic coding sequence
  source 1..516: mol_type = other DNA
atgagcagcgaggaccgggaggcccaggaggatgagctgctggccctggccagcatctatgatggagatgagttcaggaaggccgagagcgtgcagggcggggagacccgcatctacctggacctgccccagaacttcaagatctttgtgtctggcaacagcaatgaatgtctgcagaacagcggctttgagtacaccatctgcttcctgccccccctggtgctgaactttgagctgcccccagactaccccagcagcagcccccccagcttcaccctgagcggcaagtggctgagccccacccagctgagcgccctgtgcaagcacctggacaacctgtgggaggagcaccggggctctgtggtgctgtttgcctggatgcagttcctgaaggaggagaccctggcctacctgaacatcgtgagcccctttgagctgaagattggcagccagaagaaggtgcagaggagaacagcccaggccagccccaacacagagctggactttggaggatag

SEQ ID NO: 168448 - DNA, 558 bp, synthetic construct
  misc_feature 1..558: note = Description of Artificial Sequence: Synthetic coding sequence
  source 1..558: mol_type = other DNA
atgagcagcgaggaccgggaggcccaggaggatgagctgctggccctggccagcatctatgatggagatgagttcaggaaggccgagagcgtgcagggcggggagacccgcatctacctggacctgccccagaacttcaagatctttgtgtctggcaacagcaatgaatgtctgcagaacagcggctttgagtacaccatctgcttcctgccccccctggtgctgaactttgagctgcccccagactaccccagcagcagcccccccagcttcaccctgagcggcaagtggctgagccccacccagctgagcgccctgtgcaagcacctggacaacctgtgggaggagcaccggggctctgtggtgctgtttgcctggatgcagttcctgaaggaggagaccctggcctacctgaacatcgtgagcccctttgagctgaagattggcagccagaagaaggtgcagaggagaacagcccaggccagccccaacacagagctggactttggaggagctgctggcagtgatgtggaccaggaggagatcgtggatgaatag

SEQ ID NO: 168449 - DNA, 186 bp, synthetic construct
  misc_feature 1..186: note = Description of Artificial Sequence: Synthetic coding sequence
  source 1..186: mol_type = other DNA
atgagcagcgaggaccgggaggcccaggaggatgagctgctggccctggccagcatctatgatggagatgagttcaggaaggccgagagcgtgcagggcggggagacccgcatctacctggacctgccccagaacttcaagatctttgtgtctggcaacagcaatgaatgtctgcagaacagctag

SEQ ID NO: 168450 - DNA, 837 bp, synthetic construct
  misc_feature 1..837: note = Description of Artificial Sequence: Synthetic coding sequence
  source 1..837: mol_type = other DNA
atgagcagcgaggaccgggaggcccaggaggatgagctgctggccctggccagcatctatgatggagatgagttcaggaaggccgagagcgtgcagggcggggagacccgcatctacctggacctgccccagaacttcaagatctttgtgtctggcaacagcaatgaatgtctgcagaacagcggctttgagtacaccatctgcttcctgccccccctggtgctgaactttgagctgcccccagactaccccagcagcagcccccccagcttcaccctgagcggcaagtggctgagccccacccagctgagcgccctgtgcaagcacctggacaacctgtgggaggagcaccggggctctgtggtgctgtttgcctggatgcagttcctgaaggaggagaccctggcctacctgaacatcgtgagcccctttgagctgaagattggcagccagaagaaggtgcagaggagaacagcccaggccagccccaacacagagctggactttggaggagctgctggcagtgatgtggaccaggaggagatcgtggatgaaagagctgtgcaggatgtggagagcctgagcaacctgatccaggagatcctggactttgaccaggcccagcagatcaagtgcttcaacagcaagctgttcctgtgcagcatctgcttctgtgagaagctgggcagcgagtgcatgtacttcctggagtgccgccacgtgtactgcaaggcctgcctgaaggactactttgagatccagatcagagatggccaggtgcagtgcctgaactgcccagagcccaagtgccccagcgtggccaccccaggccagtag

SEQ ID NO: 168451 - DNA, 300 bp, synthetic construct
  misc_feature 1..300: note = Description of Artificial Sequence: Synthetic coding sequence
  source 1..300: mol_type = other DNA
atgagcagcgaggaccgggaggcccaggaggatgagctgctggccctggccagcatctatgatggagatgagttcaggaaggccgagagcgtgcagggcggggagacccgcatctacctggacctgccccagaacttcaagatctttgtgtctggcaacagcaatgaatgtctgcagaacagcggctttgagtacaccatctgcttcctgccccccctggtgctgaactttgagctgcccccagactaccccagcagcagcccccccagcttcaccctgagcggcaagtggctgtcctag

SEQ ID NO: 168452 - DNA, 516 bp, synthetic construct
  misc_feature 1..516: note = Description of Artificial Sequence: Synthetic coding sequence
  source 1..516: mol_type = other DNA
atgagcagcgaggaccgggaggcccaggaggatgagctgctggccctggccagcatctatgatggagatgagttcaggaaggccgagagcgtgcagggcggggagacccgcatctacctggacctgccccagaacttcaagatctttgtgtctgagaagctgatggacctgagaaatgagtacctgcaggctgatgaggccaacaagaggctgctggaccagagatatggcaagagggtcatccagaaggccctggaggagatggagagcaaggagtggctggagaagaacagcaagagctgcccctgctgcggcacccccatcgagaagctggatggctgcaacaagatgacctgcaccggctgcatgcagtacttctgctggatctgcatgggcagcctgagccgggccaacccctacaagcacttcaatgaccccggcagcccctgcttcaacagactcttctatgctgtggatgtggatgatgacatctgggaggatgaggtggaggactag

SEQ ID NO: 168453 - DNA, 1077 bp, synthetic construct
  misc_feature 1..1077: note = Description of Artificial Sequence: Synthetic coding sequence
  source 1..1077: mol_type = other DNA
atggccggctgtggggagattgaccacagcatcaacatgctgcccaccaacaggaaggccaatgaaagctgcagcaacacagcccccagcctgactgtgcctgaatgtgccatctgcctgcagacctgtgtgcaccctgtgtccctgccctgcaagcacgtgttctgctacctgtgtgtgaagggggcctcctggctgggcaagagatgtgccctgtgccggcaggagatccctgaggacttcctggacaagcccaccctgctgagccctgaggagctgaaggccgccagcagaggaaatggagaatatgcctggtactatgagggcagaaatggctggtggcagtatgatgagaggaccagccgggagctggaggatgccttcagcaagggcaagaagaacacagagatgctgattgctggcttcctgtatgtggccgacctggagaacatggtgcagtacagaagaaatgaacatggaagaagaaggaagatcaagagggacatcatcgacatccccaagaagggcgtggccggcctgcggctggactgtgatgccaacacagtgaacctggcccgggagagcagcgcagatggagctgacagcgtgtctgcccagagcggggcctctgtgcagcccctggtgtcctctgtgcggcccctgacctctgtggatggccagctgaccagccctgccacccccagcccagatgccagcaccagcctggaggacagctttgcccacctgcagctgagcggggacaacacagctgagaggagccacagaggagagggggaggaggaccacgagagccccagcagcggccgggtgcctgccccagacaccagcattgaggagacagaaagtgatgccagcagtgacagtgaagatgtgtctgctgtggtggcccagcacagcctgacccagcagaggctgctggtgtccaatgccaaccagacagtgcctgacagaagtgacaggagcggcacagacagatctgtggccggcggcggcaccgtgtctgtgtctgtgcgcagcagaagaccagatggccagtgcaccgtgacagaggtgtag

SEQ ID NO: 168454 - DNA, 1077 bp, synthetic construct; identical to SEQ ID NO: 168453
  misc_feature 1..1077: note = Description of Artificial Sequence: Synthetic coding sequence
  source 1..1077: mol_type = other DNA

SEQ ID NO: 168455 - DNA, 1080 bp, synthetic construct
  misc_feature 1..1080: note = Description of Artificial Sequence: Synthetic coding sequence
  source 1..1080: mol_type = other DNA
atgatggccggctgtggggagattgaccacagcatcaacatgctgcccaccaacaggaaggccaatgaaagctgcagcaacacagcccccagcctgactgtgcctgaatgtgccatctgcctgcagacctgtgtgcaccctgtgtccctgccctgcaagcacgtgttctgctacctgtgtgtgaagggggcctcctggctgggcaagagatgtgccctgtgccggcaggagatccctgaggacttcctggacaagcccaccctgctgagccctgaggagctgaaggccgccagcagaggaaatggagaatatgcctggtactatgagggcagaaatggctggtggcagtatgatgagaggaccagccgggagctggaggatgccttcagcaagggcaagaagaacacagagatgctgattgctggcttcctgtatgtggccgacctggagaacatggtgcagtacagaagaaatgagcacggcagaagaaggaagatcaagagggacatcatcgacatccccaagaagggcgtggccggcctgcggctggactgtgatgccaacacagtgaacctggcccgggagagcagcgcagatggagctgacagcgtgtctgcccagagcggggcctctgtgcagcccctggtgtcctctgtgcggcccctgacctctgtggatggccagctgaccagccctgccacccccagcccagatgccagcaccagcctggaggacagctttgcccacctgcagctgagcggggacaacacagctgagaggagccacagaggagagggggaggaggaccacgagagccccagcagcggccgggtgcctgccccagacaccagcattgaggagacagaaagtgatgccagcagtgacagtgaagatgtgtctgctgtggtggcccagcacagcctgacccagcagaggctgctggtgtccaatgccaaccagacagtgcctgacagaagtgacagaagtggcacagacagatctgtggccggcggcggcaccgtgtctgtgtctgtgcgcagccggcggccagatggccagtgcaccgtgacagaggtgtag

SEQ ID NO: 168456 - DNA, 1716 bp, synthetic construct
  misc_feature 1..1716: note = Description of Artificial Sequence: Synthetic coding sequence
  source 1..1716: mol_type = other DNA
atggccctgcccaaggatgccatccccagcctgtctgagtgccagtgtggcatctgcatggagatcctggtggagcctgtgaccctgccctgcaaccacaccctgtgcaagccctgcttccagagcacagtggagaaggccagcctgtgctgccccttctgcagaagaagagtgtcctcctggacccgctaccacaccaggaggaacagcctggtgaatgtggagctgtggaccatcatccagaagcactacccccgggagtgcaagctgcgggccagcggccaggagagcgaggaggtggctgatgactaccagcctgtgcggctgctgagcaagccaggagagctgcggcgggagtatgaggaggagatcagcaaggtggccgctgagcggcgggccagcgaggaggaggagaacaaggccagcgaggagtacatccagaggctgctggccgaggaggaggaggaggagaagaggcaggccgagaagagaagaagagccatggaggagcagctgaagagtgatgaggagctggccaggaagctgagcattgacatcaacaacttctgtgagggcagcatcagcgccagccccctgaacagcaggaagagtgaccctgtgacccccaagtctgagaagaagagcaagaacaagcagaggaacacaggagacatccagaagtacctgacccccaagagccagtttggaagtgccagccacagcgaggccgtgcaggaggtgaggaaggacagcgtgtccaaggacatcgacagcagtgacaggaagagccccaccggccaggacacagaaattgaggacatgcccaccctgagcccccagatcagcctgggcgtgggggagcagggcgctgacagcagcattgagagccccatgccctggctgtgtgcctgtggggctgagtggtaccacgagggcaatgtgaagacccggcccagcaaccacggcaaggagctgtgtgtgctgagccatgagcggcccaagaccagggtgccctacagcaaggagacagctgtgatgccctgtggccgcacagaaagtggctgtgcccccaccagcggcgtgacccagaccaatggaaacaacacaggagaaacagaaaatgaggagagctgcctgctgatcagcaaggagatcagcaagaggaagaaccaggagagcagctttgaagctgtgaaggacccctgcttcagcgccaagaggaggaaggtgtccccagagagcagcccagaccaggaggagacagagatcaacttcacccagaagctgattgacctggagcacctgctgtttgagcggcacaagcaggaggagcaggaccggctgctggccctgcagctgcagaaggaggtggacaaggagcagatggtgcccaaccggcagaagggcagcccagatgagtaccacctgcgggccaccagcagccccccagacaaggtgctgaatggccagaggaagaaccccaaggatggcaacttcaagaggcagacccacaccaagcaccccaccccagagcggggcagccgggacaagaaccggcaggtgtccctgaagatgcagctgaagcagagcgtgaacagaaggaagatgcccaacagcacccgggaccactgcaaggtgtccaagagcgcccacagcctgcagcccagcatcagccagaagtctgtgttccagatgttccagcgctgcaccaagtag

SEQ ID NO: 168457 - DNA, 1716 bp, synthetic construct; identical to SEQ ID NO: 168456
  misc_feature 1..1716: note = Description of Artificial Sequence: Synthetic coding sequence
  source 1..1716: mol_type = other DNA

SEQ ID NO: 168458 - DNA, 4872 bp, synthetic construct
  misc_feature 1..4872: note = Description of Artificial Sequence: Synthetic coding sequence
  source 1..4872: mol_type = other DNA
atggctgctgaggccagcaagacaggccccagccgcagcagctaccagaggatgggcaggaagagccagccctggggcgctgctgagatccagtgcacccgctgtggcagaagagtgagccgcagcagcggccaccactgtgagctgcagtgtggccacgccttctgtgagctgtgcctgctgatgacagaagaatgtaccaccatcatctgcccagactgtgaggtggccacagctgtgaacacccggcagcgctactaccccatggccggctacatcaaggaggacagcatcatggagaagctgcagcccaagaccatcaagaactgcagccaggacttcaagaagacagctgaccagctgaccaccggcctggagaggtctgccagcacagacaagaccctgctgaacagcagcgctgtgatgctggacaccaacacagctgaggagattgatgaggccctgaacacagcccaccacagctttgagcagctgagcattgctgggaaggccctggagcacatgcagaagcagaccatcgaggagcgggagcgggtgattgaggtggtggagaagcagtttgaccagctgctggccttctttgacagcaggaagaagaacctgtgtgaggagtttgcccggaccacagatgactacctgagcaacctgatcaaggccaagagctacatcgaggagaagaagaacaacctgaatgctgccatgaacatcgcccgggccctgcagctgagccccagcctgcggacctactgtgacctgaaccagatcatccgcaccctgcagctgaccagtgacagcgagctggcccaggtgagcagcccccagctgagaaatccaccccggctgtctgtgaactgcagcgagatcatctgcatgttcaacaacatgggcaagattgagttccgggacagcaccaagtgctacccccaggagaatgagatccggcagaatgtgcagaagaagtacaacaacaagaaggagctgagctgctatgacacctacccacccctggagaagaagaaggtggacatgtctgtgctgaccagcgaggcccctcctccacccctgcagcctgagaccaatgatgtgcacctggaggccaagaacttccagccccagaaggatgtggccacagccagccccaagaccatcgctgtgctgccccagatgggcagcagcccagatgtgatcatcgaggagatcattgaagataatgtggagagcagcgctgagctggtgtttgtgagccacgtgattgacccctgccacttctacatcaggaagtacagccagatcaaggatgccaaggtgctggagaagaaggtgaatgagttctgcaacagaagcagccacctggaccccagcgacatcctggagctgggcgcccgcatctttgtgagcagcatcaagaatggcatgtggtgccggggcaccatcacagagctgatccccatcgagggcaggaacaccaggaagccctgcagccccacccggctgtttgtgcatgaggtggccctgatccagatcttcatggtggactttggaaattctgaggtgctgattgtgactggagtggtggacacccacgtgcggcctgagcacagcgccaagcagcacatcgccctgaatgacctgtgcctggtgctgaggaagtctgagccctacacagagggcctgctgaaggacatccagcccctggcccagccctgcagcctgaaggacatcgtgccccagaacagcaatgaaggctgggaggaggaggccaaggtggagttcctgaagatggtgaacaacaaggctgtgtccatgaaggtgttccgggaggaggatggagtgctgattgtggacctgcagaagcccccacccaacaagatcagcagtgacatgcctgtgtccctgagagatgccctggtgttcatggagctggccaagttcaagagccagagcctgcggagccactttgagaagaacaccaccctgcactaccacccccccatcctgcccaaggagatgacagatgtgtctgtgacagtgtgccacatcaacagccctggggacttctacctgcagctgattgagggcctggacatcctcttcctgctgaagaccatcgaggagttctacaagtcagaagatggagagaacctggagatcctgtgccctgtgcaggaccaggcctgtgtggccaagtttgaagatggcatctggtaccgggccaaggtgattggcctgcccggccaccaggaggtggaggtgaagtatgtggactttggaaacacagccaagatcaccatcaaggatgtgaggaagatcaaggatgagttcctgaatgcccctgagaaggccatcaagtgcaagctggcctacatcgagccctacaagaggaccatgcagtggagcaaggaggccaaggagaagtttgaggagaaggcccaggacaagttcatgacctgcagcgtcatcaagatcctggaggacaacgtgctgctggtggagctgtttgacagcctgggcgcccctgagatgaccaccaccagcatcaatgaccagctggtgaaggagggcctggccagctatgaaattggctacatcctgaaggacaacagccagaagcacatcgaggtgtgggaccccagccctgaggagatcatcagcaatgaggtgcacaacctgaaccctgtgtctgccaagagcctgcccaatgaaaacttccagagcctgtacaacaaggagctgcctgtgcacatctgcaacgtcatcagccctgagaagatctacgtgcagtggctgctgacagagaacctgctgaacagcctggaggagaagatgattgctgcctatgagaacagcaagtgggagcctgtgaagtgggagaatgacatgcactgtgctgtgaagatccaggacaagaaccagtggaggcggggccagatcatccgcatggtgacagacaccctggtggaggtgctgctgtatgatgtgggcgtggagctggtggtgaatgtggactgcctgaggaagctggaggagaacctgaagaccatgggccgcctgagcctggagtgcagcctggtggacatccggcctgctgggggcagtgacaagtggacagccacagcctgtgactgcctgagcctgtacctgactggagctgtggccaccatcatcctgcaggtggacagcgaggagaacaacaccacctggcccctgcctgtgaagatcttctgcagagatgagaagggggagcgggtggatgtgtccaagtacctgatcaagaagggcctggccctgcgggagcggcgcatcaacaacctggacaacagccacagcctgtctgagaagagcctggaggtgcccctggagcaggaggacagcgtggtgaccaactgcatcaagaccaactttgatcctgacaagaagacagctgacatcatcagcgagcagaaggtgtctgagttccaggagaagatcctggagcccaggaccacccggggctacaagcccccagccatccccaacatgaatgtgtttgaggccaccgtgtcctgtgtgggagatgatggcaccatctttgtggtgcccaagctgtctgaatttgagctgatcaagatgaccaatgagatccagagcaacctgaagtgcctgggcctgctggagccctacttctggaagaagggggaggcctgtgctgtgcggggcagtgacaccctgtggtaccggggcaaggtgatggaggtggtgggcggcgctgtgcgggtgcagtacctggaccacggcttcacagagaagatcccccagtgccacctgtaccccatcctgctgtacccagacatcccccagttctgcatcccctgccagctgcacaacaccacccctgtgggcaatgtgtggcagccagatgccatcgaggtgctgcagcagctgctgagcaagaggcaggtggacatccacatcatggagctgcccaagaacccctgggagaagctgagcatccacctgtactttgatggcatgagcctgagctacttcatggcctactacaagtactgcaccagcgagcacacagaggagatgctgaaggagaagcccaggagtgaccatgacaagaagtatgaggaggagcagtgggagatccgctttgaggagctgctgtctgctgagacagacacccccctgctgcccccctacctgagcagcagcctgcccagccctggagagctgtatgctgtgcaggtgaagcacgtggtgagccccaatgaggtgtacatctgcctggacagcattgagaccagcaaccagagcaaccagcacagcgacacagatgattctggagtgtctggagagagcgagagcgagagcctggatgaggccctgcagagggtgaacaagaaggtggaggccctgccccccctgacagacttcagaacagagatgccctgcctggccgagtatgatgatggcctgtggtaccgggccaagatcgtggccatcaaggagttcaaccccctgagcatcctggtgcagtttgtggactatggcagcacagccaagctgaccctgaaccggctgtgccagatccccagccacctgatgagatacccagcccgggccatcaaggtgctgctggccggcttcaagccacccctgcgggacctgggggagacccgcatcccctactgccccaagtggagcatggaggccctgtgggccatgattgactgcctgcagggcaagcagctgtatgctgtgtccatggccccagcccctgagcagatcgtgaccctgtatgatgatgagcagcaccctgtgcacatgcccctggtggagatgggcctggccgacaaggatgaatag

SEQ ID NO: 168459 - DNA, 1350 bp, synthetic construct
  misc_feature 1..1350: note = Description of Artificial Sequence: Synthetic coding sequence
  source 1..1350: mol_type = other DNA
atggctgctgaggccagcaagacaggccccagccgcagcagctaccagaggatgggcaggaagagccagccctggggcgctgctgagatccagtgcacccgctgtggcagaagagtgagccgcagcagcggccaccactgtgagctgcagtgtggccacgccttctgtgagctgtgcctgctgatgacagaagaatgtaccaccatcatctgcccagactgtgaggtggccacagctgtgaacacccggcagcgctactaccccatggccggctacatcaaggaggacagcatcatggagaagctgcagcccaagaccatcaagaactgcagccaggacttcaagaagacagctgaccagctgaccaccggcctggagaggtctgccagcacagacaagaccctgctgaacagcagcgctgtgatgctggacaccaacacagctgaggagattgatgaggccctgaacacagcccaccacagctttgagcagctgagcattgctgggaaggccctggagcacatgcagaagcagaccatcgaggagcgggagcgggtgattgaggtggtggagaagcagtttgaccagctgctggccttctttgacagcaggaagaagaacctgtgtgaggagtttgcccggaccacagatgactacctgagcaacctgatcaaggccaagagctacatcgaggagaagaagaacaacctgaatgctgccatgaacatcgcccgggccctgcagctgagccccagcctgcggacctactgtgacctgaaccagatcatccgcaccctgcagctgaccagtgacagcgagctggcccaggtgagcagcccccagctgagaaatccaccccggctgtctgtgaactgcagcgagatcatctgcatgttcaacaacatgggcaagattgagttccgggacagcaccaagtgctacccccaggagaatgagatccggcagaatgtgcagaagaagtacaacaacaagaaggagctgagctgctatgacacctacccacccctggagaagaagaaggtggacatgtctgtgctgaccagcgaggcccctcctccacccctgcagcctgagaccaatgatgtgcacctggaggccaagaacttccagccccagaaggatgtggccacagccagccccaagaccatcgctgtgctgccccagatgggcagcagcccagatgtgatcatcgaggagatcattgaagataatgtggagacctgtggcacagatgacctgggggagaccccccgctaccccaagaagcccctgcagaagaacagctctgtgcccttcggcagcaaggctgacacagtgaccaccgtgtag

SEQ ID NO: 168460 - DNA, 4746 bp, synthetic construct
  misc_feature 1..4746: note = Description of Artificial Sequence: Synthetic coding sequence
  source 1..4746: mol_type = other DNA
atggctgctgaggccagcaagacaggccccagccgcagcagctaccagaggatgggcaggaagagccagccctggggcgctgctgagatccagtgcacccgctgtggcagaagagtgagccgcagcagcggccaccactgtgagctgcagtgtggccacgccttctgtgagctgtgcctgctgatgacagaagaatgtaccaccatcatctgcccagactgtgaggtggccacagctgtgaacacccggcagcgctactaccccatggccggctacatcaaggaggacagcatcatggagaagctgcagcccaagaccatcaagaactgcagccaggacttcaagaagacagctgaccagctgaccaccggcctggagaggtctgccagcacagacaagaccctgctgaacagcagcgctgtgatgctggacaccaacacagctgaggagattgatgaggccctgaacacagcccaccacagctttgagcagctgagcattgctgggaaggccctggagcacatgcagaagcagaccatcgaggagcgggagcgggtgattgaggtggtggagaagcagtttgaccagctgctggccttctttgacagcaggaagaagaacctgtgtgaggagtttgcccggaccacagatgactacctgagcaacctgatcaaggccaagagctacatcgaggagaagaagaacaacctgaatgctgccatgaacatcgcccgggccctgcagctgagccccagcctgcggacctactgtgacctgaaccagatcatccgcaccctgcagctgaccagtgacagcgagctggcccaggtgagcagcccccagctgagaaatccaccccggctgtctgtgaactgcagcgagatcatctgcatgttcaacaacatgggcaagattgagttccgggacagcaccaagtgctacccccaggagaatgagatccggcagaatgtgcagaagaagtacaacaacaagaaggagctgagctgctatgacacctacccacccctggagaagaagaaggtggacatgtctgtgctgaccagcgaggcccctcctccacccctgcagcctgagaccaatgatgtgcacctggaggccaagaacttccagccccagaaggatgtggccacagccagccccaagaccatcgctgtgctgccccagatgggcagcagcccagatgtgatcatcgaggagatcattgaagataatgtggagagcagcgctgagctggtgtttgtgagccacgtgattgacccctgccacttctacatcaggaagtacagccagatcaaggatgccaaggtgctggagaagaaggtgaatgagttctgcaacagaagcagccacctggaccccagcgacatcctggagctgggcgcccgcatctttgtgagcagcatcaagaatggcatgtggtgccggggcaccatcacagagctgatccccatcgagggcaggaacaccaggaagccctgcagccccacccggctgtttgtgcatgaggtggccctgatccagatcttcatggtggactttggaaattctgaggtgctgattgtgactggagtggtggacacccacgtgcggcctgagcacagcgccaagcagcacatcgccctgaatgacctgtgcctggtgctgaggaagtctgagccctacacagagggcctgctgaaggacatccagcccctggcccagccctgcagcctgaaggacatcgtgccccagaacagcaatgaaggctgggaggaggaggccaaggtggagttcctgaagatggtgaacaacaaggctgtgtccatgaaggtgttccgggaggaggatggagtgctgattgtggacctgcagaagcccccacccaacaagatcagcagtgacatgcctgtgtccctgagagatgccctggtgttcatggagctggccaagttcaagagccagagcctgcggagccactttgagaagaacaccaccctgcactaccacccccccatcctgcccaaggagatgacagatgtgtctgtgacagtgtgccacatcaacagccctggggacttctacctgcagctgattgagggcctggacatcctcttcctgctgaagaccatcgaggagttctacaagtcagaagatggagagaacctggagatcctgtgccctgtgcaggaccaggcctgtgtggccaagtttgaagatggcatctggtaccgggccaaggtgattggcctgcccggccaccaggaggtggaggtgaagtatgtggactttggaaacacagccaagatcaccatcaaggatgtgaggaagatcaaggatgagttcctgaatgcccctgagaaggccatcaagtgcaagctggcctacatcgagccctacaagaggaccatgcagtggagcaaggaggccaaggagaagtttgaggagaaggcccaggacaagttcatgacctgcagcgtcatcaagatcctggaggacaacgtgctgctggtggagctgtttgacagcctgggcgcccctgagatgaccaccaccagcatcaatgaccagctggtgaaggagggcctggccagctatgaaattggctacatcctgaaggacaacagccagaagcacatcgaggtgtgggaccccagccctgaggagatcatcagcaatgaggtgcacaacctgaaccctgtgtctgccaagagcctgcccaatgaaaacttccagagcctgtacaacaaggagctgcctgtgcacatctgcaacgtcatcagccctgagaagatctacgtgcagtggctgctgacagagaacctgctgaacagcctggaggagaagatgattgctgcctatgagaacagcaagtgggagcctgtgaagtgggagaatgacatgcactgtgctgtgaagatccaggacaagaaccagtggaggcggggccagatcatccgcatggtgacagacaccctggtggaggtgctgctgtatgatgtgggcgtggagctggtggtgaatgtggactgcctgaggaagctggaggagaacctgaagaccatgggccgcctgagcctggagtgcagcctggtggacatccggcctgctgggggcagtgacaagtggacagccacagcctgtgactgcctgagcctgtacctgactggagctgtggccaccatcatcctgcaggtggacagcgaggagaacaacaccacctggcccctgcctgtgaagatcttctgcagagatgagaagggggagcgggtggatgtgtccaagtacctgatcaagaagggcctggccctgcgggagcggcgcatcaacaacctggacaacagccacagcctgtctgagaagagcctggaggtgcccctggagcaggaggacagcgtggtgaccaactgcatcaagaccaactttgatcctgacaagaagacagctgacatcatcagcgagcagaaggtgtctgagttccaggagaagatcctggagcccaggaccacccggggctacaagcccccagccatccccaacatgaatgtgtttgaggccaccgtgtcctgtgtgggagatgatggcaccatctttgtggtgcccaagctgtctgaatttgagctgatcaagatgaccaatgagatccagagcaacctgaagtgcctgggcctgctggagccctacttctggaagaagggggaggcctgtgctgtgcggggcagtgacaccctgtggtaccggggcaaggtgatggaggtggtgggcggcgctgtgcgggtgcagtacctggaccacggcttcacagagaagatcccccagtgccacctgtaccccatcctgctgtacccagacatcccccagttctgcatcccctgccagctgcacaacaccacccctgtgggcaatgtgtggcagccagatgccatcgaggtgctgcagcagctgctgagcaagaggcaggtggacatccacatcatgaagcccaggagtgaccatgacaagaagtatgaggaggagcagtgggagatccgctttgaggagctgctgtctgctgagacagacacccccctgctgcccccctacctgagcagcagcctgcccagccctggagagctgtatgctgtgcaggtgaagcacgtggtgagccccaatgaggtgtacatctgcctggacagcattgagaccagcaaccagagcaaccagcacagcgacacagatgattctggagtgtctggagagagcgagagcgagagcctggatgaggccctgcagagggtgaacaagaaggtggaggccctgccccccctgacagacttcagaacagagatgccctgcctggccgagtatgatgatggcctgtggtaccgggccaagatcgtggccatcaaggagttcaaccccctgagcatcctggtgcagtttgtggactatggcagcacagccaagctgaccctgaaccggctgtgccagatccccagccacctgatgagatacccagcccgggccatcaaggtgctgctggccggcttcaagccacccctgcgggacctgggggagacccgcatcccctactgccccaagtggagcatggaggccctgtgggccatgattgactgcctgcagggcaagcagctgtatgctgtgtccatggccccagcccctgagcagatcgtgaccctgtatgatgatgagcagcaccctgtgcacatgcccctggtggagatgggcctggccgacaaggatgaatag

SEQ ID NO: 168461 - DNA, 3207 bp, synthetic construct
  misc_feature 1..3207: note = Description of Artificial Sequence: Synthetic coding sequence
  source 1..3207: mol_type = other DNA
atgctggacaccaacacagctgaggagattgatgaggccctgaacacagcccaccacagctttgagcagctgagcattgctgggaaggccctggagcacatgcagaagcagaccatcgaggagcgggagagggtcatcgaggtggtggagaagcagtttgaccagctgctggccttctttgacagcaggaagaagaacctgtgtgaggagtttgcccggaccacagatgactacctgagcaacctgatcaaggccaagagctacatcgaggagaagaagaacaacctgaatgctgccatgaacatcgcccgggccctgcagctgagccccagcctgcggacctactgtgacctgaaccagatcatccgcaccctgcagctgaccagtgacagcgagctggcccaggtgagcagcccccagctgaggaaccccccccggctgtctgtgaactgcagcgagatcatctgcatgttcaacaacatgggcaagattgagttccgggacagcaccaagtgctacccccaggagaatgagatccggcagaatgtgcagaagaagtacaacaacaagaaggagctgagctgctatgacacctacccacccctggagaagaagaaggtggacatgtctgtgctgaccagcgaggcccctcctccacccctgcagcctgagaccaatgatgtgcacctggaggccaagaacttccagccccagaaggatgtggccacagccagccccaagaccatcgctgtgctgccccagatgggcagcagcccagatgtgatcatcgaggagatcatcgaggacaacgtggagagcagcgctgagctggtgtttgtgagccacgtgattgacccctgccacttctacatcaggaagtacagccagatcaaggatgccaaggtgctggagaagaaggtgaatgagttctgcaacagaagcagccacctggaccccagcgacatcctggagctgggcgcccgcatctttgtgagcagcatcaagaatggcatgtggtgccggggcaccatcacagagctgatccccatcgagggcaggaacaccaggaagccctgcagccccacccggctgtttgtgcatgaggtggccctgatccagatcttcatggtggactttggaaacagcgaggtgctgattgtgactggagtggtggacacccacgtgcggcctgagcacagcgccaagcagcacatcgccctgaatgacctgtgcctggtgctgaggaagtctgagccctacacagagggcctgctgaaggacatccagcccctggcccagccctgcagcctgaaggacatcgtgccccagaacagcaatgaaggctgggaggaggaggccaaggtggagttcctgaagatggtgaacaacaaggctgtgtccatgaaggtgttccgggaggaggatggagtgctgattgtggacctgcagaagcccccacccaacaagatcagcagtgacatgcctgtgtccctgagagatgccctggtgttcatggagctggccaagttcaagagccagagcctgcggagccactttgagaagaacaccaccctgcactaccacccccccatcctgcccaaggagatgacagatgtgtctgtgacagtgtgccacatcaacagccctggggacttctacctgcagctgattgagggcctggacatcctcttcctgctgaagaccatcgaggagttctacaagtcagaagatggagagaacctggagatcctgtgccctgtgcaggaccaggcctgtgtggccaagtttgaagatggcatctggtaccgggccaaggtgattggcctgcccggccaccaggaggtggaggtgaagtatgtggactttggaaacacagccaagatcaccatcaaggatgtgaggaagatcaaggatgagttcctgaatgcccctgagaaggccatcaagtgcaagctggcctacatcgagccctacaagaggaccatgcagtggagcaaggaggccaaggagaagtttgaggagaaggcccaggacaagttcatgacctgcagcgtcatcaagatcctggaggacaacgtgctgctggtggagctgtttgacagcctgggcgcccctgagatgaccaccaccagcatcaatgaccagctggtgaaggagggcctggccagctatgagatcggctacatcctgaaggacaacagccagaagcacatcgaggtgtgggaccccagccctgaggagatcatcagcaatgaggtgcacaacctgaaccctgtgtctgccaagagcctgcccaatgaaaacttccagagcctgtacaacaaggagctgcctgtgcacatctgcaacgtcatcagccctgagaagatctacgtgcagtggctgctgacagagaacctgctgaacagcctggaggagaagatgattgctgcctatgagaacagcaagtgggagcctgtgaagtgggagaatgacatgcactgtgctgtgaagatccaggacaagaaccagtggaggcggggccagatcatccgcatggtgacagacaccctggtggaggtgctgctgtatgatgtgggcgtggagctggtggtgaatgtggactgcctgaggaagctggaggagaacctgaagaccatgggccgcctgagcctggagtgcagcctggtggacatccggcctgctgggggcagtgacaagtggacagccacagcctgtgactgcctgagcctgtacctgaccggggctgtggccaccatcatcctgcaggtggacagcgaggagaacaacaccacctggcccctgcctgtgaagatcttctgcagagatgagaagggggagcgggtggatgtgtccaagtacctgatcaagaagggcctggccctgcgggagcggcgcatcaacaacctggacaacagccacagcctgtctgagaagagcctggaggtgcccctggagcaggaggacagcgtggtgaccaactgcatcaagaccaactttgatcctgacaagaagacagctgacatcatcagcgagcagaaggtgtctgagttccaggagaagatcctggagcccaggaccacccggggctacaagcccccagccatccccaacatgaatgtgtttgaggccaccgtgtcctgtgtgggagatgatggcaccatctttgtggtgcccaagctgtctgaatttgagctgatcaagtag

SEQ ID NO: 168462 - DNA, 462 bp, synthetic construct
  misc_feature 1..462: note = Description of Artificial Sequence: Synthetic coding sequence
  source 1..462: mol_type = other DNA
atggccagctactttgatgaacatgactgtgagcccagcgaccctgagcaggagaccaggaccaacatgctgctggagctggcccggagcctcttcaacaggatggactttgaggacctgggcctggtggtggactgggaccaccacctgcccccacctgctgccaagacagtggtggagaacctgcccaggacagtcatccggggcagccaggccgagctgaagtgccctgtgtgcctgctggagtttgaggaggaggagacagccatcgagatgccctgccaccacctgttccacagcagctgcatcctgccctggctgagcaagaccaacagctgccccctgtgccgctatgagctgcccacagatgatgacacctatgaggagcacagaagagacaaggccaggaagcagcagcagcagcaccggctggagaacctgcacggggccatgtacacctag

SEQ ID NO: 168463 - DNA, 684 bp, synthetic construct
  misc_feature 1..684: note = Description of Artificial Sequence: Synthetic coding sequence
  source 1..684: mol_type = other DNA
atggcctgcaccaagaccctgcagcagagccagcccatctctgctggggccaccaccaccaccacagctgtggccccagctgggggccacagcggcagcacagaatgtgacctggagtgcctggtgtgccgggagccctacagctgcccccggctgcccaagctgctggcctgccagcacgccttctgtgccatctgcctgaagctgctgctgtgtgtgcaggacaacacctggagcatcacctgccccctgtgcaggaaggtgacagctgtgcctgggggcctcatctgcagcctgcgggaccacgaggccgtggtgggccagctggcccagccctgcacagaggtgtccctgtgcccccagggcctggtggaccctgctgacctggccgccggccaccccagcctggtgggagaagatggccaggatgaggtgtctgccaaccacgtggccgcccggcggctggccgcccacctgctgctgctggccctgctgatcatcctgattggccccttcatctacccaggagtgctgcgctgggtgctgaccttcatcatcgccctggccctgctgatgagcaccctcttctgctgcctgcccagcacccggggcagctgctggcccagcagcaggaccctcttctgccgggagcagaagcacagccacatcagcagcatcgcctag

SEQ ID NO: 168464 - DNA, 795 bp, synthetic construct
  misc_feature 1..795: note = Description of Artificial Sequence: Synthetic coding sequence
  source 1..795: mol_type = other DNA
atgagccaggccgtgcagaccaacggcacccagcccctgagcaagacctgggagctgagcctgtatgagctgcagaggaccccccaggaggccatcacagatggcctggagatcgtggtgagccccaggagcctgcacagcgagctgatgtgccccatctgcctggacatgctgaagaacaccatgaccaccaaggagtgcctgcaccgcttctgtgccgactgcatcatcacagccctgcggagcggcctgcagaggggcaagaagcagcagattgaaaatggcagcggggctgaagataatggagacagcagccactgcagcaatgccagcacccacagcaaccaggaggccggccccagcaacaagaggaccaagaccagtgatgattctggcctggagctggacaacaacaatgctgccatggccatcgaccctgtgatggatggagccagcgagattgagctggtgttccggccccaccccaccctgatggagaaggatgacagcgcccagacccgctacatcaagaccagcggaaatgccaccgtggaccacctgagcaagtacctggccgtgcggctggccctggaggagctgcggagcaaaggagagagcaaccagatgaacctggacacagccagcgagaagcagtacaccatctacatcgccacagccagcggccagttcaccgtgctgaatggcagcttcagcctggagctggtgtctgagaagtactggaaggtgaacaagcccatggagctgtactatgcccccaccaaggagcacaagtag

SEQ ID NO: 168465 - DNA, 1011 bp, synthetic construct
  misc_feature 1..1011: note = Description of Artificial Sequence: Synthetic coding sequence
  source 1..1011: mol_type = other DNA
atgagccaggccgtgcagaccaacggcacccagcccctgagcaagacctgggagctgagcctgtatgagctgcagaggaccccccaggaggccatcacagatggcctggagatcgtggtgagccccaggagcctgcacagcgagctgatgtgccccatctgcctggacatgctgaagaacaccatgaccaccaaggagtgcctgcaccgcttctgtgccgactgcatcatcacagccctgcggagcggcaacaaggagtgccccacctgcaggaagaagctggtgtccaagaggagcctgcggccagaccccaactttgatgccctgatcagcaagatctaccccagcagagatgaatatgaggcccaccaggagcgggtgctggcccgcatcaacaagcacaacaaccagcaggccctgagccacagcattgaggagggcctgaagatccaggccatgaaccggctgcagaggggcaagaagcagcagattgaaaatggcagcggggctgaagataatggagacagcagccactgcagcaatgccagcacccacagcaaccaggaggccggccccagcaacaagaggaccaagaccagtgatgattctggcctggagctggacaacaacaatgctgccatggccatcgaccctgtgatggatggagccagcgagattgagctggtgttccggccccaccccaccctgatggagaaggatgacagcgcccagacccgctacatcaagaccagcggaaatgccaccgtggaccacctgagcaagtacctggccgtgcggctggccctggaggagctgcggagcaaaggagagagcaaccagatgaacctggacacagccagcgagaagcagtacaccatctacatcgccacagccagcggccagttcaccgtgctgaatggcagcttcagcctggagctggtgtctgagaagtactggaaggtgaacaagcccatggagctgtactatgcccccaccaaggagcacaagtag

SEQ ID NO: 168466 - DNA, 741 bp, synthetic construct
  misc_feature 1..741: note = Description of Artificial Sequence: Synthetic coding sequence
  source 1..741: mol_type = other DNA
atgagccaggccgtgcagaccaacggcacccagcccctgagcaagacctgggagctgagcctgtatgagctgcagaggaccccccaggaggccatcacagatggcctggagatcgtggtgagccccaggagcctgcacagcgagctgatgtgccccatctgcctggacatgctgaagaacaccatgaccaccaaggagtgcctgcaccgcttctgtgccgactgcatcatcacagccctgcggagcggcaacaaggagtgccccacctgcaggaagaagctggtgtccaagaggagcctgcggccagaccccaactttgatgccctgatcagcaagatctaccccagcagagatgaatatgaggcccaccaggagcgggtgctggcccgcatcaacaagcacaacaaccagcaggccctgagccacagcattgaggagggcctgaagatccaggccatgaaccggctgcagaggggcaagaagcagcagattgaaaatggcagcggggctgaagataatggagacagcagccactgcagcaatgccagcacccacagcaaccaggaggccggccccagcaacaagaggaccaagaccagtgatgattctggcctggagctggacaacaacaatgctgccatggccatcgaccctgtgatggatggagccagcgagattgagctggtgttccggccccaccccaccctgatggagaaggatgacagcgcccagaccaggtag

SEQ ID NO: 168467 - DNA, 822 bp, synthetic construct
  misc_feature 1..822: note = Description of Artificial Sequence: Synthetic coding sequence
  source 1..822: mol_type = other DNA
atggccaactgggtgttctgcaaccgctgcttccagcccccccacaggaccagctgcttcagcctgaccaactgtggccacgtgtactgtgatgcctgcctgggcaagggcaagaagaatgaatgtctcatctgcaaggccccctgcaggacagtgctgctgagcaagcacacagatgctgacatccaggccttcttcatgagcattgacagcctgtgcaagaagtacagccgggagaccagccagtacctgcggctgagccggggctgctgccgcctgaagctgtgcccagccaccagcagcaaggaggtgccccggggcagcacccacggcagccaggccgccgcccgggacccccaggagcactgggtgtccaccacccgggccccccggcccggctgcagaagaagccagagccagcctgaggcccagggcaacaccatccaggatgccccccaccccctgaccctgctgcaccccagcaggaccctcatccacaccaagagcccctggggccagaagctgctggagttcatcaagcacgtgtgctaccaccgccaccagagccaccggccctgtgcccctggctggttctgccaggtgctgcagaggcctggagctgtgtctggagagaagacccagcagaccaggcctgcccccccagccacctgcctgctgtgcctgagctgcctgagcggcttccgccacggcccctggaggagccaggccctgcccagcgacctggtggcccccctgtttgtgtcctacacagtggaggtgtccatcaccaatgccggctggagcttccctgctgctgtgtag

SEQ ID NO: 168468 - DNA, 699 bp, synthetic construct
  misc_feature 1..699: note = Description of Artificial Sequence: Synthetic coding sequence
  source 1..699: mol_type = other DNA
atggccaactgggtgttctgcaaccgctgcttccagcccccccacaggaccagctgcttcagcctgaccaactgtggccacgtgtactgtgatgcctgcctgggcaagggcaagaagaatgaatgtctcatctgcaaggccccctgcaggacagtgctgctgagcaagcacacagatgctgacatccaggccttcttcatgagcattgacagcctgtgcaagaagtacagccgggagaccagccagatcctggagttccaggagaagcacaggaagaggctgctggccttctaccgggagaagatcagccggctggaggagagcctgaggaagtctgtgctgcagatcgagcagctgcagagcatgaggagcagccagcagacagccttcagcaccatcaagagctctgtgtccaccaagccccacggctgcctgctgcccccccacagcagcgccccagaccggctggagagcatggaggtggacctgagccccagccccatcaggaagtcagaaattgctgctggccctgcccgcatctccatgatcagccccccccaggacggccgcatggccccctgtgcccggcgggtgtgccacttccagcgcttcaccatgttcctgcaccggcggctgagcagcctggccgccccacccagcgtgcagttctggaaggcccggggcacccaccagctgtag

SEQ ID NO: 168469 - DNA, 894 bp, synthetic construct
  misc_feature 1..894: note = Description of Artificial Sequence: Synthetic coding sequence
  source 1..894: mol_type = other DNA
atggccaactgggtgttctgcaaccgctgcttccagcccccccacaggaccagctgcttcagcctgaccaactgtggccacgtgtactgtgatgcctgcctgggcaagggcaagaagaatgaatgtctcatctgcaaggccccctgcaggacagtgctgctgagcaagcacacagatgctgacatccaggccttcttcatgagcattgacagcctgtgcaagaagtacagccgggagaccagccagatcctggagttccaggagaagcacaggaagaggctgctggccttctaccgggagaagatcagccggctggaggagagcctgaggaagtctgtgctgcagatcgagcagctgcagagcatgaggagcagccagcagacagccttcagcaccatcaagagctctgtgtccaccaagccccacggctgcctgctgcccccccacagcagcgccccagaccggctggagagcatggaggtggacctgagccccagccccatcaggaagtcagaaattgctgctggccctgcccgcatctccatgatcagccccccccaggacggccgcatgggcccccacctgacagccagcttctgcttcatcccctggctgaccctgagcaagccccctgtgcctggagaatgtgtgatcagccggggcagcccctgcttctgcattgatgtgtgcccccactggctgctgctgctggccttcagcagcggccgccacggggagctgaccaacagcaagaccctgcccatctatgcagaggtgcagagagctgtgctcttccccttccagcaggccgagggcaccctggacaccttccgcaccccagctgtgtctgtggtgttccccctgtgccagtttgagaggaagaagagcttctag

SEQ ID NO: 168470 - DNA, 3192 bp, synthetic construct
  misc_feature 1..3192: note = Description of Artificial Sequence: Synthetic coding sequence
  source 1..3192: mol_type = other DNA
atggagtgccccagctgccagcacgtgtccaaggaggagacccccaagttctgcagccagtgtggggagcggctgcccccagctgcccccatcgctgacagcgagaacaacaacagcaccatggccagcgccagcgagggggagatggagtgtggccaggagctgaaggaggagggcggcccctgcctcttccctggcagtgacagctggcaggagaaccctgaggagccctgcagcaaggcctcctggacagtgcaggagagcaagaagaagaagaggaagaagaagaagaagggcaacaagagcgccagcagcgagctggccagcctgcccctgagccctgccagcccctgccacctgaccctgctgagcaacccctggccccaggacacagccctgccccacagccaggcccagcagagcggccccaccggccagcccagccagcccccaggcacagccaccacccccctggagggagatggcctgagcgcccccacagaggtgggggacagccccctgcaggcccaggccctgggggaggccggcgtggccaccggcagcgaggcccagagcagcccccagttccaggaccacacagaaggagaggaccaggatgccagcatccccagcggcggccggggcctgagccaggagggcactggaccacccaccagcgctggggagggccacagcaggacagaagatgctgcccaggagctgctgctgcctgagagcaaaggaggcagcagcgagcctggaacagagctgcagaccacagagcagcaggccggggccagcgcctccatggctgtggatgctgtggccgagcccgccaatgctgtgaagggagctgggaaggagatgaaggagaagacccagaggatgaagcagcccccagccaccaccccacccttcaagacccactgccaggaggccgagaccaagaccaaggatgagatggctgctgctgaggagaaggtgggcaagaatgagcagggcgagcctgaggacctgaagaagccagagggcaagaacagatctgctgctgctgtgaagaatgagaaggagcagaagaaccaggaggctgatgtgcaggaggtgaaggccagcaccctgagccctgggggcggcgtgaccgtcttcttccacgccatcatcagcctgcacttccccttcaacccagacctgcacaaggtgttcatccggggcggggaggagtttggagagagcaagtgggacagcaacatctgtgagctgcactacacccgggacctgggccatgacagagtgctggtggagggcatcgtgtgcatcagcaagaagcacctggacaagtacatcccctacaagtatgtgatctacaacggggagagctttgaatatgagttcatctacaagcaccagcagaagaagggggagtatgtgaaccgctgcctcttcatcaagagcagcctgctgggcagcggggactggcaccagtactatgacatcgtgtacatgaagccccacggccgcctgcagaaggtgatgaaccacatcacagatggccccaggaaggacctggtgaagggcaagcagattgctgctgccctgatgctggacagcaccttcagcatcctgcagacctgggacaccatcaacctgaacagcttcttcacccagtttgagcagttctgctttgtgctgcagcagcccatgatctatgagggccaggcccagctgtggacagacctgcagtaccgggagaaggaggtgaagcgctacctgtggcagcacctgaagaagcacgtggtgcccctgcctgatggcaagagcacagacttcctgcctgtggactgccctgtgcgcagcaagctgaagacaggcctgattgtgctgtttgtggtggagaagattgagctgctgctggagggcagcctggactggctgtgccacctgctgaccagtgatgccagcagcccagatgagttccaccgggacctgagccacatcctgggcatcccccagagctggaggctgtacctggtgaacctgtgccagcgctgcatggacaccaggacctacacctggctgggcgccctgcctgtgctgcactgctgcatggagctggcccccaggcacaaggatgcctggaggcagcctgaggacacctgggccgccctggagggcctgtccttcagccccttccgggagcagatgctggacaccagcagcctgctgcagttcatgagggagaagcagcacctgctgagcattgatgagcccctcttccgctcctggttcagcctgctgcccctgagccacctggtgatgtacatggagaacttcatcgagcacctgggccgcttccctgcccacatcctggactgcctgagcggcatctactaccgcctgcccggcctggagcaggtgctgaacacccaggatgtgcaggatgtgcagaatgtgcagaacatcctggagatgctgctgcggctgctggacacctacagagacaagatccctgaggaggccctgagccccagctacctgactgtgtgcctgaagctgcacgaggccatctgcagcagcaccaagctgctgaagttctatgagctgcctgccctgtctgctgagatcgtgtgcaggatgatccggctgctgagcctggtggacagcgctggccagagagatgagaccggcaacaacagcgtgcagacagtgttccagggcaccctggccgccaccaagcgctggctgcgggaggtgttcaccaagaacatgctgaccagcagcggggccagcttcacctacgtgaaggagattgaggtgtggaggcggctggtggagatccagtttcctgctgagcacggctggaaggagagcctgctgggggacatggagtggaggctgaccaaggaggagcccctgagccagatcacagcctactgcaacagctgctgggacaccaagggcctggaggacagcgtggccaagacctttgagaagtgcatcatcgaggccgtgtcctctgcctgccaggtgaacaacctgagctcctgggagacagattctggcagccagctgtgcagcgccatgacccagctgcgggccatgaagcaccccctgggcctgagcagcagcgccaacagcgagatcggcaagtgggcccccagcagcctggccaagggaaatggagctgagatctag

SEQ ID NO: 168471 - DNA, 9843 bp, synthetic construct
  misc_feature 1..9843: note = Description of Artificial Sequence: Synthetic coding sequence
  source 1..9843: mol_type = other DNA
atggtgtgtgatggagactgggagcactgctacctgcccagcgccttcagccagcacaaggtgtttgtgaccccccaggcccccctggaggccatccaggcctacctggccggccactacagagtgcccaagcagaccctgtctgctgctgctgtgttcaatgaccggctgtgtgtgggcatcgtggccagcgagagagctggggtgggcaagagcctgtatgtgaagaggctgcatgacaagatgaagatgcagctgaatgtgaagaatgtgcccctgaagaccatccggctgattgacccccaggtggatgagagccgggtgctgggcgccctgctgcccttcctggatgcccagtaccagaaggtgcctgtgctcttccacctggatgtgaccagctctgtgcagacaggcatctgggtgttcctgttcaagctgctgatcctgcagtacctgatggacatcaacgggaagatgtggctgaggaacccctgccacctgtacatcgtggagatcctggagaggaggacctctgtgcccagccgcagcagcagcgccctgcggaccagggtgccccagttctccttcctggacatcttccccaaggtgacctgcaggcctcccaaggaggtgattgacatggagctgagcgccctgcggagtgacacagagcccggcatggacctgtgggagttctgcagcgagaccttccagaggccctaccagtacctgcggcgcttcaaccagaaccaggacctggacaccttccagtaccaggagggctctgtggagggcaccccagaagaatgtctgcagcacttcctgttccactgtggggtcatcaaccccagctggagcgagctgaggaactttgcccgcttcctgaactaccagctgcgggactgtgaggccagcctcttctgcaaccccagcttcatcggggacaccctgcggggcttcaagaagtttgtggtgaccttcatgatcttcatggcccgggactttgccacccccagcctgcacaccagtgaccagagccctgggaagcacatggtgaccatggatggagtgcgggaggaggacctggcccccttcagcctgaggaagcgctgggagagcgagccccacccctacgtgttcttcaatgatgaccacaccaccatgaccttcatcggcttccacctgcagcccaacatcaatggatctgtggatgccatcagccacctgaccgggaaggtgatcaagagagatgtgatgacccgggacctgtaccagggcctgctgctgcagagggtgcccttcaacgtggactttgacaagctgcccaggcacaagaagctggagcggctgtgcctgaccctgggcatcccccaggccacagatcctgacaagacctatgagctgaccacagacaacatgctgaagatcctggccatcgagatgaggttccgctgtggcatccctgtgatcatcatgggagaaacaggctgcggcaagaccaggctcatcaagttcctgagtgacctgcggcggggcggcaccaatgctgacaccatcaagctggtgaaggtgcatggaggcaccacagctgacatgatctacagccgggtgcgggaggctgaaaatgtggcctttgccaacaaggaccagcaccagctggacaccatcctcttctttgatgaggccaacaccacagaggccatcagctgcatcaaggaggtgctgtgtgaccacatggtggatggccagcccctggctgaagattctggcctgcacatcatcgccgcctgcaacccctacaggaagcacagcgaggagatgatctgccgcctggagagcgctggcctgggctacagagtgtccatggaggagacagctgaccggctgggcagcatccccctgcggcagctggtgtacagagtgcacgccctgccccccagcctcatccccctggtgtgggactttggccagctgagtgatgtggccgagaagctgtacatccagcagatcgtgcagaggctggtggagagcatcagcctggatgaaaatggcaccagggtcatcacagaggtgctgtgtgccagccagggcttcatgaggaagacagaagatgaatgttcctttgtgtccctgagagatgtggagcgctgtgtgaaggtgttccgctggttccacgagcacagcgccatgctgctggcccagctgaatgccttcctgagcaagagctctgtgtccaagaaccacacagagcgggaccctgtgctgtggagcctgatgctggccatcggcgtgtgctaccacgccagcctggagaagaaggacagctacaggaaggccatcgcccgcttcttccccaagccctatgatgacagccggctgctgctggatgagatcacccgggcccaggacctcttcctggatggagtgcccctgaggaagaccatcgccaagaacctggccctgaaggaaaatgtgttcatgatggtggtgtgcatcgagctgaagatccccctcttcctggtgggcaagccaggcagcagcaagagcctggccaagaccatcgtggctgatgccatgcagggccctgctgcctacagcgacctcttccgcagcctgaagcaggtgcacctggtgtccttccagtgcagcccccacagcaccccccagggcatcatcagcaccttccggcagtgtgcccgcttccagcagggcaaggacctgcagcagtatgtgtctgtggtggtgctggatgaggtgggcctggccgaggacagccccaagatgcccctgaagaccctgcaccccctgctggaggatggctgcattgaagatgatcctgccccccacaagaaggtgggctttgtgggcatcagcaactgggccctggaccctgccaagatgaacagaggcatctttgtgtcccggggcagccccaatgaaacagagctgattgagagcgccaagggcatctgcagcagtgacatcctggtgcaggacagagtgcagggctactttgccagctttgccaaggcctatgagaccgtgtgcaagaggcaggacaaggagttcttcggcctgcgggactactacagcctcatcaagatggtgtttgctgctgccaaggccagcaacaggaagcccagcccccaggacatcgcccaggccgtgctgaggaacttcagcggcaaggatgacatccaggccctggacatcttcctggccaacctgcctgaggccaagtgcagcgaggaggtgagccccatgcagctgatcaagcagaacatcttcggccccagccagaaggtgcctggaggagagcaggaggatgctgagagccgctacctgctggtgctgaccaagaactacgtggccctgcagatcctgcagcagaccttctttgaaggagaccagcagcctgagatcatctttggaagtggcttccccaaggaccaggagtacacccagctgtgcaggaacatcaacagagtgaagatctgcatggagaccgggaagatggtgctgctgctgaacctgcagaacctgtatgagagcctgtatgatgccctgaaccagtactacgtgcacctgggcggccagaagtatgtggacctgggcctgggcacccaccgggtgaagtgccgggtgcaccccaacttccgcctcatcgtcatcgaggagaaggatgtggtgtacaagcacttccccatccccctcatcaaccggctggagaagcactacctggacatcaacacagtgctggagaagtggcagaagagcatcgtggaggagctgtgtgcctgggtggagaagttcatcaacgtgaaggcccaccacttccagaagaggcacaagtacagccccagtgatgtgttcatcggctaccacagtgatgcctgtgcctctgtggtgctgcaggtgattgagcggcagggcccccgggccctgacagaggagctgcaccagaaggtgtctgaggaggccaagagcatcctgctgaactgtgccaccccagatgctgtggtgcggctgagcgcctacagcctgggcggctttgctgctgagtggctgagccaggagtacttccaccggcagaggcacaacagctttgctgacttcctgcaggcccacctgcacacagctgacctggagagacatgccatcttcacagagatcaccaccttcagccggctgctgaccagccatgactgtgagatcctggagagcgaggtgacaggccgggcccccaagcccaccctgctgtggctgcagcagtttgacacagagtacagcttcctgaaggaggtgaggaactgcctgaccaacacagccaagtgcaagatcctgatcttccagacagactttgaagatggcatccgcagcgcccagctgattgccagcgccaagtacagcgtcatcaatgagatcaacaagatccgggagaatgaagatcgcatctttgtgtacttcatcaccaagctgagccgggtgggccggggcacagcctacgtgggcttccacggcggcctgtggcagagcgtgcacattgatgacctgcggcgcagcaccctgatggtgtctgatgtgacccggctgcagcacgtgaccatcagccagctgtttgcccctggggacctgcctgagctgggcctggagcacagagcagaagatggccacgaggaggccatggagacagaggccagcaccagcggggaggtggccgaggtggccgaggaggccatggagacagagagcagcgagaaggtgggcaaggagaccagcgagctgggcggcagtgatgtgtccatcctggacaccacccggctgctgcggagctgtgtgcagagcgctgtgggcatgctgcgggaccagaatgaaagctgcaccaggaacatgagaagagtggtgctgctgctgggcctgctgaatgaagatgatgcctgccacgccagcttcctgcgggtgtccaagatgaggctgagcgtcttcctgaagaagcaggaggagagccagttccaccccctggagtggctggcccgggaggcctgcaaccaggatgccctgcaggaggccggcaccttccgccacaccctgtggaagagggtgcagggcgctgtgacccccctgctggcctccatgatctccttcatcgacagagatggcaacctggagctgctgaccaggccagacaccccaccctgggcccgggacctgtggatgttcatcttcagtgacaccatgctgctgaacatccccctggtgatgaacaatgaaagacacaagggggagatggcctacatcgtggtgcagaaccacatgaacctgtctgaaaatgccagcaacaacgtgcccttctcctggaagatcaaggactacctggaggagctgtgggtgcaggcccagtacatcacagatgctgagggcctgcccaagaagtttgtggacatcttccagcagacccccctgggccgcttcctggcccagctgcatggagagccccagcaggagctgctgcagtgctacctgaaggacttcatcctgctgaccatgagggtgtccacagaggaggagctgaagttcctgcagatggccctgtggagctgcaccaggaagctgaaggccgccagcgaggcccctgaggaggaggtgtccctgccctgggtgcacctggcctaccagcgcttccgcagccggctgcagaacttcagccgcatcctgaccatctacccccaggtgctgcacagcctgatggaggcccgctggaaccacgagctggccggctgtgagatgaccctggatgcctttgctgccatggcctgcacagagatgctgaccaggaacaccctgaagcccagcccccaggcctggctgcagctggtgaagaacctgtccatgcccctggagctgatctgcagtgatgagcacatgcagggcagcggcagcctggcccaggccgtcatccgggaggtgcgggcccagtggagccgcatcttcagcacagccctgtttgtggagcacgtgctgctgggcacagagagccgggtgcctgagctgcagggcctggtgacagagcacgtgttcctgctggacaagtgcctgcgggagaacagtgatgtgaagacccacggcccctttgaggccgtgatgaggaccctgtgtgagtgcaaggagacagccagcaagaccctgagcagatttggcatccagccctgcagcatctgcctgggagatgccaaggaccctgtgtgcctgccctgtgaccacgtgcactgcctgcgctgcctgcgggcctggtttgccagcgagcagatgatctgcccctactgcctgacagccctgcctgatgagttcagccctgctgtgtcccaggcccaccgggaggccatcgagaagcacgcccgcttccggcagatgtgcaacagcttctttgtggacctggtgtccaccatctgcttcaaggacaatgcccctcctgagaaggaggtgattgagagcctgctgagcctgctgtttgtgcagaagggccgcctgagagatgctgcccagaggcactgtgagcacaccaagagcctgagccccttcaatgatgtggtggacaagacccctgtgatccgcagcgtcatcctgaagctgctgctgaagtacagcttccatgatgtgaaggactacatccaggagtacctgaccctgctgaagaagaaggccttcatcacagaggacaagacagagctgtacatgctgttcatcaactgcctggaggacagcatcctggagaagaccagcgcctacagcagaaatgatgagctgaaccacctggaggaggagggccgcttcctgaaggcctacagccctgccagccggggccgggagcccgccaatgaggcctctgtggagtacctgcaggaggtggcccgcatccggctgtgcctggacagagctgctgacttcctgtctgagcctgagggcggccctgagatggccaaggagaagcagtgctacctgcagcaggtgaagcagttctgcatccgggtggagaatgactggcaccgggtgtacctggtgaggaagctgagcagccagaggggcatggagtttgtgcagggcctgagcaagccaggccggccccaccagtgggtgttccccaaggatgtggtgaagcagcagggcctgcggcaggaccaccctggccagatggaccgctacctggtgtatggagatgagtacaaggccctgagagatgctgtggccaaggctgtgctggagtgcaagcccctgggcatcaagacagccctgaaggcctgcaagaccccccagagccagcagagcgcctacttcctgctgaccctcttccgggaggtggccatcctgtaccgcagccacaatgccagcctgcaccccaccccagagcagtgtgaggccgtgtccaagttcatcggggagtgcaagatcctgagccccccagacatcagcagatttgccaccagcctggtggacaacagcgtgcccctgctgcgggccggccccagcgacagcaacctggatggcaccgtgacagagatggccatccatgctgctgctgtgctgctgtgtggccagaatgagctgctggagcccctgaagaacctggccttctccccagccaccatggcccacgccttcctgcccaccatgcctgaggacctgctggcccaggcccggcgctggaagggcctggagcgggtgcactggtacacctgccccaacggccacccctgcagcgtgggggagtgtggccggcccatggagcagagcatctgcatcgactgccacgcccccatcggcggcatcgaccacaagcccagagatggcttccacctggtgaaggacaaggctgacaggacccagacaggccacgtgctgggcaacccccagaggagagatgtggtgacctgtgaccggggcctgccccctgtggtgttcctgctgatccggctgctgacccacctggccctgctgctgggcgccagccagagcagccaggccctgatcaacatcatcaagccccctgtgcgggaccccaagggcttcctgcagcagcacatcctgaaggacctggagcagctggccaagatgctgggccacagcgcagatgagaccatcggcgtggtgcacctggtgctgcggcggctgctgcaggagcagcaccagctgagcagccggcggctgctgaactttgacacagagctgagcaccaaggagatgaggaacaactgggagaaggagattgctgctgtgatcagccctgagctggagcacctggacaagaccctgcccaccatgaacaacctgatcagccaggacaagaggatcagcagcaaccctgtggccaagatcatctacggggaccctgtgaccttcctgccccacctgcccaggaagtctgtggtgcactgcagcaagatctggagctgcaggaagaggatcaccgtggagtacctgcagcacatcgtggagcagaagaatggcaaggagcgggtgcccatcctgtggcacttcctgcagaaggaggccgagctgcggctggtgaagttcctgcctgagatcctggccctgcagagggacctggtgaagcagttccagaatgtgcagcaggtggagtacagcagcatccggggcttcctgagcaagcacagcagtgatggcctgcggcagctgctgcacaaccgcatcaccgtcttcctgagcacctggaacaagctgcggcgcagcctggagaccaatggagagatcaacctgcccaaggactactgcagcacagacctggacctggacacagaatttgagatcctgctgccccggcggcggggcctgggcctgtgtgccacagccctggtgtcctacctgatccggctgcacaatgaaattgtgtatgctgtggagaagctgagcaaagaaaacaacagctacagcgtggatgctgctgaggtgacagagctgcacgtgatctcctatgaggtggagcgggacctgacccccctcatcctgagcaactgccagtaccaggtggaggagggccgggagaccgtgcaggagtttgacctggagaagatccagaggcagatcgtgagccgcttcctgcagggcaagccccggctgagcctgaagggcatccccaccctggtgtacagacatgactggaactatgagcacctgttcatggacatcaagaacaagatggcccaggacagcctgcccagcagcgtcatcagcgccatcagcggccagctgcagagctacagtgatgcctgtgaggtgctgtctgtggtggaggtgaccctgggcttcctgagcacagctggaggagaccccaacatgcagctgaatgtgtacacccaggacatcctgcagatgggagaccagaccatccacgtgctgaaggccctgaaccgctgccagctgaagcacaccatcgccctgtggcagttcctgagcgcccacaagtctgagcagctgctgcggctgcacaaggagccctttggagagatcagcagccgctacaaggctgacctgagcccagaaaatgccaagctgctgagcaccttcctgaaccagacaggcctggatgccttcctgctggagctgcacgagatgatcatcctgaagctgaagaacccccagacccagacagaggagcgcttccggccccagtggagcctgcgggacaccctggtgtcctacatgcagaccaaggagagcgagatcctgcctgagatggccagccagtttcctgaggagatcctgctggccagctgtgtgtctgtgtggaagacagctgctgtgctgaagtggaaccgggagatgaggtag

SEQ ID NO: 168472 - DNA, 4653 bp, synthetic construct
  misc_feature 1..4653: note = Description of Artificial Sequence: Synthetic coding sequence
  source 1..4653: mol_type = other DNA
atggagtgccccagctgccagcacgtgtccaaggaggagacccccaagttctgcagccagtgtggggagcggctgcccccagctgcccccatcgctgacagcgagaacaacaacagcaccatggccagcgccagcgagggggagatggagtgtggccaggagctgaaggaggagggcggcccctgcctcttccctggcagtgacagctggcaggagaaccctgaggagccctgcagcaaggcctcctggacagtgcaggagagcaagaagaagaagaggaagaagaagaagaagggcaacaagagcgccagcagcgagctggccagcctgcccctgagccctgccagcccctgccacctgaccctgctgagcaacccctggccccaggacacagccctgccccacagccaggcccagcagagcggccccaccggccagcccagccagcccccaggcacagccaccacccccctggagggagatggcctgagcgcccccacagaggtgggggacagccccctgcaggcccaggccctgggggaggccggcgtggccaccggcagcgaggcccagagcagcccccagttccaggaccacacagaaggagaggaccaggatgccagcatccccagcggcggccggggcctgagccaggagggcactggaccacccaccagcgctggggagggccacagcaggacagaagatgctgcccaggagctgctgctgcctgagagcaaaggaggcagcagcgagcctggaacagagctgcagaccacagagcagcaggccggggccagcgcctccatggctgtggatgctgtggccgagcccgccaatgctgtgaagggagctgggaaggagatgaaggagaagacccagaggatgaagcagcccccagccaccaccccacccttcaagacccactgccaggaggccgagaccaagaccaaggatgagatggctgctgctgaggagaaggtgggcaagaatgagcagggcgagcctgaggacctgaagaagccagagggcaagaacagatctgctgctgctgtgaagaatgagaaggagcagaagaaccaggaggctgatgtgcaggaggtgaaggccagcaccctgagccctgggggcggcgtgaccgtcttcttccacgccatcatcagcctgcacttccccttcaacccagacctgcacaaggtgttcatccggggcggggaggagtttggagagagcaagtgggacagcaacatctgtgagctgcactacacccgggacctgggccatgacagagtgctggtggagggcatcgtgtgcatcagcaagaagcacctggacaagtacatcccctacaagtatgtgatctacaacggggagagctttgaatatgagttcatctacaagcaccagcagaagaagggggagtatgtgaaccgctgcctcttcatcaagagcagcctgctgggcagcggggactggcaccagtactatgacatcgtgtacatgaagccccacggccgcctgcagaaggtgatgaaccacatcacagatggccccaggaaggacctggtgaagggcaagcagattgctgctgccctgatgctggacagcaccttcagcatcctgcagacctgggacaccatcaacctgaacagcttcttcacccagtttgagcagttctgctttgtgctgcagcagcccatgatctatgagggccaggcccagctgtggacagacctgcagtaccgggagaaggaggtgaagcgctacctgtggcagcacctgaagaagcacgtggtgcccctgcctgatggcaagagcacagacttcctgcctgtggactgccctgtgcgcagcaagctgaagacaggcctgattgtgctgtttgtggtggagaagattgagctgctgctggagggcagcctggactggctgtgccacctgctgaccagtgatgccagcagcccagatgagttccaccgggacctgagccacatcctgggcatcccccagagctggaggctgtacctggtgaacctgtgccagcgctgcatggacaccaggacctacacctggctgggcgccctgcctgtgctgcactgctgcatggagctggcccccaggcacaaggatgcctggaggcagcctgaggacacctgggccgccctggagggcctgtccttcagccccttccgggagcagatgctggacaccagcagcctgctgcagttcatgagggagaagcagcacctgctgagcattgatgagcccctcttccgctcctggttcagcctgctgcccctgagccacctggtgatgtacatggagaacttcatcgagcacctgggccgcttccctgcccacatcctggactgcctgagcggcatctactaccgcctgcccggcctggagcaggtgctgaacacccaggatgtgcaggatgtgcagaatgtgcagaacatcctggagatgctgctgcggctgctggacacctacagagacaagatccctgaggaggccctgagccccagctacctgactgtgtgcctgaagctgcacgaggccatctgcagcagcaccaagctgctgaagttctatgagctgcctgccctgtctgctgagatcgtgtgcaggatgatccggctgctgagcctggtggacagcgctggccagagagatgagaccggcaacaacagcgtgcagacagtgttccagggcaccctggccgccaccaagcgctggctgcgggaggtgttcaccaagaacatgctgaccagcagcggggccagcttcacctacgtgaaggagattgaggtgtggaggcggctggtggagatccagtttcctgctgagcacggctggaaggagagcctgctgggggacatggagtggaggctgaccaaggaggagcccctgagccagatcacagcctactgcaacagctgctgggacaccaagggcctggaggacagcgtggccaagacctttgagaagtgcatcatcgaggccgtgtcctctgcctgccagagccagaccagcatcctgcagggcttctcctacagcgacctgaggaagtttggaattgtgctgtctgctgtgatcaccaagtcctggcccaggacagctgacaacttcaatgacatcctgaagcacctgctgaccctggctgatgtgaagcacgtgttccggctgtgtggcacagatgagaagatcctggccaacgtgacagaagatgccaagaggctgattgctgtggccgacagcgtgctgaccaaggtggtgggggacctgctgagcggcaccatcctggtgggccagctggagctgatcatcaagcacaagaaccagttcctggacatctggcagctgcgggagaagagcctgagcccccaggatgagcagtgtgctgtggaggaggccctggactggaggcgggaggagctgctgctgctgaagaaggagaagagatgtgtggacagcctgctgaagatgtgtggaaatgtgaagcacctgatccaggtggactttggagtgctggccgtgcgccacagccaggacctgagcagcaagaggctgaatgacacagtgacagtgcggctgagcaccagcagcaacagccagagggccacccactaccacctgagcagccaggtgcaggagatggccggcaagattgacctgctgcgggacagccacatcttccagctgttctggagggaggccgctgagcccctgtctgagcccaaggaggaccaggaggccgctgagctgctgtctgagcctgaggaggagagcgagcggcacatcctggagctggaggaggtgtatgactacctgtaccagcccagctacaggaagttcatcaagctgcaccaggacctgaagtctggagaggtgaccctggccgagattgatgtgatcttcaaggactttgtgaacaagtacacagacctggacagcgagctgaagatcatgtgcaccgtggaccaccaggaccagagggactggatcaaggacagagtggagcagatcaaggagtaccaccacctgcaccaggccgtgcatgctgccaaggtgatcctgcaggtgaaggagagcctgggcctgaatggagacttctctgtgctgaacaccctgctgaacttcacagacaactttgatgacttcagaagagagaccctggaccagatcaaccaggagctgatccaggccaagaagctgctgcaggacatcagcgaggcccgctgcaagggcctgcaggccctgagcctgaggaaggagttcatctgctgggtgcgggaggccctgggcggcatcaatgagctgaaggtgtttgtggacctggccagcatctctgctggggagaatgacattgatgtggacagagtggcctgcttccatgatgctgtgcagggctacgccagcctgctcttcaagctggaccccagcgtggacttcagcgccttcatgaagcacctgaagaagctgtggaaggccctggacaaggaccagtacctgcccaggaagctggtgtccctcatcctgagcctgatgcagatcctgctgaacagagccctgctgagcaatgtgcgggctgtgacagtggagatggtggcccacctgtgtggccgctttgtgcacagccgcttccagtag

SEQ ID NO: 168473 - DNA, 15771 bp, synthetic construct
  misc_feature 1..15771: note = Description of Artificial Sequence: Synthetic coding sequence
  source 1..15771: mol_type = other DNA
atggagtgccccagctgccagcacgtgtccaaggaggagacccccaagttctgcagccagtgtggggagcggctgcccccagctgcccccatcgctgacagcgagaacaacaacagcaccatggccagcgccagcgagggggagatggagtgtggccaggagctgaaggaggagggcggcccctgcctcttccctggcagtgacagctggcaggagaaccctgaggagccctgcagcaaggcctcctggacagtgcaggagggcgccaccagcgaggtgctggtggatgctgctgtggacctgatcagtgatgagtgggaggccgccaatgccatccccagcaagaggaggaagcaggatgctgcccccctggaggccgcctctgtgcccagcgctgactgtgagcagagcaagaagaagaagaggaagaagaagaagaagggcaacaagagcgccagcagcgagctggccagcctgcccctgagccctgccagcccctgccacctgaccctgctgagcaacccctggccccaggacacagccctgccccacagccaggcccagcagagcggccccaccggccagcccagccagcccccaggcacagccaccacccccctggagggagatggcctgagcgcccccacagaggtgggggacagccccctgcaggcccaggccctgggggaggccggcgtggccactggaagtgaggcccagagcagcccccagttccaggaccacacagaaggagaggaccaggatgccagcatccccagcggcggccggggcctgagccaggagggcaccggcccccccaccagcgctggggagggccacagcaggacagaagatgctgcccaggagctgctgctgcctgagagcaagggcggcagcagcgagcccggcacagagctgcagaccacagagcagcaggccggggccagcgcctccatggctgtggatgctgtggccgagcccgccaatgctgtgaagggggccggcaaggagatgaaggagaagacccagaggatgaagcagcccccagccaccaccccacccttcaagacccactgccaggaggccgagaccaagaccaaggatgagatggctgctgctgaggagaaggtgggcaagaatgagcagggcgagcctgaggacctgaagaagccagagggcaagaacagatctgctgctgctgtgaagaatgagaaggagcagaagaaccaggaggctgatgtgcaggaggtgaaggccagcaccctgagccctgggggcggcgtgacagtgttcttccacgccatcatcagcctgcacttccccttcaacccagacctgcacaaggtgttcatccggggcggggaggagtttggagagagcaagtgggacagcaacatctgtgagctgcactacacccgggacctgggccatgacagagtgctggtggagggcatcgtgtgcatcagcaagaagcacctggacaagtacatcccctacaagtatgtgatctacaatggagagagctttgaatatgagttcatctacaagcaccagcagaagaagggggagtatgtgaaccgctgcctcttcatcaagagcagcctgctgggcagcggggactggcaccagtactatgacatcgtgtacatgaagccccacggccgcctgcagaaggtgatgaaccacatcacagatggccccaggaaggacctggtgaagggcaagcagattgctgctgccctgatgctggacagcaccttcagcatcctgcagacctgggacaccatcaacctgaacagcttcttcacccagtttgagcagttctgctttgtgctgcagcagcccatgatctatgagggccaggcccagctgtggacagacctgcagtaccgggagaaggaggtgaagcgctacctgtggcagcacctgaagaagcacgtggtgcccctgcctgatggcaagagcacagacttcctgcctgtggactgccctgtgcgcagcaagctgaagacaggcctcatcgtgctgtttgtggtggagaagattgagctgctgctggagggcagcctggactggctgtgccacctgctgaccagtgatgccagcagcccagatgagttccaccgggacctgagccacatcctgggcatcccccagagctggaggctgtacctggtgaacctgtgccagcgctgcatggacaccaggacctacacctggctgggcgccctgcctgtgctgcactgctgcatggagctggcccccaggcacaaggatgcctggaggcagcctgaggacacctgggccgccctggagggcctgtccttcagccccttccgggagcagatgctggacaccagcagcctgctgcagttcatgagggagaagcagcacctgctgagcattgatgagcccctcttccgctcctggttcagcctgctgcccctgagccacctggtgatgtacatggagaacttcatcgagcacctgggccgcttccctgcccacatcctggactgcctgagcggcatctactaccgcctgcccggcctggagcaggtgctgaacacccaggatgtgcaggatgtgcagaatgtgcagaacatcctggagatgctgctgcggctgctggacacctacagagacaagatccctgaggaggccctgagccccagctacctgactgtgtgcctgaagctgcacgaggccatctgcagcagcaccaagctgctgaagttctatgagctgcctgccctgtctgctgagatcgtgtgcaggatgatccggctgctgagcctggtggacagcgctggccagagagatgaaacaggcaacaacagcgtgcagaccgtcttccagggcaccctggccgccaccaagcgctggctgcgggaggtgttcaccaagaacatgctgaccagcagcggggccagcttcacctacgtgaaggagattgaggtgtggaggcggctggtggagatccagtttcctgctgagcacggctggaaggagagcctgctgggggacatggagtggaggctgaccaaggaggagcccctgagccagatcacagcctactgcaacagctgctgggacaccaagggcctggaggacagcgtggccaagacctttgagaagtgcatcattgaagctgtgagcagcgcctgccagagccagaccagcatcctgcagggcttctcctacagcgacctgaggaagtttggcatcgtgctgtctgctgtgatcaccaagtcctggcccaggacagctgacaacttcaatgacatcctgaagcacctgctgaccctggctgatgtgaagcacgtgttccggctgtgtggcacagatgagaagatcctggccaacgtgacagaagatgccaagaggctgattgctgtggccgacagcgtgctgaccaaggtggtgggggacctgctgagcggcaccatcctggtgggccagctggagctgatcatcaagcacaagaaccagttcctggacatctggcagctgcgggagaagagcctgagcccccaggatgagcagtgtgctgtggaggaggccctggactggaggcgggaggagctgctgctgctgaagaaggagaagagatgtgtggacagcctgctgaagatgtgtggaaatgtgaagcacctgatccaggtggactttggagtgctggccgtgcgccacagccaggacctgagcagcaagaggctgaatgacacagtgacagtgcggctgagcaccagcagcaacagccagagggccacccactaccacctgagcagccaggtgcaggagatggccggcaagattgacctgctgcgggacagccacatcttccagctgttctggagggaggccgctgagcccctgtctgagcccaaggaggaccaggaggccgctgagctgctgtctgagcctgaggaggagagcgagcggcacatcctggagctggaggaggtgtatgactacctgtaccagcccagctacaggaagttcatcaagctgcaccaggacctgaagagcggggaggtgaccctggccgagattgatgtgatcttcaaggactttgtgaacaagtacacagacctggacagcgagctgaagatcatgtgcaccgtggaccaccaggaccagagggactggatcaaggacagagtggagcagatcaaggagtaccaccacctgcaccaggccgtgcacgccgccaaggtgatcctgcaggtgaaggagagcctgggcctgaatggagacttctctgtgctgaacaccctgctgaacttcacagacaactttgatgacttccggcgggagaccctggaccagatcaaccaggagctgatccaggccaagaagctgctgcaggacatcagcgaggcccgctgcaagggcctgcaggccctgagcctgaggaaggagttcatctgctgggtgcgggaggccctgggcggcatcaatgagctgaaggtgtttgtggacctggccagcatctctgctggagaaaatgacattgatgtggacagagtggcctgcttccatgatgctgtgcagggctacgccagcctgctcttcaagctggaccccagcgtggacttcagcgccttcatgaagcacctgaagaagctgtggaaggccctggacaaggaccagtacctgcccaggaagctgtgtgacagcgccaggaacctggagtggctgaagacagtgaatgaaagccacggctctgtggagaggagcagcctgaccctggccacagccatcaaccagaggggcatctacgtgatccaggcccccaagggcggccagaagatcagcccagacacagtgctgcacctgatcctgcctgagagccctggcagccatgaggagagccgggagtacagcctggaggaggtgaaggagctgctgaacaagctgatgctgatgtctgggaagaaggacaggaacaacacagaggtggagcgcttcagcgaggtgttctgcagcgtgcagaggctgagccaggccttcatcgacctgcacagcgctggcaacatgctgttccgcacctggatcgccatggcctactgcagccccaagcagggcgtgtccctgcagatggactttggcctggacctggtgacagagctgaaggagggcggagatgtgacagagctgctggccgccctgtgccggcagatggagcacttcctggacagctggaagagatttgtgacccagaagaggatggagcacttctacctgaacttctacacagctgagcagctggtgtacctgagcacagagctgaggaagcagcccccatctgatgctgccctgaccatgctgtccttcatcaagagcaactgcaccctgagagatgtgctgcgggcctctgtgggctgcggcagcgaggccgcccgctacaggatgagaagagtgatggaggagctgcccctgatgctgctgtctgagttcagcctggtggacaagctgcgcatcatcatggagcagagcatgcgctgcctgcctgccttcctgcctgactgcctggacctggagaccctgggccactgcctggcccacctggccggcatgggcggcagccctgtggagcgctgcctgccccggggcctgcaggtgggccagcccaacctggtggtgtgtggccacagcgaggtgctgcctgctgccctggccgtgtacatgcagacccccagccagcccctgcccacctatgatgaggtgctgctgtgcaccccagccaccacctttgaggaggtggccctgctgctgcggcgctgcctgaccctgggcagcctgggccacaaggtgtacagcctgctgtttgctgaccagctgtcctatgaggtggcccggcaggccgaggagctgttccacaacctgtgcacccagcagcaccgggaggactaccagctggtgatggtgtgtgatggagactgggagcactgctacctgcccagcgccttcagccagcacaaggtgtttgtgaccccccaggcccccctggaggccatccaggcctacctggccggccactacagagtgcccaagcagaccctgtctgctgctgctgtgttcaatgaccggctgtgtgtgggcatcgtggccagcgagagagctggggtgggcaagagcctgtatgtgaagaggctgcatgacaagatgaagatgcagctgaatgtgaagaatgtgcccctgaagaccatccggctgattgacccccaggtggatgagagccgggtgctgggcgccctgctgcccttcctggatgcccagtaccagaaggtgcctgtgctcttccacctggatgtgaccagctctgtgcagacaggcatctgggtgttcctgttcaagctgctgatcctgcagtacctgatggacatcaacgggaagatgtggctgaggaacccctgccacctgtacatcgtggagatcctggagaggaggacctctgtgcccagccgcagcagcagcgccctgcggaccagggtgccccagttctccttcctggacatcttccccaaggtgacctgcaggcctcccaaggaggtgattgacatggagctgagcgccctgcggagtgacacagagcccggcatggacctgtgggagttctgcagcgagaccttccagaggccctaccagtacctgcggcgcttcaaccagaaccaggacctggacaccttccagtaccaggagggctctgtggagggcaccccagaagaatgtctgcagcacttcctgttccactgtggggtcatcaaccccagctggagcgagctgaggaactttgcccgcttcctgaactaccagctgcgggactgtgaggccagcctcttctgcaaccccagcttcatcggggacaccctgcggggcttcaagaagtttgtggtgaccttcatgatcttcatggcccgggactttgccacccccagcctgcacaccagtgaccagagccctgggaagcacatggtgaccatggatggagtgcgggaggaggacctggcccccttcagcctgaggaagcgctgggagagcgagccccacccctacgtgttcttcaatgatgaccacaccaccatgaccttcatcggcttccacctgcagcccaacatcaatggatctgtggatgccatcagccacctgaccgggaaggtgatcaagagagatgtgatgacccgggacctgtaccagggcctgctgctgcagagggtgcccttcaacgtggactttgacaagctgcccaggcacaagaagctggagcggctgtgcctgaccctgggcatcccccaggccacagatcctgacaagacctatgagctgaccacagacaacatgctgaagatcctggccatcgagatgaggttccgctgtggcatccctgtgatcatcatgggagaaacaggctgcggcaagaccaggctcatcaagttcctgagtgacctgcggcggggcggcaccaatgctgacaccatcaagctggtgaaggtgcatggaggcaccacagctgacatgatctacagccgggtgcgggaggctgaaaatgtggcctttgccaacaaggaccagcaccagctggacaccatcctcttctttgatgaggccaacaccacagaggccatcagctgcatcaaggaggtgctgtgtgaccacatggtggatggccagcccctggctgaagattctggcctgcacatcatcgccgcctgcaacccctacaggaagcacagcgaggagatgatctgccgcctggagagcgctggcctgggctacagagtgtccatggaggagacagctgaccggctgggcagcatccccctgcggcagctggtgtacagagtgcacgccctgccccccagcctcatccccctggtgtgggactttggccagctgagtgatgtggccgagaagctgtacatccagcagatcgtgcagaggctggtggagagcatcagcctggatgaaaatggcaccagggtcatcacagaggtgctgtgtgccagccagggcttcatgaggaagacagaagatgaatgttcctttgtgtccctgagagatgtggagcgctgtgtgaaggtgttccgctggttccacgagcacagcgccatgctgctggcccagctgaatgccttcctgagcaagagctctgtgtccaagaaccacacagagcgggaccctgtgctgtggagcctgatgctggccatcggcgtgtgctaccacgccagcctggagaagaaggacagctacaggaaggccatcgcccgcttcttccccaagccctatgatgacagccggctgctgctggatgagatcacccgggcccaggacctcttcctggatggagtgcccctgaggaagaccatcgccaagaacctggccctgaaggaaaatgtgttcatgatggtggtgtgcatcgagctgaagatccccctcttcctggtgggcaagccaggcagcagcaagagcctggccaagaccatcgtggctgatgccatgcagggccctgctgcctacagcgacctcttccgcagcctgaagcaggtgcacctggtgtccttccagtgcagcccccacagcaccccccagggcatcatcagcaccttccggcagtgtgcccgcttccagcagggcaaggacctgcagcagtatgtgtctgtggtggtgctggatgaggtgggcctggccgaggacagccccaagatgcccctgaagaccctgcaccccctgctggaggatggctgcattgaagatgatcctgccccccacaagaaggtgggctttgtgggcatcagcaactgggccctggaccctgccaagatgaacagaggcatctttgtgtcccggggcagccccaatgaaacagagctgattgagagcgccaagggcatctgcagcagtgacatcctggtgcaggacagagtgcagggctactttgccagctttgccaaggcctatgagaccgtgtgcaagaggcaggacaaggagttcttcggcctgcgggactactacagcctcatcaagatggtgtttgctgctgccaaggccagcaacaggaagcccagcccccaggacatcgcccaggccgtgctgaggaacttcagcggcaaggatgacatccaggccctggacatcttcctggccaacctgcctgaggccaagtgcagcgaggaggtgagccccatgcagctgatcaagcagaacatcttcggccccagccagaaggtgcctggaggagagcaggaggatgctgagagccgctacctgctggtgctgaccaagaactacgtggccctgcagatcctgcagcagaccttctttgaaggagaccagcagcctgagatcatctttggaagtggcttccccaaggaccaggagtacacccagctgtgcaggaacatcaacagagtgaagatctgcatggagaccgggaagatggtgctgctgctgaacctgcagaacctgtatgagagcctgtatgatgccctgaaccagtactacgtgcacctgggcggccagaagtatgtggacctgggcctgggcacccaccgggtgaagtgccgggtgcaccccaacttccgcctcatcgtcatcgaggagaaggatgtggtgtacaagcacttccccatccccctcatcaaccggctggagaagcactacctggacatcaacacagtgctggagaagtggcagaagagcatcgtggaggagctgtgtgcctgggtggagaagttcatcaacgtgaaggcccaccacttccagaagaggcacaagtacagccccagtgatgtgttcatcggctaccacagtgatgcctgtgcctctgtggtgctgcaggtgattgagcggcagggcccccgggccctgacagaggagctgcaccagaaggtgtctgaggaggccaagagcatcctgctgaactgtgccaccccagatgctgtggtgcggctgagcgcctacagcctgggcggctttgctgctgagtggctgagccaggagtacttccaccggcagaggcacaacagctttgctgacttcctgcaggcccacctgcacacagctgacctggagagacatgccatcttcacagagatcaccaccttcagccggctgctgaccagccatgactgtgagatcctggagagcgaggtgacaggccgggcccccaagcccaccctgctgtggctgcagcagtttgacacagagtacagcttcctgaaggaggtgaggaactgcctgaccaacacagccaagtgcaagatcctgatcttccagacagactttgaagatggcatccgcagcgcccagctgattgccagcgccaagtacagcgtcatcaatgagatcaacaagatccgggagaatgaagatcgcatctttgtgtacttcatcaccaagctgagccgggtgggccggggcacagcctacgtgggcttccacggcggcctgtggcagagcgtgcacattgatgacctgcggcgcagcaccctgatggtgtctgatgtgacccggctgcagcacgtgaccatcagccagctgtttgcccctggggacctgcctgagctgggcctggagcacagagcagaagatggccacgaggaggccatggagacagaggccagcaccagcggggaggtggccgaggtggccgaggaggccatggagacagagagcagcgagaaggtgggcaaggagaccagcgagctgggcggcagtgatgtgtccatcctggacaccacccggctgctgcggagctgtgtgcagagcgctgtgggcatgctgcgggaccagaatgaaagctgcaccaggaacatgagaagagtggtgctgctgctgggcctgctgaatgaagatgatgcctgccacgccagcttcctgcgggtgtccaagatgaggctgagcgtcttcctgaagaagcaggaggagagccagttccaccccctggagtggctggcccgggaggcctgcaaccaggatgccctgcaggaggccggcaccttccgccacaccctgtggaagagggtgcagggcgctgtgacccccctgctggcctccatgatctccttcatcgacagagatggcaacctggagctgctgaccaggccagacaccccaccctgggcccgggacctgtggatgttcatcttcagtgacaccatgctgctgaacatccccctggtgatgaacaatgaaagacacaagggggagatggcctacatcgtggtgcagaaccacatgaacctgtctgaaaatgccagcaacaacgtgcccttctcctggaagatcaaggactacctggaggagctgtgggtgcaggcccagtacatcacagatgctgagggcctgcccaagaagtttgtggacatcttccagcagacccccctgggccgcttcctggcccagctgcatggagagccccagcaggagctgctgcagtgctacctgaaggacttcatcctgctgaccatgagggtgtccacagaggaggagctgaagttcctgcagatggccctgtggagctgcaccaggaagctgaaggccgccagcgaggcccctgaggaggaggtgtccctgccctgggtgcacctggcctaccagcgcttccgcagccggctgcagaacttcagccgcatcctgaccatctacccccaggtgctgcacagcctgatggaggcccgctggaaccacgagctggccggctgtgagatgaccctggatgcctttgctgccatggcctgcacagagatgctgaccaggaacaccctgaagcccagcccccaggcctggctgcagctggtgaagaacctgtccatgcccctggagctgatctgcagtgatgagcacatgcagggcagcggcagcctggcccaggccgtcatccgggaggtgcgggcccagtggagccgcatcttcagcacagccctgtttgtggagcacgtgctgctgggcacagagagccgggtgcctgagctgcagggcctggtgacagagcacgtgttcctgctggacaagtgcctgcgggagaacagtgatgtgaagacccacggcccctttgaggccgtgatgaggaccctgtgtgagtgcaaggagacagccagcaagaccctgagcagatttggcatccagccctgcagcatctgcctgggagatgccaaggaccctgtgtgcctgccctgtgaccacgtgcactgcctgcgctgcctgcgggcctggtttgccagcgagcagatgatctgcccctactgcctgacagccctgcctgatgagttcagccctgctgtgtcccaggcccaccgggaggccatcgagaagcacgcccgcttccggcagatgtgcaacagcttctttgtggacctggtgtccaccatctgcttcaaggacaatgcccctcctgagaaggaggtgattgagagcctgctgagcctgctgtttgtgcagaagggccgcctgagagatgctgcccagaggcactgtgagcacaccaagagcctgagccccttcaatgatgtggtggacaagacccctgtgatccgcagcgtcatcctgaagctgctgctgaagtacagcttccatgatgtgaaggactacatccaggagtacctgaccctgctgaagaagaaggccttcatcacagaggacaagacagagctgtacatgctgttcatcaactgcctggaggacagcatcctggagaagaccagcgcctacagcagaaatgatgagctgaaccacctggaggaggagggccgcttcctgaaggcctacagccctgccagccggggccgggagcccgccaatgaggcctctgtggagtacctgcaggaggtggcccgcatccggctgtgcctggacagagctgctgacttcctgtctgagcctgagggcggccctgagatggccaaggagaagcagtgctacctgcagcaggtgaagcagttctgcatccgggtggagaatgactggcaccgggtgtacctggtgaggaagctgagcagccagaggggcatggagtttgtgcagggcctgagcaagccaggccggccccaccagtgggtgttccccaaggatgtggtgaagcagcagggcctgcggcaggaccaccctggccagatggaccgctacctggtgtatggagatgagtacaaggccctgagagatgctgtggccaaggctgtgctggagtgcaagcccctgggcatcaagacagccctgaaggcctgcaagaccccccagagccagcagagcgcctacttcctgctgaccctcttccgggaggtggccatcctgtaccgcagccacaatgccagcctgcaccccaccccagagcagtgtgaggccgtgtccaagttcatcggggagtgcaagatcctgagccccccagacatcagcagatttgccaccagcctggtggacaacagcgtgcccctgctgcgggccggccccagcgacagcaacctggatggcaccgtgacagagatggccatccatgctgctgctgtgctgctgtgtggccagaatgagctgctggagcccctgaagaacctggccttctccccagccaccatggcccacgccttcctgcccaccatgcctgaggacctgctggcccaggcccggcgctggaagggcctggagcgggtgcactggtacacctgccccaacggccacccctgcagcgtgggggagtgtggccggcccatggagcagagcatctgcatcgactgccacgcccccatcggcggcatcgaccacaagcccagagatggcttccacctggtgaaggacaaggctgacaggacccagacaggccacgtgctgggcaacccccagaggagagatgtggtgacctgtgaccggggcctgccccctgtggtgttcctgctgatccggctgctgacccacctggccctgctgctgggcgccagccagagcagccaggccctgatcaacatcatcaagccccctgtgcgggaccccaagggcttcctgcagcagcacatcctgaaggacctggagcagctggccaagatgctgggccacagcgcagatgagaccatcggcgtggtgcacctggtgctgcggcggctgctgcaggagcagcaccagctgagcagccggcggctgctgaactttgacacagagctgagcaccaaggagatgaggaacaactgggagaaggagattgctgctgtgatcagccctgagctggagcacctggacaagaccctgcccaccatgaacaacctgatcagccaggacaagaggatcagcagcaaccctgtggccaagatcatctacggggaccctgtgaccttcctgccccacctgcccaggaagtctgtggtgcactgcagcaagatctggagctgcaggaagaggatcaccgtggagtacctgcagcacatcgtggagcagaagaatggcaaggagcgggtgcccatcctgtggcacttcctgcagaaggaggccgagctgcggctggtgaagttcctgcctgagatcctggccctgcagagggacctggtgaagcagttccagaatgtgcagcaggtggagtacagcagcatccggggcttcctgagcaagcacagcagtgatggcctgcggcagctgctgcacaaccgcatcaccgtcttcctgagcacctggaacaagctgcggcgcagcctggagaccaatggagagatcaacctgcccaaggactactgcagcacagacctggacctggacacagaatttgagatcctgctgccccggcggcggggcctgggcctgtgtgccacagccctggtgtcctacctgatccggctgcacaatgaaattgtgtatgctgtggagaagctgagcaaagaaaacaacagctacagcgtggatgctgctgaggtgacagagctgcacgtgatctcctatgaggtggagcgggacctgacccccctcatcctgagcaactgccagtaccaggtggaggagggccgggagaccgtgcaggagtttgacctggagaagatccagaggcagatcgtgagccgcttcctgcagggcaagccccggctgagcctgaagggcatccccaccctggtgtacagacatgactggaactatgagcacctgttcatggacatcaagaacaagatggcccaggacagcctgcccagcagcgtcatcagcgccatcagcggccagctgcagagctacagtgatgcctgtgaggtgctgtctgtggtggaggtgaccctgggcttcctgagcacagctggaggagaccccaacatgcagctgaatgtgtacacccaggacatcctgcagatgggagaccagaccatccacgtgctgaaggccctgaaccgctgccagctgaagcacaccatcgccctgtggcagttcctgagcgcccacaagtctgagcagctgctgcggctgcacaaggagccctttggagagatcagcagccgctacaaggctgacctgagcccagaaaatgccaagctgctgagcaccttcctgaaccagacaggcctggatgccttcctgctggagctgcacgagatgatcatcctgaagctgaagaacccccagacccagacagaggagcgcttccggccccagtggagcctgcgggacaccctggtgtcctacatgcagaccaaggagagcgagatcctgcctgagatggccagccagtttcctgaggagatcctgctggccagctgtgtgtctgtgtggaagacagctgctgtgctgaagtggaaccgggagatgaggtag

SEQ ID NO: 168474 - DNA, 15624 bp, synthetic construct
  misc_feature 1..15624: note = Description of Artificial Sequence: Synthetic coding sequence
  source 1..15624: mol_type = other DNA
atggagtgccccagctgccagcacgtgtccaaggaggagacccccaagttctgcagccagtgtggggagcggctgcccccagctgcccccatcgctgacagcgagaacaacaacagcaccatggccagcgccagcgagggggagatggagtgtggccaggagctgaaggaggagggcggcccctgcctcttccctggcagtgacagctggcaggagaaccctgaggagccctgcagcaaggcctcctggacagtgcaggagagcaagaagaagaagaggaagaagaagaagaagggcaacaagagcgccagcagcgagctggccagcctgcccctgagccctgccagcccctgccacctgaccctgctgagcaacccctggccccaggacacagccctgccccacagccaggcccagcagagcggccccaccggccagcccagccagcccccaggcacagccaccacccccctggagggagatggcctgagcgcccccacagaggtgggggacagccccctgcaggcccaggccctgggggaggccggcgtggccaccggcagcgaggcccagagcagcccccagttccaggaccacacagaaggagaggaccaggatgccagcatccccagcggcggccggggcctgagccaggagggcactggaccacccaccagcgctggggagggccacagcaggacagaagatgctgcccaggagctgctgctgcctgagagcaaaggaggcagcagcgagcctggaacagagctgcagaccacagagcagcaggccggggccagcgcctccatggctgtggatgctgtggccgagcccgccaatgctgtgaagggagctgggaaggagatgaaggagaagacccagaggatgaagcagcccccagccaccaccccacccttcaagacccactgccaggaggccgagaccaagaccaaggatgagatggctgctgctgaggagaaggtgggcaagaatgagcagggcgagcctgaggacctgaagaagccagagggcaagaacagatctgctgctgctgtgaagaatgagaaggagcagaagaaccaggaggctgatgtgcaggaggtgaaggccagcaccctgagccctgggggcggcgtgaccgtcttcttccacgccatcatcagcctgcacttccccttcaacccagacctgcacaaggtgttcatccggggcggggaggagtttggagagagcaagtgggacagcaacatctgtgagctgcactacacccgggacctgggccatgacagagtgctggtggagggcatcgtgtgcatcagcaagaagcacctggacaagtacatcccctacaagtatgtgatctacaacggggagagctttgaatatgagttcatctacaagcaccagcagaagaagggggagtatgtgaaccgctgcctcttcatcaagagcagcctgctgggcagcggggactggcaccagtactatgacatcgtgtacatgaagccccacggccgcctgcagaaggtgatgaaccacatcacagatggccccaggaaggacctggtgaagggcaagcagattgctgctgccctgatgctggacagcaccttcagcatcctgcagacctgggacaccatcaacctgaacagcttcttcacccagtttgagcagttctgctttgtgctgcagcagcccatgatctatgagggccaggcccagctgtggacagacctgcagtaccgggagaaggaggtgaagcgctacctgtggcagcacctgaagaagcacgtggtgcccctgcctgatggcaagagcacagacttcctgcctgtggactgccctgtgcgcagcaagctgaagacaggcctgattgtgctgtttgtggtggagaagattgagctgctgctggagggcagcctggactggctgtgccacctgctgaccagtgatgccagcagcccagatgagttccaccgggacctgagccacatcctgggcatcccccagagctggaggctgtacctggtgaacctgtgccagcgctgcatggacaccaggacctacacctggctgggcgccctgcctgtgctgcactgctgcatggagctggcccccaggcacaaggatgcctggaggcagcctgaggacacctgggccgccctggagggcctgtccttcagccccttccgggagcagatgctggacaccagcagcctgctgcagttcatgagggagaagcagcacctgctgagcattgatgagcccctcttccgctcctggttcagcctgctgcccctgagccacctggtgatgtacatggagaacttcatcgagcacctgggccgcttccctgcccacatcctggactgcctgagcggcatctactaccgcctgcccggcctggagcaggtgctgaacacccaggatgtgcaggatgtgcagaatgtgcagaacatcctggagatgctgctgcggctgctggacacctacagagacaagatccctgaggaggccctgagccccagctacctgactgtgtgcctgaagctgcacgaggccatctgcagcagcaccaagctgctgaagttctatgagctgcctgccctgtctgctgagatcgtgtgcaggatgatccggctgctgagcctggtggacagcgctggccagagagatgagaccggcaacaacagcgtgcagacagtgttccagggcaccctggccgccaccaagcgctggctgcgggaggtgttcaccaagaacatgctgaccagcagcggggccagcttcacctacgtgaaggagattgaggtgtggaggcggctggtggagatccagtttcctgctgagcacggctggaaggagagcctgctgggggacatggagtggaggctgaccaaggaggagcccctgagccagatcacagcctactgcaacagctgctgggacaccaagggcctggaggacagcgtggccaagacctttgagaagtgcatcatcgaggccgtgtcctctgcctgccagagccagaccagcatcctgcagggcttctcctacagcgacctgaggaagtttggaattgtgctgtctgctgtgatcaccaagtcctggcccaggacagctgacaacttcaatgacatcctgaagcacctgctgaccctggctgatgtgaagcacgtgttccggctgtgtggcacagatgagaagatcctggccaacgtgacagaagatgccaagaggctgattgctgtggccgacagcgtgctgaccaaggtggtgggggacctgctgagcggcaccatcctggtgggccagctggagctgatcatcaagcacaagaaccagttcctggacatctggcagctgcgggagaagagcctgagcccccaggatgagcagtgtgctgtggaggaggccctggactggaggcgggaggagctgctgctgctgaagaaggagaagagatgtgtggacagcctgctgaagatgtgtggaaatgtgaagcacctgatccaggtggactttggagtgctggccgtgcgccacagccaggacctgagcagcaagaggctgaatgacacagtgacagtgcggctgagcaccagcagcaacagccagagggccacccactaccacctgagcagccaggtgcaggagatggccggcaagattgacctgctgcgggacagccacatcttccagctgttctggagggaggccgctgagcccctgtctgagcccaaggaggaccaggaggccgctgagctgctgtctgagcctgaggaggagagcgagcggcacatcctggagctggaggaggtgtatgactacctgtaccagcccagctacaggaagttcatcaagctgcaccaggacctgaagtctggagaggtgaccctggccgagattgatgtgatcttcaaggactttgtgaacaagtacacagacctggacagcgagctgaagatcatgtgcaccgtggaccaccaggaccagagggactggatcaaggacagagtggagcagatcaaggagtaccaccacctgcaccaggccgtgcatgctgccaaggtgatcctgcaggtgaaggagagcctgggcctgaatggagacttctctgtgctgaacaccctgctgaacttcacagacaactttgatgacttcagaagagagaccctggaccagatcaaccaggagctgatccaggccaagaagctgctgcaggacatcagcgaggcccgctgcaagggcctgcaggccctgagcctgaggaaggagttcatctgctgggtgcgggaggccctgggcggcatcaatgagctgaaggtgtttgtggacctggccagcatctctgctggggagaatgacattgatgtggacagagtggcctgcttccatgatgctgtgcagggctacgccagcctgctcttcaagctggaccccagcgtggacttcagcgccttcatgaagcacctgaagaagctgtggaaggccctggacaaggaccagtacctgcccaggaagctgtgtgacagcgccaggaacctggagtggctgaagacagtgaatgaaagccacggctctgtggagaggagcagcctgaccctggccacagccatcaaccagaggggcatctacgtgatccaggcccccaagggcggccagaagatcagcccagacacagtgctgcacctgatcctgcctgagagccctggcagccatgaggagagccgggagtacagcctggaggaggtgaaggagctgctgaacaagctgatgctgatgtctgggaagaaggacaggaacaacacagaggtggagcgcttcagcgaggtgttctgcagcgtgcagaggctgagccaggccttcatcgacctgcacagcgctggcaacatgctgttccgcacctggatcgccatggcctactgcagccccaagcagggcgtgtccctgcagatggactttggcctggacctggtgacagagctgaaggagggcggagatgtgacagagctgctggccgccctgtgccggcagatggagcacttcctggacagctggaagagatttgtgacccagaagaggatggagcacttctacctgaacttctacacagctgagcagctggtgtacctgagcacagagctgaggaagcagcccccatctgatgctgccctgaccatgctgtccttcatcaagagcaactgcaccctgagagatgtgctgcgggcctctgtgggctgcggcagcgaggccgcccgctacaggatgagaagagtgatggaggagctgcccctgatgctgctgtctgagttcagcctggtggacaagctgcgcatcatcatggagcagagcatgcgctgcctgcctgccttcctgcctgactgcctggacctggagaccctgggccactgcctggcccacctggccggcatgggcggcagccctgtggagcgctgcctgccccggggcctgcaggtgggccagcccaacctggtggtgtgtggccacagcgaggtgctgcctgctgccctggccgtgtacatgcagacccccagccagcccctgcccacctatgatgaggtgctgctgtgcaccccagccaccacctttgaggaggtggccctgctgctgcggcgctgcctgaccctgggcagcctgggccacaaggtgtacagcctgctgtttgctgaccagctgtcctatgaggtggcccggcaggccgaggagctgttccacaacctgtgcacccagcagcaccgggaggactaccagctggtgatggtgtgtgatggagactgggagcactgctacctgcccagcgccttcagccagcacaaggtgtttgtgaccccccaggcccccctggaggccatccaggcctacctggccggccactacagagtgcccaagcagaccctgtctgctgctgctgtgttcaatgaccggctgtgtgtgggcatcgtggccagcgagcgggccggcgtgggcaagagcctgtatgtgaagaggctgcatgacaagatgaagatgcagctgaatgtgaagaatgtgcccctgaagaccatccggctgattgacccccaggtggatgagagccgggtgctgggcgccctgctgcccttcctggatgcccagtaccagaaggtgcctgtgctcttccacctggatgtgaccagctctgtgcagacaggcatctgggtgttcctgttcaagctgctgatcctgcagtacctgatggacatcaatggcaagatgtggctgaggaacccctgccacctgtacatcgtggagatcctggagaggaggacctctgtgcccagccgcagcagcagcgccctgcggaccagggtgccccagttctccttcctggacatcttccccaaggtgacctgccggccccccaaggaggtgattgacatggagctgagcgccctgcggagtgacacagagcccggcatggacctgtgggagttctgcagcgagaccttccagaggccctaccagtacctgcggcgcttcaaccagaaccaggacctggacaccttccagtaccaggagggctctgtggagggcaccccagaggagtgcctgcagcacttcctgttccactgtggggtcatcaaccccagctggagcgagctgaggaactttgcccgcttcctgaactaccagctgcgggactgtgaggccagcctcttctgcaaccccagcttcatcggggacaccctgcggggcttcaagaagtttgtggtgaccttcatgatcttcatggcccgggactttgccacccccagcctgcacaccagtgaccagagccctgggaagcacatggtgaccatggatggagtgcgggaggaggacctggcccccttcagcctgaggaagcgctgggagagcgagccccacccctacgtgttcttcaatgatgaccacaccaccatgaccttcatcggcttccacctgcagcccaacatcaatggatctgtggatgccatcagccacctgaccgggaaggtgatcaagagagatgtgatgacccgggacctgtaccagggcctgctgctgcagagggtgcccttcaacgtggactttgacaagctgcccaggcacaagaagctggagcggctgtgcctgaccctgggcatcccccaggccacagatcctgacaagacctatgagctgaccacagacaacatgctgaagatcctggccatcgagatgaggttccgctgtggcatccctgtgatcatcatgggagagaccggctgtgggaagaccaggctcatcaagttcctgagtgacctgcggcggggcggcaccaatgctgacaccatcaagctggtgaaggtgcacggcggcaccacagctgacatgatctacagccgggtgcgggaggccgagaatgtggcctttgccaacaaggaccagcaccagctggacaccatcctcttctttgatgaggccaacaccacagaggccatcagctgcatcaaggaggtgctgtgtgaccacatggtggatggccagcccctggccgaggacagcggcctgcacatcatcgccgcctgcaacccctacaggaagcacagcgaggagatgatctgccgcctggagagcgctggcctgggctacagagtgtccatggaggagacagctgaccggctgggcagcatccccctgcggcagctggtgtacagagtgcacgccctgccccccagcctcatccccctggtgtgggactttggccagctgagtgatgtggccgagaagctgtacatccagcagatcgtgcagaggctggtggagagcatcagcctggatgaaaatggcaccagggtcatcacagaggtgctgtgtgccagccagggcttcatgaggaagacagaagatgagtgcagctttgtgtccctgagagatgtggagcgctgtgtgaaggtgttccgctggttccacgagcacagcgccatgctgctggcccagctgaatgccttcctgagcaagagctctgtgtccaagaaccacacagagcgggaccctgtgctgtggagcctgatgctggccatcggcgtgtgctaccacgccagcctggagaagaaggacagctacaggaaggccatcgcccgcttcttccccaagccctatgatgacagccggctgctgctggatgagatcacccgggcccaggacctcttcctggatggagtgcccctgaggaagaccatcgccaagaacctggccctgaaggaaaatgtgttcatgatggtggtgtgcatcgagctgaagatccccctcttcctggtgggcaagccaggcagcagcaagagcctggccaagaccatcgtggctgatgccatgcagggccctgctgcctacagcgacctcttccgcagcctgaagcaggtgcacctggtgtccttccagtgcagcccccacagcaccccccagggcatcatcagcaccttccggcagtgtgcccgcttccagcagggcaaggacctgcagcagtatgtgtctgtggtggtgctggatgaggtgggcctggccgaggacagccccaagatgcccctgaagaccctgcaccccctgctggaggatggctgcattgaagatgatcctgccccccacaagaaggtgggctttgtgggcatcagcaactgggccctggaccctgccaagatgaacagaggcatctttgtgtcccggggcagccccaatgaaacagagctgattgaaagtgccaagggcatctgcagcagtgacatcctggtgcaggacagagtgcagggctactttgccagctttgccaaggcctatgaaacagtgtgcaagaggcaggacaaggagttcttcggcctgcgggactactacagcctcatcaagatggtgtttgctgctgccaaggccagcaacaggaagcccagcccccaggacatcgcccaggccgtgctgaggaacttcagcggcaaggatgacatccaggccctggacatcttcctggccaacctgcctgaggccaagtgcagcgaggaggtgagccccatgcagctgatcaagcagaacatcttcggccccagccagaaggtgcctggaggagagcaggaggatgctgagagccgctacctgctggtgctgaccaagaactacgtggccctgcagatcctgcagcagaccttctttgaaggagaccagcagcctgagatcatcttcggcagcggcttccccaaggaccaggagtacacccagctgtgcaggaacatcaacagagtgaagatctgcatggagaccgggaagatggtgctgctgctgaacctgcagaacctgtatgagagcctgtatgatgccctgaaccagtactacgtgcacctgggcggccagaagtatgtggacctgggcctgggcacccaccgggtgaagtgccgggtgcaccccaacttccggctgattgtgattgaggagaaggatgtggtgtacaagcacttccccatccccctcatcaaccggctggagaagcactacctggacatcaacacagtgctggagaagtggcagaagagcatcgtggaggagctgtgtgcctgggtggagaagttcatcaacgtgaaggcccaccacttccagaagaggcacaagtacagccccagtgatgtgttcatcggctaccacagtgatgcctgtgcctctgtggtgctgcaggtgattgaaaggcagggcccccgggccctgacagaggagctgcaccagaaggtgtctgaggaggccaagagcatcctgctgaactgtgccaccccagatgctgtggtgcggctgagcgcctacagcctgggcggctttgctgctgagtggctgagccaggagtacttccaccggcagaggcacaacagctttgctgacttcctgcaggcccacctgcacacagctgacctggagagacatgccatcttcacagagatcaccaccttcagccggctgctgaccagccatgactgtgagatcctggagagcgaggtgacaggccgggcccccaagcccaccctgctgtggctgcagcagtttgacacagagtacagcttcctgaaggaggtgaggaactgcctgaccaacacagccaagtgcaagatcctgatcttccagacagactttgaagatggcatccgcagcgcccagctgattgccagcgccaagtacagcgtcatcaatgagatcaacaagatcagagaaaatgaagatcgcatctttgtgtacttcatcaccaagctgagccgggtgggccggggcacagcctacgtgggcttccatggaggcctgtggcagagcgtgcacattgatgacctgcggcgcagcaccctgatggtgtctgatgtgacccggctgcagcacgtgaccatcagccagctgtttgcccctggggacctgcctgagctgggcctggagcacagagcagaagatggccacgaggaggccatggagacagaggccagcaccagcggggaggtggccgaggtggccgaggaggccatggagacagagagcagcgagaaggtgggcaaggagaccagcgagctgggcggcagtgatgtgtccatcctggacaccacccggctgctgcggagctgtgtgcagagcgctgtgggcatgctgcgggaccagaatgaaagctgcaccaggaacatgagaagagtggtgctgctgctgggcctgctgaatgaagatgatgcctgccacgccagcttcctgcgggtgtccaagatgaggctgtctgtgttcctgaagaagcaggaggagagccagttccaccccctggagtggctggcccgggaggcctgcaaccaggatgccctgcaggaggccggcaccttccgccacaccctgtggaagagggtgcagggcgctgtgacccccctgctggcctccatgatctccttcatcgacagagatggcaacctggagctgctgaccaggccagacaccccaccctgggcccgggacctgtggatgttcatcttcagtgacaccatgctgctgaacatccccctggtgatgaacaatgaaagacacaagggggagatggcctacatcgtggtgcagaaccacatgaacctgtctgaaaatgccagcaacaacgtgcccttctcctggaagatcaaggactacctggaggagctgtgggtgcaggcccagtacatcacagatgctgagggcctgcccaagaagtttgtggacatcttccagcagacccccctgggccgcttcctggcccagctgcacggggagccccagcaggagctgctgcagtgctacctgaaggacttcatcctgctgaccatgagggtgtccacagaggaggagctgaagttcctgcagatggccctgtggagctgcaccaggaagctgaaggccgccagcgaggcccctgaggaggaggtgtccctgccctgggtgcacctggcctaccagcgcttccgcagccggctgcagaacttcagccgcatcctgaccatctacccccaggtgctgcacagcctgatggaggcccgctggaaccacgagctggccggctgtgagatgaccctggatgcctttgctgccatggcctgcacagagatgctgaccaggaacaccctgaagcccagcccccaggcctggctgcagctggtgaagaacctgtccatgcccctggagctgatctgcagtgatgagcacatgcagggcagcggcagcctggcccaggccgtcatccgggaggtgcgggcccagtggagccgcatcttcagcacagccctgtttgtggagcacgtgctgctgggcacagagagccgggtgcctgagctgcagggcctggtgacagaacatgtgttcctgctggacaagtgcctgagagaaaattctgatgtgaagacccacggcccctttgaagctgtgatgaggaccctgtgtgagtgcaaggagacagccagcaagaccctgagccgcttcggcatccagccctgcagcatctgcctgggagatgccaaggaccctgtgtgcctgccctgtgaccacgtgcactgcctgcgctgcctgcgggcctggtttgccagcgagcagatgatctgcccctactgcctgacagccctgcctgatgagttctccccagctgtgtcccaggcccaccgggaggccatcgagaagcacgcccgcttccggcagatgtgcaacagcttctttgtggacctggtgtccaccatctgcttcaaggacaatgcccctcctgagaaggaggtgattgagagcctgctgagcctgctgtttgtgcagaagggccgcctgagagatgctgcccagaggcactgtgagcacaccaagagcctgagccccttcaatgatgtggtggacaagacccctgtgatccgcagcgtcatcctgaagctgctgctgaagtacagcttccatgatgtgaaggactacatccaggagtacctgaccctgctgaagaagaaggccttcatcacagaggacaagacagagctgtacatgctgttcatcaactgcctggaggacagcatcctggagaagaccagcgcctacagcagaaatgatgagctgaaccacctggaggaggagggccgcttcctgaaggcctacagccctgccagccggggccgggagcccgccaatgaggcctctgtggagtacctgcaggaggtggcccgcatccggctgtgcctggacagagctgctgacttcctgtctgagcctgagggcggccctgagatggccaaggagaagcagtgctacctgcagcaggtgaagcagttctgcatccgggtggagaatgactggcaccgggtgtacctggtgaggaagctgagcagccagaggggcatggagtttgtgcagggcctgagcaagccaggccggccccaccagtgggtgttccccaaggatgtggtgaagcagcagggcctgcggcaggaccaccctggccagatggaccgctacctggtgtatggagatgagtacaaggccctgagagatgctgtggccaaggctgtgctggagtgcaagcccctgggcatcaagacagccctgaaggcctgcaagaccccccagagccagcagagcgcctacttcctgctgaccctcttccgggaggtggccatcctgtaccgcagccacaatgccagcctgcaccccaccccagagcagtgtgaggccgtgtccaagttcatcggggagtgcaagatcctgagccccccagacatcagcagatttgccaccagcctggtggacaacagcgtgcccctgctgcgggccggccccagcgacagcaacctggatggcaccgtgacagagatggccatccacgccgctgctgtgctgctgtgtggccagaatgagctgctggagcccctgaagaacctggccttcagccctgccaccatggcccacgccttcctgcccaccatgcctgaggacctgctggcccaggcccggcgctggaagggcctggagcgggtgcactggtacacctgccccaacggccacccctgcagcgtgggagaatgtggccggcccatggagcagagcatctgcatcgactgccacgcccccatcggcggcatcgaccacaagcccagagatggcttccacctggtgaaggacaaggctgacaggacccagacaggccacgtgctgggcaacccccagaggagagatgtggtgacctgtgaccggggcctgccccctgtggtgttcctgctgatccggctgctgacccacctggccctgctgctgggcgccagccagagcagccaggccctgatcaacatcatcaagccccctgtgcgggaccccaagggcttcctgcagcagcacatcctgaaggacctggagcagctggccaagatgctgggccacagcgcagatgagaccatcggcgtggtgcacctggtgctgcggcggctgctgcaggagcagcaccagctgagcagccggcggctgctgaactttgacacagagctgagcaccaaggagatgaggaacaactgggagaaggagattgctgctgtgatcagccctgagctggagcacctggacaagaccctgcccaccatgaacaacctgatcagccaggacaagaggatcagcagcaaccctgtggccaagatcatctatggagaccctgtgaccttcctgccccacctgcccaggaagtctgtggtgcactgcagcaagatctggagctgcaggaagaggatcaccgtggagtacctgcagcacatcgtggagcagaagaatggcaaggagcgggtgcccatcctgtggcacttcctgcagaaggaggccgagctgcggctggtgaagttcctgcctgagatcctggccctgcagagggacctggtgaagcagttccagaatgtgcagcaggtggagtacagcagcatccggggcttcctgagcaagcacagcagtgatggcctgcggcagctgctgcacaaccgcatcaccgtcttcctgagcacctggaacaagctgcggcgcagcctggagaccaacggggagatcaacctgcccaaggactactgcagcacagacctggacctggacacagaatttgagatcctgctgcccaggagaagaggcctgggcctgtgtgccacagccctggtgtcctacctgatccggctgcacaatgagatcgtgtatgctgtggagaagctgagcaaggagaacaacagctacagcgtggatgctgctgaggtgacagagctgcacgtgatctcctatgaggtggagcgggacctgacccccctcatcctgagcaactgccagtaccaggtggaggagggccgggagaccgtgcaggagtttgacctggagaagatccagaggcagatcgtgagccgcttcctgcagggcaagccccggctgagcctgaagggcatccccaccctggtgtacagacatgactggaactatgagcacctgttcatggacatcaagaacaagatggcccaggacagcctgcccagcagcgtcatcagcgccatcagcggccagctgcagagctacagtgatgcctgtgaggtgctgtctgtggtggaggtgaccctgggcttcctgagcacagctggaggagaccccaacatgcagctgaatgtgtacacccaggacatcctgcagatgggagaccagaccatccacgtgctgaaggccctgaaccgctgccagctgaagcacaccatcgccctgtggcagttcctgagcgcccacaagtctgagcagctgctgcggctgcacaaggagccctttggagagatcagcagccgctacaaggctgacctgagcccagaaaatgccaagctgctgagcaccttcctgaaccagacaggcctggatgccttcctgctggagctgcacgagatgatcatcctgaagctgaagaacccccagacccagacagaggagcgcttccggccccagtggagcctgcgggacaccctggtgtcctacatgcagaccaaggagagcgagatcctgcctgagatggccagccagtttcctgaggagatcctgctggccagctgtgtgtctgtgtggaagacagctgctgtgctgaagtggaaccgggagatgaggtag

SEQ ID NO: 168475 - DNA, 2772 bp, synthetic construct
  misc_feature 1..2772: note = Description of Artificial Sequence: Synthetic coding sequence
  source 1..2772: mol_type = other DNA
atggaggagggcaacaacaatgaggaggtgatccacctgaacaacttccactgccaccggggccaggagtggatcaacctgagagatggccccatcaccatcagtgacagcagtgatgaggagcgcatccccatgctggtgaccccagccccccagcagcacgaggaggaggacctggatgatgatgtgatcctgacagagaccaacaagccccagaggagccggcccaacctgatcaagccagctgcccagtggcaggacctgaagaggctgggggaggagcggcccaagaagagcagagctgcctttgaaagtgacaagagcagctacttctctgtgtgcaacaaccccctgtttgattctggggcccaggatgattctgaagatgattatggagagttcctggacctgggccccccaggcatcagcgagttcaccaagcccagcggccagacagagcgggagcccaagccaggccccagccacaaccaggccgccaatgacatcgtgaaccccaggtctgagcagaaggtgatcatcctggaggagggcagcctgctgtacacagaaagtgaccccctggagacccagaaccagagcagcgaggacagcgagacagagctgctgagcaacctgggggagagcgctgccctggctgatgaccaggccatcgaggaggactgctggctggaccacccctacttccagagcctgaaccagcagccccgggagatcaccaaccaggtggtgccccaggagcggcagcctgaggccgagctgggccgcctgctcttccagcacgagttccctggccctgccttccccaggcctgagccccagcagggcggcatcagcggccccagcagcccccagcctgcccaccccctgggggagtttgaggaccagcagctggccagtgatgatgaggagcccggccctgccttccccatgcaggagagccaggagcccaacctggagaacatctggggccaggaggccgctgaggtggaccaggagctggtggagctgctggtgaaggagacagaggcccgcttcccagatgtggccaacggcttcatcgaggagatcatccacttcaagaactactatgacctgaatgtgctgtgcaacttcctgctggagaacccagactaccccaagagagaagatcgcatcatcatcaaccccagcagcagcctgctggccagccaggatgagaccaagctgcccaagattgacttctttgactacagcaagctgacccccctggaccagcgctgcttcatccaggccgctgacctgctgatggctgacttcaaggtgctgagcagccaggacatcaagtgggccctgcacgagctgaagggccactacgccatcaccaggaaggccctgagtgatgccatcaagaagtggcaggagctgagccctgagaccagcggcaagaggaagaagaggaagcagatgaaccagtacagctacatcgacttcaagtttgagcagggcgacatcaagattgagaagaggatgttcttcctggagaacaagagaagacactgccgctcctatgacagaagagccctgctgcctgctgtgcagcaggagcaggagttctatgagcagaagatcaaggagatggccgagcacgaggacttcctgctggccctgcagatgaatgaggagcagtaccagaaggatggccagctgattgaatgtcgctgctgctacggggagttcccctttgaggagctgacccagtgtgctgatgcccacctgttctgcaaggagtgcctgatccgctatgcccaggaggccgtgtttggaagtggcaagctggagctgagctgcatggagggcagctgcacctgcagcttccccaccagcgagctggagaaggtgctgccccagaccatcctgtacaagtactatgaaaggaaggccgaggaggaggtggccgccgcctatgcagatgagctggtgcgctgccccagctgcagcttccctgccctgctggacagtgatgtgaagcgcttcagctgccccaacccccactgcaggaaggagacctgcaggaagtgccagggcctgtggaaggagcacaacggcctgacctgtgaggagctggccgagaaggatgacatcaagtaccgcaccagcattgaggagaagatgacagctgcccgcatcaggaagtgccacaagtgtggcaccggcctcatcaagtctgagggctgcaacaggatgagctgccgctgtggggcccagatgtgctacctgtgccgggtgtccatcaatggctatgaccacttctgccagcaccccaggagccctggggccccctgccaggagtgcagccgctgcagcctgtggacagaccccacagaagatgatgagaagctgattgaggagatccagaaggaggccgaggaggagcagaagaggaagaatggagagaacaccttcaagagaattggcccccccctggagaagcctgtggagaaggtgcagagggtggaggccctgcccaggcctgtgccccagaacctgccccagccccagatgccaccctatgcctttgcccacccccccttccccctgccccctgtgcggcctgtgttcaacaacttccccctgaacatgggccccatcccagccccctacgtgccccccctgcccaacgtgcgggtgaactatgactttggccccatccacatgcccctggagcacaacctgcccatgcacttcggcccccagcccaggcaccgcttctag

SEQ ID NO: 168476 - DNA, 63 bp, synthetic construct
  misc_feature 1..63: note = Description of Artificial Sequence: Synthetic coding sequence
  source 1..63: mol_type = other DNA
atggaggagggcaacaacaatgaggaggtgatccacctgaacaacttccactgccacaggtag

SEQ ID NO: 168477 - DNA, 2601 bp, synthetic construct
  misc_feature 1..2601: note = Description of Artificial Sequence: Synthetic coding sequence
  source 1..2601: mol_type = other DNA
atggaggagggcaacaacaatgaggaggtgatccacctgaacaacttccactgccaccggggccaggagtggatcaacctgagagatggccccatcaccatcagtgacagcagtgatgaggagcgcatccccatgctggtgaccccagccccccagcagcacgaggaggaggacctggatgatgatgtgatcctgacagaagatgacagtgaagatgattatggagagttcctggacctgggccccccaggcatcagcgagttcaccaagcccagcggccagacagagcgggagcccaagccaggccccagccacaaccaggccgccaatgacatcgtgaaccccaggtctgagcagaaggtgatcatcctggaggagggcagcctgctgtacacagaaagtgaccccctggagacccagaaccagagcagtgaagattctgaaacagagctgctgagcaacctgggggagagcgctgccctggctgatgaccaggccatcgaggaggactgctggctggaccacccctacttccagagcctgaaccagcagccccgggagatcaccaaccaggtggtgccccaggagcggcagcctgaggccgagctgggccgcctgctcttccagcacgagttccctggccctgccttccccaggcctgagccccagcagggcggcatcagcggccccagcagcccccagcctgcccaccccctgggggagtttgaggaccagcagctggccagtgatgatgaggagcccggccctgccttccccatgcaggagagccaggagcccaacctggagaacatctggggccaggaggccgctgaggtggaccaggagctggtggagctgctggtgaaggagacagaggcccgcttcccagatgtggccaacggcttcatcgaggagatcatccacttcaagaactactatgacctgaatgtgctgtgcaacttcctgctggagaacccagactaccccaagcgggaggaccgcatcatcatcaaccccagcagcagcctgctggccagccaggatgagaccaagctgcccaagattgacttctttgactacagcaagctgacccccctggaccagcgctgcttcatccaggccgctgacctgctgatggctgacttcaaggtgctgagcagccaggacatcaagtgggccctgcacgagctgaagggccactacgccatcaccaggaaggccctgagtgatgccatcaagaagtggcaggagctgagccctgagaccagcggcaagaggaagaagaggaagcagatgaaccagtacagctacatcgacttcaagtttgagcagggcgacatcaagattgagaagaggatgttcttcctggagaacaagaggaggcactgccgctcctatgaccggcgggccctgctgcctgctgtgcagcaggagcaggagttctatgagcagaagatcaaggagatggccgagcacgaggacttcctgctggccctgcagatgaatgaggagcagtaccagaaggatggccagctgattgagtgccgctgctgctatggagagttcccctttgaggagctgacccagtgtgctgatgcccacctgttctgcaaggaatgtctcatccgctatgcccaggaggccgtgtttggcagcggcaagctggagctgagctgcatggagggcagctgcacctgcagcttccccaccagcgagctggagaaggtgctgccccagaccatcctgtacaagtactatgaaaggaaggccgaggaggaggtggccgccgcctatgcagatgagctggtgcgctgccccagctgcagcttccctgccctgctggacagtgatgtgaagcgcttcagctgccccaacccccactgcaggaaggagacctgcaggaagtgccagggcctgtggaaggagcacaacggcctgacctgtgaggagctggccgagaaggatgacatcaagtaccgcaccagcattgaggagaagatgacagctgcccgcatcaggaagtgccacaagtgtggcaccggcctcatcaagtctgagggctgcaacaggatgagctgccgctgtggggcccagatgtgctacctgtgccgggtgtccatcaatggctatgaccacttctgccagcaccccaggagccctggggccccctgccaggagtgcagccgctgcagcctgtggacagaccccacagaagatgatgagaagctgattgaggagatccagaaggaggccgaggaggagcagaagaggaagaatggagagaacaccttcaagagaattggcccccccctggagaagcctgtggagaaggtgcagagggtggaggccctgcccaggcctgtgccccagaacctgccccagccccagatgccaccctatgcctttgcccacccccccttccccctgccccctgtgcggcctgtgttcaacaacttccccctgaacatgggccccatcccagccccctacgtgccccccctgcccaacgtgcgggtgaactatgactttggccccatccacatgcccctggagcacaacctgcccatgcacttcggcccccagcccaggcaccgcttctag

SEQ ID NO: 168478 - DNA, 2037 bp, synthetic construct
  misc_feature 1..2037: note = Description of Artificial Sequence: Synthetic coding sequence
  source 1..2037: mol_type = other DNA
atggaggagggcaacaacaatgaggaggtgatccacctgaacaacttccactgccaccggggccaggagtggatcaacctgagagatggccccatcaccatcagtgacagcagtgatgaggagcgcatccccatgctggtgaccccagccccccagcagcacgaggaggaggacctggatgatgatgtgatcctgacagagaccaacaagccccagaggagccggcccaacctgatcaagccagctgcccagtggcaggaggccgctgaggtggaccaggagctggtggagctgctggtgaaggagacagaggcccgcttcccagatgtggccaacggcttcatcgaggagatcatccacttcaagaactactatgacctgaatgtgctgtgcaacttcctgctggagaacccagactaccccaagcgggaggaccgcatcatcatcaaccccagcagcagcctgctggccagccaggatgagaccaagctgcccaagattgacttctttgactacagcaagctgacccccctggaccagcgctgcttcatccaggccgctgacctgctgatggctgacttcaaggtgctgagcagccaggacatcaagtgggccctgcacgagctgaagggccactacgccatcaccaggaaggccctgagtgatgccatcaagaagtggcaggagctgagccctgagaccagcggcaagaggaagaagaggaagcagatgaaccagtacagctacatcgacttcaagtttgagcagggcgacatcaagattgagaagaggatgttcttcctggagaacaagaggaggcactgccgctcctatgaccggcgggccctgctgcctgctgtgcagcaggagcaggagttctatgagcagaagatcaaggagatggccgagcacgaggacttcctgctggccctgcagatgaatgaggagcagtaccagaaggatggccagctgattgagtgccgctgctgctatggagagttcccctttgaggagctgacccagtgtgctgatgcccacctgttctgcaaggaatgtctcatccgctatgcccaggaggccgtgtttggcagcggcaagctggagctgagctgcatggagggcagctgcacctgcagcttccccaccagcgagctggagaaggtgctgccccagaccatcctgtacaagtactatgaaaggaaggccgaggaggaggtggccgccgcctatgcagatgagctggtgcgctgccccagctgcagcttccctgccctgctggacagtgatgtgaagcgcttcagctgccccaacccccactgcaggaaggagacctgcaggaagtgccagggcctgtggaaggagcacaacggcctgacctgtgaggagctggccgagaaggatgacatcaagtaccgcaccagcattgaggagaagatgacagctgcccgcatcaggaagtgccacaagtgtggcaccggcctcatcaagtctgagggctgcaacaggatgagctgccgctgtggggcccagatgtgctacctgtgccgggtgtccatcaatggctatgaccacttctgccagcaccccaggagccctggggccccctgccaggagtgcagccgctgcagcctgtggacagaccccacagaagatgatgagaagctgattgaggagatccagaaggaggccgaggaggagcagaagaggaagaatggagagaacaccttcaagagaattggcccccccctggagaagcctgtggagaaggtgcagagggtggaggccctgcccaggcctgtgccccagaacctgccccagccccagatgccaccctatgcctttgcccacccccccttccccctgccccctgtgcggcctgtgttcaacaacttccccctgaacatgggccccatcccagccccctacgtgccccccctgcccaacgtgcgggtgaactatgactttggccccatccacatgcccctggagcacaacctgcccatgcacttcggcccccagcccaggcaccgcttctag

SEQ ID NO: 168479 - DNA, 447 bp, synthetic construct
  misc_feature 1..447: note = Description of Artificial Sequence: Synthetic coding sequence
  source 1..447: mol_type = other DNA
atgagcagtgacttcccccactacaacttcaggatgcccaacatcggcttccagaacctgcccctgaacatctacatcgtggtgtttggaacagccatctttgtgttcatcctgagcctgctcttctgctgctacctgatccggctgcggcaccaggcccacaaggagttctacgcctacaagcaggtgatcctgaaggagaaggtgaaggagctgaacctgcacgagctgtgtgctgtgtgcctggaggacttcaagcccagagatgagctgggcatctgcccctgcaagcacgccttccacaggaaatgtctcatcaagtggctggaggtgaggaaggtgtgccccctgtgcaacatgcctgtgctgcagctggcccagctgcacagcaagcaggaccggggccccccccagggccccctgcccggggctgaaaatattgtgtag

SEQ ID NO: 168480 - DNA, 447 bp, synthetic construct; identical to SEQ ID NO: 168479
  misc_feature 1..447: note = Description of Artificial Sequence: Synthetic coding sequence
  source 1..447: mol_type = other DNA

SEQ ID NO: 168481 - DNA, 510 bp, synthetic construct
  misc_feature 1..510: note = Description of Artificial Sequence: Synthetic coding sequence
  source 1..510: mol_type = other DNA
atgctgaacaagtctggagagagccgctacccagccctcttccctgtgctgggcggcagctccatgagcagtgacttcccccactacaacttcaggatgcccaacatcggcttccagaacctgcccctgaacatctacatcgtggtgtttggaacagccatctttgtgttcatcctgagcctgctcttctgctgctacctgatccggctgcggcaccaggcccacaaggagttctacgcctacaagcaggtgatcctgaaggagaaggtgaaggagctgaacctgcacgagctgtgtgctgtgtgcctggaggacttcaagcccagagatgagctgggcatctgcccctgcaagcacgccttccacaggaagtgcctgatcaagtggctggaggtgaggaaggtgtgccccctgtgcaacatgcctgtgctgcagctggcccagctgcacagcaagcaggaccggggccccccccagggccccctgcctggagctgagaacatcgtgtag

SEQ ID NO: 168482 - DNA, 510 bp, synthetic construct; identical to SEQ ID NO: 168481
  misc_feature 1..510: note = Description of Artificial Sequence: Synthetic coding sequence
  source 1..510: mol_type = other DNA

SEQ ID NO: 168483 - DNA, 1302 bp, synthetic construct
  misc_feature 1..1302: note = Description of Artificial Sequence: Synthetic coding sequence
  source 1..1302: mol_type = other DNA
atggaggccgtgtacctggtggtgaatggcctgggcctggtgctggatgtgctgaccctggtgctggacctgaacttcctgctggtgagcagcctgctggccagcctggcctggctgctggcctttgtgtacaacctgccccacacagtgctgaccagcctgctgcacctgggccggggcgtgctgctgagcctgctggccctgattgaagctgtggtgcgcttcacctgtggcggcctgcaggccctgtgcaccctgctgtacagctgctgcagcggcctggagagcctgaagctgctgggccacctggccagccacggggccctgcggagccgggagatcctgcaccggggcgtgctgaatgtggtgagcagcggccacgccctgctgcggcaggcctgtgacatctgtgccatcgccatgagcctggtggcctacgtgatcaacagcctggtgaacatctgcctgattggcacccagaacctcttcagcctggtgctggccctgtgggatgctgtgacaggccccctgtggaggatgacagatgtggtggccgccttcctggcccacatcagcagcagcgctgtggccatggccatcctgctgtggaccccctgccagctggccctggagctgctggccagcgctgcccggctgctggccagctttgtgctggtgaacctgaccggcctggtgctgctggcctgtgtgctggccgtgacagtgacagtgctgcacccagacttcaccctgcggctggccacccaggccctgagccagctgcacgcccggcccagctaccaccggctgcgggaggatgtgatgaggctgagccggctggccctgggcagcgaggcctggaggagagtgtggagccgcagcctgcagctggcctcctggcccaacagaggaggagcccctggggccccccagggcgaccccatgagggtcttctctgtgaggacccggcggcaggacaccctgcctgaggccggcagaagaagtgaagctgaggaggaggaggcccggaccatccgggtgacccctgtgcggggccgggagcggctgaatgaggaggagcccccaggcggccaggacccctggaagctgctgaaggagcaggaggagaggaagaagtgtgtgatctgccaggaccagagcaagacagtgctgctgctgccctgccgccacctgtgcctgtgccaggcctgcacagagatcctgatgaggcaccctgtgtaccacaggaactgccccctgtgccggcggggcatcctgcagaccctgaatgtgtacctgtag

SEQ ID NO: 168484 - DNA, 3219 bp, synthetic construct
  misc_feature 1..3219: note = Description of Artificial Sequence: Synthetic coding sequence
  source 1..3219: mol_type = other DNA
atgcctggagaggaggaggagcgggccttcctggtggcccgggaggagctggccagcgccctgcggcgggacagcggccaggccttcagcctggagcagctgcggcccctgctggccagcagcctgcccctggccgcccgctacctgcagctggatgctgcccggctggtgcgctgcaatgcccacggggagcccaggaactacctgaacaccctgagcacagccctgaacatcctggagaagtatggcaggaacctgctgagcccccagaggccccgctactggaggggcgtgaagttcaacaaccctgtgttccgcagcacagtggatgctgtgcagggcggcagagatgtgctgcggctgtatggctacacagaggagcagccagatggcctgtccttccctgagggccaggaggagccagatgagcaccaggtggccaccgtgaccctggaggtgctgctgctgaggacagagctgagcctgctgctgcagaacacccacccccggcagcaggccctggagcagctgctggaggacaaggtggaggatgacatgctgcagctgtctgaatttgaccccctgctgcgggagatcgcccctggccccctgaccacccccagcgtgcccggcagcaccccaggcccctgcttcctgtgtggcagcgcccctggcaccctgcactgccccagctgcaagcaggccctgtgcccagcctgtgaccacctgttccacggccaccccagccgggcccaccacctgcggcagaccctgcccggggtgctgcagggcacccacctgagccccagcctgcctgccagcgcccagccccggccccagagcaccagcctgctggccctgggggacagcagcctgagcagccccaacccagccagcgcccacctgccctggcactgtgccgcctgtgccatgctgaatgagccctgggccgtgctgtgtgtggcctgtgaccggccccggggctgcaagggcctgggcctgggcacagagggcccccagggcaccggcggcctggagccagacctggcccggggccgctgggcctgccagagctgcacctttgaaaatgaagctgctgctgtgctgtgcagcatctgtgagcggccccggctggcccagccccccagcctggtggtggacagcagagatgctggcatctgcctgcagcccctgcagcagggagatgccctgctggccagcgcccagagccaggtgtggtactgcatccactgcaccttctgcaacagcagccctggctgggtgtgtgtgatgtgcaacagaaccagcagccccatcccagcccagcacgccccccggccctatgccagcagcctggagaagggcccccccaagccaggccccccccggcggctgagcgcccccctgcccagcagctgtggggaccctgagaagcagaggcaggacaagatgagggaggagggcctgcagctggtgtccatgatccgggagggggaggccgccggggcctgcccagaggagatcttcagcgccctgcagtacagcggcacagaggtgcccctgcagtggctgcggtctgagctgccctacgtgctggagatggtggccgagctggccggccagcaggaccccggcctgggcgccttcagctgccaggaggcccggcgggcctggctggacagacatggcaacctggatgaggccgtggaggagtgtgtgaggaccaggaggaggaaggtgcaggagctgcagagcctgggcttcggccctgaggagggcagcctgcaggccctcttccagcacggcggagatgtgtcccgggccctgacagagctgcagaggcagaggctggagcccttccggcagaggctgtgggacagcggccctgagcccacccccagctgggatggccctgacaagcagagcctggtgcggcggctgctggccgtgtatgccctgcccagctggggccgggcagagctggccctgagcctgctgcaggagaccccaagaaattatgagctgggagatgtggtggaggccgtgcgccacagccaggaccgggccttcctgcggcggctgctggcccaggagtgtgctgtgtgtggctgggccctgccccacaacaggatgcaggccctgaccagctgtgagtgcaccatctgcccagactgcttccggcagcacttcaccatcgccctgaaggagaagcacatcacagacatggtgtgcccagcctgtggccgcccagacctgacagatgacacccagctgctgagctacttcagcaccctggacatccagctgcgggagagcctggagccagatgcctatgccctcttccacaagaagctgacagagggcgtgctgatgagggaccccaagttcctgtggtgtgcccagtgcagctttggcttcatctatgaaagagagcagctggaggccacctgcccccagtgccaccagaccttctgtgtgcgctgcaagaggcagtgggaggagcagcaccggggccgcagctgtgaggacttccagaactggaagaggatgaatgaccctgagtaccaggcccagggcctggccatgtacctgcaggagaatggaattgactgccccaagtgcaagttctcctatgccctggcccggggcggctgcatgcacttccactgcacccagtgccgccaccagttctgcagcggctgctacaatgccttctacgccaagaacaagtgcccagagcccaactgccgggtgaagaagagcctgcacggccaccacccccgggactgcctcttctacctgcgggactggacagccctgcggctgcagaagctgctgcaggacaacaacgtgatgttcaacacagagcccccagctggggcccgggctgtgcctgggggcggctgcagggtcatcgagcagaaggaggtgcccaacggcctgagagatgaggcctgtgggaaggagaccccagctggctacgccggcctgtgccaggcccactacaaggagtacctggtgtccctcatcaatgcccacagcctggaccctgccaccctgtatgaggtggaggagctggagacagccacagagcgctacctgcacgtgcggccccagcccctggccggggaggaccccccagcctaccaggcccggctgctgcagaagctgacagaggaggtgcccctgggccagagcatccccaggaggaggaagtag

SEQ ID NO: 168485 - DNA, 1518 bp, synthetic construct
  misc_feature 1..1518: note = Description of Artificial Sequence: Synthetic coding sequence
  source 1..1518: mol_type = other DNA
atgcctggagaggaggaggagcgggccttcctggtggcccgggaggagctggccagcgccctgcggcgggacagcggccaggccttcagcctggagcagctgcggcccctgctggccagcagcctgcccctggccgcccgctacctgcagctggatgctgcccggctggtgcgctgcaatgcccacggggagcccaggaactacctgaacaccctgcccacccccagctgggatggccctgacaagcagagcctggtgcggcggctgctggccgtgtatgccctgcccagctggggccgggcagagctggccctgagcctgctgcaggagaccccaagaaattatgagctgggagatgtggtggaggccgtgcgccacagccaggaccgggccttcctgcggcggctgctggcccaggagtgtgctgtgtgtggctgggccctgccccacaacaggatgcaggccctgaccagctgtgagtgcaccatctgcccagactgcttccggcagcacttcaccatcgccctgaaggagaagcacatcacagacatggtgtgcccagcctgtggccgcccagacctgacagatgacacccagctgctgagctacttcagcaccctggacatccagctgcgggagagcctggagccagatgcctatgccctcttccacaagaagctgacagagggcgtgctgatgagggaccccaagttcctgtggtgtgcccagtgcagctttggcttcatctatgaaagagagcagctggaggccacctgcccccagtgccaccagaccttctgtgtgcgctgcaagaggcagtgtgaggacttccagaactggaagaggatgaatgaccctgagtaccaggcccagggcctggccatgtacctgcaggagaatggcatcgactgccccaagtgcaagttctcctatgccctggcccggggcggctgcatgcacttccactgcacccagtgccgccaccagttctgcagcggctgctacaatgccttctacgccaagaacaagtgcccagagcccaactgccgggtgaagaagagcctgcacggccaccacccccgggactgcctcttctacctgcgggactggacagccctgcggctgcagaagctgctgcaggacaacaacgtgatgttcaacacagagcccccagctggggcccgggctgtgcctgggggcggctgccgggtgattgagcagaaggaggtgcccaacggcctgagagatgaggcctgtgggaaggagaccccagctggctacgccggcctgtgccaggcccactacaaggagtacctggtgtccctcatcaatgcccacagcctggaccctgccaccctgtatgaggtggaggagctggagacagccacagagcgctacctgcacgtgcggccccagcccctggccggagaagatcctccagcctaccaggcccggctgctgcagaagctgacagaggaggtgcccctgggccagagcatccccaggaggaggaagtag

SEQ ID NO: 168486 - DNA, 2766 bp, synthetic construct
  misc_feature 1..2766: note = Description of Artificial Sequence: Synthetic coding sequence
  source 1..2766: mol_type = other DNA
atggacctgtgcaccagggctggggagcccagcctgacccagaacacccacccccggcagcaggccctggagcagctgctggaggacaaggtggaggatgacatgctgcagctgtctgaatttgaccccctgctgcgggagatcgcccctggccccctgaccaccccatctgtgcccggcagcaccccaggcccctgcttcctgtgtggcagcgcccctggcaccctgcactgccccagctgcaagcaggccctgtgcccagcctgtgaccacctgttccacggccaccccagccgggcccaccacctgcggcagaccctgcccggggtgctgcagggcacccacctgagccccagcctgcctgccagcgcccagccccggccccagagcaccagcctgctggccctgggggacagcagcctgagcagccccaacccagccagcgcccacctgccctggcactgtgccgcctgtgccatgctgaatgagccctgggccgtgctgtgtgtggcctgtgaccggccccggggctgcaagggcctgggcctgggcacagagggcccccagggcactggaggcctggagccagacctggcccggggccgctgggcctgccagagctgcacctttgaaaatgaggccgctgctgtgctgtgcagcatctgtgagcggccccggctggcccagccccccagcctggtggtggacagcagagatgctggcatctgcctgcagcccctgcagcagggagatgccctgctggccagcgcccagagccaggtgtggtactgcatccactgcaccttctgcaacagcagccctggctgggtgtgtgtgatgtgcaacagaaccagcagccccatcccagcccagcacgccccccggccctatgccagcagcctggagaagggcccccccaagccaggccccccccggcggctgagcgcccccctgcccagcagctgtggggaccctgagaagcagaggcaggacaagatgagggaggagggcctgcagctggtgtccatgatccgggagggggaggccgccggggcctgcccagaggagatcttcagcgccctgcagtacagcggcacagaggtgcccctgcagtggctgcggtctgagctgccctacgtgctggagatggtggccgagctggccggccagcaggaccccggcctgggcgccttcagctgccaggaggcccggcgggcctggctggacagacatggcaacctggatgaagctgtggaggagtgtgtgaggaccaggaggaggaaggtgcaggagctgcagagcctgggctttggacctgaggagggcagcctgcaggccctcttccagcacggcggagatgtgtcccgggccctgacagagctgcagaggcagaggctggagcccttccggcagaggctgtgggacagcggccctgagcccacccccagctgggatggccctgacaagcagagcctggtgcggcggctgctggccgtgtatgccctgcccagctggggccgggcagagctggccctgagcctgctgcaggagacccccaggaactatgagctgggagatgtggtggaggccgtgcgccacagccaggaccgggccttcctgcggcggctgctggcccaggagtgtgctgtgtgtggctgggccctgccccacaacaggatgcaggccctgaccagctgtgaatgtaccatctgcccagactgcttccggcagcacttcaccatcgccctgaaggagaagcacatcacagacatggtgtgcccagcctgtggccgcccagacctgacagatgacacccagctgctgagctacttcagcaccctggacatccagctgcgggagagcctggagccagatgcctatgccctcttccacaagaagctgacagaaggagtgctgatgagggaccccaagttcctgtggtgtgcccagtgcagctttggcttcatctatgagcgggagcagctggaggccacctgcccccagtgccaccagaccttctgtgtgcgctgcaagaggcagtgggaggagcagcaccggggccgcagctgtgaggacttccagaactggaagaggatgaatgaccctgagtaccaggcccagggcctggccatgtacctgcaggagaatggcatcgactgccccaagtgcaagttctcctatgccctggcccggggcggctgcatgcacttccactgcacccagtgccgccaccagttctgcagcggctgctacaatgccttctacgccaagaacaagtgcccagagcccaactgccgggtgaagaagagcctgcacggccaccacccccgggactgcctcttctacctgcgggactggacagccctgcggctgcagaagctgctgcaggacaacaacgtgatgttcaacacagagcccccagctggggcccgggctgtgcctgggggcggctgccgggtgattgagcagaaggaggtgcccaacggcctgagagatgaggcctgtgggaaggagaccccagctggctacgccggcctgtgccaggcccactacaaggagtacctggtgtccctcatcaatgcccacagcctggaccctgccaccctgtatgaggtggaggagctggagacagccacagagcgctacctgcacgtgcggccccagcccctggccggagaagatcctccagcctaccaggcccggctgctgcagaagctgacagaggaggtgcccctgggccagagcatccccaggaggaggaagtag

SEQ ID NO: 168487 - DNA, 513 bp, synthetic construct
  misc_feature 1..513: note = Description of Artificial Sequence: Synthetic coding sequence
  source 1..513: mol_type = other DNA
atgcctggagaggaggaggagcgggccttcctggtggcccgggaggagctggccagcgccctgcggcgggacagcggccaggccttcagcctggagcagctgcggcccctgctggccagcagcctgcccctggccgcccgctacctgcagctggatgctgcccggctggtgcgctgcaatgcccacggggagcccaggaactacctgaacaccctgagcacagccctgaacatcctggagaagtatggcaggaacctgctgagcccccagaggccccgctactggaggggcgtgaagttcaacaaccctgtgttccgcagcacagtggatgctgtgcagggcggcagagatgtgctgcggctgtatggctacacagaggagcagccagatggcctgtccttccctgagggccaggaggagccagatgagcaccaggtggccaccgtgaccctggaggtgctgctgctgaggacagagctgagcctgctgctgcagaacacccaccccaggtag

SEQ ID NO: 168488 - DNA, 171 bp, synthetic construct
  misc_feature 1..171: note = Description of Artificial Sequence: Synthetic coding sequence
  source 1..171: mol_type = other DNA
atgcctggagaggaggaggagcgggccttcctggtggcccgggaggagctggccagcgccctgcggcgggacagcggccaggccttcagcctggagcagctgcggcccctgctggccagcagcctgcccctggccgcccgctacctgcagctggatgctgcccggctgtag

SEQ ID NO: 168489 - DNA, 1122 bp, synthetic construct
  misc_feature 1..1122: note = Description of Artificial Sequence: Synthetic coding sequence
  source 1..1122: mol_type = other DNA
atgaggaaggccggggccacctccatgtgggccagctgctgcggcctgctgaatgaggtgatgggcactggagctgtgcggggccagcagagcgcctttgctggggccaccggccccttccgcttcacccccaaccctgagttcagcacctaccccccagctgccacagagggccccaacatcgtgtgcaaggcctgtggcctgtccttctctgtgttcaggaagaagcacgtgtgctgtgactgcaagaaggacttctgcagcgtgtgcagcgtgctgcaggagaacctgcggcgctgcagcacctgccacctgctgcaggagacagccttccagaggccccagctgatgaggctgaaggtgaaggacctgcggcagtacctgatcctgaggaacatccccatcgacacctgccgggagaaggaggacctggtggacctggtgctgtgccaccacggcctgggctctgaagatgacatggacaccagcagcctgaacagcagccgcagccagaccagcagcttcttcaccaggagcttcttcagcaactacacagcccccagcgccaccatgagcagcttccagggcgagctgatggatggagaccagaccagccgctctggagtgcctgcccaggtgcagagcgagatcaccagcgccaacacagaagatgatgatgatgatgatgatgaagatgatgatgatgaggaggagaatgcagaagatagaaatcctggcctgagcaaggagcgggtgcgggccagcctgagtgacctgagcagcctggatgatgtggagggcatgtctgtgcggcagctgaaggagatcctggccaggaactttgtgaactacagcggctgctgtgagaagtgggagctggtggagaaggtgaaccggctgtacaaggaaaatgaggagaaccagaagagctatggagagcggctgcagctgcaggatgaagaagatgacagcctgtgccgcatctgcatggatgctgtgattgactgtgtgctgctggagtgtggccacatggtgacctgcaccaagtgtgggaagaggatgtctgagtgccccatctgccggcagtatgtggtgcgggctgtgcacgtgttcaagagctag

SEQ ID NO: 168490 - DNA, 1119 bp, synthetic construct
  misc_feature 1..1119: note = Description of Artificial Sequence: Synthetic coding sequence
  source 1..1119: mol_type = other DNA
atgaaggccggggccacctccatgtgggccagctgctgcggcctgctgaatgaggtgatgggcaccggggctgtgcggggccagcagagcgcctttgctggggccaccggccccttccgcttcacccccaaccctgagttcagcacctacccacctgctgccacagagggccccaacatcgtgtgcaaggcctgtggcctgtccttcagcgtcttcaggaagaagcacgtgtgctgtgactgcaagaaggacttctgcagcgtgtgcagcgtgctgcaggagaacctgcggcgctgcagcacctgccacctgctgcaggagacagccttccagaggccccagctgatgaggctgaaggtgaaggacctgcggcagtacctgatcctgaggaacatccccatcgacacctgccgggagaaggaggacctggtggacctggtgctgtgccaccacggcctgggctctgaagatgacatggacaccagcagcctgaacagcagccgcagccagaccagcagcttcttcaccaggagcttcttcagcaactacacagcccccagcgccaccatgagcagcttccagggcgagctgatggatggagaccagaccagccgcagcggcgtgcctgcccaggtgcagagcgagatcaccagcgccaacacagaagatgatgatgatgatgatgatgaagatgatgatgatgaggaggagaatgctgaggacaggaaccctggcctgagcaaggagcgggtgcgggccagcctgagtgacctgagcagcctggatgatgtggagggcatgtctgtgcggcagctgaaggagatcctggccaggaactttgtgaactacagcggctgctgtgagaagtgggagctggtggagaaggtgaacagactctacaaggaaaatgaggagaaccagaagagctatggagagcggctgcagctgcaggatgaggaggatgacagcctgtgccgcatctgcatggatgctgtgattgactgtgtgctgctggagtgtggccacatggtgacctgcaccaagtgtgggaagaggatgtctgaatgtcccatctgccggcagtatgtggtgcgggctgtgcacgtgttcaagagctag

SEQ ID NO: 168491 - DNA, 1122 bp, synthetic construct; identical to SEQ ID NO: 168489
  misc_feature 1..1122: note = Description of Artificial Sequence: Synthetic coding sequence
  source 1..1122: mol_type = other DNA

SEQ ID NO: 168492 - DNA, 1548 bp, synthetic construct
  misc_feature 1..1548: note = Description of Artificial Sequence: Synthetic coding sequence
  source 1..1548: mol_type = other DNA
atggcctgcaagatcagccctggggccaacagcgccagcctgcccggccaccccaacaaggtgatctgtgagcgggtgcggctgcagagcctcttccccctgctgcccagcgaccagaacaccaccgtgcaggaggatgcccacttcaaggccttcttccagagcgaggacagccccagccccaagaggcagaggctgagccacagcgtgtttgactacaccagcgccagccctgcccccagcccccccatgaggccctgggagatgaccagcaaccggcagcccccatctgtgcggcccagccagcaccacttcagcggggagcgctgcaacaccccagccaggaacagaagaagcccccctgtgcggcggcagaggggccggcgggaccggctgagccgccacaacagcatcagccaggatgagaactaccaccacctgccctatgcccagcagcaggccatcgaggagccccgggccttccaccccccaaatgtgagcccccggctgctgcaccctgctgcccaccccccccagcagaatgctgtgatggtggacatccatgaccagctgcaccagggcaccgtgcctgtgtcctacacagtgaccaccgtggccccccacggcatccccctgtgcaccggccagcacatcccagcctgcagcacccagcaggtgcccggctgcagcgtggtgttcagcggccagcacctgcctgtgtgcagcgtgcccccacccatgctgcaggcctgcagcgtgcagcacctgcctgtgccctatgctgccttccccccactcatcagcagtgaccccttcctgatccaccccccccacctgagcccccaccaccccccccacctgcccccacctggccagtttgtgcccttccagacccagcagagccgcagccccctgcagagaattgaaaatgaggtggagctgctgggggagcacctgcctgtgggcggcttcacctacccaccttctgcccacccccccaccctgccccccagcgcccccctgcagttcctgacccatgaccccctgcaccaggaggtgtcctttggagtgccctacccacccttcatgccccggcggctgaccggccgcagccgctaccgcagccagcagcccatccccccaccaccctaccaccccagcctgctgccctacgtgctgtccatgctgcctgtgcccccagctgtgggccccaccttctcctttgagctggatgtggaggatggagaggtggagaactatgaggccctgctgaacctggccgagcggctgggggaggccaagccccggggcctgaccaaggctgacatcgagcagctgcccagctaccgcttcaaccccaacaaccaccagagcgagcagaccctgtgtgtggtgtgcatgtgtgactttgagagccggcagctgctgcgggtgctgccctgcaaccacgagttccacgccaagtgtgtggacaagtggctgaaggccaacagaacctgccccatctgcagagcagatgccagcgaggtgcaccgggacagcgagtag

SEQ ID NO: 168493 - DNA, 1299 bp, synthetic construct
  misc_feature 1..1299: note = Description of Artificial Sequence: Synthetic coding sequence
  source 1..1299: mol_type = other DNA
atgaggccctgggagatgaccagcaaccggcagccccccagcgtgcggcccagccagcaccacttctctggagagcgctgcaacaccccagccaggaacagaagaagcccccctgtgcggcggcagagaggaagaagagaccggctgagccgccacaacagcatcagccaggatgagaactaccaccacctgccctatgcccagcagcaggccatcgaggagccccgggccttccacccccccaacgtgagcccccggctgctgcaccctgctgcccaccccccccagcagaatgctgtgatggtggacatccatgaccagctgcaccagggcaccgtgcctgtgtcctacacagtgaccaccgtggcccctcatggcatccccctgtgcaccggccagcacatcccagcctgcagcacccagcaggtgcccggctgcagcgtggtgttttctggccagcacctgcctgtgtgcagcgtgcccccacccatgctgcaggcctgcagcgtgcagcacctgcctgtgccctatgctgccttccccccactcatcagcagtgaccccttcctgatccaccccccccacctgagcccccaccaccccccccacctgcccccacctggccagtttgtgcccttccagacccagcagagccgcagccccctgcagagaattgaaaatgaggtggagctgctgggggagcacctgcctgtgggcggcttcacctacccacccagcgcccacccccccaccctgcccccatctgcccccctgcagttcctgacccatgaccccctgcaccaggaggtgtcctttggagtgccctacccacccttcatgccccggcggctgaccggccgcagccgctaccgcagccagcagcccatccccccaccaccctaccaccccagcctgctgccctacgtgctgtccatgctgcctgtgcccccagctgtgggccccaccttctcctttgagctggatgtggaggatggagaggtggagaactatgaggccctgctgaacctggccgagcggctgggggaggccaagccccggggcctgaccaaggctgacatcgagcagctgcccagctaccgcttcaaccccaacaaccaccagagcgagcagaccctgtgtgtggtgtgcatgtgtgactttgagagccggcagctgctgcgggtgctgccctgcaaccacgagttccacgccaagtgtgtggacaagtggctgaaggccaacagaacctgccccatctgcagagcagatgccagcgaggtgcaccgggacagcgagtag

SEQ ID NO: 168494 - DNA, 1398 bp, synthetic construct
  misc_feature 1..1398: note = Description of Artificial Sequence: Synthetic coding sequence
  source 1..1398: mol_type = other DNA
atggcctgcaagtctgaggacagccccagccccaagaggcagaggctgagccacagcgtgtttgactacaccagcgccagccctgcccccagcccccccatgaggccctgggagatgaccagcaaccggcagcccccatctgtgcggcccagccagcaccacttcagcggggagcgctgcaacaccccagccaggaacagaagaagcccccctgtgcggcggcagaggggccggcgggaccggctgagccgccacaacagcatcagccaggatgagaactaccaccacctgccctatgcccagcagcaggccatcgaggagccccgggccttccaccccccaaatgtgagcccccggctgctgcaccctgctgcccaccccccccagcagaatgctgtgatggtggacatccatgaccagctgcaccagggcaccgtgcctgtgtcctacacagtgaccaccgtggccccccacggcatccccctgtgcaccggccagcacatcccagcctgcagcacccagcaggtgcccggctgcagcgtggtgttcagcggccagcacctgcctgtgtgcagcgtgcccccacccatgctgcaggcctgcagcgtgcagcacctgcctgtgccctatgctgccttccccccactcatcagcagtgaccccttcctgatccaccccccccacctgagcccccaccaccccccccacctgcccccacctggccagtttgtgcccttccagacccagcagagccgcagccccctgcagagaattgaaaatgaggtggagctgctgggggagcacctgcctgtgggcggcttcacctacccaccttctgcccacccccccaccctgccccccagcgcccccctgcagttcctgacccatgaccccctgcaccaggaggtgtcctttggagtgccctacccacccttcatgccccggcggctgaccggccgcagccgctaccgcagccagcagcccatccccccaccaccctaccaccccagcctgctgccctacgtgctgtccatgctgcctgtgcccccagctgtgggccccaccttctcctttgagctggatgtggaggatggagaggtggagaactatgaggccctgctgaacctggccgagcggctgggggaggccaagccccggggcctgaccaaggctgacatcgagcagctgcccagctaccgcttcaaccccaacaaccaccagagcgagcagaccctgtgtgtggtgtgcatgtgtgactttgagagccggcagctgctgcgggtgctgccctgcaaccacgagttccacgccaagtgtgtggacaagtggctgaaggccaacagaacctgccccatctgcagagcagatgccagcgaggtgcaccgggacagcgagtag

SEQ ID NO: 168495 - DNA, 1299 bp, synthetic construct; identical to SEQ ID NO: 168493
  misc_feature 1..1299: note = Description of Artificial Sequence: Synthetic coding sequence
  source 1..1299: mol_type = other DNA

SEQ ID NO: 168496 - DNA, 1320 bp, synthetic construct
  misc_feature 1..1320: note = Description of Artificial Sequence: Synthetic coding sequence
  source 1..1320: mol_type = other DNA
atgcagcacacctgcacccagcagaagaaggtgacctacaagcacatcgcccgcttcagccccaggaaccggctgtgccaggctgatgctgtgttcaacaacaacctggccggcttccagctgcagagcccccctgtgcggcggcagaggggccggcgggaccggctgagccgccacaacagcatcagccaggatgagaactaccaccacctgccctatgcccagcagcaggccatcgaggagccccgggccttccaccccccaaatgtgagcccccggctgctgcaccctgctgcccaccccccccagcagaatgctgtgatggtggacatccatgaccagctgcaccagggcaccgtgcctgtgtcctacacagtgaccaccgtggccccccacggcatccccctgtgcaccggccagcacatcccagcctgcagcacccagcaggtgcccggctgcagcgtggtgttcagcggccagcacctgcctgtgtgcagcgtgcccccacccatgctgcaggcctgcagcgtgcagcacctgcctgtgccctatgctgccttccccccactcatcagcagtgaccccttcctgatccaccccccccacctgagcccccaccaccccccccacctgcccccacctggccagtttgtgcccttccagacccagcagagccgcagccccctgcagagaattgaaaatgaggtggagctgctgggggagcacctgcctgtgggcggcttcacctacccaccttctgcccacccccccaccctgccccccagcgcccccctgcagttcctgacccatgaccccctgcaccaggaggtgtcctttggagtgccctacccacccttcatgccccggcggctgaccggccgcagccgctaccgcagccagcagcccatccccccaccaccctaccaccccagcctgctgccctacgtgctgtccatgctgcctgtgcccccagctgtgggccccaccttctcctttgagctggatgtggaggatggagaggtggagaactatgaggccctgctgaacctggccgagcggctgggggaggccaagccccggggcctgaccaaggctgacatcgagcagctgcccagctaccgcttcaaccccaacaaccaccagagcgagcagaccctgtgtgtggtgtgcatgtgtgactttgagagccggcagctgctgcgggtgctgccctgcaaccacgagttccacgccaagtgtgtggacaagtggctgaaggccaacagaacctgccccatctgcagagcagatgccagcgaggtgcaccgggacagcgagtag

SEQ ID NO: 168497 - DNA, 999 bp, synthetic construct
  misc_feature 1..999: note = Description of Artificial Sequence: Synthetic coding sequence
  source 1..999: mol_type = other DNA
atggtggacatccatgaccagctgcaccagggcaccgtgcctgtgtcctacacagtgaccaccgtggcccctcatggcatccccctgtgcaccggccagcacatcccagcctgcagcacccagcaggtgcccggctgcagcgtggtgttttctggccagcacctgcctgtgtgcagcgtgcccccacccatgctgcaggcctgcagcgtgcagcacctgcctgtgccctatgctgccttccccccactcatcagcagtgaccccttcctgatccaccccccccacctgagcccccaccaccccccccacctgcccccacctggccagtttgtgcccttccagacccagcagagccgcagccccctgcagagaattgaaaatgaggtggagctgctgggggagcacctgcctgtgggcggcttcacctacccacccagcgcccacccccccaccctgcccccatctgcccccctgcagttcctgacccatgaccccctgcaccaggaggtgtcctttggagtgccctacccacccttcatgccccggcggctgaccggccgcagccgctaccgcagccagcagcccatccccccaccaccctaccaccccagcctgctgccctacgtgctgtccatgctgcctgtgcccccagctgtgggccccaccttctcctttgagctggatgtggaggatggagaggtggagaactatgaggccctgctgaacctggccgagcggctgggggaggccaagccccggggcctgaccaaggctgacatcgagcagctgcccagctaccgcttcaaccccaacaaccaccagagcgagcagaccctgtgtgtggtgtgcatgtgtgactttgagagccggcagctgctgcgggtgctgccctgcaaccacgagttccacgccaagtgtgtggacaagtggctgaaggccaacagaacctgccccatctgcagagcagatgccagcgaggtgcaccgggacagcgagtag

SEQ ID NO: 168498 - DNA, 1320 bp, synthetic construct; identical to SEQ ID NO: 168496
  misc_feature 1..1320: note = Description of Artificial Sequence: Synthetic coding sequence
  source 1..1320: mol_type = other DNA

SEQ ID NO: 168499 - DNA, 1299 bp, synthetic construct; identical to SEQ ID NO: 168493
  misc_feature 1..1299: note = Description of Artificial Sequence: Synthetic coding sequence
  source 1..1299: mol_type = other DNA

SEQ ID NO: 168500 - DNA, 1263 bp, synthetic construct
  misc_feature 1..1263: note = Description of Artificial Sequence: Synthetic coding sequence
  source 1..1263: mol_type = other DNA
atgtggtggagggacctgacccggctgcggctgtggctgaagcgggaggccatccctggagagggcaggaaggccgccaaggtgaatgctggggtgggggagaagggcatctacacagccagcagccggggcggcccccccagcgcccggagcaaggctgtgacagtggtggccgagggcgccgccagccgctcctggctgtccatggatgcccctgagctgggccctggcctggtggagcggctggagcagctggccacctgccccctgtgtggcggcagctttgaggaccctgtgctgctggcctgtgagcacagcttctgccgggcctgcctggcccggcgctggggcaccccaccagccaccggcacagaggccagccccacagcctgcccctgctgcggcctgccctgcccccggcgcagcctgcggagcaatgtgcggctggccgtggaggtgcgcatcagccgggagctgcgggagaagctggccgagcccggggcccgggccggcagaagaagaggaggccgcatccccaccatgggctgcctggacctgcctggagaggacatgaggaagacctggaggagatttgaggtgcccaccagcaagagcagcaacagtgaagatgacctgcctgaggactaccctgtggtgaagaagatgctgcaccggctgacagctgacctgaccctggaccccggcacagcccaccggcggctgctgatctctgctgacagaagatctgtgcagctggcccctcctggcaccccagcccccccagatggccccaagagatttgaccagctgcctgctgtgctgggcgcccagggctttggagctggccgccactgctgggaggtggagacagcagatgctgccagctgccgggacagcagcggggaggatgctgatgatgaggagagccactatgctgtgggcgccgccggggagagcgtgcagaggaagggctgtgtgcggctgtgcccagctggagctgtgtgggccgtggagggccggggcggccgcctgtgggccctgacagcccctgagcccaccctgctgggcggcgtggagcccccaccccggcgcatccgggtggacctggactgggagcggggccgggtggccttctatgatggccgcagcctggacctgctgtatgccttccaggcccctggccccctgggggagcgcatcttccccctcttctgcacctgtgacccccgggcccccctgagaattgtgcctgctgagagctag

SEQ ID NO: 168501 - DNA, 756 bp, synthetic construct
  misc_feature 1..756: note = Description of Artificial Sequence: Synthetic coding sequence
  source 1..756: mol_type = other DNA
atgtggtggagggacctgacccggctgcggctgtggctgaagcgggaggccatccctggagagggcaggaaggccgccaaggtgaatgctggggtgggggagaagggcatctacacagccagcagccggggcggcccccccagcgcccggagcaaggctgtgacagtggtggccgagggcgccgccagccgctcctggctgtccatggatgcccctgagctgggccctggcctggtggagcggctggagcagctggccacctgccccctgtgtggcggcagctttgaggaccctgtgctgctggcctgtgagcacagcttctgccgggcctgcctggcccggcgctggggcaccccaccagccaccggcacagaggccagccccacagcctgcccctgctgcggcctgccctgcccccggcgcagcctgcggagcaatgtgcggctggccgtggaggtgcgcatcagccgggagctgctgtttggaggcggcatcccccacagcttcctgggcacccacagccacgcccactgccgcagcatcaacagcaacccccacttccggcccaagatcatgaggccccacctggtgtccaccttcccccggccctgcagcaagcccaaccccttcctgcccagcggcagccagaacctgctgagccccacagccaccaccgtgctgcctgacttcagccacagcaaccacagcaggcctgccatgggcaaccggcccagccccagcgtgctggtgaagtag

SEQ ID NO: 168502 - DNA, 1065 bp, synthetic construct
  misc_feature 1..1065: note = Description of Artificial Sequence: Synthetic coding sequence
  source 1..1065: mol_type = other DNA
atgtggtggagggacctgacccggctgcggctgtggctgaagcgggaggccatccctggagagggcaggaaggccgccaaggtgaatgctggggtgggggagaagggcatctacacagccagcagccggggcggcccccccagcgcccggagcaaggctgtgacagtggtggccgagggcgccgccagccgctcctggctgtccatggatgcccctgagctgggccctggcctggtggagcggctggagcagctggccacctgccccctgtgtggcggcagctttgaggaccctgtgctgctggcctgtgagcacagcttctgccgggcctgcctggcccggcgctggggcaccccaccagccaccggcacagaggccagccccacagcctgcccctgctgcggcctgccctgcccccggcgcagcctgcggagcaatgtgcggctggccgtggaggtgcgcatcagccgggagctgcgggagaagctggccgagcccggggcccgggccggcagaagaagaggaggccgcatccccaccatgggctgcctggacctgcctggagaggacatgaggaagacctggaggagatttgaggtgcccacccccaagagcagcaacagtgaagatgacctgcctgaggactaccctgtggtgaagaagatgctgcaccggctgacagctgacctgaccctggaccccggcacagcccaccggcggctgctgatcagcacagacagaagatctgtgcagctggcccctcctggcaccccagcccccccagatggccccaagagatttgaccagctgcctgctgtgctgggcgcccagggctttggagctggccgccactgctgggaggtggagacagcagatgctgccagctgccgggacagcagcggggaggatgaagatgatgaggagagccactatgctgtgggcgccgccggggagagcgtgcagaggaagggctgtgcccctggccccctgggggagcgcatcttccccctcttctgcacctgtgacccccgggcccccctgagaattgtgcctgctgagagctag

SEQ ID NO: 168503 - DNA, 1065 bp, synthetic construct
  misc_feature 1..1065: note = Description of Artificial Sequence: Synthetic coding sequence
  source 1..1065: mol_type = other DNA
atgtggtggagggacctgacccggctgcggctgtggctgaagcgggaggccatccctggagagggcaggaaggccgccaaggtgaatgctggggtgggggagaagggcatctacacagccagcagccggggcggcccccccagcgcccggagcaaggctgtgacagtggtggccgagggcgccgccagccgctcctggctgtccatggatgcccctgagctgggccctggcctggtggagcggctggagcagctggccacctgccccctgtgtggcggcagctttgaggaccctgtgctgctggcctgtgagcacagcttctgccgggcctgcctggcccggcgctggggcaccccaccagccaccggcacagaggccagccccacagcctgcccctgctgcggcctgccctgcccccggcgcagcctgcggagcaatgtgcggctggccgtggaggtgcgcatcagccgggagctgcgggagaagctggccgagcccggggcccgggccggcagaagaagaggaggccgcatccccaccatgggctgcctggacctgcctggagaggacatgaggaagacctggaggagatttgaggtgcccaccagcaagagcagcaacagtgaagatgacctgcctgaggactaccctgtggtgaagaagatgctgcaccggctgacagctgacctgaccctggaccccggcacagcccaccggcggctgctgatctctgctgacagaagatctgtgcagctggcccctcctggcaccccagcccccccagatggccccaagagatttgaccagctgcctgctgtgctgggcgcccagggctttggagctggccgccactgctgggaggtggagacagcagatgctgccagctgccgggacagcagcggggaggatgctgatgatgaggagagccactatgctgtgggcgccgccggggagagcgtgcagaggaagggctgtgcccctggccccctgggggagcgcatcttccccctcttctgcacctgtgacccccgggcccccctgagaattgtgcctgctgagagctag

SEQ ID NO: 168504 - DNA, 1263 bp, synthetic construct
  misc_feature 1..1263: note = Description of Artificial Sequence: Synthetic coding sequence
  source 1..1263: mol_type = other DNA
atgtggtggagggacctgacccggctgcggctgtggctgaagcgggaggccatccctggagagggcaggaaggccgccaaggtgaatgctggggtgggggagaagggcatctacacagccagcagccggggcggcccccccagcgcccggagcaaggctgtgacagtggtggccgagggcgccgccagccgctcctggctgtccatggatgcccctgagctgggccctggcctggtggagcggctggagcagctggccacctgccccctgtgtggcggcagctttgaggaccctgtgctgctggcctgtgagcacagcttctgccgggcctgcctggcccggcgctggggcaccccaccagccaccggcacagaggccagccccacagcctgcccctgctgcggcctgccctgcccccggcgcagcctgcggagcaatgtgcggctggccgtggaggtgcgcatcagccgggagctgcgggagaagctggccgagcccggggcccgggccggcagaagaagaggaggccgcatccccaccatgggctgcctggacctgcctggagaggacatgaggaagacctggaggagatttgaggtgcccacccccaagagcagcaacagtgaagatgacctgcctgaggactaccctgtggtgaagaagatgctgcaccggctgacagctgacctgaccctggaccccggcacagcccaccggcggctgctgatcagcacagacagaagatctgtgcagctggcccctcctggcaccccagcccccccagatggccccaagagatttgaccagctgcctgctgtgctgggcgcccagggctttggagctggccgccactgctgggaggtggagacagcagatgctgccagctgccgggacagcagcggggaggatgaagatgatgaggagagccactatgctgtgggcgccgccggggagagcgtgcagaggaagggctgtgtgcggctgtgcccagctggagctgtgtgggccgtggagggccggggcggccgcctgtgggccctgacagcccctgagcccaccctgctgggcggcgtggagcccccaccccggcgcatccgggtggacctggactgggagcggggccgggtggccttctatgatggccgcagcctggacctgctgtatgccttccaggcccctggccccctgggggagcgcatcttccccctcttctgcacctgtgacccccgggcccccctgagaattgtgcctgctgagagctag

SEQ ID NO: 168505 - DNA, 1065 bp, synthetic construct
  misc_feature 1..1065: note = Description of Artificial Sequence: Synthetic coding sequence
  source 1..1065: mol_type = other DNA
atgtggtggagggacctgacccggctgcggctgtggctgaagcgggaggccatccctggagagggcaggaaggccgccaaggtgaatgctggggtgggggagaagggcatctacacagccagcagccggggcggcccccccagcgcccggagcaaggctgtgacagtggtggccgagggcgccgccagccgctcctggctgtccatggatgcccctgagctgggccctggcctggtggagcggctggagcagctggccacctgccccctgtgtggcggcagctttgaggaccctgtgctgctggcctgtgagcacagcttctgccgggcctgcctggcccggcgctggggcaccccaccagccaccggcacagaggccagccccacagcctgcccctgctgcggcctgccctgcccccggcgcagcctgcggagcaatgtgcggctggccgtggaggtgcgcatcagccgggagctgcgggagaagctggccgagcccggggcccgggccggcagaagaagaggaggccgcatccccaccatgggctgcctggacctgcctggagaggacatgaggaagacctggaggagatttgaggtgcccaccagcaagagcagcaacagtgaagatgacctgcctgaggactaccctgtggtgaagaagatgctgcaccggctgacagctgacctgaccctggaccccggcacagcccaccggcggctgctgatctctgctgacagaagatctgtgcagctggcccctcctggcaccccagcccccccagatggccccaagcgcttcaaccagctgcctgctgtgctgggcgcccagggctttggagctggccgccactgctgggaggtggagacagcagatgctgccagctgccgggacagcagcggggaggatgctgatgatgaggagagccactatgctgtgggcgccgccggggagagcgtgcagaggaagggctgtgcccctggccccctgggggagcgcatcttccccctcttctgcacctgtgacccccgggcccccctgagaattgtgcctgctgagagctag

SEQ ID NO: 168506 - DNA, 1263 bp, synthetic construct
  misc_feature 1..1263: note = Description of Artificial Sequence: Synthetic coding sequence
  source 1..1263: mol_type = other DNA
atgtggtggagggacctgacccggctgcggctgtggctgaagcgggaggccatccctggagagggcaggaaggccgccaaggtgaatgctggggtgggggagaagggcatctacacagccagcagccggggcggcccccccagcgcccggagcaaggctgtgacagtggtggccgagggcgccgccagccgctcctggctgtccatggatgcccctgagctgggccctggcctggtggagcggctggagcagctggccacctgccccctgtgtggcggcagctttgaggaccctgtgctgctggcctgtgagcacagcttctgccgggcctgcctggcccggcgctggggcaccccaccagccaccggcacagaggccagccccacagcctgcccctgctgcggcctgccctgcccccggcgcagcctgcggagcaatgtgcggctggccgtggaggtgcgcatcagccgggagctgcgggagaagctggccgagcccggggcccgggccggcagaagaagaggaggccgcatccccaccatgggctgcctggacctgcctggagaggacatgaggaagacctggaggagatttgaggtgcccaccagcaagagcagcaacagtgaagatgacctgcctgaggactaccctgtggtgaagaagatgctgcaccggctgacagctgacctgaccctggaccccggcacagcccaccggcggctgctgatctctgctgacagaagatctgtgcagctggcccctcctggcaccccagcccccccagatggccccaagagatttgaccagctgcctgctgtgctgggcgcccagggctttggagctggccgccactgctgggaggtggagacagcagatgctgccagctgccgggacagcagcggggaggatgctgatgatgaggagagccactatgctgtgggcgccgccggggagagcgtgcagaggaagggctgtgtgcggctgtgcccagctggagctgtgtgggccgtgggcggccggggcggccgcctgtgggccctgacagcccctgagcccaccctgctgggcggcgtggagcccccaccccggcgcatccgggtggacctggactgggagcggggccgggtggccttctatgatggccgcagcctggacctgctgtatgccttccaggcccctggccccctgggggagcgcatcttccccctcttctgcacctgtgacccccgggcccccctgagaattgtgcctgctgagagctag

SEQ ID NO: 168507 - DNA, 1263 bp, synthetic construct; identical to SEQ ID NO: 168500
  misc_feature 1..1263: note = Description of Artificial Sequence: Synthetic coding sequence
  source 1..1263: mol_type = other DNA

SEQ ID NO: 168508 - DNA, 1263 bp, synthetic construct; identical to SEQ ID NO: 168500
  misc_feature 1..1263: note = Description of Artificial Sequence: Synthetic coding sequence
  source 1..1263: mol_type = other DNA

SEQ ID NO: 168509 - DNA, 1065 bp, synthetic construct; identical to SEQ ID NO: 168503
  misc_feature 1..1065: note = Description of Artificial Sequence: Synthetic coding sequence
  source 1..1065: mol_type = other DNA

SEQ ID NO: 168510 - DNA, 1065 bp, synthetic construct; identical to SEQ ID NO: 168503
  misc_feature 1..1065: note = Description of Artificial Sequence: Synthetic coding sequence
  source 1..1065: mol_type = other DNA

SEQ ID NO: 168511 - DNA, 1065 bp, synthetic construct; identical to SEQ ID NO: 168503
  misc_feature 1..1065: note = Description of Artificial Sequence: Synthetic coding sequence
  source 1..1065: mol_type = other DNA

SEQ ID NO: 168512 - DNA, 1263 bp, synthetic construct
  misc_feature 1..1263: note = Description of Artificial Sequence: Synthetic coding sequence
  source 1..1263: mol_type = other DNA
atgtggtggagggacctgacccggctgcggctgtggctgaagcgggaggccatccctggagagggcaggaaggccgccaaggtgaatgctggggtgggggagaagggcatctacacagccagcagccggggcggcccccccagcgcccggagcaaggctgtgacagtggtggccgagggcgccgccagccgctcctggctgtccatggatgcccctgagctgggccctggcctggtggagcggctggagcagctggccacctgccccctgtgtggcggcagctttgaggaccctgtgctgctggcctgtgagcacagcttctgccgggcctgcctggcccggcgctggggcaccccaccagccaccggcacagaggccagccccacagcctgcccctgctgcggcctgccctgcccccggcgcagcctgcggagcaatgtgcggctggccgtggaggtgcgcatcagccgggagctgcgggagaagctggccgagcccggggcccgggccggcagaagaagaggaggccgcatccccaccatgggctgcctggacctgcctggagaggacatgaggaagacctggaggagatttgaggtgcccaccagcaagagcagcaacagtgaagatgacctgcctgaggactaccctgtggtgaagaagatgctgcaccggctgacagctgacctgaccctggaccccggcacagcccaccggcggctgctgatctctgctgacagaagatctgtgcagctggcccctcctggcaccccagcccccccagatggccccaagcgcttcaaccagctgcctgctgtgctgggcgcccagggctttggagctggccgccactgctgggaggtggagacagcagatgctgccagctgccgggacagcagcggggaggatgctgatgatgaggagagccactatgctgtgggcgccgccggggagagcgtgcagaggaagggctgtgtgcggctgtgcccagctggagctgtgtgggccgtggagggccggggcggccgcctgtgggccctgacagcccctgagcccaccctgctgggcggcgtggagcccccaccccggcgcatccgggtggacctggactgggagcggggccgggtggccttctatgatggccgcagcctggacctgctgtatgccttccaggcccctggccccctgggggagcgcatcttccccctcttctgcacctgtgacccccgggcccccctgagaattgtgcctgctgagagctag

SEQ ID NO: 168513 - DNA, 1263 bp, synthetic construct; identical to SEQ ID NO: 168500
  misc_feature 1..1263: note = Description of Artificial Sequence: Synthetic coding sequence
  source 1..1263: mol_type = other DNA

SEQ ID NO: 168514 - DNA, 1065 bp, synthetic construct; identical to SEQ ID NO: 168503
  misc_feature 1..1065: note = Description of Artificial Sequence: Synthetic coding sequence
  source 1..1065: mol_type = other DNA

SEQ ID NO: 168515 - DNA, 1263 bp, synthetic construct; identical to SEQ ID NO: 168500
  misc_feature 1..1263: note = Description of Artificial Sequence: Synthetic coding sequence
  source 1..1263: mol_type = other DNA

SEQ ID NO: 168516 - DNA, 1065 bp, synthetic construct; identical to SEQ ID NO: 168503
  misc_feature 1..1065: note = Description of Artificial Sequence: Synthetic coding sequence
  source 1..1065: mol_type = other DNA

SEQ ID NO: 168517 - DNA, 756 bp, synthetic construct; identical to SEQ ID NO: 168501
  misc_feature 1..756: note = Description of Artificial Sequence: Synthetic coding sequence
  source 1..756: mol_type = other DNA

SEQ ID NO: 168518 - DNA, 756 bp, synthetic construct; identical to SEQ ID NO: 168501
  misc_feature 1..756: note = Description of Artificial Sequence: Synthetic coding sequence
  source 1..756: mol_type = other DNA

SEQ ID NO: 168519 - DNA, 756 bp, synthetic construct; identical to SEQ ID NO: 168501
  misc_feature 1..756: note = Description of Artificial Sequence: Synthetic coding sequence
  source 1..756: mol_type = other DNA

SEQ ID NO: 168520 - DNA, 756 bp, synthetic construct; identical to SEQ ID NO: 168501
  misc_feature 1..756: note = Description of Artificial Sequence: Synthetic coding sequence
  source 1..756: mol_type = other DNA

SEQ ID NO: 168521 - DNA, 756 bp, synthetic construct; identical to SEQ ID NO: 168501
  misc_feature 1..756: note = Description of Artificial Sequence: Synthetic coding sequence
  source 1..756: mol_type = other DNA

SEQ ID NO: 168522 - DNA, 756 bp, synthetic construct
  misc_feature 1..756: note = Description of Artificial Sequence: Synthetic coding sequence
  source 1..756: mol_type = other DNA
atgtggtggagggacctgacccggctgcggctgtggctgaagcgggaggccatccctggagagggcaggaaggccgccaaggtgaatgctggggtgggggagaagggcatctacacagccagcagccggggcggcccccccagcgcccggagcaaggctgtgacagtggtggccgagggcgccgccagccgctcctggctgtccatggatgcccctgagctgggccctggcctggtggagcggctggagcagctggccacctgccccctgtgtggcggcagctttgaggaccctgtgctgctggcctgtgagcacagcttctgccgggcctgcctggcccggcgctggggcaccccaccagccaccggcacagaggccagccccacagcctgcccctgctgcggcctgccctgcccccggcgcagcctgcggagcaatgtgcggctggccgtggaggtgcgcatcagccgggagctgctgtttggaggcggcatcccccacagcttcctgggcacccacagccacgcccactgccgcagcatcaacagcaacccccacttccggcccaagatcatgaggccccacctggtgtccaccttcccccggccctgcagcaagcccaaccccttcctgcccagcggcagccagaacctgctgagccccacagctgccaccgtgctgcctgacttcagccacagcaaccacagcaggcctgccatgggcaaccggcccagccccagcgtgctggtgaagtag

SEQ ID NO: 168523 - DNA, 756 bp, synthetic construct
  misc_feature 1..756: note = Description of Artificial Sequence: Synthetic coding sequence
  source 1..756: mol_type = other DNA
atgtggtggagggacctgacccggctgcggctgtggctgaagcgggaggccatccctggagagggcaggaaggccgccaaggtgaatgctggggtgggggagaagggcatctacacagccagcagccggggcggcccccccagcgcccggagcaaggctgtgacagtggtggccgagggcgccgccagccgctcctggctgtccatggatgcccctgagctgggccctggcctggtggagcggctggagcagctggccacctgccccctgtgtggcggcagctttgaggaccctgtgctgctggcctgtgagcacagcttctgccgggcctgcctggcccggcgctggggcaccccaccagccaccggcacagaggccagccccacagcctgcccctgctgcggcctgccctgcccccggcgcagcctgcggagcaatgtgcggctggccgtggaggtgcgcatcagccgggagctgctgtttggccggggcatcccccacagcttcctgggcacccacagccacgcccactgccgcagcatcaacagcaacccccacttccggcccaagatcatgaggccccacctggtgtccaccttcccccacccctgcagcaagcccaaccccttcctgcccagcggcagccagaacctgctgagccccacagccaccaccgtgctgcctgacttcagccacagcaaccacagcaggcctgccatgggcaaccggcccagccccagcgtgctggtgaagtag

SEQ ID NO: 168524 - DNA, 573 bp, synthetic construct
  misc_feature 1..573: note = Description of Artificial Sequence: Synthetic coding sequence
  source 1..573: mol_type = other DNA
atgagcaccaggaagaggcggggcggggccatcaacagccggcaggcccagaagaggacccgggaggccaccagcaccccagagatcagcctggaggccgagcccatcgagctggtggagacagctggagatgagatcgtggacctgacctgtgagagcctggagcctgtggtggtggacctgacccacaatgacagcgtggtgattgtggatgaaagaagaagaccaagaagaaatgcccggcggctgccccaggaccacgccgacagctgtgtggtgtccagtgatgatgaggagctgagccgggacagagatgtgtatgtgaccacccacaccccaagaaatgccagagatgagggcgccaccggcctgcggcccagcggcaccgtgtcctgccccatctgcatggatggctacagcgagatcgtgcagaatggccgcctgattgtgtccacagaatgtggccacgtgttctgcagccagtgcctgcgggacagcctgaagaatgccaacacctgccccacctgcaggaagaagatcaaccacaagcgctaccaccccatctacatctag

SEQ ID NO: 168525 - DNA, 18 bp, synthetic construct
  misc_feature 1..18: note = Description of Artificial Sequence: Synthetic coding sequence
  source 1..18: mol_type = other DNA
atgagcaccaggaagtag

SEQ ID NO: 168526 - DNA, 573 bp, synthetic construct; identical to SEQ ID NO: 168524
  misc_feature 1..573: note = Description of Artificial Sequence: Synthetic coding sequence
  source 1..573: mol_type = other DNA

SEQ ID NO: 168527 - DNA, 573 bp, synthetic construct; identical to SEQ ID NO: 168524
  misc_feature 1..573: note = Description of Artificial Sequence: Synthetic coding sequence
  source 1..573: mol_type = other DNA

SEQ ID NO: 168528 - DNA, 165 bp, synthetic construct
  misc_feature 1..165: note = Description of Artificial Sequence: Synthetic coding sequence
  source 1..165: mol_type = other DNA
atgagcaccaggaagaggcggggcggggccatcaacagccggcaggcccagaagaggacccgggaggccaccagcaccccagagatcagcctggaggccgagcccatcgagctggtggagacagctggagatgagatcgtggacctgacctgtgagagcctgtag

SEQ ID NO: 168529 - DNA, 345 bp, synthetic construct
  misc_feature 1..345: note = Description of Artificial Sequence: Synthetic coding sequence
  source 1..345: mol_type = other DNA
atgagcaccaggaagaggcggggcggggccatcaacagccggcaggcccagaagaggacccgggaggccaccagcaccccagagatcagcctggaggccgagcccatcgagctggtggagacagctggagatgagatcgtggacctgacctgtgagagcctggagcctgtggtggtggacctgacccacaatgacagcgtggtggtgtctgtgggcgtgccccaggtgctgtctgtggtgcccagcgcctggacagacacccagaggagctgcaggatggatgtgtcctccttcccccagaatgctgccatgagctctgtggccagcgccagcgtcatcccctag

SEQ ID NO: 168530 - DNA, 573 bp, synthetic construct
  misc_feature 1..573: note = Description of Artificial Sequence: Synthetic coding sequence
  source 1..573: mol_type = other DNA
atgagcaccaggaagaggcggggcggggccatcaacagccggcaggcccagaagaggacccgggaggccaccagcaccccagagatcagcctggaggccgagcccatcgagctggtggagacagctggagatgagatcgtggacctgacctgtgagagcctggagcctgtggtggtggacctgacccacaatgacagcgtggtggtgtctgatgaaagaagaagaccaagaagaaatgcccggcggctgccccaggaccacgccgacagctgtgtggtgtccagtgatgatgaggagctgagccgggacagagatgtgtatgtgaccacccacaccccaagaaatgccagagatgagggcgccaccggcctgcggcccagcggcaccgtgtcctgccccatctgcatggatggctacagcgagatcgtgcagaatggccgcctgattgtgtccacagaatgtggccacgtgttctgcagccagtgcctgcgggacagcctgaagaatgccaacacctgccccacctgcaggaagaagatcaaccacaagcgctaccaccccatctacatctag

SEQ ID NO: 168531 - DNA, 342 bp, synthetic construct
  misc_feature 1..342: note = Description of Artificial Sequence: Synthetic coding sequence
  source 1..342: mol_type = other DNA
atgagcaccaggaagaggcggggcggggccatcaacagccggcaggcccagaagaggacccgggaggccaccagcaccccagagatcagcctggaggccgagcccatcgagctggtggagacagctggagatgagatcgtggacctgacctgtgagagcctggagcctgtggtggtggacctgacccacaatgacagcgtggtgattgtggatggcccccaggtgctgtctgtggtgcccagcgcctggacagacacccagaggagctgcaggatggatgtgagcagcttcccccagaatgctgccatgagctctgtggccagcgccagcgtcatcccctag

SEQ ID NO: 168532 - DNA, 2352 bp, synthetic construct
  misc_feature 1..2352: note = Description of Artificial Sequence: Synthetic coding sequence
  source 1..2352: mol_type = other DNA
atgtctgggggccaccagctgcagctggccgccctgtggccctggctgctgatggccaccctgcaggccggctttggaagaacaggcctggtgctggccgctgctgtggagagcgagaggtctgctgagcagaaggccatcatccgggtcatccccctgaagatggaccccaccgggaagctgaacctgaccctggagggcgtgtttgctggggtggccgagatcaccccagctgagggcaagctgatgcagagccaccccctgtacctgtgcaatgccagtgatgatgacaacctggagcccggcttcatcagcatcgtgaagctggagagcccccggcgggccccccggccctgcctgagcctggccagcaaggccaggatggccggggagcggggggccagcgctgtgctgtttgacatcacagaagatagagctgctgctgagcagctgcagcagcccctgggcctgacctggcctgtggtgctgatctggggcaatgatgctgagaagctgatggagtttgtgtacaagaaccagaaggcccacgtgcgcatcgagctgaaggagcccccagcctggccagactatgatgtgtggatcctgatgacagtggtgggcaccatcttcgtcatcatcctggcctctgtgctgcgcatccgctgccggcccaggcacagcaggccagaccccctgcagcagaggacagcctgggccatcagccagctggccacccggcgctaccaggccagctgccggcaggcccggggggagtggccagacagcggcagcagctgcagcagcgcccctgtgtgtgccatctgcctggaggagttcagcgagggccaggagctgcgggtcatcagctgcctgcacgagttccacaggaactgtgtggacccctggctgcaccagcacaggacctgccccctgtgcatgttcaacatcacagaaggagacagcttcagccagagcctgggccccagccgcagctaccaggagcctggaagaaggctgcacctgatccggcagcaccctggccacgcccactaccacctgcctgctgcctacctgctgggccccagccgctctgctgtggcccggcccccccggcccggccccttcctgcccagccaggagcccggcatgggccccaggcaccaccgcttccccagggctgcccacccccgggcccctggagagcagcagaggctggccggggcccagcacccctatgcccagggctggggcctgagccacctgcagagcaccagccagcaccctgctgcctgccctgtgcccctgcggcgggcccggcccccagacagcagcggcagcggggagagctactgcacagagaggagcggctacctggctgatggccctgccagtgacagcagcagcggcccctgccacggcagcagcagtgacagcgtggtgaactgcacagacatcagcctgcagggcgtgcacggcagcagcagcaccttctgcagcagcctgagcagtgactttgaccccctggtgtactgcagccccaagggggacccccagagggtggacatgcagcccagcgtgaccagccggcccaggagcctggacagcgtggtgcccactggagagacccaggtgagcagccacgtgcactaccaccgccaccgccaccaccactacaagaagcgcttccagtggcacggcaggaagccaggccctgagactggagtgccccagagccggccccccatccccaggacccagccccagcctgagccccccagcccagaccagcaggtgaccaggagcaacagcgctgcccccagcggccgcctgagcaacccccagtgcccccgggccctgcctgagcccgcccctggccctgtggatgccagcagcatctgccccagcaccagcagcctcttcaacctgcagaagagcagcctgagcgcccggcacccccagaggaagaggcggggcggccccagcgagcccaccccaggcagccggccccaggatgccaccgtgcacccagcctgccagatcttcccccactacaccccatctgtggcctacccctggagccctgaggcccaccccctcatctgtggccccccaggcctggacaagaggctgctgcctgagaccccaggcccctgctacagcaacagccagcctgtgtggctgtgcctgaccccccggcagcccctggagccccaccccccaggagagggccccagcgagtggagcagtgacacagctgagggccggccctgcccctacccccactgccaggtgctgagcgcccagcccggcagcgaggaggagctggaggagctgtgtgagcaggccgtgtag

SEQ ID NO: 168533 - DNA, 2229 bp, synthetic construct
  misc_feature 1..2229: note = Description of Artificial Sequence: Synthetic coding sequence
  source 1..2229: mol_type = other DNA
atgtctgggggccaccagctgcagctggccgccctgtggccctggctgctgatggccaccctgcaggccggctttggaagaacaggcctggtgctggccgctgctgtggagagcgagaggtctgctgagcagaaggccatcatccgggtcatccccctgaagatggaccccaccgggaagctgaacctgaccctggagggcgtgtttgctggggtggccgagatcaccccagctgagggcaagctgatgcaggccaggatggccggggagcggggggccagcgctgtgctgtttgacatcacagaggacagagctgctgctgagcagctgcagcagcccctgggcctgacctggcctgtggtgctgatctggggcaatgatgctgagaagctgatggagtttgtgtacaagaaccagaaggcccacgtgagaattgagctgaaggagcccccagcctggccagactatgatgtgtggatcctgatgacagtggtgggcaccatctttgtgatcatcctggcctctgtgctgcgcatccgctgccggcccaggcacagcaggccagaccccctgcagcagaggacagcctgggccatcagccagctggccacccggcgctaccaggccagctgccggcaggcccggggggagtggccagattctggcagcagctgcagcagcgcccctgtgtgtgccatctgcctggaggagttcagcgagggccaggagctgcgggtcatcagctgcctgcacgagttccacaggaactgtgtggacccctggctgcaccagcacaggacctgccccctgtgcatgttcaacatcacagaaggagacagcttcagccagagcctgggccccagccgcagctaccaggagcccggccggcggctgcacctgatccggcagcaccctggccacgcccactaccacctgcctgctgcctacctgctgggccccagccgctctgctgtggcccggccccccaggcctggccccttcctgcccagccaggagcccggcatgggccccaggcaccaccgcttcccccgggccgcccacccccgggcccctggagagcagcagaggctggccggggcccagcacccctatgcccagggctggggcctgagccacctgcagagcaccagccagcaccctgctgcctgccctgtgcccctgcggcgggcccggcccccagacagcagcggcagcggggagagctactgcacagagaggagcggctacctggctgatggccctgccagtgacagcagcagcggcccctgccacggcagcagcagtgacagcgtggtgaactgcacagacatcagcctgcagggcgtgcacggcagcagcagcaccttctgcagcagcctgagcagtgactttgaccccctggtgtactgcagccccaagggggacccccagagggtggacatgcagcccagcgtgaccagccggcccaggagcctggacagcgtggtgcccaccggggagacccaggtgagcagccacgtgcactaccaccgccaccgccaccaccactacaagaagcgcttccagtggcacggcaggaagccaggccctgagaccggggtgccccagagcaggcctcccatccccaggacccagccccagcctgagccccccagcccagaccagcaggtgaccaggagcaacagcgctgcccccagcggccgcctgagcaacccccagtgcccccgggccctgcctgagcccgcccctggccctgtggatgccagcagcatctgccccagcaccagcagcctcttcaacctgcagaagagcagcctgagcgcccggcacccccagaggaagagaagaggaggccccagcgagcccaccccaggcagccggccccaggatgccaccgtgcacccagcctgccagatcttcccccactacacccccagcgtggcctacccctggagccctgaggcccaccccctcatctgtggccccccaggcctggacaagaggctgctgcctgagaccccaggcccctgctacagcaacagccagcctgtgtggctgtgcctgaccccccggcagcccctggagccccaccccccaggagagggccccagcgagtggagcagtgacacagctgagggccggccctgcccctacccccactgccaggtgctgagcgcccagcccggcagcgaggaggagctggaggagctgtgtgagcaggccgtgtag

SEQ ID NO: 168534 - DNA, 543 bp, synthetic construct
  misc_feature 1..543: note = Description of Artificial Sequence: Synthetic coding sequence
  source 1..543: mol_type = other DNA
atggctgctgctgaggaggaggatggcggccctgagggccccaaccgggagcggggcggggccggggccacctttgagtgcaacatctgcctggagacagcccgggaggccgtggtgtctgtgtgtggccacctgtactgctggccctgcctgcaccagtggctggagaccaggcctgagcggcaggagtgccctgtgtgcaaggccggcatcagccgggagaaggtggtgcccctgtatggccggggcagccagaagccccaggacccccggctgaagaccccaccccggccccagggccagaggcctgcccctgagagcagaggaggcttccagccctttggagacacaggaggcttccacttctcctttggagtgggcgccttccccttcggcttcttcaccaccgtcttcaatgcccacgagcccttcagaagaggcaccggggtggacctgggccagggccacccagccagctcctggcaggacagcctcttcctgttcctggccatcttcttcttcttctggctgctgagcatctag

SEQ ID NO: 168535 - DNA, 543 bp, synthetic construct; identical to SEQ ID NO: 168534
  misc_feature 1..543: note = Description of Artificial Sequence: Synthetic coding sequence
  source 1..543: mol_type = other DNA

SEQ ID NO: 168536 - DNA, 549 bp, synthetic construct
  misc_feature 1..549: note = Description of Artificial Sequence: Synthetic coding sequence
  source 1..549: mol_type = other DNA
atggctgctgctgaggaggaggatggcggccctgagggccccaaccgggagcggggcggggccggggccacctttgagtgcaacatctgcctggagacagcccgggaggccgtggtgtctgtgtgtggccacctgtactgctggccctgcctgcaccagtggctggagaccaggcctgagcggcaggagtgccctgtgtgcaaggccggcatcagccgggagaaggtggtgcccctgtatggccggggcagccagaagccccaggacccccggctgaagaccccaccccggccccagggccagaggcctgcccctgagagcagaggaggcttccagccctttggagacacaggaggcttccacttctcctttggagtgggcgccttccccttcggcttcttcaccaccgtcttcaatgcccacgagcccttcagaagaggcaccggccccttcagcaccagccctgccttcttccactacctgattggcaacaccagccgggagttccggggccgcatctacaacttctggctgcccaggaacctgtag

SEQ ID NO: 168537 - DNA, 543 bp, synthetic construct; identical to SEQ ID NO: 168534
  misc_feature 1..543: note = Description of Artificial Sequence: Synthetic coding sequence
  source 1..543: mol_type = other DNA

SEQ ID NO: 168538 - DNA, 543 bp, synthetic construct; identical to SEQ ID NO: 168534
  misc_feature 1..543: note = Description of Artificial Sequence: Synthetic coding sequence
  source 1..543: mol_type = other DNA

SEQ ID NO: 168539 - DNA, 543 bp, synthetic construct; identical to SEQ ID NO: 168534
  misc_feature 1..543: note = Description of Artificial Sequence: Synthetic coding sequence
  source 1..543: mol_type = other DNA

SEQ ID NO: 168540 - DNA, 543 bp, synthetic construct; identical to SEQ ID NO: 168534
  misc_feature 1..543: note = Description of Artificial Sequence: Synthetic coding sequence
  source 1..543: mol_type = other DNA

SEQ ID NO: 168541 - DNA, 543 bp, synthetic construct; identical to SEQ ID NO: 168534
  misc_feature 1..543: note = Description of Artificial Sequence: Synthetic coding sequence
  source 1..543: mol_type = other DNA

SEQ ID NO: 168542 - DNA, 549 bp, synthetic construct; identical to SEQ ID NO: 168536
  misc_feature 1..549: note = Description of Artificial Sequence: Synthetic coding sequence
  source 1..549: mol_type = other DNA

SEQ ID NO: 168543 - DNA, 549 bp, synthetic construct; identical to SEQ ID NO: 168536
  misc_feature 1..549: note = Description of Artificial Sequence: Synthetic coding sequence
  source 1..549: mol_type = other DNA

SEQ ID NO: 168544 - DNA, 549 bp, synthetic construct; identical to SEQ ID NO: 168536
  misc_feature 1..549: note = Description of Artificial Sequence: Synthetic coding sequence
  source 1..549: mol_type = other DNA

SEQ ID NO: 168545 - DNA, 549 bp, synthetic construct; identical to SEQ ID NO: 168536
  misc_feature 1..549: note = Description of Artificial Sequence: Synthetic coding sequence
  source 1..549: mol_type = other DNA

SEQ ID NO: 168546 - DNA, 549 bp, synthetic construct; identical to SEQ ID NO: 168536
  misc_feature 1..549: note = Description of Artificial Sequence: Synthetic coding sequence
  source 1..549: mol_type = other DNA

SEQ ID NO: 168547 - DNA, 549 bp, synthetic construct; identical to SEQ ID NO: 168536
  misc_feature 1..549: note = Description of Artificial Sequence: Synthetic coding sequence
  source 1..549: mol_type = other DNA

SEQ ID NO: 168548 - DNA, 342 bp, synthetic construct
  misc_feature 1..342: note = Description of Artificial Sequence: Synthetic coding sequence
  source 1..342: mol_type = other DNA
atggctgatgtggaggatggagaggagacctgtgccctggccagccacagcggcagcagcggcagcaagagcggcggggacaagatgttcagcctgaagaagtggaatgctgtggccatgtggagctgggatgtggagtgtgacacctgtgccatctgccgggtgcaggtgatggatgcctgcctgcgctgccaggccgagaacaagcaggaggactgtgtggtggtgtggggcgagtgcaaccacagcttccacaactgctgcatgagcctgtgggtgaagcagaacaaccgctgccccctgtgccagcaggactgggtggtgcagagaattggcaagtag

SEQ ID NO: 168549 - DNA, 273 bp, synthetic construct
  misc_feature 1..273: note = Description of Artificial Sequence: Synthetic coding sequence
  source 1..273: mol_type = other DNA
atggctgatgtggaggatggagaggagacctgtgccctggccagccacagcggcagcagcggcagcaagagcggcggggacaagatgttcagcctgaagaagtggaatgctgtggccatgtggagctgggatgtggagtgtgacacctgtgccatctgccgggtgcagatgcctgtgctggatgtgaagctgaagaccaacaagaggacagtgctgtggagcggggagaatgtcatcatccccagcaccacagctgcctgcccctgtggctag

SEQ ID NO: 168550 - DNA, 294 bp, synthetic construct
  misc_feature 1..294: note = Description of Artificial Sequence: Synthetic coding sequence
  source 1..294: mol_type = other DNA
atggctgatgtggaggatggagaggagacctgtgccctggccagccacagcggcagcagcggcagcaagagcggcggggacaagatgttcagcctgaagaagtggaatgctgtggccatgtggagctgggatgtggagtgtgacacctgtgccatctgccgggtgcaggtgatggtggtgtggggcgagtgcaaccacagcttccacaactgctgcatgagcctgtgggtgaagcagaacaaccgctgccccctgtgccagcaggactgggtggtgcagagaattggcaagtag

SEQ ID NO: 168551 - DNA, 1875 bp, synthetic construct
  misc_feature 1..1875: note = Description of Artificial Sequence: Synthetic coding sequence
  source 1..1875: mol_type = other DNA
atggagaacagcgacagcaatgacaagggcagcggggaccagagcgctgcccagaggaggagccagatggaccggctggaccgggaggaggccttctaccagtttgtgaacaacctgtctgaggaggactaccgcctgatgagggacaacaacctgctgggcaccccaggagagagcacagaggaggagctgctgcggcggctgcagcagatcaaggagggccccccaccccagaacagtgatgagaacagaggaggagacagcagtgatgatgtgtccaatggagacagcatcatcgactggctgaacagcgtgcggcagacaggcaacaccaccaggagcggccagaggggcaaccagagctggagggctgtgtccaggaccaaccccaacagcggggacttccgcttcagcctggagatcaacgtgaacagaaataatggcagccagaacagtgaaaatgaaaatgagcccagcgcccggcgcagcagcggggagaatgtggagaacaacagccagaggcaggtggagaaccccaggtctgagagcaccagcgcccggcccagccgctcagaaagaaacagcacagaggccctgacagaggtgccccccacccggggccagaggcgggcccggagccgcagcccagaccacaggaggacccgggcccgggcagagaggagccgcagccccctgcaccccatgtctgagatcccccggcgcagccaccacagcatcagcagccagacctttgagcaccccctggtgaatgaaacagagggcagcagcaggaccaggcaccacgtgaccctgcggcagcagatcagcggccctgagctgctgagccggggcctgtttgctgccagcggcaccagaaatgccagccagggcgccggcagcagtgacacagctgccagcggggagagcacaggcagcggccagaggcctcccaccatcgtgctggacctgcaggtgcggcgggtgcggcctggagagtaccggcagagggacagcatcgccagcaggaccaggagccgcagccagacccccaacaacacagtgacctatgagagcgagcggggcggcttccggaggaccttcagccgctcagaaagagctggggtgaggacctacgtgtccaccatccgcatccccatccgccgcatcctgaacacaggcctgtctgagaccacctctgtggccatccagaccatgctgcggcagatcatgactggatttggagagctgagctacttcatgtacagcgacagcgacagcgagcccactggatctgtgagcaacagaaacatggagcgggcagagagccgcagcggccggggcggcagcggcggcggcagcagcagcggcagcagcagcagcagcagcagcagcagcagcagcagcagcagcagcagcagcagcagcagccccagcagcagcagtggaggagagagcagcgagaccagcagtgacctgtttgagggcagcaatgaaggcagcagcagcagcggcagcagcggggcccggcgggagggccgccaccgggcccctgtgacctttgatgaaagtggcagcctgcccttcctgagcctggcccagttcttcctgctgaatgaagatgatgatgaccagccccggggcctgaccaaggagcagattgacaacctggccatgaggagctttggagaaaatgatgccctgaagacctgcagcgtgtgcatcacagagtacacagagggcaacaagctgaggaagctgccctgcagccatgagtaccacgtgcactgcatcgaccgctggctgtctgagaacagcacctgccccatctgcagaagagctgtgctggccagcggcaaccgggagagcgtggtgtag

SEQ ID NO: 168552 - DNA, 1875 bp, synthetic construct; identical to SEQ ID NO: 168551
  misc_feature 1..1875: note = Description of Artificial Sequence: Synthetic coding sequence
  source 1..1875: mol_type = other DNA

SEQ ID NO: 168553 - DNA, 954 bp, synthetic construct
  misc_feature 1..954: note = Description of Artificial Sequence: Synthetic coding sequence
  source 1..954: mol_type = other DNA
tgactgcctgccccagctgctgccctgcccggggcccctcctcctcctcctggggtgcggggctacccagcccgggcccggggcctgcagggcgccagcggcggggcccgcttccccagcagcctgagcctgcctgtgcctggaaaaggaggctgggtggtgtcccgggccaagtttcctgccctggacagctgtgagatcaccacagcccacccccggctgtgctttgctgtgagcccccccttcagctgcagcctgcccctgcccagcctcttcccccacagccccctgctgggccggcccaagaggcaggccaagccagctgctgatgagggcttctgggactgcagcgtgtgcaccttcaggaacagcgctgaggccttcaagtgcagcatctgtgatgtgaggaagggcaccagcaccaggaagccccgcatcaacagccagctggtggcccagcaggtggcccagcagtatgccaccccacctccacccaagaaggagaagaaggagaaggtggagaagcaggacaaggagaagccagagaaggacaaggagatcagccccagcgtgaccaagaagaacaccaacaagaagaccaagcccaagagtgacatcctgaaggacccccccagcgaggccaacagcatccagagcgccaatgccaccaccaagaccagcgagaccaaccacaccagccggccccggctgaagaatgtggacaggagcacagcccagcagctggccgtgacagtgggcaatgtgaccgtcatcatcacagacttcaaggagaagaccaggagcagcagcaccagcagcagcacagtgaccagcagcgctggcagcgagcagcagaaccagagcagcagcggcagcgagagcacagacaagggcagcagccgcagcagcacccccaagggggacatgtctgctgtgaatgatgagagcttctag

SEQ ID NO: 168554 - DNA, 456 bp, synthetic construct
  misc_feature 1..456: note = Description of Artificial Sequence: Synthetic coding sequence
  source 1..456: mol_type = other DNA
atggattctgctgcctgtgccgctgctgccacccctgtgcctgccctggccctggccctggccccagacctggcccaggcccccctggccctgcccggcctgctgagccccagctgcctgctgagcagcggccaggaggtgaatggcagcgagcggggcacctgcctgtggaggccctggctgagcagcaccaatgacagcccccggcagatgaggaagctggtggacctggccgccggcggggccacagctgctgaggtgaccaaggccgagagcaagttccaccaccctgtgcggctcttctggcccaagagccgcagctttgactacctgtacagcgctggggagatcctgctgcagaacttccctgtgcaggccaccatcaacctgtatgaggacagcgacagcgaggaggaggaggaggatgaggagcaggaggatgaggaggagaagtag

SEQ ID NO: 168555 - DNA, 315 bp, synthetic construct
  misc_feature 1..315: note = Description of Artificial Sequence: Synthetic coding sequence
  source 1..315: mol_type = other DNA
atggattctgctgcctgtgccgctgctgccacccctgtgcctgccctggccctggccctggccccagacctggcccaggcccccctggccctgcccggcctgctgagccccagctgcctgctgagcagcggccaggaggtgaatggcagcgagcggctcttctggcccaagagccgcagctttgactacctgtacagcgctggggagatcctgctgcagaacttccctgtgcaggccaccatcaacctgtatgaagattctgattctgaggaggaggaggaggatgaggagcaggaggatgaggaggagaagtag

SEQ ID NO: 168556 - DNA, 213 bp, synthetic construct
  misc_feature 1..213: note = Description of Artificial Sequence: Synthetic coding sequence
  source 1..213: mol_type = other DNA
atgccagatggccctggcatgacagctgccagcggcaagctgtaccagttccgccaccctgtgcggctcttctggcccaagagcaaatgttatgactacctgtaccaggaggccgaggccctgctgaagaacttccccatccaggccaccatctccttctatgaagattctgattctgaagatgaaattgaggacctgacctgtgaaaattag

SEQ ID NO: 168557 - DNA, 387 bp, synthetic construct
  misc_feature 1..387: note = Description of Artificial Sequence: Synthetic coding sequence
  source 1..387: mol_type = other DNA
atggagaatgctgggggcgctgagggcacagagagcggggctgctgcctgtgccgccacagatggccccaccaggagagctggagctgacagcggctacgccggcttctggaggccctgggtggatgctgggggcaagaaggaggaggagacccccaaccacgccgctgaggccatgccagatggccctggcatgacagctgccagcggcaagctgtaccagttccgccaccctgtgcggctcttctggcccaagagcaaatgttatgactacctgtaccaggaggccgaggccctgctgaagaacttccccatccaggccaccatctccttctatgaagattctgattctgaagatgaaattgaggacctgacctgtgaaaattag

SEQ ID NO: 168558 - DNA, 444 bp, synthetic construct
  misc_feature 1..444: note = Description of Artificial Sequence: Synthetic coding sequence
  source 1..444: mol_type = other DNA
atggctgctgctgctgacagcttcagcggcggccctgctggggtgcggctgcccaggagcccccccctgaaggtgctggccgagcagctgcggagagatgctgagggcggccctggggcctggaggctgagcagagctgctgctggccggggccccctggacctggccgctgtgtggatgcagggccgggtggtgatggctgacagaggagaggcccggctgcgggaccccagcggggacttctctgtgcggggcctggagcgggtgccccggggccggccctgcctggtgcctgggaagtatgtgatggtgatgggcgtggtgcaggcctgcagccctgagccctgcctgcaggccgtgaagatgacagacctgagtgacaaccccatccacgagagcatgtgggagctggaggtggaggacctgcacaggaacatcccctag

SEQ ID NO: 168559 - DNA, 255 bp, synthetic construct
  misc_feature 1..255: note = Description of Artificial Sequence: Synthetic coding sequence
  source 1..255: mol_type = other DNA
atgaagcagacccaggtgggcagcctcttcagcctgggcatcagaaatcctgagcccggccctgtgtctggaacagctgtgccccggcagctggcctggaagagcggcaagtatgtgatggtgatgggcgtggtgcaggcctgcagccctgagccctgcctgcaggccgtgaagatgacagacctgagtgacaaccccatccacgagagcatgtgggagctggaggtggaggacctgcacaggaacatcccctag

SEQ ID NO: 168560 - DNA, 1431 bp, synthetic construct
  misc_feature 1..1431: note = Description of Artificial Sequence: Synthetic coding sequence
  source 1..1431: mol_type = other DNA
atggccaacagcgccaaggccgaggagtatgagaagatgagcctggagcaggccaaggcctctgtgaacagcgagacagagagcagcttcaacatcaatgaaaacaccacagccagcggcaccggcctgtctgagaagacctctgtgtgccggcaggtggacatcgccaggaagaggaaggagtttgaagatgacctggtgaaggagagcagcagctgtgggaaggacacccccagcaagaagaggaagctggaccctgagatcgtgcctgaggagaaggactgtggagatgctgagggcaacagcaagaagaggaagcgggagacagaagatgtgcccaaggacaagagcagcactggagatggcacccagaacaagaggaagatcgccctggaggatgtgcctgagaagcagaagaacctggaggagggccacagcagcacagtggccgcccactacaatgagctgcaggaggtgggcctggagaagaggagccagagccgcatcttctacctgaggaacttcaacaactggatgaagtctgtgctgattggagagttcctggagaaggtgcggcagaagaagaagagggacatcaccgtgctggacctgggctgtgggaagggcggggacctgctgaagtggaagaagggccgcatcaacaagctggtgtgcacagacattgctgatgtgtctgtgaagcagtgccagcagagatatgaggacatgaagaacagaagagattctgagtacatcttctctgctgagttcatcacagctgacagcagcaaggagctgctgattgacaagttccgggacccccagatgtgctttgacatctgcagctgccagtttgtgtgccactacagctttgagagctatgagcaggccgacatgatgctgagaaatgcctgtgagcggctgagccctgggggctacttcatcggcaccacccccaacagctttgagctgatccggcggctggaggccagcgagacagagagctttggaaatgagatctacacagtgaagttccagaagaagggggactaccccctgtttggctgcaagtatgacttcaacctggagggcgtggtggatgtgcctgagttcctggtgtacttccccctgctgaatgagatggccaagaagtacaacatgaagctggtgtacaagaagaccttcctggagttctatgaggagaagatcaagaacaatgaaaacaagatgctgctgaagaggatgcaggccctggagccctacccagccaatgaaagcagcaagctggtgtctgagaaggtggatgattatgaacatgctgccaagtacatgaagaacagccaggtgcggctgcccctgggcaccctgagcaagtctgagtgggaggccaccagcatctacctggtgtttgcctttgagaagcagcagtag

SEQ ID NO: 168561 - DNA, 1431 bp, synthetic construct; identical to SEQ ID NO: 168560
  misc_feature 1..1431: note = Description of Artificial Sequence: Synthetic coding sequence
  source 1..1431: mol_type = other DNA

SEQ ID NO: 168562 - DNA, 705 bp, synthetic construct
  misc_feature 1..705: note = Description of Artificial Sequence: Synthetic coding sequence
  source 1..705: mol_type = other DNA
atgaagaacagaagagattctgagtacatcttctctgctgagttcatcacagctgacagcagcaaggagctgctgattgacaagttccgggacccccagatgtgctttgacatctgcagctgccagtttgtgtgccactacagctttgagagctatgagcaggccgacatgatgctgagaaatgcctgtgagcggctgagccctgggggctacttcatcggcaccacccccaacagctttgagctgatccggcggctggaggccagcgagacagagagctttggaaatgagatctacacagtgaagttccagaagaagggggactaccccctgtttggctgcaagtatgacttcaacctggagggcgtggtggatgtgcctgagttcctggtgtacttccccctgctgaatgagatggccaagaagtacaacatgaagctggtgtacaagaagaccttcctggagttctatgaggagaagatcaagaacaatgaaaacaagatgctgctgaagaggatgcaggccctggagccctacccagccaatgaaagcagcaagctggtgtctgagaaggtggatgattatgaacatgctgccaagtacatgaagaacagccaggtgcggctgcccctgggcaccctgagcaagtctgagtgggaggccaccagcatctacctggtgtttgcctttgagaagcagcagtag

SEQ ID NO: 168563 - DNA, 1431 bp, synthetic construct; identical to SEQ ID NO: 168560
  misc_feature 1..1431: note = Description of Artificial Sequence: Synthetic coding sequence
  source 1..1431: mol_type = other DNA

SEQ ID NO: 168564 - DNA, 390 bp, synthetic construct
  misc_feature 1..390: note = Description of Artificial Sequence: Synthetic coding sequence
  source 1..390: mol_type = other DNA
atgaagtctgtgctgattggagagttcctggagaaggtgcggcagaagaagaagagggacatcaccgtgctggacctgggctgtgggaagggcggggacctgctgaagtggaagaagggccgcatcaacaagctggtgtgcacagacattgctgatgtgtctgtgaagcagtgccagcagagatatgaggacatgaagaacagaagagattctgagtacatcttctctgctgagttcatcacagctgacagcagcaaggagctgctgattgacaagttccgggacccccagatgtgctttgacatctgcagctgccagtttgtgtgccactacagctttgagagctatgagcaggccgacatgatgctgagaaatgcctgtggcacctag

SEQ ID NO: 168565 - DNA, 468 bp, synthetic construct
  misc_feature 1..468: note = Description of Artificial Sequence: Synthetic coding sequence
  source 1..468: mol_type = other DNA
atggcccccaggacctggtgcccagctggcatcttcggcctcttctgccccctgaccctggcctgcagcagcctgaccatcgccctgacagactgccagcccatcatcctggtgagccccaccctgagcctgtggatggtggtgcgctctgtgtggatcatgcaggccagcctgctgggggagcctgaggaggtggccctgggccccatgggcgtggtggccgccaccctggaggtggtgggcacccgggccatgggcgtggccggcatcatgacagtggacctggagggcatggacatggacatggatgtgcctgagaccatcatggccgagaccagggtggtgatgacagccacccaggaggagatcacagagaccatcatgaccacagagatgagacatgcccacaacatcggggagacctggatcagcgccctgtctgagcctgtgtgccacaccctgtcctag

SEQ ID NO: 168566 - DNA, 474 bp, synthetic construct
  misc_feature 1..474: note = Description of Artificial Sequence: Synthetic coding sequence
  source 1..474: mol_type = other DNA
atgagcagcgaggagggcaagctgtttgtgggcggcctgaacttcaacacagatgagcaggccctggaggaccacttcagcagctttggccccatcagcgaggtggtggtggtgaaggaccgggagacccagaggagccggggcttcggcttcatcaccttcaccaaccctgagcacgcctctgtggccatgagggccatgaatggagagagcctggatggccggcagatccgggtggaccacgccggcaagagcgcccggggcacccggggcggcggctttggagcccacggccggggccgcagctacagccggggcggcggggaccagggctacggcagcggccgctactatgacagcaggcctgggggctacggctacggctacggccgcagccgggactacaacggcaggaaccagggcggctatgaccgctacagcggcggcaactacagagacaactatgacaactag

SEQ ID NO: 168567 - DNA, 474 bp, synthetic construct; identical to SEQ ID NO: 168566
  misc_feature 1..474: note = Description of Artificial Sequence: Synthetic coding sequence
  source 1..474: mol_type = other DNA

SEQ ID NO: 168568 - DNA, 510 bp, synthetic construct
  misc_feature 1..510: note = Description of Artificial Sequence: Synthetic coding sequence
  source 1..510: mol_type = other DNA
atggcccccaggacctggtgcccagctggcatcttcggcctcttctgccccctgaccctggcctgcagcagcctgaccatcgccctgacagactgccagcccatcatcctggtgagccccaccctgagcctgtggatggtggtgcgctctgtgtggatcatgcaggccagcctgctgggggagcctgaggaggtggccctgggccccatgggcgtggtggccgccaccctggaggtggtgggcacccgggccatgggcgtggccggcatcatgacagtggacctggagggcatggacatggacatggatgtgcctgagaccatcatggccgagaccagggtggtgatgacagccacccaggaggagatcacagagaccatcatgaccacagagatgagacatgcccacaacatcgacacccagggcatcatcagtgaccccggcagcagcttccagatggctgtgttcatcaaggtgtttggagctgcccccaagcacctgatcctgtag

SEQ ID NO: 168569 - DNA, 2559 bp, synthetic construct
  misc_feature 1..2559: note = Description of Artificial Sequence: Synthetic coding sequence
  source 1..2559: mol_type = other DNA
atggagtatgaaagaagaggaggccgcggggacagaacaggccgctacggggccacagacaggagccaggatgatggaggagagaacagaagccgggaccatgactacagagacatggactaccgcagctacccccgggagtatggcagccaggagggcaagcatgactatgatgacagcagcgaggagcagagcgctgagatccggggccagctgcagagccatggagtgcaggcccgggaggtgcggctgatgaggaacaagagcagcggccagagccggggctttgcctttgtggagttcagccacctgcaggatgccacccgctggatggaggccaaccagcacagcctgaacatcctgggccagaaggtgtccatgcactacagcgaccccaagcccaagatcaatgaagactggctgtgcaacaagtgtggggtgcagaacttcaagaggcgggagaagtgcttcaagtgtggggtgcccaagtctgaggccgagcagaagctgcccctgggcacccggctggaccagcagaccctgcccctgggcggccgggagctgagccagggcctgctgcccctgccccagccctaccaggcccagggcgtgctggccagccaggccctgagccagggcagcgagcccagcagtgaaaatgccaatgacaccatcatcctgaggaacctgaacccccacagcaccatggacagcatcctgggcgccctggccccctatgctgtgctgagcagcagcaatgtgcgggtcatcaaggacaagcagacccagctgaacagaggatttgccttcatccagctgagcaccatcgaggccgcccagctgctgcagatcctgcaggccctgcacccccccctgaccattgatggcaagaccatcaacgtggagtttgccaagggcagcaagagggacatggccagcaatgaaggcagccgcatctctgctgcctctgtggccagcacagccatcgctgctgcccagtgggccatcagccaggccagccagggcggggagggcacctgggccaccagcgaggagccccctgtggactacagctactaccagcaggatgagggctacggcaacagccagggcacagagagcagcctgtatgcccacggctacctgaagggcaccaagggccctggcatcaccggcaccaagggggaccccaccggggccggccctgaggccagcctggagcccggggctgacagcgtgtccatgcaggccttcagccgggcccagcctggagctgcccctggcatctaccagcagagcgctgaggccagcagcagccagggcacagctgccaacagccagagctacaccatcatgagccctgctgtgctgaagtctgagctgcagagccccacccaccccagcagcgccctgcccccagccaccagccccacagcccaggagagctacagccagtaccctgtgcctgatgtgtccacctaccagtatgatgagaccagcggctactactatgacccccagacaggcctgtactatgaccccaacagccagtactactacaatgcccagagccagcagtacctgtactgggatggagagaggaggacctacgtgcctgccctggagcagagcgcagatggccacaaggagactggagcccccagcaaggagggcaaggagaagaaggagaagcacaagaccaagacagcccagcagatcgccaaggacatggagcgctgggcccggagcctgaacaagcagaaggagaacttcaagaacagcttccagcccatcagcagcctgagagatgatgagcggcgggagagcgccacagcagatgctggctacgccatcctggagaagaagggggccctggccgagcggcagcacacctccatggacctgcccaagctggccagtgatgaccggcccagccccccccggggcctggtggccgcctacagcggggagagtgacagcgaggaggagcaggagcggggcggccctgagcgggaggagaagctgacagactggcagaagctggcctgcctgctgtgccggcggcagttccccagcaaggaggccctgatccgccaccagcagctgagcggcctgcacaagcagaacctggagatccaccggcgggcccacctgtctgaaaatgagctggaggccctggagaagaatgacatggagcagatgaagtacagagacagagctgctgagcggcgggagaagtatggcatccctgagcccccagagcccaagaggaggaaatatggaggcatcagcacagcctctgtggactttgagcagcccaccagagatggcctgggcagtgacaacatcggcagcaggatgctgcaggccatgggctggaaggagggcagcggcctgggcaggaagaagcagggcatcgtgacccccatcgaggcccagaccagggtgcggggcagcggcctgggcgcccggggcagcagctatggagtgaccagcacagagagctacaaggagaccctgcacaagaccatggtgacccgcttcaatgaggcccagtag

SEQ ID NO: 168570 - DNA, 2562 bp, synthetic construct
  misc_feature 1..2562: note = Description of Artificial Sequence: Synthetic coding sequence
  source 1..2562: mol_type = other DNA
atggagtatgaaagaagaggaggccgcggggacagaacaggccgctacggggccacagacaggagccaggatgatggaggagagaacagaagccgggaccatgactacagagacatggactaccgcagctacccccgggagtatggcagccaggagggcaagcatgactatgatgacagcagcgaggagcagagcgctgagatccggggccagctgcagagccatggagtgcaggcccgggaggtgcggctgatgaggaacaagagcagcggccagagccggggctttgcctttgtggagttcagccacctgcaggatgccacccgctggatggaggccaaccagcacagcctgaacatcctgggccagaaggtgtccatgcactacagcgaccccaagcccaagatcaatgaagactggctgtgcaacaagtgtggggtgcagaacttcaagaggcgggagaagtgcttcaagtgtggggtgcccaagtctgaggccgagcagaagctgcccctgggcacccggctggaccagcagaccctgcccctgggcggccgggagctgagccagggcctgctgcccctgccccagccctaccaggcccagggcgtgctggccagccaggccctgagccagggcagcgagcccagcagtgaaaatgccaatgacaccatcatcctgaggaacctgaacccccacagcaccatggacagcatcctgggcgccctggccccctatgctgtgctgagcagcagcaatgtgcgggtcatcaaggacaagcagacccagctgaacagaggatttgccttcatccagctgagcaccatcgtggaggccgcccagctgctgcagatcctgcaggccctgcacccccccctgaccattgatggcaagaccatcaacgtggagtttgccaagggcagcaagagggacatggccagcaatgaaggcagccgcatctctgctgcctctgtggccagcacagccatcgccgccgcccagtgggccatcagccaggccagccagggcggggagggcacctgggccaccagcgaggagccccctgtggactacagctactaccagcaggatgagggctacggcaacagccagggcacagagagcagcctgtatgcccacggctacctgaagggcaccaagggccctggcatcaccggcaccaagggggaccccactggagctggccctgaggccagcctggagcctggagctgacagcgtgtccatgcaggccttcagccgggcccagcccggggccgcccctggcatctaccagcagagcgctgaggccagcagcagccagggcacagctgccaacagccagagctacaccatcatgagccctgctgtgctgaagtctgagctgcagagccccacccaccccagcagcgccctgcccccagccaccagccccacagcccaggagagctacagccagtaccctgtgcctgatgtgtccacctaccagtatgatgagaccagcggctactactatgacccccagacaggcctgtactatgaccccaacagccagtactactacaatgcccagagccagcagtacctgtactgggatggagagaggaggacctacgtgcctgccctggagcagagcgcagatggccacaaggagaccggggcccccagcaaggagggcaaggagaagaaggagaagcacaagaccaagacagcccagcagatcgccaaggacatggagcgctgggcccggagcctgaacaagcagaaggagaacttcaagaacagcttccagcccatcagcagcctgagagatgatgaaagaagagagagcgccacagcagatgctggctacgccatcctggagaagaagggggccctggccgagcggcagcacacctccatggacctgcccaagctggccagtgatgaccggcccagccccccccggggcctggtggccgcctacagcggggagagtgacagcgaggaggagcaggagcggggcggccctgagcgggaggagaagctgacagactggcagaagctggcctgcctgctgtgccggcggcagttccccagcaaggaggccctgatccgccaccagcagctgagcggcctgcacaagcagaacctggagatccacagaagagcccacctgtctgaaaatgagctggaggccctggagaagaatgacatggagcagatgaagtacagagacagagctgctgagcggcgggagaagtatggcatccctgagcccccagagcccaagaggaggaaatatggaggcatcagcacagcctctgtggactttgagcagcccaccagagatggcctgggcagtgacaacatcggcagcaggatgctgcaggccatgggctggaaggagggcagcggcctgggcaggaagaagcagggcatcgtgacccccatcgaggcccagaccagggtgcggggcagcggcctgggcgcccggggcagcagctatggagtgaccagcacagagagctacaaggagaccctgcacaagaccatggtgacccgcttcaatgaggcccagtag

SEQ ID NO: 168571 - DNA, 2793 bp, synthetic construct
  misc_feature 1..2793: note = Description of Artificial Sequence: Synthetic coding sequence
  source 1..2793: mol_type = other DNA
atggagtatgaaagaagaggaggccgcggggacagaacaggccgctacggggccacagacaggagccaggatgatggaggagagaacagaagccgggaccatgactacagagacatggactaccgcagctacccccgggagtatggcagccaggagggcaagcatgactatgatgacagcagcgaggagcagagcgcagaagattcctatgaggccagccctggcagcgagacccagaggagaagaagaagaagacaccgccacagccccactggacctcctggcttccccagagatggagactacagagaccaggactacagaacagagcagggcgaggaggaggaggaggaggaggatgaggaggaggaggagaaggccagcaacatcgtgatgctgaggatgctgccccaggccgccacagaagatgacatccggggccagctgcagagccacggcgtgcaggcccgggaggtgcggctgatgaggaacaagagcagcggccagagccggggctttgcctttgtggagttcagccacctgcaggatgccacccgctggatggaggccaaccagcacagcctgaacatcctgggccagaaggtgtccatgcactacagcgaccccaagcccaagatcaatgaagactggctgtgcaacaagtgtggggtgcagaacttcaagagaagagagaagtgcttcaagtgtggggtgcccaagtctgaggccgagcagaagctgcccctgggcacccggctggaccagcagaccctgcccctgggcggccgggagctgagccagggcctgctgcccctgccccagccctaccaggcccagggcgtgctggccagccaggccctgagccagggcagcgagcccagcagtgaaaatgccaatgacaccatcatcctgaggaacctgaacccccacagcaccatggacagcatcctgggcgccctggccccctatgctgtgctgagcagcagcaatgtgcgggtcatcaaggacaagcagacccagctgaacagaggatttgccttcatccagctgagcaccatcgtggaggccgcccagctgctgcagatcctgcaggccctgcacccccccctgaccattgatggcaagaccatcaacgtggagtttgccaagggcagcaagagggacatggccagcaatgaaggcagccgcatctctgctgcctctgtggccagcacagccatcgctgctgcccagtgggccatcagccaggccagccagggcggggagggcacctgggccaccagcgaggagccccctgtggactacagctactaccagcaggatgagggctacggcaacagccagggcacagagagcagcctgtatgcccacggctacctgaagggcaccaagggccctggcatcaccggcaccaagggggaccccaccggggccggccctgaggccagcctggagcccggggctgacagcgtgtccatgcaggccttcagccgggcccagcctggagctgcccctggcatctaccagcagagcgctgaggccagcagcagccagggcacagctgccaacagccagagctacaccatcatgagccctgctgtgctgaagtctgagctgcagagccccacccaccccagcagcgccctgcccccagccaccagccccacagcccaggagagctacagccagtaccctgtgcctgatgtgtccacctaccagtatgatgagaccagcggctactactatgacccccagacaggcctgtactatgaccccaacagccagtactactacaatgcccagagccagcagtacctgtactgggatggagagaggaggacctacgtgcctgccctggagcagagcgcagatggccacaaggagactggagcccccagcaaggagggcaaggagaagaaggagaagcacaagaccaagacagcccagcagatcgccaaggacatggagcgctgggcccggagcctgaacaagcagaaggagaacttcaagaacagcttccagcccatcagcagcctgagagatgatgagcggcgggagagcgccacagcagatgctggctacgccatcctggagaagaagggggccctggccgagcggcagcacacctccatggacctgcccaagctggccagtgatgaccggcccagccccccccggggcctggtggccgcctacagcggggagagtgacagcgaggaggagcaggagcggggcggccctgagcgggaggagaagctgacagactggcagaagctggcctgcctgctgtgccggcggcagttccccagcaaggaggccctgatccgccaccagcagctgagcggcctgcacaagcagaacctggagatccaccggcgggcccacctgtctgaaaatgagctggaggccctggagaagaatgacatggagcagatgaagtacagagacagagctgctgagcggcgggagaagtatggcatccctgagcccccagagcccaagaggaggaaatatggaggcatcagcacagcctctgtggactttgagcagcccaccagagatggcctgggcagtgacaacatcggcagcaggatgctgcaggccatgggctggaaggagggcagcggcctgggcaggaagaagcagggcatcgtgacccccatcgaggcccagaccagggtgcggggcagcggcctgggcgcccggggcagcagctatggagtgaccagcacagagagctacaaggagaccctgcacaagaccatggtgacccgcttcaatgaggcccagtag

SEQ ID NO: 168572 - DNA, 2010 bp, synthetic construct
  misc_feature 1..2010: note = Description of Artificial Sequence: Synthetic coding sequence
  source 1..2010: mol_type = other DNA
atgaagatctttgtgggcaatgtggatggagctgacaccaccccagaggagctggccgccctgtttgccccctatggaacagtgatgagctgtgctgtgatgaagcagtttgcctttgtgcacatgagagaaaatgctggggccctgcgggccatcgaggccctgcacggccacgagctgcggcccggccgggccctggtggtggagatgagccggccccggcccctgaacacctggaagatctttgtgggcaatgtgtctgctgcctgcaccagccaggagctgcggagcctgtttgaaagaagaggccgggtgattgaatgtgatgtggtgaaggactatgcctttgtgcacatggagaaggaggctgatgccaaggccgccatcgcccagctgaatggcaaggaggtgaagggcaagaggatcaacgtggagctgagcaccaagggccagaagaagggccctggcctggccgtgcagagcggggacaagaccaagaagccaggggccggggacacagccttccctggcaccggcggcttcagcgccacctttgactaccagcaggcctttggaaacagcactggaggctttgatggccaggcccggcagcccaccccacccttcttcggccgggacaggagccccctgcggcgcagccccccccgggccagctatgtggcccccctgacagcccagcctgccacctaccgggcccagcccagcgtgtccctgggcgccgcctaccgggcccagcccagcgccagcctgggcgtgggctaccgcacccagcccatgacagcccaggccgccagctaccgggcccagcccagcgtgtccctgggcgccccctaccggggccagctggccagccccagcagccagagcgctgctgccagcagcctgggcccctatggaggagcccagcccagcgccagcgccctgagcagctatggaggccaggccgccgccgccagcagcctgaacagctatggagcccagggcagcagcctggccagctatggcaaccagcccagcagctatggagcccaggccgccagcagctatggagtgcgggctgctgccagcagctacaacacccagggcgccgccagcagcctgggcagctatggagcccaggccgccagctatggagcccagagcgctgccagcagcctggcctatggagcccaggccgccagctacaatgcccagcccagcgccagctacaatgcccagagcgccccctatgctgcccagcaggccgccagctacagcagccagcctgctgcctacgtggcccagcctgccacagctgctgcctatgccagccagcctgctgcctatgctgcccaggccaccacccccatggccggcagctatggagcccagcctgtggtgcagacccagctgaacagctatggagcccaggcctccatgggcctgagcggcagctatggagcccagagcgctgctgctgccaccggcagctatggagctgctgctgcctacggggcccagcccagcgccaccctggccgccccctaccgcacccagagcagcgccagcctggccgccagctatgctgcccagcagcacccccaggccgccgccagctaccggggccagcctggaaatgcctatgatggagctggccagcccagcgctgcctacctgtccatgagccagggcgctgtggccaatgccaacagcaccccaccaccctatgaaagaacccggctgagccccccccgggccagctatgatgacccctacaagaaggctgtggccatgagcaagagatatggcagtgaccggcggctggccgagctgagtgactacagaaggctgtctgagagccagctgtccttcagaagaagccccaccaagagcagcctggactaccgccgcctgcctgatgcccacagcgactatgcccgctacagcggcagctacaatgactacctgcgggccgcccagatgcacagcggctaccagaggaggatgtag

SEQ ID NO: 168573 - DNA, 471 bp, synthetic construct
  misc_feature 1..471: note = Description of Artificial Sequence: Synthetic coding sequence
  source 1..471: mol_type = other DNA
atgaagatctttgtgggcaatgtggatggagctgacaccaccccagaggagctggccgccctgtttgccccctatggaacagtgatgagctgtgctgtgatgaagcagtttgcctttgtgcacatgagagaaaatgctggggccctgcgggccatcgaggccctgcacggccacgagctgcggcccggccgggccctggtggtggagatgagccggccccggcccctgaacacctggaagatctttgtgggcaatgtgtctgctgcctgcaccagccaggagctgcggagcctgtttgaaagaagaggccgggtgattgaatgtgatgtggtgaaggactatgcctttgtgcacatggagaaggaggctgatgccaaggccgccatcgcccagctgaatggcaaggaggtgaagggcaagaggatcaacgtggagctgagcaccaagggcatggtgcccaccggggtgtag

SEQ ID NO: 168574 - DNA, 360 bp, synthetic construct
  misc_feature 1..360: note = Description of Artificial Sequence: Synthetic coding sequence
  source 1..360: mol_type = other DNA
atgaagatctttgtgggcaatgtggatggagctgacaccaccccagaggagctggccgccctgtttgccccctatggaacagtgatgagctgtgctgtgatgaagcagtttgcctttgtgcacatgagagaaaatgctggggccctgcgggccatcgaggccctgcacggccacgagctgcggcccggccgggccctggtggtggagatgagccggccccggcccctgaacacctggaagatctttgtgggcaatgtgtctgctgcctgcaccagccaggagctgcggagcctgtttgaaagaagaggccgggtgattgaatgtgatgtggtgaagggcatggtgcccactggagtgtag

SEQ ID NO: 168575 - DNA, 2934 bp, synthetic construct
  misc_feature 1..2934: note = Description of Artificial Sequence: Synthetic coding sequence
  source 1..2934: mol_type = other DNA
atgaggacagctggccgggaccctgtgcccaggaggagcccccgctggaggagagctgtgcccctgtgtgagaccagcgctggaagaagagtgacccagctgcggggagatgacctgcggcggcctgccaccatgaagggcaaggagaggagccctgtgaaggccaagaggagccggggcggggaggacagcaccagcagaggagagaggagcaagaagctgggcggcagcggcggcagcaatggcagcagcagcggcaagacagacagcggcggcggcagcagaagaagcctgcacctggacaagagcagcagcagaggaggcagccgggagtatgacaccggcggcggcagcagcagcagccggctgcacagctacagcagccccagcaccaagaacagcagcggcggcggggagagccgcagcagcagccggggcggcggcggggagagccgcagcagcggggccgccagcagcgcccctggaggaggagatggagctgagtacaagaccctgaagatcagcgagctgggcagccagctgagtgatgaagctgtggaggatggcctcttccacgagttcaagagatttggagatgtgtctgtgaagatcagccacctgagcggcagcggcagcggagatgagcgggtggcctttgtgaacttcagaagaccagaagatgcccgggccgccaagcacgcccggggccgcctggtgctgtatgaccggcccctgaagattgaagctgtgtatgtgtccagaagaagaagccgcagccccctggacaaggacacctacccaccttctgcctctgtggtgggcgcctctgtgggcggccaccgccaccccccaggcggcggcggcggccagaggagcctgagccctggaggagctgccctgggctacagagactaccgcctgcagcagctggccctgggccgcctgcccccacctcctcctccacccctgccccgggacctggagcgggagcgggactaccccttctatgaaagagtgcggcctgcctacagcctggagccccgggtgggcgctggggccggggccgcccccttccgggaggtggatgagatcagcccagaagatgaccagagggccaacagaaccctcttcctgggcaacctggacatcaccgtgacagaaagtgacctgcggcgggcctttgacagatttggagtcatcacagaggtggacatcaagaggcccagccggggccagaccagcacctacggcttcctgaagtttgagaacctggacatgagccaccgggccaagctggccatgtctgggaagatcatcatccggaaccccatcaagattggctacggcaaggccacccccaccacccggctgtgggtgggcggcctgggcccctgggtgcccctggccgccctggcccgggagtttgaccgcttcggcaccatccgcaccatcgactacaggaagggggacagctgggcctacatccagtatgagagcctggatgctgcccatgctgcctggacccacatgaggggcttccccctgggcggccctgaccggcggctgcgggtggactttgctgacacagagcaccgctaccagcagcagtacctgcagcccctgcccctgacccactatgagctggtgacagatgccttcggccaccgggccccagaccccctgcggggggcccgggacaggaccccacccctgctgtacagagaccgggaccgggacctgtacccagacagcgactgggtgcccccacctcctcctgtgcgggagaggagcaccaggacagctgccacctctgtgcctgcctatgagcccctggacagcctggacagaagaagagatggctggagcctggaccgggacagaggagaccgggacctgcccagcagccgggaccagcccaggaagaggcggctgcctgaggagagcggcggccgccacctggacaggagccctgagagtgaccggcccaggaagaggcactgtgcccccagcccagacaggagccctgagctgagcagcagccgggaccgctacaacagcgacaatgacaggagcagccggctgctgctggagcggcccagccccatccgggacagaagaggcagcctggagaagagccagggcgacaagagggacaggaagaacagcgccagcgctgagcgggacaggaagcacaggaccacagcccccacagagggcaagagccccctgaagaaggaggacagaagtgatggcagcgcccccagcaccagcacagccagcagcaagctgaagagccccagccagaagcaggacggcggcacagcccctgtggccagcgccagccccaagctgtgcctggcctggcagggcatgctgctgctgaagaacagcaacttccccagcaacatgcacctgctgcagggcgacctgcaggtggccagcagcctgctggtggagggcagcactggaggcaaggtggcccagctgaagatcacccagaggctgcggctggaccagcccaagctggatgaggtgacccggcgcatcaaggtggccggccccaacggctacgccatcctgctggccgtgcccggcagcagtgacagccgcagcagcagcagcagcgctgccagtgacacagccaccagcacccagaggcccctgaggaacctggtgtcctacctgaagcagaagcaggccgccggggtcatcagcctgcctgtgggcggcaacaaggacaaggaaaatactggagtgctgcacgccttccccccctgtgagttcagccagcagttcctggacagccctgccaaggccctggccaagtctgaggaggactacctggtgatgatcatcgtgcggggcttcggcttccagatcggcgtgcgctatgagaacaagaagcgggagaacctggccctgaccctgctgtag

SEQ ID NO: 168576 - DNA, 2673 bp, synthetic construct
  misc_feature 1..2673: note = Description of Artificial Sequence: Synthetic coding sequence
  source 1..2673: mol_type = other DNA
atgaagaggcagagcgagcgggacagcagccccagcggccggggcagcagcagcagcgccaagaggccccgggagcgggagcgggaggccgaggccggcggcagaagagctgcccacaaggccagcggcggggccaagcaccctgtgcctgcccgggcccgggacaagccccggggcagcggcagcggcggcggcggccacagagatggccggggcactggagatgccaaccaccgggccagcagcggccgcagcagcggcagcggggccggcggcggcggccggggcggcaaggccagcggggaccccggggccagcggcatgagcccccgggccagccccctgcccccacctcctcctcctcctggagctgagcccgcctgccccggcagcagcgctgctgcccctgagtacaagaccctgctgatcagcagcctgagccctgccctgcctgctgagcacctggaggacaggctcttccaccagttcaagagatttggagagatcagcctgcggctgagccacaccccagagctgggccgggtggcctacgtgaacttccgccacccccaggatgcccgggaggcccggcagcacgccctggcccggcagctgctgctgtatgaccggcccctgaaggtggagcctgtgtacctgcggggcggcggcggcagcagcagaagaagcagcagcagcagcgctgctgccagcaccccacctcctggccccccagccccagctgaccccctgggctacctgcccctgcacggcggctaccagtacaagcagaggagcctgagccctgtggccgccccacccctgcgggagccccgggcccggcatgctgctgctgcctttgccctggatgctgctgctgctgctgctgtgggcctgagccgggagcgggccctggactactacggcctgtatgatgaccggggccggccctacggctacccagctgtgtgtgaggaggacctgatgccagaagatgaccagagggccaccaggaacctcttcatcggcaacctggaccacagcgtgtctgaggtggagctgcggcgggcctttgagaagtatggcatcatcgaggaggtggtgatcaagaggcctgcccggggccagggcggggcctatgccttcctgaagttccagaacctggacatggcccaccgggccaaggtggccatgagcggccgggtcatcggcaggaaccccatcaagattggctacggcaaggccaaccccaccacccggctgtgggtgggcggcctgggccccaacaccagcctggccgccctggcccgggagtttgacagatttggcagcatccgcaccatcgaccacgtgaagggggacagctttgcctacatccagtatgagagcctggatgctgcccaggccgcctgtgccaagatgaggggcttccccctgggcggccctgaccggcggctgcgggtggactttgccaaggccgaggagacccgctacccccagcagtaccagcccagccccctgcctgtgcactatgagctgctgacagatggctacaccaggcacaggaacctggatgctgacctggtgcgggacaggaccccaccccacctgctgtacagcgaccgggacaggaccttcctggagggggactggaccagccccagcaagagcagtgacagaagaaacagcctggagggctacagccgctctgtgcgcagccgcagcggggagcgctggggcgcagatggagaccggggcctgcccaagccctgggaggagaggaggaagaggaggagcctgagcagtgaccggggccgcaccacccacagcccctatgaggagaggagcaggaccaagggcagcggccagcagagcgagcggggcagtgacaggaccccagagaggagcaggaaggagaaccacagcagcgagggcaccaaggagagcagcagcaacagcctgagcaacagccgccacggggctgaggagcggggccaccaccaccaccaccacgaggccgctgacagcagccacggcaagaaggcccgggacagcgagaggaaccacaggaccacagaagctgagcccaagcccctggaggagcccaagcatgagaccaagaagctgaagaacctgtctgaatatgcccagaccctgcagctgggctggaatggcctgctggtgctgaagaacagctgcttccccacctccatgcacatcctggagggggaccagggcgtcatcagcagcctgctgaaggaccacaccagcggcagcaagctgacccagctgaagatcgcccagaggctgcggctggaccagcccaagctggatgaggtgacccggcgcatcaagcagggcagccccaacggctatgctgtgctgctggccacccaggccacccccagcggcctgggcacagagggcatgcccaccgtggagcccggcctgcagaggcggctgctgaggaacctggtgtcctacctgaagcagaagcaggccgccggggtcatcagcctgcctgtgggcggcagcaagggcagagatggcaccggcatgctgtatgccttccccccctgtgacttcagccagcagtacctgcagagcgccctgcggaccctgggcaagctggaggaggagcacatggtgattgtgattgtgcgggacacagcctag

SEQ ID NO: 168577 - DNA, 765 bp, synthetic construct
  misc_feature 1..765: note = Description of Artificial Sequence: Synthetic coding sequence
  source 1..765: mol_type = other DNA
atggagaccgtggtgtgccccccctgggaggagaggaggaagagaagaagcctgagcagtgaccggggccgcaccacccacagcccctatgaggagaggagcaggaccaagggcagcggccagcagagcgagcggggcagtgacaggaccccagagaggagcaggaaagaaaaccacagcagcgagggcaccaaggagagcagcagcaacagcctgagcaacagcagacatggagctgaggagcggggccaccaccaccaccaccatgaagctgctgacagcagccacggcaagaaggcccgggacagcgagaggaaccacaggaccacagaggccgagcccaagcccctggaggagcccaagcatgagaccaagaagctgaagaacctgtctgaatatgcccagaccctgcagctgggctggaatggcctgctggtgctgaagaacagctgcttccccacctccatgcacatcctggagggggaccagggcgtcatcagcagcctgctgaaggaccacaccagcggcagcaagctgacccagctgaagatcgcccagaggctgcggctggaccagcccaagctggatgaggtgacccggcgcatcaagcagggcagccccaacggctatgctgtgctgctggccacccaggccaccccatctggcctgggcacagagggcatgcccaccgtggagcccggcctgcagaggcggctgctgaggaacctggtgtcctacctgaagcagaagcaggccgccggctag

SEQ ID NO: 168578 - DNA, 636 bp, synthetic construct
  misc_feature 1..636: note = Description of Artificial Sequence: Synthetic coding sequence
  source 1..636: mol_type = other DNA
atgaagaggcagagcgagaggaaccacaggaccacagaggccgagcccaagcccctggaggagcccaagcatgagaccaagaagctgaagaacctgtctgaatatgcccagaccctgcagctgggctggaatggcctgctggtgctgaagaacagctgcttccccacctccatgcacatcctggagggggaccagggcgtcatcagcagcctgctgaaggaccacaccagcggcagcaagctgacccagctgaagatcgcccagaggctgcggctggaccagcccaagctggatgaggtgacccggcgcatcaagcagggcagccccaacggctatgctgtgctgctggccacccaggccaccccatctggcctgggcacagagggcatgcccaccgtggagcccggcctgcagaggcggctgctgaggaacctggtgtcctacctgaagcagaagcaggccgccggggtcatcagcctgcctgtgggcggcagcaagggcagagatggcaccggcatgctgtatgccttccccccctgtgacttcagccagcagtacctgcagagcgccctgcggaccctgggcaagctggaggaggagcacatggtgattgtcatcgtgcgggacacagcctag

SEQ ID NO: 168579 - DNA, 1692 bp, synthetic construct
  misc_feature 1..1692: note = Description of Artificial Sequence: Synthetic coding sequence
  source 1..1692: mol_type = other DNA
atgccagaagatgaccagagggccaccaggaacctcttcatcggcaacctggaccacagcgtgtctgaggtggagctgcggcgggcctttgagaagtatggcatcatcgaggaggtggtgatcaagaggcctgcccggggccagggcggggcctatgccttcctgaagttccagaacctggacatggcccaccgggccaaggtggccatgagcggccgggtgattggaagaaaccccatcaagattggctacggcaaggccaaccccaccacccggctgtgggtgggcggcctgggccccaacaccagcctggccgccctggcccgggagtttgaccgcttcggcagcatccgcaccatcgaccacgtgaagggggacagctttgcctacatccagtatgagagcctggatgctgcccaggccgcctgtgccaagatgaggggcttccccctgggcggccctgaccggcggctgcgggtggactttgccaaggccgaggagacccgctacccccagcagtaccagcccagccccctgcctgtgcactatgagctgctgacagatggctacaccaggcacaggaacctggatgctgacctggtgcgggacaggaccccaccccacctgctgtacagcgaccgggacaggaccttcctggagggggactggaccagccccagcaagagcagtgacagaagaaacagcctggagggctacagccgctctgtgcgcagccgctctggagagcgctggggcgcagatggagaccggggcctgcccaagccctgggaggagaggaggaagagaagaagcctgagcagtgaccggggccgcaccacccacagcccctatgaggagaggagcaggaccaagggcagcggccagcagagcgagcggggcagtgacaggaccccagagaggagcaggaaagaaaaccacagcagcgagggcaccaaggagagcagcagcaacagcctgagcaacagcagacatggagctgaggagcggggccaccaccaccaccaccatgaagctgctgacagcagccacggcaagaaggcccgggacagcgagaggaaccacaggaccacagaggccgagcccaagcccctggaggagcccaagcatgagaccaagaagctgaagaacctgtctgaatatgcccagaccctgcagctgggctggaatggcctgctggtgctgaagaacagctgcttccccacctccatgcacatcctggagggggaccagggcgtcatcagcagcctgctgaaggaccacaccagcggcagcaagctgacccagctgaagatcgcccagaggctgcggctggaccagcccaagctggatgaggtgacccggcgcatcaagcagggcagccccaacggctatgctgtgctgctggccacccaggccaccccatctggcctgggcacagagggcatgcccaccgtggagcccggcctgcagaggcggctgctgaggaacctggtgtcctacctgaagcagaagcaggccgccggggtcatcagcctgcctgtgggcggcagcaagggcagagatggcaccggcatgctgtatgccttccccccctgtgacttcagccagcagtacctgcagagcgccctgcggaccctgggcaagctggaggaggagcacatggtgattgtcatcgtgcgggacacagcctag

SEQ ID NO: 168580 - DNA, 732 bp, synthetic construct
  misc_feature 1..732: note = Description of Artificial Sequence: Synthetic coding sequence
  source 1..732: mol_type = other DNA
atgggccgggtgggccgggccggccgcagccagaggaccaagcagagcacagtgctggcccctgtgattgacctgaagaggggcggcagcagtgatgaccggcagatcgtggacaccccaccccacgtggccgccggcctgaaggaccctgtgcccagcggcttctctgctggggaggtgctgatccccctggctgatgaatatgaccccatgttccccaatgactatgagaaggtggtgaagaggcagcgggaggagcggcagaggcagcgggagctggagcggcagaaggagattgaggagcgggagaagaggaggaaggacagacatgaggccagcggctttgcccggcggccagaccctgacagtgatgaagatgaagattatgagcgggagaggaggaagaggtccatgggcggggccgccatcgccccacccaccagcctggtggagaaggacaaggagctgccccgggacttcccctatgaggaggacagccggcccaggagccagagcagcaaggccgccatccccccacctgtgtatgaggagcaggaccggcccaggagccccaccggccccagcaacagcttcctggccaacatgggcggcaccgtggcccacaagatcatgcagaagtatggcttccgggagggccagggcctgggcaagcatgagcagggcctgagcacagccctgtctgtggagaagaccagcaagaggggcggctag

SEQ ID NO: 168581 - DNA, 1206 bp, synthetic construct
  misc_feature 1..1206: note = Description of Artificial Sequence: Synthetic coding sequence
  source 1..1206: mol_type = other DNA
atgagcctgtatgatgacctgggcgtggagaccagtgacagcaagacagagggctggagcaagaacttcaagctgctgcagagccagctgcaggtgaagaaggccgccctgacccaggccaagagccagaggaccaagcagagcacagtgctggcccctgtgattgacctgaagaggggcggcagcagtgatgaccggcagatcgtggacaccccaccccacgtggccgccggcctgaaggaccctgtgcccagcggcttctctgctggggaggtgctgatccccctggctgatgaatatgaccccatgttccccaatgactatgagaaggtggtgaagaggcagcgggaggagcggcagaggcagcgggagctggagcggcagaaggagattgaggagcgggagaagaggaggaaggacagacatgaggccagcggctttgcccggcggccagaccctgacagtgatgaagatgaagattatgagcgggagaggaggaagaggtccatgggcggggccgccatcgccccacccaccagcctggtggagaaggacaaggagctgccccgggacttcccctatgaggaggacagccggcccaggagccagagcagcaaggccgccatccccccacctgtgtatgaggagcaggaccggcccaggagccccaccggccccagcaacagcttcctggccaacatgggcggcaccgtggcccacaagatcatgcagaagtatggcttccgggagggccagggcctgggcaagcatgagcagggcctgagcacagccctgtctgtggagaagaccagcaagaggggcggcaagatcatcgtgggagatgccacagagaaggatgccagcaagaagagtgacagcaaccccctgacagagatcctgaagtgccccaccaaggtggtgctgctgaggaacatggtgggcgctggggaggtggatgaggacctggaggtggagaccaaggaggagtgtgagaagtatggcaaggtgggcaaatgtgtgatctttgagatccctggggccccagatgatgaggccgtgcgcatcttcctggagtttgagcgggtggagagcgccatcaaggctgtggtggacctgaatggccgctactttggaggccgggtggtgaaggcctgcttctacaacctggacaagttccgggtgctggacctggccgagcaggtgtag

SEQ ID NO: 168582 - DNA, 639 bp, synthetic construct
  misc_feature 1..639: note = Description of Artificial Sequence: Synthetic coding sequence
  source 1..639: mol_type = other DNA
atgagcctgtatgatgacctgggcgtggagaccagtgacagcaagacagagggctggagcaagaacttcaagctgctgcagagccagctgcaggtgaagaaggccgccctgacccaggccaagagccagaggaccaagcagagcacagtgctggcccctgtgattgacctgaagaggggcggcagcagtgatgaccggcagatcgtggacaccccaccccacgtggccgccggcctgaaggaccctgtgcccagcggcttctctgctggggaggtgctgatccccctggctgatgaatatgaccccatgttccccaatgactatgagaaggtggtgaagaggcagcgggaggagcggcagaggcagcgggagctggagcggcagaaggagattgaggagcgggagaagaggaggaaggacagacatgaggccagcggctttgcccggcggccagaccctgacagtgatgaagatgaagattatgagcgggagaggaggaagaggtccatgggcggggccgccatcgccccacccaccagcctggtggagaaggacaaggagctgccccgggacttcccctatgaggaggacagccggcccaggagccagagcagcaaggccgccatccccccaccctag

SEQ ID NO: 168583 - DNA, 666 bp, synthetic construct
  misc_feature 1..666: note = Description of Artificial Sequence: Synthetic coding sequence
  source 1..666: mol_type = other DNA
atgagcctgtatgatgacctgggcgtggagaccagtgacagcaagacagagggctggagcaagaacttcaagctgctgcagagccagctgcaggtgaagaaggccgccctgacccaggccaagagccagaggaccaagcagagcacagtgctggcccctgtgattgacctgaagaggggcggcagcagtgatgaccggcagatcgtggacaccccaccccacgtggccgccggcctgaaggaccctgtgcccagcggcttctctgctggggaggtgctgatccccctggctgatgaatatgaccccatgttccccaatgactatgagaaggtggtgaagaggcagcgggaggagcggcagaggcagcgggagctggagcggcagaaggagattgaggagcgggagaagaggaaggacagacatgaggccagcggctttgcccggcggccagaccctgacagtgatgaagatgaggactatgaaagagagaggaggaagaggtccatgggcggggccgccatcgccccacccaccagcctggtggagaaggacaaggagctgccccgggacttcccctatgaggaggacagccggcccaggagccagagcagcaaggccgccatccccccacctgtgtatgaggagcaggaccggcccaggagctag

SEQ ID NO: 168584 - DNA, 732 bp, synthetic construct; identical to SEQ ID NO: 168580
  misc_feature 1..732: note = Description of Artificial Sequence: Synthetic coding sequence
  source 1..732: mol_type = other DNA

SEQ ID NO: 168585 - DNA, 1206 bp, synthetic construct; identical to SEQ ID NO: 168581
  misc_feature 1..1206: note = Description of Artificial Sequence: Synthetic coding sequence
  source 1..1206: mol_type = other DNA

SEQ ID NO: 168586 - DNA, 678 bp, synthetic construct
  misc_feature 1..678: note = Description of Artificial Sequence: Synthetic coding sequence
  source 1..678: mol_type = other DNA
tgacccctggctgatgaatatgaccccatgttccccaatgactatgagaaggtggtgaagaggcagcgggaggagcggcagaggcagcgggagctggagcggcagaaggagattgaggagcgggagaagaggaggaaggacagacatgaggccagcggctttgcccggcggccagaccctgacagtgatgaagatgaggactatgaaagagagaggaggaagaggtccatgggcggggccgccatcgccccacccaccagcctggtggagaaggacaaggagctgccccgggacttcccctatgaggaggacagccggcccaggagccagagcagcaaggccgccatccccccacctgtgtatgaggagcaggaccggcccaggagccccaccggccccagcaacagcttcctggccaacatgggcggcaccgtggcccacaagatcatgcagaagtatggcttccgggagggccagggcctgggcaagcatgagcagggcctgagcacagccctgtctgtggagaagaccagcaagagaggaggcaagatcatcgtgggagatgccacagagaagggcgtgtcccctgggaagagggtgacccggggcaagggcctggcccccagcatcagtgacatggccagcctggacccccacgtgtctgctgggggccagtag

SEQ ID NO: 168587 - DNA, 3684 bp, synthetic construct
  misc_feature 1..3684: note = Description of Artificial Sequence: Synthetic coding sequence
  source 1..3684: mol_type = other DNA
atggtgctggccgccgccatgagccaggatgctgaccccagcggccctgagcagcctgacagagtggcctgcagcgtgcctggggcccgggccagccctgcccccagcggcccccggggcatgcagcagcccccacctccaccccagcccccacctccaccccaggccggcctgccccagatcatccagaatgctgccaagctgctggacaagaaccccttctctgtgagcaaccccaaccccctgctgcccagccctgccagcctgcagctggcccagctgcaggcccagctgaccctgcaccggctgaagctggcccagacagctgtgaccaacaacacagctgctgccaccgtgctgaaccaggtgctgagcaaggtggccatgagccagcccctcttcaaccagctgcggcaccccagcgtcatcaccggcccccacggccacgccggcgtgccccagcacgccgccgccatccccagcacccgcttccccagcaatgccatcgccttcagcccccccagccagacccggggccctggccccagcatgaacctgcccaaccagccccccagcgccatggtgatgcaccccttcaccggggtgatgccccagaccccaggccagcctgctgtgatcctgggcatcggcaagacaggccctgccccagccacagctggcttctatgaatatggcaaggccagcagcggccagacctacggccctgagacagatggccagcccggcttcctgcccagcagcgccagcaccagcggctctgtgacctatgagggccactacagccacacaggccaggacggccaggccgccttcagcaaggacttctacggccccaacagccagggcagccacgtggccagcggcttccctgctgagcaggccggcggcctgaagtctgaggtgggccccctgctgcagggcaccaacagccagtgggagagcccccacggcttcagcggccagagcaagccagacctgacagctggccccatgtggcccccaccccacaaccagccctatgagctgtatgaccctgaggagcccaccagtgacaggaccccacccagctttggaggccgcctgaacaacagcaagcagggcttcatcggggccggccggcgggccaaggaggaccaggccctgctgtctgtgcggcccctgcaggcccacgagctgaatgacttccatggagtggcccccctgcacctgccccacatctgcagcatctgtgacaagaaggtgtttgacctgaaggactgggagctgcacgtgaagggcaagctgcacgcccagaagtgcctggtgttttctgaaaatgccggcatccgctgcatcctgggcagcgctgagggcaccctgtgtgccagccccaacagcacagctgtgtacaacccagctggaaatgaagattatgccagcaacctgggcaccagctatgtgcccatcccagcccgctccttcacccagagcagccccaccttccccctggcctctgtgggcaccacctttgcccagaggaagggggccggccgggtggtgcacatctgcaacctgcctgagggcagctgcacagaaaatgatgtgatcaacctgggcctgccctttgggaaggtgaccaactacatcctgatgaagagcaccaaccaggccttcctggagatggcctacacagaggccgcccaggccatggtgcagtactaccaggagaagtctgctgtgatcaacggggagaagctgctgatccgcatgagcaagcgctacaaggagctgcagctgaagaagccaggcaaggctgtggccgccatcatccaggacatccacagccagcgggagcgggacatgttccgggaggccgacagatatggccctgagcggcccaggagccgcagccctgtgagccgcagcctgagccccaggagccacacccccagcttcaccagctgcagcagcagccacagccccccaggccccagcagagctgactggggcaatggccgggacagctgggagcacagcccctatgcccggcgggaggaggagcgggaccctgccccctggagggacaatggagatgacaagagggacaggatggacccctgggcccatgacaggaagcaccacccccggcagctggacaaggccgagctggatgagaggcctgagggcggccggccccaccgggagaagtaccccaggagcggcagccccaacctgccccacagcgtgtcctcctacaagagccgggaggatggctactacaggaaggagcccaaggccaagtgggacaagtacctgaagcagcagcaggatgcccctggccgcagcaggaggaaggatgaggcccggctgcgggagagccgccacccccacccagatgattctgggaaggaggatggcctgggccccaaggtgacccgggcccctgagggcgccaaggccaagcagaatgagaagaacaagaccaagaggacagaccgggaccaggagggcgcagatgacagaaaagaaaacaccatggccgagaatgaagctgggaaggaggagcaggagggcatggaggagagcccccagagcgtgggccggcaggagaaggaggccgagttcagtgaccctgagaacaccaggaccaagaaggagcaggactgggagagcgagagcgaggccgagggggagagctggtaccccaccaacatggaggagctggtgacagtggatgaggtgggggaggaggaggacttcatcgtggagccagacatccctgagctggaggagatcgtgcccatcgaccagaaggacaagatctgcccagagacctgcctgtgtgtgaccaccaccctggacctggacctggcccaggacttccccaaggagggcgtgaaggctgtgggcaatggagctgctgagatcagcctgaagagcccccgggagctgcccagcgccagcaccagctgccccagcgacatggatgtggagatgcctggcctgaacctggatgctgagaggaagccagctgagagcgagaccggcctgagcctggaggacagcgactgctatgagaaggaggccaagggcgtggagagcagtgatgtgcacccagcccccaccgtgcagcagatgagcagccccaagccagctgaggagcgggcccggcagcccagcccctttgtggatgactgcaagacccggggcaccccagaagatggagcctgtgagggcagccccctggaggagaaggccagcccccccatcgagacagacctgcagaaccaggcctgccaggaggtgctgaccccagagaacagccgctacgtggagatgaagagcctggaggtgcgcagccctgagtacacagaggtggagctgaagcagcccctgagcctgcccagctgggagccagaagatgtgttcagcgagctgagcatccccctgggcgtggagtttgtggtgcccaggacaggcttctactgcaagctgtgtggcctcttctacaccagcgaggagacagccaagatgagccactgccgctctgctgtgcactacagaaacctgcagaagtacctgagccagctggccgaggagggcctgaaggagacagaaggagctgacagccccaggcctgaggacagcggcatcgtgcccaggtttgagaggaagaagctgtag

SEQ ID NO: 168588 - DNA, 3378 bp, synthetic construct
  misc_feature 1..3378: note = Description of Artificial Sequence: Synthetic coding sequence
  source 1..3378: mol_type = other DNA
atggtgctggccgccgccatgagccaggatgctgaccccagcggccctgagcagcctgacagagtggcctgcagcgtgcctggggcccgggccagccctgcccccagcggcccccggggcatgcagcagcccccacctccaccccagcccccacctccaccccaggccggcctgccccagatcatccagaatgctgccaagctgctggacaagaaccccttctctgtgagcaaccccaaccccctgctgcccagccctgccagcctgcagctggcccagctgcaggcccagctgaccctgcaccggctgaagctggcccagacagctgtgaccaacaacacagctgctgccaccgtgctgaaccaggtgctgagcaaggtggccatgagccagcccctcttcaaccagctgcggcaccccagcgtcatcaccggcccccacggccacgccggcgtgccccagcacgccgccgccatccccagcacccgcttccccagcaatgccatcgccttcagcccccccagccagacccggggccctggccccagcatgaacctgcccaaccagccccccagcgccatggtgatgcaccccttcaccggggtgatgccccagaccccaggccagcctgctgtgatcctgggcatcggcaagacaggccctgccccagccacagctggcttctatgaatatggcaaggccagcagcggccagacctacggccctgagacagatggccagcccggcttcctgcccagcagcgccagcaccagcggctctgtgacctatgagggccactacagccacacaggccaggacggccaggccgccttcagcaaggacttctacggccccaacagccagggcagccacgtggccagcggcttccctgctgagcaggccggcggcctgaagtctgaggtgggccccctgctgcagggcaccaacagccagtgggagagcccccacggcttcagcggccagagcaagccagacctgacagctggccccatgtggcccccaccccacaaccagccctatgagctgtatgaccctgaggagcccaccagtgacaggaccccacccagctttggaggccgcctgaacaacagcaagcagggcttcatcggggccggccggcgggccaaggaggaccaggccctgctgtctgtgcggcccctgcaggcccacgagctgaatgacttccatggagtggcccccctgcacctgccccacatctgcagcatctgtgacaagaaggtgtttgacctgaaggactgggagctgcacgtgaagggcaagctgcacgcccagaagtgcctggtgttttctgaaaatgccggcatccgctgcatcctgggcagcgctgagggcaccctgtgtgccagccccaacagcacagctgtgtacaacccagctggaaatgaagattatgccagcaacctgggcaccagctatgtgcccatcccagcccgctccttcacccagagcagccccaccttccccctggcctctgtgggcaccacctttgcccagaggaagggggccggccgggtggtgcacatctgcaacctgcctgagggcagctgcacagaaaatgatgtgatcaacctgggcctgccctttgggaaggtgaccaactacatcctgatgaagagcaccaaccaggccttcctggagatggcctacacagaggccgcccaggccatggtgcagtactaccaggagaagtctgctgtgatcaacggggagaagctgctgatccgcatgagcaagcgctacaaggagctgcagctgaagaagccaggcaaggctgtggccgccatcatccaggacatccacagccagcgggagcgggacatgttccgggaggccgacagatatggccctgagcggcccaggagccgcagccctgtgagccgcagcctgagccccaggagccacacccccagcttcaccagctgcagcagcagccacagccccccaggccccagcagagctgactggggcaatggccgggacagctgggagcacagcccctatgcccggcgggaggaggagcgggaccctgccccctggagggacaatggagatgacaagagggacaggatggacccctgggcccatgacaggaagcaccacccccggcagctggacaaggccgagctggatgagaggcctgagggcggccggccccaccgggagaagtaccccaggagcggcagccccaacctgccccacagcgtgtcctcctacaagagccgggaggatggctactacaggaaggagcccaaggccaagtgggacaagtacctgaagcagcagcaggatgcccctggccgcagcaggaggaaggatgaggcccggctgcgggagagccgccacccccacccagatgattctgggaaggaggatggcctgggccccaaggtgacccgggcccctgagggcgccaaggccaagcagaatgagaagaacaagaccaagaggacagaccgggaccaggagggcgcagatgacagaaaagaaaacaccatggccgagaatgaagctgggaaggaggagcaggagggcatggaggagagcccccagagcgtgggccggcaggagaaggaggccgagttcagtgaccctgagaacaccaggaccaagaaggagcaggactgggagagcgagagcgaggccgagggggagagctggtaccccaccaacatggaggagctggtgacagtggatgaggtgggggaggaggaggacttcatcgtggagccagacatccctgagctggaggagatcgtgcccatcgaccagaaggacaagatctgcccagagacctgcctgtgtgtgaccaccaccctggacctggacctggcccaggacttccccaaggagggcgtgaaggctgtgggcaatggagctgctgagatcagcctgaagagcccccgggagctgcccagcgccagcaccagctgccccagcgacatggatgtggagatgcctggcctgaacctggatgctgagaggaagccagctgagagcgagaccggcctgagcctggaggacagcgactgctatgagaaggaggccaagggcgtggagagcagtgatgtgcacccagcccccaccgtgcagcagatgagcagccccaagccagctgaggagcgggcccggcagcccagcccctttgtggatgactgcaagacccggggcaccccagaagatggagcctgtgagggcagccccctggaggagaaggccagcccccccatcgagacagacctgcagaaccaggcctgccagggcagtgacagcgacacccggctggtgtctggctacagcctgacccccctggagaagaccccaggcacctggaagtag

SEQ ID NO: 168589 - DNA, 1263 bp, synthetic construct
  misc_feature 1..1263: note = Description of Artificial Sequence: Synthetic coding sequence
  source 1..1263: mol_type = other DNA
atggccaccagcctgggcagcaacacctacaaccggcagaactgggaggatgctgacttccccatcctgtgccagacctgcctgggggagaacccctacatccgcatgaccaaggagaagtatggcaaggagtgcaagatctgtgcccggcccttcaccgtcttccgctggtgccctggggtgaggatgaggttcaagaagacagaggtgtgccagacctgcagcaagctgaagaatgtgtgccagacctgcctgctggacctggagtatggcctgcccatccaggtgagagatgctggcctgtccttcaaggatgacatgcccaagagtgatgtgaacaaggagtactacacccagaacatggagcgggagatcagcaacagtgatggcaccaggcctgtgggcatgctgggcaaggccaccagcaccagtgacatgctgctgaagctggcccggaccaccccctactacaagaggaaccggccccacatctgcagcttctgggtgaagggggagtgcaagagaggagaggagtgcccctacagacatgagaagcccacagatcctgatgaccccctggccgaccagaacatcaaggaccgctactacggcatcaatgaccctgtggccgacaagctgctgaagagggccagcaccatgccccggctggaccccccagaggacaagaccatcaccaccctgtatgtgggcggcctgggggacaccatcacagaaacagacctgaggaaccacttctaccagtttggagagatccgcaccatcaccgtggtgcagaggcagcagtgtgccttcatccagtttgccacccggcaggccgctgaggtggccgctgagaagagcttcaacaagctgattgtgaatggccggcggctgaatgtgaagtggggccgcagccaggccgcccggggcaaggagaaggagaaggatggcaccacagattctggcatcaagctggagcctgtgcccggcctgcccggggccctgcccccacctcctgctgctgaggaggaggccagcgccaactacttcaacctgcccccatctggccccccagctgtggtgaacatcgccctgcccccacctcctggcatcgcccctcctcctcctcctggcttcggcccccacatgttccaccccatgggccccccaccacccttcatgagggcccctggccccatccactaccccagccaggacccccagaggatgggcgcccacgccggcaagcacagcagcccctag

SEQ ID NO: 168590 - DNA, 1116 bp, synthetic construct
  misc_feature 1..1116: note = Description of Artificial Sequence: Synthetic coding sequence
  source 1..1116: mol_type = other DNA
atggccaccagcctgggcagcaacacctacaaccggcagaactgggaggatgctgacttccccatcctgtgccagacctgcctgggggagaacccctacatccgcatgaccaaggagaagtatggcctgcccatccaggtgagagatgctggcctgtccttcaaggatgacatgcccaagagtgatgtgaacaaggagtactacacccagaacatggagcgggagatcagcaacagtgatggcaccaggcctgtgggcatgctgggcaaggccaccagcaccagtgacatgctgctgaagctggcccggaccaccccctactacaagaggaaccggccccacatctgcagcttctgggtgaagggggagtgcaagagaggagaagaatgtccctacagacatgagaagcccacagatcctgatgaccccctggccgaccagaacatcaaggaccgctactacggcatcaatgaccctgtggccgacaagctgctgaagagggccagcaccatgccccggctggaccccccagaggacaagaccatcaccaccctgtatgtgggcggcctgggggacaccatcacagaaacagacctgaggaaccacttctaccagtttggagagatccgcaccatcaccgtggtgcagaggcagcagtgtgccttcatccagtttgccacccggcaggccgctgaggtggccgctgagaagagcttcaacaagctgattgtgaatggaagaaggctgaatgtgaagtggggccgcagccaggccgcccggggcaaggagaaggagaaggatggcaccacagacagcggcatcaagctggagcctgtgcccggcctgcccggggccctgcccccacctcctgctgctgaggaggaggccagcgccaactacttcaacctgccccccagcggccccccagctgtggtgaacatcgccctgcccccacctcctggcatcgcccctcctcctcctcctggcttcggcccccacatgttccaccccatgggccccccaccacccttcatgagggcccctggccccatccactaccccagccaggacccccagaggatgggcgcccatgctgggaagcacagcagcccctag

SEQ ID NO: 168591 - DNA, 1116 bp, synthetic construct
  misc_feature 1..1116: note = Description of Artificial Sequence: Synthetic coding sequence
  source 1..1116: mol_type = other DNA
atggccaccagcctgggcagcaacacctacaaccggcagaactgggaggatgctgacttccccatcctgtgccagacctgcctgggggagaacccctacatccgcatggagcgggagaagagcggcctgcccatccaggtgagagatgctggcctgtccttcaaggatgacatgcccaagagtgatgtgaacaaggagtactacacccagaacatggagcgggagatcagcaacagtgatggcaccaggcctgtgggcatgctgggcaaggccaccagcaccagtgacatgctgctgaagctggcccggaccaccccctactacaagaggaaccggccccacatctgcagcttctgggtgaagggggagtgcaagagaggagaagaatgtccctacagacatgagaagcccacagatcctgatgaccccctggccgaccagaacatcaaggaccgctactacggcatcaatgaccctgtggccgacaagctgctgaagagggccagcaccatgccccggctggaccccccagaggacaagaccatcaccaccctgtatgtgggcggcctgggggacaccatcacagaaacagacctgaggaaccacttctaccagtttggagagatccgcaccatcaccgtggtgcagaggcagcagtgtgccttcatccagtttgccacccggcaggccgctgaggtggccgctgagaagagcttcaacaagctgattgtgaatggaagaaggctgaatgtgaagtggggccgcagccaggccgcccggggcaaggagaaggagaaggatggcaccacagacagcggcatcaagctggagcctgtgcccggcctgcccggggccctgcccccacctcctgctgctgaggaggaggccagcgccaactacttcaacctgccccccagcggccccccagctgtggtgaacatcgccctgcccccacctcctggcatcgcccctcctcctcctcctggcttcggcccccacatgttccaccccatgggccccccaccacccttcatgagggcccctggccccatccactaccccagccaggacccccagaggatgggcgcccatgctgggaagcacagcagcccctag

SEQ ID NO: 168592 - DNA, 2532 bp, synthetic construct
  misc_feature 1..2532: note = Description of Artificial Sequence: Synthetic coding sequence
  source 1..2532: mol_type = other DNA
atgtccttccccccccacctgaaccggccccccatgggcatcccagccctgcccccaggcatccccccaccccagtttcctggcttccccccacctgtgcccccaggcacccccatgatccctgtgcccatgagcatcatggccccagcccccaccgtgctggtgcccaccgtgtccatggtgggcaagcacctgggcgccaggaaggaccaccctggcctgaaggccaaggaaaatgatgagaactgtggccccaccaccaccgtgtttgtgggcaacatcagcgagaaggccagtgacatgctgatccggcagctgctggccaagtgtggcctggtgctgtcctggaagagggtgcagggcgccagcggcaagctgcaggccttcggcttctgtgagtacaaggagcctgagagcaccctgcgggccctgcggctgctgcatgacctgcagatcggggagaagaagctgctggtgaaggtggatgccaagaccaaggcccagctggatgagtggaaggccaagaagaaggccagcaatggaaatgcccggcctgagaccgtgaccaatgatgatgaggaggccctggatgaggagaccaagaggcgggaccagatgatcaagggggccatcgaggtgctgatccgggagtacagcagcgagctgaatgcccccagccaggagagtgacagccaccccaggaagaagaagaaggagaagaaggaggacatcttccgccgcttccctgtggcccccctcatcccctaccccctcatcaccaaggaggacatcaatgccatcgagatggaggaggacaagagggacctgatcagccgggagatcagcaagttccgggacacccacaagaagctggaggaggagaagggcaagaaggagaaggagcggcaggagattgagaaggagcggcgggagcgggagcgggagcgggagcgggagcgggagcggcgggagcgggagcgggagcgggagcgggagcgggagcgggagaaggagaaggagcgggagcgggagcgggagcgggaccgggaccgggacaggaccaaggagcgggaccgggaccgggaccgggagcgggaccgggaccgggaccgggagaggagcagtgacaggaacaaggacaggagccgcagccgggagaagagccgggaccgggagcgggagcgggagcgggagcgggagcgggagcgggagcgggagcgggagcgggagcgggagcgggagcgggagcgggagcgggagcgggagcgggagcgggagaaggacaagaagagggaccgggaggaggatgaggaggatgcctatgaaagaaggaagctggagaggaagctgcgggagaaggaggccgcctaccaggagcggctgaagaactgggagatccgggagaggaagaagacccgggagtatgagaaggaggccgagcgggaggaggagcggcggcgggagatggccaaggaggccaagaggctgaaggagttcctggaggactatgatgatgacagagatgaccccaagtactaccggggcagcgccctgcagaagaggctgcgggaccgggagaaggagatggaggctgatgagcgggacaggaagcgggagaaggaggagctggaggagatccggcagaggctgctggccgagggccacccagaccctgatgctgagctgcagaggatggagcaggaggccgagcggcggcggcagccccagatcaagcaggagcctgagagcgaggaggaggaggaggagaagcaggagaaggaggagaagcgggaggagcccatggaggaggaggaggagcctgagcagaagccctgcctgaagcccaccctgcggcccatcagcagcgcccccagcgtgagcagcgccagcggaaatgccacccccaacaccccaggagatgagagcccctgtggcatcatcatcccccatgagaacagcccagaccagcagcagcctgaggagcaccggcccaagattggcctgagcctgaagctgggcgccagcaacagccctggccagcccaacagcgtgaagaggaagaagctgcctgtggacagcgtcttcaacaagtttgaagatgaagattctgatgatgtgcccaggaagaggaagctggtgcccctggactatggagaagatgacaagaatgccaccaagggcaccgtgaacacagaggagaagaggaagcacatcaagagcctcatcgagaagatccccacagccaagccagagctgtttgcctaccccctggactggagcatcgtggacagcatcctgatggagcggcgcatccggccctggatcaacaagaagatcatcgagtacatcggggaggaggaggccaccctggtggactttgtgtgcagcaaggtgatggcccacagcagcccccagagcatcctggatgatgtggccatggtgctggatgaggaggccgaggtgttcatcgtgaagatgtggaggctgctgatctatgaaacagaggccaagaagattggcctggtgaagtag

SEQ ID NO: 168593 - DNA, 384 bp, synthetic construct
  misc_feature 1..384: note = Description of Artificial Sequence: Synthetic coding sequence
  source 1..384: mol_type = other DNA
atgtccttccccccccacctgaaccggccccccatgggcatcccagccctgcccccaggcatccccccaccccagtttcctggcttccccccacctgtgcccccaggcacccccatgatccctgtgcccatgagcatcatggccccagcccccaccgtgctggtgcccaccgtgtccatggtgggcaagcacctgggcgccaggaaggaccaccctggcctgaaggccaaggaaaatgatgagaactgtggccccaccaccaccgtgtttgtgggcaacatcagcgagaaggccagtgacatgctgatccggcagctgctggccaagtgtggcctggtgctgtcctggaagagggtgcagggcgccagcggcaagctgcagtag

SEQ ID NO: 168594 - DNA, 903 bp, synthetic construct
  misc_feature 1..903: note = Description of Artificial Sequence: Synthetic coding sequence
  source 1..903: mol_type = other DNA
atgtccttccccccccacctgaaccggccccccatgggcatcccagccctgcccccaggcatccccccaccccagtttcctggcttccccccacctgtgcccccaggcacccccatgatccctgtgcccatgagcatcatggccccagcccccaccgtgctggtgcccaccgtgtccatggtgggcaagcacctgggcgccaggaaggaccaccctggcctgaaggccaaggaaaatgatgagaactgtggccccaccaccaccgtgtttgtgggcaacatcagcgagaaggccagtgacatgctgatccggcagctgctggccaagtgtggcctggtgctgtcctggaagagggtgcagggcgccagcggcaagctgcaggccttcggcttctgtgagtacaaggagcctgagagcaccctgcgggccctgcggctgctgcatgacctgcagatcggggagaagaagctgctggtgaaggtggatgccaagaccaaggcccagctggatgagtggaaggccaagaagaaggccagcaatggaaatgcccggcctgagaccgtgaccaatgatgatgaggaggccctggatgaggagaccaagaggcgggaccagatgatcaagggggccatcgaggtgctgatccgggagtacagcagcgagctgaatgcccccagccaggagagtgacagccaccccaggaagaagaagaaggagaagaaggaggacatcttccgccgcttccctgtggcccccctcatcccctaccccctcatcaccaaggaggacatcaatgccatcgagatggaggaggacaagagggacctgatcagccgggagatcagcaagttccgggacacccacaaggtggtgttcctgtccttccacctgatccccatctag

SEQ ID NO: 168595 - DNA, 885 bp, synthetic construct
  misc_feature 1..885: note = Description of Artificial Sequence: Synthetic coding sequence
  source 1..885: mol_type = other DNA
atgtccttccccccccacctgaaccggccccccatgggcatcccagccctgcccccaggcatccccccaccccagtttcctggcttccccccacctgtgcccccaggcacccccatgatccctgtgcccatgagcatcatggccccagcccccaccgtgctggtgcccaccgtgtccatggtgggcaagcacctgggcgccaggaaggaccaccctggcctgaaggccaaggaaaatgatgagaactgtggccccaccaccaccgtgtttgtgggcaacatcagcgagaaggccagtgacatgctgatccggcagctgctggccaagtgtggcctggtgctgtcctggaagagggtgcagggcgccagcggcaagctgcaggccttcggcttctgtgagtacaaggagcctgagagcaccctgcgggccctgcggctgctgcatgacctgcagatcggggagaagaagctgctggtgaaggtggatgccaagaccaaggcccagctggatgagtggaaggccaagaagaaggccagcaatggaaatgcccggcctgagaccgtgaccaatgatgatgaggaggccctggatgaggagaccaagaggcgggaccagatgatcaagggggccatcgaggtgctgatccgggagtacagcagcgagctgaatgcccccagccaggagagtgacagccaccccaggaagaagaagaaggagaagaaggaggacatcttccgccgcttccctgtggcccccctcatcccctaccccctcatcaccaaggaggacatcaatgccatcgagatggaggaggacaagagggacctgatcagccgggagatcagcaagttccgggacacccacaagaggagctatggagactag

SEQ ID NO: 168596 - DNA, 2532 bp, synthetic construct; identical to SEQ ID NO: 168592
  misc_feature 1..2532: note = Description of Artificial Sequence: Synthetic coding sequence
  source 1..2532: mol_type = other DNA

SEQ ID NO: 168597 - DNA, 732 bp, synthetic construct
  misc_feature 1..732: note = Description of Artificial Sequence: Synthetic coding sequence
  source 1..732: mol_type = other DNA
atgtccttccccccccacctgaaccggccccccatgggcatcccagccctgcccccaggcatccccccaccccagtttcctggcttccccccacctgtgcccccaggcacccccatgatccctgtgcccatgagcatcatggccccagcccccaccgtgctggtgcccaccgtgtccatggtgggcaagcacctgggcgccaggaaggaccaccctggcctgaaggccaaggaaaatgatgagaactgtggccccaccaccaccgtgtttgtgggcaacatcagcgagaaggccagtgacatgctgatccggcagctgctggccaagtgtggcctggtgctgtcctggaagagggtgcagggcgccagcggcaagctgcaggccttcggcttctgtgagtacaaggagcctgagagcaccctgcgggccctgcggctgctgcatgacctgcagatcggggagaagaagctgctggtgaaggtggatgccaagaccaaggcccagctggatgagtggaaggccaagaagaaggccagcaatggaaatgcccggcctgagaccgtgaccaatgatgatgaggaggccctggatgaggagaccaagaggcgggaccagatgatcaagggggccatcgaggtgctgatccgggagtacagcagcgagctgaatgcccccagccaggagagtgacagccaccccaggaagaagaagaaggagaagaaggaggactag

SEQ ID NO: 168598 - DNA, 885 bp, synthetic construct; identical to SEQ ID NO: 168595
  misc_feature 1..885: note = Description of Artificial Sequence: Synthetic coding sequence
  source 1..885: mol_type = other DNA

SEQ ID NO: 168599 - DNA, 1350 bp, synthetic construct
  misc_feature 1..1350: note = Description of Artificial Sequence: Synthetic coding sequence
  source 1..1350: mol_type = other DNA
atgctgcctgctgccacagccagcctgctgggccccctgctgacagcctgtgccctgctgccctttgcccagggccagacccccaactacaccaggcctgtgttcctgtgtggaggagatgtgaagggggagagcggctacgtggccagcgagggcttccccaacctgtacccacccaacaaggagtgcatctggaccatcaccgtgcctgagggccagacagtgtccctgtccttccgggtgtttgacctggagctgcacccagcctgccgctatgatgccctggaggtgtttgctggcagcggcaccagcggccagaggctgggccgcttctgtggcaccttccggcctgcccccctggtggcccctggcaaccaggtgaccctgaggatgaccacagatgagggcactggaggccggggcttcctgctgtggtacagcggccgggccaccagcggcacagagcaccagttctgtggcggccgcctggagaaggcccagggcaccctgaccacccccaactggccagagagtgactacccacctggcatcagctgctcctggcacatcatcgcccccccagaccaggtgattgccctgacctttgagaagtttgacctggagccagacacctactgccgctatgattctgtgtctgtgttcaacggggctgtgtctgatgacagccggcggctgggcaagttctgtggagatgctgtgcccggcagcatcagcagcgagggcaatgagctgctggtgcagtttgtgtctgacctgtctgtgacagcagatggcttcagcgccagctacaagaccctgccccggggcacagccaaggagggccagggccctggccccaagaggggcacagagcccaaggtgaagctgccccccaagagccagcccccagagaagacagaggagagccccagcgccccagatgcccccacctgccccaagcagtgcagaagaacaggcaccctgcagagcaacttctgtgccagcagcctggtggtgacagccaccgtgaagtccatggtgcgggagcccggggagggcctggccgtgacagtgtccctgattggagcctacaagacaggaggcctggacctgcccagcccccccaccggggccagcctgaagttctacgtgccctgcaagcagtgcccccccatgaagaagggcgtgtcctacctgctgatgggccaggtggaggagaacagaggccctgtgctgcccccagagagctttgtggtgctgcaccggcccaaccaggaccagatcctgaccaacctgagcaagaggaagtgccccagccagcctgtgcgggctgctgccagccaggactag

SEQ ID NO: 168600 - DNA, 1857 bp, synthetic construct
  misc_feature 1..1857: note = Description of Artificial Sequence: Synthetic coding sequence
  source 1..1857: mol_type = other DNA
atggccggcctgaccctgtttgtgggccgcctgccccccagcgcccggtctgagcagctggaggagctgttcagccaggtgggccctgtgaagcagtgctttgtggtgacagagaagggccgcacagtggccgtggactgggccgtggccaaggacaagtacaaggacacccagagcgtgtctgccatcggggaggagaagagccatgagagcaagcaccaggagagcgtgaagaagaagggccgggaggaggaggacatggaggaggaggagaatgatgatgatgatgatgatgatgatgaggaggatggagtgtttgatgatgaagatgaggaggaggagaacatcgagagcaaggtgaccaagcctgtgcagatccagaagagagctgtgaagaggcctgccccagccaagagcagtgaccacagtgaagaagattctgacctggaggagagtgacagcattgatgatggagaggagctggcccagagcgacaccagcacagaggagcaggaggacaaggctgtgcaggtgagcaacaagaagaagaggaagctgcccagtgatgtgaatgaaggcaagacagtgttcatccggaacctgagctttgattctgaggaggaggagctgggggagctgctgcagcagtttggagagctgaagtatgtgagaattgtgctgcacccagacacagagcacagcaagggctgtgcctttgcccagttcatgacccaggaggccgcccagaagtgcctgctggccgccagcccagaaaatgaagctgggggcctgaagctggatggccggcagctgaaggtggacctggccgtgaccagagatgaggccgccaagctgcagaccaccaaggtgaagaagcccaccggcaccaggaacctgtacctggcccgggagggcctcatccgggccggcaccaaggctgctgagggcgtgtctgctgctgacatggccaagcgggagagatttgagctgctgaagcaccagaagctgaaggaccagaacatctttgtgtccaggacccggctgtgcctgcacaacctgcccaaggctgtggatgacaagcagctgaggaagctgctgctgagcgccaccagcggggagaagggcgtgcgcatcaaggagtgccgggtgatgagggacctgaagggcgtgcacggcaacatgaagggccagagcctgggctacgcctttgctgagttccaggagcatgaacatgccctgaaggccctgcggctcatcaacaacaaccctgagatcttcggccccctgaagaggcccatcgtggagttcagcctggaggacaggaggaagctgaagatgaaggagctgcgcatccagaggagcctgcagaagatgaggagcaagccagccaccggggagccccagaagggccagcctgagcccgccaaggaccagcagcagaaggccgcccagcaccacacagaggagcagagcaaggtgcccccagagcagaagaggaaggccggcagcacctcctggacaggcttccagaccaaggccgaggtggagcaggtggagctgcctgatggcaagaagaggaggaaggtgctggccctgcccagccaccggggccccaagatccggctgcgggacaagggcaaggtgaagcctgtgcaccccaagaagcccaagccccagatcaaccagtggaagcaggagaagcagcagctgagcagcgagcaggtgtccaggaagaaggccaagggcaacaagacagagacccgcttcaaccagctggtggagcagtacaagcagaagctgctgggccccagcaaaggagcccccctggccaagaggagcaagtggtttgacagctag

SEQ ID NO: 168601 - DNA, 720 bp, synthetic construct
  misc_feature 1..720: note = Description of Artificial Sequence: Synthetic coding sequence
  source 1..720: mol_type = other DNA
atgctgctgcagcctgccccctgtgcccccagcgctggcttcccccggcccctggccgcccctggggccatgcacggcagccagaaggacaccaccttcaccaagatctttgtgggcggcctgccctaccacaccacagatgccagcctgaggaagtactttgagggctttggagacatcgaggaggccgtggtgatcacagaccggcagacaggcaagagccggggctacggctttgtgaccatggctgacagagctgctgctgagcgggcctgcaaggaccccaaccccatcattgatggcaggaaggccaacgtgaacctggcctacctgggcgccaagcccaggagcctgcagacaggctttgccatcggcgtgcagcagctgcaccccaccctcatccagaggacctacggcctgaccccccactacatctaccccccagccatcgtgcagcccagcgtggtgatcccagctgcccctgtgcccagcctgagcagcccctacatcgagtacaccccagccagccctgcctatgcccagtaccccccagccacctatgaccagtacccctatgctgccagccctgccacagctgccagctttgtgggctacagctacccagctgctgtgccccaggccctgtctgctgctgccccagctggcaccacctttgtgcagtaccaggccccccagctgcagcctgacaggatgcagtag

SEQ ID NO: 168602 - DNA, 477 bp, synthetic construct
  misc_feature 1..477: note = Description of Artificial Sequence: Synthetic coding sequence
  source 1..477: mol_type = other DNA
atggctgacagagctgctgctgagcgggcctgcaaggaccccaaccccatcattgatggcaggaaggccaacgtgaacctggcctacctgggcgccaagcccaggagcctgcagacaggctttgccatcggcgtgcagcagctgcaccccaccctcatccagaggacctacggcctgaccccccactacatctaccccccagccatcgtgcagcccagcgtggtgatcccagctgcccctgtgcccagcctgagcagcccctacatcgagtacaccccagccagccctgcctatgcccagtaccccccagccacctatgaccagtacccctatgctgccagccctgccacagctgccagctttgtgggctacagctacccagctgctgtgccccaggccctgtctgctgctgccccagctggcaccacctttgtgcagtaccaggccccccagctgcagcctgacaggatgcagtag

SEQ ID NO: 168603 - DNA, 366 bp, synthetic construct
  misc_feature 1..366: note = Description of Artificial Sequence: Synthetic coding sequence
  source 1..366: mol_type = other DNA
atgctgctgcagcctgccccctgtgcccccagcgctggcttcccccggcccctggccgcccctggggccatgcacggcagccagaaggacaccaccttcaccaagatctttgtgggcggcctgccctaccacaccacagatgccagcctgaggaagtactttgagggctttggagacatcgaggaggccgtggtgatcacagaccggcagacaggcaagagccggggctacggctttgtgaccatggctgacagagctgctgctgagcgggcctgcaaggaccccaaccccatcattgatggcaggaaggccaacgtgaacctggcctacctgggcgccaagcccaggagcctgcagacaggatag

SEQ ID NO: 168604 - DNA, 1095 bp, synthetic construct
  misc_feature 1..1095: note = Description of Artificial Sequence: Synthetic coding sequence
  source 1..1095: mol_type = other DNA
atggtgaagctgttcatcggcaacctgccccgggaggccacagagcaggagatccgcagcctgtttgagcagtatggcaaggtgctggagtgtgacatcatcaagaactacggctttgtgcacatcgaggacaagacagctgctgaagatgccatccggaacctgcaccactacaagctgcatggagtgaacatcaacgtggaggccagcaagaacaagagcaagaccagcaccaagctgcacgtgggcaacatcagccccacctgcaccaacaaggagctgcgggccaagtttgaggagtatggccctgtgattgaatgtgacatcgtgaaggactatgcctttgtgcacatggagcgggcagaagatgctgtggaggccatccggggcctggacaacacagagttccagggcaagaggatgcacgtgcagctgagcaccagccggctgaggacagcccctggcatgggagaccagagcggctgctaccgctgtgggaaggagggccactggagcaaggagtgccccatcgacaggagcggccgggtggccgacctgacagagcagtacaatgagcagtacggggctgtgaggaccccctacaccatgtcctatggagacagcctgtactacaacaatgcctatggagccctggatgcctactacaagcgctgcagagctgcccggagctatgaagctgtggccgctgctgctgcctctgtgtacaactatgcagagcagaccctgagccagctgccccaggtgcagaacacagccatggccagccacctgaccagcaccagcctggacccctatgacagacacctgctgcccaccagcggggctgctgccacagctgctgctgctgctgctgctgctgctgctgtgacagctgccagcaccagctactacggccgggacaggagccccctgcggcgggccacagcccctgtgcccaccgtgggggagggctacggctacggccatgaaagtgagctgagccaggccagcgctgctgccaggaacagcctgtatgacatggcccgctatgaaagagagcagtatgctgaccgggcccgctacagcgccttctag

SEQ ID NO: 168605 - DNA, 1095 bp, synthetic construct; identical to SEQ ID NO: 168604
  misc_feature 1..1095: note = Description of Artificial Sequence: Synthetic coding sequence
  source 1..1095: mol_type = other DNA

SEQ ID NO: 168606 - DNA, 1095 bp, synthetic construct; identical to SEQ ID NO: 168604
  misc_feature 1..1095: note = Description of Artificial Sequence: Synthetic coding sequence
  source 1..1095: mol_type = other DNA

SEQ ID NO: 168607 - DNA, 534 bp, synthetic construct
  misc_feature 1..534: note = Description of Artificial Sequence: Synthetic coding sequence
  source 1..534: mol_type = other DNA
atggtgaagctgttcatcggcaacctgccccgggaggccacagagcaggagatccgcagcctgtttgagcagtatggcaaggtgctggagtgtgacatcatcaagaactacggctttgtgcacatcgaggacaagacagctgctgaagatgccatccggaacctgcaccactacaagctgcatggagtgaacatcaacgtggaggccagcaagaacaagagcaagaccagcaccaagctgcacgtgggcaacatcagccccacctgcaccaacaaggagctgcgggccaagtttgaggagtatggccctgtgattgaatgtgacatcgtgaaggactatgcctttgtgcacatggagcgggcagaagatgctgtggaggccatccggggcctggacaacacagagttccagggcgagccccccagcctgggccggggcctgaacacccggctgtgtgccgagaatggctggatcagcaagagaagaggcctggtgaagatcacagctgtgggctggctggtgatgaagaagtag

SEQ ID NO: 168608 - DNA, 534 bp, synthetic construct; identical to SEQ ID NO: 168607
  misc_feature 1..534: note = Description of Artificial Sequence: Synthetic coding sequence
  source 1..534: mol_type = other DNA

SEQ ID NO: 168609 - DNA, 522 bp, synthetic construct
  misc_feature 1..522: note = Description of Artificial Sequence: Synthetic coding sequence
  source 1..522: mol_type = other DNA
atggtgaagctgttcatcggcaacctgccccgggaggccacagagcaggagatccgcagcctgtttgagcagtatggcaaggtgctggagtgtgacatcatcaagaactacggctttgtgcacatcgaggacaagacagctgctgaagatgccatccggaacctgcaccactacaagctgcatggagtgaacatcaacgtggaggccagcaagaacaagagcaagaccagcaccaagctgcacgtgggcaacatcagccccacctgcaccaacaaggagctgcgggccaagtttgaggagtatggccctgtgattgaatgtgacatcgtgaaggactatgcctttgtgcacatggagcgggcagaagatgctgtggaggccatccggggcctggacaacacagagttccagggcaagatcacccctgtgacagagggctactgctgctgcaacaagggccacacctacatcttcaagaactgcaacctgatcctggagagcaggaagagccgccgctgctag

SEQ ID NO: 168610 - DNA, 432 bp, synthetic construct
  misc_feature 1..432: note = Description of Artificial Sequence: Synthetic coding sequence
  source 1..432: mol_type = other DNA
atggtgaagctgttcatcggcaacctgccccgggaggccacagagcaggagatccgcagcctgtttgagcagtatggcaaggtgctggagtgtgacatcatcaagaactacggctttgtgcacatcgaggacaagacagctgctgaagatgccatccggaacctgcaccactacaagctgcatggagtgaacatcaacgtggaggccagcaagaacaagagcaagaccagcaccaagctgcacgtgggcaacatcagccccacctgcaccaacaaggagctgcgggccaagtttgaggagtatggccctgtgattgaatgtgacatcgtgaaggactatgcctttgtgcacatggagcgggcagaagatgctgtggaggccatccggggcctggacaacacagagttccagggcggcatgtgtgtgggctag

SEQ ID NO: 168611 - DNA, 1443 bp, synthetic construct
  misc_feature 1..1443: note = Description of Artificial Sequence: Synthetic coding sequence
  source 1..1443: mol_type = other DNA
atggccggggccggccctgcccctggcctgcctggagctgggggccctgtggtgcccggccctggagctggcatccctgggaagtctggagaggagcggctgaaggagatggaggccgagatggccctgtttgagcaggaggtgctgggcgcccctgtgcccggcatccccacagctgtgcctgctgtgcccaccgtgcccaccgtgcccaccgtggaggccatgcaggtgcctgctgcccctgtgatccggcccatcatcgccaccaacacctaccagcaggtgcagcagaccctggaggcccgggctgctgctgctgccaccgtggtgccccccatggtgggcggccccccatttgtgggccctgtgggctttggacctggggacaggagccacctggacagccctgaggcccgggaggccatgttcctgcggcgggctgctgtggccccccagagggcccccatcctgcggcctgcctttgtgccccacgtgctgcagagagctgacagcgccctgagcagcgctgctgctggcccccggcccatggccctgcggcccccccaccaggccctggtgggcccccccctgcccggccccccaggcccccccatgatgctgccccccatggcccgggcccctggcccccccctgggctccatggccgccctgcggccccccctggaggagcctgctgccccccgggagctgggcctgggcctgggcctgggcctgaaggagaaggaggaggccgtggtggccgctgctgctggcctggaggaggccagcgctgctgtggccgtgggcgctgggggcgccccagctggccctgctgtgattggccccagcctgcccctggccctggccatgcccctgcctgagcctgagcccctgcccctgcccctggaggtggtgcggggcctgctgccccccctgcgcatccctgagctgctgagcctgcggccccggccccggccccccaggcctgagcccccacctggcctgatggccctggaggtgcctgagcccctgggggaggacaagaagaagggcaagccagagaagctgaagcgctgcatcagaacagctgctggcagctcctgggaggaccccagcctgctggagtgggatgctgatgacttccgcatcttctgtggggacctgggcaatgaggtgaatgatgacatcctggcccgggccttcagccgcttccccagcttcctgaaggccaaggtgatccgggacaagaggacaggcaagaccaagggctacggctttgtgtccttcaaggaccccagcgactatgtgcgggccatgagggagatgaatggcaagtatgtgggcagccggcccatcaagctgaggaagtccatgtggaaggacaggaacctggatgtggtgaggaagaagcagaaggagaagaagaagctgggcctgaggtag

SEQ ID NO: 168612 - DNA, 1356 bp, synthetic construct
  misc_feature 1..1356: note = Description of Artificial Sequence: Synthetic coding sequence
  source 1..1356: mol_type = other DNA
atggccggggccggccctgcccctggcctgcctggagctgggggccctgtggtgcccggccctggagctggcatccctgggaagtctggagaggagcggctgaaggagatggaggccgagatggccctgtttgagcaggaggtgctgggcgcccctgtgcccggcatccccacagctgtgcctgctgtgcccaccgtgcccaccgtgcccaccgtggaggccatgcaggtgcctgctgcccctgtgatccggcccatcatcgccaccaacacctaccagcaggtgcagcagaccctggaggcccgggctgctgctgctgccaccgtggtgccccccatggtgggcggccccccatttgtgggccctgtgggctttggacctggggacaggagccacctggacagccctgaggcccgggaggccatgttcctgcggcgggctgctgctggcccccggcccatggccctgcggcccccccaccaggccctggtgggcccccccctgcccggccccccaggcccccccatgatgctgccccccatggcccgggcccctggcccccccctgggctccatggccgccctgcggccccccctggaggagcctgctgccccccgggagctgggcctgggcctgggcctgggcctgaaggagaaggaggaggccgtggtggccgctgctgctggcctggaggaggccagcgctgctgtggccgtgggcgccggcggggccccagctggccctgctgtgattggccccagcctgcccctggccctggccatgcccctgcctgagcctgagcccctgcccctgcccctggaggtggtgcggggcctgctgccccccctgcgcatccctgagctgctgagcctgcggccccggcccaggcctcccaggcctgagcccccacctggcctgatggccctggaggtgcctgagcccctgggggaggacaagaagaagggcaagccagagaagctgaagcgctgcatcagaacagctgctggcagctcctgggaggaccccagcctgctggagtgggatgctgatgacttccgcatcttctgtggggacctgggcaatgaggtgaatgatgacatcctggcccgggccttcagccgcttccccagcttcctgaaggccaaggtgatccgggacaagaggacaggcaagaccaagggctacggctttgtgtccttcaaggaccccagcgactatgtgcgggccatgagggagatgaatggcaagtatgtgggcagccggcccatcaagctgaggaagtccatgtggaaggacaggaacctggatgtggtgaggaagaagcagaaggagaagaagaagctgggcctgaggtag

SEQ ID NO: 168613 - DNA, 801 bp, synthetic construct
  misc_feature 1..801: note = Description of Artificial Sequence: Synthetic coding sequence
  source 1..801: mol_type = other DNA
atgggcgctgctgctgctgaggccgacaggaccctgtttgtgggcaacctggagaccaaggtgacagaggagctgctgtttgagctgttccaccaggccggccctgtgatcaaggtgaagatccccaaggacaaggatggcaagcccaagcagtttgcctttgtgaacttcaagcatgaggtgtctgtgccctatgccatgaacctgctgaatggcatcaagctgtatggccggcccatcaagatccagttccgcagcggcagcagccacgccccccaggatgtgtccctgagctacccccagcaccacgtgggcaacagcagccccaccagcaccagccccagccgctatgaaagaaccatggacaacatgaccagcagcgcccagatcatccagaggagcttcagcagccctgagaacttccagaggcaggccgtgatgaacagcgccctgcggcagatgtcctatggaggcaagtttggcagcagccccctggaccagagcggcttcagccccagcgtgcagagccacagccacagcttcaaccagagcagcagcagccagtggaggcagggcacccccagcagccagaggaaggtgaggatgaacagctacccctacctggccgacagacactacagccgggagcagcgctacacagaccacggcagtgaccaccactaccggggcaagagagatgacttcttctatgaggacaggaaccatgatgactggagccatgactatgacaacagaagagacagcagcagagatggcaagtggaggagcagccgccactag

SEQ ID NO: 168614 - DNA, 525 bp, synthetic construct
  misc_feature 1..525: note = Description of Artificial Sequence: Synthetic coding sequence
  source 1..525: mol_type = other DNA
atggctgatgtgctggacctgcacgaggccggaggagaagattttgccatggatgaagatggagatgagagcatccacaagctgaaggagaaggccaagaagaggaagggccggggcttcggcagcgaggagggcagccgggccaggatgagggaggactatgacagcgtggagcaggatggagatgagcccggcccccagaggtctgtggagggctggatcctgtttgtgactggagtgcatgaggaggccacagaggaggacatccatgacaagtttgctgaatatggagagatcaagaacatccacctgaacctggacagaagaacaggctacctgaagggctacaccctggtggagtatgagacctacaaggaggcccaggccgccatggagggcctgaatggccaggacctgatgggccagcccatctctgtggactggtgctttgtgcggggcccccccaagggcaagagaagaggaggaagaagaagaagccgcagcccagacagaagaagaagatag

SEQ ID NO: 168615 - DNA, 522 bp, synthetic construct
  misc_feature 1..522: note = Description of Artificial Sequence: Synthetic coding sequence
  source 1..522: mol_type = other DNA
atggctgatgtgctggacctgcacgaggccggaggagaagattttgccatggatgaagatggagatgagagcatccacaagctgaaggagaaggccaagaagaggaagggccggggcttcggcagcgagggcagccgggccaggatgagagaagattatgattctgtggagcaggatggagatgagcccggcccccagaggtctgtggagggctggatcctgtttgtgactggagtgcatgaggaggccacagaggaggacatccatgacaagtttgctgaatatggagagatcaagaacatccacctgaacctggacagaagaacaggctacctgaagggctacaccctggtggagtatgagacctacaaggaggcccaggccgccatggagggcctgaatggccaggacctgatgggccagcccatctctgtggactggtgctttgtgcggggcccccccaagggcaagaggcggggcggcagaagaagaagccgcagcccagacagaagaagaagatag

SEQ ID NO: 168616 - DNA, 1179 bp, synthetic construct
  misc_feature 1..1179: note = Description of Artificial Sequence: Synthetic coding sequence
  source 1..1179: mol_type = other DNA
atggtggaggccgacaggcctgggaagctgttcatcggcggcctgaacctggagacagatgagaaggccctggaggccgagtttgggaagtatggccgcatcgtggaggtgctgctgatgaaggaccgggagaccaacaagagccggggctttgcctttgtgacctttgagagccctgcagatgccaaggctgctgcccgggacatgaatggcaagagcctggatggcaaggccatcaaggtggcccaggccaccaagccagcctttgagagcagcagaagaggccccccaccacccaggagccggggccggccccgcttcctgcggggcacccggggcggcggcggcggccccaggaggagccccagcagaggaggcccagatgatgatggcggctacacagctgactttgacctgcggcccagccgggcccccatgcccatgaagaggggccccccaccaagaagagtgggccccccacccaagagagctgcccccagcggccctgcccggagcagcggcggcggcatgaggggccgggccctggccgtgcggggcagagatggctacagcggccccccaagaagagagcccctgcccccccggcgggacccctacctgggccccagagatgagggctacagcagcagagatggctacagcagccgggactaccgggagccccggggctttgcccccagccctggagagtacacccaccgggactatggccacagctctgtgagagatgactgccccctgcggggctacagcgacagagatggctatggaggccgggaccgggactatggagaccacctgagccggggcagccaccgggagccctttgagagctatggagagctgcggggggccgcccctggccggggcaccccacccagctatggaggcggcggccgctatgaggagtaccggggctacagcccagatgcctacagcggcggccgggacagctacagcagcagctatggccgcagtgaccgctacagccggggccgccaccgggtgggccgcccagaccggggcctgagcctgtccatggagcggggctgccccccccagagggacagctacagccgcagcggctgccgggtgccccggggcggcggccgcctgggcggccgcctggagcggggcggcggccgcagccgctactag

SEQ ID NO: 168617 - DNA, 1491 bp, synthetic construct
  misc_feature 1..1491: note = Description of Artificial Sequence: Synthetic coding sequence
  source 1..1491: mol_type = other DNA
atggtggaggccgaccaccctgggaagctgttcatcggcggcctgaaccgggagaccaatgagaagatgctgaaggctgtgtttgggaagcacggccccatcagcgaggtgctgctgatcaaggacaggaccagcaagagccggggctttgccttcatcacctttgagaacccagcagatgccaagaatgctgccaaggacatgaatggcaagagcctgcacggcaaggccatcaaggtggagcaggccaagaagcccagcttccagagcggcggcagaagaagacctccagccagcagcaggaacagaagccccagcggcagcctgcggagcgcccggggcagcagaggaggcacccggggctggctgcccagccatgagggccacctggatgatggcggctacaccccagacctgaagatgagctacagccggggcctcatccctgtgaagaggggccccagcagccgcagcggcggccccccacccaagaagagcgcccccagcgctgtggcccggagcaacagctggatgggcagccagggccccatgagccagaggagagaaaattatggagtgcccccccggcgggccaccatcagctcctggagaaatgacaggatgagcaccaggcatgatggctacgccaccaatgatggcaaccaccccagctgccaggagacccgggactatgccccacccagccggggctacgcctacagagacaatggccacagcaacagagatgagcacagcagccggggctacagaaaccacaggagcagccgggagacccgggactatgccccacccagccggggccacgcctacagagattatggccacagcagaagagatgagagctacagccggggctacagaaacagaagaagcagccgggagacccgggagtatgccccacccagccggggccacggctacagagattatggccacagcagaagacatgagagctacagccggggctacagaaaccaccccagcagccgggagacccgggactatgccccaccccaccgggactatgcctacagagattatggccacagctcctgggatgagcacagcagccggggctacagctaccatgatggctatggagaggccctgggccgggaccacagcgagcacctgagcggcagcagctacagagatgccctgcagagatatggcaccagccatggagcccccccagcccggggccccaggatgtcctatggaggcagcacctgccacgcctacagcaacacccgggacagatatggccgctcctgggagagctacagcagctgtggggacttccactactgtgaccgggagcacgtgtgcaggaaggaccagagaaatccacccagcctgggccgggtgctgcctgacccccgggaggcctgtggcagcagcagctatgtggccagcatcgtggatggaggagagagccgctctgagaagggggacagcagccgctactag

SEQ ID NO: 168618 - DNA, 1491 bp, synthetic construct; identical to SEQ ID NO: 168617
  misc_feature 1..1491: note = Description of Artificial Sequence: Synthetic coding sequence
  source 1..1491: mol_type = other DNA

SEQ ID NO: 168619 - DNA, 870 bp, synthetic construct
  misc_feature 1..870: note = Description of Artificial Sequence: Synthetic coding sequence
  source 1..870: mol_type = other DNA
atgagcaccaggcatgatggctacgccaccaatgatggcaaccaccccagctgccaggagacccgggactatgccccacccagccggggctacgcctacagagacaatggccacagcaacagagatgagcacagcagccggggctacagaaaccacaggagcagccgggagacccgggactatgccccacccagccggggccacgcctacagagattatggccacagcagaagagatgagagctacagccggggctacagaaacagaagaagcagccgggagacccgggagtatgccccacccagccggggccacggctacagagattatggccacagcagaagacatgagagctacagccggggctacagaaaccaccccagcagccgggagacccgggactatgccccaccccaccgggactatgcctacagagattatggccacagctcctgggatgagcacagcagccggggctacagctaccatgatggctacggggaggccctgggccgggaccacagcgagcacctgagcggcagcagctacagagatgccctgcagagatatggcaccagccacggggcccccccagcccggggccccaggatgtcctatggaggcagcacctgccacgcctacagcaacacccgggacagatatggccgctcctgggagagctacagcagctgtggggacttccactactgtgaccgggagcacgtgtgcaggaaggaccagaggaacccccccagcctgggccgggtgctgcctgacccccgggaggcctgtggcagcagcagctatgtggccagcatcgtggatggaggagagagccgctctgagaagggggacagcagccgctactag

SEQ ID NO: 168620 - DNA, 1266 bp, synthetic construct
  misc_feature 1..1266: note = Description of Artificial Sequence: Synthetic coding sequence
  source 1..1266: mol_type = other DNA
atgggcaagaggctggaccagccccagatgtacccccagtacacctactactacccccactacctgcagaccaagcagagctatgccccagccccccaccccatggccccacccagccccagcaccaacagcagcagcaacaacagcagcaacaacagcagcggggagcagctgagcaagaccaacctgtacatccggggcctgcccccaggcaccacagaccaggacctgatcaagctgtgccagccctacggcaagatcgtgtccaccaaggccatcctggacaagaacaccaaccagtgcaagggctacggctttgtggactttgacagccctgctgctgcccagaaggctgtggccagcctgaaggccaatggagtgcaggcccagatggccaagcagcaggagcaggaccccaccaacctgtacatcagcaacctgcccatctccatggatgagcaggagctggagaacatgctgaagccctttggacatgtgatcagcacccgcatcctgagagatgccaacggggtgtccagaggagtgggctttgccaggatggagagcacagagaagtgtgaggtggtgatccagcacttcaacgggaagtacctgaagaccccacctggcatcccagcccccagcgagcccctgctgtgcaagtttgctgatggcggccagaagaagaggcagaaccagagcaagtacacccagaatggccggccctggccccgggagggggaggccggcatggccctgacctatgaccccacagctgccatccagaatggcttctacagcagcccctacagcatcgccaccaacaggatgatcccccagaccagcatcacccccttcatcgccgccagccctgtgtccacctaccaggtgcagagcacctcctggatgccccaccccccctacgtgatgcagcccactggagctgtgatcacccccaccatggaccaccccatgtccatgcagcctgccaacatgatgggccccctgacccagcagatgaaccacctgagcctgggcaccaccggcacctacatgacagctgctgcccccatgcagggcacctacatcccccagtacacccctgtgcccccaacagctgtgtccattgagggcgtggtggccgacaccagcccccagacagtggcccccagcagccaggacaccagcggccagcagcagcagattgctgtggacaccagcaatgagcacgccccagcctacagctaccagcagagcaagccctag

SEQ ID NO: 168621 - DNA, 1263 bp, synthetic construct
  misc_feature 1..1263: note = Description of Artificial Sequence: Synthetic coding sequence
  source 1..1263: mol_type = other DNA
atgggcaagaggctggaccagccccagatgtacccccagtacacctactactacccccactacctgcagaccaagcagagctatgccccagccccccaccccatggccccacccagccccagcaccaacagcagcagcaacaacagcagcaacaacagcagcggggagcagctgagcaagaccaacctgtacatccggggcctgcccccaggcaccacagaccaggacctgatcaagctgtgccagccctacggcaagatcgtgtccaccaaggccatcctggacaagaacaccaaccagtgcaagggctacggctttgtggactttgacagccctgctgctgcccagaaggctgtggccagcctgaaggccaatggagtgcaggcccagatggccaagcagcaggagcaggaccccaccaacctgtacatcagcaacctgcccatctccatggatgagcaggagctggagaacatgctgaagccctttggacatgtgatcagcacccgcatcctgagagatgccaacggggtgtccagaggagtgggctttgccaggatggagagcacagagaagtgtgaggtggtgatccagcacttcaacgggaagtacctgaagaccccacctggcatcccagcccccagcgagcccctgctgtgcaagtttgctgatggcggccagaagaagaggcagaaccagagcaagtacacccagaatggccggccctggccccgggagggggaggccggcatggccctgacctatgaccccacagctgccatccagaatggcttctacagcagcccctacagcatcgccaccaacaggatgatcccccagaccagcatcacccccttcatcgccgccagccctgtgtccacctaccaggtgcagagcacctcctggatgccccaccccccctacgtgatgcagcccactggagctgtgatcacccccaccatggaccaccccatgtccatgcagcctgccaacatgatgggccccctgacccagcagatgaaccacctgagcctgggcaccaccggcacctacatgacagctgctgcccccatgcagggcacctacatcccccagtacacccctgtgcccccaacagctgtgtccattgagggcgtggtggccgacaccagcccccagacagtggcccccagcagccaggacaccagcggccagcagcagcagattgctgtggacaccagcaatgagcacgccccagcctacagctaccagcagagcaagtag

SEQ ID NO: 168622 - DNA, 1260 bp, synthetic construct
  misc_feature 1..1260: note = Description of Artificial Sequence: Synthetic coding sequence
  source 1..1260: mol_type = other DNA
atgggcaagaggctggaccagccccagatgtacccccagtacacctactactacccccactacctgcagaccaagagctatgccccagccccccaccccatggccccacccagccccagcaccaacagcagcagcaacaacagcagcaacaacagcagtggagagcagctgagcaagaccaacctgtacatccggggcctgcccccaggcaccacagaccaggacctgatcaagctgtgccagccctacggcaagatcgtgtccaccaaggccatcctggacaagaacaccaaccagtgcaagggctacggctttgtggactttgacagccctgctgctgcccagaaggctgtggccagcctgaaggccaacggggtgcaggcccagatggccaagcagcaggagcaggaccccaccaacctgtacatcagcaacctgcccatctccatggatgagcaggagctggagaacatgctgaagcccttcggccacgtgatcagcacccgcatcctgagagatgccaatggagtgtcccggggcgtgggctttgccaggatggagagcacagagaagtgtgaggtggtgatccagcacttcaacgggaagtacctgaagaccccacctggcatcccagcccccagcgagcccctgctgtgcaagtttgctgatggcggccagaagaagaggcagaaccagagcaagtacacccagaatggccggccctggccccgggagggggaggccggcatggccctgacctatgaccccacagctgccatccagaatggcttctacagcagcccctacagcatcgccaccaacaggatgatcccccagaccagcatcacccccttcatcgccgccagccctgtgtccacctaccagggcgctgtgatcacccccaccatggaccaccccatgtccatgcagcctgccaacatgatgggccccctgacccagcagatgaaccacctgagcctgggcaccaccggcaccatccagagccaggaccgcatcatgatcctgcaccagctgctgtgccagtacatgacagctgctgcccccatgcagggcacctacatcccccagtacacccctgtgcccccaacagctgtgtccattgagggcgtggtggccgacaccagcccccagacagtggcccccagcagccaggacaccagcggccagcagcagcagattgctgtggacaccagcaatgagcacgccccagcctacagctaccagcagagcaagccctag

SEQ ID NO: 168623 - DNA, 1314 bp, synthetic construct
  misc_feature 1..1314: note = Description of Artificial Sequence: Synthetic coding sequence
  source 1..1314: mol_type = other DNA
atgggcaagaggctggaccagccccagatgtacccccagtacacctactactacccccactacctgcagaccaagcagagctatgccccagccccccaccccatggccccacccagccccagcaccaacagcagcagcaacaacagcagcaacaacagcagcggggagcagctgagcaagaccaacctgtacatccggggcctgcccccaggcaccacagaccaggacctgatcaagctgtgccagccctacggcaagatcgtgtccaccaaggccatcctggacaagaacaccaaccagtgcaagggctacggctttgtggactttgacagccctgctgctgcccagaaggctgtggccagcctgaaggccaatggagtgcaggcccagatggccaagcagcaggagcaggaccccaccaacctgtacatcagcaacctgcccatctccatggatgagcaggagctggagaacatgctgaagccctttggacatgtgatcagcacccgcatcctgagagatgccaacggggtgtccagaggagtgggctttgccaggatggagagcacagagaagtgtgaggtggtgatccagcacttcaacgggaagtacctgaagaccccacctggcatcccagcccccagcgagcccctgctgtgcaagtttgctgatggcggccagaagaagaggcagaaccagagcaagtacacccagaatggccggccctggccccgggagggggaggccggcatggccctgacctatgaccccacagctgccatccagaatggcttctacagcagcccctacagcatcgccaccaacaggatgatcccccagaccagcatcacccccttcatcgccgccagccctgtgtccacctaccaggtgcagagcacctcctggatgccccaccccccctacgtgatgcagcccactggagctgtgatcacccccaccatggaccaccccatgtccatgcagcctgccaacatgatgggccccctgacccagcagatgaaccacctgagcctgggcaccaccggcaccatccagagccaggaccgcatcatgatcctgcaccagctgctgtgccagtacatgacagctgctgcccccatgcagggcacctacatcccccagtacacccctgtgcccccaacagctgtgtccattgagggcgtggtggccgacaccagcccccagacagtggcccccagcagccaggacaccagcggccagcagcagcagattgctgtggacaccagcaatgagcacgccccagcctacagctaccagcagagcaagccctag

SEQ ID NO: 168624 - DNA, 1305 bp, synthetic construct
  misc_feature 1..1305: note = Description of Artificial Sequence: Synthetic coding sequence
  source 1..1305: mol_type = other DNA
atgggcaagaggctggaccagccccagatgtacccccagtacacctactactacccccactacctgcagaccaagcagagctatgccccagccccccaccccatggccccacccagccccagcaccaacagcagcagcaacaacagcagcaacaacagcagcggggagcagctgagcaagaccaacctgtacatccggggcctgcccccaggcaccacagaccaggacctgatcaagctgtgccagccctacggcaagatcgtgtccaccaaggccatcctggacaagaacaccaaccagtgcaagggctacggctttgtggactttgacagccctgctgctgcccagaaggctgtggccagcctgaaggccaatggagtgcaggcccagatggccaagcagcaggagcaggaccccaccaacctgtacatcagcaacctgcccatctccatggatgagcaggagctggagaacatgctgaagccctttggacatgtgatcagcacccgcatcctgagagatgccaacggggtgtccagaggagtgggctttgccaggatggagagcacagagaagtgtgaggtggtgatccagcacttcaacgggaagtacctgaagaccccacctggcatcccagcccccagcgagcccctgctgtgcaagtttgctgatggcggccagaagaagaggcagaaccagagcaagtacacccagaatggccggccctggccccgggagggggaggtgctgcggggccgcacagtgccccggcagaaccgggaggccggcatggccctgacctatgaccccacagctgccatccagaatggcttctacagcagcccctacagcatcgccaccaacaggatgatcccccagaccagcatcacccccttcatcgccgccagccctgtgtccacctaccaggtgcagagcacctcctggatgccccaccccccctacgtgatgcagcccaccggggccgtcatcacccccaccatggaccaccccatgtccatgcagcctgccaacatgatgggccccctgacccagcagatgaaccacctgagcctgggcaccaccggcacctacatgacagctgctgcccccatgcagggcacctacatcccccagtacacccctgtgcccccaacagctgtgtccattgaaggagtggtggccgacaccagcccccagacagtggcccccagcagccaggacaccagcggccagcagcagcagattgctgtggacaccagcaatgaacatgccccagcctacagctaccagcagagcaagccctag

SEQ ID NO: 168625 - DNA, 1311 bp, synthetic construct
  misc_feature 1..1311: note = Description of Artificial Sequence: Synthetic coding sequence
  source 1..1311: mol_type = other DNA
atgggcaagaggctggaccagccccagatgtacccccagtacacctactactacccccactacctgcagaccaagagctatgccccagccccccaccccatggccccacccagccccagcaccaacagcagcagcaacaacagcagcaacaacagcagtggagagcagctgagcaagaccaacctgtacatccggggcctgcccccaggcaccacagaccaggacctgatcaagctgtgccagccctacggcaagatcgtgtccaccaaggccatcctggacaagaacaccaaccagtgcaagggctacggctttgtggactttgacagccctgctgctgcccagaaggctgtggccagcctgaaggccaacggggtgcaggcccagatggccaagcagcaggagcaggaccccaccaacctgtacatcagcaacctgcccatctccatggatgagcaggagctggagaacatgctgaagcccttcggccacgtgatcagcacccgcatcctgagagatgccaatggagtgtcccggggcgtgggctttgccaggatggagagcacagagaagtgtgaggtggtgatccagcacttcaacgggaagtacctgaagaccccacctggcatcccagcccccagcgagcccctgctgtgcaagtttgctgatggcggccagaagaagaggcagaaccagagcaagtacacccagaatggccggccctggccccgggagggggaggccggcatggccctgacctatgaccccacagctgccatccagaatggcttctacagcagcccctacagcatcgccaccaacaggatgatcccccagaccagcatcacccccttcatcgccgccagccctgtgtccacctaccaggtgcagagcacctcctggatgccccaccccccctacgtgatgcagcccaccggggccgtcatcacccccaccatggaccaccccatgtccatgcagcctgccaacatgatgggccccctgacccagcagatgaaccacctgagcctgggcaccaccggcaccatccagagccaggaccgcatcatgatcctgcaccagctgctgtgccagtacatgacagctgctgcccccatgcagggcacctacatcccccagtacacccctgtgcccccaacagctgtgtccattgaaggagtggtggccgacaccagcccccagacagtggcccccagcagccaggacaccagcggccagcagcagcagattgctgtggacaccagcaatgaacatgccccagcctacagctaccagcagagcaagccctag

SEQ ID NO: 168626 - DNA, 1302 bp, synthetic construct
  misc_feature 1..1302: note = Description of Artificial Sequence: Synthetic coding sequence
  source 1..1302: mol_type = other DNA
atgggcaagaggctggaccagccccagatgtacccccagtacacctactactacccccactacctgcagaccaagcagagctatgccccagccccccaccccatggccccacccagccccagcaccaacagcagcagcaacaacagcagcaacaacagcagcggggagcagctgagcaagaccaacctgtacatccggggcctgcccccaggcaccacagaccaggacctgatcaagctgtgccagccctacggcaagatcgtgtccaccaaggccatcctggacaagaacaccaaccagtgcaagggctacggctttgtggactttgacagccctgctgctgcccagaaggctgtggccagcctgaaggccaatggagtgcaggcccagatggccaagcagcaggagcaggaccccaccaacctgtacatcagcaacctgcccatctccatggatgagcaggagctggagaacatgctgaagccctttggacatgtgatcagcacccgcatcctgagagatgccaacggggtgtccagaggagtgggctttgccaggatggagagcacagagaagtgtgaggtggtgatccagcacttcaacgggaagtacctgaagaccccacctggcatcccagcccccagcgagcccctgctgtgcaagtttgctgatggcggccagaagaagaggcagaaccagagcaagtacacccagaatggccggccctggccccgggagggggaggtgctgcggggccgcacagtgccccggcagaaccgggaggccggcatggccctgacctatgaccccacagctgccatccagaatggcttctacagcagcccctacagcatcgccaccaacaggatgatcccccagaccagcatcacccccttcatcgccgccagccctgtgtccacctaccaggtgcagagcacctcctggatgccccaccccccctacgtgatgcagcccaccggggccgtcatcacccccaccatggaccaccccatgtccatgcagcctgccaacatgatgggccccctgacccagcagatgaaccacctgagcctgggcaccaccggcacctacatgacagctgctgcccccatgcagggcacctacatcccccagtacacccctgtgcccccaacagctgtgtccattgaaggagtggtggccgacaccagcccccagacagtggcccccagcagccaggacaccagcggccagcagcagcagattgctgtggacaccagcaatgaacatgccccagcctacagctaccagcagagcaagtag

SEQ ID NO: 168627 - DNA, 615 bp, synthetic construct
  misc_feature 1..615: note = Description of Artificial Sequence: Synthetic coding sequence
  source 1..615: mol_type = other DNA
atgaacaatggaggcaaggccgagaaggagaacacccccagcgaggccaacctgcaggaggaggaggtgaggaccctgtttgtgtctggcctgcccctggacatcaagccccgggagctgtacctgctcttccggcccttcaagggctatgagggcagcctcatcaagctgaccagcaagcagcctgtgggctttgtgtcctttgacagccgctctgaggccgaggccgccaagaatgccctgaatggcatccgctttgatcctgagatcccccagaccctgcggctggagtttgccaaggccaacaccaagatggccaagaacaagctggtgggcacccccaaccccagcacccccctgcccaacacagtgccccagttcatcgcccgggagccctatgagctgactgtgcctgccctgtaccccagcagccctgaggtgtgggccccctaccccctgtacccagctgagctggccccagccctgcccccaccagccttcacctacccagccagcctgcacgcccagctgtgtgagggccagacagtgcggcgcagccaccccctgagcgcccccagcccagacagcgccagcctggcctggttccctgtgtag

SEQ ID NO: 168628 - DNA, 591 bp, synthetic construct
  misc_feature 1..591: note = Description of Artificial Sequence: Synthetic coding sequence
  source 1..591: mol_type = other DNA
atgaacaatggaggcaaggccgagaaggagaacacccccagcgaggccaacctgcaggaggaggaggtgaggaccctgtttgtgtctggcctgcccctggacatcaagccccgggagctgtacctgctcttccggcccttcaagggctatgagggcagcctcatcaagctgaccagcaagcagcctgtgggctttgtgtcctttgacagccgctctgaggccgaggccgccaagaatgccctgaatggcatccgctttgatcctgagatcccccagaccctgcggctggagtttgccaaggccaacaccaagatggccaagaacaagctggtgggcacccccaaccccagcacccccctgcccaacacagtgccccagttcatcgcccgggagccctatgagctgactgtgcctgccctgtaccccagcagccctgaggtgtgggccccctaccccctgtacccagctgagctggccccagccctgcccccaccagccttcacctacccagccagcctgcacgcccagatgcgctggctgcccccatctgaggccaccagccagggctggaagagccggcagttctgctag

SEQ ID NO: 168629 - DNA, 660 bp, synthetic construct
  misc_feature 1..660: note = Description of Artificial Sequence: Synthetic coding sequence
  source 1..660: mol_type = other DNA
atgaacaatggaggcaaggccgagaaggagaacacccccagcgaggccaacctgcaggaggaggaggtgaggaccctgtttgtgtctggcctgcccctggacatcaagccccgggagctgtacctgctcttccggcccttcaagggctatgagggcagcctcatcaagctgaccagcaagcagcctgtgggctttgtgtcctttgacagccgctctgaggccgaggccgccaagaatgccctgaatggcatccgctttgatcctgagatcccccagaccctgcggctggagtttgccaaggccaacaccaagatggccaagaacaagctggtgggcacccccaaccccagcacccccctgcccaacacagtgccccagttcatcgcccgggagccctatgagctgactgtgcctgccctgtaccccagcagccctgaggtgtgggccccctaccccctgtacccagctgagctggccccagccctgcccccaccagccttcacctacccagccagcctgcacgcccagtgcttcagccctgaggccaagcccaacacccctgtgttctgccccctgctgcagcagatccgctttgtgtctggaaatgtgtttgtgacctaccagcccacagctgaccagcagcgggagctgccctgctag

SEQ ID NO: 168630 - DNA, 591 bp, synthetic construct; identical to SEQ ID NO: 168628
  misc_feature 1..591: note = Description of Artificial Sequence: Synthetic coding sequence
  source 1..591: mol_type = other DNA

SEQ ID NO: 168631 - DNA, 462 bp, synthetic construct
  misc_feature 1..462: note = Description of Artificial Sequence: Synthetic coding sequence
  source 1..462: mol_type = other DNA
atgaacaatggaggcaaggccgagaaggagaacacccccagcgaggccaacctgcaggaggaggaggtgaggaccctgtttgtgtctggcctgcccctggacatcaagccccgggagctgtacctgctcttccggcccttcaagggctatgagggcagcctcatcaagctgaccagcaagcagcctgtgggctttgtgtcctttgacagccgctctgaggccgaggccgccaagaatgccctgaatggcatccgctttgatcctgagatcccccagaccctgcggctggagtttgccaaggccaacaccaagatggccaagaacaagctggtgggcacccccaaccccagcacccccctgcccaacacagtgccccagttcatcgcccgggagcccctgatgcgctggctgccccccagcgaggccaccagccagggctggaagagccggcagttctgctag

SEQ ID NO: 168632 - DNA, 1257 bp, synthetic construct
  misc_feature 1..1257: note = Description of Artificial Sequence: Synthetic coding sequence
  source 1..1257: mol_type = other DNA
atgctggccagccagggcgtgctgctgcacccctacggcgtgcccatgattgtgcctgctgccccctacctgcccggcctcatccagggcaaccaggaggccgccgccgccccagacaccatggcccagccctatgccagcgcccagtttgccccaccccagaatggcatcccagctgagtacacagccccccacccccacccagcccctgagtacacaggccagaccaccgtgcctgagcacaccctgaacctgtaccccccagcccagacccacagcgagcagagccctgctgacaccagcgcccagacagtgtctggaacagccacccagacagatgatgctgcccccacagatggccagccccagacccagcccagcgagaacacagagaacaagagccagcccaagaggctgcacgtgagcaacatccccttccgcttccgggaccctgacctgcggcagatgtttggccagtttgggaagatcctggatgtggagatcatcttcaatgaaagaggcagcaagggcttcggctttgtgacctttgagaacagcgcagatgctgaccgggcccgggagaagctgcatggaacagtggtggagggcaggaagattgaggtgaacaatgccacagcccgggtgatgaccaacaagaagacagtgaacccctacaccaacggctggaagctgaaccctgtggtgggcgctgtgtacagccctgagttctacgccggcaccgtgctgctgtgccaggccaaccaggagggcagctccatgtacagcgcccccagcagcctggtgtacaccagcgccatgcctggcttcccctacccagctgccacagctgctgctgcctacagaggagcccacctgcggggccggggccgcacagtgtacaacaccttccgggccgccgcccctcctccacccatcccagcctatggaggagtggtgtaccaggagcctgtgtatggcaacaagctgctgcagggcggctatgctgcctaccgctatgcccagcccaccccagccacagctgctgcctacagcgacagctatggccgggtgtatgctgctgacccctaccaccacgccctggccccagcccccacctatggagtgggcgccatgaatgcctttgcccccctgacagatgccaagaccaggagccatgctgatgatgtgggcctggtgctgagcagcctgcaggccagcatctaccggggcggctacaacagatttgccccctactag

SEQ ID NO: 168633 - DNA, 1209 bp, synthetic construct
  misc_feature 1..1209: note = Description of Artificial Sequence: Synthetic coding sequence
  source 1..1209: mol_type = other DNA
atgattgtgcctgctgccccctacctgcccggcctcatccagggcaaccaggaggccgctgctgccccagacaccatggcccagccctatgccagcgcccagtttgccccaccccagaatggcatcccagctgagtacacagccccccacccccacccagcccctgagtacacaggccagaccaccgtgcctgagcacaccctgaacctgtaccccccagcccagacccacagcgagcagagccctgctgacaccagcgcccagacagtgtctggaacagccacccagacagatgatgctgcccccacagatggccagccccagacccagcccagtgaaaatacagagaacaagagccagcccaagaggctgcacgtgagcaacatccccttccgcttccgggaccctgacctgcggcagatgtttggccagtttgggaagatcctggatgtggagatcatcttcaatgaaagaggcagcaaaggatttggatttgtgacctttgaaaattctgcagatgctgaccgggcccgggagaagctgcacggcaccgtggtggagggcaggaagattgaggtgaacaatgccacagcccgggtgatgaccaacaagaagacagtgaacccctacaccaacggctggaagctgaaccctgtggtgggcgctgtgtacagccctgagttctacgccggcaccgtgctgctgtgccaggccaaccaggagggcagctccatgtacagcgcccccagcagcctggtgtacaccagcgccatgcctggcttcccctacccagctgccacagctgctgctgcctacagaggagcccacctgcggggccggggccgcacagtgtacaacaccttccgggctgctgcccctcctccacccatcccagcctacggcggcgtggtgtaccaggacggcttctacggggctgacatctatggaggctatgctgcctaccgctatgcccagcccaccccagccacagctgctgcctacagcgacagctatggccgggtgtatgctgctgacccctaccaccacgccctggccccagcccccacctatggagtgggcgccatgaatgcctttgcccccctgacagatgccaagaccaggagccatgctgatgatgtgggcctggtgctgagcagcctgcaggccagcatctaccggggcggctacaacagatttgccccctactag

SEQ ID NO: 168634 - DNA, 1176 bp, synthetic construct
  misc_feature 1..1176: note = Description of Artificial Sequence: Synthetic coding sequence
  source 1..1176: mol_type = other DNA
atgctggccagccagggcgtgctgctgcacccctacggcgtgcccatgattgtgcctgctgccccctacctgcccggcctcatccagggcaaccaggaggccgccgccgccccagacaccatggcccagccctatgccagcgcccagtttgccccaccccagaatggcatcccagctgagtacacagccccccacccccacccagcccctgagtacacaggccagaccaccgtgcctgagcacaccctgaacctgtaccccccagcccagacccacagcgagcagagccctgctgacaccagcgcccagacagtgtctggaacagccacccagacagatgatgctgcccccacagatggccagccccagacccagcccagcgagaacacagagaacaagagccagcccaagaggctgcacgtgagcaacatccccttccgcttccgggaccctgacctgcggcagatgtttggccagtttgggaagatcctggatgtggagatcatcttcaatgaaagaggcagcaagggcttcggctttgtgacctttgagaacagcgcagatgctgaccgggcccgggagaagctgcatggaacagtggtggagggcaggaagattgaggtgaacaatgccacagcccgggtgatgaccaacaagaagacagtgaacccctacaccaacggctggaagctgaaccctgtggtgggcgctgtgtacagccctgagttctatgctgtgcccggcttcccctacccagctgccacagctgctgctgcctacagaggagcccacctgcggggccggggccgcacagtgtacaacaccttccgggctgctgcccctcctccacccatcccagcctacggcggcgtggtgtaccaggagcctgtgtatggcaacaagctgctgcagggcggctacgccgcctaccgctatgcccagcccaccccagccacagctgctgcctacagcgacagctatggccgggtgtatgctgctgacccctaccaccacgccctggccccagcccccacctacggcgtgggcgccatgaatgcctttgcccccctgacagatgccaagaccaggagccatgctgatgatgtgggcctggtgctgagcagcctgcaggccagcatctacagaggaggctacaacagatttgccccctactag

SEQ ID NO: 168635 - DNA, 1188 bp, synthetic construct
  misc_feature 1..1188: note = Description of Artificial Sequence: Synthetic coding sequence
  source 1..1188: mol_type = other DNA
atgctggccagccagggcgtgctgctgcacccctacggcgtgcccatgattgtgcctgctgccccctacctgcccggcctcatccagggcaaccaggaggccgccgccgccccagacaccatggcccagccctatgccagcgcccagtttgccccaccccagaatggcatcccagctgagtacacagccccccacccccacccagcccctgagtacacaggccagaccaccgtgcctgagcacaccctgaacctgtaccccccagcccagacccacagcgagcagagccctgctgacaccagcgcccagacagtgtctggaacagccacccagacagatgatgctgcccccacagatggccagccccagacccagcccagcgagaacacagagaacaagagccagcccaagaggctgcacgtgagcaacatccccttccgcttccgggaccctgacctgcggcagatgtttggccagtttgggaagatcctggatgtggagatcatcttcaatgaaagaggcagcaagggcttcggctttgtgacctttgagaacagcgcagatgctgaccgggcccgggagaagctgcatggaacagtggtggagggcaggaagattgaggtgaacaatgccacagcccgggtgatgaccaacaagaagacagtgaacccctacaccaacggctggaagctgaaccctgtggtgggcgctgtgtacagccctgagttctacgccggcaccgtgctgctgtgccaggccaaccaggagggcagctccatgtacagcgcccccagcagcctggtgtacaccagcgccatgcctggcttcccctacccagctgccacagctgctgctgcctacagaggagcccacctgcggggccggggccgcacagtgtacaacaccttccgggccgccgcccctcctccacccatcccagcctatggaggagtggtgtaccaggagcctgtgtatggcaacaagctgctgcagggcggctatgctgcctaccgctatgcccagcccaccccagccacagctgctgcctacagcgacaggaaccagtttgtgtttgtggccgcagatgagatcagctgcaacaccagcgctgtgacagatgagttcatgctgcccacccccaccaccacccacctgctgcagcccccacccacagccctggtgccctag

SEQ ID NO: 168636 - DNA, 1179 bp, synthetic construct
  misc_feature 1..1179: note = Description of Artificial Sequence: Synthetic coding sequence
  source 1..1179: mol_type = other DNA
atgctggccagccagggcgtgctgctgcacccctacggcgtgcccatgattgtgcctgctgccccctacctgcccggcctcatccagggcaaccaggaggccgccgccgccccagacaccatggcccagccctatgccagcgcccagtttgccccaccccagaatggcatcccagctgagtacacagccccccacccccacccagcccctgagtacacaggccagaccaccgtgcctgagcacaccctgaacctgtaccccccagcccagacccacagcgagcagagccctgctgacaccagcgcccagacagtgtctggaacagccacccagacagatgatgctgcccccacagatggccagccccagacccagcccagcgagaacacagagaacaagagccagcccaagaggctgcacgtgagcaacatccccttccgcttccgggaccctgacctgcggcagatgtttggccagtttgggaagatcctggatgtggagatcatcttcaatgaaagaggcagcaagggcttcggctttgtgacctttgagaacagcgcagatgctgaccgggcccgggagaagctgcatggaacagtggtggagggcaggaagattgaggtgaacaatgccacagcccgggtgatgaccaacaagaagacagtgaacccctacaccaacggctggaagctgaaccctgtggtgggcgctgtgtacagccctgagttctacgccggcaccgtgctgctgtgccaggccaaccaggagggcagctccatgtacagcgcccccagcagcctggtgtacaccagcgccatgcctggcttcccctacccagctgccacagctgctgctgcctacagaggagcccacctgcggggccggggccgcacagtgtacaacaccttccgggccgccgcccctcctccacccatcccagcctatggaggagtggtgtaccaggagcctgtgtatggcaacaagctgctgcagggcggctatgctgcctaccgctatgcccagcccaccccagccacagctgctgcctacagcgacagctatggccgggtgtatgctgctgacccctaccaccacgccctggccccagcccccacctatggagtgggcgccatggccagcatctaccggggcggctacaacagatttgccccctactag

SEQ ID NO: 168637 - DNA, 1194 bp, synthetic construct
  misc_feature 1..1194: note = Description of Artificial Sequence: Synthetic coding sequence
  source 1..1194: mol_type = other DNA
atgaactgtgagcgggagcagctgcggggcaaccaggaggccgccgccgccccagacaccatggcccagccctatgccagcgcccagtttgccccaccccagaatggcatcccagctgagtacacagccccccacccccacccagcccctgagtacacaggccagaccaccgtgcctgagcacaccctgaacctgtaccccccagcccagacccacagcgagcagagccctgctgacaccagcgcccagacagtgtctggaacagccacccagacagatgatgctgcccccacagatggccagccccagacccagcccagcgagaacacagagaacaagagccagcccaagaggctgcacgtgagcaacatccccttccgcttccgggaccctgacctgcggcagatgtttggccagtttgggaagatcctggatgtggagatcatcttcaatgaaagaggcagcaagggcttcggctttgtgacctttgagaacagcgcagatgctgaccgggcccgggagaagctgcatggaacagtggtggagggcaggaagattgaggtgaacaatgccacagcccgggtgatgaccaacaagaagacagtgaacccctacaccaacggctggaagctgaaccctgtggtgggcgctgtgtacagccctgagttctacgccggcaccgtgctgctgtgccaggccaaccaggagggcagctccatgtacagcgcccccagcagcctggtgtacaccagcgccatgcctggcttcccctacccagctgccacagctgctgctgcctacagaggagcccacctgcggggccggggccgcacagtgtacaacaccttccgggccgccgcccctcctccacccatcccagcctatggaggagtggtgtaccaggacggcttctatggagctgacatctacggcggctacgccgcctaccgctatgcccagcccaccccagccacagctgctgcctacagcgacagctatggccgggtgtatgctgctgacccctaccaccacgccctggccccagcccccacctacggcgtgggcgccatgaatgcctttgcccccctgacagatgccaagaccaggagccatgctgatgatgtgggcctggtgctgagcagcctgcaggccagcatctacagaggaggctacaacagatttgccccctactag

SEQ ID NO: 168638 - DNA, 1401 bp, synthetic construct
  misc_feature 1..1401: note = Description of Artificial Sequence: Synthetic coding sequence
  source 1..1401: mol_type = other DNA
atggagaccggccagaggacccacgccagcggcacctacagcttcctggacaggacccagcacagcgacatcaaggctgactgcaacacctgtgtggagattgaggacaggaaggtgtcccggcagcagatgaactgtgagcgggagcagctgcggggcaaccaggaggccgctgctgccccagacaccatggcccagccctatgccagcgcccagtttgccccaccccagaatggcatcccagctgagtacacagccccccacccccacccagcccctgagtacacaggccagaccaccgtgcctgagcacaccctgaacctgtaccccccagcccagacccacagcgagcagagccctgctgacaccagcgcccagacagtgtctggaacagccacccagacagatgatgctgcccccacagatggccagccccagacccagcccagtgaaaatacagagaacaagagccagcccaagaggctgcacgtgagcaacatccccttccgcttccgggaccctgacctgcggcagatgtttggccagtttgggaagatcctggatgtggagatcatcttcaatgaaagaggcagcaaaggatttggatttgtgacctttgaaaattctgcagatgctgaccgggcccgggagaagctgcacggcaccgtggtggagggcaggaagattgaggtgaacaatgccacagcccgggtgatgaccaacaagaagacagtgaacccctacaccaacggctggaagctgaaccctgtggtgggcgctgtgtacagccctgagttctacgccggcaccgtgctgctgtgccaggccaaccaggagggcagctccatgtacagcgcccccagcagcctggtgtacaccagcgccatgcctggcttcccctacccagctgccacagctgctgctgcctacagaggagcccacctgcggggccggggccgcacagtgtacaacaccttccgggctgctgcccctcctccacccatcccagcctacggcggcgtggtgtaccaggacggcttctacggggctgacatctatggaggctatgctgcctaccgctatgcccagcccaccccagccacagctgctgcctacagcgacaggaaccagtttgtgtttgtggccgcagatgagatcagctgcaacaccagcgctgtgacagatgagttcatgctgcccacccccaccaccacccacctgctgcagcccccacccacagccctggtgccctgccccaaggtgcctgccccagcccagaccagcgaggagctgagctgcaccctgcccggcctgtgctgccaggccgctgagaacctgacagccagcccccccctgctgcagttcatgttcaaggtgattgtggcccaggagaggaagtag

SEQ ID NO: 168639 - DNA, 1194 bp, synthetic construct; identical to SEQ ID NO: 168637
  misc_feature 1..1194: note = Description of Artificial Sequence: Synthetic coding sequence
  source 1..1194: mol_type = other DNA

SEQ ID NO: 168640 - DNA, 792 bp, synthetic construct
  misc_feature 1..792: note = Description of Artificial Sequence: Synthetic coding sequence
  source 1..792: mol_type = other DNA
atgaactgtgagcgggagcagctgcggggcaaccaggaggccgccgccgccccagacaccatggcccagccctatgccagcgcccagtttgccccaccccagaatggcatcccagctgagtacacagccccccacccccacccagcccctgagtacacaggccagaccaccgtgcctgagcacaccctgaacctgtaccccccagcccagacccacagcgagcagagccctgctgacaccagcgcccagacagtgtctggaacagccacccagacagatgatgctgcccccacagatggccagccccagacccagcccagcgagaacacagagaacaagagccagcccaagaggctgcacgtgagcaacatccccttccgcttccgggaccctgacctgcggcagatgtttggccagtttgggaagatcctggatgtggagatcatcttcaatgaaagaggcagcaagggcttcggctttgtgacctttgagaacagcgcagatgctgaccgggcccgggagaagctgcatggaacagtggtggagggcaggaagattgaggtgaacaatgccacagcccgggtgatgaccaacaagaagacagtgaacccctacaccaacggctggaagctgaaccctgtggtgggcgctgtgtacagccctgagttctacgccggcaccgtgctgctgtgccaggccaaccaggagggcagctccatgtacagcgcccccagcagcctggtgtacaccagcgccatgcctggcttcccctacccagctgccacagcctag

SEQ ID NO: 168641 - DNA, 1113 bp, synthetic construct
  misc_feature 1..1113: note = Description of Artificial Sequence: Synthetic coding sequence
  source 1..1113: mol_type = other DNA
atgaactgtgagcgggagcagctgcggggcaaccaggaggccgccgccgccccagacaccatggcccagccctatgccagcgcccagtttgccccaccccagaatggcatcccagctgagtacacagccccccacccccacccagcccctgagtacacaggccagaccaccgtgcctgagcacaccctgaacctgtaccccccagcccagacccacagcgagcagagccctgctgacaccagcgcccagacagtgtctggaacagccacccagacagatgatgctgcccccacagatggccagccccagacccagcccagcgagaacacagagaacaagagccagcccaagaggctgcacgtgagcaacatccccttccgcttccgggaccctgacctgcggcagatgtttggccagtttgggaagatcctggatgtggagatcatcttcaatgaaagaggcagcaagggcttcggctttgtgacctttgagaacagcgcagatgctgaccgggcccgggagaagctgcatggaacagtggtggagggcaggaagattgaggtgaacaatgccacagcccgggtgatgaccaacaagaagacagtgaacccctacaccaacggctggaagctgaaccctgtggtgggcgctgtgtacagccctgagttctatgctgtgcccggcttcccctacccagctgccacagctgctgctgcctacagaggagcccacctgcggggccggggccgcacagtgtacaacaccttccgggctgctgcccctcctccacccatcccagcctacggcggcgtggtgtaccaggacggcttctacggggctgacatctatggaggctatgctgcctaccgctatgcccagcccaccccagccacagctgctgcctacagcgacagctatggccgggtgtatgctgctgacccctaccaccacgccctggccccagcccccacctatggagtgggcgccatgaatgcctttgcccccctgacagatgccaagaccaggagccatgctgatgatgtgggcctggtgctgagcagcctgcaggccagcatctaccggggcggctacaacagatttgccccctactag

SEQ ID NO: 168642 - DNA, 1725 bp, synthetic construct
  misc_feature 1..1725: note = Description of Artificial Sequence: Synthetic coding sequence
  source 1..1725: mol_type = other DNA
atggcccacaacaagatccccccacgctggctgaactgcccccggcggggccagcctgtggccggccgcttcctgcccctgaagaccatgctgggccccaggtatgacagccaggtggccgaggagaaccgcttccaccccagcatgctgagcaactacctgaagagcctgaaggtgaagatgggcctgctggtggacctgaccaacaccagccgcttctatgacagaaatgacatcgagaaggagggcatcaagtacatcaagctgcagtgcaagggccacggggagtgccccaccacagaaaatacagagaccttcatccggctgtgtgagcgcttcaatgaaagaaaccccccagagctgattggagtgcactgcacccacggcttcaacagaacaggcttcctgatctgtgccttcctggtggagaagatggactggagcattgaagctgctgtggccacctttgcccaggcccggcccccaggcatctacaagggggactacctgaaggagctgttcagaagatatggagacatcgaggaggcccctcctccacccctgctgcctgactggtgctttgaagatgatgaagatgaagatgaagatgaagatggcaagaaggagagcgagcccggcagcagcgccagctttgggaagaggaggaaggagcggctgaagctgggcgccatcttcctggagggcgtgacagtgaagggcgtgacccaggtgaccacccagcccaagctgggggaggtgcagcagaagtgccaccagttctgtggctgggagggcagcggcttccctggggcccagcctgtgtccatggacaagcagaacatcaagctgctggacctgaagccctacaaggtgtcctggaaggcagatggcacccgctacatgatgctgattgatggcaccaatgaggtgttcatgattgaccgggacaacagcgtcttccacgtgagcaacctggagttccccttcaggaaggacctgaggatgcacctgagcaacaccctgctggatggagagatgatcatcgacagagtgaatggccaggccgtgccccgctacctgatctatgacatcatcaagttcaacagccagcctgtgggggactgtgacttcaacgtgcggctgcagtgcatcgagcgggagatcatcagccccaggcatgagaagatgaagacaggcctgattgacaagacccaggagcccttctctgtgaggaacaagcccttctttgacatctgcaccagcaggaagaagtacaagccaggccgctgtgatgacatcctgaagtggaagccacccagcctgaacagcgtggacttccggctgaagatcaccaggatgggcggggagggcctgctgccccagaatgtgggcctgctgtatgtgggcggctatgagcggccctttgcccagatcaaggtgaccaaggagctgaagcagtatgacaacaagatcatcgagtgcaagtttgagaacaacagctgggtgttcatgaggcagaggacagacaagagcttccccaatgcctacaacacagccatggctgtgtgcaacagcatcagcaaccctgtgaccaaggagatgctgtttgagttcatcgaccgctgcacagctgccagccagggccagaagaggaagcaccacctggaccctgacacagagctgatgcctcctcctccacccaagaggccccggcccctgacctag

SEQ ID NO: 168643 - DNA, 1626 bp, synthetic construct
  misc_feature 1..1626: note = Description of Artificial Sequence: Synthetic coding sequence
  source 1..1626: mol_type = other DNA
atggcccacaacaagatccccccacgctggctgaactgcccccggcggggccagcctgtggccggccgcttcctgcccctgaagaccatgctgggccccaggtatgacagccaggtggccgaggagaaccgcttccaccccagcatgctgagcaactacctgaagagcctgaaggtgaagatgggcctgctggtggacctgaccaacaccagccgcttctatgacagaaatgacatcgagaaggagggcatcaagtacatcaagctgcagtgcaagggccacggggagtgccccaccacagaaaatacagagaccttcatccggctgtgtgagcgcttcaatgaaagaaaccccccagagctgattggagtgcactgcacccacggcttcaacagaacaggcttcctgatctgtgccttcctggtggagaagatggactggagcattgaagctgctgtggccacctttgcccaggcccggcccccaggcatctacaagggggactacctgaaggagctgttcagaagatatggagacatcgaggaggcccctcctccacccctgctgcctgactggtgctttgaagatgatgaagatgaagatgaagatgaagatggcaagaaggagagcgagcccggcagcagcgccagctttgggaagaggaggaaggagcggctgaagctgggcgccatcttcctggagggcgtgacagtgaagggcgtgacccaggtgaccacccagcccaagctgggggaggtgcagcagaagtgccaccagttctgtggctgggagggcagcggcttccctggggcccagcctgtgtccatggacaagcagaacatcaagctgctggacctgaagccctacaaggtgtcctggaaggcagatggcacccgctacatgatgctgattgatggcaccaatgaggtgttcatgattgaccgggacaacagcgtcttccacgtgagcaacctggagttccccttcaggaaggacctgaggatgcacctgagcaacaccctgctggatggagagatgatcatcgacagagtgaatggccaggccgtgccccgctacctgatctatgacatcatcaagttcaacagccagcctgtgggggactgtgacttcaacgtgcggctgcagtgcatcgagcgggagatcatcagccccaggcatgagaagatgaagacaggcctgattgacaagacccaggagcccttctctgtgaggaacaagcccttctttgacatctgcaccagcaggaagctgctggagggcaactttgccaaggaggtgtcccatgagatggatggcctcatcttccagcccaccgggaagtacaagccaggccgctgtgatgacatcctgaagtggaagccacccagcctgaacagcgtggacttccggctgaagatcaccaggatgggcggggagggcctgctgccccagaatgtgggcctgctgtatgtgggcggctatgaaagaccatttgcccagatcaaggtgtgcctcttcatcttctctgtgctcttcctggatgtgctgctgagccgcatccaccagaacctggccaacaacaaccagcacatcaagatcagctgcagcagcaccctgggcggctag

SEQ ID NO: 168644 - DNA, 1794 bp, synthetic construct
  misc_feature 1..1794: note = Description of Artificial Sequence: Synthetic coding sequence
  source 1..1794: mol_type = other DNA
atggcccacaacaagatccccccacgctggctgaactgcccccggcggggccagcctgtggccggccgcttcctgcccctgaagaccatgctgggccccaggtatgacagccaggtggccgaggagaaccgcttccaccccagcatgctgagcaactacctgaagagcctgaaggtgaagatgggcctgctggtggacctgaccaacaccagccgcttctatgacagaaatgacatcgagaaggagggcatcaagtacatcaagctgcagtgcaagggccacggggagtgccccaccacagaaaatacagagaccttcatccggctgtgtgagcgcttcaatgaaagaaaccccccagagctgattggagtgcactgcacccacggcttcaacagaacaggcttcctgatctgtgccttcctggtggagaagatggactggagcattgaagctgctgtggccacctttgcccaggcccggcccccaggcatctacaagggggactacctgaaggagctgttcagaagatatggagacatcgaggaggcccctcctccacccctgctgcctgactggtgctttgaagatgatgaagatgaagatgaagatgaagatggcaagaaggagagcgagcccggcagcagcgccagctttgggaagaggaggaaggagcggctgaagctgggcgccatcttcctggagggcgtgacagtgaagggcgtgacccaggtgaccacccagcccaagctgggggaggtgcagcagaagtgccaccagttctgtggctgggagggcagcggcttccctggggcccagcctgtgtccatggacaagcagaacatcaagctgctggacctgaagccctacaaggtgtcctggaaggcagatggcacccgctacatgatgctgattgatggcaccaatgaggtgttcatgattgaccgggacaacagcgtcttccacgtgagcaacctggagttccccttcaggaaggacctgaggatgcacctgagcaacaccctgctggatggagagatgatcatcgacagagtgaatggccaggccgtgccccgctacctgatctatgacatcatcaagttcaacagccagcctgtgggggactgtgacttcaacgtgcggctgcagtgcatcgagcgggagatcatcagccccaggcatgagaagatgaagacaggcctgattgacaagacccaggagcccttctctgtgaggaacaagcccttctttgacatctgcaccagcaggaagctgctggagggcaactttgccaaggaggtgtcccatgagatggatggcctcatcttccagcccaccgggaagtacaagccaggccgctgtgatgacatcctgaagtggaagccacccagcctgaacagcgtggacttccggctgaagatcaccaggatgggcggggagggcctgctgccccagaatgtgggcctgctgtatgtgggcggctatgaaagaccatttgcccagatcaaggtgaccaaggagctgaagcagtatgacaacaagatcatcgagtgcaagtttgagaacaacagctgggtgttcatgaggcagaggacagacaagagcttccccaatgcctacaacacagccatggctgtgtgcaacagcatcagcaaccctgtgaccaaggagatgctgtttgagttcatcgaccgctgcacagctgccagccagggccagaagaggaagcaccacctggaccctgacacagagctgatgcctcctcctccacccaagaggccccggcccctgacctag

SEQ ID NO: 168645 - DNA, 1707 bp, synthetic construct
  misc_feature 1..1707: note = Description of Artificial Sequence: Synthetic coding sequence
  source 1..1707: mol_type = other DNA
atgctgggccccaggtatgacagccaggtggccgaggagaaccgcttccaccccagcatgctgagcaactacctgaagagcctgaaggtgaagatgggcctgctggtggacctgaccaacaccagccgcttctatgacagaaatgacatcgagaaggagggcatcaagtacatcaagctgcagtgcaagggccatggagaatgtcccaccacagagaacacagagaccttcatccggctgtgtgagcgcttcaatgaaagaaatcctcctgagctgattggagtgcactgcacccacggcttcaacagaacaggcttcctgatctgtgccttcctggtggagaagatggactggagcattgaggccgctgtggccacctttgcccaggcccggcccccaggcatctacaagggggactacctgaaggagctgttccgccgctacggggacatcgaggaggcccctcctccacccctgctgcctgactggtgctttgaagatgatgaagatgaagatgaagatgaagatggcaagaaggagagcgagcccggcagcagcgccagctttgggaagaggaggaaggagcggctgaagctgggcgccatcttcctggagggcgtgacagtgaagggcgtgacccaggtgaccacccagcccaagctgggggaggtgcagcagaagtgccaccagttctgtggctgggagggcagcggcttccctggggcccagcctgtgtccatggacaagcagaacatcaagctgctggacctgaagccctacaaggtgtcctggaaggcagatggcacccgctacatgatgctgattgatggcaccaatgaggtgttcatgattgaccgggacaacagcgtcttccacgtgagcaacctggagttccccttcaggaaggacctgaggatgcacctgagcaacaccctgctggatggagagatgatcatcgacagagtgaatggccaggccgtgccccgctacctgatctatgacatcatcaagttcaacagccagcctgtgggggactgtgacttcaacgtgcggctgcagtgcatcgagcgggagatcatcagccccaggcatgagaagatgaagacaggcctgattgacaagacccaggagcccttctctgtgaggaacaagcccttctttgacatctgcaccagcaggaagctgctggagggcaactttgccaaggaggtgtcccatgagatggatggcctcatcttccagcccaccgggaagtacaagccaggccgctgtgatgacatcctgaagtggaagccacccagcctgaacagcgtggacttccggctgaagatcaccaggatgggcggggagggcctgctgccccagaatgtgggcctgctgtatgtgggcggctatgagcggccctttgcccagatcaaggtgaccaaggagctgaagcagtatgacaacaagatcatcgagtgcaagtttgagaacaacagctgggtgttcatgaggcagaggacagacaagagcttccccaatgcctacaacacagccatggctgtgtgcaacagcatcagcaaccctgtgaccaaggagatgctgtttgagttcatcgaccgctgcacagctgccagccagggccagaagaggaagcaccacctggaccctgacacagagctgatgcctcctcctccacccaagaggccccggcccctgacctag

SEQ ID NO: 168646 - DNA, 1545 bp, synthetic construct
  misc_feature 1..1545: note = Description of Artificial Sequence: Synthetic coding sequence
  source 1..1545: mol_type = other DNA
atgggcctgctggtggacctgaccaacaccagccgcttctatgacagaaatgacatcgagaaggagggcatcaagtacatcaagctgcagtgcaagggccacggggagtgccccaccacagaaaatacagagaccttcatccggctgtgtgagcgcttcaatgaaagaaaccccccagagctgattggagtgcactgcacccacggcttcaacagaacaggcttcctgatctgtgccttcctggtggagaagatggactggagcattgaagctgctgtggccacctttgcccaggcccggcccccaggcatctacaagggggactacctgaaggagctgttcagaagatatggagacatcgaggaggcccctcctccacccctgctgcctgactggtgctttgaagatgatgaagatgaagatgaagatgaagatggcaagaaggagagcgagcccggcagcagcgccagctttgggaagaggaggaaggagcggctgaagctgggcgccatcttcctggagggcgtgacagtgaagggcgtgacccaggtgaccacccagcccaagctgggggaggtgcagcagaagtgccaccagttctgtggctgggagggcagcggcttccctggggcccagcctgtgtccatggacaagcagaacatcaagctgctggacctgaagccctacaaggtgtcctggaaggcagatggcacccgctacatgatgctgattgatggcaccaatgaggtgttcatgattgaccgggacaacagcgtcttccacgtgagcaacctggagttccccttcaggaaggacctgaggatgcacctgagcaacaccctgctggatggagagatgatcatcgacagagtgaatggccaggccgtgccccgctacctgatctatgacatcatcaagttcaacagccagcctgtgggggactgtgacttcaacgtgcggctgcagtgcatcgagcgggagatcatcagccccaggcatgagaagatgaagacaggcctgattgacaagacccaggagcccttctctgtgaggaacaagcccttctttgacatctgcaccagcaggaagaagtacaagccaggccgctgtgatgacatcctgaagtggaagccacccagcctgaacagcgtggacttccggctgaagatcaccaggatgggcggggagggcctgctgccccagaatgtgggcctgctgtatgtgggcggctatgagcggccctttgcccagatcaaggtgaccaaggagctgaagcagtatgacaacaagatcatcgagtgcaagtttgagaacaacagctgggtgttcatgaggcagaggacagacaagagcttccccaatgcctacaacacagccatggctgtgtgcaacagcatcagcaaccctgtgaccaaggagatgctgtttgagttcatcgaccgctgcacagctgccagccagggccagaagaggaagcaccacctggaccctgacacagagctgatgcctcctcctccacccaagaggccccggcccctgacctag

SEQ ID NO: 168647 - DNA, 1263 bp, synthetic construct
  misc_feature 1..1263: note = Description of Artificial Sequence: Synthetic coding sequence
  source 1..1263: mol_type = other DNA
atggccgccctggtgcggcctgccaggtttgtggtgcggcccctgctgcaggtggtgcaggcctgggacctggatgcccggcgctgggtgcgggccctgcggcgcagccctgtgaaggtggtgttccccagcggggaggtggtggagcagaagagggcccctgggaagcagcccaggaaggcccccagcgaggccagcgcccaggagcagcgggagaagcagcccctggaggagagcgccagccgggcccccagcacctgggaggagagcggcctgcgctatgacaaggcctacccaggggaccggcggctgagctctgtgatgaccatcgtgaagagccggcccttccgggagaagcagggcaagatcctgctggagggccggcggctcatcagtgatgccctgaaggccggggctgtgcccaagatgttcttcttcagccggctggagtacctgaaggagctgcctgtggacaagctgaagggcgtgtccctcatcaaggtgaagtttgaggacatcaaggactggagcgacctggtgaccccccagggcatcatgggcatctttgccaagccagaccacgtgaagatgacctaccccaagacccagctgcagcacagcctgcccctgctgctgatctgtgacaacctgcgggaccccggcaacctgggcaccatcctgcggtctgctgctggagctggctgcagcaaggtgctgctgaccaagggctgtgtggatgcctgggagcccaaggtgctgcgggccggcatgggcgcccacttcaggatgcccatcatcaacaacctggagtgggagaccgtgcccaactacctgcccccagacaccagggtgtatgtggccgacaactgtggcctgtatgcccaggccgagatgagcaacaaggccagtgaccacggctgggtgtgtgaccagagggtgatgaagttccacaagtatgaggaggaggaggatgtggagactggagccagccaggactggctgccccacgtggaggtgcagagctatgacagcgactggacagaggccccagctgctgtggtgattggaggagagacctacggcgtgtccctggagagcctgcagctggccgagagcactggaggcaagaggctgctgatccctgtggtgcctggggtggacagcctgaacagcgccatggccgccagcatcctgctgtttgagggcaagaggcagctgcggggccgggcagaggacctgagccgggacaggagctaccactag

SEQ ID NO: 168648 - DNA, 4182 bp, synthetic construct
  misc_feature 1..4182: note = Description of Artificial Sequence: Synthetic coding sequence
  source 1..4182: mol_type = other DNA
atgctgagccggcccaagccaggagagagcgaggtggacctgctgcacttccagagccagttcctggccgccggggccgccccagctgtgcagctggtgaagaagggcaacagaggaggaggagatgccaacagcgaccggccccccctgcaggaccacagagatgtggtgatgctggacaacctgcctgacctgcccccagccctggtgcccagcccccccaagagggcccggcccagccctggccactgcctgcctgaagatgaagatcctgaggagcggctgcggagacatgaccagcacatcacagctgtgctgaccaagatcatcgagcgggacaccagctctgtggccgtgaacctgcctgtgcccagcggcgtggccttccctgctgtgttcctgcggagccgggacacccagggcaagagcgccaccagcggcaagaggagcatctttgcccaggagattgctgccaggagaattgctgaggccaagggccccagcgtgggggaggtggtgcccaacgtgggccccccagagggcgctgtgacctgtgagacccccaccccaagaaaccagggctgccagctgcccggcagcagccacagcttccagggccccaacctggtgacaggcaagggcctgcgggaccaggaggccgagcaggaggcccagaccatccacgaggagaacatcgcccggctgcaggccatggcccctgaggagatcctgcaggagcagcagaggctgctggcccagctggaccccagcctggtggccttcctgcggagccacagccacacccaggagcagacaggagaaacagccagcgaggagcagaggcctgggggccccagcgccaacgtgaccaaggaggagcccctgatgtctgcctttgccagcgagcccaggaagagggacaagctggagcctgaggccccagccctggccctgcctgtgaccccccagaaggagtggctgcacatggacacagtggagctggagaagctgcactggacccaggacctgccccctgtgcggcggcagcagacccaggagaggatgcaggcccgcttcagcctgcagggcgagctgctggccccagatgtggacctgcccacccacctgggcctgcaccaccacggggaggaggccgagcgggccggctacagcctgcaggagctgttccacctgaccaggagccaggtgtcccagcagagggccctggccctgcacgtgctggcccaggtgatcagccgggcccaggccggggagtttggagaccggctggccggctctgtgctgagcctgctgctggatgctggcttcctgttcctgctgcgcttcagcctggatgacagagtggatggagtgattgccacagccatccgggccctgcgggccctgctggtggcccctggagatgaggagctgctggacagcaccttctcctggtaccatggagccctgaccttccccctgatgcccagccaggaggacaaggaggatgaagatgaagatgaagaatgtcctgctgggaaggccaagaggaagagccctgaggaggagagccggcccccaccagacctggcccggcatgatgtgatcaagggcctgctggccaccagcctgctgccccggctgcgctacgtgctggaggtgacctacccaggccctgctgtggtgctggacatcctggccgtgctgatccggctggcccggcacagcctggagagcgccaccagggtgctggagtgccccaggctcatcgagaccatcgtgcgggagttcctgcccacctcctggagccctgtgggcgccggccccacccccagcctgtacaaggtgccctgtgccacagccatgaagctgctgcgggtgctggccagcgctggaagaaatattgctgcccggctgctgagcagctttgacctgcggagccggctgtgccgcatcatcgccgaggccccccaggagctggccctgcccccagaggaggccgagatgctgagcacagaggccctgcggctgtgggccgtggccgccagctatggccagggcggctacctgtaccgggagctgtaccctgtgctgatgagggccctgcaggtggtgccccgggagctgagcacccaccccccccagcccctgtccatgcagagaattgccagcctgctgaccctgctgacccagctgaccctggccgccggcagcaccccagctgagaccatcagtgacagcgctgaggccagcctgagcgccacccccagcctggtgacctggacccaggtgtctggcctgcagcccctggtggagccctgcctgcggcagaccctgaagctgctgagcaggcctgagatgtggagggctgtgggccctgtgcctgtggcctgcctgctcttcctgggcgcctactaccaggcctggagccagcagcccagcagctgcccagaggactggctgcaggacatgcagaggctgtctgaggagctgctgctgcccctgctgagccagcccaccctgggcagcctgtgggacagcctgcggcactgcagcctgctgtgcaaccccctgagctgtgtgcctgccctggaggccccacccagcctggtgtccctgggctgcagcggcggctgcccccggctgagcctggccggcagcgccagccccttccccttcctgacagccctgctgagcctgctgaacaccctggcccagatccacaagggcctgtgtggccagctggccgccatcctggccgcccctggcctgcagaactacttcctgcagtgtgtggcccctggggccgccccccacctgacccccttcagcgcctgggccctgcggcatgagtaccacctgcagtacctggccctggccctggcccagaaggccgccgccctgcagcccctgcctgccacccacgccgccctgtaccacggcatggccctggccctgctgagccggctgctgcccggcagcgagtacctgacccatgagctgctgctgagctgtgtgttccggctggagttcctgcctgagaggaccagcggcggccctgaggccgctgacttcagtgaccagctgagcctgggcagcagccgggtgccccgctgtggccagggcaccctgctggcccaggcctgccaggacctgcccagcatccggaactgctacctgacccactgcagccctgcccgggccagcctgctggccagccaggccctgcacagaggagagctgcagagggtgcccaccctgctgctgcccatgcccacagagcccctgctgcccacagactggcccttcctgcccctcatccggctgtaccaccgggccagtgacacccccagcggcctgagccccacagacaccatgggcacagccatgagggtgctgcagtgggtgctggtgctggagagctggaggccccaggccctgtgggccgtgcccccagctgcccggctggcccggctgatgtgtgtgttcctggtggacagcgagctgttccgggagagccctgtgcagcacctggtggccgccctgctggcccagctgtgccagccccaggtgctgcccaacctgaacctggactgccgcctgcccggcctgaccagcttcccagacctgtatgccaacttcctggaccactttgaggccgtgtcctttggagaccacctgtttggagccctggtgctgctgcccctgcagaggcgcttctctgtgaccctgcggctggccctgtttggagagcacgtgggcgccctgcgggccctgagcctgcccctgacccagctgcctgtgtccctggagtgctacacagtgcccccagaggacaacctggccctgctgcagctgtacttccgcaccctggtgactggagccctgcggccccgctggtgccctgtgctgtatgctgtggccgtggcccacgtgaacagcttcatcttcagccaggacccccagagcagtgatgaggtgaaggccgcccggcgctccatgctgcagaagacctggctgctggctgatgagggcctgcggcagcacctgctgcactacaagctgcccaacagcaccctgcctgagggctttgagctgtacagccagctgccccccctgcggcagcactacctgcagaggctgaccagcacagtgctgcagaatggagtgtctgagacctag

SEQ ID NO: 168649 - DNA, 1839 bp, synthetic construct
  misc_feature 1..1839: note = Description of Artificial Sequence: Synthetic coding sequence
  source 1..1839: mol_type = other DNA
atggctgactttgctggccccagcagcgctggcaggaaggccggggccccccgctgcagcaggaaggccgccggcaccaagcagaccagcaccctgaagcaggaggatgccagcaagaggaaggccgagctggaggccgctgtgaggaagaagattgaatttgagaggaaggccctgcacatcgtggagcagctgctggaggagaacatcacagaggagttcctgatggagtgtggccgcttcatcaccccagcccactacagtgatgtggtggatgagaggagcatcgtgaagctgtgtggctaccccctgtgccagaagaagctgggcatcgtgcccaagcagaagtacaagatcagcaccaagaccaacaaggtgtatgacatcacagagaggaagagcttctgcagcaacttctgctaccaggccagcaagttctttgaggcccagatccccaagacccctgtgtgggtgcgggaggaggagcggcacccagacttccagctgctgaaggaggagcagagcggccacagcggggaggaggtgcagctgtgcagcaaggccatcaagaccagtgacatcgacaaccccagccactttgagaagcagtatgagagcagcagcagcagcacccacagcgacagcagcagtgacaatgagcaggactttgtgagcagcatcctgcccggcaaccggcccaacagcaccaacatccggccccagctgcaccagaagagcatcatgaagaagaaggccggccacaaggccaacagcaagcacaaggacaaggagcagacagtggtggatgtgacagagcagctgggggactgcaagctggacagccaggagaaggatgccacctgtgagctgcccctgcagaaggtgaacacccagagcagcagcaacagcaccctgcctgagcggctgaaggcctctgaaaattctgagagcgagtacagccgctctgagatcaccctggtgggcatcagcaagaagtctgctgagcacttcaagaggaagtttgccaagagcaaccaggtgagccgctctgtgagcagctctgtgcaggtgtgcccagaggtgggcaagaggaacctgctgaaggtgctgaaggagaccctgattgagtggaagacagaggagaccctgcgcttcctgtatggccagaactatgcctctgtgtgcctgaagccagaggccagcctggtgaaggaggagctggatgaagatgacatcatcagtgaccctgacagccacttccctgcctggagggagagccagaacagcctggatgagagcctgcccttccggggcagcggcacagccatcaagcccctgcccagctatgagaacctgaagaaggagacagagaagctgaacctgcgcatccgggagttctaccggggccgctacgtgctgggggaggagaccaccaagagccaggacagcgaggagcatgacagcaccttccccctgattgacagcagcagccagaaccagatcaggaagagaattgtgctggagaagctgagcaaggtgctgcccggcctgctggtgcccctgcagatcaccctgggggacatctacacccagctgaagaacctggtgaggaccttccggctgaccaacagaaacatcatccacaagccagctgagtggaccctcatcgccatggtgctgctgagcctgctgacccccatcctgggcatccagaagcacagccaggagggcatggtgttcacccgcttcctggacaccctgctggaggagctgcacctgaagaatgaagacctggagagcctgaccatcatcttccgcaccagctgcctgcctgagtag

SEQ ID NO: 168650 - DNA, 1755 bp, synthetic construct
  misc_feature 1..1755: note = Description of Artificial Sequence: Synthetic coding sequence
  source 1..1755: mol_type = other DNA
atggctgactttgctggccccagcagcgctggcaggaaggccggggccccccgctgcagcaggaaggccgccggcaccaagcagaccagcaccctgaagcaggaggatgccagcaagaggaaggccgagctggaggccgctgtgaggaagaagattgaatttgagaggaaggccctgcacatcgtggagcagctgctggaggagaacatcacagaggagttcctgatggagtgtggccgcttcatcaccccagcccactacagtgatgtggtggatgagaggagcatcgtgaagctgtgtggctaccccctgtgccagaagaagctgggcatcgtgcccaagcagaagtacaagatcagcaccaagaccaacaaggtgtatgacatcacagagaggaagagcttctgcagcaacttctgctaccaggccagcaagttctttgaggcccagatccccaagacccctgtgtgggtgcgggaggaggagcggcacccagacttccagctgctgaaggaggagcagagcggccacagcggggaggaggtgcagctgtgcagcaaggccatcaagaccagtgacatcgacaaccccagccactttgagaagcagtatgagagcagcagcagcagcacccacagcgacagcagcagtgacaatgagcaggactttgtgagcagcatcctgcccggcaaccggcccaacagcaccaacatccggccccagctgcaccagaagagcatcatgaagaagaaggccggccacaaggccaacagcaagcacaaggacaaggagcagacagtggtggatgtgacagagcagctgggggactgcaagctggacagccaggagaaggatgccacctgtgagctgcccctgcagaaggtgaacacccagagcagcagcaacagcaccctgcctgagcggctgaaggcctctgaaaattctgagagcgagtacagccgctctgagatcaccctggtgggcatcagcaagaagtctgctgagcacttcaagaggaagtttgccaagagcaaccaggtgagccgctctgtgagcagctctgtgcaggtgtgcccagaggtgggcaagaggaacctgctgaaggtgctgaaggagaccctgattgagtggaagacagaggagaccctgcgcttcctgtatggccagaactatgcctctgtgtgcctgaagccagaggccagcctggtgaaggaggagctggatgaagatgacatcatcagtgaccctgacagccacttccctgcctggagggagagccagaacagcctggatgagagcctgcccttccggggcagcggcacagccatcaagcccctgcccagctatgagaacctgaagaaggagacagagaagctgaacctgcgcatccgggagttctaccggggccgctacgtgctgggggaggagaccaccaagagccaggacagcgaggagcatgacagcaccttccccctgattgacagcagcagccagaaccagatcaggaagagaattgtgctggagaagctgagcaaggtgctgcccggcctgctggtgcccctgcagatcaccctgggggacatctacacccagctgaagaacctggtgaggaccttccggctgaccaacagaaacatcatccacaagccagctgagtggaccctcatcgccatggtgctgctgtccttcctgctgaatgtgaagacccgcatcaagaccttcatgatgatctacttccacctgatgaacagctag

SEQ ID NO: 168651 - DNA, 1998 bp, synthetic construct
  misc_feature 1..1998: note = Description of Artificial Sequence: Synthetic coding sequence
  source 1..1998: mol_type = other DNA
atgaccagcgccaacaaggccatcgagctgcagctgcaggtgaagcagaatgctgaggagctgcaggacttcatgagggacctggagaactgggagaaggacatcaagcagaaggacatggagctgcggcggcagaatggagtgcctgaggagaacctgccccccatcagaaatggaaacttcaggaagaagaagaagggcaaggccaaggagagcagcaagaagacccgggaggagaacaccaagaaccgcatcaagagctatgactatgaggcctgggccaagctggatgtggaccgcatcctggatgagctggacaaggatgacagcacccatgagagcctgagccaggagagcgagagtgaagaagatggcatccacgtggacagccagaaggccctggtgctgaaggagaagggcaacaagtacttcaagcagggcaagtatgatgaggccatcgactgctacaccaagggcatggatgctgacccctacaaccctgtgctgcccaccaacagagccagcgcctacttccggctgaagaagtttgctgtggccgagagtgactgcaacctggccgtggccctgaacagaagctacaccaaggcctacagcagaagaggagctgccaggtttgccctgcagaagctggaggaggccaagaaggactatgaaagagtgctggagctggagcccaacaactttgaggccaccaatgagctgaggaagatcagccaggccctggccagcaaggagaacagctaccccaaggaggccgacatcgtcatcaagagcacagaaggagagaggaagcagatcgaggcccagcagaacaagcagcaggccatcagcgagaaggacagaggaaatggcttcttcaaggagggcaagtatgaaagagccatcgagtgctacacccggggcattgctgctgatggagccaatgccctgctgcctgccaacagagccatggcctacctgaagatccagaagtatgaggaggccgagaaggactgcacccaggccatcctgctggatggcagctacagcaaggcctttgcccggcggggcacagcccggaccttcctgggcaagctgaatgaggccaagcaggactttgaaacagtgctgctgctggagcccggcaacaagcaggccgtgacagagctgagcaagatcaagaaggagctgattgagaagggccactgggatgatgtgttcctggacagcacccagaggcagaatgtggtgaagcccatcgacaaccccccccaccctggcagcaccaagcccctgaagaaggtgatcatcgaggagaccggcaacctgatccagaccattgatgtgcctgacagcaccacagctgctgcccctgagaacaaccccatcaacctggccaacgtgattgctgccaccggcaccaccagcaagaagaacagcagccaggatgacctcttccccaccagtgacaccccccgggccaaggtgctgaagattgaggaggtgtctgacaccagcagcctgcagccccaggccagcctgaagcaggatgtgtgccagagctacagcgagaagatgcccatcgagattgagcagaagccagcccagtttgccaccaccgtgctgccccccatcccagccaacagcttccagctggagagtgacttccggcagctgaagagcagcccagacatgctgtaccagtacctgaagcagatcgagcccagcctgtaccccaagctgttccagaagaacctggaccctgatgtgttcaaccagatcgtgaagatcctgcatgacttctacatcgagaaggagaagcccctgctgatctttgagatcctgcagaggctgtctgagctgaagagatttgacatggctgtgatgttcatgtctgaaacagagaagaagatcgcccgggccctcttcaaccacatcgacaagagcggcctgaaggacagctctgtggaggagctgaagaagagatatggaggatag

SEQ ID NO: 168652 - DNA, 1896 bp, synthetic construct
  misc_feature 1..1896: note = Description of Artificial Sequence: Synthetic coding sequence
  source 1..1896: mol_type = other DNA
atgaccagcgccaacaaggccatcgagctgcagctgcaggtgaagcagaatgctgaggagctgcaggacttcatgagggacctggagaactgggagaaggacatcaagcagaaggacatggagctgcggcggcagaatggagtgcctgaggagaacctgccccccatcagaaatggaaacttcaggaagaagaagaagggcaaggccaaggagagcagcaagaagacccgggaggagaacaccaagaaccgcatcaagagctatgactatgaggcctgggccaagctggatgtggaccgcatcctggatgagctggacaaggatgacagcacccatgagagcctgagccaggagagcgagagtgaagaagatggcatccacgtggacagccagaaggccctggtgctgaaggagaagggcaacaagtacttcaagcagggcaagtatgatgaggccatcgactgctacaccaagggcatggatgctgacccctacaaccctgtgctgcccaccaacagagccagcgcctacttccggctgaagaagtttgctgtggccgagagtgactgcaacctggccgtggccctgaacagaagctacaccaaggcctacagcagaagaggagctgccaggtttgccctgcagaagctggaggaggccaagaaggactatgaaagagtgctggagctggagcccaacaactttgaggccaccaatgagctgaggaagatcagccaggccctggccagcaaggagaacagctaccccaaggaggccgacatcgtcatcaagagcacagaaggagagaggaagcagatcgaggcccagcagaacaagcagcaggccatcagcgagaaggacagaggaaatggcttcttcaaggagggcaagtatgaaagagccatcgagtgctacacccggggcattgctgctgatggagccaatgccctgctgcctgccaacagagccatggcctacctgaagatccagaagtatgaggaggccgagaaggactgcacccaggccatcctgctggatggcagctacagcaaggcctttgcccggcggggcacagcccggaccttcctgggcaagctgaatgaggccaagcaggactttgaaacagtgctgctgctggagcccggcaacaagcaggccgtgacagagctgagcaagatcaagaagaagcccctgaagaaggtgatcatcgaggagaccggcaacctgatccagaccattgatgtgcctgacagcaccacagctgctgcccctgagaacaaccccatcaacctggccaacgtgattgctgccaccggcaccaccagcaagaagaacagcagccaggatgacctcttccccaccagtgacaccccccgggccaaggtgctgaagattgaggaggtgtctgacaccagcagcctgcagccccaggccagcctgaagcaggatgtgtgccagagctacagcgagaagatgcccatcgagattgagcagaagccagcccagtttgccaccaccgtgctgccccccatcccagccaacagcttccagctggagagtgacttccggcagctgaagagcagcccagacatgctgtaccagtacctgaagcagatcgagcccagcctgtaccccaagctgttccagaagaacctggaccctgatgtgttcaaccagatcgtgaagatcctgcatgacttctacatcgagaaggagaagcccctgctgatctttgagatcctgcagaggctgtctgagctgaagagatttgacatggctgtgatgttcatgtctgaaacagagaagaagatcgcccgggccctcttcaaccacatcgacaagagcggcctgaaggacagctctgtggaggagctgaagaagagatatggaggatag

SEQ ID NO: 168653 - DNA, 1521 bp, synthetic construct
  misc_feature 1..1521: note = Description of Artificial Sequence: Synthetic coding sequence
  source 1..1521: mol_type = other DNA
atggatgctgacccctacaaccctgtgctgcccaccaacagagccagcgcctacttccggctgaagaagtttgctgtggccgagagtgactgcaacctggccgtggccctgaacagaagctacaccaaggcctacagcagaagaggagctgccaggtttgccctgcagaagctggaggaggccaagaaggactatgagcgggtgctggagctggagcccaacaactttgaggccaccaatgagctgaggaagatcagccaggccctggccagcaaagaaaattcctaccccaaggaggccgacatcgtcatcaagagcacagaaggagagaggaagcagatcgaggcccagcagaacaagcagcaggccatcagcgagaaggacagaggaaatggcttcttcaaggagggcaagtatgagcgggccatcgagtgctacacccggggcattgctgctgatggagccaatgccctgctgcctgccaacagagccatggcctacctgaagatccagaagtatgaggaggccgagaaggactgcacccaggccatcctgctggatggcagctacagcaaggcctttgcccggcggggcacagcccggaccttcctgggcaagctgaatgaggccaagcaggactttgagaccgtgctgctgctggagcccggcaacaagcaggccgtgacagagctgagcaagatcaagaaggagctgattgagaagggccactgggatgatgtgttcctggacagcacccagaggcagaatgtggtgaagcccatcgacaaccccccccaccctggcagcaccaagcccctgaagaaggtgatcatcgaggagactggaaacctgatccagaccattgatgtgcctgacagcaccacagctgctgcccctgagaacaaccccatcaacctggccaacgtgattgctgccaccggcaccaccagcaagaagaacagcagccaggatgacctcttccccaccagtgacaccccccgggccaaggtgctgaagattgaggaggtgtctgacaccagcagcctgcagccccaggccagcctgaagcaggatgtgtgccagagctacagcgagaagatgcccattgaaattgagcagaagccagcccagtttgccaccaccgtgctgccccccatcccagccaacagcttccagctggagagtgacttccggcagctgaagagcagcccagacatgctgtaccagtacctgaagcagatcgagcccagcctgtaccccaagctgttccagaagaacctggaccctgatgtgttcaaccagatcgtgaagatcctgcatgacttctacatcgagaaggagaagcccctgctgatctttgagatcctgcagaggctgtctgagctgaagagatttgacatggctgtgatgttcatgtctgaaacagagaagaagatcgcccgggccctcttcaaccacatcgacaagagcggcctgaaggacagctctgtggaggagctgaagaagagatatggaggatag

SEQ ID NO: 168654 - DNA, 4821 bp, synthetic construct
  misc_feature 1..4821: note = Description of Artificial Sequence: Synthetic coding sequence
  source 1..4821: mol_type = other DNA
atgattgctgagcccgcccacttctacctgtttggcctcatctgcctgtgcagcggcagccggctgcggcaggaggacttccccccaagaattgtggagcaccccagcgacctgattgtgtccaagggggagcccgccaccctgaactgcaaggccgagggccggcccacccccaccatcgagtggtacaagggcggggagcgggtggagacagacaaggatgaccccaggagccacaggatgctgctgcccagcggcagcctcttcttcctgagaattgtgcacggcaggaagagcaggccagatgagggcgtgtatgtgtgtgtggccaggaactacctgggggaggccgtgagccacaatgccagcctggaggtggccatcctgagagatgacttccggcagaaccccagtgatgtgatggtggccgtgggggagcctgctgtgatggagtgccagcccccccggggccaccctgagcccaccatctcctggaagaaggatggcagccccctggatgacaaggatgagcgcatcaccatccggggcggcaagctgatgatcacctacaccaggaagagtgatgctgggaagtatgtgtgtgtgggcaccaacatggtgggggagcgggagagcgaggtggccgagctgactgtgctggagcggcccagctttgtgaagaggcccagcaacctggccgtgacagtggatgattctgctgagttcaagtgtgaggcccggggggaccctgtgcccaccgtgcgctggaggaaggatgatggagagctgcccaagagccgctatgagatcagagatgaccacaccctgaagatcaggaaggtgacagctggggacatgggcagctacacctgtgtggccgagaacatggtgggcaaggccgaggccagcgccaccctgactgtgcaggcccccagcgagcccccccactttgtggtgaagccccgggaccaggtggtggccctgggccgcacagtgaccttccagtgtgaggccactggaaacccccagcctgccatcttctggaggcgggagggcagccagaacctgctcttctcctaccagcccccccagagcagcagccgcttctctgtgtcccagacaggagacctgaccatcaccaacgtgcagaggagtgatgtgggctactacatctgccagaccctgaatgtggccggcagcatcatcaccaaggcctacctggaggtgacagatgtgattgctgacaggcctcctcctgtgatccggcagggccctgtgaaccagacagtggccgtggatggcacctttgtgctgagctgtgtggccaccggcagccctgtgcccaccatcctgtggaggaaggatggagtgctggtgtccacccaggacagccgcatcaagcagctggagaatggagtgctgcagatccgctatgccaagctgggggacaccggccgctacacctgcatcgccagcaccccatctggagaggccacctggagcgcctacatcgaggtgcaggagtttggagtgcctgtgcagcccccccggcccacagaccccaacctgatccccagcgcccccagcaagccagaggtgacagatgtgtccaggaacacagtgaccctgtcctggcagcccaacctgaacagcggggccacccccaccagctacatcatcgaggccttcagccacgccagcggcagctcctggcagacagtggccgagaatgtgaagacagagaccagcgccatcaagggcctgaagcccaatgccatctacctgttcctggtgcgggccgccaatgcctacggcatcagtgaccccagccagatcagtgaccctgtgaagacccaggatgtgctgcccaccagccagggcgtggaccacaagcaggtgcagcgggagctgggcaatgctgtgctgcacctgcacaaccccaccgtgctgagcagcagcagcattgaggtgcactggacagtggaccagcagagccagtacatccagggctacaagatcctgtaccggcccagcggggccaaccacggggagagtgactggctggtgtttgaggtgaggaccccagccaagaacagcgtggtgatcccagacctgaggaaaggagtgaactatgagatcaaggcccggcccttcttcaatgagttccagggcgctgacagcgagatcaagtttgccaagaccctggaggaggcccccagcgccccaccccagggcgtgacagtgtccaagaatgatggaaatggaacagccatcctggtgtcctggcagcccccacctgaggacacccagaatggcatggtgcaggagtacaaggtgtggtgcctgggcaatgagacccgctaccacatcaacaagacagtggatggcagcaccttctctgtggtgatccccttcctggtgcccggcatccgctacagcgtggaggtggccgccagcactggagctggcagcggcgtgaagtctgagccccagttcatccagctggatgcccacggcaaccctgtgtccccagaggaccaggtgtccctggcccagcagatcagtgatgtggtgaagcagcctgccttcatcgccggcattggagctgcctgctggatcatcctgatggtgttcagcatctggctgtaccgccacaggaagaagagaaatggcctgaccagcacctacgccggcatcaggaaggtgacctaccagagaggaggagaggccgtgtcctctgggggccggcccggcctgctgaacatcagcgagcctgctgcccagccctggctggccgacacctggcccaacacaggcaacaaccacaatgactgcagcatcagctgctgcacagctggaaatggaaacagcgacagcaacctgaccacctacagcaggcctgctgactgcatcgccaactacaacaaccagctggacaacaagcagaccaacctgatgctgcctgagagcacagtgtatggagatgtggacctgagcaacaagatcaatgagatgaagaccttcaacagccccaacctgaaggatggccgctttgtgaaccccagcggccagcccaccccctatgccaccacccagctgatccagagcaacctgagcaacaacatgaacaacggcagcggggacagcggggagaagcactggaagcccctgggccagcagaagcaggaggtggcccctgtgcagtacaacatcgtggagcagaacaagctgaacaaggactaccgggccaatgacacagtgccccccaccatcccctacaaccagagctatgaccagaacacaggaggcagctacaacagcagtgaccggggcagcagcaccagcggcagccagggccacaagaagggggcccggacccccaaggtgcccaagcagggcggcatgaactgggccgacctgctgcccccacctccagcccaccccccaccccacagcaacagcgaggagtacaacatctctgtggatgagagctatgaccaggagatgccctgccctgtgcccccagccaggatgtacctgcagcaggatgagctggaggaggaggaggatgagcggggccccaccccacctgtgagaggagctgccagcagccctgctgctgtgtcctacagccaccagagcacagccaccctgacccccagcccccaggaggagctgcagcccatgctgcaggactgcccagaggagaccggccacatgcagcaccagcctgacagaagacggcagcctgtgtccccacctcctccaccccggcccatcagccccccccacacctacggctacatcagcggccccctggtgtctgacatggacacagatgcccctgaggaggaggaggatgaagctgacatggaggtggccaagatgcagacccggcggctgctgctgcggggcctggagcagaccccagccagctctgtgggggacctggagagctctgtgacaggctccatgatcaatggctggggcagcgccagcgaggaggacaacatcagcagcggccgcagctctgtgagcagcagtgatggcagcttcttcacagatgctgactttgcccaggccgtggccgctgctgctgaatatgccggcctgaaggtggcccggcggcagatgcaggatgctgctggccgccgccacttccacgccagccagtgcccccggcccaccagccctgtgtccacagacagcaacatgtctgctgctgtgatgcagaagaccaggcctgccaagaagctgaagcaccagcccggccacctgcggcgggagacctacacagatgacctgcccccacctcctgtgcccccaccagccatcaagagccccacagcccagagcaagacccagctggaggtgcggcctgtggtggtgcccaagctgcccagcatggatgccaggacagacaggagcagtgacaggaagggcagcagctacaagggccgggaggtgctggatggccggcaggtggtggacatgaggaccaaccctggggacccccgggaggcccaggagcagcagaatgatggcaagggccggggcaacaaggccgccaagagggacctgcccccagccaagacccacctgatccaggaggacatcctgccctactgccggcccaccttccccaccagcaacaacccccgggaccccagcagcagcagctccatgagcagccggggcagcggcagccggcagcgggagcaggccaacgtgggcagaagaaatattgctgagatgcaggtgctgggcggctatgaaagaggagaggacaacaatgaggagctggaggagacagagagctag

SEQ ID NO: 168655 - DNA, 4968 bp, synthetic construct
  misc_feature 1..4968: note = Description of Artificial Sequence: Synthetic coding sequence
  source 1..4968: mol_type = other DNA
atgaagtggaagcacgtgcccttcctggtgatgatcagcctgctgagcctgagccccaaccacctgttcctggcccagctgatcccagaccctgaagatgtggagagaggaaatgaccacggcacccccatccccaccagtgacaatgatgacaacagcctgggctacacaggcagccggctgcggcaggaggacttccccccacgcatcgtggagcaccccagcgacctgattgtgtccaaaggagagcccgccaccctgaactgcaaggccgagggccggcccacccccaccatcgagtggtacaagggcggggagcgggtggagacagacaaggatgaccccaggagccacaggatgctgctgcccagcggcagcctcttcttcctgcgcatcgtgcacggcaggaagagcaggccagatgaaggagtgtatgtgtgtgtggccaggaactacctgggggaggccgtgagccacaatgccagcctggaggtggccatcctgagagatgacttccggcagaaccccagtgatgtgatggtggccgtgggggagcctgctgtgatggagtgccagcccccccggggccaccctgagcccaccatctcctggaagaaggatggcagccccctggatgacaaggatgagcgcatcaccatccggggcggcaagctgatgatcacctacaccaggaagagtgatgctgggaagtatgtgtgtgtgggcaccaacatggtgggggagcgggagagcgaggtggccgagctgactgtgctggagcggcccagctttgtgaagaggcccagcaacctggccgtgacagtggatgacagcgctgagttcaagtgtgaggcccggggggaccctgtgcccaccgtgcgctggaggaaggatgatggagagctgcccaagagccgctatgagatcagagatgaccacaccctgaagatcaggaaggtgacagctggggacatgggcagctacacctgtgtggccgagaacatggtgggcaaggccgaggccagcgccaccctgactgtgcaggagcccccccactttgtggtgaagccccgggaccaggtggtggccctgggccgcacagtgaccttccagtgtgaggccactggaaacccccagcctgccatcttctggaggcgggagggcagccagaacctgctcttctcctaccagcccccccagagcagcagccgcttctctgtgtcccagacaggagacctgaccatcaccaacgtgcagaggagtgatgtgggctactacatctgccagaccctgaatgtggccggcagcatcatcaccaaggcctacctggaggtgacagatgtgattgctgacaggcctcctcctgtgatccggcagggccctgtgaaccagacagtggccgtggatggcacctttgtgctgagctgtgtggccaccggcagccctgtgcccaccatcctgtggaggaaggatggagtgctggtgtccacccaggacagccgcatcaagcagctggagaatggagtgctgcagatccgctatgccaagctgggggacaccggccgctacacctgcatcgccagcaccccatctggagaggccacctggagcgcctacatcgaggtgcagggcaaggtgaatgaatttggagtgcctgtgcagcccccccggcccacagaccccaacctgatccccagcgcccccagcaagccagaggtgacagatgtgtccaggaacacagtgaccctgtcctggcagcccaacctgaacagcggggccacccccaccagctacatcatcgaggccttcagccacgccagcggcagctcctggcagacagtggccgagaatgtgaagacagagaccagcgccatcaagggcctgaagcccaatgccatctacctgttcctggtgcgggccgccaatgcctacggcatcagtgaccccagccagatcagtgaccctgtgaagacccaggatgtgctgcccaccagccagggcgtggaccacaagcaggtgcagcgggagctgggcaatgctgtgctgcacctgcacaaccccaccgtgctgagcagcagcagcattgaggtgcactggacagtggaccagcagagccagtacatccagggctacaagatcctgtaccggcccagcggggccaaccacggggagagtgactggctggtgtttgaggtgaggaccccagccaagaacagcgtggtgatcccagacctgaggaaaggagtgaactatgagatcaaggcccggcccttcttcaatgagttccagggcgctgacagcgagatcaagtttgccaagaccctggaggaggcccccagcgccccaccccagggcgtgacagtgtccaagaatgatggaaatggaacagccatcctggtgtcctggcagcccccacctgaggacacccagaatggcatggtgcaggagtacaaggtgtggtgcctgggcaatgagacccgctaccacatcaacaagacagtggatggcagcaccttctctgtggtgatccccttcctggtgcccggcatccgctacagcgtggaggtggccgccagcactggagctggcagcggcgtgaagtctgagccccagttcatccagctggatgcccacggcaaccctgtgtccccagaggaccaggtgtccctggcccagcagatcagtgatgtggtgaagcagcctgccttcatcgccggcattggagctgcctgctggatcatcctgatggtgttcagcatctggctgtaccgccacaggaagaagagaaatggcctgaccagcacctacgccggcatcaggaaggtgcccagcttcaccttcacccccaccgtgacctaccagaggggcggggaggccgtgagcagcggcggccggcccggcctgctgaacatcagcgagcctgctgcccagccctggctggccgacacctggcccaacacaggcaacaaccacaatgactgcagcatcagctgctgcacagctggaaatggaaacagcgacagcaacctgaccacctacagcaggcctgctgactgcatcgccaactacaacaaccagctggacaacaagcagaccaacctgatgctgcctgagagcacagtgtatggagatgtggacctgagcaacaagatcaatgagatgaagaccttcaacagccccaacctgaaggatggccgctttgtgaaccccagcggccagcccaccccctatgccaccacccagctgatccagagcaacctgagcaacaacatgaacaatggaagtggggacagcggggagaagcactggaagcccctgggccagcagaagcaggaggtggcccctgtgcagtacaacatcgtggagcagaacaagctgaacaaggactaccgggccaatgacacagtgccccccaccatcccctacaaccagagctatgaccagaacacaggaggcagctacaacagcagtgaccggggcagcagcaccagcggcagccagggccacaagaagggggcccggacccccaaggtgcccaagcagggcggcatgaactgggccgacctgctgcccccacctccagcccaccccccaccccacagcaacagcgaggagtacaacatctctgtggatgagagctatgaccaggagatgccctgccctgtgcccccagccaggatgtacctgcagcaggatgagctggaggaggaggaggatgagcggggccccaccccacctgtgcggggggccgccagcagccctgctgctgtgtcctacagccaccagagcacagccaccctgacccccagcccccaggaggagctgcagcccatgctgcaggactgcccagaggagaccggccacatgcagcaccagcctgacagaagacggcagcctgtgagccccccacctccaccccggcccatcagccccccccacacctacggctacatcagcggccccctggtgtctgacatggacacagatgcccctgaggaggaggaggatgaggccgacatggaggtggccaagatgcagacccggcggctgctgctgcggggcctggagcagaccccagccagctctgtgggggacctggagagctctgtgacaggctccatgatcaatggctggggcagcgccagcgaggaggacaacatcagcagcggccgcagctctgtgagcagcagtgatggcagcttcttcacagatgctgactttgcccaggccgtggccgctgctgctgaatatgccggcctgaaggtggcccggcggcagatgcaggatgctgctggaagaagacacttccacgccagccagtgcccccggcccaccagccctgtgtccacagacagcaacatgtctgctgctgtgatgcagaagaccaggcctgccaagaagctgaagcaccagcccggccacctgcggcgggagacctacacagatgacctgcccccacctcctgtgcccccaccagccatcaagagccccacagcccagagcaagacccagctggaggtgcggcctgtggtggtgcccaagctgcccagcatggatgccaggacagacaggagcagtgacaggaagggcagcagctacaagggccgggaggtgctggatggccggcaggtggtggacatgaggaccaaccctggggacccccgggaggcccaggagcagcagaatgatggcaagggccggggcaacaaggccgccaagagggacctgcccccagccaagacccacctgatccaggaggacatcctgccctactgccggcccaccttccccaccagcaacaacccccgggaccccagcagcagcagctccatgagcagccggggcagcggcagccggcagcgggagcaggccaacgtgggcagaagaaatattgctgagatgcaggtgctgggcggctatgaaagaggagaggacaacaatgaggagctggaggagcccagcagctag

SEQ ID NO: 168656 - DNA, 4839 bp, synthetic construct
  misc_feature 1..4839: note = Description of Artificial Sequence: Synthetic coding sequence
  source 1..4839: mol_type = other DNA
atgattgctgagcccgcccacttctacctgtttggcctcatctgcctgtgcagcggcagccggctgcggcaggaggacttccccccaagaattgtggagcaccccagcgacctgattgtgtccaagggggagcccgccaccctgaactgcaaggccgagggccggcccacccccaccatcgagtggtacaagggcggggagcgggtggagacagacaaggatgaccccaggagccacaggatgctgctgcccagcggcagcctcttcttcctgagaattgtgcacggcaggaagagcaggccagatgagggcgtgtatgtgtgtgtggccaggaactacctgggggaggccgtgagccacaatgccagcctggaggtggccatcctgagagatgacttccggcagaaccccagtgatgtgatggtggccgtgggggagcctgctgtgatggagtgccagcccccccggggccaccctgagcccaccatctcctggaagaaggatggcagccccctggatgacaaggatgagcgcatcaccatccggggcggcaagctgatgatcacctacaccaggaagagtgatgctgggaagtatgtgtgtgtgggcaccaacatggtgggggagcgggagagcgaggtggccgagctgactgtgctggagcggcccagctttgtgaagaggcccagcaacctggccgtgacagtggatgattctgctgagttcaagtgtgaggcccggggggaccctgtgcccaccgtgcgctggaggaaggatgatggagagctgcccaagagccgctatgagatcagagatgaccacaccctgaagatcaggaaggtgacagctggggacatgggcagctacacctgtgtggccgagaacatggtgggcaaggccgaggccagcgccaccctgactgtgcaggagcccccccactttgtggtgaagccccgggaccaggtggtggccctgggccgcacagtgaccttccagtgtgaggccaccggcaacccccagcctgccatcttctggaggcgggagggcagccagaacctgctcttctcctaccagcccccccagagcagcagccgcttctctgtgtcccagacaggagacctgaccatcaccaacgtgcagaggagtgatgtgggctactacatctgccagaccctgaatgtggccggcagcatcatcaccaaggcctacctggaggtgacagatgtgattgctgaccggcccccacctgtgatccggcagggccctgtgaaccagacagtggccgtggatggcacctttgtgctgagctgtgtggccaccggcagccctgtgcccaccatcctgtggaggaaggatggagtgctggtgtccacccaggacagccgcatcaagcagctggagaatggagtgctgcagatccgctatgccaagctgggggacaccggccgctacacctgcatcgccagcacccccagcggggaggccacctggagcgcctacatcgaggtgcaggagtttggagtgcctgtgcagcccccccggcccacagaccccaacctgatccccagcgcccccagcaagccagaggtgacagatgtgtccaggaacacagtgaccctgtcctggcagcccaacctgaacagcggggccacccccaccagctacatcatcgaggccttcagccacgccagcggcagctcctggcagacagtggctgaaaatgtgaagacagagaccagcgccatcaagggcctgaagcccaatgccatctacctgttcctggtgcgggccgccaatgcctacggcatcagtgaccccagccagatcagtgaccctgtgaagacccaggatgtgctgcccaccagccagggcgtggaccacaagcaggtgcagcgggagctgggcaatgctgtgctgcacctgcacaaccccaccgtgctgagcagcagcagcattgaggtgcactggacagtggaccagcagagccagtacatccagggctacaagatcctgtaccggcccagcggggccaaccacggggagagtgactggctggtgtttgaggtgaggaccccagccaagaacagcgtggtgatcccagacctgaggaagggcgtgaactatgagatcaaggcccggcccttcttcaatgagttccagggcgctgacagcgagatcaagtttgccaagaccctggaggaggcccccagcgccccaccccagggcgtgacagtgtccaagaatgatggaaatggaacagccatcctggtgtcctggcagcccccacctgaggacacccagaatggcatggtgcaggagtacaaggtgtggtgcctgggcaatgagacccgctaccacatcaacaagacagtggatggcagcaccttctctgtggtgatccccttcctggtgcccggcatccgctacagcgtggaggtggccgccagcactggagctggcagcggcgtgaagtctgagccccagttcatccagctggatgcccacggcaaccctgtgtccccagaggaccaggtgtccctggcccagcagatcagtgatgtggtgaagcagcctgccttcatcgccggcatcggggccgcctgctggatcatcctgatggtgttcagcatctggctgtaccgccacaggaagaagagaaatggcctgaccagcacctacgccggcatcaggaaggtgcccagcttcaccttcacccccaccgtgacctaccagagaggaggagaggccgtgtcctctgggggccggcccggcctgctgaacatcagcgagcctgctgcccagccctggctggccgacacctggcccaacacaggcaacaaccacaatgactgcagcatcagctgctgcacagctggaaatggaaacagcgacagcaacctgaccacctacagcaggcctgctgactgcatcgccaactacaacaaccagctggacaacaagcagaccaacctgatgctgcctgagagcacagtgtatggagatgtggacctgagcaacaagatcaatgagatgaagaccttcaacagccccaacctgaaggatggccgctttgtgaaccccagcggccagcccaccccctatgccaccacccagctgatccagagcaacctgagcaacaacatgaacaacggcagcggggacagcggggagaagcactggaagcccctgggccagcagaagcaggaggtggcccctgtgcagtacaacatcgtggagcagaacaagctgaacaaggactaccgggccaatgacacagtgccccccaccatcccctacaaccagagctatgaccagaacacaggaggcagctacaacagcagtgaccggggcagcagcaccagcggcagccagggccacaagaagggggcccggacccccaaggtgcccaagcagggcggcatgaactgggccgacctgctgcccccacctccagcccaccccccaccccacagcaacagcgaggagtacaacatctctgtggatgagagctatgaccaggagatgccctgccctgtgcccccagccaggatgtacctgcagcaggatgagctggaggaggaggaggatgagcggggccccaccccacctgtgagaggagctgccagcagccctgctgctgtgtcctacagccaccagagcacagccaccctgacccccagcccccaggaggagctgcagcccatgctgcaggactgcccagaggagaccggccacatgcagcaccagcctgacagaagacggcagcctgtgtccccacctcctccaccccggcccatcagccccccccacacctacggctacatcagcggccccctggtgtctgacatggacacagatgcccctgaggaggaggaggatgaagctgacatggaggtggccaagatgcagacccggcggctgctgctgcggggcctggagcagaccccagccagctctgtgggggacctggagagctctgtgacaggctccatgatcaatggctggggcagcgccagcgaggaggacaacatcagcagcggccgcagctctgtgagcagcagtgatggcagcttcttcacagatgctgactttgcccaggccgtggccgctgctgctgaatatgccggcctgaaggtggcccggcggcagatgcaggatgctgctggccgccgccacttccacgccagccagtgcccccggcccaccagccctgtgtccacagacagcaacatgtctgctgctgtgatgcagaagaccaggcctgccaagaagctgaagcaccagcccggccacctgcggcgggagacctacacagatgacctgcccccacctcctgtgcccccaccagccatcaagagccccacagcccagagcaagacccagctggaggtgcggcctgtggtggtgcccaagctgcccagcatggatgccaggacagacaggagcagtgacaggaagggcagcagctacaagggccgggaggtgctggatggccggcaggtggtggacatgaggaccaaccctggggacccccgggaggcccaggagcagcagaatgatggcaagggccggggcaacaaggccgccaagagggacctgcccccagccaagacccacctgatccaggaggacatcctgccctactgccggcccaccttccccaccagcaacaacccccgggaccccagcagcagcagctccatgagcagccggggcagcggcagccggcagcgggagcaggccaacgtgggcagaagaaatattgctgagatgcaggtgctgggcggctatgaaagaggagaggacaacaatgaggagctggaggagacagagagctag

SEQ ID NO: 168657 - DNA, 4956 bp, synthetic construct
  misc_feature 1..4956: note = Description of Artificial Sequence: Synthetic coding sequence
  source 1..4956: mol_type = other DNA
atgaagtggaagcacgtgcccttcctggtgatgatcagcctgctgagcctgagccccaaccacctgttcctggcccagctgatcccagaccctgaagatgtggagagaggaaatgaccacggcacccccatccccaccagtgacaatgatgacaacagcctgggctacacaggcagccggctgcggcaggaggacttccccccacgcatcgtggagcaccccagcgacctgattgtgtccaaaggagagcccgccaccctgaactgcaaggccgagggccggcccacccccaccatcgagtggtacaagggcggggagcgggtggagacagacaaggatgaccccaggagccacaggatgctgctgcccagcggcagcctcttcttcctgcgcatcgtgcacggcaggaagagcaggccagatgaaggagtgtatgtgtgtgtggccaggaactacctgggggaggccgtgagccacaatgccagcctggaggtggccatcctgagagatgacttccggcagaaccccagtgatgtgatggtggccgtgggggagcctgctgtgatggagtgccagcccccccggggccaccctgagcccaccatctcctggaagaaggatggcagccccctggatgacaaggatgagcgcatcaccatccggggcggcaagctgatgatcacctacaccaggaagagtgatgctgggaagtatgtgtgtgtgggcaccaacatggtgggggagcgggagagcgaggtggccgagctgactgtgctggagcggcccagctttgtgaagaggcccagcaacctggccgtgacagtggatgacagcgctgagttcaagtgtgaggcccggggggaccctgtgcccaccgtgcgctggaggaaggatgatggagagctgcccaagagccgctatgagatcagagatgaccacaccctgaagatcaggaaggtgacagctggggacatgggcagctacacctgtgtggccgagaacatggtgggcaaggccgaggccagcgccaccctgactgtgcaggagcccccccactttgtggtgaagccccgggaccaggtggtggccctgggccgcacagtgaccttccagtgtgaggccactggaaacccccagcctgccatcttctggaggcgggagggcagccagaacctgctcttctcctaccagcccccccagagcagcagccgcttctctgtgtcccagacaggagacctgaccatcaccaacgtgcagaggagtgatgtgggctactacatctgccagaccctgaatgtggccggcagcatcatcaccaaggcctacctggaggtgacagatgtgattgctgacaggcctcctcctgtgatccggcagggccctgtgaaccagacagtggccgtggatggcacctttgtgctgagctgtgtggccaccggcagccctgtgcccaccatcctgtggaggaaggatggagtgctggtgtccacccaggacagccgcatcaagcagctggagaatggagtgctgcagatccgctatgccaagctgggggacaccggccgctacacctgcatcgccagcaccccatctggagaggccacctggagcgcctacatcgaggtgcaggagtttggagtgcctgtgcagcccccccggcccacagaccccaacctgatccccagcgcccccagcaagccagaggtgacagatgtgtccaggaacacagtgaccctgtcctggcagcccaacctgaacagcggggccacccccaccagctacatcatcgaggccttcagccacgccagcggcagctcctggcagacagtggccgagaatgtgaagacagagaccagcgccatcaagggcctgaagcccaatgccatctacctgttcctggtgcgggccgccaatgcctacggcatcagtgaccccagccagatcagtgaccctgtgaagacccaggatgtgctgcccaccagccagggcgtggaccacaagcaggtgcagcgggagctgggcaatgctgtgctgcacctgcacaaccccaccgtgctgagcagcagcagcattgaggtgcactggacagtggaccagcagagccagtacatccagggctacaagatcctgtaccggcccagcggggccaaccacggggagagtgactggctggtgtttgaggtgaggaccccagccaagaacagcgtggtgatcccagacctgaggaaaggagtgaactatgagatcaaggcccggcccttcttcaatgagttccagggcgctgacagcgagatcaagtttgccaagaccctggaggaggcccccagcgccccaccccagggcgtgacagtgtccaagaatgatggaaatggaacagccatcctggtgtcctggcagcccccacctgaggacacccagaatggcatggtgcaggagtacaaggtgtggtgcctgggcaatgagacccgctaccacatcaacaagacagtggatggcagcaccttctctgtggtgatccccttcctggtgcccggcatccgctacagcgtggaggtggccgccagcactggagctggcagcggcgtgaagtctgagccccagttcatccagctggatgcccacggcaaccctgtgtccccagaggaccaggtgtccctggcccagcagatcagtgatgtggtgaagcagcctgccttcatcgccggcattggagctgcctgctggatcatcctgatggtgttcagcatctggctgtaccgccacaggaagaagagaaatggcctgaccagcacctacgccggcatcaggaaggtgcccagcttcaccttcacccccaccgtgacctaccagaggggcggggaggccgtgagcagcggcggccggcccggcctgctgaacatcagcgagcctgctgcccagccctggctggccgacacctggcccaacacaggcaacaaccacaatgactgcagcatcagctgctgcacagctggaaatggaaacagcgacagcaacctgaccacctacagcaggcctgctgactgcatcgccaactacaacaaccagctggacaacaagcagaccaacctgatgctgcctgagagcacagtgtatggagatgtggacctgagcaacaagatcaatgagatgaagaccttcaacagccccaacctgaaggatggccgctttgtgaaccccagcggccagcccaccccctatgccaccacccagctgatccagagcaacctgagcaacaacatgaacaatggaagtggggacagcggggagaagcactggaagcccctgggccagcagaagcaggaggtggcccctgtgcagtacaacatcgtggagcagaacaagctgaacaaggactaccgggccaatgacacagtgccccccaccatcccctacaaccagagctatgaccagaacacaggaggcagctacaacagcagtgaccggggcagcagcaccagcggcagccagggccacaagaagggggcccggacccccaaggtgcccaagcagggcggcatgaactgggccgacctgctgcccccacctccagcccaccccccaccccacagcaacagcgaggagtacaacatctctgtggatgagagctatgaccaggagatgccctgccctgtgcccccagccaggatgtacctgcagcaggatgagctggaggaggaggaggatgagcggggccccaccccacctgtgcggggggccgccagcagccctgctgctgtgtcctacagccaccagagcacagccaccctgacccccagcccccaggaggagctgcagcccatgctgcaggactgcccagaggagaccggccacatgcagcaccagcctgacagaagacggcagcctgtgagccccccacctccaccccggcccatcagccccccccacacctacggctacatcagcggccccctggtgtctgacatggacacagatgcccctgaggaggaggaggatgaggccgacatggaggtggccaagatgcagacccggcggctgctgctgcggggcctggagcagaccccagccagctctgtgggggacctggagagctctgtgacaggctccatgatcaatggctggggcagcgccagcgaggaggacaacatcagcagcggccgcagctctgtgagcagcagtgatggcagcttcttcacagatgctgactttgcccaggccgtggccgctgctgctgaatatgccggcctgaaggtggcccggcggcagatgcaggatgctgctggaagaagacacttccacgccagccagtgcccccggcccaccagccctgtgtccacagacagcaacatgtctgctgctgtgatgcagaagaccaggcctgccaagaagctgaagcaccagcccggccacctgcggcgggagacctacacagatgacctgcccccacctcctgtgcccccaccagccatcaagagccccacagcccagagcaagacccagctggaggtgcggcctgtggtggtgcccaagctgcccagcatggatgccaggacagacaggagcagtgacaggaagggcagcagctacaagggccgggaggtgctggatggccggcaggtggtggacatgaggaccaaccctggggacccccgggaggcccaggagcagcagaatgatggcaagggccggggcaacaaggccgccaagagggacctgcccccagccaagacccacctgatccaggaggacatcctgccctactgccggcccaccttccccaccagcaacaacccccgggaccccagcagcagcagctccatgagcagccggggcagcggcagccggcagcgggagcaggccaacgtgggcagaagaaatattgctgagatgcaggtgctgggcggctatgaaagaggagaggacaacaatgaggagctggaggagacagagagctag

SEQ ID NO: 168658 - DNA, 4656 bp, synthetic construct
  misc_feature 1..4656: note = Description of Artificial Sequence: Synthetic coding sequence
  source 1..4656: mol_type = other DNA
atgattgctgagcccgcccacttctacctgtttggcctcatctgcctgtgcagcggcagccggctgcggcaggaggacttccccccaagaattgtggagcaccccagcgacctgattgtgtccaagggggagcccgccaccctgaactgcaaggccgagggccggcccacccccaccatcgagtggtacaagggcggggagcgggtggagacagacaaggatgaccccaggagccacaggatgctgctgcccagcggcagcctcttcttcctgagaattgtgcacggcaggaagagcaggccagatgagggcgtgtatgtgtgtgtggccaggaactacctgggggaggccgtgagccacaatgccagcctggaggtggccatcctgagagatgacttccggcagaaccccagtgatgtgatggtggccgtgggggagcctgctgtgatggagtgccagcccccccggggccaccctgagcccaccatctcctggaagaaggatggcagccccctggatgacaaggatgagcgcatcaccatccggggcggcaagctgatgatcacctacaccaggaagagtgatgctgggaagtatgtgtgtgtgggcaccaacatggtgggggagcgggagagcgaggtggccgagctgactgtgctggagcggcccagctttgtgaagaggcccagcaacctggccgtgacagtggatgattctgctgagttcaagtgtgaggcccggggggaccctgtgcccaccgtgcgctggaggaaggatgatggagagctgcccaagagccgctatgagatcagagatgaccacaccctgaagatcaggaaggtgacagctggggacatgggcagctacacctgtgtggccgagaacatggtgggcaaggccgaggccagcgccaccctgactgtgcaggtgggcagcgagcccccccactttgtggtgaagccccgggaccaggtggtggccctgggccgcacagtgaccttccagtgtgaggccactggaaacccccagcctgccatcttctggaggcgggagggcagccagaacctgctcttctcctaccagcccccccagagcagcagccgcttctctgtgtcccagacaggagacctgaccatcaccaacgtgcagaggagtgatgtgggctactacatctgccagaccctgaatgtggccggcagcatcatcaccaaggcctacctggaggtgacagatgtgattgctgacaggcctcctcctgtgatccggcagggccctgtgaaccagacagtggccgtggatggcacctttgtgctgagctgtgtggccaccggcagccctgtgcccaccatcctgtggaggaaggatggagtgctggtgtccacccaggacagccgcatcaagcagctggagaatggagtgctgcagatccgctatgccaagctgggggacaccggccgctacacctgcatcgccagcaccccatctggagaggccacctggagcgcctacatcgaggtgcaggagtttggagtgcctgtgcagcccccccggcccacagaccccaacctgatccccagcgcccccagcaagccagaggtgacagatgtgtccaggaacacagtgaccctgtcctggcagcccaacctgaacagcggggccacccccaccagctacatcatcgaggccttcagccacgccagcggcagctcctggcagacagtggccgagaatgtgaagacagagaccagcgccatcaagggcctgaagcccaatgccatctacctgttcctggtgcgggccgccaatgcctacggcatcagtgaccccagccagatcagtgaccctgtgaagacccaggatgtgctgcccaccagccagggcgtggaccacaagcaggtgcagcgggagctgggcaatgctgtgctgcacctgcacaaccccaccgtgctgagcagcagcagcattgaggtgcactggacagtggaccagcagagccagtacatccagggctacaagatcctgtaccggcccagcggggccaaccacggggagagtgactggctggtgtttgaggtgaggaccccagccaagaacagcgtggtgatcccagacctgaggaaaggagtgaactatgagatcaaggcccggcccttcttcaatgagttccagggcgctgacagcgagatcaagtttgccaagaccctggaggaggcccccagcgccccaccccagggcgtgacagtgtccaagaatgatggaaatggaacagccatcctggtgtcctggcagcccccacctgaggacacccagaatggcatggtgcaggagtacaaggtgtggtgcctgggcaatgagacccgctaccacatcaacaagacagtggatggcagcaccttctctgtggtgatccccttcctggtgcccggcatccgctacagcgtggaggtggccgccagcactggagctggcagcggcgtgaagtctgagccccagttcatccagctggatgcccacggcaaccctgtgtccccagaggaccaggtgtccctggcccagcagatcagtgatgtggtgaagcagcctgccttcatcgccggcattggagctgcctgctggatcatcctgatggtgttcagcatctggctgtaccgccacaggaagaagagaaatggcctgaccagcacctacgccggcatcaggaaggtgacctaccagagaggaggagaggccgtgtcctctgggggccggcccggcctgctgaacatcagcgagcctgctgcccagccctggctggccgacacctggcccaacacaggcaacaaccacaatgactgcagcatcagctgctgcacagctggaaatggaaacagcgacagcaacctgaccacctacagcaggcctggccagcccaccccctatgccaccacccagctgatccagagcaacctgagcaacaacatgaacaatggaagtggggacagcggggagaagcactggaagcccctgggccagcagaagcaggaggtggcccctgtgcagtacaacatcgtggagcagaacaagctgaacaaggactaccgggccaatgacacagtgccccccaccatcccctacaaccagagctatgaccagaacacaggaggcagctacaacagcagtgaccggggcagcagcaccagcggcagccagggccacaagaagggggcccggacccccaaggtgcccaagcagggcggcatgaactgggccgacctgctgcccccacctccagcccaccccccaccccacagcaacagcgaggagtacaacatctctgtggatgagagctatgaccaggagatgccctgccctgtgcccccagccaggatgtacctgcagcaggatgagctggaggaggaggaggatgagcggggccccaccccacctgtgcggggggccgccagcagccctgctgctgtgtcctacagccaccagagcacagccaccctgacccccagcccccaggaggagctgcagcccatgctgcaggactgcccagaggagaccggccacatgcagcaccagcctgacagaagacggcagcctgtgagccccccacctccaccccggcccatcagccccccccacacctacggctacatcagcggccccctggtgtctgacatggacacagatgcccctgaggaggaggaggatgaggccgacatggaggtggccaagatgcagacccggcggctgctgctgcggggcctggagcagaccccagccagctctgtgggggacctggagagctctgtgacaggctccatgatcaatggctggggcagcgccagcgaggaggacaacatcagcagcggccgcagctctgtgagcagcagtgatggcagcttcttcacagatgctgactttgcccaggccgtggccgctgctgctgaatatgccggcctgaaggtggcccggcggcagatgcaggatgctgctggaagaagacacttccacgccagccagtgcccccggcccaccagccctgtgtccacagacagcaacatgtctgctgctgtgatgcagaagaccaggcctgccaagaagctgaagcaccagcccggccacctgcggcgggagacctacacagatgacctgcccccacctcctgtgcccccaccagccatcaagagccccacagcccagagcaagacccagctggaggtgcggcctgtggtggtgcccaagctgcccagcatggatgccaggacagacaggagcagtgacaggaagggcagcagctacaagggccgggaggtgctggatggccggcaggtggtggacatgaggaccaaccctggggacccccgggaggcccaggagcagcagaatgatggcaagggccggggcaacaaggccgccaagagggacctgcccccagccaagacccacctgatccaggaggacatcctgccctactgccggcccaccttccccaccagcaacaacccccgggaccccagcagcagcagctccatgagcagccggggcagcggcagccggcagcgggagcaggccaacgtgggcagaagaaatattgctgagatgcaggtgctgggcggctatgaaagaggagaggacaacaatgaggagctggaggagacagagagctag

SEQ ID NO: 168659 - DNA, 4821 bp, synthetic construct
  misc_feature 1..4821: note = Description of Artificial Sequence: Synthetic coding sequence
  source 1..4821: mol_type = other DNA
atgattgctgagcccgcccacttctacctgtttggcctcatctgcctgtgcagcggcagccggctgcggcaggaggacttccccccaagaattgtggagcaccccagcgacctgattgtgtccaagggggagcccgccaccctgaactgcaaggccgagggccggcccacccccaccatcgagtggtacaagggcggggagcgggtggagacagacaaggatgaccccaggagccacaggatgctgctgcccagcggcagcctcttcttcctgagaattgtgcacggcaggaagagcaggccagatgagggcgtgtatgtgtgtgtggccaggaactacctgggggaggccgtgagccacaatgccagcctggaggtggccatcctgagagatgacttccggcagaaccccagtgatgtgatggtggccgtgggggagcctgctgtgatggagtgccagcccccccggggccaccctgagcccaccatctcctggaagaaggatggcagccccctggatgacaaggatgagcgcatcaccatccggggcggcaagctgatgatcacctacaccaggaagagtgatgctgggaagtatgtgtgtgtgggcaccaacatggtgggggagcgggagagcgaggtggccgagctgactgtgctggagcggcccagctttgtgaagaggcccagcaacctggccgtgacagtggatgattctgctgagttcaagtgtgaggcccggggggaccctgtgcccaccgtgcgctggaggaaggatgatggagagctgcccaagagccgctatgagatcagagatgaccacaccctgaagatcaggaaggtgacagctggggacatgggcagctacacctgtgtggccgagaacatggtgggcaaggccgaggccagcgccaccctgactgtgcaggtgggcagcgagcccccccactttgtggtgaagccccgggaccaggtggtggccctgggccgcacagtgaccttccagtgtgaggccactggaaacccccagcctgccatcttctggaggcgggagggcagccagaacctgctcttctcctaccagcccccccagagcagcagccgcttctctgtgtcccagacaggagacctgaccatcaccaacgtgcagaggagtgatgtgggctactacatctgccagaccctgaatgtggccggcagcatcatcaccaaggcctacctggaggtgacagatgtgattgctgacaggcctcctcctgtgatccggcagggccctgtgaaccagacagtggccgtggatggcacctttgtgctgagctgtgtggccaccggcagccctgtgcccaccatcctgtggaggaaggatggagtgctggtgtccacccaggacagccgcatcaagcagctggagaatggagtgctgcagatccgctatgccaagctgggggacaccggccgctacacctgcatcgccagcaccccatctggagaggccacctggagcgcctacatcgaggtgcaggagtttggagtgcctgtgcagcccccccggcccacagaccccaacctgatccccagcgcccccagcaagccagaggtgacagatgtgtccaggaacacagtgaccctgtcctggcagcccaacctgaacagcggggccacccccaccagctacatcatcgaggccttcagccacgccagcggcagctcctggcagacagtggccgagaatgtgaagacagagaccagcgccatcaagggcctgaagcccaatgccatctacctgttcctggtgcgggccgccaatgcctacggcatcagtgaccccagccagatcagtgaccctgtgaagacccaggatgtgctgcccaccagccagggcgtggaccacaagcaggtgcagcgggagctgggcaatgctgtgctgcacctgcacaaccccaccgtgctgagcagcagcagcattgaggtgcactggacagtggaccagcagagccagtacatccagggctacaagatcctgtaccggcccagcggggccaaccacggggagagtgactggctggtgtttgaggtgaggaccccagccaagaacagcgtggtgatcccagacctgaggaaaggagtgaactatgagatcaaggcccggcccttcttcaatgagttccagggcgctgacagcgagatcaagtttgccaagaccctggaggaggcccccagcgccccaccccagggcgtgacagtgtccaagaatgatggaaatggaacagccatcctggtgtcctggcagcccccacctgaggacacccagaatggcatggtgcaggagtacaaggtgtggtgcctgggcaatgagacccgctaccacatcaacaagacagtggatggcagcaccttctctgtggtgatccccttcctggtgcccggcatccgctacagcgtggaggtggccgccagcactggagctggcagcggcgtgaagtctgagccccagttcatccagctggatgcccacggcaaccctgtgtccccagaggaccaggtgtccctggcccagcagatcagtgatgtggtgaagcagcctgccttcatcgccggcattggagctgcctgctggatcatcctgatggtgttcagcatctggctgtaccgccacaggaagaagagaaatggcctgaccagcacctacgccggcatcaggaaggtgacctaccagagaggaggagaggccgtgtcctctgggggccggcccggcctgctgaacatcagcgagcctgctgcccagccctggctggccgacacctggcccaacacaggcaacaaccacaatgactgcagcatcagctgctgcacagctggaaatggaaacagcgacagcaacctgaccacctacagcaggcctgctgactgcatcgccaactacaacaaccagctggacaacaagcagaccaacctgatgctgcctgagagcacagtgtatggagatgtggacctgagcaacaagatcaatgagatgaagaccttcaacagccccaacctgaaggatggccgctttgtgaaccccagcggccagcccaccccctatgccaccacccagctgatccagagcaacctgagcaacaacatgaacaacggcagcggggacagcggggagaagcactggaagcccctgggccagcagaagcaggaggtggcccctgtgcagtacaacatcgtggagcagaacaagctgaacaaggactaccgggccaatgacacagtgccccccaccatcccctacaaccagagctatgaccagaacacaggaggcagctacaacagcagtgaccggggcagcagcaccagcggcagccagggccacaagaagggggcccggacccccaaggtgcccaagcagggcggcatgaactgggccgacctgctgcccccacctccagcccaccccccaccccacagcaacagcgaggagtacaacatctctgtggatgagagctatgaccaggagatgccctgccctgtgcccccagccaggatgtacctgcagcaggatgagctggaggaggaggaggatgagcggggccccaccccacctgtgagaggagctgccagcagccctgctgctgtgtcctacagccaccagagcacagccaccctgacccccagcccccaggaggagctgcagcccatgctgcaggactgcccagaggagaccggccacatgcagcaccagcctgacagaagacggcagcctgtgtccccacctcctccaccccggcccatcagccccccccacacctacggctacatcagcggccccctggtgtctgacatggacacagatgcccctgaggaggaggaggatgaagctgacatggaggtggccaagatgcagacccggcggctgctgctgcggggcctggagcagaccccagccagctctgtgggggacctggagagctctgtgacaggctccatgatcaatggctggggcagcgccagcgaggaggacaacatcagcagcggccgcagctctgtgagcagcagtgatggcagcttcttcacagatgctgactttgcccaggccgtggccgctgctgctgaatatgccggcctgaaggtggcccggcggcagatgcaggatgctgctggccgccgccacttccacgccagccagtgcccccggcccaccagccctgtgtccacagacagcaacatgtctgctgctgtgatgcagaagaccaggcctgccaagaagctgaagcaccagcccggccacctgcggcgggagacctacacagatgacctgcccccacctcctgtgcccccaccagccatcaagagccccacagcccagagcaagacccagctggaggtgcggcctgtggtggtgcccaagctgcccagcatggatgccaggacagacaggagcagtgacaggaagggcagcagctacaagggccgggaggtgctggatggccggcaggtggtggacatgaggaccaaccctggggacccccgggaggcccaggagcagcagaatgatggcaagggccggggcaacaaggccgccaagagggacctgcccccagccaagacccacctgatccaggaggacatcctgccctactgccggcccaccttccccaccagcaacaacccccgggaccccagcagcagcagctccatgagcagccggggcagcggcagccggcagcgggagcaggccaacgtgggcagaagaaatattgctgagatgcaggtgctgggcggctatgaaagaggagaggacaacaatgaggagctggaggagacagagagctag

SEQ ID NO: 168660 - DNA, 3213 bp, synthetic construct
  misc_feature 1..3213: note = Description of Artificial Sequence: Synthetic coding sequence
  source 1..3213: mol_type = other DNA
atggccaggagacatgagcgggtgaccaggaggatgtggacctgggcccctggcctgctgatgatgacagtggtgttctggggccaccagggcaatggccagggccagggcagccggctgcggcaggaggacttccccccaagaattgtggagcaccccagtgatgtgattgtgtccaagggggagcccaccaccctgaactgcaaggccgagggccggcccacccccaccatcgagtggtacaaggatggagagcgggtggagacagacaaggatgaccccaggagccacaggatgctgctgcccagcggcagcctcttcttcctgagaattgtgcatggaagaagaagcaagccagatgagggcagctatgtgtgtgtggccaggaactacctgggggaggccgtgtccagaaatgccagcctggaggtggccctgctgagagatgacttccggcagaaccccacagatgtggtggtggccgccggggagcccgccatcctggagtgccagcccccccggggccaccctgagcccaccatctactggaagaaggacaaggtgagaattgatgacaaggaggagcgcatcagcatccggggcggcaagctgatgatcagcaacaccaggaagagtgatgctggcatgtacacctgtgtgggcaccaacatggtgggggagcgggacagcgaccctgctgagctgactgtgtttgagcggcccaccttcctgcggcggcccatcaaccaggtggtgctggaggaggaggccgtggagttccgctgccaggtgcagggcgacccccagcccaccgtgcgctggaagaaggatgatgctgacctgccccggggccgctatgacatcaaggatgactacaccctgcgcatcaagaagaccatgagcacagatgagggcacctacatgtgcatcgccgagaacagagtgggcaagatggaggccagcgccaccctgactgtgcggggcggcgtgattgccccaccccagtttgtggtgcggccccgggaccagatcgtggcccagggccgcacagtgaccttcccctgtgagaccaagggcaacccccagcctgctgtgttctggcagaaggagggcagccagaacctgctcttccccaaccagccccagcagcccaacagccgctgcagcgtgagccccactggagacctgaccatcaccaacatccagaggagtgatgctggctactacatctgccaggccctgactgtggccggcagcatcctggccaaggcccagctggaggtgacagatgtgctgacagaccggcccccacccatcatcctgcagggccctgccaaccagaccctggccgtggatggaacagccctgctgaagtgcaaggccaccggggaccccctgcctgtgatctcctggctgaaggagggcttcaccttccctggccgggacccccgggccaccatccaggagcagggcaccctgcagatcaagaacctgcgcatcagtgacaccggcacctacacctgtgtggccaccagcagcagcggggagacctcctggagcgctgtgctggatgtgacagagagcggggccaccatcagcaagaactatgacctgagtgacctgcccggcccccccagcaagccccaggtgacagatgtgaccaagaacagcgtgaccctgtcctggcagcccggcaccccaggcaccctgcctgccagcgcctacatcatcgaggccttcagccagagcgtgagcaacagctggcagacagtggccaaccacgtgaagaccaccctgtacacagtgcggggcctgcggcccaacaccatctacctgttcatggtgcgggccatcaacccccagggcctgagtgaccccagccccatgtctgaccctgtgaggacccaggacatcagccccccagcccagggcgtggaccaccggcaggtgcagaaggagctgggagatgtgctggtgcggctgcacaaccctgtggtgctgacccccaccaccgtgcaggtgacctggacagtggaccggcagccccagttcatccagggctacagagtgatgtaccggcagaccagcggcctgcaggccaccagctcctggcagaacctggatgccaaggtgcccacagagaggtctgctgtgctggtgaacctgaagaagggcgtgacctatgagatcaaggtgcggccctacttcaatgagttccagggcatggacagcgagagcaagacagtgaggaccacagaggaggcccccagcgccccaccccagagcgtgacagtgctgactgtgggcagctacaacagcaccagcatctctgtgtcctgggaccccccacctccagaccaccagaatggcatcatccaggagtacaagatctggtgcctgggcaatgagacccgcttccacatcaacaagacagtggatgctgccatccgcagcgtcatcattggaggcctcttccctggcatccagtacagagtggaggtggccgccagcaccagcgctggggtgggcgtgaagtctgagccccagcccatcatcattggaagaagaaatgaggtggtgatcacagagaacaacaacagcatcacagagcagatcacagatgtggtgaagcagcctgccttcatcgccggcattggaggagcctgctgggtgatcctgatgggcttcagcatctggctgtactggaggaggaagaagaggaagggcctgagcaactatgctgtgaccttccagagaggagatggcggcctgatgagcaatggcagcaggcctggcctgctgaatgctggggaccccagctacccctggctggccgacagctggccagccaccagcctgcctgtgaacaacagcaacagcggccccaatgaaattggcaactttggaagaggagatgtgctgccccctgtgcccggccagggcgacaagacagccaccatgctgagtgatggagccatctacagcagcattgacttcaccaccaagaccagctacaacagcagcagccagatcacccaggccaccccctatgccaccacccagatcctgcacagcaacagcatccacgagctggccgtggacctgcctgacccccagtggaagagcagcatccagcagaagacagacctgatgggcttcggctacagcctgcctgaccagaacaagggcaacaatggagagagcggcagctag

SEQ ID NO: 168661 - DNA, 1713 bp, synthetic construct
  misc_feature 1..1713: note = Description of Artificial Sequence: Synthetic coding sequence
  source 1..1713: mol_type = other DNA
atgagcacagatgagggcacctacatgtgcatcgcagaaaatagagtgggcaagatggaggccagcgccaccctgactgtgcggggcggcgtcatcgccccaccccagtttgtggtgcggccccgggaccagatcgtggcccagggccgcacagtgaccttcccctgtgagaccaagggcaacccccagcctgctgtgttctggcagaaggagggcagccagaacctgctcttccccaaccagccccagcagcccaacagccgctgcagcgtgagccccaccggggacctgaccatcaccaacatccagaggagtgatgctggctactacatctgccaggccctgactgtggccggcagcatcctggccaaggcccagctggaggtgacagatgtgctgacagaccggcccccacccatcatcctgcagggccctgccaaccagaccctggccgtggatggaacagccctgctgaagtgcaaggccactggagaccccctgcccgtcatctcctggctgaaggagggcttcaccttccctggccgggacccccgggccaccatccaggagcagggcaccctgcagatcaagaacctgcgcatcagtgacaccggcacctacacctgtgtggccaccagcagcagtggagagacctcctggagcgctgtgctggatgtgacagaaagtggggccaccatcagcaagaactatgacctgagtgacctgcccggcccccccagcaagccccaggtgacagatgtgaccaagaacagcgtgaccctgtcctggcagcccggcaccccaggcaccctgcctgccagcgcctacatcatcgaggccttcagccagagcgtgagcaacagctggcagacagtggccaaccacgtgaagaccaccctgtacacagtgcggggcctgcggcccaacaccatctacctgttcatggtgcgggccatcaacccccagggcctgagtgaccccagccccatgtctgaccctgtgaggacccaggacatcagccccccagcccagggcgtggaccaccggcaggtgcagaaggagctgggagatgtgctggtgcggctgcacaaccctgtggtgctgacccccaccaccgtgcaggtgacctggacagtggaccggcagccccagttcatccagggctacagagtgatgtaccggcagaccagcggcctgcaggccaccagctcctggcagaacctggatgccaaggtgcccacagagaggtctgctgtgctggtgaacctgaagaagggcgtgacctatgagatcaaggtgcggccctacttcaatgagttccagggcatggattctgagagcaagacagtgaggaccacagaggaggcccccagcgccccaccccagagcgtgacagtgctgactgtgggcagctacaacagcaccagcatctctgtgtcctgggaccccccacctccagaccaccagaatggcatcatccaggagtacaagatctggtgcctgggcaatgagacccgcttccacatcaacaagacagtggatgctgccatccgcagcgtcatcatcggcggcctcttccctggcatccagtacagagtggaggtggccgccagcaccagcgctggggtgggcgtgaagtctgagccccagcccaacaacacaggctaccccatctgccacgacacagacctggccttccagcagcacacctag

SEQ ID NO: 168662 - DNA, 4185 bp, synthetic construct
  misc_feature 1..4185: note = Description of Artificial Sequence: Synthetic coding sequence
  source 1..4185: mol_type = other DNA
atggccaggagacatgagcgggtgaccaggaggatgtggacctgggcccctggcctgctgatgatgacagtggtgttctggggccaccagggcaatggccagggccagggcagccggctgcggcaggaggacttccccccaagaattgtggagcaccccagtgatgtgattgtgtccaagggggagcccaccaccctgaactgcaaggccgagggccggcccacccccaccatcgagtggtacaaggatggagagcgggtggagacagacaaggatgaccccaggagccacaggatgctgctgcccagcggcagcctcttcttcctgagaattgtgcatggaagaagaagcaagccagatgagggcagctatgtgtgtgtggccaggaactacctgggggaggccgtgtccagaaatgccagcctggaggtggccctgctgagagatgacttccggcagaaccccacagatgtggtggtggccgccggggagcccgccatcctggagtgccagcccccccggggccaccctgagcccaccatctactggaagaaggacaaggtgagaattgatgacaaggaggagcgcatcagcatccggggcggcaagctgatgatcagcaacaccaggaagagtgatgctggcatgtacacctgtgtgggcaccaacatggtgggggagcgggacagcgaccctgctgagctgactgtgtttgagcggcccaccttcctgcggcggcccatcaaccaggtggtgctggaggaggaggccgtggagttccgctgccaggtgcagggcgacccccagcccaccgtgcgctggaagaaggatgatgctgacctgccccggggccgctatgacatcaaggatgactacaccctgcgcatcaagaagaccatgagcacagatgagggcacctacatgtgcatcgccgagaacagagtgggcaagatggaggccagcgccaccctgactgtgcgggccccaccccagtttgtggtgcggccccgggaccagatcgtggcccagggccgcacagtgaccttcccctgtgagaccaagggcaacccccagcctgctgtgttctggcagaaggagggcagccagaacctgctcttccccaaccagccccagcagcccaacagccgctgcagcgtgagccccactggagacctgaccatcaccaacatccagaggagtgatgctggctactacatctgccaggccctgactgtggccggcagcatcctggccaaggcccagctggaggtgacagatgtgctgacagaccggcccccacccatcatcctgcagggccctgccaaccagaccctggccgtggatggaacagccctgctgaagtgcaaggccaccggggaccccctgcctgtgatctcctggctgaaggagggcttcaccttccctggccgggacccccgggccaccatccaggagcagggcaccctgcagatcaagaacctgcgcatcagtgacaccggcacctacacctgtgtggccaccagcagcagcggggagacctcctggagcgctgtgctggatgtgacagagagcggggccaccatcagcaagaactatgacctgagtgacctgcccggcccccccagcaagccccaggtgacagatgtgaccaagaacagcgtgaccctgtcctggcagcccggcaccccaggcaccctgcctgccagcgcctacatcatcgaggccttcagccagagcgtgagcaacagctggcagacagtggccaaccacgtgaagaccaccctgtacacagtgcggggcctgcggcccaacaccatctacctgttcatggtgcgggccatcaacccccagggcctgagtgaccccagccccatgtctgaccctgtgaggacccaggacatcagccccccagcccagggcgtggaccaccggcaggtgcagaaggagctgggagatgtgctggtgcggctgcacaaccctgtggtgctgacccccaccaccgtgcaggtgacctggacagtggaccggcagccccagttcatccagggctacagagtgatgtaccggcagaccagcggcctgcaggccaccagctcctggcagaacctggatgccaaggtgcccacagagaggtctgctgtgctggtgaacctgaagaagggcgtgacctatgagatcaaggtgcggccctacttcaatgagttccagggcatggacagcgagagcaagacagtgaggaccacagaggaggcccccagcgccccaccccagagcgtgacagtgctgactgtgggcagctacaacagcaccagcatctctgtgtcctgggaccccccacctccagaccaccagaatggcatcatccaggagtacaagatctggtgcctgggcaatgagacccgcttccacatcaacaagacagtggatgctgccatccgcagcgtcatcattggaggcctcttccctggcatccagtacagagtggaggtggccgccagcaccagcgctggggtgggcgtgaagtctgagccccagcccatcatcattggaagaagaaatgaggtggtgatcacagagaacaacaacagcatcacagagcagatcacagatgtggtgaagcagcctgccttcatcgccggcattggaggagcctgctgggtgatcctgatgggcttcagcatctggctgtactggaggaggaagaagaggaagggcctgagcaactatgctgtgaccttccagagaggagatggcggcctgatgagcaatggcagcaggcctggcctgctgaatgctggggaccccagctacccctggctggccgacagctggccagccaccagcctgcctgtgaacaacagcaacagcggccccaatgaaattggcaactttggaagaggagatgtgctgccccctgtgcccggccagggcgacaagacagccaccatgctgagtgatggagccatctacagcagcattgacttcaccaccaagaccagctacaacagcagcagccagatcacccaggccaccccctatgccaccacccagatcctgcacagcaacagcatccacgagctggccgtggacctgcctgacccccagtggaagagcagcatccagcagaagacagacctgatgggcttcggctacagcctgcctgaccagaacaagggcaacaatggaggcaagggcggcaagaagaagaagaacaagaacagcagcaagccccagaagaacaacggcagcacctgggccaacgtgcccctgcccccacctcctgtgcagcccctgcctggaacagagctggagcactatgctgtggagcagcaggagaatggctatgacagcgacagctggtgcccccccctgcctgtgcagacctacctgcaccagggcctggaggatgagctggaggaggatgatgacagagtgcccaccccacctgtgcggggcgtggccagcagccctgccatcagctttggccagcagagcacagccaccctgacccccagcccccgggaggagatgcagcccatgctgcaggcccacctggatgagctgacccgggcctaccagtttgacatcgccaagcagacctggcacatccagagcaacaaccagcccccccagccccctgtgccccccctgggctacgtgtctggggccctgatcagtgacctggagacagatgtggctgatgatgatgctgatgatgaggaggaggccctggagatcccccggcccctgcgggccctggaccagaccccaggcagctccatggacaacctggacagctctgtgacaggcaaggccttcaccagcagccagaggccccggcccaccagccccttcagcacagacagcaacaccagcgctgccctgagccagagccagaggccccggcccaccaagaagcacaagggcggccgcatggaccagcagcctgccctgccccacagaagagagggcatgacagatgaggaggccctggtgccctacagcaagcccagcttccccagccctgggggccacagcagcagcggcacagccagcagcaagggcagcacaggccccaggaagacagaggtgctgcgggccggccaccagagaaatgccagtgacctgctggacatcggctacatgggcagcaacagccagggccagttcaccggggagctgtag

SEQ ID NO: 168663 - DNA, 4137 bp, synthetic construct
  misc_feature 1..4137: note = Description of Artificial Sequence: Synthetic coding sequence
  source 1..4137: mol_type = other DNA
atgagcctgctgatgttcacccagctgctgctgtgtggcttcctgtatgtgcgggtggatggcagccggctgcggcaggaggacttccccccaagaattgtggagcaccccagtgatgtgattgtgtccaagggggagcccaccaccctgaactgcaaggccgagggccggcccacccccaccatcgagtggtacaaggatggagagcgggtggagacagacaaggatgaccccaggagccacaggatgctgctgcccagcggcagcctcttcttcctgagaattgtgcatggaagaagaagcaagccagatgagggcagctatgtgtgtgtggccaggaactacctgggggaggccgtgtccagaaatgccagcctggaggtggccctgctgagagatgacttccggcagaaccccacagatgtggtggtggccgccggggagcccgccatcctggagtgccagcccccccggggccaccctgagcccaccatctactggaagaaggacaaggtgagaattgatgacaaggaggagcgcatcagcatccggggcggcaagctgatgatcagcaacaccaggaagagtgatgctggcatgtacacctgtgtgggcaccaacatggtgggggagcgggacagcgaccctgctgagctgactgtgtttgagcggcccaccttcctgcggcggcccatcaaccaggtggtgctggaggaggaggccgtggagttccgctgccaggtgcagggcgacccccagcccaccgtgcgctggaagaaggatgatgctgacctgccccggggccgctatgacatcaaggatgactacaccctgcgcatcaagaagaccatgagcacagatgagggcacctacatgtgcatcgccgagaacagagtgggcaagatggaggccagcgccaccctgactgtgcgggccccaccccagtttgtggtgcggccccgggaccagatcgtggcccagggccgcacagtgaccttcccctgtgagaccaagggcaacccccagcctgctgtgttctggcagaaggagggcagccagaacctgctcttccccaaccagccccagcagcccaacagccgctgcagcgtgagccccactggagacctgaccatcaccaacatccagaggagtgatgctggctactacatctgccaggccctgactgtggccggcagcatcctggccaaggcccagctggaggtgacagatgtgctgacagaccggcccccacccatcatcctgcagggccctgccaaccagaccctggccgtggatggaacagccctgctgaagtgcaaggccaccggggaccccctgcctgtgatctcctggctgaaggagggcttcaccttccctggccgggacccccgggccaccatccaggagcagggcaccctgcagatcaagaacctgcgcatcagtgacaccggcacctacacctgtgtggccaccagcagcagcggggagacctcctggagcgctgtgctggatgtgacagagagcggggccaccatcagcaagaactatgacctgagtgacctgcccggcccccccagcaagccccaggtgacagatgtgaccaagaacagcgtgaccctgtcctggcagcccggcaccccaggcaccctgcctgccagcgcctacatcatcgaggccttcagccagagcgtgagcaacagctggcagacagtggccaaccacgtgaagaccaccctgtacacagtgcggggcctgcggcccaacaccatctacctgttcatggtgcgggccatcaacccccagggcctgagtgaccccagccccatgtctgaccctgtgaggacccaggacatcagccccccagcccagggcgtggaccaccggcaggtgcagaaggagctgggagatgtgctggtgcggctgcacaaccctgtggtgctgacccccaccaccgtgcaggtgacctggacagtggaccggcagccccagttcatccagggctacagagtgatgtaccggcagaccagcggcctgcaggccaccagctcctggcagaacctggatgccaaggtgcccacagagaggtctgctgtgctggtgaacctgaagaagggcgtgacctatgagatcaaggtgcggccctacttcaatgagttccagggcatggacagcgagagcaagacagtgaggaccacagaggaggcccccagcgccccaccccagagcgtgacagtgctgactgtgggcagctacaacagcaccagcatctctgtgtcctgggaccccccacctccagaccaccagaatggcatcatccaggagtacaagatctggtgcctgggcaatgagacccgcttccacatcaacaagacagtggatgctgccatccgcagcgtcatcattggaggcctcttccctggcatccagtacagagtggaggtggccgccagcaccagcgctggggtgggcgtgaagtctgagccccagcccatcatcattggaagaagaaatgaggtggtgatcacagagaacaacaacagcatcacagagcagatcacagatgtggtgaagcagcctgccttcatcgccggcattggaggagcctgctgggtgatcctgatgggcttcagcatctggctgtactggaggaggaagaagaggaagggcctgagcaactatgctgtgaccttccagagaggagatggcggcctgatgagcaatggcagcaggcctggcctgctgaatgctggggaccccagctacccctggctggccgacagctggccagccaccagcctgcctgtgaacaacagcaacagcggccccaatgaaattggcaactttggaagaggagatgtgctgccccctgtgcccggccagggcgacaagacagccaccatgctgagtgatggagccatctacagcagcattgacttcaccaccaagaccagctacaacagcagcagccagatcacccaggccaccccctatgccaccacccagatcctgcacagcaacagcatccacgagctggccgtggacctgcctgacccccagtggaagagcagcatccagcagaagacagacctgatgggcttcggctacagcctgcctgaccagaacaagggcaacaatggaggcaagggcggcaagaagaagaagaacaagaacagcagcaagccccagaagaacaacggcagcacctgggccaacgtgcccctgcccccacctcctgtgcagcccctgcctggaacagagctggagcactatgctgtggagcagcaggagaatggctatgacagcgacagctggtgcccccccctgcctgtgcagacctacctgcaccagggcctggaggatgagctggaggaggatgatgacagagtgcccaccccacctgtgcggggcgtggccagcagccctgccatcagctttggccagcagagcacagccaccctgacccccagcccccgggaggagatgcagcccatgctgcaggcccacctggatgagctgacccgggcctaccagtttgacatcgccaagcagacctggcacatccagagcaacaaccagcccccccagccccctgtgccccccctgggctacgtgtctggggccctgatcagtgacctggagacagatgtggctgatgatgatgctgatgatgaggaggaggccctggagatcccccggcccctgcgggccctggaccagaccccaggcagctccatggacaacctggacagctctgtgacaggcaaggccttcaccagcagccagaggccccggcccaccagccccttcagcacagacagcaacaccagcgctgccctgagccagagccagaggccccggcccaccaagaagcacaagggcggccgcatggaccagcagcctgccctgccccacagaagagagggcatgacagatgaggaggccctggtgccctacagcaagcccagcttccccagccctgggggccacagcagcagcggcacagccagcagcaagggcagcacaggccccaggaagacagaggtgctgcgggccggccaccagagaaatgccagtgacctgctggacatcggctacatgggcagcaacagccagggccagttcaccggggagctgtag

SEQ ID NO: 168664 - DNA, 4185 bp, synthetic construct; identical to SEQ ID NO: 168662
  misc_feature 1..4185: note = Description of Artificial Sequence: Synthetic coding sequence
  source 1..4185: mol_type = other DNA

SEQ ID NO: 168665 - DNA, 4161 bp, synthetic construct
  misc_feature 1..4161: note = Description of Artificial Sequence: Synthetic coding sequence
  source 1..4161: mol_type = other DNA
atgctgcgctacctgctgaagaccctgctgcagatgaacctgtttgctgacagcctggccggggacatcagcaacagcagcgagctgctgctgggcttcaacagcagcctggccgccctgaaccacaccctgctgcccccaggggaccccagcctgaatggcagccgggtgggcccagaagatgccatgccccgcatcgtggagcagcccccagacctgctggtgtccagaggagagcccgccaccctgccctgcagagctgagggccggccccggcccaacatcgagtggtacaagaatggagcccgggtggccaccgtgcgggaggacccccgggcccaccggctgctgctgcccagcggggccctcttcttcccccgcatcgtgcacggccggcgggcccggccagatgaaggagtgtacacctgtgtggccaggaactacctgggcgccgccgccagcagaaatgccagcctggaggtggccgtgctgagagatgacttccggcagagccctggaaatgtggtggtggccgtgggggagcctgctgtgctggagtgtgtgcccccccggggccaccctgagcccagcgtgtcctggaggaaggatggagcccggctgaaggaggaggagggccgcatcaccatccggggcggcaagctgatgatgagccacaccctgaagagtgatgctggcatgtatgtgtgtgtggccagcaacatggccggggagcgggagagcgctgctgctgaggtgatggtgctggagcggcccagcttcctgcggcggcctgtgaaccaggtggtgctggctgatgcccctgtgaccttcctgtgtgaggtgaagggggaccccccaccccggctgcgctggaggaaggaggatggagagctgcccaccggccgctatgagatccgcagtgaccacagcctgtggattggacatgtgtctgcagaagatgagggcacctacacctgtgtggctgaaaattctgtgggccgggcagaggccagcggcagcctgtctgtgcacgtgcccccccagctggtgacccagccccaggaccagatggccgcccctggagagagcgtggccttccagtgtgagaccaagggcaaccccccaccagccatcttctggcagaaggagggcagccaggtgctgctcttccccagccagagcctgcagcccaccggccgcttctctgtgagcccccggggccagctgaacatcacagctgtgcagagaggagatgctggctactacgtgtgccaggccgtgtctgtggccggcagcatcctggccaaggccctgctggagatcaagggggccagcctggatggcctgccccctgtgatcctgcagggccctgccaaccagaccctggtgctgggcagctctgtgtggctgccctgccgggtgactggaaacccccagcccagcgtgcgctggaagaaggatggccagtggctgcagggagatgacctgcagttcaagaccatggccaacggcaccctgtacatcgccaacgtgcaggagatggacatgggcttctacagctgtgtggccaagagcagcactggagaggccacctggagcggctggctgaagatgagggaggactggggcgtgtccccagaccccccaacagagcccagcagccccccaggggcccccagccagcctgtggtgacagagatcaccaagaacagcatcaccctgacctggaagcccaacccccagacaggagctgctgtgaccagctatgtgattgaggccttcagccctgctgctggcaacacctggaggacagtggctgatggagtgcagctggagacccacacagtgtctggcctgcagcccaacaccatctacctgttcctggtgcgggctgtgggcgcctggggcctgtctgagcccagccctgtgtctgagcctgtgaggacccaggacagcagccccagcaggcctgtggaggacccctggaggggccagcagggcctggccgaggtggccgtgcggctgcaggagcccatcgtgctgggccccaggaccctgcaggtgtcctggacagtggatggccctgtgcagctggtgcagggcttccgggtgtcctggagggtggccggccctgagggcggctcctggaccatgctggacctgcagagccccagccagcagagcacagtgctgcggggcctgcccccaggcacccagatccagatcaaggtgcaggcccagggccaggagggcctgggcgctgagagcctgtctgtgaccaggagcatccctgaggaggcccccagcggccccccccagggcgtggccgtggccctgggcggagatggcaacagcagcatcaccgtgtcctgggagccccccctgcccagccagcagaatggagtcatcacagagtaccagatctggtgcctgggcaatgaaagccgcttccacctgaacagatctgctgctggctgggcccggagcgccatgctgcggggcctggtgcccggcctgctgtaccgcaccctggtggccgccgccaccagcgctggggtgggcgtgcccagcgcccctgtgctggtgcagctgcccagccccccagacctggagcccggcctggaggtgggcgccggcctggccgtgcggctggcccgggtgctgcgggagcccgccttcctggccggcagcggggccgcctgtggggccctgctgctgggcctgtgtgccgccctgtactggaggaggaagcagaggaaggagctgagccactacacagccagctttgcctacaccccagctgtgtccttcccccacagcgagggcctgagcggggccagcagccggccccccatgggcctgggccctgccccctacagctggctggccgacagctggccccaccccagccgcagccccagcgcccaggagccccggggcagctgctgccccagcaacccagaccctgatgaccgctactacaatgaagctggcatcagcctgtacctggcccagacagcccggggcacagctgcccctggagagggccctgtgtacagcaccatcgaccctgctggggaggagctgcagaccttccatggaggcttcccccagcaccccagcggggacctgggcccctggagccagtatgcccctcctgagtggagccagggcgacagcggggccaagggcggcaaggtgaagctgctgggcaagcctgtgcagatgcccagcctgaactggccagaggccctgcccccacctccacccagctgtgagctgagctgcctggagggccctgaggaggagctggagggcagcagcgagcctgaggagtggtgcccccccatgcctgagaggagccacctgacagagcccagcagcagcggcggctgcctggtgacccccagccggcgggagacccccagccccacccccagctatggccagcagagcacagccaccctgacccccagccccccagaccccccccagcccccaacagacatgccccacctgcaccagatgccccggcgggtgcccctgggccccagcagccccctgtctgtgtcccagcccatgctgggcatccgggaggcccggcctgctggcctgggcgccggccctgctgccagcccccacctgagccccagccctgcccccagcacagccagcagcgcccctggccgcacctggcagggcaatggagagatgaccccacccctgcagggcccccgggcccgcttcaggaagaagcccaaggccctgccctacagaagagagaacagccctggggacctgcccccaccacccctgcccccacctgaggaggaggcctcctgggccctggagctgcgggccgccggctccatgagcagcctggagcgggagaggtctggagagaggaaggctgtgcaggccgtgcccctggccgcccagagggtgctgcacccagatgaggaggcctggctgccctacagccggcccagcttcctgagccggggccagggcaccagcacctgcagcacagctggcagcaacagcagccggggcagcagcagcagccggggcagccggggccctggccgcagccgcagccgcagccagagccgcagccagagccagaggcctggccagaagagaagagaggagcccaggtag

SEQ ID NO: 168666 - DNA, 4095 bp, synthetic construct
  misc_feature 1..4095: note = Description of Artificial Sequence: Synthetic coding sequence
  source 1..4095: mol_type = other DNA
atggagaggcctgaggacagcctgagcctgtggagcctgaacctgagcccccagttcccctgcctgaatgccctgcggcaccccctgagccctggcagccgggtgggcccagaagatgccatgccccgcatcgtggagcagcccccagacctgctggtgtccagaggagagcccgccaccctgccctgcagagctgagggccggccccggcccaacatcgagtggtacaagaatggagcccgggtggccaccgtgcgggaggacccccgggcccaccggctgctgctgcccagcggggccctcttcttcccccgcatcgtgcacggccggcgggcccggccagatgaaggagtgtacacctgtgtggccaggaactacctgggcgccgccgccagcagaaatgccagcctggaggtggccgtgctgagagatgacttccggcagagccctggaaatgtggtggtggccgtgggggagcctgctgtgctggagtgtgtgcccccccggggccaccctgagcccagcgtgtcctggaggaaggatggagcccggctgaaggaggaggagggccgcatcaccatccggggcggcaagctgatgatgagccacaccctgaagagtgatgctggcatgtatgtgtgtgtggccagcaacatggccggggagcgggagagcgctgctgctgaggtgatggtgctggagcggcccagcttcctgcggcggcctgtgaaccaggtggtgctggctgatgcccctgtgaccttcctgtgtgaggtgaagggggaccccccaccccggctgcgctggaggaaggaggatggagagctgcccaccggccgctatgagatccgcagtgaccacagcctgtggattggacatgtgtctgcagaagatgagggcacctacacctgtgtggctgaaaattctgtgggccgggcagaggccagcggcagcctgtctgtgcacgtgcccccccagctggtgacccagccccaggaccagatggccgcccctggagagagcgtggccttccagtgtgagaccaagggcaaccccccaccagccatcttctggcagaaggagggcagccaggtgctgctcttccccagccagagcctgcagcccaccggccgcttctctgtgagcccccggggccagctgaacatcacagctgtgcagagaggagatgctggctactacgtgtgccaggccgtgtctgtggccggcagcatcctggccaaggccctgctggagatcaagggggccagcctggatggcctgccccctgtgatcctgcagggccctgccaaccagaccctggtgctgggcagctctgtgtggctgccctgccgggtgactggaaacccccagcccagcgtgcgctggaagaaggatggccagtggctgcagggagatgacctgcagttcaagaccatggccaacggcaccctgtacatcgccaacgtgcaggagatggacatgggcttctacagctgtgtggccaagagcagcactggagaggccacctggagcggctggctgaagatgagggaggactggggcgtgtccccagaccccccaacagagcccagcagccccccaggggcccccagccagcctgtggtgacagagatcaccaagaacagcatcaccctgacctggaagcccaacccccagacaggagctgctgtgaccagctatgtgattgaggccttcagccctgctgctggcaacacctggaggacagtggctgatggagtgcagctggagacccacacagtgtctggcctgcagcccaacaccatctacctgttcctggtgcgggctgtgggcgcctggggcctgtctgagcccagccctgtgtctgagcctgtgaggacccaggacagcagccccagcaggcctgtggaggacccctggaggggccagcagggcctggccgaggtggccgtgcggctgcaggagcccatcgtgctgggccccaggaccctgcaggtgtcctggacagtggatggccctgtgcagctggtgcagggcttccgggtgtcctggagggtggccggccctgagggcggctcctggaccatgctggacctgcagagccccagccagcagagcacagtgctgcggggcctgcccccaggcacccagatccagatcaaggtgcaggcccagggccaggagggcctgggcgctgagagcctgtctgtgaccaggagcatccctgaggaggcccccagcggccccccccagggcgtggccgtggccctgggcggagatggcaacagcagcatcaccgtgtcctgggagccccccctgcccagccagcagaatggagtcatcacagagtaccagatctggtgcctgggcaatgaaagccgcttccacctgaacagatctgctgctggctgggcccggagcgccatgctgcggggcctggtgcccggcctgctgtaccgcaccctggtggccgccgccaccagcgctggggtgggcgtgcccagcgcccctgtgctggtgcagctgcccagccccccagacctggagcccggcctggaggtgggcgccggcctggccgtgcggctggcccgggtgctgcgggagcccgccttcctggccggcagcggggccgcctgtggggccctgctgctgggcctgtgtgccgccctgtactggaggaggaagcagaggaaggagctgagccactacacagccagctttgcctacaccccagctgtgtccttcccccacagcgagggcctgagcggggccagcagccggccccccatgggcctgggccctgccccctacagctggctggccgacagctggccccaccccagccgcagccccagcgcccaggagccccggggcagctgctgccccagcaacccagaccctgatgaccgctactacaatgaagctggcatcagcctgtacctggcccagacagcccggggcacagctgcccctggagagggccctgtgtacagcaccatcgaccctgctggggaggagctgcagaccttccatggaggcttcccccagcaccccagcggggacctgggcccctggagccagtatgcccctcctgagtggagccagggcgacagcggggccaagggcggcaaggtgaagctgctgggcaagcctgtgcagatgcccagcctgaactggccagaggccctgcccccacctccacccagctgtgagctgagctgcctggagggccctgaggaggagctggagggcagcagcgagcctgaggagtggtgcccccccatgcctgagaggagccacctgacagagcccagcagcagcggcggctgcctggtgacccccagccggcgggagacccccagccccacccccagctatggccagcagagcacagccaccctgacccccagccccccagaccccccccagcccccaacagacatgccccacctgcaccagatgccccggcgggtgcccctgggccccagcagccccctgtctgtgtcccagcccatgctgggcatccgggaggcccggcctgctggcctgggcgccggccctgctgccagcccccacctgagccccagccctgcccccagcacagccagcagcgcccctggccgcacctggcagggcaatggagagatgaccccacccctgcagggcccccgggcccgcttcaggaagaagcccaaggccctgccctacagaagagagaacagccctggggacctgcccccaccacccctgcccccacctgaggaggaggcctcctgggccctggagctgcgggccgccggctccatgagcagcctggagcgggagaggtctggagagaggaaggctgtgcaggccgtgcccctggccgcccagagggtgctgcacccagatgaggaggcctggctgccctacagccggcccagcttcctgagccggggccagggcaccagcacctgcagcacagctggcagcaacagcagccggggcagcagcagcagccggggcagccggggccctggccgcagccgcagccgcagccagagccgcagccagagccagaggcctggccagaagagaagagaggagcccaggtag

SEQ ID NO: 168667 - DNA, 450 bp, synthetic construct
  misc_feature 1..450: note = Description of Artificial Sequence: Synthetic coding sequence
  source 1..450: mol_type = other DNA
atgaccccacccctgcagggcccccgggcccgcttcaggaagaagcccaaggccctgccctaccgccgggagaacagccctggggacctgcccccaccacccctgcccccacctgaggaggaggcctcctgggccctggagctgcgggctgctggctccatgagcagcctggagcgggagaggtctggagagaggaaggctgtgcaggccgtgcccctggccgcccagagggtgctgcacccagatgaggaggcctggctgccctacagccggcccagcttcctgagccggggccagggcaccagcacctgcagcacagctggcagcaacagcagccggggcagcagcagcagccggggcagccggggccctggccgcagccgcagccgcagccagagccgcagccagagccagaggcctggccagaagaggcgggaggagcccaggtag

SEQ ID NO: 168668 - DNA, 3024 bp, synthetic construct
  misc_feature 1..3024: note = Description of Artificial Sequence: Synthetic coding sequence
  source 1..3024: mol_type = other DNA
atgggcagcggcggggacagcctgctgggcggccggggcagcctgcccctgctgctgctgctgatcatgggcggcatggcccaggacagccccccccagatcctggtgcacccccaggaccagctgttccagggccctggccctgccaggatgagctgccaggccagcggccagcccccacccaccatccgctggctgctgaatggccagcccctgtccatggtgcccccagacccccaccacctgctgcctgatggcaccctgctgctgctgcagcccccagcccggggccacgcccatgatggccaggccctgagcacagacctgggcgtgtacacctgtgaggccagcaaccggctgggcacagctgtgtccagaggagcccggctgtctgtggccgtgctgcgggaggacttccagatccagccccgggacatggtggccgtggtgggggagcagttcaccctggagtgtggccccccctggggccaccctgagcccaccgtgtcctggtggaaggatggcaagcccctggccctgcagcccggccgccacacagtgtctgggggcagcctgctgatggcccgggcagagaagagtgatgagggcacctacatgtgtgtggccaccaacagcgctggccaccgggagagccgggccgcccgggtgtccatccaggagccccaggactacacagagcctgtggagctgctggccgtgcgcatccagctggagaatgtgaccctgctgaacccagaccctgctgagggccccaagcccaggcctgctgtgtggctgtcctggaaggtgtctggccctgctgccccagcccagagctacacagccctcttccgcacccagacagcccctgggggccagggcgccccctgggccgaggagctgctggccggctggcagagcgctgagctgggcggcctgcactggggccaggactatgagttcaaggtgcggcccagcagcggccgggcccggggccctgacagcaatgtgctgctgctgcggctgcctgagaaggtgcccagcgccccaccccaggaggtgaccctgaagccaggaaatggcaccgtgtttgtgtcctgggtgcccccacctgctgagaaccacaacggcatcatccggggctaccaggtgtggagcctgggcaacaccagcctgcccccagccaactggacagtggtgggggagcagacccagctggagatcgccacccacatgcctggcagctactgtgtgcaggtggccgctgtgactggagctggggccggggagcccagcaggcctgtgtgcctgctgctggagcaggccatggagcgggccacccaggagcccagcgagcacggcccctggaccctggagcagctgcgggccaccctgaagaggcctgaggtgattgccacctgtggggtggccctgtggctgctgctgctgggcacagctgtgtgcatccacagaagaagaagagcccgggtgcacctgggccctggcctgtaccgctacaccagtgaagatgccatcctgaagcacaggatggaccacagcgacagccagtggctggccgacacctggaggagcaccagcggcagccgggacctgagcagcagcagcagcctgagcagccggctgggcgcagatgcccgggaccccctggactgcagaagaagcctgctgtcctgggacagccgcagccctggggtgcccctgctgcctgacaccagcaccttctacggcagcctgattgctgagctgcccagcagcaccccagcccggcccagcccccaggtgcctgctgtgcggcggctgcccccccagctggcccagctgagcagcccctgcagcagcagtgacagcctgtgcagcagaagaggcctgagcagcccccggctgagcctggccccagctgaggcctggaaggccaagaagaagcaggagctgcagcacgccaacagcagccccctgctgcggggcagccacagcctggagctgcgggcctgtgagctgggcaacagaggcagcaagaacctgagccagagccctggagctgtgccccaggccctggtggcctggagggccctgggccccaagctgctgagcagcagcaatgagctggtgaccaggcacctgcccccagcccccctcttcccccatgagaccccacccacccagagccagcagacccagccccctgtggccccccaggcccccagcagcatcctgctgcctgctgcccccatccccatcctgagcccctgcagcccccccagcccccaggccagcagcctgagcggccccagccctgccagcagccggctgagcagcagcagcctgagcagcctgggggaggaccaggacagcgtgctgaccccagaggaggtggccctgtgcctggagctgtctgagggggaggagacccccaggaacagcgtgagccccatgccccgggcccccagcccccccaccacctacggctacatctctgtgcccacagccagcgagttcacagacatgggccgcactggaggcggcgtgggccccaagggcggcgtgctgctgtgccccccccggccctgcctgacccccaccccatctgagggcagcctggccaacggctggggcagcgccagcgaggacaatgctgccagcgcccgggccagcctggtgagcagcagtgatggcagcttcctggctgatgcccactttgcccgggccctggccgtggccgtggacagctttggatttggcctggagccccgggaggccgactgtgtgttcattgatgccagcagcccccccagccccagagatgagatcttcctgacccccaacctgagcctgcccctgtgggagtggaggccagactggctggaggacatggaggtgagccacacccagaggctgggccggggcatgccaccctggcccccagacagccagatcagcagccagaggagccagctgcactgcaggatgcccaaggccggggccagccctgtggactacagctag

SEQ ID NO: 168669 - DNA, 2106 bp, synthetic construct
  misc_feature 1..2106: note = Description of Artificial Sequence: Synthetic coding sequence
  source 1..2106: mol_type = other DNA
atgggcagcggcggggacagcctgctgggcggccggggcagcctgcccctgctgctgctgctgatcatggtgctgcgggaggacttccagatccagccccgggacatggtggccgtggtgggggagcagttcaccctggagtgtggccccccctggggccaccctgagcccaccgtgtcctggtggaaggatggcaagcccctggccctgcagcccggccgccacacagtgtctgggggcagcctgctgatggcccgggcagagaagagtgatgagggcacctacatgtgtgtggccaccaacagcgctggccaccgggagagccgggccgcccgggtgtccatccaggagccccaggactacacagagcctgtggagctgctggccgtgcgcatccagctggagaatgtgaccctgctgaacccagaccctgctgagggccccaagcccaggcctgctgtgtggctgtcctggaaggtgtctggccctgctgccccagcccagagctacacagccctcttccgcacccagacagcccctgggggccagggcgccccctgggccgaggagctgctggccggctggcagagcgctgagctgggcggcctgcactggggccaggactatgagttcaaggtgcggcccagcagcggccgggcccggggccctgacagcaatgtgctgctgctgcggctgcctgagaaggtgcccagcgccccaccccaggaggtgaccctgaagccaggaaatggcaccgtgtttgtgtcctgggtgcccccacctgctgagaaccacaacggcatcatccggggctaccaggtgtggagcctgggcaacaccagcctgcccccagccaactggacagtggtgggggagcagacccagctggagatcgccacccacatgcctggcagctactgtgtgcaggtggccgctgtgactggagctggggccggggagcccagcaggcctgtgtgcctgctgctggagcaggccatggagcgggccacccaggagcccagcgagcacggcccctggaccctggagcagctgcgggccaccctgaagaggcctgaggtgattgccacctgtggggtggccctgtggctgctgctgctgggcacagctgtgtgcatccacagaagaagaagagcccgggtgcacctgggccctggcctgtaccgctacaccagtgaagatgccatcctgaagcacaggatggaccacagcgacagccagtggctggccgacacctggaggagcaccagcggcagccgggacctgagcagcagcagcagcctgagcagccggctgggcgcagatgcccgggaccccctggactgcagaagaagcctgctgtcctgggacagccgcagccctggggtgcccctgctgcctgacaccagcaccttctacggcagcctgattgctgagctgcccagcagcaccccagcccggcccagcccccaggtgcctgctgtgcggcggctgcccccccagctggcccagctgagcagcccctgcagcagcagtgacagcctgtgcagcagaagaggcctgagcagcccccggctgagcctggccccagctgaggcctggaaggccaagaagaagcaggagctgcagcacgccaacagcagccccctgctgcggggcagccacagcctggagctgcgggcctgtgagctgggcaacagaggcagcaagaacctgagccagagccctggagctgtgccccaggccctggtggcctggagggccctgggccccaagctgctgagcagcagcaatgagctggtgaccaggcacctgcccccagcccccctcttcccccatgagaccccacccacccagagccagcagacccagccccctgtggccccccaggcccccagcagcatcctgctgcctgctgcccccatccccatcctgagcccctgcagcccccccagcccccaggccagcagcctgagcggccccagccctgccagcagccggctgagcagcagcagcctgagcagcctgggggaggaccaggacagcgtgctgaccccagaggaggtggccctgtgcctggagctgtctgagggggaggagaccccctag

SEQ ID NO: 168670 - DNA, 2589 bp, synthetic construct
  misc_feature 1..2589: note = Description of Artificial Sequence: Synthetic coding sequence
  source 1..2589: mol_type = other DNA
atggtggccgtggtgggggagcagttcaccctggagtgtggccccccctggggccaccctgagcccaccgtgtcctggtggaaggatggcaagcccctggccctgcagcccggccgccacacagtgtctgggggcagcctgctgatggcccgggcagagaagagtgatgagggcacctacatgtgtgtggccaccaacagcgctggccaccgggagagcagagctgcccgggtgtccatccaggagccccaggactacacagagcctgtggagctgctggccgtgcgcatccagctggagaatgtgaccctgctgaacccagaccctgctgagggccccaagcccaggcctgctgtgtggctgtcctggaaggtgtctggccctgctgccccagcccagagctacacagccctcttccgcacccagacagcccctgggggccagggcgccccctgggccgaggagctgctggccggctggcagagcgctgagctgggcggcctgcactggggccaggactatgagttcaaggtgcggcccagcagcggccgggcccggggccctgacagcaatgtgctgctgctgcggctgcctgagaaggtgcccagcgccccaccccaggaggtgaccctgaagccaggaaatggaacagtgtttgtgtcctgggtgcccccacctgctgagaaccacaacggcatcatccggggctaccaggtgtggagcctgggcaacaccagcctgcccccagccaactggacagtggtgggggagcagacccagctggagatcgccacccacatgcctggcagctactgtgtgcaggtggccgctgtgactggagctggagctggggagcccagcaggcctgtgtgcctgctgctggagcaggccatggagcgggccacccaggagcccagcgagcacggcccctggaccctggagcagctgcgggccaccctgaagaggcctgaggtgattgccacctgtggggtggccctgtggctgctgctgctgggcacagctgtgtgcatccacagaagaagaagagcccgggtgcacctgggccctggcctgtaccgctacaccagtgaagatgccatcctgaagcacaggatggaccacagcgacagccagtggctggccgacacctggaggagcaccagcggcagccgggacctgagcagcagcagcagcctgagcagccggctgggcgcagatgcccgggaccccctggactgccgccgcagcctgctgtcctgggacagccgcagccctggggtgcccctgctgcctgacaccagcaccttctacggcagcctgattgctgagctgcccagcagcaccccagcccggcccagcccccaggtgcctgctgtgcggcggctgcccccccagctggcccagctgagcagcccctgcagcagcagtgacagcctgtgcagccggcggggcctgagcagcccccggctgagcctggccccagctgaggcctggaaggccaagaagaagcaggagctgcagcacgccaacagcagccccctgctgcggggcagccacagcctggagctgcgggcctgtgagctgggcaacagaggcagcaagaacctgagccagagccctggagctgtgccccaggccctggtggcctggagggccctgggccccaagctgctgagcagcagcaatgagctggtgaccaggcacctgcccccagcccccctcttcccccatgagaccccacccacccagagccagcagacccagccccctgtggccccccaggcccccagcagcatcctgctgcctgctgcccccatccccatcctgagcccctgcagcccccccagcccccaggccagcagcctgagcggccccagccctgccagcagccggctgagcagcagcagcctgagcagcctgggggaggaccaggacagcgtgctgaccccagaggaggtggccctgtgcctggagctgtctgagggggaggagaccccaagaaattctgtgagccccatgccccgggcccccagcccccccaccacctacggctacatctctgtgcccacagccagcgagttcacagacatgggccgcactggaggaggagtgggccccaagggcggcgtgctgctgtgccccccccggccctgcctgacccccacccccagcgagggcagcctggccaacggctggggcagcgcctctgaagataatgctgccagcgcccgggccagcctggtgagcagcagtgatggcagcttcctggctgatgcccactttgcccgggccctggccgtggccgtggacagctttggcttcggcctggagccccgggaggccgactgtgtgttcattgatgccagcagcccccccagccccagagatgagatcttcctgacccccaacctgagcctgcccctgtgggagtggaggccagactggctggaggacatggaggtgagccacacccagaggctgggccggggcatgccaccctggcccccagacagccagatcagcagccagaggagccagctgcactgcaggatgcccaaggccggggccagccctgtggactacagctag

SEQ ID NO: 168671 - DNA, 3708 bp, synthetic construct
  misc_feature 1..3708: note = Description of Artificial Sequence: Synthetic coding sequence
  source 1..3708: mol_type = other DNA
atgagcggccccacagatgaaacagctggggacctgcctgtgaaggacaccggcctgaacctgtttggcatgggcggcctgcaggagaccagcaccaccaggaccatgaagagccggcaggccgtgtcccgggtgtcccgggaggagctggaggaccgcttcctgcggctgcatgatgagaacatcctgctgaagcagcacgccaggaagcaggaggacaagatcaagaggatggccaccaagctgatccggctggtgaatgacaagaagagatatgaaagagtgggcggcggccccaagaggctgggcagagatgtggagatggaggagatgattgagcagctgcaggagaaggtgcatgagctggagaagcagaatgagaccctgaagaacagactcatcagcgccaagcagcagctgcagacccagggctaccggcagaccccctacaacaacgtgcagagccgcatcaacacaggaagaaggaaggccaatgaaaatgccggcctgcaggagtgccccaggaagggcatcaagttccaggatgctgatgtggccgagaccccccaccccatgttcaccaagtatggcaacagcctgctggaggaggcccggggggagatccggaacctggagaatgtcatccagagccagaggggccagatcgaggagctggagcacctggccgagatcctgaagacccagctgcggaggaaagaaaatgaaattgagctgagcctgctgcagctgcgggagcagcaggccacagaccagaggagcaacatccgggacaacgtggagatgatcaagctgcacaagcagctggtggagaagagcaatgccctgagcgccatggagggcaagttcatccagctgcaggagaagcagaggaccctgcgcatcagccatgatgccctgatggccaatggagatgagctgaacatgcagctgaaggagcagaggctgaagtgctgcagcctggagaagcagctgcacagcatgaagttcagcgagaggagaattgaggagctgcaggaccgcatcaatgacctggagaaggagcgggagctgctgaaggagaactatgacaagctgtatgacagcgccttctctgctgcccacgaggagcagtggaagctgaaggagcagcagctgaaggtgcagatcgcccagctggagacagccctgaagagtgacctgacagacaagacagagatcctggaccggctgaagacagagcgggaccagaatgagaagctggtgcaggagaaccgggagctgcagctgcagtacctggagcagaagcagcagctggatgagctgaagaagaggatcaagctgtacaaccaggagaatgacatcaatgctgatgagctgtctgaggccctgctgctgatcaaggcccagaaggagcagaagaatggagacctgtccttcctggtgaaggtggacagcgagatcaacaaggacctggagaggtccatgagggagctgcaggccacccatgctgagaccgtgcaggagctggagaagaccaggaacatgctgatcatgcagcacaagatcaacaaggactaccagatggaggtggaggccgtgaccaggaagatggagaacctgcagcaggactatgagctgaaggtggagcagtatgtgcacctgctggacatccgggccgcccgcatccacaagctggaggcccagctgaaggacatcgcctacggcaccaagcagtacaagttcaagccagagatcatgccagatgacagcgtggatgaatttgatgagaccatccacctggagcggggggagaacctgtttgagatccacatcaacaaggtgaccttcagcagcgaggtgctgcaggccagcggggacaaggagcctgtgaccttctgcacctacgccttctatgactttgagctgcagaccacccctgtggtgcggggcctgcaccctgagtacaacttcaccagccagtacctggtgcacgtgaatgacctcttcctgcagtacatccagaagaacaccatcaccctggaggtgcaccaggcctacagcacagaatatgagaccatcgccgcctgccagctgaagttccacgagatcctggagaagagcggccgcatcttctgcacagccagcctgattggcaccaagggggacatccccaactttggcaccgtggagtactggttccggctgcgggtgcccatggaccaggccatccggctgtaccgggagcgggccaaggccctgggctacatcaccagcaacttcaagggccctgagcacatgcagagcctgagccagcaggcccccaagacagcccagctgagcagcacagacagcacagatggcaacctgaatgagctgcacatcaccatccgctgctgcaaccacctgcagagccgggccagccacctgcagccccacccctacgtggtgtacaagttctttgattttgctgaccatgacacagccatcatccccagcagcaatgacccccagtttgatgaccacatgtacttccctgtgcccatgaacatggacctggaccgctacctgaagtctgagagcctgtccttctacgtgtttgatgacagcgacacccaggagaacatctacatcggcaaggtgaatgtgcccctcatcagcctggcccatgaccgctgcatcagcggcatctttgagctgacagaccaccagaagcaccctgctggcaccatccacgtgatcctgaagtggaagtttgcctacctgccccccagcggcagcatcaccacagaggacctgggcaacttcatccgctctgaggagcctgaggtggtgcagaggctgcccccagccagctctgtgtccaccctggtgctggccccccggcccaagccccggcagaggctgacccctgtggacaagaaggtgtcctttgtggacatcatgccccaccagagtgatgtgtcccaggagggctctgtggatgaggtgaaggagaacacagagaagatgcagcagggcaaggatgatgtgtccctgctgtctgagggccagctggccgagcagagcctggccagcagtgaagatgaaacagagatcacagaggacctggagcctgaggtggaggaggacatgtctgccagtgacagtgatgactgcatcatccctggccccatcagcaagaacatcaagcagcccagcgagaagatcagaattgagatcatcgccctgagcctgaatgacagccaggtgaccatggatgacaccatccagaggctgtttgtggagtgccgcttctacagcctgcctgctgaggagacccctgtgtccctgcccaagcccaagagcggccagtgggtgtactacaactacagcaatgtcatctacgtggacaaggagaacaacaaggccaagagggacatcctgaaggccatcctgcagaagcaggagatgcccaacagaagcctgcgcttcaccgtggtgtctgaccccccagaagatgagcaggacctggagtgtgaagatattggagtggcccacgtggacctggccgacatgttccaggagggccgggacctgattgagcagaacattgatgtgtttgatgcccgggcagatggagagggcatcggcaagctgcgggtgacagtggaggccctgcacgccctgcagagcgtgtacaagcagtacagagatgacctggaggcctag

SEQ ID NO: 168672 - DNA, 3948 bp, synthetic construct
  misc_feature 1..3948: note = Description of Artificial Sequence: Synthetic coding sequence
  source 1..3948: mol_type = other DNA
atgagcggccccacagatgaaacagctggggacctgcctgtgaaggacaccggcctgaacctgtttggcatgggcggcctgcaggagaccagcaccaccaggaccatgaagagccggcaggccgtgtcccgggtgtcccgggaggagctggaggaccgcttcctgcggctgcatgatgagaacatcctgctgaagcagcacgccaggaagcaggaggacaagatcaagaggatggccaccaagctgatccggctggtgaatgacaagaagagatatgaaagagtgggcggcggccccaagaggctgggcagagatgtggagatggaggagatgattgagcagctgcaggagaaggtgcatgagctggagaagcagaatgagaccctgaagaacagactcatcagcgccaagcagcagctgcagacccagggctaccggcagaccccctacaacaacgtgcagagccgcatcaacacaggaagaaggaaggccaatgaaaatgccggcctgcaggagtgccccaggaagggcatcaagttccaggatgctgatgtggccgagaccccccaccccatgttcaccaagtatggcaacagcctgctggaggaggcccggggggagatccggaacctggagaatgtcatccagagccagaggggccagatcgaggagctggagcacctggccgagatcctgaagacccagctgcggaggaaagaaaatgaaattgagctgagcctgctgcagctgcgggagcagcaggccacagaccagaggagcaacatccgggacaacgtggagatgatcaagctgcacaagcagctggtggagaagagcaatgccctgagcgccatggagggcaagttcatccagctgcaggagaagcagaggaccctgcgcatcagccatgatgccctgatggccaatggagatgagctgaacatgcagctgaaggagcagaggctgaagtgctgcagcctggagaagcagctgcacagcatgaagttcagcgagaggagaattgaggagctgcaggaccgcatcaatgacctggagaaggagcgggagctgctgaaggagaactatgacaagctgtatgacagcgccttctctgctgcccacgaggagcagtggaagctgaaggagcagcagctgaaggtgcagatcgcccagctggagacagccctgaagagtgacctgacagacaagacagagatcctggaccggctgaagacagagcgggaccagaatgagaagctggtgcaggagaaccgggagctgcagctgcagtacctggagcagaagcagcagctggatgagctgaagaagaggatcaagctgtacaaccaggagaatgacatcaatgctgatgagctgtctgaggccctgctgctgatcaaggcccagaaggagcagaagaatggagacctgtccttcctggtgaaggtggacagcgagatcaacaaggacctggagaggtccatgagggagctgcaggccacccatgctgagaccgtgcaggagctggagaagaccaggaacatgctgatcatgcagcacaagatcaacaaggactaccagatggaggtggaggccgtgaccaggaagatggagaacctgcagcaggactatgagctgaaggtggagcagtatgtgcacctgctggacatccgggccgcccgcatccacaagctggaggcccagctgaaggacatcgcctacggcaccaagcagtacaagttcaagccagagatcatgccagatgacagcgtggatgaatttgatgagaccatccacctggagcggggggagaacctgtttgagatccacatcaacaaggtgaccttcagcagcgaggtgctgcaggccagcggggacaaggagcctgtgaccttctgcacctacgccttctatgactttgagctgcagaccacccctgtggtgcggggcctgcaccctgagtacaacttcaccagccagtacctggtgcacgtgaatgacctcttcctgcagtacatccagaagaacaccatcaccctggaggtgcaccaggcctacagcacagaatatgagaccatcgccgcctgccagctgaagttccacgagatcctggagaagagcggccgcatcttctgcacagccagcctgattggcaccaagggggacatccccaactttggcaccgtggagtactggttccggctgcgggtgcccatggaccaggccatccggctgtaccgggagcgggccaaggccctgggctacatcaccagcaacttcaagggccctgagcacatgcagagcctgagccagcaggcccccaagacagcccagctgagcagcacagacagcacagatggcaacctgaatgagctgcacatcaccatccgctgctgcaaccacctgcagagccgggccagccacctgcagccccacccctacgtggtgtacaagttctttgattttgctgaccatgacacagccatcatccccagcagcaatgacccccagtttgatgaccacatgtacttccctgtgcccatgaacatggacctggaccgctacctgaagtctgagagcctgtccttctacgtgtttgatgacagcgacacccaggagaacatctacatcggcaaggtgaatgtgcccctcatcagcctggcccatgaccgctgcatcagcggcatctttgagctgacagaccaccagaagcaccctgctggcaccatccacgtgatcctgaagtggaagtttgcctacctgccccccagcggcagcatcaccacagaggacctgggcaacttcatccgctctgaggagcctgaggtggtgcagaggctgcccccagccagctctgtgtccaccctggtgctggccccccggcccaagccccggcagaggctgacccctgtggacaagaaggtgtcctttgtggacatcatgccccaccagagtgatgagaccagccccccacctgaggacaggaaggagatcagccctgaggtggagcacatccctgagattgagatcaacatgctgactgtgccccacgtgcccaaggtgtcccaggagggctctgtggatgaggtgaaggagaacacagagaagatgcagcagggcaaggatgatgtgtccctgctgtctgagggccagctggccgagcagagcctggccagcagtgaagatgaaacagagatcacagaggacctggagcctgaggtggaggaggacatgtctgccagtgacagtgatgactgcatcatccctggccccatcagcaagaacatcaagcagagcctggccctgagccctggcctgggctgcagcagcgccatcagcgcccactgcaacttccggctgcccggcagcagtgacttccctgccagcgccagccaggtggatggcatcactggagcctgccaccacacccagcccagcgagaagatcagaattgagatcatcgccctgagcctgaatgacagccaggtgaccatggatgacaccatccagaggctgtttgtggagtgccgcttctacagcctgcctgctgaggagacccctgtgtccctgcccaagcccaagagcggccagtgggtgtactacaactacagcaatgtcatctacgtggacaaggagaacaacaaggccaagagggacatcctgaaggccatcctgcagaagcaggagatgcccaacagaagcctgcgcttcaccgtggtgtctgaccccccagaagatgagcaggacctggagtgtgaagatattggagtggcccacgtggacctggccgacatgttccaggagggccgggacctgattgagcagaacattgatgtgtttgatgcccgggcagatggagagggcatcggcaagctgcgggtgacagtggaggccctgcacgccctgcagagcgtgtacaagcagtacagagatgacctggaggcctag

SEQ ID NO: 168673 - DNA, 1956 bp, synthetic construct
  misc_feature 1..1956: note = Description of Artificial Sequence: Synthetic coding sequence
  source 1..1956: mol_type = other DNA
atggccgcccccctgctgcacacccggctgcctggagatgctgctgccagcagcagcgctgtgaagaagctgggcgccagcaggacaggcatcagcaacatgagggccctggagaatgacttcttcaacagcccccccaggaagacagtgcgctttggaggcaccgtgacagaggtgctgctgaagtacaagaagggggagaccaatgactttgagctgctgaagaaccagctgctggaccctgacatcaaggatgaccagatcatcaactggctgctggagttccgcagcagcatcatgtacctgaccaaggactttgagcagctgatcagcatcatcctgcggctgccctggctgaacagaagccagacagtggtggaggagtacctggccttcctgggcaacctggtgtctgcccagacagtgttcctgcggccctgcctgtccatgattgccagccactttgtgccccccagggtcatcatcaaggagggagatgtggatgtgtctgacagtgatgatgaagatgacaacctgcctgccaactttgacacctgccaccgggccctgcagatcatcgcccgctacgtgcccagcaccccctggttcctgatgcccatcctggtggagaagttcccctttgtgaggaagtctgagaggaccctggagtgctacgtgcacaacctgctgcgcatctctgtgtacttccccaccctgcggcatgagatcctggagctgatcatcgagaagctgctgaagctggatgtgaatgccagccggcagggcattgaagatgctgaggagacagccacccagacctgtggcggcacagacagcacagagggcctcttcaacatggatgaagatgaggagacagagcacgagaccaaggccggccctgagcggctggaccagatggtgcaccctgtggccgagcggctggacatcctgatgagcctggtgctgagctacatgaaggatgtgtgctacgtggatggcaaggtggacaatggcaagaccaaggacctgtacagagacctgatcaacatctttgacaagctgctgctgcccacccacgccagctgccacgtgcagttcttcatgttctacctgtgcagcttcaagctgggctttgctgaggccttcctggagcacctgtggaagaagctgcaggaccccagcaacccagccatcatccggcaggccgccggcaactacatcggcagcttcctggcccgggccaagttcatccccctcatcaccgtgaagagctgcctggacctgctggtgaactggctgcacatctacctgaacaaccaggacagcggcaccaaggccttctgtgatgtggccctgcacggccccttctacagcgcctgccaggccgtgttctacacctttgtgttccgccacaagcagctgctgagcggcaacctgaaggagggcctgcagtacctgcagagcctgaactttgagcgcatcgtgatgagccagctgaaccccctgaagatctgcctgcccagcgtggtgaacttctttgctgccatcaccaacaagtaccagctggtgttctgctacaccatcattgaaagaaacaaccggcagatgctgcccgtcatccgcagcacagctggaggagacagcgtgcagatctgcaccaaccccctggacaccttcttcccctttgacccctgtgtgctgaagaggagcaagaagttcatcgaccccatctaccaggtgtgggaggacatgtctgctgaggagctgcaggagttcaagaagcccatgaagaaggacatcgtggaggatgaagatgatgacttcctgaagggggaggtgccccagaatgacaccgtcatcggcatcacccccagcagctttgacacccacttccgcagccccagcagctctgtgggcagcccccctgtgctgtacatgcagcccagccccctgtag

SEQ ID NO: 168674 - DNA, 1857 bp, synthetic construct
  misc_feature 1..1857: note = Description of Artificial Sequence: Synthetic coding sequence
  source 1..1857: mol_type = other DNA
atgagggccctggagaatgacttcttcaacagcccccccaggaagacagtgcgctttggaggcaccgtgacagaggtgctgctgaagtacaagaagggggagaccaatgactttgagctgctgaagaaccagctgctggaccctgacatcaaggatgaccagatcatcaactggctgctggagttccgcagcagcatcatgtacctgaccaaggactttgagcagctgatcagcatcatcctgcggctgccctggctgaacagaagccagacagtggtggaggagtacctggccttcctgggcaacctggtgtctgcccagaccgtcttcctgcggccctgcctgtccatgattgccagccactttgtgccccccagggtcatcatcaaggagggagatgtggatgtgtctgacagtgatgatgaagatgacaacctgcctgccaactttgacacctgccaccgggccctgcagatcatcgcccgctacgtgcccagcaccccctggttcctgatgcccatcctggtggagaagttcccctttgtgaggaagtctgagaggaccctggagtgctacgtgcacaacctgctgcgcatctctgtgtacttccccaccctgcggcatgagatcctggagctgatcatcgagaagctgctgaagctggatgtgaatgccagccggcagggcattgaagatgctgaggagacagccacccagacctgtggcggcacagacagcacagagggcctcttcaacatggatgaagatgaggagacagaacatgagaccaaggccggccctgagcggctggaccagatggtgcaccctgtggccgagcggctggacatcctgatgagcctggtgctgagctacatgaaggatgtgtgctacgtggatggcaaggtggacaacgggaagaccaaggacctgtacagagacctgatcaacatctttgacaagctgctgctgcccacccacgccagctgccacgtgcagttcttcatgttctacctgtgcagcttcaagctgggctttgctgaggccttcctggagcacctgtggaagaagctgcaggaccccagcaacccagccatcatccggcaggccgccggcaactacatcggcagcttcctggcccgggccaagttcatccccctcatcaccgtgaagagctgcctggacctgctggtgaactggctgcacatctacctgaacaaccaggacagcggcaccaaggccttctgtgatgtggccctgcacggccccttctacagcgcctgccaggccgtgttctacacctttgtgttccgccacaagcagctgctgagcggcaacctgaaggagggcctgcagtacctgcagagcctgaactttgaaagaattgtgatgagccagctgaaccccctgaagatctgcctgcccagcgtggtgaacttctttgctgccatcaccaacaagtaccagctggtgttctgctacaccatcatcgagaggaacaaccggcagatgctgcctgtgatccgcagcacagctggaggagacagcgtgcagatctgcaccaaccccctggacaccttcttcccctttgacccctgtgtgctgaagaggagcaagaagttcatcgaccccatctaccaggtgtgggaggacatgtctgctgaggagctgcaggagttcaagaagcccatgaagaaggacatcgtggaggatgaagatgatgacttcctgaagggggaggtgccccagaatgacacagtgattggcatcacccccagcagctttgacacccacttccgcagccccagcagctctgtgggcagcccccctgtgctgtacatgcagcccagccccctgtag

SEQ ID NO: 168675 - DNA, 1866 bp, synthetic construct
  misc_feature 1..1866: note = Description of Artificial Sequence: Synthetic coding sequence
  source 1..1866: mol_type = other DNA
atggccgcccccctgctgcacacccggctgcctggagatgctgctgccagcagcagcgctgtgaagaagctgggcgccagcaggacaggcatcagcaacatgagggccctggagaatgacttcttcaacagcccccccaggaagacagtgcgctttggaggcaccgtgacagaggtgctgctgaagtacaagaagggggagaccaatgactttgagctgctgaagaaccagctgctggaccctgacatcaagaggctgccctggctgaacagaagccagacagtggtggaggagtacctggccttcctgggcaacctggtgtctgcccagacagtgttcctgcggccctgcctgtccatgattgccagccactttgtgccccccagggtcatcatcaaggagggagatgtggatgtgtctgacagtgatgatgaagatgacaacctgcctgccaactttgacacctgccaccgggccctgcagatcatcgcccgctacgtgcccagcaccccctggttcctgatgcccatcctggtggagaagttcccctttgtgaggaagtctgagaggaccctggagtgctacgtgcacaacctgctgcgcatctctgtgtacttccccaccctgcggcatgagatcctggagctgatcatcgagaagctgctgaagctggatgtgaatgccagccggcagggcattgaagatgctgaggagacagccacccagacctgtggcggcacagacagcacagagggcctcttcaacatggatgaagatgaggagacagagcacgagaccaaggccggccctgagcggctggaccagatggtgcaccctgtggccgagcggctggacatcctgatgagcctggtgctgagctacatgaaggatgtgtgctacgtggatggcaaggtggacaatggcaagaccaaggacctgtacagagacctgatcaacatctttgacaagctgctgctgcccacccacgccagctgccacgtgcagttcttcatgttctacctgtgcagcttcaagctgggctttgctgaggccttcctggagcacctgtggaagaagctgcaggaccccagcaacccagccatcatccggcaggccgccggcaactacatcggcagcttcctggcccgggccaagttcatccccctcatcaccgtgaagagctgcctggacctgctggtgaactggctgcacatctacctgaacaaccaggacagcggcaccaaggccttctgtgatgtggccctgcacggccccttctacagcgcctgccaggccgtgttctacacctttgtgttccgccacaagcagctgctgagcggcaacctgaaggagggcctgcagtacctgcagagcctgaactttgagcgcatcgtgatgagccagctgaaccccctgaagatctgcctgcccagcgtggtgaacttctttgctgccatcaccaacaagtaccagctggtgttctgctacaccatcattgaaagaaacaaccggcagatgctgcccgtcatccgcagcacagctggaggagacagcgtgcagatctgcaccaaccccctggacaccttcttcccctttgacccctgtgtgctgaagaggagcaagaagttcatcgaccccatctaccaggtgtgggaggacatgtctgctgaggagctgcaggagttcaagaagcccatgaagaaggacatcgtggaggatgaagatgatgacttcctgaagggggaggtgccccagaatgacaccgtcatcggcatcacccccagcagctttgacacccacttccgcagccccagcagctctgtgggcagcccccctgtgctgtacatgcagcccagccccctgtag

SEQ ID NO: 168676 - DNA, 1410 bp, synthetic construct
  misc_feature 1..1410: note = Description of Artificial Sequence: Synthetic coding sequence
  source 1..1410: mol_type = other DNA
atgattgccagccactttgtgccccccagggtcatcatcaaggagggagatgtggatgtgtctgacagtgatgatgaagatgacaacctgcctgccaactttgacacctgccaccgggccctgcagatcatcgcccgctacgtgcccagcaccccctggttcctgatgcccatcctggtggagaagttcccctttgtgaggaagtctgagaggaccctggtgaatgccagccggcagggcattgaagatgctgaggagacagccacccagacctgtggcggcacagacagcacagagggcctcttcaacatggatgaagatgaggagacagagcacgagaccaaggccggccctgagcggctggaccagatggtgcaccctgtggccgagcggctggacatcctgatgagcctggtgctgagctacatgaaggatgtgtgctacgtggatggcaaggtggacaatggcaagaccaaggacctgtacagagacctgatcaacatctttgacaagctgctgctgcccacccacgccagctgccacgtgcagttcttcatgttctacctgtgcagcttcaagctgggctttgctgaggccttcctggagcacctgtggaagaagctgcaggaccccagcaacccagccatcatccggcaggccgccggcaactacatcggcagcttcctggcccgggccaagttcatccccctcatcaccgtgaagagctgcctggacctgctggtgaactggctgcacatctacctgaacaaccaggacagcggcaccaaggccttctgtgatgtggccctgcacggccccttctacagcgcctgccaggccgtgttctacacctttgtgttccgccacaagcagctgctgagcggcaacctgaaggagggcctgcagtacctgcagagcctgaactttgagcgcatcgtgatgagccagctgaaccccctgaagatctgcctgcccagcgtggtgaacttctttgctgccatcaccaacaagtaccagctggtgttctgctacaccatcattgaaagaaacaaccggcagatgctgcccgtcatccgcagcacagctggaggagacagcgtgcagatctgcaccaaccccctggacaccttcttcccctttgacccctgtgtgctgaagaggagcaagaagttcatcgaccccatctaccaggtgtgggaggacatgtctgctgaggagctgcaggagttcaagaagcccatgaagaaggacatcgtggaggatgaagatgatgacttcctgaagggggaggtgccccagaatgacaccgtcatcggcatcacccccagcagctttgacacccacttccgcagccccagcagctctgtgggcagcccccctgtgctgtacatgcagcccagccccctgtag

SEQ ID NO: 168677 - DNA, 792 bp, synthetic construct
  misc_feature 1..792: note = Description of Artificial Sequence: Synthetic coding sequence
  source 1..792: mol_type = other DNA
atgaggctgggcctgtgtgtggtggccctggtgctgtcctggacccacctgaccatcagcagccggggcatcaagggcaagaggcagaggcgcatctctgctgagggcagccaggcctgtgccaagggctgtgagctgtgcagcgaggtgaatggctgcctgaagtgcagccccaagctgttcatcctgctggagagaaatgacatccggcaggtgggcgtgtgcctgcccagctgccccccaggctactttgatgccagaaatccagacatgaacaagtgcatcaagtgcaagattgagcactgtgaggcctgcttcagccacaacttctgcaccaagtgcaaggagggcctgtacctgcacaagggccgctgctacccagcctgcccagagggcagcagcgctgccaacggcaccatggagtgcagcagccctgcccagtgtgagatgtctgagtggagcccctggggcccctgcagcaagaagcagcagctgtgtggcttcagaagaggcagcgaggagaggaccaggagagtgctgcacgcccctgtgggggaccacgccgcctgcagcgacaccaaggagacccggcgctgcaccgtgcggcgggtgccctgcccagagggccagaagaggaggaagggcggccagggcagaagagaaaatgccaacagaaacctggccaggaaggagagcaaggaggccggggccggcagcagaagaaggaagggccagcagcagcagcagcagcagggcaccgtgggccccctgaccagcgctggccctgcctag

SEQ ID NO: 168678 - DNA, 792 bp, synthetic construct; identical to SEQ ID NO: 168677
  misc_feature 1..792: note = Description of Artificial Sequence: Synthetic coding sequence
  source 1..792: mol_type = other DNA

SEQ ID NO: 168679 - DNA, 792 bp, synthetic construct; identical to SEQ ID NO: 168677
  misc_feature 1..792: note = Description of Artificial Sequence: Synthetic coding sequence
  source 1..792: mol_type = other DNA

SEQ ID NO: 168680 - DNA, 603 bp, synthetic construct
  misc_feature 1..603: note = Description of Artificial Sequence: Synthetic coding sequence
  source 1..603: mol_type = other DNA
atgaggctgggcctgtgtgtggtggccctggtgctgtcctggacccacctgaccatcagcagccggggcatcaagggcaagaggcagaggcgcatctctgctgagggcagccaggcctgtgccaagggctgtgagctgtgcagcgaggtgaatggctgcctgaagtgcagccccaagctgttcatcctgctggagagaaatgacatccggcaggtgggcgtgtgcctgcccagctgccccccaggctactttgatgccagaaatccagacatgaacaagtgcatcaagtgcaagattgagcactgtgaggcctgcttcagccacaacttctgcaccaagtgcaaggagggcctgtacctgcacaagggccgctgctacccagcctgcccagagggcagcagcgctgccaacggcaccatggagtgcagcagccctggccagaagagaagaaaaggaggccagggccggcgggagaatgccaacagaaacctggccaggaaggagagcaaggaggccggggccggcagcagaagaaggaagggccagcagcagcagcagcagcagggcaccgtgggccccctgaccagcgctggccctgcctag

SEQ ID NO: 168681 - DNA, 711 bp, synthetic construct
  misc_feature 1..711: note = Description of Artificial Sequence: Synthetic coding sequence
  source 1..711: mol_type = other DNA
atgatcttccgggtgtctgctgagggcagccaggcctgtgccaagggctgtgagctgtgcagcgaggtgaatggctgcctgaagtgcagccccaagctgttcatcctgctggagagaaatgacatccggcaggtgggcgtgtgcctgcccagctgccccccaggctactttgatgccaggaacccagacatgaacaagtgcatcaagtgcaagattgagcactgtgaggcctgcttcagccacaacttctgcaccaagtgcaaggagggcctgtacctgcacaagggccgctgctacccagcctgcccagagggcagcagcgctgccaacggcaccatggagtgcagcagccctgcccagtgtgagatgtctgagtggagcccctggggcccctgcagcaagaagcagcagctgtgtggcttccggcggggcagcgaggagaggacccggcgggtgctgcacgcccctgtgggggaccatgctgcctgcagcgacaccaaggagacccggcgctgcaccgtgagaagagtgccctgcccagagggccagaagagaagaaaaggaggccagggccggcgggagaatgccaacagaaacctggccaggaaggagagcaaggaggccggggccggcagcagaagaaggaagggccagcagcagcagcagcagcagggcaccgtgggccccctgaccagcgctggccctgcctag

SEQ ID NO: 168682 - DNA, 732 bp, synthetic construct
  misc_feature 1..732: note = Description of Artificial Sequence: Synthetic coding sequence
  source 1..732: mol_type = other DNA
atgcagttccgcctcttctcctttgccctgatcatcctgaactgcatggactacagccactgccagggcaaccgctggaggaggagcaagagggccagctatgtgagcaaccccatctgcaagggctgcctgagctgcagcaaggacaatggctgcagccgctgccagcagaagctgttcttcttcctgcggcgggagggcatgaggcagtatggagaatgtctgcacagctgccccagcggctactacggccaccgggccccagacatgaacagatgtgcccgctgcagaattgagaactgtgacagctgcttcagcaaggacttctgcaccaagtgcaaggtgggcttctacctgcaccggggccgctgctttgatgaatgtccagatggctttgcccccctggaggagaccatggagtgtgtggagggctgtgaggtgggccactggagcgagtggggcacctgcagcaggaacaacagaacctgtggcttcaagtggggcctggagaccaggacccggcagatcgtgaagaagcctgtgaaggacaccatcctgtgccccaccatcgccgagagccgccgctgcaagatgaccatgaggcactgccctgggggcaagaggacccccaaggccaaggagaagaggaacaagaagaagaagaggaagctgattgagcgggcccaggagcagcacagcgtcttcctggccacagaccgggccaaccagtag

SEQ ID NO: 168683 - DNA, 540 bp, synthetic construct
  misc_feature 1..540: note = Description of Artificial Sequence: Synthetic coding sequence
  source 1..540: mol_type = other DNA
atgcagttccgcctcttctcctttgccctgatcatcctgaactgcatggactacagccactgccagggcaaccgctggaggaggagcaagaggggctgcagaattgagaactgtgacagctgcttcagcaaggacttctgcaccaagtgcaaggtgggcttctacctgcaccggggccgctgctttgatgagtgcccagatggctttgcccccctggaggagaccatggagtgtgtgggctgtgaggtgggccactggagcgagtggggcacctgcagcaggaacaacagaacctgtggcttcaagtggggcctggagaccaggacccggcagatcgtgaagaagcctgtgaaggacaccatcctgtgccccaccatcgccgagagccgccgctgcaagatgaccatgaggcactgccctgggggcaagaggacccccaaggccaaggagaagaggaacaagaagaagaagaggaagctgattgagcgggcccaggagcagcacagcgtcttcctggccacagaccgggccaaccagtag

SEQ ID NO: 168684 - DNA, 540 bp, synthetic construct; identical to SEQ ID NO: 168683
  misc_feature 1..540: note = Description of Artificial Sequence: Synthetic coding sequence
  source 1..540: mol_type = other DNA

SEQ ID NO: 168685 - DNA, 531 bp, synthetic construct
  misc_feature 1..531: note = Description of Artificial Sequence: Synthetic coding sequence
  source 1..531: mol_type = other DNA
atgaggcagtacggggagtgcctgcacagctgccccagcggctactacggccaccgggccccagacatgaacagatgtgcccgctgcagaattgagaactgtgacagctgcttcagcaaggacttctgcaccaagtgcaaggtgggcttctacctgcaccggggccgctgctttgatgagtgcccagatggctttgcccccctggaggagaccatggagtgtgtggagggctgtgaggtgggccactggagcgagtggggcacctgcagcaggaacaacagaacctgtggcttcaagtggggcctggagaccaggacccggcagatcgtgaagaagcctgtgaaggacaccatcctgtgccccaccatcgccgagagccgccgctgcaagatgaccatgaggcactgccctgggggcaagaggacccccaaggccaaggagaagaggaacaagaagaagaagaggaagctgattgaaagagcccaggagcagcacagcgtcttcctggccacagaccgggccaaccagtag

SEQ ID NO: 168686 - DNA, 507 bp, synthetic construct
  misc_feature 1..507: note = Description of Artificial Sequence: Synthetic coding sequence
  source 1..507: mol_type = other DNA
atgaggcagtacggggagtgcctgcacagctgccccagcggctactacggccaccgggccccagacatgaacagatgtgcccgctgcagaattgagaactgtgacagctgcttcagcaaggacttctgcaccaagtgcaaggtgggcttctacctgcaccggggccgctgctttgatgagtgcccagatggctttgcccccctggaggagaccatggagtgtgtggagggctgtgaggtgggccactggagcgagtggggcacctgcagcaggaacaacagaacctgtggcttcaagtggggcctggagaccaggacccggcagatcgtgaagaagcctgtgaaggacaccatcctgtgccccaccatcgccgagagccgccgctgcaagatgaccatgaggcactgccctgggggcaagaggacccccaaggccaaggagaagaggaacaagaagaagaagaggaagctgattgaaagagcccaggagcagcacagcgtcttctag

SEQ ID NO: 168687 - DNA, 270 bp, synthetic construct
  misc_feature 1..270: note = Description of Artificial Sequence: Synthetic coding sequence
  source 1..270: mol_type = other DNA
atgaggcagtacggggagtgcctgcacagctgccccagcggctactacggccaccgggccccagacatgaacagatgtgcccgctgcagaattgagaactgtgacagctgcttcagcaaggacttctgcaccaagtgcaaggtgggcttctacctgcaccggggccgctgctttgatgagtgcccagatggctttgcccccctggaggagaccatggagtgtgtggagggctgtgaggtgggccactggagcgagtggggcacctgctag

SEQ ID NO: 168688 - DNA, 366 bp, synthetic construct
  misc_feature 1..366: note = Description of Artificial Sequence: Synthetic coding sequence
  source 1..366: mol_type = other DNA
atgcagttccgcctcttctcctttgccctgatcatcctgaactgcatggactacagccactgccagggcaaccgctggaggaggagcaagagggccagctatgtgagcaaccccatctgcaagggctgcctgagctgcagcaaggacaatggctgcagccgctgccagcagaagctgttcttcttcctgcggcgggagggcatgaggcagtatggagaatgtctgcacagctgccccagcggctactacggccaccgggccccagacatgaacagatgtgcccgctgcagaattgagaactgtgacagctgcttcagcaaggacttctgcaccaagtgcaaggtgggcttctacctgcacaggtag

SEQ ID NO: 168689 - DNA, 234 bp, synthetic construct
  misc_feature 1..234: note = Description of Artificial Sequence: Synthetic coding sequence
  source 1..234: mol_type = other DNA
atgcagttccgcctcttctcctttgccctgatcatcctgaactgcatggactacagccactgccagggcaaccgctggaggaggagcaagagggccagctatgtgagcaaccccatctgcaagggctgcctgagctgcagcaaggacaatggctgcagccgctgccagcagaagctgttcttcttcctgcggcgggagggcatgaggcagtatggagaatgtctgcacagctag

SEQ ID NO: 168690 - DNA, 1410 bp, synthetic construct
  misc_feature 1..1410: note = Description of Artificial Sequence: Synthetic coding sequence
  source 1..1410: mol_type = other DNA
atggccttcctgatgcacctgctggtgtgtgtgtttggcatgggctcctgggtgaccatcaatggcctgtgggtggagctgcccctgctggtgatggagctgcctgagggctggtacctgcccagctacctgactgtggtgatccagctggccaacatcggccccctgctggtgaccctgctgcaccacttccggcccagctgcctgtctgaggtgcccatcatcttcaccctgctgggcgtgggcaccgtgacctgcatcatctttgccttcctgtggaacatgacctcctgggtgctggatggccaccacagcatcgccttcctggtgctgaccttcttcctggccctggtggactgcaccagctctgtgaccttcctgcccttcatgagccggctgcccacctactacctgaccaccttctttgtgggggagggcctgagcggcctgctgcctgccctggtggccctggcccagggcagcggcctgaccacctgtgtgaatgtgacagagatcagtgacagcgtgcccagccctgtgcccacccgggagacagacatcgcccagggcgtgccccgggccctggtgtctgccctgcccggcatggaggcccccctgagccacctggagagccgctacctgcctgcccacttcagccccctggtgttcttcctgctgctgagcatcatgatggcctgctgcctggtggccttctttgtgctgcagaggcagccccgctgctgggaggcctctgtggaggacctgctgaatgaccaggtgaccctgcacagcatccggccccgggaggagaatgacctgggccctgctggcaccgtggacagcagccagggccagggctacctggaggagaaggccgccccctgctgcccagcccacctggccttcatctacaccctggtggcctttgtgaatgccctgaccaacggcatgctgcccagcgtgcagacctacagctgcctgtcctatggccctgtggcctaccacctggccgccaccctgagcatcgtggccaaccccctggccagcctggtgtccatgttcctgcccaacagaagcctgctcttcctgggcgtgctgtctgtgctgggcacctgctttggaggctacaacatggccatggctgtgatgagcccctgccccctgctgcagggccactggggcggggaggtgctgattgtggcctcctgggtgctcttcagcggctgcctgtcctatgtgaaggtgatgctgggcgtggtgctgcgggacctgagccgcagcgccctgctgtggtgtggggctgctgtgcagctgggcagcctgctgggcgccctgctgatgttccccctggtgaatgtgctgcggctcttcagcagcgctgacttctgcaacctgcactgcccagcctag

SEQ ID NO: 168691 - DNA, 519 bp, synthetic construct
  misc_feature 1..519: note = Description of Artificial Sequence: Synthetic coding sequence
  source 1..519: mol_type = other DNA
atgagggcccccctgtgcctgctgctgctggtggcccatgctgtggacatgctggccctgaacagaaggaagaagcaggtgggcaccggcctgggcggcaactgcaccggctgcatcatctgcagcgaggagaatggctgcagcacctgccagcagaggctcttcctgttcatcagaagagagggcatccggcagtatggcaagtgcctgcatgactgccccccaggctacttcggcatccggggccaggaggtgaaccgctgcaagaagtgtggggccacctgtgagagctgcttcagccaggacttctgcatccgctgcaagaggcagttctacctgtacaagggcaagtgcctgcccacctgccccccaggcaccctggcccaccagaacacccgggagtgccaggagaggagccctggccagaagaagggcaggaaggacagaagacccaggaaggacaggaagctggaccggcggctggatgtgcggccccggcagcccggcctgcagccctag

SEQ ID NO: 168692 - DNA, 2133 bp, synthetic construct
  misc_feature 1..2133: note = Description of Artificial Sequence: Synthetic coding sequence
  source 1..2133: mol_type = other DNA
atgaggggccgcctgtgtgtgggccgggctgctgctgctgctgctgctgtggccgtgcccctggccggcggccaggagggcagccctgggggcggcagaagaggcagccggggcaccaccatggtgaagaagaggaagggccgggtggtgattgacagcgacacagaggacagcggcagtgatgagaacctggaccaggagctgctgagcctggccaagaggaagagaagtgacagcgaggagaaggagccccctgtgtcccagcctgctgccagcagtgacagcgagaccagtgacagtgatgatgagtggaccttcggcagcaacaagaacaagaagaagggcaaggccaggaagattgagaagaagggcaccatgaagaagcaggccaacaagacagccagcagcggcagcagtgacaaggacagcagcgctgagagcagcgcccctgaggagggggaggtgtctgacagcgacagcaacagcagcagcagcagcagtgacagcgacagcagcagtgaagatgaggagttccatgatggctacggggaggacctgatgggagatgaagaagatcgggcccggctggagcagatgacagagaaggagcgggagcaggagctgttcaaccgcatcgagaagcgggaggtgctgaagagaagatttgagatcaagaagaagctgaagacagccaagaagaaggagaagaaggagaagaagaagaagcaggaggaggagcaggagaagaagaagctgacccagatccaggagagccaggtgaccagccacaacaaggagaggaggagcaagagagatgagaagctggacaagaagagccaggccatggaggagctgaaggccgagcgggagaagaggaagaacagaacagctgagctgctggccaagaagcagcccctgaagaccagcgaggtgtacagtgatgatgaggaggaggaggaggatgacaagagcagcgagaagagtgacaggagcagcaggaccagcagcagtgatgaggaggaggagaaggaggagatcccccccaagagccagcctgtgtccctgcctgaggagctgaacagagtgcggctgagccgccacaagctggagcgctggtgccacatgcccttctttgccaagacagtgacaggctgctttgtgagaattggaattggcaaccacaacagcaagcctgtgtacagagtggccgagatcaccggggtggtggagacagccaaggtgtaccagctgggcggcaccaggaccaacaagggcctgcagctgcggcacggcaatgaccagagggtcttccggctggagtttgtgagcaaccaggagttcacagagagcgagttcatgaagtggaaggaggccatgttttctgctggcatgcagctgcccaccctggatgagatcaacaagaaggagctgagcatcaaggaggccctgaactacaagttcaatgaccaggacatcgaggagatcgtgaaggagaaggagcgcttcaggaaggccccacccaactatgccatgaagaagacccagctgctgaaggagaaggccatggccgaggacctgggggaccaggacaaggccaagcagatccaggaccagctgaatgagctggaggagcgggcagaggccctggaccggcagaggaccaagaacatcagcgccatctcctacatcaaccagaggaaccgggagtggaacatcgtggagagcgagaaggccctggtggccgagagccacaacatgaagaaccagcagatggaccccttcacccggcggcagtgcaagcccaccatcgtgagcaacagccgggaccctgctgtgcaggccgccatcctggcccagctgaatgccaagtatggcagcggcgtgctgcctgatgcccccaaggagatgagcaagggccagggcaaggacaaggacctgaacagcaagagcgccagtgacctgtctgaggacctcttcaaggtgcatgactttgatgtgaagattgacctgcaggtgcccagcagcgagagcaaggccctggccatcaccagcaaggcccccccagccaaggatggagcccccaggaggagcctgaacctggaggactacaagaagaggcggggcctcatctag

SEQ ID NO: 168693 - DNA, 4551 bp, synthetic construct
  misc_feature 1..4551: note = Description of Artificial Sequence: Synthetic coding sequence
  source 1..4551: mol_type = other DNA
atggacagcccccccaagctgaccggggagaccctgattgtgcaccacatccccctggtgcactgccaggtgcctgaccggcagtgctgcggcggggccggcggcggcggcggcagcacccggcccaaccccttctgccccccagagctgggcatcacccagcctgaccaggacctgggccaggccgacagcctgctcttcagcagcctgcacagcacccctgggggcacagcccggagcattgacagcaccaagagccgcagcagagatggccggggccctggggcccccaagaggcacaaccccttcctgctgcaggagggcgtgggggagcccggcctgggggacctgtatgatgacagcatcggggacagcgccacccagcagagcttccacctgcacggcaccggccagcccaacttccacctgagcagcttccagctgcccccatctggcccccgggtgggccggccctggggcaccaccaggagccgggccggcgtggtggagggccaggagcaggagcctgtgatgaccctggacacccagcagtgtggcaccagccactgctgcaggcctgagctggaggccgagaccatggagctggatgaatgtggcggccctgggggcagcggcagcggcggcggggccagtgacaccagcggcttctcctttgaccaggagtggaagctgagcagtgatgagagccccaggaaccctggctgcagcggcagcggggaccagcactgccgctgcagcagcaccagcagccagagcgaggccgctgaccagagcatgggctacgtgtctgacagcagctgcaacagcagtgatggagtgctggtgaccttcagcaccctgtacaacaagatgcacggcaccccccgggccaacctgaacagcgccccccagagctgcagcgacagcagcttctgcagccacagcgaccccggggccttctacctggacctgcagcccagcccctttgagagcaagatgtcctatgagagccaccaccctgagagcggcggccgggagggcggctacggctgcccccacgccagcagccctgagctggatgccaactgcaacagctaccggccccactgtgagccctgcccagctgtggccgacctgacagcctgcttccagagccaggcccggctggtggtggccacccagaactactacaagctggtgacctgtgacctgagcagccagagcagccccagccctgctggcagcagcatcaccagctgcagcgaggagcacaccaagatcagccccccacctggccctggccctgaccccggccccagccagcccagcgagtactacctgttccagaagccagaggtgcagcctgaggagcaggaggccgtgagcagcagcacccaggccgctgctgctgtgggccccaccgtgctggagggccaggtgtacaccaacaccagcccccccaacctgagcacaggccggcagaggagccgctcctatgacaggagcctgcagaggagcccccctgtgcggctgggcagcctggagaggatgctgagctgccctgtgcggctgtctgagggccctgctgccatggccggccctggcagccccccaagaagagtgaccagctttgctgagctggccaagggcaggaagaagacaggaggcagcggcagcccccccctgcgggtgtctgtgggggacagcagccaggagttcagccccatccaggaggcccagcaggacagaggagcccccctggatgagggcacctgctgcagccacagcctgccccccatgcccctgggccctggcatggacctgctgggccctgaccccagccccccctggagcacccaggtgtgccagggcccccacagcagcgagatgcctcctgctggcctgcgggccaccggccagggccccctggcccagctgatggaccccggccctgccctgcccggcagccctgccaacagccacacccagagagatgcccgggcccgggcagatggcggcggcacagagagcaggcctgtgctgcgctacagcaaggagcagaggcccaccaccctgcccatccagccctttgtgttccagcaccacttccccaagcagctggccaaggcccgggccctgcacagcctgagccagctgtacagcctgagcggctgcagcaggacccagcagcctgcccccctggccgccccagctgcccaggtgtctgtgcctgcccccagcggggagccccaggccagcaccccccgggccaccggccgcggggccaggaaggccggcagcgagcctgagaccagccggcccagccccctgggcagctacagccccatccgctctgtgggccccttcggccccagcacagacagcagcgccagcaccagctgcagccccccacctgagcagcccacagccacagagagcctgcccccctggagccacagctgccccagcgctgtgcggcctgccaccagccagcagccccagaaggaggaccagaagatcctgaccctgacagagtaccgcctgcatggaacaggcagcctgccccccctgggctcctggaggagcggcctgagcagagctgagagcctggcccggggcggcggggagggctccatggccacccggcccagcaatgccaaccacctgagcccccaggccctgaagtggagggagtacagaaggaagaaccccctgggccccccaggcctgagcggcagcctggaccggcgcagccaggaggcccggctggcccggaggaaccccatctttgagttccctggcagcctgtctgctgccagccacctgaactgccgcctgaatggccaggccgtgaagcccctgcccctgacctgcccagacttccaggaccccttcagcctgacagagaagcccccagctgagttctgcctgagcccagatggcagcagcgaggccatcagcattgacctgctgcagaagaagggcctggtgaaggctgtgaacattgctgtggacctgattgtggcccacttcggcaccagccgggaccccggggtgaaggccaagctgggcaacagctctgtgagccccaacgtgggccacctggtgctgaagtacctgtgcccagctgtgcgggctgtgctggaggatggcctgaaggcctttgtgctggatgtgatcatcggccagaggaagaacatgccctggagcgtggtggaggccagcacccagctgggccccagcaccaaggtgctgcacggcctgtacaacaaggtgtcccagtttcctgagctgaccagccacaccatgaggttcaatgccttcatcctgggcctgctgaacatccgcagcctggagttctggttcaaccacctgtacaaccacgaggacatcatccagacccactaccagccctggggcttcctgtctgctgcccacacagtgtgccccggcctgtttgaggagctgctgctgctgctgcagcccctggccctgctgcccttcagcctggacctgctcttccagcaccggctgctgcagagcggccagcagcagaggcagcacaaggagctgctgcgggtgtcccaggacctgctgctgagcgcccacagcaccctgcagctggcccgggcccggggccaggagggccctggagatgtggacagagctgcccagggcgagcgggtgaagggcgtgggcgccagcgagggcggggaggaggaggaggaggaggaggagacagaggaggtggccgaggccgccggcggcagcggccgggcccgctgggcccggggcggccaggccggctggtggtaccagctgatgcagagcagccaggtgtacattgatggcagcattgagggcagccgcttcccccggggcagcagcaacagcagcagcgagaagaagaagggggccggcggcggcggccccccccaggcccccccaccccgggagggcgtggtggagggcgctgaggcctgcccagccagcgaggaggccctgggccgggagcggggctggcccttctggatgggcagccccccagattctgtgctggccgagctgcggcgcagccgggagcgggagggccctgctgccagccctgcagaaaatgaggagggcgccagcgagcccagccctgggggcatcaagtggggccacctgtttggcagcaggaaggcccagcgggaggcccggcccaccaaccggctgcccagcgactggctgagcctggacaagtccatgttccagctggtggcccagacagtgggcagcagaagagagcctgagcccaaggagagcctgcaggagccccacagccctgccctgcccagcagccccccctgtgaggtgcaggccctgtgccaccacctggccactggacctggccagctgtccttccacaagggggacatcctgcgggtgctgggccgggccggcggggactggctgcgctgcagccggggcccagattctggcctggtgcccctggcctacgtgaccctgacccccacccccagccccaccccaggcagcagccagaactag

SEQ ID NO: 168694 - DNA, 4551 bp, synthetic construct; identical to SEQ ID NO: 168693
  misc_feature 1..4551: note = Description of Artificial Sequence: Synthetic coding sequence
  source 1..4551: mol_type = other DNA

SEQ ID NO: 168695 - DNA, 2775 bp, synthetic construct
  misc_feature 1..2775: note = Description of Artificial Sequence: Synthetic coding sequence
  source 1..2775: mol_type = other DNA
atggacagcccccccaagctgaccggggagaccctgattgtgcaccacatccccctggtgcactgccaggtgcctgaccggcagtgctgcggcggggccggcggcggcggcggcagcacccggcccaaccccttctgccccccagagctgggcatcacccagcctgaccaggacctgggccaggccgacagcctgctcttcagcagcctgcacagcacccctgggggcacagcccggagcattgacagcaccaagagccgcagcagagatggccggggccctggggcccccaagaggcacaaccccttcctgctgcaggagggcgtgggggagcccggcctgggggacctgtatgatgacagcatcggggacagcgccacccagcagagcttccacctgcacggcaccggccagcccaacttccacctgagcagcttccagctgcccccatctggcccccgggtgggccggccctggggcaccaccaggagccgggccggcgtggtggagggccaggagcaggagcctgtgatgaccctggacacccagcagtgtggcaccagccactgctgcaggcctgagctggaggccgagaccatggagctggatgaatgtggcggccctgggggcagcggcagcggcggcggggccagtgacaccagcggcttctcctttgaccaggagtggaagctgagcagtgatgagagccccaggaaccctggctgcagcggcagcggggaccagcactgccgctgcagcagcaccagcagccagagcgaggccgctgaccagagcatgggctacgtgtctgacagcagctgcaacagcagtgatggagtgctggtgaccttcagcaccctgtacaacaagatgcacggcaccccccgggccaacctgaacagcgccccccagagctgcagcgacagcagcttctgcagccacagcgaccccggggccttctacctggacctgcagcccagcccctttgagagcaagatgtcctatgagagccaccaccctgagagcggcggccgggagggcggctacggctgcccccacgccagcagccctgagctggatgccaactgcaacagctaccggccccactgtgagccctgcccagctgtggccgacctgacagcctgcttccagagccaggcccggctggtggtggccacccagaactactacaagctggtgacctgtgacctgagcagccagagcagccccagccctgctggcagcagcatcaccagctgcagcgaggagcacaccaagatcagccccccacctggccctggccctgaccccggccccagccagcccagcgagtactacctgttccagaagccagaggtgcagcctgaggagcaggaggccgtgagcagcagcacccaggccgctgctgctgtgggccccaccgtgctggagggccaggtgtacaccaacaccagcccccccaacctgagcacaggccggcagaggagccgctcctatgacaggagcctgcagaggagcccccctgtgcggctgggcagcctggagaggatgctgagctgccctgtgcggctgtctgagggccctgctgccatggccggccctggcagccccccaagaagagtgaccagctttgctgagctggccaagggcaggaagaagacaggaggcagcggcagcccccccctgcgggtgtctgtgggggacagcagccaggagttcagccccatccaggaggcccagcaggacagaggagcccccctggatgagggcacctgctgcagccacagcctgccccccatgcccctgggccctggcatggacctgctgggccctgaccccagccccccctggagcacccaggtgtgccagggcccccacagcagcgagatgcctcctgctggcctgcgggccaccggccagggccccctggcccagctgatggaccccggccctgccctgcccggcagccctgccaacagccacacccagagagatgcccgggcccgggcagatggcggcggcacagagagcaggcctgtgctgcgctacagcaaggagcagaggcccaccaccctgcccatccagccctttgtgttccagcaccacttccccaagcagctggccaaggcccgggccctgcacagcctgagccagctgtacagcctgagcggctgcagcaggacccagcagcctgcccccctggccgccccagctgcccaggtgtctgtgcctgcccccagcggggagccccaggccagcaccccccgggccaccggccgcggggccaggaaggccggcagcgagcctgagaccagccggcccagccccctgggcagctacagccccatccgctctgtgggccccttcggccccagcacagacagcagcgccagcaccagctgcagccccccacctgagcagcccacagccacagagagcctgcccccctggagccacagctgccccagcgctgtgcggcctgccaccagccagcagccccagaaggaggaccagaagatcctgaccctgacagagtaccgcctgcatggaacaggcagcctgccccccctgggctcctggaggagcggcctgagcagagctgagagcctggcccggggcggcggggagggctccatggccacccggcccagcaatgccaaccacctgagcccccaggccctgaagtggagggagtacagaaggaagaaccccctgggccccccaggcctgagcggcagcctggaccggcgcagccaggaggccaggactggatag

SEQ ID NO: 168696 - DNA, 591 bp, synthetic construct
  misc_feature 1..591: note = Description of Artificial Sequence: Synthetic coding sequence
  source 1..591: mol_type = other DNA
atgtccatgctgcggctgcagaagaggctggccagctctgtgctgcgctgtgggaagaagaaggtgtggctggaccccaatgagaccaatgagatcgccaatgccaacagccggcagcagatcaggaagctgatcaaggatggcctcatcatcaggaagcctgtgacagtgcacagccgggcccgctgcaggaagaacaccctggcccggaggaagggccgccacatgggcatcggcaagaggaagggcacagccaatgccaggatgcctgagaaggtgacctggatgaggaggatgaggatcctgcggcggctgctgcggcgctaccgggagagcaagaagattgacagacacatgtaccacagcctgtacctgaaggtgaagggaaatgtgttcaagaacaagaggatcctgatggagcacatccacaagctgaaggctgacaaggccaggaagaagctgctggccgaccaggccgaggcccggcgcagcaagaccaaggaggccaggaagaggcgggaggagcggctgcaggccaagaaggaggagatcatcaagaccctgagcaaggaggaggagaccaagaagtag

SEQ ID NO: 168697 - DNA, 1341 bp, synthetic construct
  misc_feature 1..1341: note = Description of Artificial Sequence: Synthetic coding sequence
  source 1..1341: mol_type = other DNA
atggaggccagctttgtgcagaccaccatggccctgggcctgagcagcaagaaggccagcagcagaaatgtggccgtggagaggaagaacctgatcaccgtgtgccgcttctctgtgaagaccctgctggagaagtacacagctgagcccattgatgacagcagcgaggagtttgtgaactttgctgccatcctggagcagatcctgagccaccgcttcaaggcctgtgccccagctggccctgtgtcctggttcagcagtgatggccagaggggcttctgggactacatccggctggcctgcagcaaggtgcccaacaactgtgtgagcagcattgagaacatggagaacatcagcacagcccgggccaagggccgggcctggatccgggtggccctgatggagaagaggatgtctgagtacatcaccacagccctgcgggacaccaggaccacccggcgcttctatgacagcggggccatcatgctgagagatgaggccaccatcctgaccggcatgctgattggcctgagcgccatcgacttctccttctgcctgaagggggaggtgctggatggcaagacccctgtggtgattgactacaccccctacctgaagttcacccagagctatgactacctgacagatgaggaggagcggcacagcgctgagagcagcaccagcgaggacaacagccctgagcacccctacctgcccctggtgacagatgaggacagctggtacagcaagtggcacaagatggagcagaagttccgcatcgtgtatgcccagaagggctacctggaggagctggtgcggctgcgggagagccagctgaaggacctggaggctgaaaatagaaggctgcagctgcagctggaggaggccgccgcccagaaccagcgggagaagcgggagctggagggcgtcatcctggagctgcaggagcagctgaccggcctcatccccagcgaccacgcccccctggcccagggcagcaaggagctgaccacccccctggtgaaccagtggcccagcctgggcaccctgaatggagctgagggcgccagcaacagcaagctgtacagaagacacagcttcatgagcacagagcccctgtctgctgaggccagcctgagcagtgacagccagaggctgggggagggcaccagagatgaggagccctggggccccatcggcaaggaccccacccccagcatgctgggcctgtgtggcagcctggccagcatccccagctgcaagagcctggccagcttcaagagcaatgaatgtctggtgtctgacagccctgagggcagccctgccctgagccccagctag

SEQ ID NO: 168698 - DNA, 1371 bp, synthetic construct
  misc_feature 1..1371: note = Description of Artificial Sequence: Synthetic coding sequence
  source 1..1371: mol_type = other DNA
atgaagattgaggaggtgaagagcaccaccaagacccagagaattgccagccacagccacgtgaagggcctgggcctggatgaaagtggcctggccaagcaggccgccagcggcctggtgggccaggagaatgcccgggaggcctgtggggtcatcgtggagctgatcaagagcaagaagatggccggccgggctgtgctgctggccggccccccaggcaccgggaagacagccctggccctggccatcgcccaggagctgggcagcaaggtgcccttctgccccatggtgggcagcgaggtgtacagcacagagatcaagaagacagaggtgctgatggagaacttcagaagagccatcggcctgcgcatcaaggagaccaaggaggtgtatgaaggagaggtgacagagctgaccccctgtgaaacagagaaccccatgggcggctacggcaagaccatcagccacgtgatcatcggcctgaagacagccaagggcaccaagcagctgaagctggaccccagcatctttgagagcctgcagaaggagcgggtggaggccggagatgtgatctacatcgaggccaacagcggggctgtgaagaggcagggccgctgtgacacctacgccacagaatttgacctggaggccgaggagtatgtgcccctgcccaagggagatgtgcacaagaagaaggagatcatccaggatgtgaccctgcatgacctggatgtggccaatgcccggccccagggcggccaggacatcctgtccatgatgggccagctgatgaagcccaagaagacagagatcacagacaagctgcggggggagatcaacaaggtggtgaacaagtacatcgaccagggcattgctgagctggtgcctggggtgctgtttgtggatgaggtgcacatgctggacatcgagtgcttcacctacctgcaccgggccctggagagcagcatcgcccccatcgtcatctttgccagcaacagaggcaactgtgtgatccggggcacagaggacatcaccagcccccacggcatccccctggacctgctggacagagtgatgatcatccgcaccatgctgtacaccccccaggagatgaagcagatcatcaagatccgggcccagacagagggcatcaacatcagcgaggaggccctgaaccacctgggggagatcggcaccaagaccaccctgcgctacagcgtgcagctgctgaccccagccaacctgctggccaagatcaacgggaaggacagcattgagaaggagcacgtggaggagatcagcgagctgttctatgatgccaagagcagcgccaagatcctggccgaccagcaggacaagtacatgaagtag

SEQ ID NO: 168699 - DNA, 1161 bp, synthetic construct
  misc_feature 1..1161: note = Description of Artificial Sequence: Synthetic coding sequence
  source 1..1161: mol_type = other DNA
atgaagattgaggaggtgaagagcaccaccaagacccagagaattgccagccacagccacgtgaagggcctgggcctggatgaaagtggcctggccaagcaggccgccagcggcctggtgggccaggagaatgcccgggaggcctgtggggtcatcgtggagctgatcaagagcaagaagatggccggccgggctgtgctgctggccggccccccaggcaccgggaagacagccctggccctggccatcgcccaggagctgggcagcaaggtgcccttctgccccatggtgggcagcgaggtgtacagcacagagatcaagaagacagaggtgctgatggagaacttcagaagagccatcggcctgcgcatcaaggagaccaaggaggtgtatgaaggagaggtgacagagctgaccccctgtgaaacagagaaccccatgggcggctacggcaagaccatcagccacgtgatcatcggcctgaagacagccaagggcaccaagcagctgaagctggaccccagcatctttgagagcctgcagaaggagcgggtggaggccggagatgtgatctacatcgaggccaacagcggggctgtgaagaggcagggccgctgtgacacctacgccacagaatttgacctggaggccgaggagtatgtgcccctgcccaagggagatgtgcacaagaagaaggagatcatccaggatgtgaccctgcatgacctggatgtggccaatgcccggccccagggcggccaggacatcctgtccatgatgggccagctgatgaagcccaagaagacagagatcacagacaagctgcggggggagatcaacaaggtggtgaacaagtacatcgaccagggcattgctgagctggtgcctggggtgctgtttgtggatgaggtgcacatgctggacatcgagtgcttcacctacctgcaccgggccctggagagcagcatcgcccccatcgtcatctttgccagcaacagaggcaactgtgtgatccggggcacagaggacatcaccagcccccacggcatccccctggacctgctggacagagtgatgatcatccgcaccatgctgtacaccccccaggagatgaagcaggtgctgtctgctgctgctgaccccggccagctggcctgctag

SEQ ID NO: 168700 - DNA, 2502 bp, synthetic construct; identical to SEQ ID NO: 160204
  misc_feature 1..2502: note = Description of Artificial Sequence: Synthetic coding sequence
  source 1..2502: mol_type = other DNA

SEQ ID NO: 168701 - DNA, 1257 bp, synthetic construct
  misc_feature 1..1257: note = Description of Artificial Sequence: Synthetic coding sequence
  source 1..1257: mol_type = other DNA
atggtgggccagctggccgcccggcgggctgctggggtggtgctggagatgatccgggagggcaagattgctggccgggctgtgctgattgctggccagcccggcaccgggaagacagccatcgccatgggcatggcccaggccctgggccctgacacccccttcaccgccatcgccggcagcgagatcttcagcctggagatgagcaagacagaggccctgacccaggccttcagaagaagcattggagtgcgcatcaaggaggagacagagatcattgaaggagaggtggtggagatccagattgacaggcctgccactggaacaggcagcaaggtgggcaagctgaccctgaagaccacagagatggagaccatctatgacctgggcaccaagatgattgagagcctgaccaaggacaaggtgcaggccggagatgtgatcaccatcgacaaggccaccgggaagatcagcaagctgggccgctccttcacccgggcccgggactatgatgccatgggcagccagaccaagtttgtgcagtgcccagatggagagctgcagaagaggaaggaggtggtgcacacagtgtccctgcacgagattgatgtgatcaacagcaggacccagggcttcctggccctcttcagcggggacaccggggagatcaagtctgaggtgcgggagcagatcaatgccaaggtggccgagtggagggaggagggcaaggccgagatcatccctggggtgctcttcattgatgaggtgcacatgctggacatcgagagcttctccttcctgaacagagccctggagagtgacatggcccctgtgctgatcatggccaccaacagaggcatcacccgcatccggggcaccagctaccagagcccccacggcatccccatcgacctgctggaccggctgctgattgtgtccaccaccccctacagcgagaaggacaccaagcagatcctgcgcatccgctgtgaggaggaggatgtggagatgtctgaagatgcctacacagtgctgacccgcatcggcctggagaccagcctgcgctatgccatccagctgatcacagctgccagcctggtgtgcaggaagaggaagggcacagaggtgcaggtggatgacatcaagagggtgtacagcctcttcctggatgagagccgcagcacccagtacatgaaggagtaccaggatgccttcctgttcaatgagctgaagggggagaccatggacaccagctag

SEQ ID NO: 168702 - DNA, 1392 bp, synthetic construct; identical to SEQ ID NO: 151237
  misc_feature 1..1392: note = Description of Artificial Sequence: Synthetic coding sequence
  source 1..1392: mol_type = other DNA

SEQ ID NO: 168703 - DNA, 15102 bp, synthetic construct
  misc_feature 1..15102: note = Description of Artificial Sequence: Synthetic coding sequence
  source 1..15102: mol_type = other DNA
atgggagatgctgaaggagaagatgaggtgcagttcctgaggacagatgatgaggtggtgctgcagtgcagcgccaccgtgctgaaggagcagctgaagctgtgcctggccgctgagggctttggaaaccggctgtgcttcctggagcccaccagcaatgcccagaatgtgcccccagacctggccatctgctgctttgtgctggagcagagcctgtctgtgcgggccctgcaggagatgctggccaacacagtggaggccggcgtggagagcagccagggcggcggccacaggaccctgctgtatggccacgccatcctgctgcggcatgcccacagcaggatgtacctgagctgcctgaccaccagccgctccatgacagacaagctggcctttgatgtgggcctgcaggaggatgccactggagaggcctgctggtggaccatgcacccagccagcaagcagaggtctgagggggagaaggtgcgggtgggagatgacatcatcctggtgtctgtgtcctctgagcgctacctgcacctgagcacagccagcggggagctgcaggtggatgccagcttcatgcagaccctgtggaacatgaaccccatctgcagccgctgtgaggagggctttgtgactggaggccacgtgctgcggctcttccacggccacatggatgagtgcctgaccatcagccctgctgacagtgatgaccagaggcggctggtgtactatgagggcggcgctgtgtgcacccacgcccggagcctgtggaggctggagcccctgcgcatctcctggagcggcagccacctgcgctggggccagcccctgcgggtgagacatgtgaccaccggccagtacctggccctgacagaggaccagggcctggtggtggtggatgccagcaaggcccacaccaaggccaccagcttctgcttccgcatcagcaaggagaagctggatgtggcccccaagagagatgtggagggcatgggccccccagagatcaagtacggggagagcctgtgctttgtgcagcacgtggccagcggcctgtggctgacctatgctgccccagaccccaaggccctgcggctgggcgtgctgaagaagaaggccatgctgcaccaggagggccacatggatgatgccctgagcctgacccgctgccagcaggaggagagccaggccgccaggatgatccacagcaccaacggcctgtacaaccagttcatcaagagcctggacagcttcagcggcaagccccggggcagcggccccccagctggaacagccctgcccattgaaggagtcatcctgagcctgcaggacctgatcatctactttgagcccccatctgaggacctgcagcacgaggagaagcagagcaagctgcggagcctgaggaaccggcagagcctcttccaggaggagggcatgctgtccatggtgctgaactgcatcgaccggctgaatgtgtacaccacagctgcccactttgctgagtttgctggggaggaggccgctgagagctggaaggagatcgtgaacctgctgtatgagctgctggccagcctcatccggggcaacagaagcaactgtgccctcttcagcaccaacctggactggctggtgtccaagctggaccggctggaggccagcagcggcatcctggaggtgctgtactgtgtgctgattgagagccctgaggtgctgaacatcatccaggagaaccacatcaagagcatcatcagcctgctggacaagcacggcaggaaccacaaggtgctggatgtgctgtgcagcctgtgtgtgtgcaatggagtggccgtgcgcagcaaccaggacctgatcacagagaacctgctgcccggccgggagctgctgctgcagaccaacctgatcaactacgtgaccagcatccggcccaacatctttgtgggccgggcagagggcaccacccagtacagcaagtggtactttgaggtgatggtggatgaggtgacccccttcctgacagcccaggccacccacctgcgggtgggctgggccctgacagagggctacaccccctacccaggagctggggagggctggggcggcaatggagtgggagatgacctgtacagctatggctttgatggcctgcacctgtggacaggccacgtggcccggcctgtgaccagccctggccagcacctgctggccccagaagatgtgatcagctgctgcctggacctgtctgtgcccagcatctccttccgcatcaatggctgccctgtgcagggcgtgtttgagagcttcaacctggatggcctcttcttccctgtggtgtccttctctgctggggtgaaggtgcgcttcctgctgggcggccgccacggggagttcaagttcctgcccccacctggctacgccccctgccatgaagctgtgctgccccgggagcggctgcacctggagcccatcaaggagtacagaagagagggcccccggggcccccacctggtgggccccagccgctgcctgagccacacagactttgtgccctgccctgtggacacagtgcagatcgtgctgcccccccacctggagcgcatccgggagaagctggccgagaacatccacgagctgtgggccctgacccgcatcgagcagggctggacctacggccctgtgagagatgacaacaagaggctgcacccctgcctggtggacttccacagcctgcctgagcctgagaggaactacaacctgcagatgtctggagagaccctgaagaccctgctggccctgggctgccacgtgggcatggctgatgagaaggccgaggacaacctgaagaagaccaagctgcccaagacctacatgatgagcaatggctacaagccagcccccctggacctgagccacgtgcggctgaccccagcccagaccaccctggtggaccggctggctgaaaatggccacaacgtgtgggcccgggacagagtgggccagggctggagctacagcgctgtgcaggacatcccagcccggaggaacccccggctggtgccctaccgcctgctggatgaggccaccaagaggagcaacagagacagcctgtgccaggccgtgaggaccctgctgggctacggctacaacatcgagcccccagaccaggagcccagccaggtggagaaccagagccgctgtgacagagtgcgcatcttccgggcagagaagagctacacagtgcagagcggccgctggtactttgaatttgaagctgtgaccaccggggagatgagggtgggctgggcccggcctgagctgcggccagatgtggagctgggcgcagatgagctggcctacgtgttcaacggccaccggggccagcgctggcacctgggcagcgagcccttcggccggccctggcagcctggagatgtggtgggctgcatgattgacctgacagagaacaccatcatcttcaccctgaatggagaggtgctgatgtctgacagcggcagcgagacagccttccgggagattgaaattggagatggcttcctgcctgtgtgcagcctgggccctggccaggtgggccacctgaacctgggccaggatgtgagcagcctgcgcttctttgccatctgtggcctgcaggagggctttgagccctttgccatcaacatgcagaggcctgtgaccacctggttcagcaagggcctgccccagtttgagcctgtgcccctggagcacccccactatgaggtgtcccgggtggatggcaccgtggacaccccaccctgcctgcggctgacccacaggacctggggcagccagaacagcctggtggagatgctgttcctgcggctgagcctgcctgtgcagttccaccagcacttccgctgcacagctggggccacccccctggcccctcctggcctgcagcccccagcagaagatgaggcccgggctgctgagccagaccctgactatgagaacctgcggcgctctgctgggggctggagcgaggctgaaaatggcaaggagggcacagccaaggagggcgcccctgggggcaccccccaggccggcggggaggcccagcctgcccgggcagaaaatgagaaggatgccaccacagagaagaacaagaagaggggcttcctgttcaaggccaagaaggtggccatgatgacccagcccccagccacccccaccctgccccggctgccccatgatgtggtgcctgctgacaacagagatgatcctgagatcatcctgaacaccaccacctactactacagcgtgcgggtgtttgctggccaggagcccagctgtgtgtgggccggctgggtgaccccagactaccaccagcacgacatgagctttgacctgagcaaggtgcgggtggtgacagtgaccatgggagatgagcagggcaatgtgcacagcagcctgaagtgcagcaactgctacatggtgtggggcggggactttgtgtccccaggccagcagggccgcatcagccacacagacctggtgattggctgcctggtggacctggccaccggcctgatgaccttcaccgccaacgggaaggagagcaacaccttcttccaggtggagcccaacaccaagctgtttcctgctgtgtttgtgctgcccacccaccagaatgtcatccagtttgagctgggcaagcagaagaacatcatgcccctgtctgctgccatgttccagagcgagaggaagaacccagccccccagtgccccccccggctggagatgcagatgctgatgcctgtgtcctggagcaggatgcccaaccacttcctgcaggtggagaccaggagagctggggagcggctgggctgggccgtgcagtgccaggagcccctgaccatgatggccctgcacatcccagaagaaaatcgctgcatggacatcctggagctgtctgagcggctggacctgcagcgcttccacagccacaccctgcggctgtacagagctgtgtgtgccctgggcaacaacagagtggcccacgccctgtgcagccacgtggaccaggcccagctgctgcacgccctggaggatgcccacctgcccggccccctgcgggccggctactatgacctgctgatcagcatccacctggagagcgcctgccgcagccgccgctccatgctgtctgagtacatcgtgcccctgaccccagagacccgggccatcaccctcttccccccaggccgcagcacagaaaatggccaccccaggcatggcctgcccggggtgggcgtgaccaccagcctgcggcccccccaccacttcagccccccctgctttgtggccgccctgcctgctgctggagctgctgaggccccagcccggctgagccctgccatccccctggaggccctgcgggacaaggccctgaggatgctgggggaggccgtgagagatggcggccagcacgcccgggaccctgtgggcggctctgtggagttccagtttgtgcctgtgctgaagctggtgtccaccctgctggtgatgggcatctttggagatgaagatgtgaagcagatcctgaagatgattgagcctgaggtgttcacagaggaggaggaggaggaggatgaggaggaggagggggaggaggaggatgaggaggagaaggaggaggatgaggaggagacagcccaggagaaggaggatgaggagaaggaggaggaggaggccgctgagggggagaaggaggagggcctggaggagggcctgctgcagatgaagctgcctgagagcgtgaagctgcagatgtgccacctgctggagtacttctgtgaccaggagctgcagcaccgggtggagagcctggccgcctttgctgagagatatgtggacaagctgcaggccaaccagaggagccgctatggcctgctgatcaaggccttctccatgacagctgctgagacagcccggaggacccgggagttccgcagccccccccaggagcagatcaacatgctgctgcagttcaaggatggaacagatgaggaggactgccccctgcctgaggagatccggcaggacctgctggacttccaccaggacctgctggcccactgcggcatccagctggatggagaggaggaggagcctgaggaggagaccaccctgggcagccggctgatgagcctgctggagaaggtgcggctggtgaagaagaaggaggagaagccagaggaggagaggtctgctgaggagagcaagcccaggagcctgcaggagctggtgagccacatggtggtgcgctgggcccaggaggactttgtgcagagccctgagctggtgcgggccatgttcagcctgctgcaccggcagtatgatggcctgggggagctgctgcgggccctgccccgggcctacaccatcagccccagctctgtggaggacaccatgagcctgctggagtgcctgggccagatccgcagcctgctgattgtgcagatgggcccccaggaggagaacctgatgatccagagcatcggcaacatcatgaacaacaaggtgttctaccagcaccccaacctgatgagggccctgggcatgcatgagaccgtgatggaggtgatggtgaatgtgctgggcggcggggagagcaaggagatccgcttccccaagatggtgaccagctgctgccgcttcctgtgctacttctgccgcatcagccggcagaaccagaggtccatgtttgaccacctgagctacctgctggagaacagcggcatcggcctgggcatgcagggcagcacccccctggatgtggccgccgcctctgtgattgacaacaatgagctggccctggccctgcaggagcaggacctggagaaggtggtgtcctacctggccggctgcggcctgcagagctgccccatgctggtggccaagggctacccagacatcggctggaacccctgtggcggggagcgctacctggacttcctgcgctttgctgtgtttgtgaatggagagagcgtggaggagaatgccaacgtggtggtgcggctgctgatcaggaagccagagtgcttcggccctgccctgcggggggagggcggcagcggcctgctggccgccatcgaggaggccatccgcatcagcgaggaccctgccagagatggccctggcatccggcgggacagaagaagagagcactttggagaggagcccccagaagaaaatagagtgcacctgggccacgccatcatgtccttctatgctgccctgattgacctgctgggccgctgtgcccctgagatgcacctgatccaggccgggaaaggagaggccctgcgcatccgggccatcctgcggagcctggtgcccctggaggacctggtgggcatcatcagcctgcccctgcagatccccaccctgggcaaggatggagccctggtgcagcccaagatgtctgccagctttgtgcctgaccacaaggcctccatggtgctcttcctggacagagtgtatggaattgagaaccaggacttcctgctgcacgtgctggatgtgggcttcctgcctgacatgagagctgctgccagcctggacacagccaccttcagcaccacagagatggccctggccctgaaccgctacctgtgcctggccgtgctgcccctcatcaccaagtgtgcccccctgtttgctggaacagagcaccgggccatcatggtggacagcatgctgcacacagtgtaccgcctgagccggggccgcagcctgaccaaggcccagagagatgtgattgaggactgcctgatgagcctgtgccgctacatccggcccagcatgctgcagcacctgctgcggcggctggtgtttgatgtgcccatcctgaatgaatttgccaagatgcccctgaagctgctgaccaaccactatgagcgctgctggaagtactactgcctgcccaccggctgggccaactttggagtgaccagcgaggaggagctgcacctgaccaggaagctgttctggggcatctttgacagcctggcccacaagaagtatgaccctgagctgtacaggatggccatgccctgcctgtgtgccatcgccggggccctgcccccagactatgtggatgccagctacagcagcaaggccgagaagaaggccaccgtggatgctgagggcaactttgaccccaggcctgtggagaccctgaatgtcatcatccctgagaagctggacagcttcatcaacaagtttgctgagtacacccatgagaagtgggcctttgacaagatccagaacaactggagctatggagaaaatattgatgaggagctgaagacccaccccatgctgcggccctacaagaccttcagcgagaaggacaaggagatctaccgctggcccatcaaggagagcctgaaggccatgattgcctgggagtggaccatcgagaaggcccgggagggggaggaggagaagacagagaagaagaagaccaggaagatcagccagagcgcccagacctatgacccccgggagggctacaacccccagcccccagacctgtctgctgtgaccctgagccgggagctgcaggccatggccgagcagctggccgagaactaccacaacacctggggcaggaagaagaagcaggagctggaggccaagggcggcggcacccaccccctgctggtgccctatgacaccctgacagccaaggagaaggcccgggaccgggagaaggcccaggagctgctgaagttcctgcagatgaatggctatgctgtgacccggggcctgaaggacatggagctggacagcagcagcattgagaagagatttgccttcggcttcctgcagcagctgctgcgctggatggacatcagccaggagttcatcgcccacctggaggccgtggtgagcagcggccgggtggagaagagcccccatgagcaggagatcaagttctttgccaagatcctgctgcccctcatcaaccagtacttcaccaaccactgcctgtacttcctgagcaccccagccaaggtgctgggcagcggcggccacgccagcaacaaggagaaggagatgatcaccagcctcttctgcaagctggccgccctggtgcgccaccgggtgtccctgtttggaacagatgccccagctgtggtgaactgcctgcacatcctggcccggagcctggatgccaggacagtgatgaagagcggccctgagatcgtgaaggccggcctgcggagcttctttgagagcgcctctgaagatattgagaagatggtggagaacctgcggctgggcaaggtgtcccaggcccggacccaggtgaagggcgtgggccagaacctgacctacaccaccgtggccctgctgcctgtgctgaccaccctcttccagcacatcgcccagcaccagtttggagatgatgtgatcctggatgatgtgcaggtgtcctgctaccgcaccctgtgcagcatctacagcctgggcaccaccaagaacacctacgtggagaagctgcggcctgccctgggggagtgcctggcccggctggccgccgccatgcctgtggccttcctggagccccagctgaatgagtacaatgcctgcagcgtgtacaccaccaagagcccccgggagcgggccatcctgggcctgcccaacagcgtggaggagatgtgcccagacatccctgtgctggagcggctgatggctgacattggaggcctggccgagagcggggcccgctacacagagatgccccacgtgattgagatcaccctgcccatgctgtgcagctacctgccccgctggtgggagcggggccctgaggccccacccagcgccctgcctgctggggcccccccaccctgcacagctgtgaccagtgaccacctgaacagcctgctgggcaacatcctgcgcatcatcgtgaacaacctgggcattgatgaggcctcctggatgaagaggctggccgtgtttgcccagcccatcgtgtcccgggcccggcctgagctgctgcagagccacttcatccccaccatcggccgcctgaggaagagagctgggaaggtggtgtctgaggaggagcagctgcggctggaggccaaggccgaggcccaggagggggagctgctggtgagagatgagttctctgtgctgtgccgggacctgtatgccctgtaccccctgctgatccgctacgtggacaacaacagagcccagtggctgacagagcccaaccccagcgctgaggagctgttcaggatggtgggggagatcttcatctactggagcaagagccacaacttcaagcgggaggagcagaactttgtggtgcagaatgagatcaacaacatgtccttcctgacagctgacaacaagagcaagatggccaagagcggcggcagtgaccaggagaggaccaagaagaagagaagaggagaccgctacagcgtgcagaccagcctgattgtggccaccctgaagaagatgctgcccatcggcctgaacatgtgtgcccccacagaccaggacctgatcaccctggccaagaccaggtatgccctgaaggacacagatgaggaggtgcgggagttcctgcacaacaacctgcacctgcagggcaaggtggagggcagccccagcctgcgctggcagatggccctgtacagaggagtgcccggccgggaggaggatgctgatgatcctgagaagatcgtgagaagagtgcaggaggtgtctgctgtgctgtactacctggaccagacagagcacccctacaagagcaagaaggctgtgtggcacaagctgctgagcaagcagaggcggcgggctgtggtggcctgcttcaggatgacccccctgtacaacctgcccacccaccgggcctgcaacatgttcctggagagctacaaggccgcctggatcctgacagaggaccacagctttgaggacaggatgattgatgacctgagcaaggccggggagcaggaggaggaggaggaggaggtggaggagaagaagccagaccccctgcaccagctggtgctgcacttcagcaggacagccctgacagagaagagcaagctggatgaggactacctgtacatggcctatgctgacatcatggccaagagctgccacctggaggagggcggagaaaatggagaggccgaggaggaggtggaggtgtcctttgaggagaagcagatggagaagcagaggctgctgtaccagcaggcccggctgcacaccagaggagctgctgagatggtgctgcagatgatcagcgcctgcaagggggagaccggggccatggtgagcagcaccctgaagctgggcatcagcatcctgaatggaggaaatgctgaggtgcagcagaagatgctggactacctgaaggacaagaaggaggtgggcttcttccagagcatccaggccctgatgcagacctgcagcgtgctggacctgaatgcctttgagcggcagaacaaggccgagggcctgggcatggtgaatgaagatggcaccgtcatcaaccggcagaatggagagaaggtgatggctgatgatgagttcacccaggacctcttccgcttcctgcagctgctgtgtgagggccacaacaatgacttccagaactacctgcggacccagacaggcaacaccaccaccatcaacatcatcatctgcaccgtggactacctgctgcggctgcaggagagcatcagtgacttctactggtactacagcggcaaggatgtgattgaggagcagggcaagaggaacttcagcaaggccatgtctgtggccaagcaggtgttcaacagcctgacagagtacatccagggcccctgcaccggcaaccagcagagcctggcccacagccggctgtgggatgctgtggtgggcttcctgcacgtgtttgcccacatgatgatgaagctggcccaggacagcagccagatcgagctgctgaaggagctgctggacctgcagaaggacatggtggtgatgctgctgagcctgctggagggcaatgtggtgaatggcatgattgcccggcagatggtggacatgctggtggagagcagcagcaatgtggagatgatcctgaagttctttgacatgttcctgaagctgaaggacatcgtgggcagcgaggccttccaggactatgtgacagacccccggggcctcatcagcaagaaggacttccagaaggccatggacagccagaagcagttcagcggccctgagatccagttcctgctgagctgcagcgaggctgatgaaaatgagatgatcaactgtgaggagtttgccaaccgcttccaggagcccgcccgggacatcggcttcaacgtggccgtgctgctgaccaacctgtctgaacatgtgccccatgacccccggctgcacaacttcctggagctggccgagagcatcctggagtacttccggccctacctgggcagaattgagatcatgggcgccagccgccgcatcgagcgcatctactttgagatcagcgagaccaacagagcccagtgggagatgccccaggtgaaggagagcaagaggcagttcatctttgatgtggtgaatgaaggaggagaggccgagaagatggagctgtttgtgtccttctgtgaggacaccatctttgagatgcagattgctgcccagatcagcgagcctgagggggagcctgagacagatgaagatgaaggagctggagctgctgaggccggggctgagggcgctgaggagggcgctgctggcctggagggcacagctgccacagctgctgctggggccacagcccgggtggtggccgccgccggccgggccctgcggggcctgagctaccgcagcctgcggcggcgggtgcggcggctgcggcggctgacagcccgggaggccgccacagctgtggccgccctgctgtgggccgctgtgacccgggccggggctgctggagctggagctgctgctggggccctgggcctgctgtggggcagcctgtttggaggcggcctggtggagggcgccaagaaggtgacagtgacagagctgctggccggcatgccagaccccaccagtgatgaggtgcatggagagcagcctgctggccctggaggagatgctgatggagagggcgccagcgagggcgctggagatgctgctgagggcgctggagatgaggaggaggccgtgcatgaggccggccctgggggcgcagatggagctgtggccgtgacagatggcggccccttccggcctgagggcgctgggggcctgggggacatgggagacaccaccccagctgagccccccaccccagagggcagccccatcctgaagaggaagctgggcgtggatggagtggaggaggagctgcccccagagcctgagcctgagcctgagcctgagctggagcctgagaaggcagatgctgaaaatggagagaaggaggaggtgcctgagcccaccccagagccccccaagaagcaggccccacccagccccccacccaagaaggaggaggccggcggggagttctggggcgagctggaggtgcagagggtgaagttcctgaactacctgagcaggaacttctacaccctgcgcttcctggccctcttcctggcctttgccatcaacttcatcctgctcttctacaaggtgtctgacagccccccaggagaagatgacatggagggcagcgctgctggagatgtgtctggagctggcagcggcggcagcagcggctggggcctgggcgctggggaggaggccgagggagatgaagatgagaacatggtgtactacttcctggaggagagcacaggctacatggagcccgccctgcgctgcctgagcctgctgcacaccctggtggccttcctgtgcatcatcggctacaactgcctgaaggtgcccctggtgatcttcaagcgggagaaggagctggccaggaagctggagtttgatggcctgtacatcacagagcagccagaagatgatgatgtgaagggccagtgggaccggctggtgctgaacacccccagcttccccagcaactactgggacaagtttgtgaagaggaaggtgctggacaagcacggggacatctacggccgggagagaattgctgagctgctgggcatggacctggccaccctggagatcacagcccacaatgaaaggaagcccaaccccccacctggcctgctgacctggctgatgagcattgatgtgaagtaccagatctggaagtttggagtcatcttcacagacaacagcttcctgtacctgggctggtacatggtgatgagcctgctgggccactacaacaacttcttctttgctgcccacctgctggacatcgccatgggcgtgaagaccctgcggaccatcctgagctctgtgacccacaacgggaagcagctggtgatgacagtgggcctgctggccgtggtggtgtacctgtacacagtggtggccttcaacttcttcaggaagttctacaacaagtcagaagatgaagatgagccagacatgaagtgtgatgacatgatgacctgctacctgttccacatgtatgtgggcgtgcgggccggcggcggcattggagatgaaattgaggaccctgctggagatgaatatgagctgtacagagtggtgtttgacatcaccttcttcttctttgtgattgtcatcctgctggccatcatccagggcctcatcattgatgccttcggggagctgcgggaccagcaggagcaggtgaaggaggacatggagaccaagtgcttcatctgtggcattggaagtgactactttgacaccacccctcatggctttgagacccacaccctggaggagcacaacctggccaactacatgttcttcctgatgtacctgatcaacaaggatgaaacagagcacacaggccaggagagctatgtgtggaagatgtaccaggagcgctgctgggacttcttccctgctggggactgcttcaggaagcagtatgaggaccagctgtcctag

SEQ ID NO: 168704 - DNA, 15117 bp, synthetic construct
  misc_feature 1..15117: note = Description of Artificial Sequence: Synthetic coding sequence
  source 1..15117: mol_type = other DNA
atgggagatgctgaaggagaagatgaggtgcagttcctgaggacagatgatgaggtggtgctgcagtgcagcgccaccgtgctgaaggagcagctgaagctgtgcctggccgctgagggctttggaaaccggctgtgcttcctggagcccaccagcaatgcccagaatgtgcccccagacctggccatctgctgctttgtgctggagcagagcctgtctgtgcgggccctgcaggagatgctggccaacacagtggaggccggcgtggagagcagccagggcggcggccacaggaccctgctgtatggccacgccatcctgctgcggcatgcccacagcaggatgtacctgagctgcctgaccaccagccgctccatgacagacaagctggcctttgatgtgggcctgcaggaggatgccactggagaggcctgctggtggaccatgcacccagccagcaagcagaggtctgagggggagaaggtgcgggtgggagatgacatcatcctggtgtctgtgtcctctgagcgctacctgcacctgagcacagccagcggggagctgcaggtggatgccagcttcatgcagaccctgtggaacatgaaccccatctgcagccgctgtgaggagggctttgtgactggaggccacgtgctgcggctcttccacggccacatggatgagtgcctgaccatcagccctgctgacagtgatgaccagaggcggctggtgtactatgagggcggcgctgtgtgcacccacgcccggagcctgtggaggctggagcccctgcgcatctcctggagcggcagccacctgcgctggggccagcccctgcgggtgagacatgtgaccaccggccagtacctggccctgacagaggaccagggcctggtggtggtggatgccagcaaggcccacaccaaggccaccagcttctgcttccgcatcagcaaggagaagctggatgtggcccccaagagagatgtggagggcatgggccccccagagatcaagtacggggagagcctgtgctttgtgcagcacgtggccagcggcctgtggctgacctatgctgccccagaccccaaggccctgcggctgggcgtgctgaagaagaaggccatgctgcaccaggagggccacatggatgatgccctgagcctgacccgctgccagcaggaggagagccaggccgccaggatgatccacagcaccaacggcctgtacaaccagttcatcaagagcctggacagcttcagcggcaagccccggggcagcggccccccagctggaacagccctgcccattgaaggagtcatcctgagcctgcaggacctgatcatctactttgagcccccatctgaggacctgcagcacgaggagaagcagagcaagctgcggagcctgaggaaccggcagagcctcttccaggaggagggcatgctgtccatggtgctgaactgcatcgaccggctgaatgtgtacaccacagctgcccactttgctgagtttgctggggaggaggccgctgagagctggaaggagatcgtgaacctgctgtatgagctgctggccagcctcatccggggcaacagaagcaactgtgccctcttcagcaccaacctggactggctggtgtccaagctggaccggctggaggccagcagcggcatcctggaggtgctgtactgtgtgctgattgagagccctgaggtgctgaacatcatccaggagaaccacatcaagagcatcatcagcctgctggacaagcacggcaggaaccacaaggtgctggatgtgctgtgcagcctgtgtgtgtgcaatggagtggccgtgcgcagcaaccaggacctgatcacagagaacctgctgcccggccgggagctgctgctgcagaccaacctgatcaactacgtgaccagcatccggcccaacatctttgtgggccgggcagagggcaccacccagtacagcaagtggtactttgaggtgatggtggatgaggtgacccccttcctgacagcccaggccacccacctgcgggtgggctgggccctgacagagggctacaccccctacccaggagctggggagggctggggcggcaatggagtgggagatgacctgtacagctatggctttgatggcctgcacctgtggacaggccacgtggcccggcctgtgaccagccctggccagcacctgctggccccagaagatgtgatcagctgctgcctggacctgtctgtgcccagcatctccttccgcatcaatggctgccctgtgcagggcgtgtttgagagcttcaacctggatggcctcttcttccctgtggtgtccttctctgctggggtgaaggtgcgcttcctgctgggcggccgccacggggagttcaagttcctgcccccacctggctacgccccctgccatgaagctgtgctgccccgggagcggctgcacctggagcccatcaaggagtacagaagagagggcccccggggcccccacctggtgggccccagccgctgcctgagccacacagactttgtgccctgccctgtggacacagtgcagatcgtgctgcccccccacctggagcgcatccgggagaagctggccgagaacatccacgagctgtgggccctgacccgcatcgagcagggctggacctacggccctgtgagagatgacaacaagaggctgcacccctgcctggtggacttccacagcctgcctgagcctgagaggaactacaacctgcagatgtctggagagaccctgaagaccctgctggccctgggctgccacgtgggcatggctgatgagaaggccgaggacaacctgaagaagaccaagctgcccaagacctacatgatgagcaatggctacaagccagcccccctggacctgagccacgtgcggctgaccccagcccagaccaccctggtggaccggctggctgaaaatggccacaacgtgtgggcccgggacagagtgggccagggctggagctacagcgctgtgcaggacatcccagcccggaggaacccccggctggtgccctaccgcctgctggatgaggccaccaagaggagcaacagagacagcctgtgccaggccgtgaggaccctgctgggctacggctacaacatcgagcccccagaccaggagcccagccaggtggagaaccagagccgctgtgacagagtgcgcatcttccgggcagagaagagctacacagtgcagagcggccgctggtactttgaatttgaagctgtgaccaccggggagatgagggtgggctgggcccggcctgagctgcggccagatgtggagctgggcgcagatgagctggcctacgtgttcaacggccaccggggccagcgctggcacctgggcagcgagcccttcggccggccctggcagcctggagatgtggtgggctgcatgattgacctgacagagaacaccatcatcttcaccctgaatggagaggtgctgatgtctgacagcggcagcgagacagccttccgggagattgaaattggagatggcttcctgcctgtgtgcagcctgggccctggccaggtgggccacctgaacctgggccaggatgtgagcagcctgcgcttctttgccatctgtggcctgcaggagggctttgagccctttgccatcaacatgcagaggcctgtgaccacctggttcagcaagggcctgccccagtttgagcctgtgcccctggagcacccccactatgaggtgtcccgggtggatggcaccgtggacaccccaccctgcctgcggctgacccacaggacctggggcagccagaacagcctggtggagatgctgttcctgcggctgagcctgcctgtgcagttccaccagcacttccgctgcacagctggggccacccccctggcccctcctggcctgcagcccccagcagaagatgaggcccgggctgctgagccagaccctgactatgagaacctgcggcgctctgctgggggctggagcgaggctgaaaatggcaaggagggcacagccaaggagggcgcccctgggggcaccccccaggccggcggggaggcccagcctgcccgggcagaaaatgagaaggatgccaccacagagaagaacaagaagaggggcttcctgttcaaggccaagaaggtggccatgatgacccagcccccagccacccccaccctgccccggctgccccatgatgtggtgcctgctgacaacagagatgatcctgagatcatcctgaacaccaccacctactactacagcgtgcgggtgtttgctggccaggagcccagctgtgtgtgggccggctgggtgaccccagactaccaccagcacgacatgagctttgacctgagcaaggtgcgggtggtgacagtgaccatgggagatgagcagggcaatgtgcacagcagcctgaagtgcagcaactgctacatggtgtggggcggggactttgtgtccccaggccagcagggccgcatcagccacacagacctggtgattggctgcctggtggacctggccaccggcctgatgaccttcaccgccaacgggaaggagagcaacaccttcttccaggtggagcccaacaccaagctgtttcctgctgtgtttgtgctgcccacccaccagaatgtcatccagtttgagctgggcaagcagaagaacatcatgcccctgtctgctgccatgttccagagcgagaggaagaacccagccccccagtgccccccccggctggagatgcagatgctgatgcctgtgtcctggagcaggatgcccaaccacttcctgcaggtggagaccaggagagctggggagcggctgggctgggccgtgcagtgccaggagcccctgaccatgatggccctgcacatcccagaagaaaatcgctgcatggacatcctggagctgtctgagcggctggacctgcagcgcttccacagccacaccctgcggctgtacagagctgtgtgtgccctgggcaacaacagagtggcccacgccctgtgcagccacgtggaccaggcccagctgctgcacgccctggaggatgcccacctgcccggccccctgcgggccggctactatgacctgctgatcagcatccacctggagagcgcctgccgcagccgccgctccatgctgtctgagtacatcgtgcccctgaccccagagacccgggccatcaccctcttccccccaggccgcagcacagaaaatggccaccccaggcatggcctgcccggggtgggcgtgaccaccagcctgcggcccccccaccacttcagccccccctgctttgtggccgccctgcctgctgctggagctgctgaggccccagcccggctgagccctgccatccccctggaggccctgcgggacaaggccctgaggatgctgggggaggccgtgagagatggcggccagcacgcccgggaccctgtgggcggctctgtggagttccagtttgtgcctgtgctgaagctggtgtccaccctgctggtgatgggcatctttggagatgaagatgtgaagcagatcctgaagatgattgagcctgaggtgttcacagaggaggaggaggaggaggatgaggaggaggagggggaggaggaggatgaggaggagaaggaggaggatgaggaggagacagcccaggagaaggaggatgaggagaaggaggaggaggaggccgctgagggggagaaggaggagggcctggaggagggcctgctgcagatgaagctgcctgagagcgtgaagctgcagatgtgccacctgctggagtacttctgtgaccaggagctgcagcaccgggtggagagcctggccgcctttgctgagagatatgtggacaagctgcaggccaaccagaggagccgctatggcctgctgatcaaggccttctccatgacagctgctgagacagcccggaggacccgggagttccgcagccccccccaggagcagatcaacatgctgctgcagttcaaggatggaacagatgaggaggactgccccctgcctgaggagatccggcaggacctgctggacttccaccaggacctgctggcccactgcggcatccagctggatggagaggaggaggagcctgaggaggagaccaccctgggcagccggctgatgagcctgctggagaaggtgcggctggtgaagaagaaggaggagaagccagaggaggagaggtctgctgaggagagcaagcccaggagcctgcaggagctggtgagccacatggtggtgcgctgggcccaggaggactttgtgcagagccctgagctggtgcgggccatgttcagcctgctgcaccggcagtatgatggcctgggggagctgctgcgggccctgccccgggcctacaccatcagccccagctctgtggaggacaccatgagcctgctggagtgcctgggccagatccgcagcctgctgattgtgcagatgggcccccaggaggagaacctgatgatccagagcatcggcaacatcatgaacaacaaggtgttctaccagcaccccaacctgatgagggccctgggcatgcatgagaccgtgatggaggtgatggtgaatgtgctgggcggcggggagagcaaggagatccgcttccccaagatggtgaccagctgctgccgcttcctgtgctacttctgccgcatcagccggcagaaccagaggtccatgtttgaccacctgagctacctgctggagaacagcggcatcggcctgggcatgcagggcagcacccccctggatgtggccgccgcctctgtgattgacaacaatgagctggccctggccctgcaggagcaggacctggagaaggtggtgtcctacctggccggctgcggcctgcagagctgccccatgctggtggccaagggctacccagacatcggctggaacccctgtggcggggagcgctacctggacttcctgcgctttgctgtgtttgtgaatggagagagcgtggaggagaatgccaacgtggtggtgcggctgctgatcaggaagccagagtgcttcggccctgccctgcggggggagggcggcagcggcctgctggccgccatcgaggaggccatccgcatcagcgaggaccctgccagagatggccctggcatccggcgggacagaagaagagagcactttggagaggagcccccagaagaaaatagagtgcacctgggccacgccatcatgtccttctatgctgccctgattgacctgctgggccgctgtgcccctgagatgcacctgatccaggccgggaaaggagaggccctgcgcatccgggccatcctgcggagcctggtgcccctggaggacctggtgggcatcatcagcctgcccctgcagatccccaccctgggcaaggatggagccctggtgcagcccaagatgtctgccagctttgtgcctgaccacaaggcctccatggtgctcttcctggacagagtgtatggaattgagaaccaggacttcctgctgcacgtgctggatgtgggcttcctgcctgacatgagagctgctgccagcctggacacagccaccttcagcaccacagagatggccctggccctgaaccgctacctgtgcctggccgtgctgcccctcatcaccaagtgtgcccccctgtttgctggaacagagcaccgggccatcatggtggacagcatgctgcacacagtgtaccgcctgagccggggccgcagcctgaccaaggcccagagagatgtgattgaggactgcctgatgagcctgtgccgctacatccggcccagcatgctgcagcacctgctgcggcggctggtgtttgatgtgcccatcctgaatgaatttgccaagatgcccctgaagctgctgaccaaccactatgagcgctgctggaagtactactgcctgcccaccggctgggccaactttggagtgaccagcgaggaggagctgcacctgaccaggaagctgttctggggcatctttgacagcctggcccacaagaagtatgaccctgagctgtacaggatggccatgccctgcctgtgtgccatcgccggggccctgcccccagactatgtggatgccagctacagcagcaaggccgagaagaaggccaccgtggatgctgagggcaactttgaccccaggcctgtggagaccctgaatgtcatcatccctgagaagctggacagcttcatcaacaagtttgctgagtacacccatgagaagtgggcctttgacaagatccagaacaactggagctatggagaaaatattgatgaggagctgaagacccaccccatgctgcggccctacaagaccttcagcgagaaggacaaggagatctaccgctggcccatcaaggagagcctgaaggccatgattgcctgggagtggaccatcgagaaggcccgggagggggaggaggagaagacagagaagaagaagaccaggaagatcagccagagcgcccagacctatgacccccgggagggctacaacccccagcccccagacctgtctgctgtgaccctgagccgggagctgcaggccatggccgagcagctggccgagaactaccacaacacctggggcaggaagaagaagcaggagctggaggccaagggcggcggcacccaccccctgctggtgccctatgacaccctgacagccaaggagaaggcccgggaccgggagaaggcccaggagctgctgaagttcctgcagatgaatggctatgctgtgacccggggcctgaaggacatggagctggacagcagcagcattgagaagagatttgccttcggcttcctgcagcagctgctgcgctggatggacatcagccaggagttcatcgcccacctggaggccgtggtgagcagcggccgggtggagaagagcccccatgagcaggagatcaagttctttgccaagatcctgctgcccctcatcaaccagtacttcaccaaccactgcctgtacttcctgagcaccccagccaaggtgctgggcagcggcggccacgccagcaacaaggagaaggagatgatcaccagcctcttctgcaagctggccgccctggtgcgccaccgggtgtccctgtttggaacagatgccccagctgtggtgaactgcctgcacatcctggcccggagcctggatgccaggacagtgatgaagagcggccctgagatcgtgaaggccggcctgcggagcttctttgagagcgcctctgaagatattgagaagatggtggagaacctgcggctgggcaaggtgtcccaggcccggacccaggtgaagggcgtgggccagaacctgacctacaccaccgtggccctgctgcctgtgctgaccaccctcttccagcacatcgcccagcaccagtttggagatgatgtgatcctggatgatgtgcaggtgtcctgctaccgcaccctgtgcagcatctacagcctgggcaccaccaagaacacctacgtggagaagctgcggcctgccctgggggagtgcctggcccggctggccgccgccatgcctgtggccttcctggagccccagctgaatgagtacaatgcctgcagcgtgtacaccaccaagagcccccgggagcgggccatcctgggcctgcccaacagcgtggaggagatgtgcccagacatccctgtgctggagcggctgatggctgacattggaggcctggccgagagcggggcccgctacacagagatgccccacgtgattgagatcaccctgcccatgctgtgcagctacctgccccgctggtgggagcggggccctgaggccccacccagcgccctgcctgctggggcccccccaccctgcacagctgtgaccagtgaccacctgaacagcctgctgggcaacatcctgcgcatcatcgtgaacaacctgggcattgatgaggcctcctggatgaagaggctggccgtgtttgcccagcccatcgtgtcccgggcccggcctgagctgctgcagagccacttcatccccaccatcggccgcctgaggaagagagctgggaaggtggtgtctgaggaggagcagctgcggctggaggccaaggccgaggcccaggagggggagctgctggtgagagatgagttctctgtgctgtgccgggacctgtatgccctgtaccccctgctgatccgctacgtggacaacaacagagcccagtggctgacagagcccaaccccagcgctgaggagctgttcaggatggtgggggagatcttcatctactggagcaagagccacaacttcaagcgggaggagcagaactttgtggtgcagaatgagatcaacaacatgtccttcctgacagctgacaacaagagcaagatggccaaggccggggacatccagagcggcggcagtgaccaggagaggaccaagaagaagagaagaggagaccgctacagcgtgcagaccagcctcatcgtggccaccctgaagaagatgctgcccatcggcctgaacatgtgtgcccccacagaccaggacctgatcaccctggccaagaccaggtatgccctgaaggacacagatgaggaggtgcgggagttcctgcacaacaacctgcacctgcagggcaaggtggagggcagccccagcctgcgctggcagatggccctgtaccggggcgtgcccggccgggaggaggatgctgatgatcctgagaagatcgtgcggcgggtgcaggaggtgtctgctgtgctgtactacctggaccagacagagcacccctacaagagcaagaaggctgtgtggcacaagctgctgagcaagcagaggagaagagctgtggtggcctgcttcaggatgacccccctgtacaacctgcccacccaccgggcctgcaacatgttcctggagagctacaaggccgcctggatcctgacagaggaccacagctttgaggacaggatgattgatgacctgagcaaggccggggagcaggaggaggaggaggaggaggtggaggagaagaagccagaccccctgcaccagctggtgctgcacttcagcaggacagccctgacagagaagagcaagctggatgaggactacctgtacatggcctatgctgacatcatggccaagagctgccacctggaggagggcggggagaatggagaggccgaggaggaggtggaggtgtcctttgaggagaagcagatggagaagcagaggctgctgtaccagcaggcccggctgcacaccagaggagctgctgagatggtgctgcagatgatcagcgcctgcaagggggagactggagccatggtgagcagcaccctgaagctgggcatcagcatcctgaatggaggaaatgctgaggtgcagcagaagatgctggactacctgaaggacaagaaggaggtgggcttcttccagagcatccaggccctgatgcagacctgcagcgtgctggacctgaatgcctttgagcggcagaacaaggccgagggcctgggcatggtgaatgaagatggcaccgtcatcaaccggcagaatggagagaaggtgatggctgatgatgagttcacccaggacctcttccgcttcctgcagctgctgtgtgagggccacaacaatgacttccagaactacctgcggacccagacaggcaacaccaccaccatcaacatcatcatctgcaccgtggactacctgctgcggctgcaggagagcatcagtgacttctactggtactacagcggcaaggatgtgattgaggagcagggcaagaggaacttcagcaaggccatgtctgtggccaagcaggtgttcaacagcctgacagagtacatccagggcccctgcaccggcaaccagcagagcctggcccacagccggctgtgggatgctgtggtgggcttcctgcacgtgtttgcccacatgatgatgaagctggcccaggacagcagccagatcgagctgctgaaggagctgctggacctgcagaaggacatggtggtgatgctgctgagcctgctggagggcaatgtggtgaatggcatgattgcccggcagatggtggacatgctggtggagagcagcagcaatgtggagatgatcctgaagttctttgacatgttcctgaagctgaaggacatcgtgggcagcgaggccttccaggactatgtgacagacccccggggcctcatcagcaagaaggacttccagaaggccatggacagccagaagcagttcagcggccctgagatccagttcctgctgagctgcagcgaggctgatgaaaatgagatgatcaactgtgaggagtttgccaaccgcttccaggagcccgcccgggacatcggcttcaacgtggccgtgctgctgaccaacctgtctgagcacgtgccccatgacccccggctgcacaacttcctggagctggccgagagcatcctggagtacttccggccctacctgggccgcatcgagatcatgggcgccagcagaagaattgagcgcatctactttgagatcagcgagaccaacagagcccagtgggagatgccccaggtgaaggagagcaagaggcagttcatctttgatgtggtgaatgaaggaggagaggccgagaagatggagctgtttgtgtccttctgtgaggacaccatctttgagatgcagattgctgcccagatcagcgagcctgagggggagcctgagacagatgaagatgagggcgctggagctgctgaggccggggctgagggcgctgaggagggcgccgccggcctggagggcacagctgccacagctgctgctggggccacagcccgggtggtggccgctgctggccgggccctgcggggcctgagctaccgcagcctgcggaggagagtgcggcggctgcggcggctgacagcccgggaggccgccacagctgtggccgccctgctgtgggccgctgtgaccagggctggagctgctggggccggggctgctgctggggccctgggcctgctgtggggcagcctgtttggaggcggcctggtggagggcgccaagaaggtgacagtgacagagctgctggccggcatgccagaccccaccagtgatgaggtgcacggggagcagcctgctggccctggaggagatgctgatggagagggcgccagcgagggcgctggagatgctgctgagggcgctggagatgaggaggaggccgtgcatgaagctggccctggaggagcagatggagctgtggccgtgacagatggcggccccttccggcctgagggcgccggcggcctgggggacatgggagacaccaccccagctgagccccccaccccagagggcagccccatcctgaagaggaagctgggcgtggatggagtggaggaggagctgcccccagagcctgagcctgagcctgagcctgagctggagcctgagaaggcagatgctgaaaatggagagaaggaggaggtgcctgagcccaccccagagccccccaagaagcaggccccacccagccccccacccaagaaggaggaggccggcggggagttctggggcgagctggaggtgcagagggtgaagttcctgaactacctgagcaggaacttctacaccctgcgcttcctggccctcttcctggcctttgccatcaacttcatcctgctcttctacaaggtgtctgacagccccccaggagaagatgacatggagggcagcgctgctggagatgtgtctggggccggcagcggcggcagcagcggctggggcctgggcgctggggaggaggccgagggagatgaagatgagaacatggtgtactacttcctggaggagagcacaggctacatggagcccgccctgcgctgcctgagcctgctgcacaccctggtggccttcctgtgcatcatcggctacaactgcctgaaggtgcccctggtgatcttcaagcgggagaaggagctggccaggaagctggagtttgatggcctgtacatcacagagcagccagaagatgatgatgtgaagggccagtgggaccggctggtgctgaacacccccagcttccccagcaactactgggacaagtttgtgaagaggaaggtgctggacaagcatggagacatctacggccgggagagaattgctgagctgctgggcatggacctggccaccctggagatcacagcccacaatgaaaggaagcccaaccccccacctggcctgctgacctggctgatgagcattgatgtgaagtaccagatctggaagtttggagtcatcttcacagacaacagcttcctgtacctgggctggtacatggtgatgagcctgctgggccactacaacaacttcttctttgctgcccacctgctggacatcgccatgggcgtgaagaccctgcggaccatcctgagctctgtgacccacaacgggaagcagctggtgatgacagtgggcctgctggccgtggtggtgtacctgtacacagtggtggccttcaacttcttcaggaagttctacaacaagtcagaagatgaagatgagccagacatgaagtgtgatgacatgatgacctgctacctgttccacatgtatgtgggcgtgcgggccggcggcggcattggagatgaaattgaagatcctgctggagatgaatatgagctgtacagagtggtgtttgacatcaccttcttcttcttcgtcatcgtcatcctgctggccatcatccagggcctcatcattgatgcctttggagagctgcgggaccagcaggagcaggtgaaggaggacatggagaccaagtgcttcatctgtggcatcggcagtgactactttgacaccaccccccacggctttgagacccacaccctggaggagcacaacctggccaactacatgttcttcctgatgtacctgatcaacaaggatgaaacagagcacacaggccaggagagctatgtgtggaagatgtaccaggagcgctgctgggacttcttccctgctggggactgcttcaggaagcagtatgaggaccagctgtcctag

SEQ ID NO: 168705 - DNA, 15102 bp, synthetic construct
  misc_feature 1..15102: note = Description of Artificial Sequence: Synthetic coding sequence
  source 1..15102: mol_type = other DNA
atgggagatgctgaaggagaagatgaggtgcagttcctgaggacagatgatgaggtggtgctgcagtgcagcgccaccgtgctgaaggagcagctgaagctgtgcctggccgctgagggctttggaaaccggctgtgcttcctggagcccaccagcaatgcccagaatgtgcccccagacctggccatctgctgctttgtgctggagcagagcctgtctgtgcgggccctgcaggagatgctggccaacacagtggaggccggcgtggagagcagccagggcggcggccacaggaccctgctgtatggccacgccatcctgctgcggcatgcccacagcaggatgtacctgagctgcctgaccaccagccgctccatgacagacaagctggcctttgatgtgggcctgcaggaggatgccactggagaggcctgctggtggaccatgcacccagccagcaagcagaggtctgagggggagaaggtgcgggtgggagatgacatcatcctggtgtctgtgtcctctgagcgctacctgcacctgagcacagccagcggggagctgcaggtggatgccagcttcatgcagaccctgtggaacatgaaccccatctgcagccgctgtgaggagggctttgtgactggaggccacgtgctgcggctcttccacggccacatggatgagtgcctgaccatcagccctgctgacagtgatgaccagaggcggctggtgtactatgagggcggcgctgtgtgcacccacgcccggagcctgtggaggctggagcccctgcgcatctcctggagcggcagccacctgcgctggggccagcccctgcgggtgagacatgtgaccaccggccagtacctggccctgacagaggaccagggcctggtggtggtggatgccagcaaggcccacaccaaggccaccagcttctgcttccgcatcagcaaggagaagctggatgtggcccccaagagagatgtggagggcatgggccccccagagatcaagtacggggagagcctgtgctttgtgcagcacgtggccagcggcctgtggctgacctatgctgccccagaccccaaggccctgcggctgggcgtgctgaagaagaaggccatgctgcaccaggagggccacatggatgatgccctgagcctgacccgctgccagcaggaggagagccaggccgccaggatgatccacagcaccaacggcctgtacaaccagttcatcaagagcctggacagcttcagcggcaagccccggggcagcggccccccagctggaacagccctgcccattgaaggagtcatcctgagcctgcaggacctgatcatctactttgagcccccatctgaggacctgcagcacgaggagaagcagagcaagctgcggagcctgaggaaccggcagagcctcttccaggaggagggcatgctgtccatggtgctgaactgcatcgaccggctgaatgtgtacaccacagctgcccactttgctgagtttgctggggaggaggccgctgagagctggaaggagatcgtgaacctgctgtatgagctgctggccagcctcatccggggcaacagaagcaactgtgccctcttcagcaccaacctggactggctggtgtccaagctggaccggctggaggccagcagcggcatcctggaggtgctgtactgtgtgctgattgagagccctgaggtgctgaacatcatccaggagaaccacatcaagagcatcatcagcctgctggacaagcacggcaggaaccacaaggtgctggatgtgctgtgcagcctgtgtgtgtgcaatggagtggccgtgcgcagcaaccaggacctgatcacagagaacctgctgcccggccgggagctgctgctgcagaccaacctgatcaactacgtgaccagcatccggcccaacatctttgtgggccgggcagagggcaccacccagtacagcaagtggtactttgaggtgatggtggatgaggtgacccccttcctgacagcccaggccacccacctgcgggtgggctgggccctgacagagggctacaccccctacccaggagctggggagggctggggcggcaatggagtgggagatgacctgtacagctatggctttgatggcctgcacctgtggacaggccacgtggcccggcctgtgaccagccctggccagcacctgctggccccagaagatgtgatcagctgctgcctggacctgtctgtgcccagcatctccttccgcatcaatggctgccctgtgcagggcgtgtttgagagcttcaacctggatggcctcttcttccctgtggtgtccttctctgctggggtgaaggtgcgcttcctgctgggcggccgccacggggagttcaagttcctgcccccacctggctacgccccctgccatgaagctgtgctgccccgggagcggctgcacctggagcccatcaaggagtacagaagagagggcccccggggcccccacctggtgggccccagccgctgcctgagccacacagactttgtgccctgccctgtggacacagtgcagatcgtgctgcccccccacctggagcgcatccgggagaagctggccgagaacatccacgagctgtgggccctgacccgcatcgagcagggctggacctacggccctgtgagagatgacaacaagaggctgcacccctgcctggtggacttccacagcctgcctgagcctgagaggaactacaacctgcagatgtctggagagaccctgaagaccctgctggccctgggctgccacgtgggcatggctgatgagaaggccgaggacaacctgaagaagaccaagctgcccaagacctacatgatgagcaatggctacaagccagcccccctggacctgagccacgtgcggctgaccccagcccagaccaccctggtggaccggctggctgaaaatggccacaacgtgtgggcccgggacagagtgggccagggctggagctacagcgctgtgcaggacatcccagcccggaggaacccccggctggtgccctaccgcctgctggatgaggccaccaagaggagcaacagagacagcctgtgccaggccgtgaggaccctgctgggctacggctacaacatcgagcccccagaccaggagcccagccaggtggagaaccagagccgctgtgacagagtgcgcatcttccgggcagagaagagctacacagtgcagagcggccgctggtactttgaatttgaagctgtgaccaccggggagatgagggtgggctgggcccggcctgagctgcggccagatgtggagctgggcgcagatgagctggcctacgtgttcaacggccaccggggccagcgctggcacctgggcagcgagcccttcggccggccctggcagcctggagatgtggtgggctgcatgattgacctgacagagaacaccatcatcttcaccctgaatggagaggtgctgatgtctgacagcggcagcgagacagccttccgggagattgaaattggagatggcttcctgcctgtgtgcagcctgggccctggccaggtgggccacctgaacctgggccaggatgtgagcagcctgcgcttctttgccatctgtggcctgcaggagggctttgagccctttgccatcaacatgcagaggcctgtgaccacctggttcagcaagggcctgccccagtttgagcctgtgcccctggagcacccccactatgaggtgtcccgggtggatggcaccgtggacaccccaccctgcctgcggctgacccacaggacctggggcagccagaacagcctggtggagatgctgttcctgcggctgagcctgcctgtgcagttccaccagcacttccgctgcacagctggggccacccccctggcccctcctggcctgcagcccccagcagaagatgaggcccgggctgctgagccagaccctgactatgagaacctgcggcgctctgctgggggctggagcgaggctgaaaatggcaaggagggcacagccaaggagggcgcccctgggggcaccccccaggccggcggggaggcccagcctgcccgggcagaaaatgagaaggatgccaccacagagaagaacaagaagaggggcttcctgttcaaggccaagaaggtggccatgatgacccagcccccagccacccccaccctgccccggctgccccatgatgtggtgcctgctgacaacagagatgatcctgagatcatcctgaacaccaccacctactactacagcgtgcgggtgtttgctggccaggagcccagctgtgtgtgggccggctgggtgaccccagactaccaccagcacgacatgagctttgacctgagcaaggtgcgggtggtgacagtgaccatgggagatgagcagggcaatgtgcacagcagcctgaagtgcagcaactgctacatggtgtggggcggggactttgtgtccccaggccagcagggccgcatcagccacacagacctggtgattggctgcctggtggacctggccaccggcctgatgaccttcaccgccaacgggaaggagagcaacaccttcttccaggtggagcccaacaccaagctgtttcctgctgtgtttgtgctgcccacccaccagaatgtcatccagtttgagctgggcaagcagaagaacatcatgcccctgtctgctgccatgttccagagcgagaggaagaacccagccccccagtgccccccccggctggagatgcagatgctgatgcctgtgtcctggagcaggatgcccaaccacttcctgcaggtggagaccaggagagctggggagcggctgggctgggccgtgcagtgccaggagcccctgaccatgatggccctgcacatcccagaagaaaatcgctgcatggacatcctggagctgtctgagcggctggacctgcagcgcttccacagccacaccctgcggctgtacagagctgtgtgtgccctgggcaacaacagagtggcccacgccctgtgcagccacgtggaccaggcccagctgctgcacgccctggaggatgcccacctgcccggccccctgcgggccggctactatgacctgctgatcagcatccacctggagagcgcctgccgcagccgccgctccatgctgtctgagtacatcgtgcccctgaccccagagacccgggccatcaccctcttccccccaggccgcagcacagaaaatggccaccccaggcatggcctgcccggggtgggcgtgaccaccagcctgcggcccccccaccacttcagccccccctgctttgtggccgccctgcctgctgctggagctgctgaggccccagcccggctgagccctgccatccccctggaggccctgcgggacaaggccctgaggatgctgggggaggccgtgagagatggcggccagcacgcccgggaccctgtgggcggctctgtggagttccagtttgtgcctgtgctgaagctggtgtccaccctgctggtgatgggcatctttggagatgaagatgtgaagcagatcctgaagatgattgagcctgaggtgttcacagaggaggaggaggaggaggatgaggaggaggagggggaggaggaggatgaggaggagaaggaggaggatgaggaggagacagcccaggagaaggaggatgaggagaaggaggaggaggaggccgctgagggggagaaggaggagggcctggaggagggcctgctgcagatgaagctgcctgagagcgtgaagctgcagatgtgccacctgctggagtacttctgtgaccaggagctgcagcaccgggtggagagcctggccgcctttgctgagagatatgtggacaagctgcaggccaaccagaggagccgctatggcctgctgatcaaggccttctccatgacagctgctgagacagcccggaggacccgggagttccgcagccccccccaggagcagatcaacatgctgctgcagttcaaggatggaacagatgaggaggactgccccctgcctgaggagatccggcaggacctgctggacttccaccaggacctgctggcccactgcggcatccagctggatggagaggaggaggagcctgaggaggagaccaccctgggcagccggctgatgagcctgctggagaaggtgcggctggtgaagaagaaggaggagaagccagaggaggagaggtctgctgaggagagcaagcccaggagcctgcaggagctggtgagccacatggtggtgcgctgggcccaggaggactttgtgcagagccctgagctggtgcgggccatgttcagcctgctgcaccggcagtatgatggcctgggggagctgctgcgggccctgccccgggcctacaccatcagccccagctctgtggaggacaccatgagcctgctggagtgcctgggccagatccgcagcctgctgattgtgcagatgggcccccaggaggagaacctgatgatccagagcatcggcaacatcatgaacaacaaggtgttctaccagcaccccaacctgatgagggccctgggcatgcatgagaccgtgatggaggtgatggtgaatgtgctgggcggcggggagagcaaggagatccgcttccccaagatggtgaccagctgctgccgcttcctgtgctacttctgccgcatcagccggcagaaccagaggtccatgtttgaccacctgagctacctgctggagaacagcggcatcggcctgggcatgcagggcagcacccccctggatgtggccgccgcctctgtgattgacaacaatgagctggccctggccctgcaggagcaggacctggagaaggtggtgtcctacctggccggctgcggcctgcagagctgccccatgctggtggccaagggctacccagacatcggctggaacccctgtggcggggagcgctacctggacttcctgcgctttgctgtgtttgtgaatggagagagcgtggaggagaatgccaacgtggtggtgcggctgctgatcaggaagccagagtgcttcggccctgccctgcggggggagggcggcagcggcctgctggccgccatcgaggaggccatccgcatcagcgaggaccctgccagagatggccctggcatccggcgggacagaagaagagagcactttggagaggagcccccagaagaaaatagagtgcacctgggccacgccatcatgtccttctatgctgccctgattgacctgctgggccgctgtgcccctgagatgcacctgatccaggccgggaaaggagaggccctgcgcatccgggccatcctgcggagcctggtgcccctggaggacctggtgggcatcatcagcctgcccctgcagatccccaccctgggcaaggatggagccctggtgcagcccaagatgtctgccagctttgtgcctgaccacaaggcctccatggtgctcttcctggacagagtgtatggaattgagaaccaggacttcctgctgcacgtgctggatgtgggcttcctgcctgacatgagagctgctgccagcctggacacagccaccttcagcaccacagagatggccctggccctgaaccgctacctgtgcctggccgtgctgcccctcatcaccaagtgtgcccccctgtttgctggaacagagcaccgggccatcatggtggacagcatgctgcacacagtgtaccgcctgagccggggccgcagcctgaccaaggcccagagagatgtgattgaggactgcctgatgagcctgtgccgctacatccggcccagcatgctgcagcacctgctgcggcggctggtgtttgatgtgcccatcctgaatgaatttgccaagatgcccctgaagctgctgaccaaccactatgagcgctgctggaagtactactgcctgcccaccggctgggccaactttggagtgaccagcgaggaggagctgcacctgaccaggaagctgttctggggcatctttgacagcctggcccacaagaagtatgaccctgagctgtacaggatggccatgccctgcctgtgtgccatcgccggggccctgcccccagactatgtggatgccagctacagcagcaaggccgagaagaaggccaccgtggatgctgagggcaactttgaccccaggcctgtggagaccctgaatgtcatcatccctgagaagctggacagcttcatcaacaagtttgctgagtacacccatgagaagtgggcctttgacaagatccagaacaactggagctatggagaaaatattgatgaggagctgaagacccaccccatgctgcggccctacaagaccttcagcgagaaggacaaggagatctaccgctggcccatcaaggagagcctgaaggccatgattgcctgggagtggaccatcgagaaggcccgggagggggaggaggagaagacagagaagaagaagaccaggaagatcagccagagcgcccagacctatgacccccgggagggctacaacccccagcccccagacctgtctgctgtgaccctgagccgggagctgcaggccatggccgagcagctggccgagaactaccacaacacctggggcaggaagaagaagcaggagctggaggccaagggcggcggcacccaccccctgctggtgccctatgacaccctgacagccaaggagaaggcccgggaccgggagaaggcccaggagctgctgaagttcctgcagatgaatggctatgctgtgacccggggcctgaaggacatggagctggacagcagcagcattgagaagagatttgccttcggcttcctgcagcagctgctgcgctggatggacatcagccaggagttcatcgcccacctggaggccgtggtgagcagcggccgggtggagaagagcccccatgagcaggagatcaagttctttgccaagatcctgctgcccctcatcaaccagtacttcaccaaccactgcctgtacttcctgagcaccccagccaaggtgctgggcagcggcggccacgccagcaacaaggagaaggagatgatcaccagcctcttctgcaagctggccgccctggtgcgccaccgggtgtccctgtttggaacagatgccccagctgtggtgaactgcctgcacatcctggcccggagcctggatgccaggacagtgatgaagagcggccctgagatcgtgaaggccggcctgcggagcttctttgagagcgcctctgaagatattgagaagatggtggagaacctgcggctgggcaaggtgtcccaggcccggacccaggtgaagggcgtgggccagaacctgacctacaccaccgtggccctgctgcctgtgctgaccaccctcttccagcacatcgcccagcaccagtttggagatgatgtgatcctggatgatgtgcaggtgtcctgctaccgcaccctgtgcagcatctacagcctgggcaccaccaagaacacctacgtggagaagctgcggcctgccctgggggagtgcctggcccggctggccgccgccatgcctgtggccttcctggagccccagctgaatgagtacaatgcctgcagcgtgtacaccaccaagagcccccgggagcgggccatcctgggcctgcccaacagcgtggaggagatgtgcccagacatccctgtgctggagcggctgatggctgacattggaggcctggccgagagcggggcccgctacacagagatgccccacgtgattgagatcaccctgcccatgctgtgcagctacctgccccgctggtgggagcggggccctgaggccccacccagcgccctgcctgctggggcccccccaccctgcacagctgtgaccagtgaccacctgaacagcctgctgggcaacatcctgcgcatcatcgtgaacaacctgggcattgatgaggcctcctggatgaagaggctggccgtgtttgcccagcccatcgtgtcccgggcccggcctgagctgctgcagagccacttcatccccaccatcggccgcctgaggaagagagctgggaaggtggtgtctgaggaggagcagctgcggctggaggccaaggccgaggcccaggagggggagctgctggtgagagatgagttctctgtgctgtgccgggacctgtatgccctgtaccccctgctgatccgctacgtggacaacaacagagcccagtggctgacagagcccaaccccagcgctgaggagctgttcaggatggtgggggagatcttcatctactggagcaagagccacaacttcaagcgggaggagcagaactttgtggtgcagaatgagatcaacaacatgtccttcctgacagctgacaacaagagcaagatggccaaggccggggacatccagagcggcggcagtgaccaggagaggaccaagaagaagagaagaggagaccgctacagcgtgcagaccagcctcatcgtggccaccctgaagaagatgctgcccatcggcctgaacatgtgtgcccccacagaccaggacctgatcaccctggccaagaccaggtatgccctgaaggacacagatgaggaggtgcgggagttcctgcacaacaacctgcacctgcagggcaaggtggagggcagccccagcctgcgctggcagatggccctgtaccggggcgtgcccggccgggaggaggatgctgatgatcctgagaagatcgtgcggcgggtgcaggaggtgtctgctgtgctgtactacctggaccagacagagcacccctacaagagcaagaaggctgtgtggcacaagctgctgagcaagcagaggagaagagctgtggtggcctgcttcaggatgacccccctgtacaacctgcccacccaccgggcctgcaacatgttcctggagagctacaaggccgcctggatcctgacagaggaccacagctttgaggacaggatgattgatgacctgagcaaggccggggagcaggaggaggaggaggaggaggtggaggagaagaagccagaccccctgcaccagctggtgctgcacttcagcaggacagccctgacagagaagagcaagctggatgaggactacctgtacatggcctatgctgacatcatggccaagagctgccacctggaggagggcggggagaatggagaggccgaggaggaggtggaggtgtcctttgaggagaagcagatggagaagcagaggctgctgtaccagcaggcccggctgcacaccagaggagctgctgagatggtgctgcagatgatcagcgcctgcaagggggagactggagccatggtgagcagcaccctgaagctgggcatcagcatcctgaatggaggaaatgctgaggtgcagcagaagatgctggactacctgaaggacaagaaggaggtgggcttcttccagagcatccaggccctgatgcagacctgcagcgtgctggacctgaatgcctttgagcggcagaacaaggccgagggcctgggcatggtgaatgaagatggcaccgtgggggagaaggtgatggctgatgatgagttcacccaggacctcttccgcttcctgcagctgctgtgtgagggccacaacaatgacttccagaactacctgcggacccagacaggcaacaccaccaccatcaacatcatcatctgcaccgtggactacctgctgcggctgcaggagagcatcagtgacttctactggtactacagcggcaaggatgtgattgaggagcagggcaagaggaacttcagcaaggccatgtctgtggccaagcaggtgttcaacagcctgacagagtacatccagggcccctgcaccggcaaccagcagagcctggcccacagccggctgtgggatgctgtggtgggcttcctgcacgtgtttgcccacatgatgatgaagctggcccaggacagcagccagatcgagctgctgaaggagctgctggacctgcagaaggacatggtggtgatgctgctgagcctgctggagggcaatgtggtgaatggcatgattgcccggcagatggtggacatgctggtggagagcagcagcaatgtggagatgatcctgaagttctttgacatgttcctgaagctgaaggacatcgtgggcagcgaggccttccaggactatgtgacagacccccggggcctcatcagcaagaaggacttccagaaggccatggacagccagaagcagttcagcggccctgagatccagttcctgctgagctgcagcgaggctgatgaaaatgagatgatcaactgtgaggagtttgccaaccgcttccaggagcccgcccgggacatcggcttcaacgtggccgtgctgctgaccaacctgtctgaacatgtgccccatgacccccggctgcacaacttcctggagctggccgagagcatcctggagtacttccggccctacctgggcagaattgagatcatgggcgccagccgccgcatcgagcgcatctactttgagatcagcgagaccaacagagcccagtgggagatgccccaggtgaaggagagcaagaggcagttcatctttgatgtggtgaatgaaggaggagaggccgagaagatggagctgtttgtgtccttctgtgaggacaccatctttgagatgcagattgctgcccagatcagcgagcctgagggggagcctgagacagatgaagatgaaggagctggagctgctgaggccggggctgagggcgctgaggagggcgctgctggcctggagggcacagctgccacagctgctgctggggccacagcccgggtggtggccgccgccggccgggccctgcggggcctgagctaccgcagcctgcggcggcgggtgcggcggctgcggcggctgacagcccgggaggccgccacagctgtggccgccctgctgtgggccgctgtgacccgggccggggctgctggagctggagctgctgctggggccctgggcctgctgtggggcagcctgtttggaggcggcctggtggagggcgccaagaaggtgacagtgacagagctgctggccggcatgccagaccccaccagtgatgaggtgcatggagagcagcctgctggccctggaggagatgctgatggagagggcgccagcgagggcgctggagatgctgctgagggcgctggagatgaggaggaggccgtgcatgaggccggccctgggggcgcagatggagctgtggccgtgacagatggcggccccttccggcctgagggcgctgggggcctgggggacatgggagacaccaccccagctgagccccccaccccagagggcagccccatcctgaagaggaagctgggcgtggatggagtggaggaggagctgcccccagagcctgagcctgagcctgagcctgagctggagcctgagaaggcagatgctgaaaatggagagaaggaggaggtgcctgagcccaccccagagccccccaagaagcaggccccacccagccccccacccaagaaggaggaggccggcggggagttctggggcgagctggaggtgcagagggtgaagttcctgaactacctgagcaggaacttctacaccctgcgcttcctggccctcttcctggcctttgccatcaacttcatcctgctcttctacaaggtgtctgacagccccccaggagaagatgacatggagggcagcgctgctggagatgtgtctggagctggcagcggcggcagcagcggctggggcctgggcgctggggaggaggccgagggagatgaagatgagaacatggtgtactacttcctggaggagagcacaggctacatggagcccgccctgcgctgcctgagcctgctgcacaccctggtggccttcctgtgcatcatcggctacaactgcctgaaggtgcccctggtgatcttcaagcgggagaaggagctggccaggaagctggagtttgatggcctgtacatcacagagcagccagaagatgatgatgtgaagggccagtgggaccggctggtgctgaacacccccagcttccccagcaactactgggacaagtttgtgaagaggaaggtgctggacaagcacggggacatctacggccgggagagaattgctgagctgctgggcatggacctggccaccctggagatcacagcccacaatgaaaggaagcccaaccccccacctggcctgctgacctggctgatgagcattgatgtgaagtaccagatctggaagtttggagtcatcttcacagacaacagcttcctgtacctgggctggtacatggtgatgagcctgctgggccactacaacaacttcttctttgctgcccacctgctggacatcgccatgggcgtgaagaccctgcggaccatcctgagctctgtgacccacaacgggaagcagctggtgatgacagtgggcctgctggccgtggtggtgtacctgtacacagtggtggccttcaacttcttcaggaagttctacaacaagtcagaagatgaagatgagccagacatgaagtgtgatgacatgatgacctgctacctgttccacatgtatgtgggcgtgcgggccggcggcggcattggagatgaaattgaggaccctgctggagatgaatatgagctgtacagagtggtgtttgacatcaccttcttcttctttgtgattgtcatcctgctggccatcatccagggcctcatcattgatgccttcggggagctgcgggaccagcaggagcaggtgaaggaggacatggagaccaagtgcttcatctgtggcattggaagtgactactttgacaccacccctcatggctttgagacccacaccctggaggagcacaacctggccaactacatgttcttcctgatgtacctgatcaacaaggatgaaacagagcacacaggccaggagagctatgtgtggaagatgtaccaggagcgctgctgggacttcttccctgctggggactgcttcaggaagcagtatgaggaccagctgtcctag

SEQ ID NO: 168706 - DNA, 2031 bp, synthetic construct
  misc_feature 1..2031: note = Description of Artificial Sequence: Synthetic coding sequence
  source 1..2031: mol_type = other DNA
atgaagagcggccctgagatcgtgaaggccggcctgcggagcttctttgagagcgcctctgaagatattgagaagatggtggagaacctgcggctgggcaaggtgtcccaggcccggacccaggtgaagggcgtgggccagaacctgacctacaccaccgtggccctgctgcctgtgctgaccaccctcttccagcacatcgcccagcaccagtttggagatgatgtgatcctggatgatgtgcaggtgtcctgctaccgcaccctgtgcagcatctacagcctgggcaccaccaagaacacctacgtggagaagctgcggcctgccctgggggagtgcctggcccggctggccgccgccatgcctgtggccttcctggagccccagctgaatgagtacaatgcctgcagcgtgtacaccaccaagagcccccgggagcgggccatcctgggcctgcccaacagcgtggaggagatgtgcccagacatccctgtgctggagcggctgatggctgacattggaggcctggccgagagcggggcccgctacacagagatgccccacgtgattgagatcaccctgcccatgctgtgcagctacctgccccgctggtgggagcggggccctgaggccccacccagcgccctgcctgctggggcccccccaccctgcacagctgtgaccagtgaccacctgaacagcctgctgggcaacatcctgcgcatcatcgtgaacaacctgggcattgatgaggcctcctggatgaagaggctggccgtgtttgcccagcccatcgtgtcccgggcccggcctgagctgctgcagagccacttcatccccaccatcggccgcctgaggaagagagctgggaaggtggtgtctgaggaggagcagctgcggctggaggccaaggccgaggcccaggagggggagctgctggtgagagatgagttctctgtgctgtgccgggacctgtatgccctgtaccccctgctgatccgctacgtggacaacaacagagcccagtggctgacagagcccaaccccagcgctgaggagctgttcaggatggtgggggagatcttcatctactggagcaagagccacaacttcaagcgggaggagcagaactttgtggtgcagaatgagatcaacaacatgtccttcctgacagctgacaacaagagcaagatggccaaggccggggacatccagagcggcggcagtgaccaggagaggaccaagaagaagagaagaggagaccgctacagcgtgcagaccagcctcatcgtggccaccctgaagaagatgctgcccatcggcctgaacatgtgtgcccccacagaccaggacctgatcaccctggccaagaccaggtatgccctgaaggacacagatgaggaggtgcgggagttcctgcacaacaacctgcacctgcagggcaaggtggagggcagccccagcctgcgctggcagatggccctgtaccggggcgtgcccggccgggaggaggatgctgatgatcctgagaagatcgtgcggcgggtgcaggaggtgtctgctgtgctgtactacctggaccagacagagcacccctacaagagcaagaaggctgtgtggcacaagctgctgagcaagcagaggagaagagctgtggtggcctgcttcaggatgacccccctgtacaacctgcccacccaccgggcctgcaacatgttcctggagagctacaaggccgcctggatcctgacagaggaccacagctttgaggacaggatgattgatgacctgagcaaggccggggagcaggaggaggaggaggaggaggtggaggagaagaagccagaccccctgcaccagctggtgctgcacttcagcaggacagccctgacagagaagagcaagctggatgaggactacctgtacatggcctatgctgacatcatggccaagagctgccacctggaggagggcggggagaatggagaggccgaggaggaggtggaggtgtcctttgaggagaagcagtag

SEQ ID NO: 168707 - DNA, 14922 bp, synthetic construct
  misc_feature 1..14922: note = Description of Artificial Sequence: Synthetic coding sequence
  source 1..14922: mol_type = other DNA
ctgggccccaggagcagcagcaacaagctgagcaacaagaagatgatgaagtggttctgcagcgccccccagcccagcaccaagaacaacagaagctatgcctggcagcagaaggacctggccacagactttgtgtcctggagccccctgcccatccccaggatgtgcccccagaccagccccagcgcccccctgtgctggagcagccccagcctgagcggccgctgccgccgctgctggctgaccccctggaggaaccagaagggccagctggacatcatcaagtggagctttggcctgaagacagcccagggcggcggccacaggaccctgctgtatggccacgccatcctgctgcggcacagctacagcggcatgtacctgtgctgcctgagcaccagccgcagcagcacagacaagctggcctttgatgtgggcctgcaggaggacaccaccggggaggcctgctggtggaccatccacccagccagcaagcagaggtctgagggggagaaggtgcgggtgggagatgacctgatcctggtgtctgtgagcagcgagcgctacctgcacctgtcctatggaaatggcagcctgcacgtggatgctgccttccagcagaccctgtggagcgtggcccccatcagcagcggcagcgaggccgcccagggctacctgattggaggagatgtgctgcggctgctgcacggccacatggatgaatgtctgactgtgcccagcggggagcacggggaggagcagaggagaacagtgcactatgagggcggcgctgtgtctgtgcacgcccggagcctgtggaggctggagaccctgcgggtggcctggagcggcagccacatccgctggggccagcccttccggctgcggcacgtgaccaccgggaagtacctgagcctgatggaggacaagaacctgctgctgatggacaaggagaaggcagatgtgaagagcacagccttcaccttccgcagcagcaaggagaagctggatgtgggcgtgaggaaggaggtggatggcatgggcaccagcgagatcaagtacggggacagcgtgtgctacatccagcacgtggacaccggcctgtggctgacctaccagagcgtggatgtgaagtctgtgaggatgggcagcatccagaggaaggccatcatgcaccacgagggccacatggatgatggcatcagcctgagccgcagccagcacgaggagagcaggacagcccgggtcatccgcagcaccgtcttcctgttcaaccgcttcatccggggcctggatgccctgagcaagaaggccaaggccagcacagtggacctgcccattgaatctgtgtccctgagcctgcaggacctgattggctacttccaccccccagatgagcacctggagcacgaggacaagcagaaccggctgcgggccctgaagaaccggcagaacctcttccaggaggagggcatgatcaacctggtgctggagtgcatcgaccggctgcacgtgtacagcagcgctgcccactttgctgatgtggccggccgggaggccggggagagctggaagagcatcctgaacagcctgtatgagctgctggccgccctgatccggggcaacaggaagaactgtgcccagttcagcggcagcctggactggctgatcagccggctggagcggctggaggccagcagcggcatcctggaggtgctgcactgtgtgctggtggagagccctgaggccctgaacatcatcaaggagggccacatcaagagcatcatcagcctgctggacaagcacggcaggaaccacaaggtgctggatgtgctgtgcagcctgtgtgtgtgccacggcgtggccgtgcgcagcaaccagcacctgatctgtgacaacctgctgcccggccgggacctgctgctgcagacccggctggtgaaccacgtgtcctccatgaggcccaacatcttcctgggcgtgtctgagggcagcgcccagtacaagaagtggtactatgagctgatggtggaccacacagagccctttgtgacagctgaggccacccacctgcgggtgggctgggccagcacagagggctacagcccctacccaggcggcggggaggagtggggcggcaatggagtgggagatgacctcttctcctatggctttgatggcctgcacctgtggagcggctgcatcgccaggacagtgagcagccccaaccagcacctgctgaggacagatgatgtgatcagctgctgcctggacctgagcgcccccagcatctccttccgcatcaatggccagcctgtgcagggcatgtttgagaacttcaacattgatggcctcttcttccctgtggtgtccttctctgctggcatcaaggtgcgcttcctgctgggcggccgccacggggagttcaagttcctgcccccacctggctacgccccctgctatgaagctgtgctgcccaaggagaagctgaaggtggagcacagccgggagtacaagcaggagaggacctacacccgggacctgctgggccccaccgtgtccctgacccaggccgccttcacccccatccctgtggacaccagccagatcgtgctgcccccccacctggagcgcatccgggagaagctggccgagaacatccacgagctgtgggtgatgaacaagattgagctgggctggcagtatggccctgtgagagatgacaacaagaggcagcacccctgcctggtggagttcagcaagctgcctgagcaggagaggaactacaacctgcagatgagcctggagaccctgaagaccctgctggccctgggctgccacgtgggcatcagtgatgagcacgccgaggacaaggtgaagaagatgaagctgcccaagaactaccagctgaccagcggctacaagccagcccccatggacctgtccttcatcaagctgacccccagccaggaggccatggtggacaagctggctgaaaatgcccacaacgtgtgggcccgggaccgcatccggcagggctggacctacggcatccagcaggatgtgaagaacagaagaaacccccggctggtgccctacaccctgctggatgacaggaccaagaagagcaacaaggacagcctgcgggaggccgtgaggaccctgctgggctacggctacaacctggaggccccagaccaggaccacgccgcccgggcagaggtgtgcagcggcactggagagcgcttccgcatcttccgggcagagaagacctatgctgtgaaggccggccgctggtactttgaatttgaaacagtgacagctggggacatgagggtgggctggagccggcccggctgccagcctgaccaggagctgggcagtgatgagcgggcctttgcctttgatggcttcaaggcccagcgctggcaccagggcaatgagcactacggccgctcctggcaggccggagatgtggtgggctgcatggtggacatgaatgagcacaccatgatgttcaccctgaatggagagatcctgctggatgacagcggcagcgagctggccttcaaggactttgatgtgggagatggcttcatccctgtgtgcagcctgggcgtggcccaggtgggccgcatgaactttgggaaggatgtgtccaccctgaagtacttcaccatctgtggcctgcaggagggctatgagccctttgctgtgaacaccaacagagacatcaccatgtggctgagcaagaggctgccccagttcctgcaggtgcccagcaaccacgagcacatcgaggtgaccagaattgatggcaccatcgacagcagcccctgcctgaaggtgacccagaagagctttggcagccagaacagcaacacagacatcatgttctaccgcctgtccatgcccattgaatgtgccgaggtgttcagcaagacagtggccggcggcctgcctggagctggcctgtttggccccaagaatgacctggaggactatgatgctgacagcgactttgaggtgctgatgaagacagcccacggccacctggtgcctgacagagtggacaaggacaaggaggccaccaagccagagttcaacaaccacaaggactatgcccaggagaagcccagccggctgaagcagcgcttcctgctgcggaggaccaagccagactacagcaccagccacagcgcccggctgacagaagatgtgctggctgatgacagagatgattatgacttcctgatgcagaccagcacctactactacagcgtgcgcatcttccctggccaggagcccgccaacgtgtgggtgggctggatcaccagtgacttccaccagtatgacaccggctttgacctggacagagtgaggacagtgacagtgaccctgggagatgagaagggcaaggtgcatgagagcatcaagaggagcaactgctacatggtgtgtgccggggagagcatgagccctggccagggcaggaacaacaacggcctggagatcggctgtgtggtggatgctgccagcggcctgctgaccttcatcgccaacgggaaggagctgagcacctactaccaggtggagcccagcaccaagctgtttcctgctgtgtttgcccaggccaccagccccaacgtgttccagtttgagctgggccgcatcaagaatgtgatgcccctgtctgctggcctcttcaagtctgagcacaagaaccctgtgccccagtgccccccccggctgcacgtgcagttcctgagccacgtgctgtggagcaggatgcccaaccagttcctgaaggtggatgtgagccgcatcagcgagcggcagggctggctggtgcagtgcctggaccccctgcagttcatgagcctgcacatcccagaagaaaatagatctgtggacatcctggagctgacagagcaggaggagctgctgaagttccactaccacaccctgcggctgtacagcgctgtgtgtgccctgggcaaccaccgggtggcccacgccctgtgcagccacgtggatgagccccagctgctgtatgccatcgagaacaagtacatgcctggcctgctgcgggccggctactatgacctgctgattgacatccacctgagcagctatgccacagcccggctgatgatgaacaatgagtacatcgtgcccatgacagaggagaccaagagcatcaccctcttcccagatgagaacaagaagcacggcctgcccggcatcggcctgagcaccagcctgcggcccaggatgcagttcagcagccccagctttgtgtccatcagcaatgaatgctaccagtacagccctgagttccccctggacatcctgaagagcaagaccatccagatgctgacagaggccgtgaaggagggcagcctgcacgcccgggaccctgtgggcggcaccacagagttcctgtttgtgcccctcatcaagctgttctacaccctgctgatcatgggcatcttccacaatgaagacctgaagcacatcctgcagctgattgagcccagcgtcttcaaggaggccgccaccccagaggaggagagtgacaccctggagaaggagctgtctgtggatgatgccaagctgcagggcgctggggaggaggaggccaagggcggcaagaggcccaaggagggcctgctgcagatgaagctgcctgagcctgtgaagctgcagatgtgcctgctgctgcagtacctgtgtgactgccaggtgcgccaccgcatcgaggccatcgtggccttcagtgatgactttgtggccaagctgcaggacaaccagcgcttccgctacaatgaggtgatgcaggccctgaacatgtctgctgccctgacagccaggaagaccaaggagttccgcagccccccccaggagcagatcaacatgctgctgaacttcaaggatgacaagtcagaatgtccctgcccagaggagatccgggaccagctgctggacttccacgaggacctgatgacccactgcggcatcgagctggatgaagatggcagcctggatggcaacagcgacctgaccatccggggccgcctgctgagcctggtggagaaggtgacctacctgaagaagaagcaggccgagaagcctgtggagagtgacagcaagaagagcagcaccctgcagcagctgatcagcgagaccatggtgcgctgggcccaggagagcgtgattgaggaccctgagctggtgcgggccatgtttgtgctgctgcaccggcagtatgatggcattggaggcctggtgcgggccctgcccaagacctacaccatcaatggagtgtctgtggaggacaccatcaacctgctggccagcctgggccagatccgcagcctgctgtctgtgaggatgggcaaggaggaggagaagctgatgatccggggcctgggggacatcatgaacaacaaggtgttctaccagcaccccaacctgatgagggccctgggcatgcatgagaccgtgatggaggtgatggtgaatgtgctgggcggcggggagagcaaggagatcaccttccccaagatggtggccaactgctgccgcttcctgtgctacttctgccgcatcagccggcagaaccagaaggccatgtttgaccacctgagctacctgctggagaacagctctgtgggcctggccagccctgccatgaggggcagcacccccctggatgtggccgccgcctctgtgatggacaacaatgagctggccctggccctgcgggagccagacctggagaaggtggtgcgctacctggccggctgcggcctgcagagctgccagatgctggtgtccaagggctacccagacatcggctggaaccctgtggagggggagcgctacctggacttcctgcgctttgctgtgttctgcaatggagagagcgtggaggagaatgccaacgtggtggtgcggctgctgatccggcggccagaatgttttggacctgccctgcggggggagggcggcaatggcctgctggccgccatggaggaggccatcaagattgctgaggaccccagcagagatggccccagccccaacagcggcagcagcaagaccctggacacagaggaggaggaggatgacaccatccacatgggaaatgccatcatgaccttctacagcgccctgattgacctgctgggccgctgtgcccctgagatgcacctgattcatgctggaaaaggagaggccatccgcatccgcagcatcctgcggagcctcatccccctgggggacctggtgggcgtcatcagcatcgccttccagatgcccaccatcgccaaggatggaaatgtggtggagccagacatgtctgctggcttctgcccagaccacaaggccgccatggtgctcttcctggacagagtgtatggcatcgaggtgcaggacttcctgctgcacctgctggaggtgggcttcctgcctgacctgcgggctgctgccagcctggacacagctgccctgagcgccacagacatggccctggccctgaaccgctacctgtgcacagctgtgctgcccctgctgacccgctgtgcccccctgtttgctggaacagagcaccacgccagcctgattgacagcctgctgcacacagtgtaccgcctgagcaagggctgcagcctgaccaaggcccagagggacagcattgaggtgtgcctgctgagcatctgtggccagctgcggcccagcatgatgcagcacctgctgcggcggctggtgtttgatgtgcccctgctgaatgagcacgccaagatgcccctgaagctgctgaccaaccactatgagcgctgctggaagtactactgcctgcccggcggctggggcaactttggagctgccagcgaggaggagctgcacctgagcaggaagctgttctggggcatctttgatgccctgagccagaagaagtatgagcaggagctgttcaagctggccctgccctgcctgtctgctgtggccggggccctgcccccagactacatggagagcaactacgtgtccatgatggagaagcagagctccatggattctgagggcaacttcaacccccagcctgtggacaccagcaacatcaccatccctgagaagctggagtacttcatcaacaagtatgcagagcacagccatgacaagtggagcatggacaagctggccaacggctggatctatggagagatctacagcgacagcagcaaggtgcagcccctgatgaagccctacaagctgctgtctgagaaggagaaggagatctaccgctggcccatcaaggagagcctgaagaccatgctggcctggggctggagaattgaaagaacccgggagggggacagcatggccctgtacaacagaacaagacgcatcagccagaccagccaggtgtctgtggatgctgcccacggctacagcccccgggccatcgacatgagcaatgtgaccctgagccgggacctgcacgccatggccgagatgatggccgagaactaccacaacatctgggccaagaagaagaagatggagctggagagcaaaggaggcggcaaccaccccctgctggtgccctatgacaccctgacagccaaggagaaggccaaggaccgggagaaggcccaggacatcctgaagttcctgcagatcaatggctatgctgtgtcccggggcttcaaggacctggagctggacacccccagcattgagaagagatttgcctacagcttcctgcagcagctgatccgctacgtggatgaggcccaccagtacatcctggagtttgatggcggcagccggggcaagggggagcacttcccctatgagcaggagatcaagttctttgccaaggtggtgctgcccctgattgaccagtacttcaagaaccaccggctgtacttcctgtctgctgccagccggcccctgtgcagcggcggccacgccagcaacaaggagaaggagatggtgaccagcctcttctgcaagctgggcgtgctggtgcgccaccgcatcagcctgtttggaaatgatgccaccagcatcgtgaactgcctgcacatcctgggccagaccctggatgccaggacagtgatgaagacaggcctggagagcgtgaagagcgccctgcgggccttcctggacaatgctgctgaggacctggagaagaccatggagaacctgaagcagggccagttcacccacaccaggaaccagcccaagggcgtgacccagatcatcaactacaccaccgtggccctgctgcccatgctgagcagcctgtttgagcacatcggccagcaccagtttggagaagatctcatcctggaggatgtgcaggtgtcctgctaccgcatcctgaccagcctgtatgccctgggcaccagcaagagcatctacgtggagcggcagaggtctgccctgggagaatgtctggccgcctttgctggggccttccctgtggccttcctggagacccacctggacaagcacaacatctacagcatctacaacaccaagagcagccgggagagagctgccctgagcctgcccaccaacgtggaggatgtgtgccccaacatccccagcctggagaagctgatggaggagatcgtggagctggccgagagcggcatccgctacacccagatgcctcatgtgatggaggtgatcctgcccatgctgtgcagctacatgagccgctggtgggagcacggccctgagaacaaccctgagagagctgagatgtgctgcacagccctgaacagcgagcacatgaacaccctgctgggcaacatcctgaagatcatctacaacaacctgggcattgatgaaggagcctggatgaagaggctggccgtgttcagccagcccatcatcaacaaggtgaagccccagctgctgaagacccacttcctgcccctgatggagaagctgaagaagaaggccgccaccgtggtgtctgaggaggaccacctgaaggccgaggcccggggggacatgtctgaggccgagctgctgatcctggatgagttcaccaccctggcccgggacctgtatgccttctaccccctgctgatccgctttgtggactacaacagagccaagtggctgaaggagcccaaccctgaggccgaggagctgttcaggatggtggccgaggtgttcatctactggagcaagagccacaacttcaagcgggaggagcagaactttgtggtgcagaatgagatcaacaacatgtccttcctgatcacagacaccaagagcaagatgagcaaggctgctgtgtctgaccaggagaggaagaagatgaagaggaaaggagaccgctacagcatgcagaccagcctcatcgtggccgccctgaagaggctgctgcccatcggcctgaacatctgtgcccctggggaccaggagctgattgccctggccaagaaccgcttcagcctgaaggacacagaagatgaggtgcgggacatcatccgcagcaacatccacctgcagggcaagctggaggaccctgccatccgctggcagatggccctgtacaaggacctgcccaacagaacagatgacaccagtgaccctgagaagacagtggagcgggtgctggacatcgccaacgtgctcttccacctggagcagaagagcaagagggtgggccgccgccactactgcctggtggagcacccccagaggagcaagaaggctgtgtggcacaagctgctgagcaagcagaggaagagagctgtggtggcctgcttcaggatggcccccctgtacaacctgcccaggcacagagctgtgaacctcttcctgcagggctatgagaagtcctggattgaaacagaggagcactactttgaggacaagctgattgaggacctggccaagccaggagctgagcccccagaggaggatgagggcaccaagagggtggaccccctgcaccagctgatcctgctcttcagcaggacagccctgacagagaagtgcaagctggaggaggacttcctgtacatggcctatgctgacatcatggccaagagctgccatgatgaagaagatgatgatggagaggaggaggtgaagagctttgaggtgacaggcagccagaggagcaaggagaaggagatggagaagcagaagctgctgtaccagcaggcccggctgcatgacagaggagctgctgagatggtgctgcagaccatcagcgccagcaagggggagaccggccccatggtggccgccaccctgaagctgggcatcgccatcctgaatggaggcaacagcacagtgcagcagaagatgctggactacctgaaggagaagaaggatgtgggcttcttccagagcctggccggcctgatgcagagctgcagcgtgctggacctgaatgcctttgagcggcagaacaaggccgagggcctgggcatggtgacagaggagggcagcggggagaaggtgctgcaggatgatgagttcacctgtgacctcttccgcttcctgcagctgctgtgtgagggccacaacagcgacttccagaactacctgcggacccagacaggcaacaacaccaccgtgaacatcatcatcagcacagtggactacctgctgcgggtgcaggagagcatcagtgacttctactggtactacagcggcaaggatgtgattgatgagcagggccagaggaacttcagcaaggccatccaggtggccaagcaggtgttcaacaccctgacagagtacatccagggcccctgcaccggcaaccagcagagcctggcccacagccggctgtgggatgctgtggtgggcttcctgcacgtgtttgcccacatgcagatgaagctgagccaggacagcagccagatcgagctgctgaaggagctgatggacctgcagaaggacatggtggtgatgctgctgtccatgctggagggcaatgtggtgaatggcaccatcggcaagcagatggtggacatgctggtggagagcagcaacaacgtggagatgatcctgaagttctttgacatgttcctgaagctgaaggacctgaccagcagtgacaccttcaaggagtatgaccctgatggcaagggcgtcatcagcaagagggacttccacaaggccatggagagccacaagcactacacccagagcgagacagagttcctgctgagctgtgccgagacagatgaaaatgagaccctggactatgaggagtttgtgaagcgcttccacgagcccgccaaggacatcggcttcaacgtggccgtgctgctgaccaacctgtctgagcacatgcccaatgacacccggctgcagaccttcctggagctggccgagagcgtgctgaactacttccagcccttcctgggccgcatcgagatcatgggcagcgccaagagaattgagcgggtgtactttgagatcagcgagagcagcaggacccagtgggagaagccccaggtgaaggagagcaagaggcagttcatctttgatgtggtgaatgaaggaggagagaaggagaagatggagctgtttgtgaacttctgtgaggacaccatctttgagatgcagctggccgcccagatcagcgagagtgacctgaatgaaagaagtgccaacaaggaggagagcgagaaggagaggcctgaggagcagggccccaggatggccttcttcagcatcctgactgtgcgcagcgccctgtttgccctgcgctacaacatcctgaccctgatgaggatgctgagcctgaagagcctgaagaagcagatgaagaaggtgaagaagatgacagtgaaggacatggtgacagccttcttcagcagctactggagcatcttcatgaccctgctgcactttgtggccagcgtcttccggggcttcttccgcatcatctgcagcctgctgctgggcggcagcctggtggagggcgccaagaagatcaaggtggccgagctgctggccaacatgccagaccccacccaggatgaggtgagaggagatggagaggagggggagaggaagcccctggaggccgccctgcccagcgaggacctgacagacctgaaggagctgacagaggagagtgacctgctgagtgacatcttcggcctggacctgaagcgggagggcggccagtacaagctgatcccccacaaccccaatgccggcctgagtgacctgatgagcaaccctgtgcccatgcctgaggtgcaggagaagttccaggagcagaaggccaaggaggaggagaaggaggagaaggaggagaccaagtctgagcctgagaaggccgagggagaagatggagagaaggaggagaaggccaaggaggacaagggcaagcagaagctgcggcagctgcacacccaccgctacggggagcctgaggtgcctgagagcgccttctggaagaagatcatcgcctaccagcagaagctgctgaactactttgccaggaacttctacaacatgaggatgctggccctgtttgtggcctttgccatcaacttcatcctgctcttctacaaggtgtccaccagctctgtggtggagggcaaggagctgcccaccaggagcagcagtgaaaatgccaaggtgaccagcctggacagcagcagccaccgcatcatcgctgtgcactacgtgctggaggagagcagcggctacatggagcccaccctgcgcatcctggccatcctgcacacagtcatctccttcttctgcatcatcggctactactgcctgaaggtgcccctggtgatcttcaagcgggagaaggaggtggccaggaagctggagtttgatggcctgtacatcacagagcagcccagtgaagatgacatcaagggccagtgggaccggctggtgatcaacacccagagcttccccaacaactactgggacaagtttgtgaagaggaaggtgatggacaagtatggagagttctacggccgggaccgcatcagcgagctgctgggcatggacaaggccgccctggacttcagtgatgcccgggagaagaagaagcccaagaaggacagcagcctgtctgctgtgctgaacagcattgatgtgaagtaccagatgtggaagctgggcgtggtgttcacagacaacagcttcctgtacctggcctggtacatgaccatgtctgtgctgggccactacaacaacttcttctttgctgcccacctgctggacatcgccatgggcttcaagaccctgcggaccatcctgagctctgtgacccacaacgggaagcagctggtgctgactgtgggcctgctggccgtggtggtgtacctgtacacagtggtggccttcaacttcttcaggaagttctacaacaagtcagaagatggagacaccccagacatgaagtgtgatgacatgctgacctgctacatgttccacatgtatgtgggcgtgcgggccggcggcggcattggagatgaaattgaggaccctgctggagatgaatatgagatctaccgcatcatctttgacatcaccttcttcttctttgtgattgtcatcctgctggccatcatccagggcctcatcattgatgccttcggggagctgcgggaccagcaggagcaggtgaaggaggacatggagaccaagtgcttcatctgtggcattggaaatgactactttgacacagtgccccacggctttgagacccacaccctgcaggagcacaacctggccaactacctgttcttcctgatgtacctgatcaacaaggatgaaacagagcacacaggccaggagagctatgtgtggaagatgtaccaggagcgctgctgggagttcttccctgctggggactgcttcaggaagcagtatgaggaccagctgaactag

SEQ ID NO: 168708 - DNA, 14904 bp, synthetic construct
  misc_feature 1..14904: note = Description of Artificial Sequence: Synthetic coding sequence
  source 1..14904: mol_type = other DNA
atggctgatggaggagagggggaggatgagatccagttcctgaggacagatgatgaggtggtgctgcagtgcacagccaccatccacaaggagcagcagaagctgtgcctggccgctgagggcttcggcaaccggctgtgcttcctggagagcaccagcaacagcaagaatgtgcccccagacctgagcatctgcacctttgtgctggagcagagcctgtctgtgcgggccctgcaggagatgctggccaacacagtggagaagtctgagggccaggtggatgtggagaagtggaagttcatgatgaagacagcccagggcggcggccacaggaccctgctgtatggccacgccatcctgctgcggcacagctacagcggcatgtacctgtgctgcctgagcaccagccgcagcagcacagacaagctggcctttgatgtgggcctgcaggaggacaccaccggggaggcctgctggtggaccatccacccagccagcaagcagaggtctgagggggagaaggtgcgggtgggagatgacctgatcctggtgtctgtgagcagcgagcgctacctgcacctgtcctatggaaatggcagcctgcacgtggatgctgccttccagcagaccctgtggagcgtggcccccatcagcagcggcagcgaggccgcccagggctacctgattggaggagatgtgctgcggctgctgcacggccacatggatgaatgtctgactgtgcccagcggggagcacggggaggagcagaggagaacagtgcactatgagggcggcgctgtgtctgtgcacgcccggagcctgtggaggctggagaccctgcgggtggcctggagcggcagccacatccgctggggccagcccttccggctgcggcacgtgaccaccgggaagtacctgagcctgatggaggacaagaacctgctgctgatggacaaggagaaggcagatgtgaagagcacagccttcaccttccgcagcagcaaggagaagctggatgtgggcgtgaggaaggaggtggatggcatgggcaccagcgagatcaagtacggggacagcgtgtgctacatccagcacgtggacaccggcctgtggctgacctaccagagcgtggatgtgaagtctgtgaggatgggcagcatccagaggaaggccatcatgcaccacgagggccacatggatgatggcatcagcctgagccgcagccagcacgaggagagcaggacagcccgggtcatccgcagcaccgtcttcctgttcaaccgcttcatccggggcctggatgccctgagcaagaaggccaaggccagcacagtggacctgcccattgaatctgtgtccctgagcctgcaggacctgattggctacttccaccccccagatgagcacctggagcacgaggacaagcagaaccggctgcgggccctgaagaaccggcagaacctcttccaggaggagggcatgatcaacctggtgctggagtgcatcgaccggctgcacgtgtacagcagcgctgcccactttgctgatgtggccggccgggaggccggggagagctggaagagcatcctgaacagcctgtatgagctgctggccgccctgatccggggcaacaggaagaactgtgcccagttcagcggcagcctggactggctgatcagccggctggagcggctggaggccagcagcggcatcctggaggtgctgcactgtgtgctggtggagagccctgaggccctgaacatcatcaaggagggccacatcaagagcatcatcagcctgctggacaagcacggcaggaaccacaaggtgctggatgtgctgtgcagcctgtgtgtgtgccacggcgtggccgtgcgcagcaaccagcacctgatctgtgacaacctgctgcccggccgggacctgctgctgcagacccggctggtgaaccacgtgtcctccatgaggcccaacatcttcctgggcgtgtctgagggcagcgcccagtacaagaagtggtactatgagctgatggtggaccacacagagccctttgtgacagctgaggccacccacctgcgggtgggctgggccagcacagagggctacagcccctacccaggcggcggggaggagtggggcggcaatggagtgggagatgacctcttctcctatggctttgatggcctgcacctgtggagcggctgcatcgccaggacagtgagcagccccaaccagcacctgctgaggacagatgatgtgatcagctgctgcctggacctgagcgcccccagcatctccttccgcatcaatggccagcctgtgcagggcatgtttgagaacttcaacattgatggcctcttcttccctgtggtgtccttctctgctggcatcaaggtgcgcttcctgctgggcggccgccacggggagttcaagttcctgcccccacctggctacgccccctgctatgaagctgtgctgcccaaggagaagctgaaggtggagcacagccgggagtacaagcaggagaggacctacacccgggacctgctgggccccaccgtgtccctgacccaggccgccttcacccccatccctgtggacaccagccagatcgtgctgcccccccacctggagcgcatccgggagaagctggccgagaacatccacgagctgtgggtgatgaacaagattgagctgggctggcagtatggccctgtgagagatgacaacaagaggcagcacccctgcctggtggagttcagcaagctgcctgagcaggagaggaactacaacctgcagatgagcctggagaccctgaagaccctgctggccctgggctgccacgtgggcatcagtgatgagcacgccgaggacaaggtgaagaagatgaagctgcccaagaactaccagctgaccagcggctacaagccagcccccatggacctgtccttcatcaagctgacccccagccaggaggccatggtggacaagctggctgaaaatgcccacaacgtgtgggcccgggaccgcatccggcagggctggacctacggcatccagcaggatgtgaagaacagaagaaacccccggctggtgccctacaccctgctggatgacaggaccaagaagagcaacaaggacagcctgcgggaggccgtgaggaccctgctgggctacggctacaacctggaggccccagaccaggaccacgccgcccgggcagaggtgtgcagcggcactggagagcgcttccgcatcttccgggcagagaagacctatgctgtgaaggccggccgctggtactttgaatttgaaacagtgacagctggggacatgagggtgggctggagccggcccggctgccagcctgaccaggagctgggcagtgatgagcgggcctttgcctttgatggcttcaaggcccagcgctggcaccagggcaatgagcactacggccgctcctggcaggccggagatgtggtgggctgcatggtggacatgaatgagcacaccatgatgttcaccctgaatggagagatcctgctggatgacagcggcagcgagctggccttcaaggactttgatgtgggagatggcttcatccctgtgtgcagcctgggcgtggcccaggtgggccgcatgaactttgggaaggatgtgtccaccctgaagtacttcaccatctgtggcctgcaggagggctatgagccctttgctgtgaacaccaacagagacatcaccatgtggctgagcaagaggctgccccagttcctgcaggtgcccagcaaccacgagcacatcgaggtgaccagaattgatggcaccatcgacagcagcccctgcctgaaggtgacccagaagagctttggcagccagaacagcaacacagacatcatgttctaccgcctgtccatgcccattgaatgtgccgaggtgttcagcaagacagtggccggcggcctgcctggagctggcctgtttggccccaagaatgacctggaggactatgatgctgacagcgactttgaggtgctgatgaagacagcccacggccacctggtgcctgacagagtggacaaggacaaggaggccaccaagccagagttcaacaaccacaaggactatgcccaggagaagcccagccggctgaagcagcgcttcctgctgcggaggaccaagccagactacagcaccagccacagcgcccggctgacagaagatgtgctggctgatgacagagatgattatgacttcctgatgcagaccagcacctactactacagcgtgcgcatcttccctggccaggagcccgccaacgtgtgggtgggctggatcaccagtgacttccaccagtatgacaccggctttgacctggacagagtgaggacagtgacagtgaccctgggagatgagaagggcaaggtgcatgagagcatcaagaggagcaactgctacatggtgtgtgccggggagagcatgagccctggccagggcaggaacaacaacggcctggagatcggctgtgtggtggatgctgccagcggcctgctgaccttcatcgccaacgggaaggagctgagcacctactaccaggtggagcccagcaccaagctgtttcctgctgtgtttgcccaggccaccagccccaacgtgttccagtttgagctgggccgcatcaagaatgtgatgcccctgtctgctggcctcttcaagtctgagcacaagaaccctgtgccccagtgccccccccggctgcacgtgcagttcctgagccacgtgctgtggagcaggatgcccaaccagttcctgaaggtggatgtgagccgcatcagcgagcggcagggctggctggtgcagtgcctggaccccctgcagttcatgagcctgcacatcccagaagaaaatagatctgtggacatcctggagctgacagagcaggaggagctgctgaagttccactaccacaccctgcggctgtacagcgctgtgtgtgccctgggcaaccaccgggtggcccacgccctgtgcagccacgtggatgagccccagctgctgtatgccatcgagaacaagtacatgcctggcctgctgcgggccggctactatgacctgctgattgacatccacctgagcagctatgccacagcccggctgatgatgaacaatgagtacatcgtgcccatgacagaggagaccaagagcatcaccctcttcccagatgagaacaagaagcacggcctgcccggcatcggcctgagcaccagcctgcggcccaggatgcagttcagcagccccagctttgtgtccatcagcaatgaatgctaccagtacagccctgagttccccctggacatcctgaagagcaagaccatccagatgctgacagaggccgtgaaggagggcagcctgcacgcccgggaccctgtgggcggcaccacagagttcctgtttgtgcccctcatcaagctgttctacaccctgctgatcatgggcatcttccacaatgaagacctgaagcacatcctgcagctgattgagcccagcgtcttcaaggaggccgccaccccagaggaggagagtgacaccctggagaaggagctgtctgtggatgatgccaagctgcagggcgctggggaggaggaggccaagggcggcaagaggcccaaggagggcctgctgcagatgaagctgcctgagcctgtgaagctgcagatgtgcctgctgctgcagtacctgtgtgactgccaggtgcgccaccgcatcgaggccatcgtggccttcagtgatgactttgtggccaagctgcaggacaaccagcgcttccgctacaatgaggtgatgcaggccctgaacatgtctgctgccctgacagccaggaagaccaaggagttccgcagccccccccaggagcagatcaacatgctgctgaacttcaaggatgacaagtcagaatgtccctgcccagaggagatccgggaccagctgctggacttccacgaggacctgatgacccactgcggcatcgagctggatgaagatggcagcctggatggcaacagcgacctgaccatccggggccgcctgctgagcctggtggagaaggtgacctacctgaagaagaagcaggccgagaagcctgtggagagtgacagcaagaagagcagcaccctgcagcagctgatcagcgagaccatggtgcgctgggcccaggagagcgtgattgaggaccctgagctggtgcgggccatgtttgtgctgctgcaccggcagtatgatggcattggaggcctggtgcgggccctgcccaagacctacaccatcaatggagtgtctgtggaggacaccatcaacctgctggccagcctgggccagatccgcagcctgctgtctgtgaggatgggcaaggaggaggagaagctgatgatccggggcctgggggacatcatgaacaacaaggtgttctaccagcaccccaacctgatgagggccctgggcatgcatgagaccgtgatggaggtgatggtgaatgtgctgggcggcggggagagcaaggagatcaccttccccaagatggtggccaactgctgccgcttcctgtgctacttctgccgcatcagccggcagaaccagaaggccatgtttgaccacctgagctacctgctggagaacagctctgtgggcctggccagccctgccatgaggggcagcacccccctggatgtggccgccgcctctgtgatggacaacaatgagctggccctggccctgcgggagccagacctggagaaggtggtgcgctacctggccggctgcggcctgcagagctgccagatgctggtgtccaagggctacccagacatcggctggaaccctgtggagggggagcgctacctggacttcctgcgctttgctgtgttctgcaatggagagagcgtggaggagaatgccaacgtggtggtgcggctgctgatccggcggccagaatgttttggacctgccctgcggggggagggcggcaatggcctgctggccgccatggaggaggccatcaagattgctgaggaccccagcagagatggccccagccccaacagcggcagcagcaagaccctggacacagaggaggaggaggatgacaccatccacatgggaaatgccatcatgaccttctacagcgccctgattgacctgctgggccgctgtgcccctgagatgcacctgattcatgctggaaaaggagaggccatccgcatccgcagcatcctgcggagcctcatccccctgggggacctggtgggcgtcatcagcatcgccttccagatgcccaccatcgccaaggatggaaatgtggtggagccagacatgtctgctggcttctgcccagaccacaaggccgccatggtgctcttcctggacagagtgtatggcatcgaggtgcaggacttcctgctgcacctgctggaggtgggcttcctgcctgacctgcgggctgctgccagcctggacacagctgccctgagcgccacagacatggccctggccctgaaccgctacctgtgcacagctgtgctgcccctgctgacccgctgtgcccccctgtttgctggaacagagcaccacgccagcctgattgacagcctgctgcacacagtgtaccgcctgagcaagggctgcagcctgaccaaggcccagagggacagcattgaggtgtgcctgctgagcatctgtggccagctgcggcccagcatgatgcagcacctgctgcggcggctggtgtttgatgtgcccctgctgaatgagcacgccaagatgcccctgaagctgctgaccaaccactatgagcgctgctggaagtactactgcctgcccggcggctggggcaactttggagctgccagcgaggaggagctgcacctgagcaggaagctgttctggggcatctttgatgccctgagccagaagaagtatgagcaggagctgttcaagctggccctgccctgcctgtctgctgtggccggggccctgcccccagactacatggagagcaactacgtgtccatgatggagaagcagagctccatggattctgagggcaacttcaacccccagcctgtggacaccagcaacatcaccatccctgagaagctggagtacttcatcaacaagtatgcagagcacagccatgacaagtggagcatggacaagctggccaacggctggatctatggagagatctacagcgacagcagcaaggtgcagcccctgatgaagccctacaagctgctgtctgagaaggagaaggagatctaccgctggcccatcaaggagagcctgaagaccatgctggcctggggctggagaattgaaagaacccgggagggggacagcatggccctgtacaacagaacaagacgcatcagccagaccagccaggtgtctgtggatgctgcccacggctacagcccccgggccatcgacatgagcaatgtgaccctgagccgggacctgcacgccatggccgagatgatggccgagaactaccacaacatctgggccaagaagaagaagatggagctggagagcaaaggaggcggcaaccaccccctgctggtgccctatgacaccctgacagccaaggagaaggccaaggaccgggagaaggcccaggacatcctgaagttcctgcagatcaatggctatgctgtgtcccggggcttcaaggacctggagctggacacccccagcattgagaagagatttgcctacagcttcctgcagcagctgatccgctacgtggatgaggcccaccagtacatcctggagtttgatggcggcagccggggcaagggggagcacttcccctatgagcaggagatcaagttctttgccaaggtggtgctgcccctgattgaccagtacttcaagaaccaccggctgtacttcctgtctgctgccagccggcccctgtgcagcggcggccacgccagcaacaaggagaaggagatggtgaccagcctcttctgcaagctgggcgtgctggtgcgccaccgcatcagcctgtttggaaatgatgccaccagcatcgtgaactgcctgcacatcctgggccagaccctggatgccaggacagtgatgaagacaggcctggagagcgtgaagagcgccctgcgggccttcctggacaatgctgctgaggacctggagaagaccatggagaacctgaagcagggccagttcacccacaccaggaaccagcccaagggcgtgacccagatcatcaactacaccaccgtggccctgctgcccatgctgagcagcctgtttgagcacatcggccagcaccagtttggagaagatctcatcctggaggatgtgcaggtgtcctgctaccgcatcctgaccagcctgtatgccctgggcaccagcaagagcatctacgtggagcggcagaggtctgccctgggagaatgtctggccgcctttgctggggccttccctgtggccttcctggagacccacctggacaagcacaacatctacagcatctacaacaccaagagcagccgggagagagctgccctgagcctgcccaccaacgtggaggatgtgtgccccaacatccccagcctggagaagctgatggaggagatcgtggagctggccgagagcggcatccgctacacccagatgcctcatgtgatggaggtgatcctgcccatgctgtgcagctacatgagccgctggtgggagcacggccctgagaacaaccctgagagagctgagatgtgctgcacagccctgaacagcgagcacatgaacaccctgctgggcaacatcctgaagatcatctacaacaacctgggcattgatgaaggagcctggatgaagaggctggccgtgttcagccagcccatcatcaacaaggtgaagccccagctgctgaagacccacttcctgcccctgatggagaagctgaagaagaaggccgccaccgtggtgtctgaggaggaccacctgaaggccgaggcccggggggacatgtctgaggccgagctgctgatcctggatgagttcaccaccctggcccgggacctgtatgccttctaccccctgctgatccgctttgtggactacaacagagccaagtggctgaaggagcccaaccctgaggccgaggagctgttcaggatggtggccgaggtgttcatctactggagcaagagccacaacttcaagcgggaggagcagaactttgtggtgcagaatgagatcaacaacatgtccttcctgatcacagacaccaagagcaagatgagcaaggctgctgtgtctgaccaggagaggaagaagatgaagaggaaaggagaccgctacagcatgcagaccagcctcatcgtggccgccctgaagaggctgctgcccatcggcctgaacatctgtgcccctggggaccaggagctgattgccctggccaagaaccgcttcagcctgaaggacacagaagatgaggtgcgggacatcatccgcagcaacatccacctgcagggcaagctggaggaccctgccatccgctggcagatggccctgtacaaggacctgcccaacagaacagatgacaccagtgaccctgagaagacagtggagcgggtgctggacatcgccaacgtgctcttccacctggagcagaagagcaagagggtgggccgccgccactactgcctggtggagcacccccagaggagcaagaaggctgtgtggcacaagctgctgagcaagcagaggaagagagctgtggtggcctgcttcaggatggcccccctgtacaacctgcccaggcacagagctgtgaacctcttcctgcagggctatgagaagtcctggattgaaacagaggagcactactttgaggacaagctgattgaggacctggccaagccaggagctgagcccccagaggaggatgagggcaccaagagggtggaccccctgcaccagctgatcctgctcttcagcaggacagccctgacagagaagtgcaagctggaggaggacttcctgtacatggcctatgctgacatcatggccaagagctgccatgatgaagaagatgatgatggagaggaggaggtgaagagctttgaggagaaggagatggagaagcagaagctgctgtaccagcaggcccggctgcatgacagaggagctgctgagatggtgctgcagaccatcagcgccagcaagggggagaccggccccatggtggccgccaccctgaagctgggcatcgccatcctgaatggaggcaacagcacagtgcagcagaagatgctggactacctgaaggagaagaaggatgtgggcttcttccagagcctggccggcctgatgcagagctgcagcgtgctggacctgaatgcctttgagcggcagaacaaggccgagggcctgggcatggtgacagaggagggcagcggggagaaggtgctgcaggatgatgagttcacctgtgacctcttccgcttcctgcagctgctgtgtgagggccacaacagcgacttccagaactacctgcggacccagacaggcaacaacaccaccgtgaacatcatcatcagcacagtggactacctgctgcgggtgcaggagagcatcagtgacttctactggtactacagcggcaaggatgtgattgatgagcagggccagaggaacttcagcaaggccatccaggtggccaagcaggtgttcaacaccctgacagagtacatccagggcccctgcaccggcaaccagcagagcctggcccacagccggctgtgggatgctgtggtgggcttcctgcacgtgtttgcccacatgcagatgaagctgagccaggacagcagccagatcgagctgctgaaggagctgatggacctgcagaaggacatggtggtgatgctgctgtccatgctggagggcaatgtggtgaatggcaccatcggcaagcagatggtggacatgctggtggagagcagcaacaacgtggagatgatcctgaagttctttgacatgttcctgaagctgaaggacctgaccagcagtgacaccttcaaggagtatgaccctgatggcaagggcgtcatcagcaagagggacttccacaaggccatggagagccacaagcactacacccagagcgagacagagttcctgctgagctgtgccgagacagatgaaaatgagaccctggactatgaggagtttgtgaagcgcttccacgagcccgccaaggacatcggcttcaacgtggccgtgctgctgaccaacctgtctgagcacatgcccaatgacacccggctgcagaccttcctggagctggccgagagcgtgctgaactacttccagcccttcctgggccgcatcgagatcatgggcagcgccaagagaattgagcgggtgtactttgagatcagcgagagcagcaggacccagtgggagaagccccaggtgaaggagagcaagaggcagttcatctttgatgtggtgaatgaaggaggagagaaggagaagatggagctgtttgtgaacttctgtgaggacaccatctttgagatgcagctggccgcccagatcagcgagagtgacctgaatgaaagaagtgccaacaaggaggagagcgagaaggagaggcctgaggagcagggccccaggatggccttcttcagcatcctgactgtgcgcagcgccctgtttgccctgcgctacaacatcctgaccctgatgaggatgctgagcctgaagagcctgaagaagcagatgaagaaggtgaagaagatgacagtgaaggacatggtgacagccttcttcagcagctactggagcatcttcatgaccctgctgcactttgtggccagcgtcttccggggcttcttccgcatcatctgcagcctgctgctgggcggcagcctggtggagggcgccaagaagatcaaggtggccgagctgctggccaacatgccagaccccacccaggatgaggtgagaggagatggagaggagggggagaggaagcccctggaggccgccctgcccagcgaggacctgacagacctgaaggagctgacagaggagagtgacctgctgagtgacatcttcggcctggacctgaagcgggagggcggccagtacaagctgatcccccacaaccccaatgccggcctgagtgacctgatgagcaaccctgtgcccatgcctgaggtgcaggagaagttccaggagcagaaggccaaggaggaggagaaggaggagaaggaggagaccaagtctgagcctgagaaggccgagggagaagatggagagaaggaggagaaggccaaggaggacaagggcaagcagaagctgcggcagctgcacacccaccgctacggggagcctgaggtgcctgagagcgccttctggaagaagatcatcgcctaccagcagaagctgctgaactactttgccaggaacttctacaacatgaggatgctggccctgtttgtggcctttgccatcaacttcatcctgctcttctacaaggtgtccaccagctctgtggtggagggcaaggagctgcccaccaggagcagcagtgaaaatgccaaggtgaccagcctggacagcagcagccaccgcatcatcgctgtgcactacgtgctggaggagagcagcggctacatggagcccaccctgcgcatcctggccatcctgcacacagtcatctccttcttctgcatcatcggctactactgcctgaaggtgcccctggtgatcttcaagcgggagaaggaggtggccaggaagctggagtttgatggcctgtacatcacagagcagcccagtgaagatgacatcaagggccagtgggaccggctggtgatcaacacccagagcttccccaacaactactgggacaagtttgtgaagaggaaggtgatggacaagtatggagagttctacggccgggaccgcatcagcgagctgctgggcatggacaaggccgccctggacttcagtgatgcccgggagaagaagaagcccaagaaggacagcagcctgtctgctgtgctgaacagcattgatgtgaagtaccagatgtggaagctgggcgtggtgttcacagacaacagcttcctgtacctggcctggtacatgaccatgtctgtgctgggccactacaacaacttcttctttgctgcccacctgctggacatcgccatgggcttcaagaccctgcggaccatcctgagctctgtgacccacaacgggaagcagctggtgctgactgtgggcctgctggccgtggtggtgtacctgtacacagtggtggccttcaacttcttcaggaagttctacaacaagtcagaagatggagacaccccagacatgaagtgtgatgacatgctgacctgctacatgttccacatgtatgtgggcgtgcgggccggcggcggcattggagatgaaattgaggaccctgctggagatgaatatgagatctaccgcatcatctttgacatcaccttcttcttctttgtgattgtcatcctgctggccatcatccagggcctcatcattgatgccttcggggagctgcgggaccagcaggagcaggtgaaggaggacatggagaccaagtgcttcatctgtggcattggaaatgactactttgacacagtgccccacggctttgagacccacaccctgcaggagcacaacctggccaactacctgttcttcctgatgtacctgatcaacaaggatgaaacagagcacacaggccaggagagctatgtgtggaagatgtaccaggagcgctgctgggagttcttccctgctggggactgcttcaggaagcagtatgaggaccagctgaactag

SEQ ID NO: 168709 - DNA, 987 bp, synthetic construct
  misc_feature 1..987: note = Description of Artificial Sequence: Synthetic coding sequence
  source 1..987: mol_type = other DNA
atggagcccaccctgcgcatcctggccatcctgcacacagtcatctccttcttctgcatcatcggctactactgcctgaaggtgcccctggtgatcttcaagcgggagaaggaggtggccaggaagctggagtttgatggcctgtacatcacagagcagcccagtgaagatgacatcaagggccagtgggaccggctggtgatcaacacccagagcttccccaacaactactgggacaagtttgtgaagaggaaggtgatggacaagtacggggagttctacggccgggaccgcatcagcgagctgctgggcatggacaaggccgccctggacttcagtgatgcccgggagaagaagaagcccaagaaggacagcagcctgtctgctgtgctgaacagcattgatgtgaagtaccagatgtggaagctgggcgtggtgttcacagacaacagcttcctgtacctggcctggtacatgaccatgtctgtgctgggccactacaacaacttcttctttgctgcccacctgctggacatcgccatgggcttcaagaccctgcggaccatcctgagctctgtgacccacaacgggaagcagctggtgctgactgtgggcctgctggccgtggtggtgtacctgtacacagtggtggccttcaacttcttcaggaagttctacaacaagtcagaagatggagacaccccagacatgaagtgtgatgacatgctgacctgctacatgttccacatgtatgtgggcgtgcgggccggcggcggcattggagatgaaattgaagatcctgctggagatgaatatgagatctaccgcatcatctttgacatcaccttcttcttcttcgtcatcgtcatcctgctggccatcatccagggcctcatcattgatgcctttggagagctgcgggaccagcaggagcaggtgaaggaggacatggaggtgttcagtgatgtgtcctacaagcagaggtag

SEQ ID NO: 168710 - DNA, 645 bp, synthetic construct
  misc_feature 1..645: note = Description of Artificial Sequence: Synthetic coding sequence
  source 1..645: mol_type = other DNA
agcctcttctgcaagctgggcgtgctggtgcgccaccgcatcagcctgtttggaaatgatgccaccagcatcgtgaactgcctgcacatcctgggccagaccctggatgccaggacagtgatgaagacaggcctggagagcgtgaagagcgccctgcgggccttcctggacaatgctgctgaggacctggagaagaccatggagaacctgaagcagggccagttcacccacaccaggaaccagcccaagggcgtgacccagatcatcaactacaccaccgtggccctgctgcccatgctgagcagcctgtttgagcacatcggccagcaccagtttggagaggacctgatcctggaggatgtgcaggtgtcctgctaccgcatcctgaccagcctgtatgccctgggcaccagcaagagcatctacgtggagcggcagaggtctgccctgggggagtgcctggccgcctttgctggggccttccctgtggccttcctggagacccacctggacaagcacaacatctacagcatctacaacaccaagagcagccgggagcgggccgccctgagcctgcccaccaacgtggaggatgtgtgccccaacatccccagcctggagaagctgatggaggagatcgtgtag

SEQ ID NO: 168711 - DNA, 4266 bp, synthetic construct
  misc_feature 1..4266: note = Description of Artificial Sequence: Synthetic coding sequence
  source 1..4266: mol_type = other DNA
atgaagacaggcctggagagcgtgaagagcgccctgcgggccttcctggacaatgctgctgaggacctggagaagaccatggagaacctgaagcagggccagttcacccacaccaggaaccagcccaagggcgtgacccagatcatcaactacaccaccgtggccctgctgcccatgctgagcagcctgtttgagcacatcggccagcaccagtttggagaggacctgatcctggaggatgtgcaggtgtcctgctaccgcatcctgaccagcctgtatgccctgggcaccagcaagagcatctacgtggagcggcagaggtctgccctgggggagtgcctggccgcctttgctggggccttccctgtggccttcctggagacccacctggacaagcacaacatctacagcatctacaacaccaagagcagccgggagcgggccgccctgagcctgcccaccaacgtggaggatgtgtgccccaacatccccagcctggagaagctgatggaggagatcgtggagctggccgagagcggcatccgctacacccagatgccccacgtgatggaggtgatcctgcccatgctgtgcagctacatgagccgctggtgggagcacggccctgagaacaaccctgagcgggcagagatgtgctgcacagccctgaacagcgagcacatgaacaccctgctgggcaacatcctgaagatcatctacaacaacctgggcattgatgagggcgcctggatgaagaggctggccgtgttcagccagcccatcatcaacaaggtgaagccccagctgctgaagacccacttcctgcccctgatggagaagctgaagaagaaggccgccaccgtggtgtctgaggaggaccacctgaaggccgaggcccggggggacatgtctgaggccgagctgctgatcctggatgagttcaccaccctggcccgggacctgtatgccttctaccccctgctgatccgctttgtggactacaacagagccaagtggctgaaggagcccaaccctgaggccgaggagctgttcaggatggtggccgaggtgttcatctactggagcaagagccacaacttcaagcgggaggagcagaactttgtggtgcagaatgagatcaacaacatgtccttcctgatcacagacaccaagagcaagatgagcaaggctgctgtgtctgaccaggagaggaagaagatgaagaggaagggggaccgctacagcatgcagaccagcctgattgtggccgccctgaagaggctgctgcccatcggcctgaacatctgtgcccctggggaccaggagctgattgccctggccaagaaccgcttcagcctgaaggacacagaagatgaggtgcgggacatcatccgcagcaacatccacctgcagggcaagctggaggaccctgccatccgctggcagatggccctgtacaaggacctgcccaacagaacagatgacaccagtgaccctgagaagacagtggagcgggtgctggacatcgccaacgtgctcttccacctggagcagaagagcaagagggtgggcagaagacactactgcctggtggagcacccccagaggagcaagaaggctgtgtggcacaagctgctgagcaagcagaggaagagagctgtggtggcctgcttcaggatggcccccctgtacaacctgcccaggcacagagctgtgaacctcttcctgcagggctatgagaagtcctggattgaaacagaggagcactactttgaggacaagctgattgaggacctggccaagccaggagctgagcccccagaagaagatgagggcaccaagagggtggaccccctgcaccagctgatcctgctcttcagcaggacagccctgacagagaagtgcaagctggaggaggacttcctgtacatggcctatgctgacatcatggccaagagctgccatgatgaggaggatgatgatggagaggaggaggtgaagagctttgaacatgacatcatcaaggacctgaggaacaagtttgccagcctgggggagaacagcctggagaaggagatggagaagcagaagctgctgtaccagcaggcccggctgcatgacagaggagctgctgagatggtgctgcagaccatcagcgccagcaagggggagaccggccccatggtggccgccaccctgaagctgggcatcgccatcctgaatggaggcaacagcacagtgcagcagaagatgctggactacctgaaggagaagaaggatgtgggcttcttccagagcctggccggcctgatgcagagctgcagcgtgctggacctgaatgcctttgagcggcagaacaaggccgagggcctgggcatggtgacagaggagggcagcggggagaaggtgctgcaggatgatgagttcacctgtgacctcttccgcttcctgcagctgctgtgtgagggccacaacagcgacttccagaactacctgcggacccagacaggcaacaacaccaccgtgaacatcatcatcagcacagtggactacctgctgcgggtgcaggagagcatcagtgacttctactggtactacagcggcaaggatgtgattgatgagcagggccagaggaacttcagcaaggccatccaggtggccaagcaggtgttcaacaccctgacagagtacatccagggcccctgcaccggcaaccagcagagcctggcccacagccggctgtgggatgctgtggtgggcttcctgcacgtgtttgcccacatgcagatgaagctgagccaggacagcagccagatcgagctgctgaaggagctgatggacctgcagaaggacatggtggtgatgctgctgtccatgctggagggcaatgtggtgaatggcaccatcggcaagcagatggtggacatgctggtggagagcagcaacaacgtggagatgatcctgaagttctttgacatgttcctgaagctgaaggacctgaccagcagtgacaccttcaaggagtatgaccctgatggcaagggcgtcatcagcaagagggacttccacaaggccatggagagccacaagcactacacccagagcgagacagagttcctgctgagctgtgccgagacagatgaaaatgagaccctggactatgaggagtttgtgaagcgcttccacgagcccgccaaggacatcggcttcaacgtggccgtgctgctgaccaacctgtctgagcacatgcccaatgacacccggctgcagaccttcctggagctggccgagagcgtgctgaactacttccagcccttcctgggccgcatcgagatcatgggcagcgccaagagaattgagcgggtgtactttgagatcagcgagagcagcaggacccagtgggagaagccccaggtgaaggagagcaagaggcagttcatctttgatgtggtgaatgaaggaggagagaaggagaagatggagctgtttgtgaacttctgtgaggacaccatctttgagatgcagctggccgcccagatcagcgagagtgacctgaatgaaagaagtgccaacaaggaggagagcgagaaggagaggcctgaggagcagggccccaggatggccttcttcagcatcctgactgtgcgcagcgccctgtttgccctgcgctacaacatcctgaccctgatgaggatgctgagcctgaagagcctgaagaagcagatgaagaaggtgaagaagatgacagtgaaggacatggtgacagccttcttcagcagctactggagcatcttcatgaccctgctgcactttgtggccagcgtcttccggggcttcttccgcatcatctgcagcctgctgctgggcggcagcctggtggagggcgccaagaagatcaaggtggccgagctgctggccaacatgccagaccccacccaggatgaggtgagaggagatggagaggagggggagaggaagcccctggaggccgccctgcccagcgaggacctgacagacctgaaggagctgacagaggagagtgacctgctgagtgacatcttcggcctggacctgaagcgggagggcggccagtacaagctgatcccccacaaccccaatgccggcctgagtgacctgatgagcaaccctgtgcccatgcctgaggtgcaggagaagttccaggagcagaaggccaaggaggaggagaaggaggagaaggaggagaccaagtctgagcctgagaaggccgagggagaagatggatag

SEQ ID NO: 168712 - DNA, 14856 bp, synthetic construct
  misc_feature 1..14856: note = Description of Artificial Sequence: Synthetic coding sequence
  source 1..14856: mol_type = other DNA
gatgatgaggtggtgctgcagtgcacagccaccatccacaaggagcagcagaagctgtgcctggccgctgagggcttcggcaaccggctgtgcttcctggagagcaccagcaacagcaagaatgtgcccccagacctgagcatctgcacctttgtgctggagcagagcctgtctgtgcgggccctgcaggagatgctggccaacacagtggagaagtctgagggccaggtggatgtggagaagtggaagttcatgatgaagacagcccagggcggcggccacaggaccctgctgtatggccacgccatcctgctgcggcacagctacagcggcatgtacctgtgctgcctgagcaccagccgcagcagcacagacaagctggcctttgatgtgggcctgcaggaggacaccaccggggaggcctgctggtggaccatccacccagccagcaagcagaggtctgagggggagaaggtgcgggtgggagatgacctgatcctggtgtctgtgagcagcgagcgctacctgcacctgtcctatggaaatggcagcctgcacgtggatgctgccttccagcagaccctgtggagcgtggcccccatcagcagcggcagcgaggccgcccagggctacctgattggaggagatgtgctgcggctgctgcacggccacatggatgaatgtctgactgtgcccagcggggagcacggggaggagcagaggagaacagtgcactatgagggcggcgctgtgtctgtgcacgcccggagcctgtggaggctggagaccctgcgggtggcctggagcggcagccacatccgctggggccagcccttccggctgcggcacgtgaccaccgggaagtacctgagcctgatggaggacaagaacctgctgctgatggacaaggagaaggcagatgtgaagagcacagccttcaccttccgcagcagcaaggagaagctggatgtgggcgtgaggaaggaggtggatggcatgggcaccagcgagatcaagtacggggacagcgtgtgctacatccagcacgtggacaccggcctgtggctgacctaccagagcgtggatgtgaagtctgtgaggatgggcagcatccagaggaaggccatcatgcaccacgagggccacatggatgatggcatcagcctgagccgcagccagcacgaggagagcaggacagcccgggtcatccgcagcaccgtcttcctgttcaaccgcttcatccggggcctggatgccctgagcaagaaggccaaggccagcacagtggacctgcccattgaatctgtgtccctgagcctgcaggacctgattggctacttccaccccccagatgagcacctggagcacgaggacaagcagaaccggctgcgggccctgaagaaccggcagaacctcttccaggaggagggcatgatcaacctggtgctggagtgcatcgaccggctgcacgtgtacagcagcgctgcccactttgctgatgtggccggccgggaggccggggagagctggaagagcatcctgaacagcctgtatgagctgctggccgccctgatccggggcaacaggaagaactgtgcccagttcagcggcagcctggactggctgatcagccggctggagcggctggaggccagcagcggcatcctggaggtgctgcactgtgtgctggtggagagccctgaggccctgaacatcatcaaggagggccacatcaagagcatcatcagcctgctggacaagcacggcaggaaccacaaggtgctggatgtgctgtgcagcctgtgtgtgtgccacggcgtggccgtgcgcagcaaccagcacctgatctgtgacaacctgctgcccggccgggacctgctgctgcagacccggctggtgaaccacgtgtcctccatgaggcccaacatcttcctgggcgtgtctgagggcagcgcccagtacaagaagtggtactatgagctgatggtggaccacacagagccctttgtgacagctgaggccacccacctgcgggtgggctgggccagcacagagggctacagcccctacccaggcggcggggaggagtggggcggcaatggagtgggagatgacctcttctcctatggctttgatggcctgcacctgtggagcggctgcatcgccaggacagtgagcagccccaaccagcacctgctgaggacagatgatgtgatcagctgctgcctggacctgagcgcccccagcatctccttccgcatcaatggccagcctgtgcagggcatgtttgagaacttcaacattgatggcctcttcttccctgtggtgtccttctctgctggcatcaaggtgcgcttcctgctgggcggccgccacggggagttcaagttcctgcccccacctggctacgccccctgctatgaagctgtgctgcccaaggagaagctgaaggtggagcacagccgggagtacaagcaggagaggacctacacccgggacctgctgggccccaccgtgtccctgacccaggccgccttcacccccatccctgtggacaccagccagatcgtgctgcccccccacctggagcgcatccgggagaagctggccgagaacatccacgagctgtgggtgatgaacaagattgagctgggctggcagtatggccctgtgagagatgacaacaagaggcagcacccctgcctggtggagttcagcaagctgcctgagcaggagaggaactacaacctgcagatgagcctggagaccctgaagaccctgctggccctgggctgccacgtgggcatcagtgatgagcacgccgaggacaaggtgaagaagatgaagctgcccaagaactaccagctgaccagcggctacaagccagcccccatggacctgtccttcatcaagctgacccccagccaggaggccatggtggacaagctggctgaaaatgcccacaacgtgtgggcccgggaccgcatccggcagggctggacctacggcatccagcaggatgtgaagaacagaagaaacccccggctggtgccctacaccctgctggatgacaggaccaagaagagcaacaaggacagcctgcgggaggccgtgaggaccctgctgggctacggctacaacctggaggccccagaccaggaccacgccgcccgggcagaggtgtgcagcggcactggagagcgcttccgcatcttccgggcagagaagacctatgctgtgaaggccggccgctggtactttgaatttgaaacagtgacagctggggacatgagggtgggctggagccggcccggctgccagcctgaccaggagctgggcagtgatgagcgggcctttgcctttgatggcttcaaggcccagcgctggcaccagggcaatgagcactacggccgctcctggcaggccggagatgtggtgggctgcatggtggacatgaatgagcacaccatgatgttcaccctgaatggagagatcctgctggatgacagcggcagcgagctggccttcaaggactttgatgtgggagatggcttcatccctgtgtgcagcctgggcgtggcccaggtgggccgcatgaactttgggaaggatgtgtccaccctgaagtacttcaccatctgtggcctgcaggagggctatgagccctttgctgtgaacaccaacagagacatcaccatgtggctgagcaagaggctgccccagttcctgcaggtgcccagcaaccacgagcacatcgaggtgaccagaattgatggcaccatcgacagcagcccctgcctgaaggtgacccagaagagctttggcagccagaacagcaacacagacatcatgttctaccgcctgtccatgcccattgaatgtgccgaggtgttcagcaagacagtggccggcggcctgcctggagctggcctgtttggccccaagaatgacctggaggactatgatgctgacagcgactttgaggtgctgatgaagacagcccacggccacctggtgcctgacagagtggacaaggacaaggaggccaccaagccagagttcaacaaccacaaggactatgcccaggagaagcccagccggctgaagcagcgcttcctgctgcggaggaccaagccagactacagcaccagccacagcgcccggctgacagaagatgtgctggctgatgacagagatgattatgacttcctgatgcagaccagcacctactactacagcgtgcgcatcttccctggccaggagcccgccaacgtgtgggtgggctggatcaccagtgacttccaccagtatgacaccggctttgacctggacagagtgaggacagtgacagtgaccctgggagatgagaagggcaaggtgcatgagagcatcaagaggagcaactgctacatggtgtgtgccggggagagcatgagccctggccagggcaggaacaacaacggcctggagatcggctgtgtggtggatgctgccagcggcctgctgaccttcatcgccaacgggaaggagctgagcacctactaccaggtggagcccagcaccaagctgtttcctgctgtgtttgcccaggccaccagccccaacgtgttccagtttgagctgggccgcatcaagaatgtgatgcccctgtctgctggcctcttcaagtctgagcacaagaaccctgtgccccagtgccccccccggctgcacgtgcagttcctgagccacgtgctgtggagcaggatgcccaaccagttcctgaaggtggatgtgagccgcatcagcgagcggcagggctggctggtgcagtgcctggaccccctgcagttcatgagcctgcacatcccagaagaaaatagatctgtggacatcctggagctgacagagcaggaggagctgctgaagttccactaccacaccctgcggctgtacagcgctgtgtgtgccctgggcaaccaccgggtggcccacgccctgtgcagccacgtggatgagccccagctgctgtatgccatcgagaacaagtacatgcctggcctgctgcgggccggctactatgacctgctgattgacatccacctgagcagctatgccacagcccggctgatgatgaacaatgagtacatcgtgcccatgacagaggagaccaagagcatcaccctcttcccagatgagaacaagaagcacggcctgcccggcatcggcctgagcaccagcctgcggcccaggatgcagttcagcagccccagctttgtgtccatcagcaatgaatgctaccagtacagccctgagttccccctggacatcctgaagagcaagaccatccagatgctgacagaggccgtgaaggagggcagcctgcacgcccgggaccctgtgggcggcaccacagagttcctgtttgtgcccctcatcaagctgttctacaccctgctgatcatgggcatcttccacaatgaagacctgaagcacatcctgcagctgattgagcccagcgtcttcaaggaggccgccaccccagaggaggagagtgacaccctggagaaggagctgtctgtggatgatgccaagctgcagggcgctggggaggaggaggccaagggcggcaagaggcccaaggagggcctgctgcagatgaagctgcctgagcctgtgaagctgcagatgtgcctgctgctgcagtacctgtgtgactgccaggtgcgccaccgcatcgaggccatcgtggccttcagtgatgactttgtggccaagctgcaggacaaccagcgcttccgctacaatgaggtgatgcaggccctgaacatgtctgctgccctgacagccaggaagaccaaggagttccgcagccccccccaggagcagatcaacatgctgctgaacttcaaggatgacaagtcagaatgtccctgcccagaggagatccgggaccagctgctggacttccacgaggacctgatgacccactgcggcatcgagctggatgaagatggcagcctggatggcaacagcgacctgaccatccggggccgcctgctgagcctggtggagaaggtgacctacctgaagaagaagcaggccgagaagcctgtggagagtgacagcaagaagagcagcaccctgcagcagctgatcagcgagaccatggtgcgctgggcccaggagagcgtgattgaggaccctgagctggtgcgggccatgtttgtgctgctgcaccggcagtatgatggcattggaggcctggtgcgggccctgcccaagacctacaccatcaatggagtgtctgtggaggacaccatcaacctgctggccagcctgggccagatccgcagcctgctgtctgtgaggatgggcaaggaggaggagaagctgatgatccggggcctgggggacatcatgaacaacaaggtgttctaccagcaccccaacctgatgagggccctgggcatgcatgagaccgtgatggaggtgatggtgaatgtgctgggcggcggggagagcaaggagatcaccttccccaagatggtggccaactgctgccgcttcctgtgctacttctgccgcatcagccggcagaaccagaaggccatgtttgaccacctgagctacctgctggagaacagctctgtgggcctggccagccctgccatgaggggcagcacccccctggatgtggccgccgcctctgtgatggacaacaatgagctggccctggccctgcgggagccagacctggagaaggtggtgcgctacctggccggctgcggcctgcagagctgccagatgctggtgtccaagggctacccagacatcggctggaaccctgtggagggggagcgctacctggacttcctgcgctttgctgtgttctgcaatggagagagcgtggaggagaatgccaacgtggtggtgcggctgctgatccggcggccagaatgttttggacctgccctgcggggggagggcggcaatggcctgctggccgccatggaggaggccatcaagattgctgaggaccccagcagagatggccccagccccaacagcggcagcagcaagaccctggacacagaggaggaggaggatgacaccatccacatgggaaatgccatcatgaccttctacagcgccctgattgacctgctgggccgctgtgcccctgagatgcacctgattcatgctggaaaaggagaggccatccgcatccgcagcatcctgcggagcctcatccccctgggggacctggtgggcgtcatcagcatcgccttccagatgcccaccatcgccaaggatggaaatgtggtggagccagacatgtctgctggcttctgcccagaccacaaggccgccatggtgctcttcctggacagagtgtatggcatcgaggtgcaggacttcctgctgcacctgctggaggtgggcttcctgcctgacctgcgggctgctgccagcctggacacagctgccctgagcgccacagacatggccctggccctgaaccgctacctgtgcacagctgtgctgcccctgctgacccgctgtgcccccctgtttgctggaacagagcaccacgccagcctgattgacagcctgctgcacacagtgtaccgcctgagcaagggctgcagcctgaccaaggcccagagggacagcattgaggtgtgcctgctgagcatctgtggccagctgcggcccagcatgatgcagcacctgctgcggcggctggtgtttgatgtgcccctgctgaatgagcacgccaagatgcccctgaagctgctgaccaaccactatgagcgctgctggaagtactactgcctgcccggcggctggggcaactttggagctgccagcgaggaggagctgcacctgagcaggaagctgttctggggcatctttgatgccctgagccagaagaagtatgagcaggagctgttcaagctggccctgccctgcctgtctgctgtggccggggccctgcccccagactacatggagagcaactacgtgtccatgatggagaagcagagctccatggattctgagggcaacttcaacccccagcctgtggacaccagcaacatcaccatccctgagaagctggagtacttcatcaacaagtatgcagagcacagccatgacaagtggagcatggacaagctggccaacggctggatctatggagagatctacagcgacagcagcaaggtgcagcccctgatgaagccctacaagctgctgtctgagaaggagaaggagatctaccgctggcccatcaaggagagcctgaagaccatgctggcctggggctggagaattgaaagaacccgggagggggacagcatggccctgtacaacagaacaagacgcatcagccagaccagccaggtgtctgtggatgctgcccacggctacagcccccgggccatcgacatgagcaatgtgaccctgagccgggacctgcacgccatggccgagatgatggccgagaactaccacaacatctgggccaagaagaagaagatggagctggagagcaaaggaggcggcaaccaccccctgctggtgccctatgacaccctgacagccaaggagaaggccaaggaccgggagaaggcccaggacatcctgaagttcctgcagatcaatggctatgctgtgtcccggggcttcaaggacctggagctggacacccccagcattgagaagagatttgcctacagcttcctgcagcagctgatccgctacgtggatgaggcccaccagtacatcctggagtttgatggcggcagccggggcaagggggagcacttcccctatgagcaggagatcaagttctttgccaaggtggtgctgcccctgattgaccagtacttcaagaaccaccggctgtacttcctgtctgctgccagccggcccctgtgcagcggcggccacgccagcaacaaggagaaggagatggtgaccagcctcttctgcaagctgggcgtgctggtgcgccaccgcatcagcctgtttggaaatgatgccaccagcatcgtgaactgcctgcacatcctgggccagaccctggatgccaggacagtgatgaagacaggcctggagagcgtgaagagcgccctgcgggccttcctggacaatgctgctgaggacctggagaagaccatggagaacctgaagcagggccagttcacccacaccaggaaccagcccaagggcgtgacccagatcatcaactacaccaccgtggccctgctgcccatgctgagcagcctgtttgagcacatcggccagcaccagtttggagaagatctcatcctggaggatgtgcaggtgtcctgctaccgcatcctgaccagcctgtatgccctgggcaccagcaagagcatctacgtggagcggcagaggtctgccctgggagaatgtctggccgcctttgctggggccttccctgtggccttcctggagacccacctggacaagcacaacatctacagcatctacaacaccaagagcagccgggagagagctgccctgagcctgcccaccaacgtggaggatgtgtgccccaacatccccagcctggagaagctgatggaggagatcgtggagctggccgagagcggcatccgctacacccagatgcctcatgtgatggaggtgatcctgcccatgctgtgcagctacatgagccgctggtgggagcacggccctgagaacaaccctgagagagctgagatgtgctgcacagccctgaacagcgagcacatgaacaccctgctgggcaacatcctgaagatcatctacaacaacctgggcattgatgaaggagcctggatgaagaggctggccgtgttcagccagcccatcatcaacaaggtgaagccccagctgctgaagacccacttcctgcccctgatggagaagctgaagaagaaggccgccaccgtggtgtctgaggaggaccacctgaaggccgaggcccggggggacatgtctgaggccgagctgctgatcctggatgagttcaccaccctggcccgggacctgtatgccttctaccccctgctgatccgctttgtggactacaacagagccaagtggctgaaggagcccaaccctgaggccgaggagctgttcaggatggtggccgaggtgttcatctactggagcaagagccacaacttcaagcgggaggagcagaactttgtggtgcagaatgagatcaacaacatgtccttcctgatcacagacaccaagagcaagatgagcaaggctgctgtgtctgaccaggagaggaagaagatgaagaggaaaggagaccgctacagcatgcagaccagcctcatcgtggccgccctgaagaggctgctgcccatcggcctgaacatctgtgcccctggggaccaggagctgattgccctggccaagaaccgcttcagcctgaaggacacagaagatgaggtgcgggacatcatccgcagcaacatccacctgcagggcaagctggaggaccctgccatccgctggcagatggccctgtacaaggacctgcccaacagaacagatgacaccagtgaccctgagaagacagtggagcgggtgctggacatcgccaacgtgctcttccacctggagcagaagagcaagagggtgggccgccgccactactgcctggtggagcacccccagaggagcaagaaggctgtgtggcacaagctgctgagcaagcagaggaagagagctgtggtggcctgcttcaggatggcccccctgtacaacctgcccaggcacagagctgtgaacctcttcctgcagggctatgagaagtcctggattgaaacagaggagcactactttgaggacaagctgattgaggacctggccaagccaggagctgagcccccagaggaggatgagggcaccaagagggtggaccccctgcaccagctgatcctgctcttcagcaggacagccctgacagagaagtgcaagctggaggaggacttcctgtacatggcctatgctgacatcatggccaagagctgccatgatgaagaagatgatgatggagaggaggaggtgaagagctttgaggagaaggagatggagaagcagaagctgctgtaccagcaggcccggctgcatgacagaggagctgctgagatggtgctgcagaccatcagcgccagcaagggggagaccggccccatggtggccgccaccctgaagctgggcatcgccatcctgaatggaggcaacagcacagtgcagcagaagatgctggactacctgaaggagaagaaggatgtgggcttcttccagagcctggccggcctgatgcagagctgcagcgtgctggacctgaatgcctttgagcggcagaacaaggccgagggcctgggcatggtgacagaggagggcagcggggagaaggtgctgcaggatgatgagttcacctgtgacctcttccgcttcctgcagctgctgtgtgagggccacaacagcgacttccagaactacctgcggacccagacaggcaacaacaccaccgtgaacatcatcatcagcacagtggactacctgctgcgggtgcaggagagcatcagtgacttctactggtactacagcggcaaggatgtgattgatgagcagggccagaggaacttcagcaaggccatccaggtggccaagcaggtgttcaacaccctgacagagtacatccagggcccctgcaccggcaaccagcagagcctggcccacagccggctgtgggatgctgtggtgggcttcctgcacgtgtttgcccacatgcagatgaagctgagccaggacagcagccagatcgagctgctgaaggagctgatggacctgcagaaggacatggtggtgatgctgctgtccatgctggagggcaatgtggtgaatggcaccatcggcaagcagatggtggacatgctggtggagagcagcaacaacgtggagatgatcctgaagttctttgacatgttcctgaagctgaaggacctgaccagcagtgacaccttcaaggagtatgaccctgatggcaagggcgtcatcagcaagagggacttccacaaggccatggagagccacaagcactacacccagagcgagacagagttcctgctgagctgtgccgagacagatgaaaatgagaccctggactatgaggagtttgtgaagcgcttccacgagcccgccaaggacatcggcttcaacgtggccgtgctgctgaccaacctgtctgagcacatgcccaatgacacccggctgcagaccttcctggagctggccgagagcgtgctgaactacttccagcccttcctgggccgcatcgagatcatgggcagcgccaagagaattgagcgggtgtactttgagatcagcgagagcagcaggacccagtgggagaagccccaggtgaaggagagcaagaggcagttcatctttgatgtggtgaatgaaggaggagagaaggagaagatggagctgtttgtgaacttctgtgaggacaccatctttgagatgcagctggccgcccagatcagcgagagtgacctgaatgaaagaagtgccaacaaggaggagagcgagaaggagaggcctgaggagcagggccccaggatggccttcttcagcatcctgactgtgcgcagcgccctgtttgccctgcgctacaacatcctgaccctgatgaggatgctgagcctgaagagcctgaagaagcagatgaagaaggtgaagaagatgacagtgaaggacatggtgacagccttcttcagcagctactggagcatcttcatgaccctgctgcactttgtggccagcgtcttccggggcttcttccgcatcatctgcagcctgctgctgggcggcagcctggtggagggcgccaagaagatcaaggtggccgagctgctggccaacatgccagaccccacccaggatgaggtgagaggagatggagaggagggggagaggaagcccctggaggccgccctgcccagcgaggacctgacagacctgaaggagctgacagaggagagtgacctgctgagtgacatcttcggcctggacctgaagcgggagggcggccagtacaagctgatcccccacaaccccaatgccggcctgagtgacctgatgagcaaccctgtgcccatgcctgaggtgcaggagaagttccaggagcagaaggccaaggaggaggagaaggaggagaaggaggagaccaagtctgagcctgagaaggccgagggagaagatggagagaaggaggagaaggccaaggaggacaagggcaagcagaagctgcggcagctgcacacccaccgctacggggagcctgaggtgcctgagagcgccttctggaagaagatcatcgcctaccagcagaagctgctgaactactttgccaggaacttctacaacatgaggatgctggccctgtttgtggcctttgccatcaacttcatcctgctcttctacaaggtgtccaccagctctgtggtggagggcaaggagctgcccaccaggagcagcagtgaaaatgccaaggtgaccagcctggacagcagcagccaccgcatcatcgctgtgcactacgtgctggaggagagcagcggctacatggagcccaccctgcgcatcctggccatcctgcacacagtcatctccttcttctgcatcatcggctactactgcctgaaggtgcccctggtgatcttcaagcgggagaaggaggtggccaggaagctggagtttgatggcctgtacatcacagagcagcccagtgaagatgacatcaagggccagtgggaccggctggtgatcaacacccagagcttccccaacaactactgggacaagtttgtgaagaggaaggtgatggacaagtatggagagttctacggccgggaccgcatcagcgagctgctgggcatggacaaggccgccctggacttcagtgatgcccgggagaagaagaagcccaagaaggacagcagcctgtctgctgtgctgaacagcattgatgtgaagtaccagatgtggaagctgggcgtggtgttcacagacaacagcttcctgtacctggcctggtacatgaccatgtctgtgctgggccactacaacaacttcttctttgctgcccacctgctggacatcgccatgggcttcaagaccctgcggaccatcctgagctctgtgacccacaacgggaagcagctggtgctgactgtgggcctgctggccgtggtggtgtacctgtacacagtggtggccttcaacttcttcaggaagttctacaacaagtcagaagatggagacaccccagacatgaagtgtgatgacatgctgacctgctacatgttccacatgtatgtgggcgtgcgggccggcggcggcattggagatgaaattgaggaccctgctggagatgaatatgagatctaccgcatcatctttgacatcaccttcttcttctttgtgattgtcatcctgctggccatcatccagggcctcatcattgatgccttcggggagctgcgggaccagcaggagcaggtgaaggaggacatggagaccaagtgcttcatctgtggcattggaaatgactactttgacacagtgccccacggctttgagacccacaccctgcaggagcacaacctggccaactacctgttcttcctgatgtacctgatcaacaaggatgaaacagagcacacaggccaggagagctatgtgtggaagatgtaccaggagcgctgctgggagttcttccctgctggggactgcttcaggaagcagtatgaggaccagctgaactag

SEQ ID NO: 168713 - DNA, 14601 bp, synthetic construct
  misc_feature 1..14601: note = Description of Artificial Sequence: Synthetic coding sequence
  source 1..14601: mol_type = other DNA
atggccgagctgggcggcggcggggaggaggatgcccgctggtacaggaaggaggatgaggtggtgctgcagtgcatcgccaccatccacaaggagcagaggaagttctgcctggccgctgagggcctgggcaaccggctgtgcttcctggagcccaccagcgaggccaagtacatccccccagacctgtgtgtgtgcaactttgtgctggagcagagcctgtctgtgcgggccctgcaggagatgctggccaacacaggagaaaatggaggagagggcgccgcccagggcggcggccacaggaccctgctgtatggccatgctgtgctgctgcggcacagcttcagcggcatgtacctgacctgcctgaccaccagccgcagccagacagacaagctggcctttgatgtgggcctgcgggagcacgccaccggggaggcctgctggtggaccatccacccagccagcaagcagaggtctgagggggagaaggtgagaattggagatgacctgatcctggtgtctgtgagcagcgagcgctacctgcacctgtctgtgtccaatggaaacatccaggtggatgccagcttcatgcagaccctgtggaatgtgcaccccacctgcagcggcagcagcattgaggagggctacctgctgggcggccacgtggtgcggctcttccacggccatgatgagtgcctgaccatccccagcacagaccagaatgacagccagcaccggcgcatcttctatgaagctggaggagctggcacccgggcccggagcctgtggagggtggagcccctgcgcatctcctggagcggcagcaacatccgctggggccaggccttccggctgcggcacctgaccaccggccactacctggccctgacagaggaccagggcctcatcctgcaggaccgggccaagagtgacaccaagagcacagccttctccttccgggccagcaaggagctgaaggagaagctggacagcagccacaagagggacatcgagggcatgggcgtgcctgagatcaagtacggggacagcgtgtgctttgtgcagcacatcgccagcggcctgtgggtgacctacaaggcccaggatgccaagaccagccggctgggccccctgaagaggaaggtgatcctgcaccaggagggccacatggatgatggcctgaccctgcagcgctgccagcgggaggagagccaggccgcccgcatcatccggaacaccacagccctcttcagccagtttgtgtctggcaacaacagaacagctgcccccatcaccctgcccatcgaggaggtgctgcagaccctgcaggacctgattgcctacttccagcccccagaggaggagatgagacatgaggacaagcagaacaagctgcggagcctgaagaaccggcagaacctcttcaaggaggagggcatgctggccctggtgctgaactgcatcgaccggctgaatgtgtacaacagcgtggcccactttgctggcatcgcccgggaggagagcggcatggcctggaaggagatcctgaacctgctgtacaagctgctggccgccctgatccggggcaacagaaacaactgtgcccagttcagcaacaacctggactggctgatcagcaagctggaccggctggagagcagcagcggcatcctggaggtgctgcactgcatcctgacagagagccctgaggccctgaacctgattgctgagggccacatcaagagcatcatcagcctgctggacaagcatggaagaaaccacaaggtgctggacatcctgtgcagcctgtgcctgtgcaatggagtggccgtgcgggccaaccagaacctgatctgtgacaacctgctgcccaggaggaacctgctgctgcagaccaggctcatcaatgatgtgaccagcatccggcccaacatcttcctgggcgtggccgagggcagcgcccagtacaagaagtggtactttgagctgatcatcgaccaggtggaccccttcctgacagctgagcccacccacctgcgggtgggctgggccagcagcagcggctacgccccctacccaggcggcggggagggctggggcggcaatggagtgggagatgacctgtacagctatggctttgatggcctgcacctgtggagcggccgcatccccagggctgtggccagcatcaaccagcacctgctgcggagtgatgatgtggtgtcctgctgcctggacctgggcgtgcccagcatctccttccgcatcaatggccagcctgtgcagggcatgtttgagaacttcaacacagatggcctcttcttccctgtgatgtccttctctgctggggtgaaggtgcgcttcctgatgggcggcagacatggagagttcaagttcctgccccccagcggctacgccccctgctatgaggccctgctgcccaaggagaagatgaggctggagcctgtgaaggagtacaagagagatgctgatggcatccgggacctgctgggcaccacccagttcctgagccaggccagcttcatcccctgccctgtggacaccagccaggtgatcctgcccccccacctggagaagatccgggaccggctggccgagaacatccacgagctgtggggcatgaacaagattgagctgggctggaccttcggcaagatcagagatgacaacaagaggcagcacccctgcctggtggagttcagcaagctgcctgagacagagaagaactacaacctgcagatgagcacagagaccctgaagaccctgctggccctgggctgccacatcgcccacgtgaacccagctgctgaggaggacctgaagaaggtgaagctgcccaagaactacatgatgagcaatggctacaagccagcccccctggacctgagtgatgtgaagctgctgcccccccaggagatcctggtggacaagctggccgagaatgcccacaacgtgtgggccaaggaccgcatcaagcagggctggacctacggcatccagcaggacctgaagaacaagaggaacccccggctggtgccctatgccctgctggatgagaggaccaagaagagcaacagagacagcctgcgggaggccgtgaggacctttgtgggctacggctacaacatcgagcccagcgaccaggagctggccgacagcgctgtggagaaggtgtccattgacaagatccgcttcttccgggtggagaggagctatgctgtgcgcagcggcaagtggtactttgaatttgaggtggtgactggaggagacatgagggtgggctgggcccggcccggctgcaggccagatgtggagctgggcgcagatgaccaggcctttgtgtttgagggcaacagaggccagcgctggcaccagggcagcggctacttcggccgcacctggcagcctggagatgtggtgggctgcatgatcaacctggatgatgcctccatgatcttcaccctgaatggagagctgctgatcaccaacaagggcagcgagctggcctttgctgactatgaaattgaaaatggatttgtgcccatctgctgcctgggcctgagccagatcggccgcatgaacctgggcacagatgccagcaccttcaagttctacaccatgtgtggcctgcaggagggctttgagccctttgctgtgaacatgaacagagatgtggccatgtggttcagcaagaggctgcccacctttgtgaatgtgcccaaggaccacccccacatcgaggtgatgagaattgatggcaccatggacagccccccctgcctgaaggtgacccacaagaccttcggcacccagaacagcaatgctgacatgatctactgccgcctgtccatgcctgtggagtgccacagcagcttcagccacagcccctgcctggacagcgaggccttccagaagaggaagcagatgcaggagatcctgagccacaccaccacccagtgctactatgccatccgcatctttgctggccaggaccccagctgtgtgtgggtgggctgggtgaccccagactaccacctgtacagcgagaagtttgacctgaacaagaactgcaccgtgacagtgaccctgggagatgagcggggccgggtgcatgaatctgtgaagaggagcaactgctacatggtgtggggcggggacatcgtggccagcagccagaggagcaacagaagcaatgtggacctggagatcggctgcctggtggacctggccatgggcatgctgtccttcagcgccaacgggaaggagctgggcacctgctaccaggtggagcccaacaccaaggtgtttcctgctgtgttcctgcagcccaccagcaccagcctcttccagtttgagctgggcaagctgaagaatgccatgcccctgtctgctgccatcttccgctctgaggagaagaaccctgtgccccagtgccccccccggctggatgtgcagaccatccagcctgtgctgtggagcaggatgcccaacagcttcctgaaggtggagacagagcgggtgtctgaaagacatggctgggtggtgcagtgcctggagcccctgcagatgatggccctgcacatcccagaagaaaatagatgtgtggacatcctggagctgtgtgagcaggaggacctgatgaggttccactaccacaccctgcggctgtacagcgctgtgtgtgccctgggcaacagccgggtggcctatgccctgtgcagccacgtggacctgagccagctgttctacgccatcgacaacaagtacctgcccggcctgctgcggagcggcttctatgacctgctgatcagcatccacctggccagcgccaaggagaggaagctgatgatgaagaatgagtacatcatccccatcaccagcaccaccaggaacatccgcctcttcccagatgagagcaagagacatggcctgcccggggtgggcctgcggacctgcctgaagccaggcttccgcttcagcaccccctgctttgtggtgactggagaggaccaccagaagcagagccctgagatccccctggagagcctgcggaccaaggccctgtccatgctgacagaggccgtgcagtgcagcggggcccacatccgggaccctgtgggcggctctgtggagttccagtttgtgcctgtgctgaagctgattggcaccctgctggtgatgggcgtgtttgatgatgatgatgtgcggcagatcctgctgctgattgaccccagcgtgtttggagagcacagcgctggaacagaggagggcgctgagaaggaggaggtgacccaggtggaggagaaggctgtggaggccggggagaaggccggcaaggaggcccctgtgaagggcctgctgcagacccggctgcctgagagcgtgaagctgcagatgtgtgagctgctgagctacctgtgtgactgtgagctgcagcaccgggtggaggccatcgtggcctttggagacatctacgtgtccaagctgcaggccaaccagaagttccgctacaatgagctgatgcaggccctgaacatgtctgctgccctgacagccaggaagaccaaggagttccgcagccccccccaggagcagatcaacatgctgctgaacttccagctgggggagaactgcccctgcccagaggagatccgggaggagctgtatgacttccacgaggacctgctgctgcactgcggcgtgcccctggaggaggaggaggaggaggaggaggacacctcctggacaggcaagctgtgtgccctggtgtacaagatcaagggcccccccaagccagagaaggagcagcccacagaggaggaggagcgctgccccaccaccctgaaggagctgatcagccagaccatgatctgctgggcccaggaggaccagatccaggacagcgagctggtgaggatgatgttcaacctgctgcggcggcagtatgacagcattggagagctgctgcaggccctgaggaagacctacaccatcagccacacctctgtgtctgacaccatcaacctgctggccgccctgggccagatccgcagcctgctgtctgtgaggatgggcaaggaggaggagctgctgatgatcaatggcctgggggacatcatgaacaacaaggtgttctaccagcaccccaacctgatgagggtgctgggcatgcatgagaccgtgatggaggtgatggtgaatgtgctgggcacagagaagagccagatcgccttccccaagatggtggccagctgctgccgcttcctgtgctacttctgccgcatcagccggcagaaccagaaggccatgtttgagcacctgagctacctgctggagaacagctctgtgggcctggccagccccagcatgaggggcagcacccccctggatgtggccgccagctctgtgatggacaacaatgagctggccctgagcctggaggagccagacctggagaaggtggtgacctacctggccggctgcggcctgcagagctgccccatgctgctggccaagggctacccagatgtgggctggaaccccatcgagggggagcgctacctgtccttcctgcgctttgctgtgtttgtgaacagcgagagcgtggaggagaatgcctctgtggtggtgaagctgctgatcagaagacctgagtgcttcggccctgccctgcggggggagggcggcaatggcctgctggccgccatgcagggcgccatcaagatcagcgagaacccagccctggacctgcccagccagggctacaagcgggaggtgtccactggagatgatgaggaggaggaggagatcgtgcacatgggaaatgccatcatgtccttctacagcgccctgattgacctgctgggccgctgtgcccctgagatgcacctgatccagacaggcaagggggaggccatccgcatccgcagcatcctgcggagcctggtgcccacagaggacctggtgggcatcatcagcatccccctgaagctgcccagcctgaacaaggatggctctgtgtctgagccagacatggccgccaacttctgcccagaccacaaggcccccatggtgctcttcctggacagagtgtatggcatcaaggaccagaccttcctgctgcacctgctggaggtgggcttcctgcctgacctgcgggccagcgccagcctggacacagtgtccctgagcaccacagaagctgccctggccctgaaccgctacatctgcagcgctgtgctgcccctgctgacccgctgtgcccccctgtttgctggaacagagcactgcaccagcctgattgacagcaccctgcagaccatctaccgcctgagcaagggccgcagcctgaccaaggcccagagggacaccatcgaggagtgcctgctggccatctgcaaccacctgcggcccagcatgctgcagcagctgctgcggcggctggtgtttgatgtgccccagctgaatgagtactgcaagatgcccctgaagctgctgaccaaccactatgagcagtgctggaagtactactgcctgcccagcggctggggcagctatggcctggccgtggaggaggagctgcacctgacagagaagctgttctggggcatctttgacagcctgagccacaagaagtatgaccctgacctcttcaggatggccctgccctgcctgagcgccatcgccggggccctgcccccagactacctggacacccgcatcacagccaccctggagaagcagatctctgtggatgctgatggcaactttgaccccaagcccatcaacaccatgaacttcagcctgcctgagaagctggagtacatcgtgaccaagtatgcagagcacagccatgacaagtgggcctgtgacaagagccagagcggctggaagtatggcatcagcctggatgaaaatgtgaagacccaccccctcatccggcccttcaagaccctgacagagaaggagaaggagatctaccgctggccagcccgggagagcctgaagaccatgctggccgtgggctggacagtggagaggaccaaggagggggaggccctggtgcagcagcgggagaatgagaagctgcggtctgtgtcccaggccaaccagggcaacagctacagccctgcccccctggacctgagcaatgtggtgctgagccgggagctgcagggcatggtggaggtggtggccgagaactaccacaacatctgggccaagaagaagaagctggagctggagagcaagggcggcggcagccaccccctgctggtgccctatgacaccctgacagccaaggagaagttcaaggaccgggagaaggcccaggacctcttcaagttcctgcaggtgaatggcatcatcgtgtcccggggcatgaaggacatggagctggatgccagctccatggagaagagatttgcctacaagttcctgaagaagatcctgaagtatgtggacagcgcccaggagttcatcgcccacctggaggccatcgtgagcagcggcaagacagagaagagcccccgggaccaggagatcaagttctttgccaaggtgctgctgcccctggtggaccagtacttcaccagccactgcctgtacttcctgagcagccccctgaagcccctgagcagcagcggctacgccagccacaaggagaaggagatggtggccggcctcttctgcaagctggccgccctggtgcgccaccgcatcagcctgtttggaagtgacagcaccaccatggtgtcctgcctgcacatcctggcccagaccctggacaccaggacagtgatgaagagcggcagcgagctggtgaaggccggcctgcgggccttctttgaaaatgctgctgaggacctggagaagaccagcgagaacctgaagctgggcaagttcacccacagcaggacccagatcaagggcgtgtcccagaacatcaactacaccaccgtggccctgctgcccatcctgaccagcatctttgaacatgtgacccagcaccagtttggcatggacctgctgctgggagatgtgcagatcagctgctaccacatcctgtgcagcctgtacagcctgggcaccgggaagaacatctacgtggagcggcagaggcctgccctgggagaatgtctggccagcctggccgccgccatccctgtggccttcctggagcccaccctgaaccgctacaaccccctgagcgtcttcaacaccaagaccccccgggagaggagcatcctgggcatgccagacacagtggaggacatgtgcccagacatcccccagctggagggcctgatgaaggagatcaatgacctggccgagagcggggcccgctacacagagatgcctcatgtgattgaagtcatcctgcccatgctgtgcaactacctgagctactggtgggagcggggccctgagaacctgccccccagcacaggcccctgctgcaccaaggtgaccagcgagcacctgagcctcatcctgggcaacatcctgaagatcatcaacaacaacctgggcattgatgaggcctcctggatgaagagaattgctgtgtatgcccagcccatcatcagcaaggcccggccagacctgctgcggagccacttcatccccaccctggagaagctgaagaagaaggctgtgaagacagtgcaggaggaggagcagctgaaggcagatggaaaaggagacacccaggaggccgagctgctgatcctggatgaatttgctgtgctgtgccgggacctgtatgccttctaccccatgctgatccgctacgtggacaacaacagaagcaactggctgaagagcccagatgctgacagcgaccagctgttcaggatggtggccgaggtgttcatcctgtggtgcaagagccacaacttcaagcgggaggagcagaactttgtgatccagaatgagatcaacaacctggccttcctgaccggggacagcaagagcaagatgagcaagagcggcggccaggaccaggagaggaagaagaccaagagaagaggagacctgtacagcatccagaccagcctcatcgtggccgccctgaagaagatgctgcccatcggcctgaacatgtgcacccctggggaccaggagctgatcagcctggccaagagccgctacagccaccgggacacagatgaggaggtgcgggagcacctgaggaacaacctgcacctgcaggagaagagtgatgatcctgctgtgaagtggcagctgaacctgtacaaggatgtgctgaagtctgaggagcccttcaaccctgagaagacagtggagcgggtgcagaggatctctgctgctgtgttccacctggagcaggtggagcagcccctgcggagcaagaaggctgtgtggcacaagctgctgagcaagcagaggaagagagctgtggtggcctgcttcaggatggcccccctgtacaacctgcccaggcacaggagcatcaacctcttcctgcacggctaccagcgcttctggattgaaacagaggagtacagctttgaggagaagctggtgcaggacctggccaagagccccaaggtggaggaggaggaggaggaggagacagagaagcagcctgaccccctgcaccagatcatcctgtacttcagcagaaatgccctgacagagaggagcaagctggaggatgaccccctgtacaccagctacagctccatgatggccaagagctgccagagcggagaagatgaggaggaggatgaggacaaggagaagacctttgaggagaaggagatggagaagcagaagaccctgtaccagcaggcccggctgcacgagagaggagctgctgagatggtgctgcagatgatcagcgccagcaaaggagagatgagccccatggtggtggagaccctgaagctgggcatcgccatcctgaatggaggaaatgctggggtgcagcagaagatgctggactacctgaaggagaagaaggatgctggcttcttccagagcctgagcggcctgatgcagagctgccgctctgtgctggacctgaatgcctttgagcggcagaacaaggccgagggcctgggcatggtgacagaggagggcaccctgattgtgcgggagcggggggagaaggtgctgcagaatgatgagttcacccgggacctcttccgcttcctgcagctgctgtgtgagggccacaacagcgacttccagaacttcctgcggacccagatgggcaacaccaccaccgtgaatgtcatcatcagcacagtggactacctgctgcggctgcaggagagcatcagtgacttctactggtactacagcggcaaggacatcattgatgaaagtggccagcacaacttcagcaaggccctggccgtgaccaagcagatcttcaacagcctgacagagtacatccagggcccctgcatcggcaaccagcagagcctggcccacagccggctgtgggatgctgtggtgggcttcctgcacgtgtttgccaacatgcagatgaagctgagccaggacagcagccagatcgagctgctgaaggagctgctggacctgctgcaggacatggtggtgatgctgctgagcctgctggagggcaatgtggtgaatggcaccatcggcaagcagatggtggacaccctggtggagagcagcaccaacgtggagatgatcctgaagttctttgacatgttcctgaagctgaaggacctgaccagcagtgacaccttcaaggagtatgaccctgatggcaagggcatcatcagcaagaaggagttccagaaggccatggagggccagaagcagtacacccagagcgagattgacttcctgctgagctgtgccgaggctgatgaaaatgacatgttcaactacgtggactttgtggaccgcttccacgagcccgccaaggacatcggcttcaacgtggccgtgctgctgaccaacctgtctgagcacatgcccaatgacagccggctgaagtgcctgctggaccctgctgagagcgtgctgaactactttgagccctacctgggccgcatcgagatcatgggcggggccaagaagattgagcgggtgtactttgagatcagcgagagcagcaggacccagtgggagaagccccaggtgaaggagagcaagaggcagttcatctttgatgtggtgaatgaaggaggagagcaggagaagatggagctgtttgtgaacttctgtgaggacaccatctttgagatgcagctggccagccagatcagcgagagtgacagcgctgacaggcctgaggaggaggaggaggatgaggacagcagctatgtgctggagattgctggggaggaggaggaggatggcagcctggagcccgccagcgcctttgccatggcctgtgcctctgtgaagagaaatgtgacagacttcctgaagagggccaccctgaagaacctgaggaagcagtacagaaatgtgaagaagatgacagccaaggagctggtgaaggtgctcttctccttcttctggatgctgtttgtgggcctcttccagctgctcttcaccatcctgggcggcatcttccagatcctgtggagcacagtgtttggaggcggcctggtggagggcgccaagaacatccgggtgaccaagatcctgggggacatgccagaccccacccagtttggcatccatgatgacaccatggaggccgagagagctgaggtgatggagcccggcatcaccacagagctggtgcacttcatcaagggggagaagggggacacagacatcatgtctgacctgtttggcctgcaccccaagaaggagggcagcctgaagcacggccctgaggtgggcctgggggacctgtctgagatcatcggcaaggatgagccccccaccctggagagcacagtgcagaagaagaggaaggcccaggccgctgagatgaaggccgccaatgaggccgagggcaaggtggagagcgagaaggctgacatggaggatggagagaaggaggacaaggacaaggaggaggagcaggccgagtacctgtggacagaggtgaccaagaagaagaagagaagatgtggccagaaggtggagaagccagaggccttcaccgccaacttcttcaagggcctggagatctaccagaccaagctgctgcactacctggccaggaacttctacaacctgcgcttcctggccctgtttgtggcctttgccatcaacttcatcctgctcttctacaaggtgacagaggagcccctggaggaggagacagaagatgtggccaacctgtggaacagcttcaatgatgaggaggaggaggaggccatggtgttctttgtgctgcaggagagcacaggctacatggcccccaccctgcgggccctggccatcatccacaccatcatcagcctggtgtgtgtggtgggctactactgcctgaaggtgcccctggtggtgttcaagcgggagaaggagatcgccaggaagctggagtttgatggcctgtacatcacagagcagcccagtgaagatgacatcaagggccagtgggaccggctggtgatcaacacccccagcttccccaacaactactgggacaagtttgtgaagaggaaggtgatcaacaagtacggggacctgtatggagctgagagaattgctgagctgctgggcctggacaagaatgccctggacttcagccctgtggaggagaccaaggccgaggccgccagcctggtgtcctggctgagcagcattgacatgaagtaccacatctggaagctgggcgtggtgttcacagacaacagcttcctgtacctggcctggtacaccaccatgtctgtgctgggccactacaacaacttcttctttgctgcccacctgctggacatcgccatgggcttcaagaccctgcggaccatcctgagctctgtgacccacaacgggaagcagctggtgctgactgtgggcctgctggccgtggtggtgtacctgtacacagtggtggccttcaacttcttcaggaagttctacaacaagtcagaagatgatgatgagccagacatgaagtgtgatgacatgatgacctgctacctgttccacatgtatgtgggcgtgcgggccggcggcggcattggagatgaaattgaagatcctgctggggacccctatgagatgtacagaattgtgtttgacatcaccttcttcttcttcgtcatcgtcatcctgctggccatcatccagggcctcatcattgatgcctttggagagctgcgggaccagcaggagcaggtgcgggaggacatggagaccaagtgcttcatctgtggcattggaaatgactactttgacaccaccccccacggctttgagacccacaccctgcaggagcacaacctggccaactacctgttcttcctgatgtacctgatcaacaaggatgaaacagagcacacaggccaggagagctatgtgtggaagatgtaccaggagcgctgctgggacttcttccctgctggggactgcttcaggaagcagtatgaggaccagctgggctag

SEQ ID NO: 168714 - DNA, 14613 bp, synthetic construct
  misc_feature 1..14613: note = Description of Artificial Sequence: Synthetic coding sequence
  source 1..14613: mol_type = other DNA
atggccgagggcggggagggcggagaagatgagatccagttcctgaggacagaagatgaggtggtgctgcagtgcatcgccaccatccacaaggagcagaggaagttctgcctggccgctgagggcctgggcaaccggctgtgcttcctggagcccaccagcgaggccaagtacatccccccagacctgtgtgtgtgcaactttgtgctggagcagagcctgtctgtgcgggccctgcaggagatgctggccaacacaggagaaaatggaggagagggcgccgcccagggcggcggccacaggaccctgctgtatggccatgctgtgctgctgcggcacagcttcagcggcatgtacctgacctgcctgaccaccagccgcagccagacagacaagctggcctttgatgtgggcctgcgggagcacgccaccggggaggcctgctggtggaccatccacccagccagcaagcagaggtctgagggggagaaggtgagaattggagatgacctgatcctggtgtctgtgagcagcgagcgctacctgcacctgtctgtgtccaatggaaacatccaggtggatgccagcttcatgcagaccctgtggaatgtgcaccccacctgcagcggcagcagcattgaggagggctacctgctgggcggccacgtggtgcggctcttccacggccatgatgagtgcctgaccatccccagcacagaccagaatgacagccagcaccggcgcatcttctatgaagctggaggagctggcacccgggcccggagcctgtggagggtggagcccctgcgcatctcctggagcggcagcaacatccgctggggccaggccttccggctgcggcacctgaccaccggccactacctggccctgacagaggaccagggcctcatcctgcaggaccgggccaagagtgacaccaagagcacagccttctccttccgggccagcaaggagctgaaggagaagctggacagcagccacaagagggacatcgagggcatgggcgtgcctgagatcaagtacggggacagcgtgtgctttgtgcagcacatcgccagcggcctgtgggtgacctacaaggcccaggatgccaagaccagccggctgggccccctgaagaggaaggtgatcctgcaccaggagggccacatggatgatggcctgaccctgcagcgctgccagcgggaggagagccaggccgcccgcatcatccggaacaccacagccctcttcagccagtttgtgtctggcaacaacagaacagctgcccccatcaccctgcccatcgaggaggtgctgcagaccctgcaggacctgattgcctacttccagcccccagaggaggagatgagacatgaggacaagcagaacaagctgcggagcctgaagaaccggcagaacctcttcaaggaggagggcatgctggccctggtgctgaactgcatcgaccggctgaatgtgtacaacagcgtggcccactttgctggcatcgcccgggaggagagcggcatggcctggaaggagatcctgaacctgctgtacaagctgctggccgccctgatccggggcaacagaaacaactgtgcccagttcagcaacaacctggactggctgatcagcaagctggaccggctggagagcagcagcggcatcctggaggtgctgcactgcatcctgacagagagccctgaggccctgaacctgattgctgagggccacatcaagagcatcatcagcctgctggacaagcatggaagaaaccacaaggtgctggacatcctgtgcagcctgtgcctgtgcaatggagtggccgtgcgggccaaccagaacctgatctgtgacaacctgctgcccaggaggaacctgctgctgcagaccaggctcatcaatgatgtgaccagcatccggcccaacatcttcctgggcgtggccgagggcagcgcccagtacaagaagtggtactttgagctgatcatcgaccaggtggaccccttcctgacagctgagcccacccacctgcgggtgggctgggccagcagcagcggctacgccccctacccaggcggcggggagggctggggcggcaatggagtgggagatgacctgtacagctatggctttgatggcctgcacctgtggagcggccgcatccccagggctgtggccagcatcaaccagcacctgctgcggagtgatgatgtggtgtcctgctgcctggacctgggcgtgcccagcatctccttccgcatcaatggccagcctgtgcagggcatgtttgagaacttcaacacagatggcctcttcttccctgtgatgtccttctctgctggggtgaaggtgcgcttcctgatgggcggcagacatggagagttcaagttcctgccccccagcggctacgccccctgctatgaggccctgctgcccaaggagaagatgaggctggagcctgtgaaggagtacaagagagatgctgatggcatccgggacctgctgggcaccacccagttcctgagccaggccagcttcatcccctgccctgtggacaccagccaggtgatcctgcccccccacctggagaagatccgggaccggctggccgagaacatccacgagctgtggggcatgaacaagattgagctgggctggaccttcggcaagatcagagatgacaacaagaggcagcacccctgcctggtggagttcagcaagctgcctgagacagagaagaactacaacctgcagatgagcacagagaccctgaagaccctgctggccctgggctgccacatcgcccacgtgaacccagctgctgaggaggacctgaagaaggtgaagctgcccaagaactacatgatgagcaatggctacaagccagcccccctggacctgagtgatgtgaagctgctgcccccccaggagatcctggtggacaagctggccgagaatgcccacaacgtgtgggccaaggaccgcatcaagcagggctggacctacggcatccagcaggacctgaagaacaagaggaacccccggctggtgccctatgccctgctggatgagaggaccaagaagagcaacagagacagcctgcgggaggccgtgaggacctttgtgggctacggctacaacatcgagcccagcgaccaggagctggccgacagcgctgtggagaaggtgtccattgacaagatccgcttcttccgggtggagaggagctatgctgtgcgcagcggcaagtggtactttgaatttgaggtggtgactggaggagacatgagggtgggctgggcccggcccggctgcaggccagatgtggagctgggcgcagatgaccaggcctttgtgtttgagggcaacagaggccagcgctggcaccagggcagcggctacttcggccgcacctggcagcctggagatgtggtgggctgcatgatcaacctggatgatgcctccatgatcttcaccctgaatggagagctgctgatcaccaacaagggcagcgagctggcctttgctgactatgaaattgaaaatggatttgtgcccatctgctgcctgggcctgagccagatcggccgcatgaacctgggcacagatgccagcaccttcaagttctacaccatgtgtggcctgcaggagggctttgagccctttgctgtgaacatgaacagagatgtggccatgtggttcagcaagaggctgcccacctttgtgaatgtgcccaaggaccacccccacatcgaggtgatgagaattgatggcaccatggacagccccccctgcctgaaggtgacccacaagaccttcggcacccagaacagcaatgctgacatgatctactgccgcctgtccatgcctgtggagtgccacagcagcttcagccacagcccctgcctggacagcgaggccttccagaagaggaagcagatgcaggagatcctgagccacaccaccacccagtgctactatgccatccgcatctttgctggccaggaccccagctgtgtgtgggtgggctgggtgaccccagactaccacctgtacagcgagaagtttgacctgaacaagaactgcaccgtgacagtgaccctgggagatgagcggggccgggtgcatgaatctgtgaagaggagcaactgctacatggtgtggggcggggacatcgtggccagcagccagaggagcaacagaagcaatgtggacctggagatcggctgcctggtggacctggccatgggcatgctgtccttcagcgccaacgggaaggagctgggcacctgctaccaggtggagcccaacaccaaggtgtttcctgctgtgttcctgcagcccaccagcaccagcctcttccagtttgagctgggcaagctgaagaatgccatgcccctgtctgctgccatcttccgctctgaggagaagaaccctgtgccccagtgccccccccggctggatgtgcagaccatccagcctgtgctgtggagcaggatgcccaacagcttcctgaaggtggagacagagcgggtgtctgaaagacatggctgggtggtgcagtgcctggagcccctgcagatgatggccctgcacatcccagaagaaaatagatgtgtggacatcctggagctgtgtgagcaggaggacctgatgaggttccactaccacaccctgcggctgtacagcgctgtgtgtgccctgggcaacagccgggtggcctatgccctgtgcagccacgtggacctgagccagctgttctacgccatcgacaacaagtacctgcccggcctgctgcggagcggcttctatgacctgctgatcagcatccacctggccagcgccaaggagaggaagctgatgatgaagaatgagtacatcatccccatcaccagcaccaccaggaacatccgcctcttcccagatgagagcaagagacatggcctgcccggggtgggcctgcggacctgcctgaagccaggcttccgcttcagcaccccctgctttgtggtgactggagaggaccaccagaagcagagccctgagatccccctggagagcctgcggaccaaggccctgtccatgctgacagaggccgtgcagtgcagcggggcccacatccgggaccctgtgggcggctctgtggagttccagtttgtgcctgtgctgaagctgattggcaccctgctggtgatgggcgtgtttgatgatgatgatgtgcggcagatcctgctgctgattgaccccagcgtgtttggagagcacagcgctggaacagaggagggcgctgagaaggaggaggtgacccaggtggaggagaaggctgtggaggccggggagaaggccggcaaggaggcccctgtgaagggcctgctgcagacccggctgcctgagagcgtgaagctgcagatgtgtgagctgctgagctacctgtgtgactgtgagctgcagcaccgggtggaggccatcgtggcctttggagacatctacgtgtccaagctgcaggccaaccagaagttccgctacaatgagctgatgcaggccctgaacatgtctgctgccctgacagccaggaagaccaaggagttccgcagccccccccaggagcagatcaacatgctgctgaacttccagctgggggagaactgcccctgcccagaggagatccgggaggagctgtatgacttccacgaggacctgctgctgcactgcggcgtgcccctggaggaggaggaggaggaggaggaggacacctcctggacaggcaagctgtgtgccctggtgtacaagatcaagggcccccccaagccagagaaggagcagcccacagaggaggaggagcgctgccccaccaccctgaaggagctgatcagccagaccatgatctgctgggcccaggaggaccagatccaggacagcgagctggtgaggatgatgttcaacctgctgcggcggcagtatgacagcattggagagctgctgcaggccctgaggaagacctacaccatcagccacacctctgtgtctgacaccatcaacctgctggccgccctgggccagatccgcagcctgctgtctgtgaggatgggcaaggaggaggagctgctgatgatcaatggcctgggggacatcatgaacaacaaggtgttctaccagcaccccaacctgatgagggtgctgggcatgcatgagaccgtgatggaggtgatggtgaatgtgctgggcacagagaagagccagatcgccttccccaagatggtggccagctgctgccgcttcctgtgctacttctgccgcatcagccggcagaaccagaaggccatgtttgagcacctgagctacctgctggagaacagctctgtgggcctggccagccccagcatgaggggcagcacccccctggatgtggccgccagctctgtgatggacaacaatgagctggccctgagcctggaggagccagacctggagaaggtggtgacctacctggccggctgcggcctgcagagctgccccatgctgctggccaagggctacccagatgtgggctggaaccccatcgagggggagcgctacctgtccttcctgcgctttgctgtgtttgtgaacagcgagagcgtggaggagaatgcctctgtggtggtgaagctgctgatcagaagacctgagtgcttcggccctgccctgcggggggagggcggcaatggcctgctggccgccatgcagggcgccatcaagatcagcgagaacccagccctggacctgcccagccagggctacaagcgggaggtgtccactggagatgatgaggaggaggaggagatcgtgcacatgggaaatgccatcatgtccttctacagcgccctgattgacctgctgggccgctgtgcccctgagatgcacctgatccagacaggcaagggggaggccatccgcatccgcagcatcctgcggagcctggtgcccacagaggacctggtgggcatcatcagcatccccctgaagctgcccagcctgaacaaggatggctctgtgtctgagccagacatggccgccaacttctgcccagaccacaaggcccccatggtgctcttcctggacagagtgtatggcatcaaggaccagaccttcctgctgcacctgctggaggtgggcttcctgcctgacctgcgggccagcgccagcctggacacagtgtccctgagcaccacagaagctgccctggccctgaaccgctacatctgcagcgctgtgctgcccctgctgacccgctgtgcccccctgtttgctggaacagagcactgcaccagcctgattgacagcaccctgcagaccatctaccgcctgagcaagggccgcagcctgaccaaggcccagagggacaccatcgaggagtgcctgctggccatctgcaaccacctgcggcccagcatgctgcagcagctgctgcggcggctggtgtttgatgtgccccagctgaatgagtactgcaagatgcccctgaagctgctgaccaaccactatgagcagtgctggaagtactactgcctgcccagcggctggggcagctatggcctggccgtggaggaggagctgcacctgacagagaagctgttctggggcatctttgacagcctgagccacaagaagtatgaccctgacctcttcaggatggccctgccctgcctgagcgccatcgccggggccctgcccccagactacctggacacccgcatcacagccaccctggagaagcagatctctgtggatgctgatggcaactttgaccccaagcccatcaacaccatgaacttcagcctgcctgagaagctggagtacatcgtgaccaagtatgcagagcacagccatgacaagtgggcctgtgacaagagccagagcggctggaagtatggcatcagcctggatgaaaatgtgaagacccaccccctcatccggcccttcaagaccctgacagagaaggagaaggagatctaccgctggccagcccgggagagcctgaagaccatgctggccgtgggctggacagtggagaggaccaaggagggggaggccctggtgcagcagcgggagaatgagaagctgcggtctgtgtcccaggccaaccagggcaacagctacagccctgcccccctggacctgagcaatgtggtgctgagccgggagctgcagggcatggtggaggtggtggccgagaactaccacaacatctgggccaagaagaagaagctggagctggagagcaagggcggcggcagccaccccctgctggtgccctatgacaccctgacagccaaggagaagttcaaggaccgggagaaggcccaggacctcttcaagttcctgcaggtgaatggcatcatcgtgtcccggggcatgaaggacatggagctggatgccagctccatggagaagagatttgcctacaagttcctgaagaagatcctgaagtatgtggacagcgcccaggagttcatcgcccacctggaggccatcgtgagcagcggcaagacagagaagagcccccgggaccaggagatcaagttctttgccaaggtgctgctgcccctggtggaccagtacttcaccagccactgcctgtacttcctgagcagccccctgaagcccctgagcagcagcggctacgccagccacaaggagaaggagatggtggccggcctcttctgcaagctggccgccctggtgcgccaccgcatcagcctgtttggaagtgacagcaccaccatggtgtcctgcctgcacatcctggcccagaccctggacaccaggacagtgatgaagagcggcagcgagctggtgaaggccggcctgcgggccttctttgaaaatgctgctgaggacctggagaagaccagcgagaacctgaagctgggcaagttcacccacagcaggacccagatcaagggcgtgtcccagaacatcaactacaccaccgtggccctgctgcccatcctgaccagcatctttgaacatgtgacccagcaccagtttggcatggacctgctgctgggagatgtgcagatcagctgctaccacatcctgtgcagcctgtacagcctgggcaccgggaagaacatctacgtggagcggcagaggcctgccctgggagaatgtctggccagcctggccgccgccatccctgtggccttcctggagcccaccctgaaccgctacaaccccctgagcgtcttcaacaccaagaccccccgggagaggagcatcctgggcatgccagacacagtggaggacatgtgcccagacatcccccagctggagggcctgatgaaggagatcaatgacctggccgagagcggggcccgctacacagagatgcctcatgtgattgaagtcatcctgcccatgctgtgcaactacctgagctactggtgggagcggggccctgagaacctgccccccagcacaggcccctgctgcaccaaggtgaccagcgagcacctgagcctcatcctgggcaacatcctgaagatcatcaacaacaacctgggcattgatgaggcctcctggatgaagagaattgctgtgtatgcccagcccatcatcagcaaggcccggccagacctgctgcggagccacttcatccccaccctggagaagctgaagaagaaggctgtgaagacagtgcaggaggaggagcagctgaaggcagatggaaaaggagacacccaggaggccgagctgctgatcctggatgaatttgctgtgctgtgccgggacctgtatgccttctaccccatgctgatccgctacgtggacaacaacagaagcaactggctgaagagcccagatgctgacagcgaccagctgttcaggatggtggccgaggtgttcatcctgtggtgcaagagccacaacttcaagcgggaggagcagaactttgtgatccagaatgagatcaacaacctggccttcctgaccggggacagcaagagcaagatgagcaaggccatgcaggtgaagagcggcggccaggaccaggagaggaagaagaccaagagaagaggagacctgtacagcatccagaccagcctgattgtggccgccctgaagaagatgctgcccatcggcctgaacatgtgcacccctggggaccaggagctgatcagcctggccaagagccgctacagccaccgggacacagatgaggaggtgcgggagcacctgaggaacaacctgcacctgcaggagaagagtgatgatcctgctgtgaagtggcagctgaacctgtacaaggatgtgctgaagtctgaggagcccttcaaccctgagaagacagtggagcgggtgcagaggatctctgctgctgtgttccacctggagcaggtggagcagcccctgcggagcaagaaggctgtgtggcacaagctgctgagcaagcagaggaagagagctgtggtggcctgcttcaggatggcccccctgtacaacctgcccaggcacaggagcatcaacctcttcctgcacggctaccagcgcttctggattgaaacagaggagtacagctttgaggagaagctggtgcaggacctggccaagagccccaaggtggaggaggaggaggaggaggagacagagaagcagcctgaccccctgcaccagatcatcctgtacttcagcagaaatgccctgacagagaggagcaagctggaggatgaccccctgtacaccagctacagctccatgatggccaagagctgccagagcggggaggatgaggaggaggatgaggacaaggagaagacctttgaggagaaggagatggagaagcagaagaccctgtaccagcaggcccggctgcacgagagaggagctgctgagatggtgctgcagatgatcagcgccagcaagggggagatgagccccatggtggtggagaccctgaagctgggcatcgccatcctgaatggaggaaatgccggcgtgcagcagaagatgctggactacctgaaggagaagaaggatgctggcttcttccagagcctgagcggcctgatgcagagctgcagcgtgctggacctgaatgcctttgagcggcagaacaaggccgagggcctgggcatggtgacagaggagggcaccctgattgtgcgggagcggggggagaaggtgctgcagaatgatgagttcacccgggacctcttccgcttcctgcagctgctgtgtgagggccacaacagcgacttccagaacttcctgcggacccagatgggcaacaccaccaccgtgaatgtcatcatcagcacagtggactacctgctgcggctgcaggagagcatcagtgacttctactggtactacagcggcaaggacatcattgatgaaagtggccagcacaacttcagcaaggccctggccgtgaccaagcagatcttcaacagcctgacagagtacatccagggcccctgcatcggcaaccagcagagcctggcccacagccggctgtgggatgctgtggtgggcttcctgcacgtgtttgccaacatgcagatgaagctgagccaggacagcagccagatcgagctgctgaaggagctgctggacctgctgcaggacatggtggtgatgctgctgagcctgctggagggcaatgtggtgaatggcaccatcggcaagcagatggtggacaccctggtggagagcagcaccaacgtggagatgatcctgaagttctttgacatgttcctgaagctgaaggacctgaccagcagtgacaccttcaaggagtatgaccctgatggcaagggcatcatcagcaagaaggagttccagaaggccatggagggccagaagcagtacacccagagcgagattgacttcctgctgagctgtgccgaggctgatgaaaatgacatgttcaactacgtggactttgtggaccgcttccacgagcccgccaaggacatcggcttcaacgtggccgtgctgctgaccaacctgtctgagcacatgcccaatgacagccggctgaagtgcctgctggaccctgctgagagcgtgctgaactactttgagccctacctgggccgcatcgagatcatgggcggggccaagaagattgagcgggtgtactttgagatcagcgagagcagcaggacccagtgggagaagccccaggtgaaggagagcaagaggcagttcatctttgatgtggtgaatgaaggaggagagcaggagaagatggagctgtttgtgaacttctgtgaggacaccatctttgagatgcagctggccagccagatcagcgagagtgacagcgctgacaggcctgaggaggaggaggaggatgaggacagcagctatgtgctggagattgctggggaggaggaggaggatggcagcctggagcccgccagcgcctttgccatggcctgtgcctctgtgaagagaaatgtgacagacttcctgaagagggccaccctgaagaacctgaggaagcagtacagaaatgtgaagaagatgacagccaaggagctggtgaaggtgctcttctccttcttctggatgctgtttgtgggcctcttccagctgctcttcaccatcctgggcggcatcttccagatcctgtggagcacagtgtttggaggcggcctggtggagggcgccaagaacatccgggtgaccaagatcctgggggacatgccagaccccacccagtttggcatccatgatgacaccatggaggccgagagagctgaggtgatggagcccggcatcaccacagagctggtgcacttcatcaagggggagaagggggacacagacatcatgtctgacctgtttggcctgcaccccaagaaggagggcagcctgaagcacggccctgaggtgggcctgggggacctgtctgagatcatcggcaaggatgagccccccaccctggagagcacagtgcagaagaagaggaaggcccaggccgctgagatgaaggccgccaatgaggccgagggcaaggtggagagcgagaaggctgacatggaggatggagagaaggaggacaaggacaaggaggaggagcaggccgagtacctgtggacagaggtgaccaagaagaagaagagaagatgtggccagaaggtggagaagccagaggccttcaccgccaacttcttcaagggcctggagatctaccagaccaagctgctgcactacctggccaggaacttctacaacctgcgcttcctggccctgtttgtggcctttgccatcaacttcatcctgctcttctacaaggtgacagaggagcccctggaggaggagacagaagatgtggccaacctgtggaacagcttcaatgatgaggaggaggaggaggccatggtgttctttgtgctgcaggagagcacaggctacatggcccccaccctgcgggccctggccatcatccacaccatcatcagcctggtgtgtgtggtgggctactactgcctgaaggtgcccctggtggtgttcaagcgggagaaggagatcgccaggaagctggagtttgatggcctgtacatcacagagcagcccagtgaagatgacatcaagggccagtgggaccggctggtgatcaacacccccagcttccccaacaactactgggacaagtttgtgaagaggaaggtgatcaacaagtacggggacctgtatggagctgagagaattgctgagctgctgggcctggacaagaatgccctggacttcagccctgtggaggagaccaaggccgaggccgccagcctggtgtcctggctgagcagcattgacatgaagtaccacatctggaagctgggcgtggtgttcacagacaacagcttcctgtacctggcctggtacaccaccatgtctgtgctgggccactacaacaacttcttctttgctgcccacctgctggacatcgccatgggcttcaagaccctgcggaccatcctgagctctgtgacccacaacgggaagcagctggtgctgactgtgggcctgctggccgtggtggtgtacctgtacacagtggtggccttcaacttcttcaggaagttctacaacaagtcagaagatgatgatgagccagacatgaagtgtgatgacatgatgacctgctacctgttccacatgtatgtgggcgtgcgggccggcggcggcattggagatgaaattgaagatcctgctggggacccctatgagatgtacagaattgtgtttgacatcaccttcttcttcttcgtcatcgtcatcctgctggccatcatccagggcctcatcattgatgcctttggagagctgcgggaccagcaggagcaggtgcgggaggacatggagaccaagtgcttcatctgtggcattggaaatgactactttgacaccaccccccacggctttgagacccacaccctgcaggagcacaacctggccaactacctgttcttcctgatgtacctgatcaacaaggatgaaacagagcacacaggccaggagagctatgtgtggaagatgtaccaggagcgctgctgggacttcttccctgctggggactgcttcaggaagcagtatgaggaccagctgggctag

SEQ ID NO: 168715 - DNA, 14598 bp, synthetic construct
  misc_feature 1..14598: note = Description of Artificial Sequence: Synthetic coding sequence
  source 1..14598: mol_type = other DNA
atggccgagggcggggagggcggagaagatgagatccagttcctgaggacagaagatgaggtggtgctgcagtgcatcgccaccatccacaaggagcagaggaagttctgcctggccgctgagggcctgggcaaccggctgtgcttcctggagcccaccagcgaggccaagtacatccccccagacctgtgtgtgtgcaactttgtgctggagcagagcctgtctgtgcgggccctgcaggagatgctggccaacacaggagaaaatggaggagagggcgccgcccagggcggcggccacaggaccctgctgtatggccatgctgtgctgctgcggcacagcttcagcggcatgtacctgacctgcctgaccaccagccgcagccagacagacaagctggcctttgatgtgggcctgcgggagcacgccaccggggaggcctgctggtggaccatccacccagccagcaagcagaggtctgagggggagaaggtgagaattggagatgacctgatcctggtgtctgtgagcagcgagcgctacctgcacctgtctgtgtccaatggaaacatccaggtggatgccagcttcatgcagaccctgtggaatgtgcaccccacctgcagcggcagcagcattgaggagggctacctgctgggcggccacgtggtgcggctcttccacggccatgatgagtgcctgaccatccccagcacagaccagaatgacagccagcaccggcgcatcttctatgaagctggaggagctggcacccgggcccggagcctgtggagggtggagcccctgcgcatctcctggagcggcagcaacatccgctggggccaggccttccggctgcggcacctgaccaccggccactacctggccctgacagaggaccagggcctcatcctgcaggaccgggccaagagtgacaccaagagcacagccttctccttccgggccagcaaggagctgaaggagaagctggacagcagccacaagagggacatcgagggcatgggcgtgcctgagatcaagtacggggacagcgtgtgctttgtgcagcacatcgccagcggcctgtgggtgacctacaaggcccaggatgccaagaccagccggctgggccccctgaagaggaaggtgatcctgcaccaggagggccacatggatgatggcctgaccctgcagcgctgccagcgggaggagagccaggccgcccgcatcatccggaacaccacagccctcttcagccagtttgtgtctggcaacaacagaacagctgcccccatcaccctgcccatcgaggaggtgctgcagaccctgcaggacctgattgcctacttccagcccccagaggaggagatgagacatgaggacaagcagaacaagctgcggagcctgaagaaccggcagaacctcttcaaggaggagggcatgctggccctggtgctgaactgcatcgaccggctgaatgtgtacaacagcgtggcccactttgctggcatcgcccgggaggagagcggcatggcctggaaggagatcctgaacctgctgtacaagctgctggccgccctgatccggggcaacagaaacaactgtgcccagttcagcaacaacctggactggctgatcagcaagctggaccggctggagagcagcagcggcatcctggaggtgctgcactgcatcctgacagagagccctgaggccctgaacctgattgctgagggccacatcaagagcatcatcagcctgctggacaagcatggaagaaaccacaaggtgctggacatcctgtgcagcctgtgcctgtgcaatggagtggccgtgcgggccaaccagaacctgatctgtgacaacctgctgcccaggaggaacctgctgctgcagaccaggctcatcaatgatgtgaccagcatccggcccaacatcttcctgggcgtggccgagggcagcgcccagtacaagaagtggtactttgagctgatcatcgaccaggtggaccccttcctgacagctgagcccacccacctgcgggtgggctgggccagcagcagcggctacgccccctacccaggcggcggggagggctggggcggcaatggagtgggagatgacctgtacagctatggctttgatggcctgcacctgtggagcggccgcatccccagggctgtggccagcatcaaccagcacctgctgcggagtgatgatgtggtgtcctgctgcctggacctgggcgtgcccagcatctccttccgcatcaatggccagcctgtgcagggcatgtttgagaacttcaacacagatggcctcttcttccctgtgatgtccttctctgctggggtgaaggtgcgcttcctgatgggcggcagacatggagagttcaagttcctgccccccagcggctacgccccctgctatgaggccctgctgcccaaggagaagatgaggctggagcctgtgaaggagtacaagagagatgctgatggcatccgggacctgctgggcaccacccagttcctgagccaggccagcttcatcccctgccctgtggacaccagccaggtgatcctgcccccccacctggagaagatccgggaccggctggccgagaacatccacgagctgtggggcatgaacaagattgagctgggctggaccttcggcaagatcagagatgacaacaagaggcagcacccctgcctggtggagttcagcaagctgcctgagacagagaagaactacaacctgcagatgagcacagagaccctgaagaccctgctggccctgggctgccacatcgcccacgtgaacccagctgctgaggaggacctgaagaaggtgaagctgcccaagaactacatgatgagcaatggctacaagccagcccccctggacctgagtgatgtgaagctgctgcccccccaggagatcctggtggacaagctggccgagaatgcccacaacgtgtgggccaaggaccgcatcaagcagggctggacctacggcatccagcaggacctgaagaacaagaggaacccccggctggtgccctatgccctgctggatgagaggaccaagaagagcaacagagacagcctgcgggaggccgtgaggacctttgtgggctacggctacaacatcgagcccagcgaccaggagctggccgacagcgctgtggagaaggtgtccattgacaagatccgcttcttccgggtggagaggagctatgctgtgcgcagcggcaagtggtactttgaatttgaggtggtgactggaggagacatgagggtgggctgggcccggcccggctgcaggccagatgtggagctgggcgcagatgaccaggcctttgtgtttgagggcaacagaggccagcgctggcaccagggcagcggctacttcggccgcacctggcagcctggagatgtggtgggctgcatgatcaacctggatgatgcctccatgatcttcaccctgaatggagagctgctgatcaccaacaagggcagcgagctggcctttgctgactatgaaattgaaaatggatttgtgcccatctgctgcctgggcctgagccagatcggccgcatgaacctgggcacagatgccagcaccttcaagttctacaccatgtgtggcctgcaggagggctttgagccctttgctgtgaacatgaacagagatgtggccatgtggttcagcaagaggctgcccacctttgtgaatgtgcccaaggaccacccccacatcgaggtgatgagaattgatggcaccatggacagccccccctgcctgaaggtgacccacaagaccttcggcacccagaacagcaatgctgacatgatctactgccgcctgtccatgcctgtggagtgccacagcagcttcagccacagcccctgcctggacagcgaggccttccagaagaggaagcagatgcaggagatcctgagccacaccaccacccagtgctactatgccatccgcatctttgctggccaggaccccagctgtgtgtgggtgggctgggtgaccccagactaccacctgtacagcgagaagtttgacctgaacaagaactgcaccgtgacagtgaccctgggagatgagcggggccgggtgcatgaatctgtgaagaggagcaactgctacatggtgtggggcggggacatcgtggccagcagccagaggagcaacagaagcaatgtggacctggagatcggctgcctggtggacctggccatgggcatgctgtccttcagcgccaacgggaaggagctgggcacctgctaccaggtggagcccaacaccaaggtgtttcctgctgtgttcctgcagcccaccagcaccagcctcttccagtttgagctgggcaagctgaagaatgccatgcccctgtctgctgccatcttccgctctgaggagaagaaccctgtgccccagtgccccccccggctggatgtgcagaccatccagcctgtgctgtggagcaggatgcccaacagcttcctgaaggtggagacagagcgggtgtctgaaagacatggctgggtggtgcagtgcctggagcccctgcagatgatggccctgcacatcccagaagaaaatagatgtgtggacatcctggagctgtgtgagcaggaggacctgatgaggttccactaccacaccctgcggctgtacagcgctgtgtgtgccctgggcaacagccgggtggcctatgccctgtgcagccacgtggacctgagccagctgttctacgccatcgacaacaagtacctgcccggcctgctgcggagcggcttctatgacctgctgatcagcatccacctggccagcgccaaggagaggaagctgatgatgaagaatgagtacatcatccccatcaccagcaccaccaggaacatccgcctcttcccagatgagagcaagagacatggcctgcccggggtgggcctgcggacctgcctgaagccaggcttccgcttcagcaccccctgctttgtggtgactggagaggaccaccagaagcagagccctgagatccccctggagagcctgcggaccaaggccctgtccatgctgacagaggccgtgcagtgcagcggggcccacatccgggaccctgtgggcggctctgtggagttccagtttgtgcctgtgctgaagctgattggcaccctgctggtgatgggcgtgtttgatgatgatgatgtgcggcagatcctgctgctgattgaccccagcgtgtttggagagcacagcgctggaacagaggagggcgctgagaaggaggaggtgacccaggtggaggagaaggctgtggaggccggggagaaggccggcaaggaggcccctgtgaagggcctgctgcagacccggctgcctgagagcgtgaagctgcagatgtgtgagctgctgagctacctgtgtgactgtgagctgcagcaccgggtggaggccatcgtggcctttggagacatctacgtgtccaagctgcaggccaaccagaagttccgctacaatgagctgatgcaggccctgaacatgtctgctgccctgacagccaggaagaccaaggagttccgcagccccccccaggagcagatcaacatgctgctgaacttccagctgggggagaactgcccctgcccagaggagatccgggaggagctgtatgacttccacgaggacctgctgctgcactgcggcgtgcccctggaggaggaggaggaggaggaggaggacacctcctggacaggcaagctgtgtgccctggtgtacaagatcaagggcccccccaagccagagaaggagcagcccacagaggaggaggagcgctgccccaccaccctgaaggagctgatcagccagaccatgatctgctgggcccaggaggaccagatccaggacagcgagctggtgaggatgatgttcaacctgctgcggcggcagtatgacagcattggagagctgctgcaggccctgaggaagacctacaccatcagccacacctctgtgtctgacaccatcaacctgctggccgccctgggccagatccgcagcctgctgtctgtgaggatgggcaaggaggaggagctgctgatgatcaatggcctgggggacatcatgaacaacaaggtgttctaccagcaccccaacctgatgagggtgctgggcatgcatgagaccgtgatggaggtgatggtgaatgtgctgggcacagagaagagccagatcgccttccccaagatggtggccagctgctgccgcttcctgtgctacttctgccgcatcagccggcagaaccagaaggccatgtttgagcacctgagctacctgctggagaacagctctgtgggcctggccagccccagcatgaggggcagcacccccctggatgtggccgccagctctgtgatggacaacaatgagctggccctgagcctggaggagccagacctggagaaggtggtgacctacctggccggctgcggcctgcagagctgccccatgctgctggccaagggctacccagatgtgggctggaaccccatcgagggggagcgctacctgtccttcctgcgctttgctgtgtttgtgaacagcgagagcgtggaggagaatgcctctgtggtggtgaagctgctgatcagaagacctgagtgcttcggccctgccctgcggggggagggcggcaatggcctgctggccgccatgcagggcgccatcaagatcagcgagaacccagccctggacctgcccagccagggctacaagcgggaggtgtccactggagatgatgaggaggaggaggagatcgtgcacatgggaaatgccatcatgtccttctacagcgccctgattgacctgctgggccgctgtgcccctgagatgcacctgatccagacaggcaagggggaggccatccgcatccgcagcatcctgcggagcctggtgcccacagaggacctggtgggcatcatcagcatccccctgaagctgcccagcctgaacaaggatggctctgtgtctgagccagacatggccgccaacttctgcccagaccacaaggcccccatggtgctcttcctggacagagtgtatggcatcaaggaccagaccttcctgctgcacctgctggaggtgggcttcctgcctgacctgcgggccagcgccagcctggacacagtgtccctgagcaccacagaagctgccctggccctgaaccgctacatctgcagcgctgtgctgcccctgctgacccgctgtgcccccctgtttgctggaacagagcactgcaccagcctgattgacagcaccctgcagaccatctaccgcctgagcaagggccgcagcctgaccaaggcccagagggacaccatcgaggagtgcctgctggccatctgcaaccacctgcggcccagcatgctgcagcagctgctgcggcggctggtgtttgatgtgccccagctgaatgagtactgcaagatgcccctgaagctgctgaccaaccactatgagcagtgctggaagtactactgcctgcccagcggctggggcagctatggcctggccgtggaggaggagctgcacctgacagagaagctgttctggggcatctttgacagcctgagccacaagaagtatgaccctgacctcttcaggatggccctgccctgcctgagcgccatcgccggggccctgcccccagactacctggacacccgcatcacagccaccctggagaagcagatctctgtggatgctgatggcaactttgaccccaagcccatcaacaccatgaacttcagcctgcctgagaagctggagtacatcgtgaccaagtatgcagagcacagccatgacaagtgggcctgtgacaagagccagagcggctggaagtatggcatcagcctggatgaaaatgtgaagacccaccccctcatccggcccttcaagaccctgacagagaaggagaaggagatctaccgctggccagcccgggagagcctgaagaccatgctggccgtgggctggacagtggagaggaccaaggagggggaggccctggtgcagcagcgggagaatgagaagctgcggtctgtgtcccaggccaaccagggcaacagctacagccctgcccccctggacctgagcaatgtggtgctgagccgggagctgcagggcatggtggaggtggtggccgagaactaccacaacatctgggccaagaagaagaagctggagctggagagcaagggcggcggcagccaccccctgctggtgccctatgacaccctgacagccaaggagaagttcaaggaccgggagaaggcccaggacctcttcaagttcctgcaggtgaatggcatcatcgtgtcccggggcatgaaggacatggagctggatgccagctccatggagaagagatttgcctacaagttcctgaagaagatcctgaagtatgtggacagcgcccaggagttcatcgcccacctggaggccatcgtgagcagcggcaagacagagaagagcccccgggaccaggagatcaagttctttgccaaggtgctgctgcccctggtggaccagtacttcaccagccactgcctgtacttcctgagcagccccctgaagcccctgagcagcagcggctacgccagccacaaggagaaggagatggtggccggcctcttctgcaagctggccgccctggtgcgccaccgcatcagcctgtttggaagtgacagcaccaccatggtgtcctgcctgcacatcctggcccagaccctggacaccaggacagtgatgaagagcggcagcgagctggtgaaggccggcctgcgggccttctttgaaaatgctgctgaggacctggagaagaccagcgagaacctgaagctgggcaagttcacccacagcaggacccagatcaagggcgtgtcccagaacatcaactacaccaccgtggccctgctgcccatcctgaccagcatctttgaacatgtgacccagcaccagtttggcatggacctgctgctgggagatgtgcagatcagctgctaccacatcctgtgcagcctgtacagcctgggcaccgggaagaacatctacgtggagcggcagaggcctgccctgggagaatgtctggccagcctggccgccgccatccctgtggccttcctggagcccaccctgaaccgctacaaccccctgagcgtcttcaacaccaagaccccccgggagaggagcatcctgggcatgccagacacagtggaggacatgtgcccagacatcccccagctggagggcctgatgaaggagatcaatgacctggccgagagcggggcccgctacacagagatgcctcatgtgattgaagtcatcctgcccatgctgtgcaactacctgagctactggtgggagcggggccctgagaacctgccccccagcacaggcccctgctgcaccaaggtgaccagcgagcacctgagcctcatcctgggcaacatcctgaagatcatcaacaacaacctgggcattgatgaggcctcctggatgaagagaattgctgtgtatgcccagcccatcatcagcaaggcccggccagacctgctgcggagccacttcatccccaccctggagaagctgaagaagaaggctgtgaagacagtgcaggaggaggagcagctgaaggcagatggaaaaggagacacccaggaggccgagctgctgatcctggatgaatttgctgtgctgtgccgggacctgtatgccttctaccccatgctgatccgctacgtggacaacaacagaagcaactggctgaagagcccagatgctgacagcgaccagctgttcaggatggtggccgaggtgttcatcctgtggtgcaagagccacaacttcaagcgggaggagcagaactttgtgatccagaatgagatcaacaacctggccttcctgaccggggacagcaagagcaagatgagcaagagcggcggccaggaccaggagaggaagaagaccaagagaagaggagacctgtacagcatccagaccagcctcatcgtggccgccctgaagaagatgctgcccatcggcctgaacatgtgcacccctggggaccaggagctgatcagcctggccaagagccgctacagccaccgggacacagatgaggaggtgcgggagcacctgaggaacaacctgcacctgcaggagaagagtgatgatcctgctgtgaagtggcagctgaacctgtacaaggatgtgctgaagtctgaggagcccttcaaccctgagaagacagtggagcgggtgcagaggatctctgctgctgtgttccacctggagcaggtggagcagcccctgcggagcaagaaggctgtgtggcacaagctgctgagcaagcagaggaagagagctgtggtggcctgcttcaggatggcccccctgtacaacctgcccaggcacaggagcatcaacctcttcctgcacggctaccagcgcttctggattgaaacagaggagtacagctttgaggagaagctggtgcaggacctggccaagagccccaaggtggaggaggaggaggaggaggagacagagaagcagcctgaccccctgcaccagatcatcctgtacttcagcagaaatgccctgacagagaggagcaagctggaggatgaccccctgtacaccagctacagctccatgatggccaagagctgccagagcggagaagatgaggaggaggatgaggacaaggagaagacctttgaggagaaggagatggagaagcagaagaccctgtaccagcaggcccggctgcacgagagaggagctgctgagatggtgctgcagatgatcagcgccagcaaaggagagatgagccccatggtggtggagaccctgaagctgggcatcgccatcctgaatggaggaaatgctggggtgcagcagaagatgctggactacctgaaggagaagaaggatgctggcttcttccagagcctgagcggcctgatgcagagctgcagcgtgctggacctgaatgcctttgagcggcagaacaaggccgagggcctgggcatggtgacagaggagggcaccctcatcgtgcgggagcggggggagaaggtgctgcagaatgatgagttcacccgggacctcttccgcttcctgcagctgctgtgtgagggccacaacagcgacttccagaacttcctgcggacccagatgggcaacaccaccaccgtgaatgtcatcatcagcacagtggactacctgctgcggctgcaggagagcatcagtgacttctactggtactacagcggcaaggacatcattgatgagagcggccagcacaacttcagcaaggccctggccgtgaccaagcagatcttcaacagcctgacagagtacatccagggcccctgcatcggcaaccagcagagcctggcccacagccggctgtgggatgctgtggtgggcttcctgcacgtgtttgccaacatgcagatgaagctgagccaggacagcagccagatcgagctgctgaaggagctgctggacctgctgcaggacatggtggtgatgctgctgagcctgctggagggcaatgtggtgaatggcaccatcggcaagcagatggtggacaccctggtggagagcagcaccaacgtggagatgatcctgaagttctttgacatgttcctgaagctgaaggacctgaccagcagtgacaccttcaaggagtatgaccctgatggcaagggcatcatcagcaagaaggagttccagaaggccatggagggccagaagcagtacacccagagcgagattgacttcctgctgagctgtgccgaggctgatgaaaatgacatgttcaactacgtggactttgtggaccgcttccacgagcccgccaaggacatcggcttcaacgtggccgtgctgctgaccaacctgtctgagcacatgcccaatgacagccggctgaagtgcctgctggaccctgctgagagcgtgctgaactactttgagccctacctgggcagaattgagatcatgggcggggccaagaagattgaaagagtgtactttgagatcagcgagagcagcaggacccagtgggagaagccccaggtgaaggagagcaagaggcagttcatctttgatgtggtgaatgaaggaggagagcaggagaagatggagctgtttgtgaacttctgtgaggacaccatctttgagatgcagctggccagccagatcagcgagagtgacagcgctgacaggcctgaggaggaggaggaggatgaggacagcagctatgtgctggagattgctggggaggaggaggaggatggcagcctggagcccgccagcgcctttgccatggcctgtgcctctgtgaagagaaatgtgacagacttcctgaagagggccaccctgaagaacctgaggaagcagtacagaaatgtgaagaagatgacagccaaggagctggtgaaggtgctcttctccttcttctggatgctgtttgtgggcctcttccagctgctcttcaccatcctgggcggcatcttccagatcctgtggagcacagtgtttggaggcggcctggtggagggcgccaagaacatccgggtgaccaagatcctgggggacatgccagaccccacccagtttggcatccatgatgacaccatggaggccgagcgggcagaggtgatggagcccggcatcaccacagagctggtgcacttcatcaagggggagaagggggacacagacatcatgtctgacctgtttggcctgcaccccaagaaggagggcagcctgaagcacggccctgaggtgggcctgggggacctgtctgagatcatcggcaaggatgagccccccaccctggagagcacagtgcagaagaagaggaaggcccaggccgctgagatgaaggccgccaatgaagctgagggcaaggtggagagcgagaaggctgacatggaggatggagagaaggaggacaaggacaaggaggaggagcaggccgagtacctgtggacagaggtgaccaagaagaagaagaggcgctgtggccagaaggtggagaagccagaggccttcaccgccaacttcttcaagggcctggagatctaccagaccaagctgctgcactacctggccaggaacttctacaacctgcgcttcctggccctgtttgtggcctttgccatcaacttcatcctgctcttctacaaggtgacagaggagcccctggaggaggagacagaagatgtggccaacctgtggaacagcttcaatgatgaggaggaggaggaggccatggtgttctttgtgctgcaggagagcacaggctacatggcccccaccctgcgggccctggccatcatccacaccatcatcagcctggtgtgtgtggtgggctactactgcctgaaggtgcccctggtggtgttcaagcgggagaaggagatcgccaggaagctggagtttgatggcctgtacatcacagagcagcccagtgaagatgacatcaagggccagtgggaccggctggtgatcaacacccccagcttccccaacaactactgggacaagtttgtgaagaggaaggtgatcaacaagtatggagacctgtatggagctgagagaattgctgagctgctgggcctggacaagaatgccctggacttcagccctgtggaggagaccaaggccgaggccgccagcctggtgtcctggctgagcagcattgacatgaagtaccacatctggaagctgggcgtggtgttcacagacaacagcttcctgtacctggcctggtacaccaccatgtctgtgctgggccactacaacaacttcttctttgctgcccacctgctggacatcgccatgggcttcaagaccctgcggaccatcctgagctctgtgacccacaacgggaagcagctggtgctgactgtgggcctgctggccgtggtggtgtacctgtacacagtggtggccttcaacttcttcaggaagttctacaacaagtcagaagatgatgatgagccagacatgaagtgtgatgacatgatgacctgctacctgttccacatgtatgtgggcgtgcgggccggcggcggcattggagatgaaattgaggaccctgctggggacccctatgagatgtaccgcatcgtgtttgacatcaccttcttcttctttgtgattgtcatcctgctggccatcatccagggcctcatcattgatgccttcggggagctgcgggaccagcaggagcaggtgcgggaggacatggagaccaagtgcttcatctgtggcattggaaatgactactttgacaccacccctcatggctttgagacccacaccctgcaggagcacaacctggccaactacctgttcttcctgatgtacctgatcaacaaggatgaaacagagcacacaggccaggagagctatgtgtggaagatgtaccaggagcgctgctgggacttcttccctgctggggactgcttcaggaagcagtatgaggaccagctgggctag

SEQ ID NO: 168716 - DNA, 285 bp, synthetic construct
  misc_feature 1..285: note = Description of Artificial Sequence: Synthetic coding sequence
  source 1..285: mol_type = other DNA
atgggcagcgagctggagacagccatggagaccctcatcaacgtgttccacgcccacagcggcaaggagggggacaagtacaagctgagcaagaaggagctgaaggagctgctgcagacagagctgagcggcttcctggatgcccagaaggatgtggatgctgtggacaaggtgatgaaggagctggatgaaaatggagatggagaggtggacttccaggagtatgtggtgctggtggccgccctgactgtggcctgcaacaacttcttctgggagaacagctag

SEQ ID NO: 168717 - DNA, 162 bp, synthetic construct
  misc_feature 1..162: note = Description of Artificial Sequence: Synthetic coding sequence
  source 1..162: mol_type = other DNA
atgggcagcgagctggagacagccatggagaccctcatcaacgtgttccacgcccacagcggcaaggagggggacaagtacaagctgagcaagaaggagctgaaggagctgctgcagacagagctgagcggcttcctggatgtgaaggagctgatgctgtag

SEQ ID NO: 168718 - DNA, 444 bp, synthetic construct
  misc_feature 1..444: note = Description of Artificial Sequence: Synthetic coding sequence
  source 1..444: mol_type = other DNA
atggaggagccccagaccaagacccccagcgctgagttccccccctaccgggcccagcctgcccagcctgccacagccccagctgccacctttgccaccctggccatctgcccagagcccgcccccaccagcggccctggccagccctgcacagctgccatgggcagcgagctggagacagccatggagaccctcatcaacgtgttccacgcccacagcggcaaggagggggacaagtacaagctgagcaagaaggagctgaaggagctgctgcagacagagctgagcggcttcctggatgcccagaaggatgtggatgctgtggacaaggtgatgaaggagctggatgaaaatggagatggagaggtggacttccaggagtatgtggtgctggtggccgccctgactgtggcctgcaacaacttcttctgggagaacagctag

SEQ ID NO: 168719 - DNA, 105 bp, synthetic construct
  misc_feature 1..105: note = Description of Artificial Sequence: Synthetic coding sequence
  source 1..105: mol_type = other DNA
atgggcagcgagctggagacagccatggagaccctcatcaacgtgttccacgcccacagcggcaaggagggggacaagtacaagctgagcaagaaggagctgtag

SEQ ID NO: 168720 - DNA, 294 bp, synthetic construct
  misc_feature 1..294: note = Description of Artificial Sequence: Synthetic coding sequence
  source 1..294: mol_type = other DNA
atgcccagccagatggagcacgccatggagaccatgatgttcaccttccacaagtttgctggggacaagggctacctgaccaaggaggacctgcgggtgctgatggagaaggagttccctggcttcctggagaaccagaaggaccccctggccgtggacaagatcatgaaggacctggaccagtgcagagatggcaaggtgggcttccagagcttcttcagcctgattgctggcctgaccatcgcctgcaatgactactttgtggtgcacatgaagcagaagggcaagaagtag

SEQ ID NO: 168721 - DNA, 294 bp, synthetic construct; identical to SEQ ID NO: 168720
  misc_feature 1..294: note = Description of Artificial Sequence: Synthetic coding sequence
  source 1..294: mol_type = other DNA

SEQ ID NO: 168722 - DNA, 318 bp, synthetic construct
  misc_feature 1..318: note = Description of Artificial Sequence: Synthetic coding sequence
  source 1..318: mol_type = other DNA
atggccaagatcagcagccccacagaaacagagcgctgcatcgagagcctgattgctgtgttccagaagtatgccggcaaggatggctacaactacaccctgagcaagacagagttcctgtccttcatgaacacagagctggccgccttcaccaagaaccagaaggaccccggggtgctggacaggatgatgaagaagctggacaccaacagtgatggccagctggacttcagcgagttcctgaacctgattggaggcctggccatggcctgccacgacagcttcctgaaggctgtgcccagccagaagaggacatag

SEQ ID NO: 168723 - DNA, 252 bp, synthetic construct
  misc_feature 1..252: note = Description of Artificial Sequence: Synthetic coding sequence
  source 1..252: mol_type = other DNA
gctgggaagatgaccaagctggaggagcacctggagggcatcgtgaacatcttccaccagtacagcgtgaggaagggccactttgacaccctgagcaaaggagagctgaagcagctgctgaccaaggagctggccaacaccatcaagaggcccaagaagggcagctctgtgattgatgagatcttccagggcctggatgccaaccaggatgagcaggtggacttccaggagttcatcagcctggtggcctag

SEQ ID NO: 168724 - DNA, 279 bp, synthetic construct
  misc_feature 1..279: note = Description of Artificial Sequence: Synthetic coding sequence
  source 1..279: mol_type = other DNA
atgaccaagctggaggagcacctggagggcatcgtgaacatcttccaccagtacagcgtgaggaagggccactttgacaccctgagcaagggggagctgaagcagctgctgaccaaggagctggccaacaccatcaagaacatcaaggacaaggctgtgattgatgagatcttccagggcctggatgccaaccaggatgagcaggtggacttccaggagttcatcagcctggtggccatcgccctgaaggccgcccactaccacacccacaaggagtag

SEQ ID NO: 168725 - DNA, 297 bp, synthetic construct
  misc_feature 1..297: note = Description of Artificial Sequence: Synthetic coding sequence
  source 1..297: mol_type = other DNA
atggctgctgagcccctgacagagctggaggagagcattgaaacagtggtgaccaccttcttcacctttgcccggcaggagggcaggaaggacagcctgtctgtgaatgagttcaaggagctggtgacccagcagctgccccacctgctgaaggatgtgggcagcctggatgagaagatgaagagcctggatgtgaaccaggacagcgagctgaagttcaatgagtactggaggctcatcggggagctggccaaggagatcaggaagaagaaggacctgaagatcaggaagaagtag

SEQ ID NO: 168726 - DNA, 297 bp, synthetic construct; identical to SEQ ID NO: 168725
  misc_feature 1..297: note = Description of Artificial Sequence: Synthetic coding sequence
  source 1..297: mol_type = other DNA

SEQ ID NO: 168727 - DNA, 297 bp, synthetic construct; identical to SEQ ID NO: 168725
  misc_feature 1..297: note = Description of Artificial Sequence: Synthetic coding sequence
  source 1..297: mol_type = other DNA

SEQ ID NO: 168728 - DNA, 297 bp, synthetic construct; identical to SEQ ID NO: 168725
  misc_feature 1..297: note = Description of Artificial Sequence: Synthetic coding sequence
  source 1..297: mol_type = other DNA

SEQ ID NO: 168729 - DNA, 297 bp, synthetic construct; identical to SEQ ID NO: 168725
  misc_feature 1..297: note = Description of Artificial Sequence: Synthetic coding sequence
  source 1..297: mol_type = other DNA

SEQ ID NO: 168730 - DNA, 315 bp, synthetic construct
  misc_feature 1..315: note = Description of Artificial Sequence: Synthetic coding sequence
  source 1..315: mol_type = other DNA
atgggccagtgccgcagcgccaatgcagaagatgcccaggagttcagtgatgtggagcgggccatcgagaccctcatcaagaacttccaccagtacagcgtggagggcggcaaggagaccctgacccccagcgagctgcgggacctggtgacccagcagctgccccacctgatgcccagcaactgtggcctggaggagaagatcgccaacctgggcagctgcaatgacagcaagctggagttccgctccttctgggagctgattggagaggccgccaagtctgtgaagctggagaggcctgtgcggggccactag

SEQ ID NO: 168731 - DNA, 315 bp, synthetic construct; identical to SEQ ID NO: 168730
  misc_feature 1..315: note = Description of Artificial Sequence: Synthetic coding sequence
  source 1..315: mol_type = other DNA

SEQ ID NO: 168732 - DNA, 315 bp, synthetic construct; identical to SEQ ID NO: 168730
  misc_feature 1..315: note = Description of Artificial Sequence: Synthetic coding sequence
  source 1..315: mol_type = other DNA

SEQ ID NO: 168733 - DNA, 315 bp, synthetic construct; identical to SEQ ID NO: 168730
  misc_feature 1..315: note = Description of Artificial Sequence: Synthetic coding sequence
  source 1..315: mol_type = other DNA

SEQ ID NO: 168734 - DNA, 417 bp, synthetic construct
  misc_feature 1..417: note = Description of Artificial Sequence: Synthetic coding sequence
  source 1..417: mol_type = other DNA
atgtgcagcagcctggagcaggccctggccgtgctggtgaccaccttccacaagtacagctgccaggagggggacaagttcaagctgagcaaaggagagatgaaggagctgctgcacaaggagctgcccagctttgtgggccacagccgggagccctgtgctgtgcgggccttccgggtgcacctgttcaaccctgtgattggagacctgaggaaccagagccctgagggcaagagtgactgccccaagatcacccagcactgggagaaggtggatgaggagggcctgaagaagctgatgggcagcctggatgaaaattctgaccagcaggtggacttccaggagtatgctgtgttcctggccctgatcaccgtgatgtgcaatgacttcttccagggctgcccagaccggccctag

SEQ ID NO: 168735 - DNA, 294 bp, synthetic construct
  misc_feature 1..294: note = Description of Artificial Sequence: Synthetic coding sequence
  source 1..294: mol_type = other DNA
atgtgcagcagcctggagcaggccctggccgtgctggtgaccaccttccacaagtacagctgccaggagggggacaagttcaagctgagcaaaggagagatgaaggagctgctgcacaaggagctgcccagctttgtgggggagaaggtggatgaggagggcctgaagaagctgatgggcagcctggatgagaacagcgaccagcaggtggacttccaggagtatgctgtgttcctggccctgatcaccgtgatgtgcaatgacttcttccagggctgcccagaccggccctag

SEQ ID NO: 168736 - DNA, 294 bp, synthetic construct; identical to SEQ ID NO: 168735
  misc_feature 1..294: note = Description of Artificial Sequence: Synthetic coding sequence
  source 1..294: mol_type = other DNA

SEQ ID NO: 168737 - DNA, 294 bp, synthetic construct; identical to SEQ ID NO: 168735
  misc_feature 1..294: note = Description of Artificial Sequence: Synthetic coding sequence
  source 1..294: mol_type = other DNA

SEQ ID NO: 168738 - DNA, 306 bp, synthetic construct
  misc_feature 1..306: note = Description of Artificial Sequence: Synthetic coding sequence
  source 1..306: mol_type = other DNA
atggcccggcccctggagcaggccgtggccgccatcgtgtgcaccttccaggagtatgccggccgctgtggggacaagtacaagctgtgccaggccgagctgaaggagctgctgcagaaggagctggccacctggacccccacagagttccgggagtgtgactacaacaagttcatgtctgtgctggacaccaacaaggactgtgaggtggactttgtggagtatgtgcgcagcctggcctgcctgtgcctgtactgccacgagtacttcaaggactgccccagcgagcccccctgcagccagtag

SEQ ID NO: 168739 - DNA, 306 bp, synthetic construct; identical to SEQ ID NO: 168738
  misc_feature 1..306: note = Description of Artificial Sequence: Synthetic coding sequence
  source 1..306: mol_type = other DNA

SEQ ID NO: 168740 - DNA, 306 bp, synthetic construct
  misc_feature 1..306: note = Description of Artificial Sequence: Synthetic coding sequence
  source 1..306: mol_type = other DNA
atggcctgccccctggagaaggccctggatgtgatggtgtccaccttccacaagtacagcggcaaggagggggacaagttcaagctgaacaagtctgagctgaaggagctgctgacccgggagctgcccagcttcctgggcaagaggacagatgaagctgccttccagaagctgatgagcaacctggacagcaacagagacaatgaggtggacttccaggagtactgtgtgttcctgagctgcatcgccatgatgtgcaatgagttctttgagggcttcccagacaagcagcccaggaagaagtag

SEQ ID NO: 168741 - DNA, 306 bp, synthetic construct; identical to SEQ ID NO: 168740
  misc_feature 1..306: note = Description of Artificial Sequence: Synthetic coding sequence
  source 1..306: mol_type = other DNA

SEQ ID NO: 168742 - DNA, 306 bp, synthetic construct; identical to SEQ ID NO: 168740
  misc_feature 1..306: note = Description of Artificial Sequence: Synthetic coding sequence
  source 1..306: mol_type = other DNA

SEQ ID NO: 168743 - DNA, 306 bp, synthetic construct; identical to SEQ ID NO: 168740
  misc_feature 1..306: note = Description of Artificial Sequence: Synthetic coding sequence
  source 1..306: mol_type = other DNA

SEQ ID NO: 168744 - DNA, 273 bp, synthetic construct
  misc_feature 1..273: note = Description of Artificial Sequence: Synthetic coding sequence
  source 1..273: mol_type = other DNA
atggtgtccaccttccacaagtacagcggcaaggagggggacaagttcaagctgaacaagtctgagctgaaggagctgctgacccgggagctgcccagcttcctgggcaagaggacagatgaggccgccttccagaagctgatgagcaacctggacagcaacagagacaatgaggtggacttccaggagtactgtgtgttcctgagctgcatcgccatgatgtgcaatgagttctttgagggcttcccagacaagcagcccaggaagaagtag

SEQ ID NO: 168745 - DNA, 333 bp, synthetic construct
  misc_feature 1..333: note = Description of Artificial Sequence: Synthetic coding sequence
  source 1..333: mol_type = other DNA
atgcctgctgcctggatcctgtgggcccacagccacagcgagctgcacacagtgatggagacccccctggagaaggccctgaccaccatggtgaccaccttccacaagtacagcggccgggagggcagcaagctgaccctgagcaggaaggagctgaaggagctgatcaagaaggagctgtgcctgggggagatgaaggagagcagcattgatgacctgatgaagagcctggacaagaacagcgaccaggagattgacttcaaggagtacagcgtcttcctgaccatgctgtgcatggcctacaatgacttcttcctggaggacaacaagtag

SEQ ID NO: 168746 - DNA, 279 bp, synthetic construct
  misc_feature 1..279: note = Description of Artificial Sequence: Synthetic coding sequence
  source 1..279: mol_type = other DNA
atggagacccccctggagaaggccctgaccaccatggtgaccaccttccacaagtacagcggccgggagggcagcaagctgaccctgagcaggaaggagctgaaggagctgatcaagaaggagctgtgcctgggggagatgaaggagagcagcattgatgacctgatgaagagcctggacaagaacagcgaccaggagattgacttcaaggagtacagcgtcttcctgaccatgctgtgcatggcctacaatgacttcttcctggaggacaacaagtag

SEQ ID NO: 168747 - DNA, 279 bp, synthetic construct; identical to SEQ ID NO: 168746
  misc_feature 1..279: note = Description of Artificial Sequence: Synthetic coding sequence
  source 1..279: mol_type = other DNA

SEQ ID NO: 168748 - DNA, 273 bp, synthetic construct
  misc_feature 1..273: note = Description of Artificial Sequence: Synthetic coding sequence
  source 1..273: mol_type = other DNA
atggcctgccccctggaccaggccatcggcctgctggtggccatcttccacaagtacagcggccgggagggggacaagcacaccctgagcaagaaggagctgaaggagctgatccagaaggagctgaccatcggcagcaagctgcaggatgctgagatcgcccggctgatggaggacctggacaggaacaaggaccaggaggtgaacttccaggagtatgtgaccttcctgggcgccctggccctgatctacaatgaggccctgaagggctag

SEQ ID NO: 168749 - DNA, 273 bp, synthetic construct; identical to SEQ ID NO: 168748
  misc_feature 1..273: note = Description of Artificial Sequence: Synthetic coding sequence
  source 1..273: mol_type = other DNA

SEQ ID NO: 168750 - DNA, 306 bp, synthetic construct
  misc_feature 1..306: note = Description of Artificial Sequence: Synthetic coding sequence
  source 1..306: mol_type = other DNA
atgagcaacacccaggccgagaggagcatcatcggcatgattgacatgttccacaagtacaccaggagagatgacaagattgagaagcccagcctgctgaccatgatgaaggagaacttccccaacttcctgagcgcctgtgacaagaagggcaccaactacctggctgatgtgtttgagaagaaggacaagaatgaagacaagaagattgacttcagcgagttcctgagcctgctgggggacatcgccacagactaccacaagcagagccatggagctgccccctgcagcggcggcagccagtag

SEQ ID NO: 168751 - DNA, 306 bp, synthetic construct; identical to SEQ ID NO: 168750
  misc_feature 1..306: note = Description of Artificial Sequence: Synthetic coding sequence
  source 1..306: mol_type = other DNA

SEQ ID NO: 168752 - DNA, 282 bp, synthetic construct
  misc_feature 1..282: note = Description of Artificial Sequence: Synthetic coding sequence
  source 1..282: mol_type = other DNA
atgctgacagagctggagaaggccctgaacagcatcattgatgtgtaccacaagtacagcctcatcaagggcaacttccacgctgtgtacagagatgacctgaagaagctgctggagacagaatgtccccagtacatcaggaagaagggagcagatgtgtggttcaaggagctggacatcaacacagatggagctgtgaacttccaggagttcctgatcctggtgatcaagatgggcgtggccgcccacaagaagagccatgaggagagccacaaggagtag

SEQ ID NO: 168753 - DNA, 282 bp, synthetic construct; identical to SEQ ID NO: 168752
  misc_feature 1..282: note = Description of Artificial Sequence: Synthetic coding sequence
  source 1..282: mol_type = other DNA

SEQ ID NO: 168754 - DNA, 345 bp, synthetic construct
  misc_feature 1..345: note = Description of Artificial Sequence: Synthetic coding sequence
  source 1..345: mol_type = other DNA
atgacctgcaagatgagccagctggagaggaacatcgagaccatcatcaacaccttccaccagtacagcgtgaagctgggccacccagacaccctgaaccagggcgagttcaaggagctggtgaggaaggacctgcagaacttcctgaagaaggagaacaagaatgagaaggtgattgagcacatcatggaggacctggacaccaatgctgacaagcagctgagctttgaggagttcatcatgctgatggcccggctgacctgggccagccatgagaagatgcatgaaggagatgagggccctggccaccaccacaagccaggcctgggggagggcaccccctag

SEQ ID NO: 168755 - DNA, 279 bp, synthetic construct
  misc_feature 1..279: note = Description of Artificial Sequence: Synthetic coding sequence
  source 1..279: mol_type = other DNA
atgtctgagctggagaaggccatggtggccctgattgatgtgttccaccagtacagcggccgggagggggacaagcacaagctgaagaagtctgagctgaaggagctgatcaacaatgagctgagccacttcctggaggagatcaaggagcaggaggtggtggacaaggtgatggagaccctggacaatgatggagatggagaatgtgacttccaggagttcatggcctttgtggccatggtgaccacagcctgccacgagttctttgaacatgaatag

SEQ ID NO: 168756 - DNA, 279 bp, synthetic construct; identical to SEQ ID NO: 168755
  misc_feature 1..279: note = Description of Artificial Sequence: Synthetic coding sequence
  source 1..279: mol_type = other DNA

SEQ ID NO: 168757 - DNA, 288 bp, synthetic construct
  misc_feature 1..288: note = Description of Artificial Sequence: Synthetic coding sequence
  source 1..288: mol_type = other DNA
atgacagagctggagacagccatgggcatgatcattgatgtgttcagccgctacagcggcagcgagggcagcacccagaccctgaccaagggggagctgaaggtgctgatggagaaggagctgcccggcttcctgcagagcggcaaggacaaggatgctgtggacaagctgctgaaggacctggatgccaatggagatgcccaggtggacttcagcgagttcatcgtgtttgtggccgccatcaccagcgcctgccacaagtactttgagaaggccggcctgaagtag

SEQ ID NO: 168758 - DNA, 300 bp, synthetic construct
  misc_feature 1..300: note = Description of Artificial Sequence: Synthetic coding sequence
  source 1..300: mol_type = other DNA
atgcccacccagctggagatggccatggacaccatgatccgcatcttccaccgctacagcggcaaggagaggaagcgcttcaagctgagcaaaggagagctgaagctgctgctgcagcgggagctgacagagttcctgagctgccagaaggagacccagctggtggacaagatcgtgcaggacctggatgccaacaaggacaatgaggtggacttcaatgaatttgtggtgatggtggccgccctgactgtggcctgcaatgactactttgtggagcagctgaagaagaagggcaagtag

SEQ ID NO: 168759 - DNA, 300 bp, synthetic construct; identical to SEQ ID NO: 168758
  misc_feature 1..300: note = Description of Artificial Sequence: Synthetic coding sequence
  source 1..300: mol_type = other DNA

SEQ ID NO: 168760 - DNA, 1029 bp, synthetic construct
  misc_feature 1..1029: note = Description of Artificial Sequence: Synthetic coding sequence
  source 1..1029: mol_type = other DNA
atgatgtgcagccgggtgcccagcgagcagagcagcggcaccagcctgctgcccaaggatggagcccccttctcctgggacagcctggatgaagatggcctggatgacagcctgctggagctgtctgagggggaggaggatgatggagatgtgaactacacagaggaggagattgatgccctgctgaaggaggatgaccccagctatgagcagagcagtggagaagatgatggcggccacgtggagaagggggagcggggcagccagatcctgctggacaccccccgggagaagaacagcagctacagcctgggccctgtggccgagaccccagacctcttcaagctgccccagctgagcaccagcagcggccacggccctgcccacaccaagcccctgaacagaagatctgtgctggagaagaacctgatcaaggtgacagtggcccccttcaaccccaccgtgtgtgatgccctgctggacaaggatgaaacagacagcagcaaggacacagagaagctgagcagcctgggggaggagatgagagaagatggcctgagccccaatgaaagcaagctgtgcacagaaagtgagggcatcagccccaacaacagcgcctggaatggcccccagctgagcagcagcaacaacaacttccagcagacagtgtctgacaagaacatgccagattctgagaaccccaccagcgtcttcagccgcatcagtgaccacagcgagacccccaacatggagctgagctgcagaaatggaggcagccacaagagcagctgtgagatgaggagcctggtggtgtccaccagcagcaacaagcaggatgtgctgaacaaggacagcggcaagatgaagggccatgaaagaaggctgggcaaggtgattcctgtgctgcagaccaagaccaggaccaacgtgcccaccttcagccagagcaacctggagcagcagaagcagctgtacctgcggagcgtcatcgcccacatcgaggaccctgaggacaccaaccagggctag

SEQ ID NO: 168761 - DNA, 1227 bp, synthetic construct
  misc_feature 1..1227: note = Description of Artificial Sequence: Synthetic coding sequence
  source 1..1227: mol_type = other DNA
atgatgtgcagccgggtgcccagcgagcagagcagcggcaccagcctgctgcccaaggatggagcccccttctcctgggacagcctggatgaagatggcctggatgacagcctgctggagctgtctgagggggaggaggatgatggagatgtgaactacacagaggaggagattgatgccctgctgaaggaggatgaccccagctatgagcagagcagtggagaagatgatggcggccacgtggagaagggggagcggggcagccagatcctgctggacaccccccgggagaagaacagcagctacagcctgggccctgtggccgagaccccagacctcttcaagctgccccagctgagcaccagcagcggccacggccctgcccacaccaagcccctgaacagaagatctgtgctggagaagaacctgatcaaggtgacagtggcccccttcaaccccaccgtgtgtgatgccctgctggacaaggatgaaacagacagcagcaaggacacagagaagctgagcagcctgggggaggagatgagagaagatggcctgagccccaatgaaagcaagctgtgcacagaaagtgagggcatcagccccaacaacagcgcctggaatggcccccagctgagcagcagcaacaacaacttccagcagacagtgtctgacaagaacatgccagattctgagaaccccaccagcgtcttcagccgcatcagtgaccacagcgagacccccaacatggagctgagctgcagaaatggaggcagccacaagagcagctgtgagatgaggagcctggtggtgtccaccagcagcaacaagcaggatgtgctgaacaaggacagcggcaagatgaagggccatgaaagaaggctgggcaaggtgattcctgtgctgcagaccaagaccaggaccaacgtgcccaccttcagccagagcaacctggagcagcagaagcagctgtacctgcggagcgtcatcgcccacatcgaggaccctgaggacaccaaccagggcatcagcggggagctgtgtgccctgatggaccaggtgcaccacatgcagcacagcaagtggcagcaccccagcgacctgaccaccagaaattatgcccggcggcagaagcacctgcagcgctacagcctgacccagtgggtggacaggaacatgaggagccaccaccgcttccagaggctgcctgacttctcctacagctag

SEQ ID NO: 168762 - DNA, 1227 bp, synthetic construct; identical to SEQ ID NO: 168761
  misc_feature 1..1227: note = Description of Artificial Sequence: Synthetic coding sequence
  source 1..1227: mol_type = other DNA

SEQ ID NO: 168763 - DNA, 1026 bp, synthetic construct
  misc_feature 1..1026: note = Description of Artificial Sequence: Synthetic coding sequence
  source 1..1026: mol_type = other DNA
atgatgtgcagccgggtgcccagcgagcagagcagcggcaccagcctgctgcccaaggatggagcccccttctcctgggacagcctggatgaagatggcctggatgacagcctgctggagctgtctgagggggaggaggatgatggagatgtgaactacacagaggaggagattgatgccctgctgaaggaggatgaccccagctatgagcagagcagtggagaagatgatggcggccacgtggagaagggggagcggggcagccagatcctgctggacaccccccgggagaagaacagcagctacagcctgggccctgtggccgagaccccagacctcttcaagctgccccagctgagcaccagcagcggccacggccctgcccacaccaagcccctgaacagaagatctgtgctggagaagaacctgatcaaggtgacagtggcccccttcaaccccaccgtgtgtgatgccctgctggacaaggatgaaacagacagcagcaaggacacagagaagctgagcagcctgggggaggagatgagagaagatggcctgagccccaatgaaagcaagctgtgcacagaaagtgagggcatcagccccaacaacagcgcctggaatggcccccagctgagcagcagcaacaacaacttccagcagacagtgtctgacaagaacatgccagattctgagaaccccaccagcgtcttcagccgcatcagtgaccacagcgagacccccaacatggagctgagctgcagaaatggaggcagccacaagagcagctgtgagatgaggagcctggtggtgtccaccagcagcaacaaggatgtgctgaacaaggacagcggcaagatgaagggccacgagcggcggctgggcaaggtgattcctgtgctgcagaccaagaccaggaccaacgtgcccaccttcagccagagcaacctggagcagcagaagcagctgtacctgcggtctgtgattgcccacattgaagatcctgaggacaccaaccagggctag

SEQ ID NO: 168764 - DNA, 441 bp, synthetic construct
  misc_feature 1..441: note = Description of Artificial Sequence: Synthetic coding sequence
  source 1..441: mol_type = other DNA
atgatgtgcagccgggtgcccagcgagcagagcagcggcaccagcctgctgcccaaggatggagcccccttctcctgggacagcctggatgaagatggcctggatgacagcctgctggagctgtctgagggggaggaggatgatggagatgtgaactacacagaggaggagattgatgccctgctgaaggaggatgaccccagctatgagcagagcagtggagaagatgatggcggccacgtggagaagggggagcggggcagccagatcctgctggacaccccccgggagaagaacagcagctacagcctgggccctgtggccgagaccccagacctcttcaagctgccccagctgagcaccagcagcggccacggccctgcccacaccaagcccctgaacagaagatctgtgctggagaagaacctgatcaaggtgtag

SEQ ID NO: 168765 - DNA, 363 bp, synthetic construct
  misc_feature 1..363: note = Description of Artificial Sequence: Synthetic coding sequence
  source 1..363: mol_type = other DNA
atgatgtgcagccgggtgcccagcgagcagagcagcggcaccagcctgctgcccaaggatggagcccccttctcctgggacagcctggatgaagatggcctggatgacagcctgctggagctgtctgagggggaggaggatgatggagatgtgaactacacagaggaggagattgatgccctgctgaaggaggatgaccccagctatgagcagagcagtggagaagatgatggcggccacgtggagaagggggagcggggcagccagatcctgctggacaccccccgggagaagaacagcagctacagcctgggccctgtggccgagaccccagacctcttcaagctgccccagctgtcctag

SEQ ID NO: 168766 - DNA, 126 bp, synthetic construct
  misc_feature 1..126: note = Description of Artificial Sequence: Synthetic coding sequence
  source 1..126: mol_type = other DNA
atgatgtgcagccgggtgcccagcgagcagagcagcggcaccagcctgctgcccaaggatggagcccccttctcctgggacagcctggatgaagatggcctggatgacagcctgctggagctgtag

SEQ ID NO: 168767 - DNA, 18 bp, synthetic construct
  misc_feature 1..18: note = Description of Artificial Sequence: Synthetic coding sequence
  source 1..18: mol_type = other DNA
atgatgtgcagcaggtag

SEQ ID NO: 168768 - DNA, 393 bp, synthetic construct
  misc_feature 1..393: note = Description of Artificial Sequence: Synthetic coding sequence
  source 1..393: mol_type = other DNA
atgatgtgcagccgggtgcccagcgagcagagcagcggcaccagcctgctgcccaaggatggagcccccttctcctgggacagcctggatgaagatggcctggatgacagcctgctggagctgtctgagggggaggaggatgatggagatgtgaactacacagaggaggagattgatgccctgctgaaggaggatgaccccagctatgagcagagcagtggagaagatgatggcggccacgtggagaagggggagcggggcagccagatcctgctggacaccccccgggagaagaacagcagctacagcctgggccctgtggccgagaccccagacctcttcaagctgccccagctgagcaccagcagcggccacggccctgcccacacctag

SEQ ID NO: 168769 - DNA, 1026 bp, synthetic construct; identical to SEQ ID NO: 168763
  misc_feature 1..1026: note = Description of Artificial Sequence: Synthetic coding sequence
  source 1..1026: mol_type = other DNA

SEQ ID NO: 168770 - DNA, 516 bp, synthetic construct
  misc_feature 1..516: note = Description of Artificial Sequence: Synthetic coding sequence
  source 1..516: mol_type = other DNA
atgatgtgcagccgggtgcccagcgagcagagcagcggcaccagcctgctgcccaaggatggagcccccttctcctgggacagcctggatgaagatggcctggatgacagcctgctggagctgtctgagggggaggaggatgatggagatgtgaactacacagaggaggagattgatgccctgctgaaggaggatgaccccagctatgagcagagcagtggagaagatgatggcggccacgtggagaagggggagcggggcagccagatcctgctggacaccccccgggagaagaacagcagctacagcctgggccctgtggccgagaccccagacctcttcaagctgccccagctgagcaccagcagcggccacggccctgcccacaccaagcccctgaacagaagatctgtgctggagaagaacctgatcaaggtgacagtggcccccttcaaccccaccgtgtgtgatgccctgctggacaaggatgaaacagacagcagcaaggacacctag

SEQ ID NO: 168771 - DNA, 1764 bp, synthetic construct
  misc_feature 1..1764: note = Description of Artificial Sequence: Synthetic coding sequence
  source 1..1764: mol_type = other DNA
atggccacagctgcctatgagcagctgaagctgcacatcaccccagagaagttctacgtggaggcctgtgatgatggagcagatgatgtgctgaccatcgacagagtgtccacagaggtgaccctggccgtgaagaaggatgtgcccccatctgctgtgacccggcccatcttcggcatcctgggcaccatccacctggtggccggcaactacctgattgtcatcaccaagaagatcaaggtgggggagttcttcagccacgtggtgtggaaggccacagactttgatgtgctgagctacaagaagaccatgctgcacctgacagacatccagctgcaggacaacaagaccttcctggccatgctgaaccacgtgctgaatgtggatggcttctacttcagcaccacctatgacctgacccacaccctgcagaggctgagcaacaccagccctgagttccaggagatgagcctgctggagagagctgaccagagatttgtgtggaatggccacctgctgcgggagctgagcgcccagcctgaggtgcacagatttgccctgcctgtgctgcacggcttcatcaccatgcacagctgcagcatcaacgggaagtactttgactggatcctgatcagcagaagaagctgcttccgggccggcgtgcgctactacgtgcggggcatcgacagcgagggccacgccgccaactttgtggagacagagcagatcgtgcactacaacggcagcaaggccagctttgtgcagacccggggcagcatccctgtgttctggagccagaggcccaacctgaagtacaagcccctgccccagatcagcaaggtggccaaccacatggatggcttccagaggcactttgacagccaggtgatcatctacggcaagcaggtgatcatcaacctgatcaaccagaagggcagcgagaagcccctggagcagacctttgccaccatggtgagcagcctgggcagcggcatgatgagatacatcgcctttgacttccacaaggagtgcaagaacatgcgctgggaccggctgagcatcctgctggaccaggtggccgagatgcaggatgagctgagctacttcctggtggacagcgctggccaggtggtggccaaccaggagggcgtcttccgcagcaactgcatggactgcctggacaggaccaacgtcatccagagcctgctggcccggcgcagcctgcaggcccagctgcagaggctgggcgtgctgcacgtgggccagaagctggaggagcaggatgaatttgagaagatctacaagaatgcctgggccgacaatgccaatgcctgtgccaagcagtatgccggcaccggggccctgaagacagacttcaccaggacaggcaagaggacccacctgggcctcatcatggatggctggaacagcatgatccgctactacaagaacaacttcagtgatggcttccggcaggacagcattgacctcttcctgggcaactacagcgtggatgagctggagagccacagccccctgtctgtgccccgggactggaagttcctggccctgcccatcatcatggtggtggccttctccatgtgcatcatctgcctgctgatggccggggacacctggacagagaccctggcctacgtgctcttctggggcgtggccagcatcggcaccttcttcatcatcctgtacaacgggaaggactttgtggatgccccccggctggtgcagaaggagaagattgattag

SEQ ID NO: 168772 - DNA, 1581 bp, synthetic construct
  misc_feature 1..1581: note = Description of Artificial Sequence: Synthetic coding sequence
  source 1..1581: mol_type = other DNA
atgtggaagctggtgatgatggagcagatgacctacctgcccctgactgtgtgcccccagaggctgcccctgcagagcaggaagatgttcctgctgcagctgagccaggaccagtacctggtgtactgggcccagagcatctggtggcagctgcaggacaacaagaccttcctggccatgctgaaccacgtgctgaatgtggatggcttctacttcagcaccacctatgacctgacccacaccctgcagaggctgagcaacaccagccctgagttccaggagatgagcctgctggagagagctgaccagagatttgtgtggaatggccacctgctgcgggagctgagcgcccagcctgaggtgcacagatttgccctgcctgtgctgcacggcttcatcaccatgcacagctgcagcatcaatggcaagtactttgactggatcctgatcagccgccgcagctgcttccgggccggcgtgcgctactacgtgcggggcattgattctgagggccatgctgccaactttgtggagacagagcagatcgtgcactacaacggcagcaaggccagctttgtgcagacccggggcagcatccctgtgttctggagccagaggcccaacctgaagtacaagcccctgccccagatcagcaaggtggccaaccacatggatggcttccagaggcactttgacagccaggtgatcatctacggcaagcaggtgatcatcaacctgatcaaccagaagggcagcgagaagcccctggagcagacctttgccaccatggtgagcagcctgggcagcggcatgatgagatacatcgcctttgacttccacaaggagtgcaagaacatgcgctgggaccggctgagcatcctgctggaccaggtggccgagatgcaggatgagctgagctacttcctggtggacagcgctggccaggtggtggccaaccaggagggcgtcttccgcagcaactgcatggactgcctggacaggaccaacgtcatccagagcctgctggcccggcgcagcctgcaggcccagctgcagaggctgggcgtgctgcacgtgggccagaagctggaggagcaggatgaatttgagaagatctacaagaatgcctgggccgacaatgccaatgcctgtgccaagcagtatgccggcactggagccctgaagacagacttcaccaggacaggcaagaggacccacctgggcctcatcatggatggctggaacagcatgatccgctactacaagaacaacttcagtgatggcttccggcaggacagcattgacctcttcctgggcaactacagcgtggatgagctggagagccacagccccctgtctgtgccccgggactggaagttcctggccctgcccatcatcatggtggtggccttctccatgtgcatcatctgcctgctgatggccggggacacctggacagagaccctggcctacgtgctcttctggggcgtggccagcatcggcaccttcttcatcatcctgtacaacgggaaggactttgtggatgccccccggctggtgcagaaggagaagattgattag

SEQ ID NO: 168773 - DNA, 2901 bp, synthetic construct
  misc_feature 1..2901: note = Description of Artificial Sequence: Synthetic coding sequence
  source 1..2901: mol_type = other DNA
atgttctggaagtttgacctgaacaccaccagccacgtggacaagctgctggacaaggagcacgtgaccctgcaggagctgatggatgaagatgacatcctgcaggagtgcaaggcccagaaccagaagctgctggacttcctgtgccggcagcagtgcatggaggagctggtgtccctcatcacccaggacccccccctggacatggaggagaaggtgcgcttcaagtaccccaacacagcctgtgagctgctgacctgtgatgtgccccagatcagtgaccggctgggcggagatgagagcctgctgagcctgctgtatgacttcctggaccacgagccccccctgaaccccctgctggccagcttcttcagcaagaccatcggcaacctgattgccaggaagacagagcaggtgatcaccttcctgaagaagaaggacaagttcatcagcctggtgctgaagcacatcggcaccagcgccctgatggacctgctgctgcggctggtgtcctgtgtggagcccgccggcctgcggcaggatgtgctgcactggctgaatgaggagaaggtgatccagaggctggtggagctgatccaccccagccaggatgaagatcggcagagcaatgccagccagaccctgtgtgacatcgtgcggctgggccgggaccagggcagccagctgcaggaggccctggagccagaccccctgctgacagccctggagagccaggactgtgtggagcagctgctgaagaacatgtttgatggagacagaacagagagctgcctggtgtctggcacccaggtgctgctgaccctgctggagaccaggagagtgggcacagagggcctggtggacagcttcagccagggcctggagaggagctatgctgtgagcagctctgtgctgcacggcatcgagccccggctgaaggacttccaccagctgctgctgaacccccccaagaagaaggccatcctgaccaccatcggcgtgctggaggagcccctgggcaatgcccggctgcatggagcccggctgatggccgccctgctgcacaccaacacccccagcatcaaccaggagctgtgccgcctgaacaccatggacctgctgctggacctcttcttcaagtacacctggaacaacttcctgcacttccaggtggagctgtgcatcgccgccatcctgagccacgccgcccgggaggagaggacagaggccagcggcagcgagagccgggtggagccccctcatgaaaatggaaacagaagcctggagaccccccagcctgctgccagcctgcctgacaacaccatggtgacccacctgttccagaagtgctgcctggtgcagaggatcctggaggcctgggaggccaatgaccacacccaggccgccggcggcatgagaagaggcaacatgggccacctgaccagaattgccaatgctgtggtgcagaacctggagcggggccctgtgcagacccacatcagcgaggtgatccggggcctgcctgctgactgccggggccgctgggagagctttgtggaggagaccctgacagagaccaacagaagaaacacagtggacctggtgtccacccaccacctgcacagcagcagtgaagatgaagatattgaaggagccttccccaatgagctgagcctgcagcaggccttcagtgactaccagatccagcagatgacagccaactttgtggaccagtttggcttcaatgatgaggagtttgctgaccaggatgacaacatcaatgccccctttgacagaattgctgagatcaacttcaacattgatgctgatgaggacagccccagcgctgccctgtttgaggcctgctgcagcgaccgcatccagccctttgatgatgatgaagatgaggacatctgggaggacagcgacacccgctgtgccgcccgggtgatggcccggcccaggtttggagccccccacgccagcgagagctgcagcaagaatggacctgagcggggcggccaggacggcaaggccagcctggaggcccacagagatgcccctggggccggggcccccccagcccctgggaagaaggaggcccctcctgtggagggggacagcgagggcgccatgtggacagctgtgtttgatgagcccgccaacagcacccccacagcccctggggtggtgagagatgtgggcagctctgtgtgggccgccggcaccagcgcccctgaggagaagggctgggccaagttcacagacttccagcccttctgctgcagcgagagcggcccccgctgcagcagccctgtggacacagagtgcagccacgccgagggcagccgcagccagggccctgagaaggccagccaggccagctactttgctgtgtccccagccagcccctgtgcctggaatgtgtgtgtgaccaggaaggcccccctgctggccagtgacagcagcagcagcggcggcagccacagtgaagatggagaccagaaggccgccagcgccatggatgctgtgtcccggggccctggccgggaggccccacccctgcccaccgtggccaggacagaggaggccgtgggccgggtgggctgtgccgacagccggctgctgagccctgcctgcccagcccccaaggaggtgacagctgccccagctgtggccgtgcccccagaggccaccgtggccatcaccacagccctgagcaaggccggccctgccatccccaccccagctgtgagcagcgccctggccgtggccgtgcccctgggccccatcatggctgtgacagctgccccagccatggtggccaccctgggcaccgtgaccaaggatggcaagacagatgcccctcctgagggcgccgccctgaatggacctgtgtag

SEQ ID NO: 168774 - DNA, 2217 bp, synthetic construct
  misc_feature 1..2217: note = Description of Artificial Sequence: Synthetic coding sequence
  source 1..2217: mol_type = other DNA
atgagcagaagaagccagaggctgacccgctacagccagggagatgatgatggcagcagcagcagcggcggcagctctgtggccggcagccagagcaccctcttcaaggacagccccctgcggaccctgaagaggaagagcagcaacatgaagaggctgagccctgccccccagctgggccccagcagtgatgcccacaccagctactacagcgagagcctggtgcatgagagctggttccccccaagaagcagcctggaggagctgcatggagatgccaactggggcgaggacctgcgggtgagaagaagaagaggaactggaggcagcgagagcagccgggccagcggcctggtgggcaggaaggccacagaggacttcctgggcagcagcagcggctacagcagtgaagatgattatgtggaggacagcgagggccggggcagcaaggtgacagaaacagagcctgtgtcctccttccctgctggctacagtgatgtggaccagcagagcagcagcagccggctgcggtctgctgtgtccagagctggcagcctgctgtggatggtggccaccagccctggccgcctcttccggctgctgtactggtgggccggcaccacctggtaccgcctgaccacagctgccagcctgctggatgtgtttgtgctgacccggcgcttcagcagcctgaagaccttcctgtggttcctgctgcccctgctgctgctgacctgcctgacctatggagcctggtacttctacccctacggcctgcagaccttccacccagccctggtgtcctggtgggccgccaaggacagccggcggccagatgagggctgggaggcccgggacagcagcccccacttccaggccgagcagagggtgatgagccgggtgcacagcctggagcggcggctggaggccctggccgctgagttcagcagcaactggcagaaggaggccatgaggctggagcggctggagctgcggcagggcgcccctggccagggcggcggcggcggcctgagccatgaggacaccctggccctgctggagggcctggtgtccagaagagaggccgccctgaaggaggacttcagaagagaaacagctgcccgcatccaggaggagctgagcgccctgcgggcagagcaccagcaggacagcgaggacctcttcaagaagatcgtgcgggccagccaggagagcgaggcccgcatccagcagctgaagtctgagtggcagagcatgacccaggagagcttccaggagagctctgtgaaggagctgcggcggctggaggaccagctggccggcctgcagcaggagctggccgccctggccctgaagcagagctctgtggccgaggaggtgggcctgctgccccagcagatccaggccgtgagagatgatgtggagagccagtttcctgcctggatcagccagttcctggcccggggcggcggcggccgggtgggcctgctgcagcgggaggagatgcaggcccagctgcgggagctggagagcaagatcctgacccacgtggccgagatgcagggcaagagcgcccgggaggccgccgccagcctgagcctgaccctgcagaaggagggcgtcatcggcgtgacagaggagcaggtgcaccacatcgtgaagcaggccctgcagcgctacagcgaggacagaattggcctggccgactatgccctggagagcggcggggccagcgtcatcagcacccgctgcagcgagacctatgagaccaagacagccctgctgagcctgtttggcatccccctgtggtaccacagccagagccccagggtcatcctgcagccagatgtgcaccctggcaactgctgggccttccagggcccccagggctttgctgtggtgcggctgagcgcccgcatccggcccacagctgtgaccctggagcacgtgcccaaggccctgagccccaacagcaccatcagcagcgcccccaaggactttgccatcttcggctttgatgaggacctgcagcaggagggcaccctgctgggcaagttcacctatgaccaggatggagagcccatccagaccttccacttccaggcccccaccatggccacctaccaggtggtggagctgcgcatcctgaccaactggggccaccctgagtacacctgcatctaccgcttccgggtgcatggagagcccgcccactag

SEQ ID NO: 168775 - DNA, 2154 bp, synthetic construct
  misc_feature 1..2154: note = Description of Artificial Sequence: Synthetic coding sequence
  source 1..2154: mol_type = other DNA
atgagcagaagaagccagaggctgacccgctacagccagggagatgatgatggcagcagcagcagcggcggcagctctgtggccggcagccagagcaccctcttcaaggacagccccctgcggaccctgaagaggaagagcagcaacatgaagaggctgagccctgccccccagctgggccccagcagtgatgcccacaccagctactacagcgagagcctggtgcatgagagctggttccccccaagaagcagcctggaggagctgcatggagatgccaactggggcgaggacctgcgggtgagaagaagaagaggaactggaggcagcgagagcagccgggccagcggcctggtgggcaggaaggccacagaggacttcctgggcagcagcagcggctacagcagtgaagatgattatgtgggctacagtgatgtggaccagcagagcagcagcagccggctgcggtctgctgtgtcccgggccggcagcctgctgtggatggtggccaccagccctggccgcctcttccggctgctgtactggtgggccggcaccacctggtaccgcctgaccacagctgccagcctgctggatgtgtttgtgctgacccggcgcttcagcagcctgaagaccttcctgtggttcctgctgcccctgctgctgctgacctgcctgacctacggggcctggtacttctacccctacggcctgcagaccttccacccagccctggtgtcctggtgggccgccaaggacagcagaagaccagatgagggctgggaggcccgggacagcagcccccacttccaggccgagcagagggtgatgagccgggtgcacagcctggagcggcggctggaggccctggccgctgagttcagcagcaactggcagaaggaggccatgaggctggagcggctggagctgcggcagggcgcccctggccagggcggcggcggcggcctgagccatgaggacaccctggccctgctggagggcctggtgtcccggcgggaggccgccctgaaggaggacttccggcgggagacagctgcccgcatccaggaggagctgagcgccctgcgggcagagcaccagcaggacagtgaagatctcttcaagaagatcgtgcgggccagccaggagagcgaggcccgcatccagcagctgaagtctgagtggcagagcatgacccaggagagcttccaggagagctctgtgaaggagctgcggcggctggaggaccagctggccggcctgcagcaggagctggccgccctggccctgaagcagagctctgtggccgaggaggtgggcctgctgccccagcagatccaggccgtgagagatgatgtggagagccagtttcctgcctggatcagccagttcctggcccggggcggcggcggccgggtgggcctgctgcagcgggaggagatgcaggcccagctgcgggagctggagagcaagatcctgacccacgtggccgagatgcagggcaagagcgcccgggaggccgccgccagcctgagcctgaccctgcagaaggagggcgtgattggagtgacagaggagcaggtgcaccacatcgtgaagcaggccctgcagcgctacagtgaagatcgcatcggcctggccgactatgccctggagagcggcggggccagcgtcatcagcacccgctgcagcgagacctatgagaccaagacagccctgctgagcctgtttggcatccccctgtggtaccacagccagagccccagggtcatcctgcagccagatgtgcaccctggcaactgctgggccttccagggcccccagggctttgctgtggtgcggctgagcgcccgcatccggcccacagctgtgaccctggagcacgtgcccaaggccctgagccccaacagcaccatcagcagcgcccccaaggactttgccatctttggatttgatgaggacctgcagcaggagggcaccctgctgggcaagttcacctatgaccaggatggagagcccatccagaccttccacttccaggcccccaccatggccacctaccaggtggtggagctgcgcatcctgaccaactggggccaccctgagtacacctgcatctaccgcttccgggtgcacggggagcccgcccactag

SEQ ID NO: 168776 - DNA, 2154 bp, synthetic construct; identical to SEQ ID NO: 168775
  misc_feature 1..2154: note = Description of Artificial Sequence: Synthetic coding sequence
  source 1..2154: mol_type = other DNA

SEQ ID NO: 168777 - DNA, 2121 bp, synthetic construct
  misc_feature 1..2121: note = Description of Artificial Sequence: Synthetic coding sequence
  source 1..2121: mol_type = other DNA
atggtgagcccccccagcgctggccagaggctgcggggcgtgcctgtgtgggccgccggggccttccgcttcagcagcggggaggagagcaccagccacctgatcatgagccgccgcagccagaggctgacccgctacagccagggagatgatgatggcagcagcagcagcggcggcagctctgtggccggcagccagagcaccctcttcaaggacagccccctgcggaccctgaagaggaagagcagcaacatgaagaggctgagccctgccccccagctgggccccagcagtgatgcccacaccagctactacagcgagagcctggtgcatgagagctggttcccccccaggagcagcctggaggagctgcatggagatgccaactggggctacagtgatgtggaccagcagagcagcagcagccggctgcggtctgctgtgtccagagctggcagcctgctgtggatggtggccaccagccctggccgcctcttccggctgctgtactggtgggccggcaccacctggtaccgcctgaccacagctgccagcctgctggatgtgtttgtgctgacccggcgcttcagcagcctgaagaccttcctgtggttcctgctgcccctgctgctgctgacctgcctgacctatggagcctggtacttctacccctacggcctgcagaccttccacccagccctggtgtcctggtgggccgccaaggacagccggcggccagatgagggctgggaggcccgggacagcagcccccacttccaggccgagcagagggtgatgagccgggtgcacagcctggagcggcggctggaggccctggccgctgagttcagcagcaactggcagaaggaggccatgaggctggagcggctggagctgcggcagggcgcccctggccagggcggcggcggcggcctgagccatgaggacaccctggccctgctggagggcctggtgtccagaagagaggccgccctgaaggaggacttcagaagagaaacagctgcccgcatccaggaggagctgagcgccctgcgggcagagcaccagcaggacagcgaggacctcttcaagaagatcgtgcgggccagccaggagagcgaggcccgcatccagcagctgaagtctgagtggcagagcatgacccaggagagcttccaggagagctctgtgaaggagctgcggcggctggaggaccagctggccggcctgcagcaggagctggccgccctggccctgaagcagagctctgtggccgaggaggtgggcctgctgccccagcagatccaggccgtgagagatgatgtggagagccagtttcctgcctggatcagccagttcctggcccggggcggcggcggccgggtgggcctgctgcagcgggaggagatgcaggcccagctgcgggagctggagagcaagatcctgacccacgtggccgagatgcagggcaagagcgcccgggaggccgccgccagcctgagcctgaccctgcagaaggagggcgtcatcggcgtgacagaggagcaggtgcaccacatcgtgaagcaggccctgcagcgctacagcgaggacagaattggcctggccgactatgccctggagagcggcggggccagcgtcatcagcacccgctgcagcgagacctatgagaccaagacagccctgctgagcctgtttggcatccccctgtggtaccacagccagagccccagggtcatcctgcagccagatgtgcaccctggcaactgctgggccttccagggcccccagggctttgctgtggtgcggctgagcgcccgcatccggcccacagctgtgaccctggagcacgtgcccaaggccctgagccccaacagcaccatcagcagcgcccccaaggactttgccatcttcggctttgatgaggacctgcagcaggagggcaccctgctgggcaagttcacctatgaccaggatggagagcccatccagaccttccacttccaggcccccaccatggccacctaccaggtggtggagctgcgcatcctgaccaactggggccaccctgagtacacctgcatctaccgcttccgggtgcatggagagcccgcccactag

SEQ ID NO: 168778 - DNA, 375 bp, synthetic construct
  misc_feature 1..375: note = Description of Artificial Sequence: Synthetic coding sequence
  source 1..375: mol_type = other DNA
atgagcagaagaagccagaggctgacccgctacagccagggagatgatgatggcagcagcagcagcggcggcagctctgtggccggcagccagagcaccctcttcaaggacagccccctgcggaccctgaagaggaagagcagcaacatgaagaggctgagccctgccccccagctgggccccagcagtgatgcccacaccagctactacagcgagagcctggtgcatgagagctggttccccccaagaagcagcctggaggagctgcatggagatgccaactgggaccccaccttccagaagctgctggaggcccagaagagcccctggttcttccctgcccaggtgaggacctgtggctgcggcggcggctag

SEQ ID NO: 168779 - DNA, 384 bp, synthetic construct
  misc_feature 1..384: note = Description of Artificial Sequence: Synthetic coding sequence
  source 1..384: mol_type = other DNA
atgagcagaagaagccagaggctgacccgctacagccagggagatgatgatggcagcagcagcagcggcggcagctctgtggccggcagccagagcaccctcttcaaggacagccccctgcggaccctgaagaggaagagcagcaacatgaagaggctgagccctgccccccagctgggccccagcagtgatgcccacaccagctactacagcgagagcctggtgcatgagagctggttccccccaagaagcagcctggaggagctgcatggagatgccaactggggctacagtgatgtggaccagcagagcagcagcagccggctgcggtctgctgtgtcccgggccggcagcctgctgtggatggtggccaccagcccctag

SEQ ID NO: 168780 - DNA, 333 bp, synthetic construct
  misc_feature 1..333: note = Description of Artificial Sequence: Synthetic coding sequence
  source 1..333: mol_type = other DNA
atgagcagaagaagccagaggctgacccgctacagccagggagatgatgatggcagcagcagcagcggcggcagctctgtggccggcagccagagcaccctcttcaaggacagccccctgcggaccctgaagaggaagagcagcaacatgaagaggctgagccctgccccccagctgggccccagcagtgatgcccacaccagctactacagcgagagcctggtgcatgagagctggttccccccaagaagcagcctggaggagctgcatggagatgccaactggggcgaggacctgcgggtgagaagaagaagaggaactggaggcagctag

SEQ ID NO: 168781 - DNA, 675 bp, synthetic construct
  misc_feature 1..675: note = Description of Artificial Sequence: Synthetic coding sequence
  source 1..675: mol_type = other DNA
atgagcagaagaagccagaggctgacccgctacagccagggagatgatgatggcagcagcagcagcggcggcagctctgtggccggcagccagagcaccctcttcaaggacagccccctgcggaccctgaagaggaagagcagcaacatgaagaggctgagccctgccccccagctgggccccagcagtgatgcccacaccagctactacagcgagagcctggtgcatgagagctggttccccccaagaagcagcctggaggagctgcatggagatgccaactggggctacagtgatgtggaccagcagagcagcagcagccggctgcggtctgctgtgtcccgggccggcagcctgctgtggatggtggccaccagccctggccgcctcttccggctgctgtactggtgggccggcaccacctggtaccgcctgaccacagctgccagcctgctggatgtgtttgtgctgacccggcgcttcagcagcctgaagaccttcctgtggttcctgctgcccctgctgctgctgacctgcctgacctacggggcctggtacttctacccctacggcctgcagaccttccacccagccctggtgtcctggtgggccgccaaggacagcagaagaccagatgagggctgggaggcccgggacagcagcccccacttctag

SEQ ID NO: 168782 - DNA, 306 bp, synthetic construct
  misc_feature 1..306: note = Description of Artificial Sequence: Synthetic coding sequence
  source 1..306: mol_type = other DNA
atgagcagaagaagccagaggctgacccgctacagccagggagatgatgatggcagcagcagcagcggcggcagctctgtggccggcagccagagcaccctcttcaaggacagccccctgcggaccctgaagaggaagagcagcaacatgaagaggctgagccctgccccccagctgggccccagcagtgatgcccacaccagctactacagcgagagcctggtgcatgagagctggttccccccaagaagcagcctggaggagctgcatggagatgccaactggggcgaggacctgcgggtgtag

SEQ ID NO: 168783 - DNA, 435 bp, synthetic construct
  misc_feature 1..435: note = Description of Artificial Sequence: Synthetic coding sequence
  source 1..435: mol_type = other DNA
atgagcagaagaagccagaggctgacccgctacagccagggagatgatgatggcagcagcagcagcggcggcagctctgtggccggcagccagagcaccctcttcaaggacagccccctgcggaccctgaagaggaagagcagcaacatgaagaggctgagccctgccccccagctgggccccagcagtgatgcccacaccagctactacagcgagagcctggtgcatgagagctggttccccccaagaagcagcctggaggagctgcatggagatgccaactggggcgaggacctgcgggtgagaagaagaagaggaactggaggcagcgagagcagccgggccagcggcctggtgggcaggaaggccacagaggacttcctgggcagcagcagcggctacagcagtgaagatgattatgtgggcagaagatag

SEQ ID NO: 168784 - DNA, 618 bp, synthetic construct
  misc_feature 1..618: note = Description of Artificial Sequence: Synthetic coding sequence
  source 1..618: mol_type = other DNA
atgagcagaagaagccagaggctgacccgctacagccagggagatgatgatggcagcagcagcagcggcggcagctctgtggccggcagccagagcaccctcttcaaggacagccccctgcggaccctgaagaggaagagcagcaacatgaagaggctgagccctgccccccagctgggccccagcagtgatgcccacaccagctactacagcgagagcctggtgcatgagagctggttccccccaagaagcagcctggaggagctgcatggagatgccaactggggcgaggacctgcgggtgagaagaagaagaggaactggaggcagcgagagcagccgggccagcggcctggtgggcaggaaggccacagaggacttcctgggcagcagcagcggctacagcagtgaagatgattatgtgggctacagtgatgtggaccagcagagcagcagcagccggctgcggtctgctgtgtcccgggccggcagcctgctgtggatggtggccaccagccctggccgcctcttccggctgctgtactggtgggccggcaccacctggtaccgcctgaccacagctgccagcctgctggatgtgtttgtgctgaccaggtag

SEQ ID NO: 168785 - DNA, 1140 bp, synthetic construct
  misc_feature 1..1140: note = Description of Artificial Sequence: Synthetic coding sequence
  source 1..1140: mol_type = other DNA
atgcccaggagcagccgcagccctggggaccccggggccctgctggaggatgtggcccacaacccccggcccaggagaattgcccagaggggcaggaacaccagcaggatggccgaggacaccagccccaacatgaatgacaacatcctgctgcctgtgaggaacaatgaccaggccctgggcctgacccagtgcatgctgggctgtgtgtcctggttcacctgctttgcctgcagcctgcggacccaggcccagcaggtgctcttcaacacctgccgctgcaagctgctgtgccagaagctgatggagaagacaggcatcctgctgctgtgtgccttcggcttctggatgttcagcatccacctgcccagcaagatgaaggtgtggcaggatgacagcatcaatggccccctgcagagcctgcggctgtaccaggagaaggtgcgccaccacagcggggagatccaggacctgcggggctccatgaaccagctgattgccaagctgcaggagatggaggccatgtctgatgagcagaagatggcccagaagatcatgaagatgatccacggggactacatcgagaagccagactttgccctgaagagcatcggggccagcattgactttgagcacacctctgtgacctacaaccacgagaaggcccacagctactggaactggatccagctgtggaactatgcccagcccccagatgtgatcctggagcccaacgtgaccccaggcaactgctgggcctttgaaggagaccggggccaggtgaccatccagctggcccagaaggtgtacctgagcaacctgaccctgcagcacatccccaagaccatcagcctgagcggcagcctggacacagcccccaaggactttgtgatctacggcatggagggcagccccaaggaggaggtgttcctgggcgccttccagttccagcctgagaacatcatccagatgttccccctgcagaaccagcctgcccgggccttctctgctgtgaaggtgaagatcagcagcaactggggcaaccctggcttcacctgcctgtacagagtgcgggtgcacggctctgtggccccaccccgggagcagccccaccagaacccctaccccaagagggactag

SEQ ID NO: 168786 - DNA, 369 bp, synthetic construct
  misc_feature 1..369: note = Description of Artificial Sequence: Synthetic coding sequence
  source 1..369: mol_type = other DNA
atgcccaggagcagccgcagccctggggaccccggggccctgctggaggatgtggcccacaacccccggcccaggagaattgcccagaggggcaggaacaccagcaggatggccgaggacaccagccccaacatgaatgacaacatcctgctgcctgtgaggaacaatgaccaggccctgggcctgacccagtgcatgctgggctgtgtgtatgccagctgctgtgcccggagctcctggaggcggcaggccttctgcagctctgtgctgtctgtgtgcccccgggccctgcccagcccccgctggagatacccctgggccctggccctgatcatcggccactgggcccggcactgcacagccacctag

SEQ ID NO: 168787 - DNA, 1065 bp, synthetic construct
  misc_feature 1..1065: note = Description of Artificial Sequence: Synthetic coding sequence
  source 1..1065: mol_type = other DNA
atgcccaggagcagccgcagccctggggaccccggggccctgctggaggatgtggcccacaacccccggcccaggagaattgcccagaggggcaggaacaccagcaggatggccgaggacaccagccccaacatgacctggttcacctgctttgcctgcagcctgcggacccaggcccagcaggtgctcttcaacacctgccgctgcaagctgctgtgccagaagctgatggagaagacaggcatcctgctgctgtgtgccttcggcttctggatgttcagcatccacctgcccagcaagatgaaggtgtggcaggatgacagcatcaatggccccctgcagagcctgcggctgtaccaggagaaggtgcgccaccacagcggggagatccaggacctgcggggctccatgaaccagctgattgccaagctgcaggagatggaggccatgtctgatgagcagaagatggcccagaagatcatgaagatgattcatggagactacatcgagaagccagactttgccctgaagagcattggagccagcattgactttgagcacacctctgtgacctacaaccacgagaaggcccacagctactggaactggatccagctgtggaactatgcccagcccccagatgtgatcctggagcccaacgtgaccccaggcaactgctgggcctttgaaggagaccggggccaggtgaccatccagctggcccagaaggtgtacctgagcaacctgaccctgcagcacatccccaagaccatcagcctgagcggcagcctggacacagcccccaaggactttgtgatctacggcatggagggcagccccaaggaggaggtgttcctgggcgccttccagttccagcctgagaacatcatccagatgttccccctgcagaaccagcctgcccgggccttctctgctgtgaaggtgaagatcagcagcaactggggcaaccctggcttcacctgcctgtacagagtgcgggtgcacggctctgtggccccaccccgggagcagccccaccagaacccctaccccaagagggactag

SEQ ID NO: 168788 - DNA, 459 bp, synthetic construct
  misc_feature 1..459: note = Description of Artificial Sequence: Synthetic coding sequence
  source 1..459: mol_type = other DNA
ggggccctgctggaggatgtggcccacaacccccggccccggcgcatcgcccagagaggaagaaacaccagcaggatggccgaggacaccagccccaacatgaatgacaacatcctgctgcctgtgagaaataatgaccaggccctgggcctgacccagtgcatgctgggctgtgtgtcctggttcacctgctttgcctgcagcctgcggacccaggcccagcaggtgctcttcaacacctgccgctgcaagctgctgtgccagaagctgatggagaagacaggcatcctgctgctgtgtgccttcggcgtgtcccagggccctgcccagagccaggtggaggtgtccctgggccctggaacagactaccgcaccctgggcaagaccctgcactgccacgtgacccagttcccccacctgcctgatggctgctgctgtgaaaattatgagatgaagtag

SEQ ID NO: 168789 - DNA, 387 bp, synthetic construct
  misc_feature 1..387: note = Description of Artificial Sequence: Synthetic coding sequence
  source 1..387: mol_type = other DNA
atgtctgagggcggcggccaggtgtcctgcatctttgctgcccccacccggctgtgccgctggccagccctgattgaatgtggggtgaacctgacccagcccctgtgtgagtggatgatccaggtggcccgggacaggaccctgagcctggcctgggaggtggccagcctgctgaccctgagcagcagcgaggtgggcctggagggcgtgggcaccatctggcccagcagctacagcagcgaggagagcagcagaaatggagctgagcagggccggcagctgagcattgagggccccttccagggccagaactgccccagccaccctgctgctgccctgcccctgcccatgagaggagagagccaggccaccagctgccaggtgtag

SEQ ID NO: 168790 - DNA, 3975 bp, synthetic construct
  misc_feature 1..3975: note = Description of Artificial Sequence: Synthetic coding sequence
  source 1..3975: mol_type = other DNA
atgagcaggaggaagcaggccaagccccagcacttccagagcgaccctgaggtggccagcctgcccaggagagatggagacacagagaagggccagcccagccggcccaccaagagcaaggatgcccacgtgtgtggccgctgctgtgccgagttctttgagctgagtgacctgctgctgcacaagaagaactgcaccaagaaccagctggtgctgattgtgaatgaaaatcctgccagccccccagagaccttcagccccagccccccaccagacaacccagatgagcagatgaatgacacagtgaacaagacagaccaggtggactgcagcgacctgtctgagcacaacggcctggaccgggaggagagcatggaggtggaggcccctgtggccaacaagagcggcagcggcaccagcagcggcagccacagcagcacagcccccagcagcagcagcagcagcagcagcagcagcggcggcggcggcagcagcagcacaggcaccagcgccatcaccaccagcctgccccagctgggggacctgaccaccctgggcaacttcagcgtcatcaacagcaatgtcatcatcgagaacctgcagagcaccaaggtggccgtggcccagttcagccaggaggcccgctgtggcggggccagcggcggcaagctggccgtgcctgccctgatggagcagctgctggccctgcagcagcagcagatccaccagctgcagctgattgagcagatccgccaccagatcctgctgctggccagccagaatgctgacctgcccaccagcagcagccccagccagggcaccctgcggaccagcgccaaccccctgagcaccctgagcagccacctgagccagcagctggccgctgctgctggcctggcccagagcctggccagccagagcgccagcatctctggagtgaagcagctgccccccatccagctgccccagagcagcagcggcaacaccatcatccccagcaacagcggcagcagccccaacatgaacatcctggccgctgctgtgaccacccccagcagcgagaaggtggccagcagcgctggggccagccacgtgagcaacccagctgtgagcagcagcagcagccctgcctttgccatcagcagcctgctgagccctgccagcaaccccctgctgccccagcaggccagcgccaacagcgtcttccccagccccctgcccaacatcggcaccacagctgaggacctgaacagcctgagcgccctggcccagcagaggaagagcaagccacccaacgtgacagcctttgaggccaagagcaccagtgatgaggccttcttcaagcacaagtgccgcttctgtgccaaggtgtttggaagtgacagcgccctgcagatccacctgcggagccacactggagagcggcccttcaagtgcaacatctgtggcaaccgcttcagcaccaagggcaacctgaaggtgcacttccagaggcacaaggagaagtacccccacatccagatgaacccctaccctgtgcctgagcacctggacaacatccccaccagcacaggcatcccctacggcatgagcatccccccagagaagcctgtgacctcctggctggacaccaagcctgtgctgcccaccctgaccacctctgtgggcctgcccctgccccccaccctgcccagcctcatccccttcatcaagacagaggagcccgcccccatccccatcagccacagcgccaccagccccccaggctctgtgaagagtgacagcggcggccctgagagcgccaccaggaacctgggcggcctgcctgaggaggccgagggcagcaccctgccccccagcggcggcaagtctgaggagagcggcatggtgaccaacagcgtgcccacagccagcagctctgtgctgagcagccctgctgctgactgtggccctgctggcagcgccaccaccttcaccaaccccctgctgcccctgatgtctgagcagttcaaggccaagttcccctttggaggcctgctggacagcgcccaggccagcgagaccagcaagctgcagcagctggtggagaacatcgacaagaaggccacagaccccaatgaatgcatcatctgccaccgggtgctgagctgccagagcgccctgaagatgcactaccgcacccacactggagagcggcccttcaagtgcaagatctgtggccgggccttcaccaccaagggcaacctgaagacccactacagcgtgcaccgggccatgccacccctgcgggtgcagcacagctgccccatctgccagaagaagttcaccaatgctgtggtgctgcagcagcacatccgcatgcacatgggcggccagatccccaacacccctgtgcctgacagctacagcgagagcatggagagtgacaccggcagctttgatgagaagaactttgatgacctggacaacttcagtgatgagaacatggaggactgcccagagggcagcatcccagacacccccaagtctgcagatgccagccaggacagcctgagcagcagccccctgcccctggagatgagcagcattgctgccctggagaaccagatgaagatgatcaatgccggcctggccgagcagctgcaggccagcctgaagtctgtggagaatggcagcattgaaggagatgtgctgaccaatgacagcagctctgtgggcggggacatggagagccagagcgctggcagccctgccatcagcgagagcaccagctccatgcaggccctgagccccagcaacagcacccaggagttccacaagagccccagcattgaggagaagccccagagagctgtgcccagcgagtttgccaacggcctgagccccacccctgtgaatggaggagccctggacctgaccagcagccatgctgagaagatcatcaaggaggacagcctgggcatcctcttccccttccgggaccggggcaagttcaagaacacagcctgtgacatctgtgggaagacctttgcctgccagagcgccctggacatccactaccgcagccacaccaaggagcggcccttcatctgcaccgtgtgcaacagaggcttcagcaccaagggcaacctgaagcagcacatgctgacccaccagatgagggacctgcccagccagctgtttgagcccagcagcaacctgggccccaaccagaacagcgctgtgatcccagccaacagcctgagcagcctcatcaagacagaggtgaatggatttgtgcacgtgagcccccaggacagcaaggacacccccaccagccacgtgcccagcggccccctgagcagcagcgccaccagccctgtgctgctgcctgccctgcccaggaggacccccaagcagcactactgcaacacctgtgggaagaccttcagcagcagcagcgccctgcagatccacgagaggacccacactggagagaagccctttgcctgcaccatctgtggccgggccttcaccaccaagggcaacctgaaggtgcacatgggcacccacatgtggaacagcaccccagcccggcggggccgccgcctgtctgtggatggccccatgaccttcctgggcggcaaccctgtgaagtttcctgagatgttccagaaggacctggccgcccggagcggcagcggggaccccagcagcttctggaaccagtatgctgctgccctgagcaatggcctggccatgaaggccaatgagatcagcgtcatccagaatggaggcatcccccccatccctggcagcctgggcagcggcaacagcagccctgtgtctggcctgactggaaacctggagcggctgcagaacagcgagcccaatgcccccctggccggcctggagaagatggccagcagtgaaaatggcaccaacttccgcttcaccaggtttgtggaggacagcaaggagatcgtgaccagctag

SEQ ID NO: 168791 - DNA, 3684 bp, synthetic construct
  misc_feature 1..3684: note = Description of Artificial Sequence: Synthetic coding sequence
  source 1..3684: mol_type = other DNA
atgaatgacacagtgaacaagacagaccaggtggactgcagcgacctgtctgagcacaacggcctggaccgggaggagagcatggaggtggaggcccctgtggccaacaagagcggcagcggcaccagcagcggcagccacagcagcacagcccccagcagcagcagcagcagcagcagcagcagcggcggcggcggcagcagcagcacaggcaccagcgccatcaccaccagcctgccccagctgggggacctgaccaccctgggcaacttcagcgtcatcaacagcaatgtcatcatcgagaacctgcagagcaccaaggtggccgtggcccagttcagccaggaggcccgctgtggcggggccagcggcggcaagctggccgtgcctgccctgatggagcagctgctggccctgcagcagcagcagatccaccagctgcagctgattgagcagatccgccaccagatcctgctgctggccagccagaatgctgacctgcccaccagcagcagccccagccagggcaccctgcggaccagcgccaaccccctgagcaccctgagcagccacctgagccagcagctggccgctgctgctggcctggcccagagcctggccagccagagcgccagcatcagcggcgtgaagcagctgccccccatccagctgccccagagcagcagcggcaacaccatcatccccagcaacagcggcagcagccccaacatgaacatcctggccgctgctgtgaccacccccagcagcgagaaggtggccagcagcgctggggccagccacgtgagcaacccagctgtgagcagcagcagcagccctgcctttgccatcagcagcctgctgagccctgccagcaaccccctgctgccccagcaggccagcgccaacagcgtcttccccagccccctgcccaacatcggcaccacagctgaggacctgaacagcctgagcgccctggcccagcagaggaagagcaagcccccaaatgtgacagcctttgaggccaagagcaccagtgatgaggccttcttcaagcacaagtgccgcttctgtgccaaggtgtttggaagtgacagcgccctgcagatccacctgcggagccacactggagagcggcccttcaagtgcaacatctgtggcaaccgcttcagcaccaagggcaacctgaaggtgcacttccagaggcacaaggagaagtacccccacatccagatgaacccctaccctgtgcctgagcacctggacaacatccccaccagcacaggcatcccctacggcatgagcatccccccagagaagcctgtgacctcctggctggacaccaagcctgtgctgcccaccctgaccacctctgtgggcctgcccctgccccccaccctgcccagcctcatccccttcatcaagacagaggagcccgcccccatccccatcagccacagcgccaccagccccccaggctctgtgaagagtgacagcggcggccctgagagcgccaccaggaacctgggcggcctgcctgaggaggccgagggcagcaccctgcccccatctgggggcaagtctgaggagagcggcatggtgaccaacagcgtgcccacagccagcagctctgtgctgagcagccctgctgctgactgtggccctgctggcagcgccaccaccttcaccaaccccctgctgcccctgatgtctgagcagttcaaggccaagttcccctttggaggcctgctggacagcgcccaggccagcgagaccagcaagctgcagcagctggtggagaacatcgacaagaaggccacagaccccaatgaatgcatcatctgccaccgggtgctgagctgccagagcgccctgaagatgcactaccgcacccacactggagagcggcccttcaagtgcaagatctgtggccgggccttcaccaccaagggcaacctgaagacccactacagcgtgcaccgggccatgccacccctgcgggtgcagcacagctgccccatctgccagaagaagttcaccaatgctgtggtgctgcagcagcacatccgcatgcacatgggcggccagatccccaacacccctgtgcctgacagctacagcgagagcatggagagtgacaccggcagctttgatgagaagaactttgatgacctggacaacttcagtgatgagaacatggaggactgcccagagggcagcatcccagacacccccaagtctgcagatgccagccaggacagcctgagcagcagccccctgcccctggagatgagcagcattgctgccctggagaaccagatgaagatgatcaatgccggcctggccgagcagctgcaggccagcctgaagtctgtggagaatggcagcattgaaggagatgtgctgaccaatgacagcagctctgtgggcggggacatggagagccagagcgctggcagccctgccatcagcgagagcaccagctccatgcaggccctgagccccagcaacagcacccaggagttccacaagagccccagcattgaggagaagccccagagagctgtgcccagcgagtttgccaacggcctgagccccacccctgtgaatggaggagccctggacctgaccagcagccacgccgagaagatcatcaaggaggacagcctgggcatcctcttccccttccgggaccggggcaagttcaagaacacagcctgtgacatctgtgggaagacctttgcctgccagagcgccctggacatccactaccgcagccacaccaaggagcggcccttcatctgcaccgtgtgcaacagaggcttcagcaccaagggcaacctgaagcagcacatgctgacccaccagatgagggacctgcccagccagctgtttgagcccagcagcaacctgggccccaaccagaacagcgctgtgatcccagccaacagcctgagcagcctcatcaagacagaggtgaatggatttgtgcacgtgagcccccaggacagcaaggacacccccaccagccacgtgcccagcggccccctgagcagcagcgccaccagccctgtgctgctgcctgccctgcccaggaggacccccaagcagcactactgcaacacctgtgggaagaccttcagcagcagcagcgccctgcagatccacgagaggacccacactggagagaagccctttgcctgcaccatctgtggccgggccttcaccaccaagggcaacctgaaggtgcacatgggcacccacatgtggaacagcaccccagcccggcggggccggcggctgtctgtggatggccccatgaccttcctgggcggcaaccctgtgaagtttcctgagatgttccagaaggacctggccgcccggagcggcagcggggaccccagcagcttctggaaccagtatgctgctgccctgagcaatggcctggccatgaaggccaatgagatcagcgtcatccagaatggaggcatcccccccatccctggcagcctgggcagcggcaacagcagccctgtgtctggcctgaccggcaacctggagcggctgcagaacagcgagcccaatgcccccctggccggcctggagaagatggccagcagtgaaaatggcaccaacttccgcttcaccaggtttgtggaggacagcaaggagatcgtgaccagctag

SEQ ID NO: 168792 - DNA, 3867 bp, synthetic construct
  misc_feature 1..3867: note = Description of Artificial Sequence: Synthetic coding sequence
  source 1..3867: mol_type = other DNA
atgagcaggaggaagcaggccaagccccagcacttccagagcgaccctgaggtggccagcctgcccaggagagatggagacacagagaagggccagcccagccggcccaccaagagcaaggatgcccacgtgtgtggccgctgctgtgccgagttctttgagctgagtgacctgctgctgcacaagaagaactgcaccaagaaccagctggtgctgattgtgaatgaaaatcctgccagccccccagagaccttcagccccagccccccaccagacaacccagatgagcagatgaatgacacagtgaacaagacaggcagccacagcagcacagcccccagcagcagcagcagcagcagcagcagcagcggcggcggcggcagcagcagcacaggcaccagcgccatcaccaccagcctgccccagctgggggacctgaccaccctgggcaacttcagcgtcatcaacagcaatgtcatcatcgagaacctgcagagcaccaaggtggccgtggcccagttcagccaggaggcccgctgtggcggggccagcggcggcaagctggccgtgcctgccctgatggagcagctgctggccctgcagcagcagcagatccaccagctgcagctgattgagcagatccgccaccagatcctgctgctggccagccagaatgctgacctgcccaccagcagcagccccagccagggcaccctgcggaccagcgccaaccccctgagcaccctgagcagccacctgagccagcagctggccgctgctgctggcctggcccagagcctggccagccagagcgccagcatctctggagtgaagcagctgccccccatccagctgccccagagcagcagcggcaacaccatcatccccagcaacagcggcagcagccccaacatgaacatcctggccgctgctgtgaccacccccagcagcgagaaggtggccagcagcgctggggccagccacgtgagcaacccagctgtgagcagcagcagcagccctgcctttgccatcagcagcctgctgagccctgccagcaaccccctgctgccccagcaggccagcgccaacagcgtcttccccagccccctgcccaacatcggcaccacagctgaggacctgaacagcctgagcgccctggcccagcagaggaagagcaagccacccaacgtgacagcctttgaggccaagagcaccagtgatgaggccttcttcaagcacaagtgccgcttctgtgccaaggtgtttggaagtgacagcgccctgcagatccacctgcggagccacactggagagcggcccttcaagtgcaacatctgtggcaaccgcttcagcaccaagggcaacctgaaggtgcacttccagaggcacaaggagaagtacccccacatccagatgaacccctaccctgtgcctgagcacctggacaacatccccaccagcacaggcatcccctacggcatgagcatccccccagagaagcctgtgacctcctggctggacaccaagcctgtgctgcccaccctgaccacctctgtgggcctgcccctgccccccaccctgcccagcctcatccccttcatcaagacagaggagcccgcccccatccccatcagccacagcgccaccagccccccaggctctgtgaagagtgacagcggcggccctgagagcgccaccaggaacctgggcggcctgcctgaggaggccgagggcagcaccctgccccccagcggcggcaagtctgaggagagcggcatggtgaccaacagcgtgcccacagccagcagctctgtgctgagcagccctgctgctgactgtggccctgctggcagcgccaccaccttcaccaaccccctgctgcccctgatgtctgagcagttcaaggccaagttcccctttggaggcctgctggacagcgcccaggccagcgagaccagcaagctgcagcagctggtggagaacatcgacaagaaggccacagaccccaatgaatgcatcatctgccaccgggtgctgagctgccagagcgccctgaagatgcactaccgcacccacactggagagcggcccttcaagtgcaagatctgtggccgggccttcaccaccaagggcaacctgaagacccactacagcgtgcaccgggccatgccacccctgcgggtgcagcacagctgccccatctgccagaagaagttcaccaatgctgtggtgctgcagcagcacatccgcatgcacatgggcggccagatccccaacacccctgtgcctgacagctacagcgagagcatggagagtgacaccggcagctttgatgagaagaactttgatgacctggacaacttcagtgatgagaacatggaggactgcccagagggcagcatcccagacacccccaagtctgcagatgccagccaggacagcctgagcagcagccccctgcccctggagatgagcagcattgctgccctggagaaccagatgaagatgatcaatgccggcctggccgagcagctgcaggccagcctgaagtctgtggagaatggcagcattgaaggagatgtgctgaccaatgacagcagctctgtgggcggggacatggagagccagagcgctggcagccctgccatcagcgagagcaccagctccatgcaggccctgagccccagcaacagcacccaggagttccacaagagccccagcattgaggagaagccccagagagctgtgcccagcgagtttgccaacggcctgagccccacccctgtgaatggaggagccctggacctgaccagcagccatgctgagaagatcatcaaggaggacagcctgggcatcctcttccccttccgggaccggggcaagttcaagaacacagcctgtgacatctgtgggaagacctttgcctgccagagcgccctggacatccactaccgcagccacaccaaggagcggcccttcatctgcaccgtgtgcaacagaggcttcagcaccaagggcaacctgaagcagcacatgctgacccaccagatgagggacctgcccagccagctgtttgagcccagcagcaacctgggccccaaccagaacagcgctgtgatcccagccaacagcctgagcagcctcatcaagacagaggtgaatggatttgtgcacgtgagcccccaggacagcaaggacacccccaccagccacgtgcccagcggccccctgagcagcagcgccaccagccctgtgctgctgcctgccctgcccaggaggacccccaagcagcactactgcaacacctgtgggaagaccttcagcagcagcagcgccctgcagatccacgagaggacccacactggagagaagccctttgcctgcaccatctgtggccgggccttcaccaccaagggcaacctgaaggtgcacatgggcacccacatgtggaacagcaccccagcccggcggggccgccgcctgtctgtggatggccccatgaccttcctgggcggcaaccctgtgaagtttcctgagatgttccagaaggacctggccgcccggagcggcagcggggaccccagcagcttctggaaccagtatgctgctgccctgagcaatggcctggccatgaaggccaatgagatcagcgtcatccagaatggaggcatcccccccatccctggcagcctgggcagcggcaacagcagccctgtgtctggcctgactggaaacctggagcggctgcagaacagcgagcccaatgcccccctggccggcctggagaagatggccagcagtgaaaatggcaccaacttccgcttcaccaggtttgtggaggacagcaaggagatcgtgaccagctag

SEQ ID NO: 168793 - DNA, 444 bp, synthetic construct
  misc_feature 1..444: note = Description of Artificial Sequence: Synthetic coding sequence
  source 1..444: mol_type = other DNA
atggtgcacatgggcacccacatgtggaacagcaccccagcccggcggggccggcggctgtctgtggatggccccatgaccttcctgggcggcaaccctgtgaagtttcctgagatgttccagaaggacctggccgcccggagcggcagcggggaccccagcagcttctggaaccagtatgctgctgccctgagcaatggcctggccatgaaggccaatgagatcagcgtcatccagaatggaggcatcccccccatccctggcagcctgggcagcggcaacagcagccctgtgtctggcctgaccggcaacctggagcggctgcagaacagcgagcccaatgcccccctggccggcctggagaagatggccagcagtgaaaatggcaccaacttccgcttcaccaggtttgtggaggacagcaaggagatcgtgaccagctag

SEQ ID NO: 168794 - DNA, 3024 bp, synthetic construct
  misc_feature 1..3024: note = Description of Artificial Sequence: Synthetic coding sequence
  source 1..3024: mol_type = other DNA
atgagcaggaggaagcagaggaagccccagcagctgatcagtgactgtgagggccccagcgcctctgaaaatggagatgccagcgaggaggaccacccccaggtgtgtgccaagtgctgtgcccagttcacagaccccacagagttcctggcccaccagaatgcctgcagcacagacccccctgtgatggtgatcatcggcggccaggagaaccccaacaacagcagcgccagcagcgagcccaggcctgagggccacaacaacccccaggtgatggacacagagcacagcaaccccccagacagcggcagctctgtgcccacagaccccacctggggccctgagcggcggggggaggagagccctggccacttcctggtggccgccaccggcacagctgctgggggcggcggcggcctcatcctggccagccccaagctgggcgccacccccctgcccccagagagcaccccagcccctcctcctcctcctcctcctcctcctcctcctggggtgggcagcggccacctgaacatccccctcatcctggaggagctgcgggtgctgcagcagaggcagatccaccagatgcagatgacagagcagatctgccggcaggtgctgctgctgggcagcctgggccagacagtgggcgccccagccagccccagcgagctgcccggcactggaacagccagcagcaccaagcccctgctgcccctcttcagccccatcaagcctgtgcagaccagcaagaccctggccagcagcagcagcagcagcagcagcagcagtggagctgagacccccaagcaggccttcttccacctgtaccaccccctgggcagccagcaccccttctctgctggaggagtgggccgcagccacaagcccaccccagcccccagccctgccctgcccggcagcacagaccagctgattgccagcccccacctggccttccccagcaccaccggcctgctggccgcccagtgcctgggcgccgcccggggcctggaggccacagccagccctggcctgctgaagcccaagaatggcagcggggagctgtcctatggagaggtgatgggccccctggagaagccaggcggccgccacaagtgccgcttctgtgccaaggtgtttggaagtgacagcgccctgcagatccacctgcggagccacactggagagcggccctacaagtgcaatgtgtgtggcaaccgcttcaccacccggggcaacctgaaggtgcacttccaccgccaccgggagaagtacccccacgtgcagatgaacccccaccctgtgcctgagcacctggactatgtgatcaccagcagcggcctgccctacggcatgtctgtgcccccagagaaggccgaggaggaggccgccacccctgggggcggcgtggagaggaagcccctggtggccagcaccacagccctgagcgccacagagagcctgaccctgctgagcaccagcgctggaacagccacagcccctggcctgcctgccttcaacaagtttgtgctgatgaaggctgtggagcccaagaacaaggcagatgagaacaccccacctggcagcgagggcagcgccatctctggagtggccgagagcagcacagccaccaggatgcagctgagcaagctggtgaccagcctgcccagctgggccctgctgaccaaccacttcaagagcacaggcagcttccccttcccctacgtgctggagcccctgggcgccagccccagcgagaccagcaagctgcagcagctggtggagaagattgaccggcagggcgctgtggccgtgaccagcgctgccagcggggcccccaccaccagcgccccagcccccagcagcagcgccagcagcggccccaaccagtgtgtgatctgcctgcgggtgctgagctgcccccgggccctgcggctgcactacggccagcacggcggggagcggcccttcaagtgcaaggtgtgtggccgggccttcagcacccggggcaacctgcgggcccactttgtgggccacaaggccagccctgctgcccgggcccagaacagctgccccatctgccagaagaagttcaccaatgctgtgaccctgcagcagcacgtgaggatgcacctgggcggccagatccccaacggcggcacagccctgcctgagggcggcggggccgcccaggagaatggaagtgagcagagcacagtgtctggagctggcagcttcccccagcagcagagccagcagcccagccctgaggaggagctgtctgaggaggaggaggaggaggatgaggaggaggaggaggatgtgacagatgaggacagcctggccggccggggcagcgagagcggcggggagaaggccatctctgtgcggggggacagcgaggaggccagcggggctgaggaggaggtgggcaccgtggccgccgccgccacagctgggaaggagatggacagcaatgagaagaccacccagcagagcagcctgcccccacctcctcctccagacagcctggaccagccccagcccatggagcagggcagcagtggagtgctgggcggcaaggaggagggcggcaagccagagaggagcagcagccctgccagcgccctgaccccagagggggaggccacctctgtgaccctggtggaggagctgagcctgcaggaggccatgaggaaggagcccggggagagcagcagcaggaaggcctgtgaggtgtgtggccaggccttccccagccaggccgccctggaggagcaccagaagacccaccccaaggagggccccctcttcacctgtgtgttctgccggcagggcttcctggagcgggccaccctgaagaagcacatgctgctggcccaccaccaggtgcagccctttgccccccacggcccccagaacattgctgccctgagcctggtgcccggctgcagccccagcatcaccagcacaggcctgagccccttccccaggaaggatgaccccaccatcccctag

SEQ ID NO: 168795 - DNA, 1827 bp, synthetic construct
  misc_feature 1..1827: note = Description of Artificial Sequence: Synthetic coding sequence
  source 1..1827: mol_type = other DNA
atgagcaggaggaagcagaggaagccccagcagctgatcagtgactgtgagggccccagcgcctctgaaaatggagatgccagcgaggaggaccacccccaggtgtgtgccaagtgctgtgcccagttcacagaccccacagagttcctggcccaccagaatgcctgcagcacagacccccctgtgatggtgatcatcggcggccaggagaaccccaacaacagcagcgccagcagcgagcccaggcctgagggccacaacaacccccaggtgatggacacagagcacagcaaccccccagacagcggcagctctgtgcccacagaccccacctggggccctgagcggcggggggaggagagccctggccacttcctggtggccgccaccggcacagctgctgggggcggcggcggcctcatcctggccagccccaagctgggcgccacccccctgcccccagagagcaccccagcccctcctcctcctcctcctcctcctcctcctcctggggtgggcagcggccacctgaacatccccctcatcctggaggagctgcgggtgctgcagcagaggcagatccaccagatgcagatgacagagcagatctgccggcaggtgctgctgctgggcagcctgggccagacagtgggcgccccagccagccccagcgagctgcccggcactggaacagccagcagcaccaagcccctgctgcccctcttcagccccatcaagcctgtgcagaccagcaagaccctggccagcagcagcagcagcagcagcagcagcagtggagctgagacccccaagcaggccttcttccacctgtaccaccccctgggcagccagcaccccttctctgctggaggagtgggccgcagccacaagcccaccccagcccccagccctgccctgcccggcagcacagaccagctgattgccagcccccacctggccttccccagcaccaccggcctgctggccgcccagtgcctgggcgccgcccggggcctggaggccacagccagccctggcctgctgaagcccaagaatggcagcggggagctgtcctatggagaggtgatgggccccctggagaagccaggcggccgccacaagtgccgcttctgtgccaaggtgtttggaagtgacagcgccctgcagatccacctgcggagccacactggagagcggccctacaagtgcaatgtgtgtggcaaccgcttcaccacccggggcaacctgaaggtgcacttccaccgccaccgggagaagtacccccacgtgcagatgaacccccaccctgtgcctgagcacctggactatgtgatcaccagcagcggcctgccctacggcatgtctgtgcccccagagaaggccgaggaggaggccgccacccctgggggcggcgtggagaggaagcccctggtggccagcaccacagccctgagcgccacagagagcctgaccctgctgagcaccagcgctggaacagccacagcccctggcctgcctgccttcaacaagtttgtgctgatgaaggctgtggagcccaagaacaaggcagatgagaacaccccacctggcagcgagggcagcgccatctctggagtggccgagagcagcacagccaccaggatgcagctgagcaagctggtgaccagcctgcccagctgggccctgctgaccaaccacttcaagagcacaggcagcttccccttcccctacgtgcctgaggaggtgcaccagtgctgccacagcgctgctgcctgcccagatgcccctgggggccctgacccccagcgctggtactgcaccccctag

SEQ ID NO: 168796 - DNA, 3687 bp, synthetic construct
  misc_feature 1..3687: note = Description of Artificial Sequence: Synthetic coding sequence
  source 1..3687: mol_type = other DNA
atgagcaggaggaagcaggccaagccccagcacctgaagagtgatgaggagctgctgcccccagatggagcccctgagcacgccgcccctggagagggcgcagaagatgctgacagcggccctgagagccgctctggaggagaggagacctctgtgtgtgagaagtgctgtgccgagttcttcaagtgggccgacttcctggagcaccagaggagctgcaccaagctgccccctgtgctgattgtgcatgaagatgccccagcccctcctcctgaggacttccctgagcccagccctgccagcagccccagcgagagagctgagagcgaggccgctgaggaggccggggctgagggcgctgagggggaggcccggcctgtggagaaggaggccgagcccatggatgctgagcctgctggggacacccgggcccccaggcctcctcctgctgccccagccccacccaccccagcctatggagcccccagcaccaacgtgaccctggaggccctgctgagcaccaaggtggccgtggcccagttcagccagggcgcccgggccgccggcggcagcggggccggcggcggcgtggccgctgctgctgtgcccctcatcctggagcagctgatggccctgcagcagcagcagatccaccagctgcagctgattgagcagatccgcagccaggtggccctgatgcagaggcccccaccccggcccagcctgagccctgctgctgcccccagcgcccctggccctgcccccagccagctgcccggcctggccgccctgcccctgtctgctggggccccagctgctgccatcgccggcagcggccctgctgccccagctgcctttgagggcgcccagcccctgagcaggcctgagagcggggccagcacccctgggggccctgctgagcccagcgccccagctgcccccagcgctgccccagccccagctgccccagccccagccccagccccccagagcgctgccagcagccagccccagagcgccagcaccccaccagccctggcccctggcagcctgctgggcgccgcccctggcctgcccagccccctgctgccccagaccagcgccagcggggtcatcttccccaaccccctggtgtccattgctgccacagccaatgccctggaccccctgagcgccctgatgaagcacaggaagggcaagcccccaaatgtgtctgtgtttgagcccaaggccagcgctgaggaccccttcttcaagcacaagtgccgcttctgtgccaaggtgtttggaagtgacagcgccctgcagatccacctgcggagccacactggagagcggcccttcaagtgcaacatctgtggcaaccgcttcagcaccaagggcaacctgaaggtgcacttccagaggcacaaggagaagtacccccacatccagatgaacccctaccctgtgcctgagtacctggacaacgtgcccacctgcagcggcatcccctacggcatgagcctgcccccagagaagcctgtgaccacctggctggacagcaagcctgtgctgcccaccgtgcccacctctgtgggcctgcagctgcccccaacagtgcctggggcccacggctatgctgacagccccagcgccaccccagccagccgcagcccccagaggcccagccctgccagcagtgaatgtgccagcctgagccctggcctgaaccacgtggagagcggcgtgtctgccacagctgagagcccccagagcctgctgggcggcccccccctgaccaaggccgagcctgtgtccctgccctgcaccaatgcccgggctggagatgcccctgtgggcgcccaggccagcgctgcccccacctctgtggatggagcccccaccagcctgggcagccctggcctgcctgctgtgtctgagcagttcaaggcccagttcccctttggaggcctgctggacagcatgcagaccagcgagaccagcaagctgcagcagctggtggagaacatcgacaagaagatgacagaccccaaccagtgtgtgatctgccaccgggtgctgagctgccagagcgccctgaagatgcactaccgcacccacactggagagcggcccttcaagtgcaagatctgtggccgggccttcaccaccaagggcaacctgaagacccactttggagtgcaccgggccaagccacccctgcgggtgcagcacagctgccccatctgccagaagaagttcaccaatgctgtggtgctgcagcagcacatccgcatgcacatgggcggccagatccccaacacccccctgcctgagggcttccaggatgccatggattctgagctggcctatgatgacaagaatgctgagaccctgagcagctatgatgatgacatggatgagaacagcatggaggatgatgctgagctgaaggatgctgccacagatcctgccaagcccctgctgtcctatgccggcagctgcccccccagccccccatctgtcatcagcagcattgctgccctggagaaccagatgaagatgattgacagcgtgatgagctgccagcagctgaccggcctgaagtctgtggagaatggaagtggagagagtgaccggctgagcaatgacagcagcagcgctgtgggggacctggagagccgctctgctggcagccctgccctgtctgagagcagcagcagccaggccctgagccctgcccccagcaatggagagagcttccgcagcaagagccctggcctgggcgcccctgaggagccccaggagatccccctgaagacagagaggccagacagccctgctgctgcccctggcagcggcggggcccctggccgggccggcatcaaggaggaggcccccttcagcctgctcttcctgagccgggagcggggccccagccagagcacccccagcctcatcagcagcgctgcccccaccatgatcaagatggaggtgaatggccacggcaaggccatggccctgggggagggcccccccctgcctgctggggtgcaggtgcctgctggcccccagacagtgatgggccctggcctggcccccatgctggcccccccacccaggaggacccccaagcagcacaactgccagagctgtgggaagaccttcagcagcgccagcgccctgcagatccacgagaggacccacactggagagaagcccttcggctgcaccatctgtggccgggccttcaccaccaagggcaacctgaaggtgcacatgggcacccacatgtggaacaatgccccagcccggcggggccggcggctgtctgtggagaaccccatggccctgctgggcggagatgccctgaagttcagcgagatgttccagaaggacctggccgcccgggccatgaatgtggaccccagcttctggaaccagtatgctgctgccatcaccaacggcctggccatgaagaacaatgagatcagcgtcatccagaatggaggcatcccccagctgcctgtgtccctgggcggcagcgccctgccccccctgggctccatggccagcggcatggacaaggccaggacaggcagcagcccccccatcgtgtccctggacaaggccagcagcgagacagctgccagccggcccttcacccgcttcatcgaggacaacaaggagatcggcatcaactag

SEQ ID NO: 168797 - DNA, 3903 bp, synthetic construct
  misc_feature 1..3903: note = Description of Artificial Sequence: Synthetic coding sequence
  source 1..3903: mol_type = other DNA
atgagcaggaggaagcaggccaagccccagcacctgaagagtgatgaggagctgctgcccccagatggagcccctgagcacgccgcccctggagagggcgcagaagatgctgacagcggccctgagagccgctctggaggagaggagacctctgtgtgtgagaagtgctgtgccgagttcttcaagtgggccgacttcctggagcaccagaggagctgcaccaagctgccccctgtgctgattgtgcatgaagatgccccagcccctcctcctgaggacttccctgagcccagccctgccagcagccccagcgagagagctgagagcgaggccgctgaggaggccggggctgagggcgctgagggggaggcccggcctgtggagaaggaggccgagcccatggatgctgagcctgctggggacacccgggcccccaggcctcctcctgctgccccagccccacccaccccagcctatggagcccccagcaccaacgtgaccctggaggccctgctgagcaccaaggtggccgtggcccagttcagccagggcgcccgggccgccggcggcagcggggccggcggcggcgtggccgctgctgctgtgcccctcatcctggagcagctgatggccctgcagcagcagcagatccaccagctgcagctgattgagcagatccgcagccaggtggccctgatgcagaggcccccaccccggcccagcctgagccctgctgctgcccccagcgcccctggccctgcccccagccagctgcccggcctggccgccctgcccctgtctgctggggccccagctgctgccatcgccggcagcggccctgctgccccagctgcctttgagggcgcccagcccctgagcaggcctgagagcggggccagcacccctgggggccctgctgagcccagcgccccagctgcccccagcgctgccccagccccagctgccccagccccagccccagccccccagagcgctgccagcagccagccccagagcgccagcaccccaccagccctggcccctggcagcctgctgggcgccgcccctggcctgcccagccccctgctgccccagaccagcgccagcggggtcatcttccccaaccccctggtgtccattgctgccacagccaatgccctggaccccctgagcgccctgatgaagcacaggaagggcaagcccccaaatgtgtctgtgtttgagcccaaggccagcgctgaggaccccttcttcaagcacaagtgccgcttctgtgccaaggtgtttggaagtgacagcgccctgcagatccacctgcggagccacactggagagcggcccttcaagtgcaacatctgtggcaaccgcttcagcaccaagggcaacctgaaggtgcacttccagaggcacaaggagaagtacccccacatccagatgaacccctaccctgtgcctgagtacctggacaacgtgcccacctgcagcggcatcccctacggcatgagcctgcccccagagaagcctgtgaccacctggctggacagcaagcctgtgctgcccaccgtgcccacctctgtgggcctgcagctgcccccaacagtgcctggggcccacggctatgctgacagccccagcgccaccccagccagccgcagcccccagaggcccagccctgccagcagtgaatgtgccagcctgagccctggcctgaaccacgtggagagcggcgtgtctgccacagctgagagcccccagagcctgctgggcggcccccccctgaccaaggccgagcctgtgtccctgccctgcaccaatgcccgggctggagatgcccctgtgggcgcccaggccagcgctgcccccacctctgtggatggagcccccaccagcctgggcagccctggcctgcctgctgtgtctgagcagttcaaggcccagttcccctttggaggcctgctggacagcatgcagaccagcgagaccagcaagctgcagcagctggtggagaacatcgacaagaagatgacagaccccaaccagtgtgtgatctgccaccgggtgctgagctgccagagcgccctgaagatgcactaccgcacccacactggagagcggcccttcaagtgcaagatctgtggccgggccttcaccaccaagggcaacctgaagacccactttggagtgcaccgggccaagccacccctgcgggtgcagcacagctgccccatctgccagaagaagttcaccaatgctgtggtgctgcagcagcacatccgcatgcacatgggcggccagatccccaacacccccctgcctgagggcttccaggatgccatggattctgagctggcctatgatgacaagaatgctgagaccctgagcagctatgatgatgacatggatgagaacagcatggaggatgatgctgagctgaaggatgctgccacagatcctgccaagcccctgctgtcctatgccggcagctgcccccccagccccccatctgtcatcagcagcattgctgccctggagaaccagatgaagatgattgacagcgtgatgagctgccagcagctgaccggcctgaagtctgtggagaatggaagtggagagagtgaccggctgagcaatgacagcagcagcgctgtgggggacctggagagccgctctgctggcagccctgccctgtctgagagcagcagcagccaggccctgagccctgcccccagcaatggagagagcttccgcagcaagagccctggcctgggcgcccctgaggagccccaggagatccccctgaagacagagaggccagacagccctgctgctgcccctggcagcggcggggcccctggccgggccggcatcaaggaggaggcccccttcagcctgctcttcctgagccgggagcggggcaaatgtcccagcacagtgtgtggggtgtgtgggaagccctttgcctgcaagagcgccctggagatccactaccgcagccacaccaaggagcggccctttgtgtgtgccctgtgcagaagaggctgcagcaccatgggcaacctgaagcagcacctgctgacccaccggctgaaggagctgcccagccagctgtttgaccccaactttgccctgggccccagccagagcacccccagcctcatcagcagcgctgcccccaccatgatcaagatggaggtgaatggccacggcaaggccatggccctgggggagggcccccccctgcctgctggggtgcaggtgcctgctggcccccagacagtgatgggccctggcctggcccccatgctggcccccccacccaggaggacccccaagcagcacaactgccagagctgtgggaagaccttcagcagcgccagcgccctgcagatccacgagaggacccacactggagagaagcccttcggctgcaccatctgtggccgggccttcaccaccaagggcaacctgaaggtgcacatgggcacccacatgtggaacaatgccccagcccggcggggccggcggctgtctgtggagaaccccatggccctgctgggcggagatgccctgaagttcagcgagatgttccagaaggacctggccgcccgggccatgaatgtggaccccagcttctggaaccagtatgctgctgccatcaccaacggcctggccatgaagaacaatgagatcagcgtcatccagaatggaggcatcccccagctgcctgtgtccctgggcggcagcgccctgccccccctgggctccatggccagcggcatggacaaggccaggacaggcagcagcccccccatcgtgtccctggacaaggccagcagcgagacagctgccagccggcccttcacccgcttcatcgaggacaacaaggagatcggcatcaactag

SEQ ID NO: 168798 - DNA, 2883 bp, synthetic construct
  misc_feature 1..2883: note = Description of Artificial Sequence: Synthetic coding sequence
  source 1..2883: mol_type = other DNA
atgagcaggaggaagcaggccaagccccagcacctgaagagtgatgaggagctgctgcccccagatggagcccctgagcacgccgcccctggagagggcgcagaagatgctgacagcggccctgagagccgctctggaggagaggagacctctgtgtgtgagaagtgctgtgccgagttcttcaagtgggccgacttcctggagcaccagaggagctgcaccaagctgccccctgtgctgattgtgcatgaagatgcccctcctggcctgcccagccccctgctgccccagaccagcgccagcggggtcatcttccccaaccccctggtgtccattgctgccacagccaatgccctggaccccctgagcgccctgatgaagcacaggaagggcaagcccccaaatgtgtctgtgtttgagcccaaggccagcgctgaggaccccttcttcaagcacaagtgccgcttctgtgccaaggtgtttggaagtgacagcgccctgcagatccacctgcggagccacactggagagcggcccttcaagtgcaacatctgtggcaaccgcttcagcaccaagggcaacctgaaggtgcacttccagaggcacaaggagaagtacccccacatccagatgaacccctaccctgtgcctgagtacctggacaacgtgcccacctgcagcggcatcccctacggcatgagcctgcccccagagaagcctgtgaccacctggctggacagcaagcctgtgctgcccaccgtgcccacctctgtgggcctgcagctgcccccaacagtgcctggggcccacggctatgctgacagccccagcgccaccccagccagccgcagcccccagaggcccagccctgccagcagtgaatgtgccagcctgagccctggcctgaaccacgtggagagcggcgtgtctgccacagctgagagcccccagagcctgctgggcggcccccccctgaccaaggccgagcctgtgtccctgccctgcaccaatgcccgggctggagatgcccctgtgggcgcccaggccagcgctgcccccacctctgtggatggagcccccaccagcctgggcagccctggcctgcctgctgtgtctgagcagttcaaggcccagttcccctttggaggcctgctggacagcatgcagaccagcgagaccagcaagctgcagcagctggtggagaacatcgacaagaagatgacagaccccaaccagtgtgtgatctgccaccgggtgctgagctgccagagcgccctgaagatgcactaccgcacccacactggagagcggcccttcaagtgcaagatctgtggccgggccttcaccaccaagggcaacctgaagacccactttggagtgcaccgggccaagccacccctgcgggtgcagcacagctgccccatctgccagaagaagttcaccaatgctgtggtgctgcagcagcacatccgcatgcacatgggcggccagatccccaacacccccctgcctgagggcttccaggatgccatggattctgagctggcctatgatgacaagaatgctgagaccctgagcagctatgatgatgacatggatgagaacagcatggaggatgatgctgagctgaaggatgctgccacagatcctgccaagcccctgctgtcctatgccggcagctgcccccccagccccccatctgtcatcagcagcattgctgccctggagaaccagatgaagatgattgacagcgtgatgagctgccagcagctgaccggcctgaagtctgtggagaatggaagtggagagagtgaccggctgagcaatgacagcagcagcgctgtgggggacctggagagccgctctgctggcagccctgccctgtctgagagcagcagcagccaggccctgagccctgcccccagcaatggagagagcttccgcagcaagagccctggcctgggcgcccctgaggagccccaggagatccccctgaagacagagaggccagacagccctgctgctgcccctggcagcggcggggcccctggccgggccggcatcaaggaggaggcccccttcagcctgctcttcctgagccgggagcggggccccagccagagcacccccagcctcatcagcagcgctgcccccaccatgatcaagatggaggtgaatggccacggcaaggccatggccctgggggagggcccccccctgcctgctggggtgcaggtgcctgctggcccccagacagtgatgggccctggcctggcccccatgctggcccccccacccaggaggacccccaagcagcacaactgccagagctgtgggaagaccttcagcagcgccagcgccctgcagatccacgagaggacccacactggagagaagcccttcggctgcaccatctgtggccgggccttcaccaccaagggcaacctgaaggtgcacatgggcacccacatgtggaacaatgccccagcccggcggggccggcggctgtctgtggagaaccccatggccctgctgggcggagatgccctgaagttcagcgagatgttccagaaggacctggccgcccgggccatgaatgtggaccccagcttctggaaccagtatgctgctgccatcaccaacggcctggccatgaagaacaatgagatcagcgtcatccagaatggaggcatcccccagctgcctgtgtccctgggcggcagcgccctgccccccctgggctccatggccagcggcatggacaaggccaggacaggcagcagcccccccatcgtgtccctggacaaggccagcagcgagacagctgccagccggcccttcacccgcttcatcgaggacaacaaggagatcggcatcaactag

SEQ ID NO: 168799 - DNA, 516 bp, synthetic construct
  misc_feature 1..516: note = Description of Artificial Sequence: Synthetic coding sequence
  source 1..516: mol_type = other DNA
atggtgcggccccctgtggtgccccggcggcccccagcccacatcagctctgtgcggcaggccagcacccaggtgcccaggacagtgccccacacccagagggtggccaacatcggcacccagaccaccggccccagcggcgtgggctgctgcaccccaggccggcccctgctgccctgcaagtgcagcagcgctgcccacagcacctacagagtgcaggagcctgctgtgcacatccctggccaggagcccctgacagcctccatgctggccgccgcccccctgcacgagcagaagcagatgattggagagcggctgtaccccctcatccatgatgtgcacacccagctggccggcaagatcaccggcatgctgctggagattgacaacagcgagctgctgctgatgctggagagccctgagagcctgcacgccaagaagaggaagagcagcctgccctggctgcccaagggccagtgcttctggctgagcgccctgcggccctgcaagctgtag

SEQ ID NO: 168800 - DNA, 831 bp, synthetic construct
  misc_feature 1..831: note = Description of Artificial Sequence: Synthetic coding sequence
  source 1..831: mol_type = other DNA
atgagcaggaggaagcaggccaagccccagcacatcaacagcgaggaggaccagggcgagcagcagccccagcagcagaccccagagtttgctgatgctgccccagctgccccagctgctggggagctgggccgcagcagcctgcccagcaccttcatccgggccccacccacctacgtgaaggtggaggtgcccggcacctttgtgggccccagcaccctgagccctggcatgacccccctgctggccgcccagccccggcggcaggccaagcagcacggctgcacccgctgtgggaagaacttcagcagcgccagcgccctgcagatccacgagaggacccacactggagagaagccctttgtgtgcaacatctgtggccgggccttcaccaccaagggcaacctgaaggtgcactacatgacccatggagccaacaacaacagcgcccggcggggcaggaagctggccatcgagaacaccatggccctgctgggcacagatggcaagagggtgtctgagatcttccccaaggagatcctggcccccagcgtgaatgtggaccctgtggtgtggaaccagtacacctccatgctgaatggaggcctggccgtgaagaccaatgagatcagcgtcatccagagcggaggagtgcccaccctgcctgtgtccctgggcgccacctctgtggtgaacaatgccaccgtgtccaagatggatggcagccagagcggcatctctgcagatgtggagaagcccagcgccacagatggagtgcccaagcaccagttcccccacttcctggaggagaacaagattgctgtgtcctag

SEQ ID NO: 168801 - DNA, 1851 bp, synthetic construct
  misc_feature 1..1851: note = Description of Artificial Sequence: Synthetic coding sequence
  source 1..1851: mol_type = other DNA
atgagcaggaggaagcaggccaagccccagcacatcaacagcgaggaggaccagggcgagcagcagccccagcagcagaccccagagtttgctgatgctgccccagctgccccagctgctggggagctgggcgcccctgtgaaccaccctggaaatgatgaggtggcctctgaagatgaggccaccgtgaagaggctgcggcgggaggagacccacgtgtgtgagaagtgctgtgccgagttcttcagcatcagcgagttcctggagcacaagaagaactgcaccaagaacccccctgtgctgatcatgaatgacagcgagggccctgtgcccagcgaggacttcagcggggctgtgctgagccaccagcccaccagccctggcagcaaggactgccacagagaaaatggaggcagcagcgaggacatgaaggagaagccagatgctgagagcgtggtgtacctgaagacagaaacagccctgccccccaccccccaggacatctcctacctggccaagggcaaggtggccaacaccaacgtgaccctgcaggccctgcggggcaccaaggtggccgtgaaccagaggtctgcagatgccctgcctgcccctgtgcctggggccaacagcatcccctgggtgctggagcagatcctgtgcctgcagcagcagcagctgcagcagatccagctgacagagcagatccgcatccaggtgaacatgtgggccagccacgccctgcacagcagcggggccggggctgacaccctgaagaccctgggcagccacatgagccagcaggtgtctgctgctgtggccctgctgagccagaaggccggcagccagggcctgagcctggatgccctgaagcaggccaagctgccccacgccaacatccccagcgccaccagcagcctgagccctggcctggcccccttcaccctgaagccagatggcaccagggtgctgcccaacgtgatgagccggctgcccagcgccctgctgccccaggcccctggctctgtgctcttccagagccccttcagcacagtggccctggacaccagcaagaagggcaagggcaagccacccaacatctctgctgtggatgtgaagcccaaggatgaagctgccctgtacaagcacaagtgccgcagcagcctgcccagcaccttcatccgggccccacccacctacgtgaaggtggaggtgcccggcacctttgtgggccccagcaccctgagccctggcatgacccccctgctggccgcccagccccggcggcaggccaagcagcacggctgcacccgctgtgggaagaacttcagcagcgccagcgccctgcagatccacgagaggacccacactggagagaagccctttgtgtgcaacatctgtggccgggccttcaccaccaagggcaacctgaaggtgcactacatgacccatggagccaacaacaacagcgcccggcggggcaggaagctggccatcgagaacaccatggccctgctgggcacagatggcaagagggtgtctgagatcttccccaaggagatcctggcccccagcgtgaatgtggaccctgtggtgtggaaccagtacacctccatgctgaatggaggcctggccgtgaagaccaatgagatcagcgtcatccagagcggaggagtgcccaccctgcctgtgtccctgggcgccacctctgtggtgaacaatgccaccgtgtccaagatggatggcagccagagcggcatctctgcagatgtggagaagcccagcgccacagatggagtgcccaagcaccagttcccccacttcctggaggagaacaagattgctgtgtcctag

SEQ ID NO: 168802 - DNA, 2781 bp, synthetic construct
  misc_feature 1..2781: note = Description of Artificial Sequence: Synthetic coding sequence
  source 1..2781: mol_type = other DNA
atggtgatggctgatggccccaggcacctgcagaggggccctgtgcgggtgggcttctatgacatcgagggcaccctgggcaagggcaactttgctgtggtgaagctgggccgccaccgcatcaccaagacagaggtggccatcaagatcatcgacaagagccagctggatgctgtgaacctggagaagatctaccgggaggtgcagatcatgaagatgctggaccacccccacatcatcaagctgtaccaggtgatggagaccaagtccatgctgtacctggtgacagaatatgccaagaatggagagatctttgactacctggccaaccacggccgcctgaatgaaagtgaggcccggaggaagttctggcagatcctgtctgctgtggactactgccacggcaggaagatcgtgcaccgggacctgaaggccgagaacctgctgctggacaacaacatgaacatcaagattgctgactttggatttggaaacttcttcaagtctggagagctgctggccacctggtgtggcagccccccctatgctgcccctgaggtgtttgagggccagcagtatgagggcccccagctggacatctggagcatgggcgtggtgctgtatgtgctggtgtgtggggccctgccctttgatggccccaccctgcccatcctgcggcagagggtgctggagggccgcttccgcatcccctacttcatgtctgaggactgtgagcacctgatccggaggatgctggtgctggaccccagcaagaggctgaccatcgcccagatcaaggagcacaagtggatgctgattgaggtgcctgtgcagaggcctgtgctgtacccccaggagcaggagaatgagcccagcattggagagttcaatgagcaggtgctgcggctgatgcacagcctgggcatcgaccagcagaagaccatcgagagcctgcagaacaagagctacaaccactttgctgccatctacttcctgctggtggagcggctgaagagccacaggagcagcttccctgtggagcagaggctggatggccggcagaggcggcccagcaccatcgccgagcagacagtggccaaggcccagacagtgggcctgcctgtgaccatgcacagccccaacatgaggctgctgcggagcgccctgctgccccaggccagcaatgtggaggccttctccttccctgccagcggctgccaggccgaggccgccttcatggaggaggagtgtgtggacacccccaaggtgaatggctgcctgctggaccctgtgccccctgtgctggtgaggaagggctgccagagcctgcccagcaacatgatggagaccagcattgatgagggcctggagacagaaggagaggccgaggaggaccctgcccacgcctttgaggccttccagagcaccaggagcggccagaggaggcacaccctgtctgaggtgaccaaccagctggtggtgatgcctggggccggcaagatcttctccatgaatgacagccccagcctggacagcgtggacagtgaatatgacatgggctctgtgcagagggacctgaacttcctggaggacaaccccagcctgaaggacatcatgctggccaaccagcccagccccaggatgaccagccccttcatcagcctgcggcccaccaacccagccatgcaggccctgagcagccagaagcgggaggtgcacaacagaagccctgtgtccttccgggagggccggcgggccagtgacaccagcctgacccagggcatcgtggccttccggcagcacctgcagaacctggcccggaccaagggcatcctggagctgaacaaggtgcagctgctgtatgagcagatcggccctgaggccgaccccaacctggccccagctgccccccagctgcaggacctggccagcagctgcccccaggaggaggtgtcccagcagcaggagagcgtgtccaccctgcctgcctctgtgcacccccagctgagcccccggcagagcctggagacccagtacctgcagcaccggctgcagaagcccagcctgctgagcaaggcccagaacacctgccagctgtactgcaaggagccccccaggagcctggagcagcagctgcaggagcaccggctgcagcagaagaggctcttcctgcagaagcagagccagctgcaggcctacttcaaccagatgcagattgctgagagcagctacccccagcccagccagcagctgcccctgccccggcaggagaccccaccacccagccagcaggccccacccttcagcctgacccagcccctgagccctgtgctggagcccagcagcgagcagatgcagtacagccccttcctgagccagtaccaggagatgcagctgcagcccctgcccagcaccagcggcccccgggccgccccacccctgcccacccagctgcagcagcagcagcccccacctcctcctcctcctcctccaccccggcagcctggagctgccccagcccccctgcagttctcctaccagacctgtgagctgcccagcgctgccagccctgccccagactaccccaccccctgccagtaccctgtggatggagcccagcagagcgacctgaccggccctgactgccccaggagccctggcctgcaggaggcccccagcagctatgaccccctggccctgtctgagctgcccggcctgtttgactgtgagatgctggatgctgtggacccccagcacaacggctacgtgctggtgaactag

SEQ ID NO: 168803 - DNA, 1881 bp, synthetic construct
  misc_feature 1..1881: note = Description of Artificial Sequence: Synthetic coding sequence
  source 1..1881: mol_type = other DNA
atgcagagagctgacagcgagcagcccagcaagaggccccgctgtgatgacagccccaggacccccagcaacaccccatctgctgaggccgactggagccctggcctggagctgcacccagactacaagacctggggccctgagcaggtgtgcagcttcctgcggcggggcggctttgaggagcctgtgctgctgaagaacatccgggagaatgagatcaccggggccctgctgccctgcctggatgagagcagatttgagaacctgggcgtgagcagcctgggggagaggaagaagctgctgagctacatccagaggctggtgcagatccacgtggacaccatgaaggtgatcaatgaccccatccacggccacatcgagctgcaccccctgctggtgcgcatcatcgacaccccccagttccagaggctgcgctacatcaagcagctgggcggcggctactacgtgtttcctggggccagccacaacagatttgagcacagcctgggcgtgggctacctggccggctgcctggtgcacgccctgggggagaagcagcctgagctgcagatcagcgagagagatgtgctgtgtgtgcagattgctggcctgtgccacgacctgggccacggccccttcagccacatgtttgatggccgcttcatccccctggcccggcctgaggtgaagtggacccatgagcagggctctgtgatgatgtttgagcacctgatcaacagcaatggcatcaagcctgtgatggagcagtatggcctcatccctgaggaggacatctgcttcatcaaggagcagatcgtgggccccctggagagccctgtggaggacagcctgtggccctacaagggccggcctgagaacaagagcttcctgtatgagatcgtgagcaacaagagaaatggaattgatgtggacaagtgggactactttgcccgggactgccaccacctgggcatccagaacaactttgactacaagcgcttcatcaagtttgcccgggtgtgtgaggtggacaatgagctgcgcatctgtgcccgggacaaggaggtgggcaacctgtatgacatgttccacaccaggaacagcctgcacagaagagcctaccagcacaaggtgggcaacatcatcgacaccatgatcacagatgccttcctgaaggcagatgactacatcgagatcaccggggccggcggcaagaagtaccgcatcagcacagccattgatgacatggaggcctacaccaagctgacagacaacatcttcctggagatcctgtacagcacagaccccaagctgaaggatgcccgggagatcctgaagcagatcgagtacagaaacctcttcaagtatgtgggggagacccagcccaccggccagatcaagatcaagagagaagattatgagagcctgcccaaggaggtggccagcgccaagcccaaggtgctgctggatgtgaagctgaaggccgaggacttcatcgtggatgtgatcaacatggactatggcatgcaggagaagaaccccatcgaccacgtgtccttctactgcaagacagcccccaacagagccatccgcatcaccaagaaccaggtgtcccagctgctgcctgagaagtttgctgagcagctgatccgggtgtactgcaagaaggtggacaggaagagcctgtatgctgcccggcagtactttgtgcagtggtgtgccgacaggaacttcaccaagccccaggatggagatgtgattgcccccctcatcaccccccagaagaaggagtggaatgacagcacctctgtgcagaaccccacccggctgcgggaggccagcaagagccgggtgcagctgttcaaggatgaccccatgtag

SEQ ID NO: 168804 - DNA, 513 bp, synthetic construct
  misc_feature 1..513: note = Description of Artificial Sequence: Synthetic coding sequence
  source 1..513: mol_type = other DNA
atgtttgatggccgcttcatccccctggcccggcctgaggtgaagtggacccatgagcagggctctgtgatgatgtttgagcacctgatcaacagcaatggcatcaagcctgtgatggagcagtatggcctcatccctgaggaggacatctgcttcatcaaggagcagatcgtgggccccctggagagccctgtggaggacagcctgtggccctacaagggccggcctgagaacaagagcttcctgtatgaaattgtgagcaacaagagaaatggaattgatgtggacaagtgggactactttgcccgggactgccaccacctgggcatccagaacaactttgactacaagcgcttcatcaagtttgcccgggtgtgtgaggtggacaatgagctgcgcatctgtgcccgggacaaggaggtgggcaacctgtatgacatgttccacaccaggaacagcctgcaccggcgggcctaccagcacaaggtgggcaacatcatcgacaccatgtag

SEQ ID NO: 168805 - DNA, 1326 bp, synthetic construct
  misc_feature 1..1326: note = Description of Artificial Sequence: Synthetic coding sequence
  source 1..1326: mol_type = other DNA
atggagatccggctggacaccctgagcgccagcctgggccgcagcagcaccctgaacaactgcaacctggaggacaagctggcctggtatgaaggagaggcctacatgtggcaccactggaagcccttccctgagaaccccctgtggacctgcctggacttccagatcgcccaggtgggcccctgggaccactgcagcagctgcatccgccacacccggctgaagagcagctgcagcgacatggacctgctgcacagctggaggagcagcagctttggaaactttgaccgcttcaggaacaacagcctgagcaagccagatgacagcacagaggcccatgaaggagaccccaccaatggaagtggagagcagagcaagaccagcaacaacggcggcggcctgggcaagaagatgagggccatctcctggaccatgaagaagaaggtgggcaagaagtacatcaaggccctgtctgaggagaaggatgaggaggatggagaaaatgcccacccctacagaaacagcgaccctgtgattggcacccacacagagaaggtgtccctgaaggccagtgacagcatggacagcctgtacagcggccagagcagcagcagcggcatcaccagctgcagtgatggcaccagcaacagagacagcttccggctggatgatgatggcccctacagcggccccttctgtggccgggcccgggtgcacacagacttcacccccagcccctatgacacagacagcctgaagatcaagaagggggacatcatcgacatcatctgcaagacccccatgggcatgtggacaggcatgctgaacaacaaggtgggcaacttcaagttcatctacgtggatgtgatcagcgaggaggaggccgcccccaagaagatcaaggccaacagaagaagcaacagcaagaagagcaagaccctgcaggagttcctggagcgcatccacctgcaggagtacaccagcaccctgctgctgaatggctatgagaccctggaggacctgaaggacatcaaggagagccacctgattgagctgaacattgaaaatccagatgacagaagaaggctgctgtctgctgctgagaacttcctggaggaggagatcatccaggagcaggagaatgaacctgagcccctgagcctgagcagtgacatcagcctgaacaagagccagctggatgactgcccccgggacagcggctgctacatcagcagcggcaacagcgacaatggcaaggaggacctggagagcgagaacctgagtgacatggtgcacaagatcatcatcacagagcccagcgactag

SEQ ID NO: 168806 - DNA, 618 bp, synthetic construct
  misc_feature 1..618: note = Description of Artificial Sequence: Synthetic coding sequence
  source 1..618: mol_type = other DNA
atgctgaagaggaagcccagcaatgtgtctgagaaggagaagcaccagaagcccaagaagggggacatcatcgacatcatctgcaagacccccatgggcatgtggacaggcatgctgaacaacaaggtgggcaacttcaagttcatctacgtggatgtgatcagcgaggaggaggccgcccccaagaagatcaaggccaacagaagaagcaacagcaagaagagcaagaccctgcaggagttcctggagcgcatccacctgcaggagtacaccagcaccctgctgctgaatggctatgagaccctggaggacctgaaggacatcaaggagagccacctgattgagctgaacattgaaaatccagatgacagaagaaggctgctgtctgctgctgagaacttcctggaggaggagatcatccaggagcaggagaatgaacctgagcccctgagcctgagcagtgacatcagcctgaacaagagccagctggatgactgcccccgggacagcggctgctacatcagcagcggcaacagcgacaatggcaaggaggacctggagagcgagaacctgagtgacatggtgcacaagatcatcatcacagagcccagcgactag

SEQ ID NO: 168807 - DNA, 1122 bp, synthetic construct
  misc_feature 1..1122: note = Description of Artificial Sequence: Synthetic coding sequence
  source 1..1122: mol_type = other DNA
atgctgaagaggaagcccagcaatgtgtctgagaaggagaagcaccagaagcccaagaggagcagcagctttggaaactttgaccgcttcaggaacaacagcctgagcaagccagatgacagcacagaggcccatgaaggagaccccaccaatggaagtggagagcagagcaagaccagcaacaacggcggcggcctgggcaagaagatgagggccatctcctggaccatgaagaagaaggtgggcaagaagtacatcaaggccctgtctgaggagaaggatgaggaggatggagaaaatgcccacccctacagaaacagcgaccctgtgattggcacccacacagagaaggtgtccctgaaggccagtgacagcatggacagcctgtacagcggccagagcagcagcagcggcatcaccagctgcagtgatggcaccagcaacagagacagcttccggctggatgatgatggcccctacagcggccccttctgtggccgggcccgggtgcacacagacttcacccccagcccctatgacacagacagcctgaagatcaagaagggggacatcatcgacatcatctgcaagacccccatgggcatgtggacaggcatgctgaacaacaaggtgggcaacttcaagttcatctacgtggatgtgatcagcgaggaggaggccgcccccaagaagatcaaggccaacagaagaagcaacagcaagaagagcaagaccctgcaggagttcctggagcgcatccacctgcaggagtacaccagcaccctgctgctgaatggctatgagaccctggaggacctgaaggacatcaaggagagccacctgattgagctgaacattgaaaatccagatgacagaagaaggctgctgtctgctgctgagaacttcctggaggaggagatcatccaggagcaggagaatgaacctgagcccctgagcctgagcagtgacatcagcctgaacaagagccagctggatgactgcccccgggacagcggctgctacatcagcagcggcaacagcgacaatggcaaggaggacctggagagcgagaacctgagtgacatggtgcacaagatcatcatcacagagcccagcgactag

SEQ ID NO: 168808 - DNA, 1008 bp, synthetic construct
  misc_feature 1..1008: note = Description of Artificial Sequence: Synthetic coding sequence
  source 1..1008: mol_type = other DNA
atgggcagcgccagccctggcctgagctctgtgagccccagccacctgctgctgcccccagacacagtgtccaggacaggcctggagaaggctgctgctggagctgtgggcctggagcggcgggactggagccccagccccccagccaccccagagcagggcctgagcgccttctacctgagctactttgacatgctgtacccagaggacagctcctgggccgccaaggcccctggggccagcagccgggaggagcccccagaggagcctgagcagtgccctgtgattgacagccaggccccagctggcagcctggacctggtgcctgggggcctgaccctggaggagcacagcctggagcaggtgcagagcatggtggtgggggaggtgctgaaggacatcgagacagcctgcaagctgctgaacatcacagctgaccccatggactggagccccagcaatgtgcagaagtggctgctgtggacagagcaccagtaccgcctgccccccatgggcaaggccttccaggagctggccggcaaggagctgtgtgccatgtctgaggagcagttccggcagaggagccccctgggcggagatgtgctgcacgcccacctggacatctggaagtctgctgcctggatgaaggagaggaccagccctggggccatccactactgtgccagcaccagcgaggagagctggacagacagcgaggtggacagcagctgcagcggccagcccatccacctgtggcagttcctgaaggagctgctgctgaagccccacagctatggccgcttcatccgctggctgaacaaggagaagggcatcttcaagattgaggacagcgcccaggtggcccggctgtggggcatcaggaagaacagacctgccatgaactatgacaagctgagccgcagcatccggcagtactacaagaagggcatcatcaggaagccagacatcagccagaggctggtgtaccagtttgtgcaccccatctag

SEQ ID NO: 168809 - DNA, 960 bp, synthetic construct
  misc_feature 1..960: note = Description of Artificial Sequence: Synthetic coding sequence
  source 1..960: mol_type = other DNA
atgggcagcgccagccctggcctgagctctgtgagccccagccacctgctgctgcccccagacacagtgtccaggacaggcctggagaaggctgctgctggagctgtgggcctggagcggcgggactggagccccagccccccagccaccccagagcagggcctgagcgccttctacctgagctactttgacatgctgtacccagaggacagctcctgggccgccaaggcccctggggccagcagccgggaggagcccccagaggagcctgagcagtgccctgtgattgacagccaggccccagctggcagcctggacctggtgcctgggggcctgaccctggaggagcacagcctggagcaggtgcagagcatggtggtgggggaggtgctgaaggacatcgagacagcctgcaagctgctgaacatcacagctgaccccatggactggagccccagcaatgtgcagaagtggctgctgtggacagagcaccagtaccgcctgccccccatgggcaaggccttccaggagctggccggcaaggagctgtgtgccatgtctgaggagcagttccggcagaggagccccctgggcggagatgtgctgcacgcccacctggacatctggaagagcgccagcaccagcgaggagagctggacagacagcgaggtggacagcagctgcagcggccagcccatccacctgtggcagttcctgaaggagctgctgctgaagccccacagctatggccgcttcatccgctggctgaacaaggagaagggcatcttcaagattgaggacagcgcccaggtggcccggctgtggggcatcaggaagaacagacctgccatgaactatgacaagctgagccgcagcatccggcagtactacaagaagggcatcatcaggaagccagacatcagccagaggctggtgtaccagtttgtgcaccccatctag

SEQ ID NO: 168810 - DNA, 1218 bp, synthetic construct
  misc_feature 1..1218: note = Description of Artificial Sequence: Synthetic coding sequence
  source 1..1218: mol_type = other DNA
atggccgccagcggcaagaccagcaagtctgagcccaaccacgtgatcttcaagaagatcagccgggacaagtctgtgaccatctacctgggcaacagagactacatcgaccacgtgtcccaggtgcagcctgtggatggagtggtgctggtggaccctgacctggtgaagggcaagaaggtgtatgtgaccctgacctgtgccttccgctatggccaggaggacattgatgtgattggcctgaccttccggcgggacctgtacttcagccgggtgcaggtgtacccacctgtgggcgccgccagcacccccaccaagctgcaggagagcctgctgaagaagctgggcagcaacacctaccccttcctgctgaccttcccagactacctgccctgcagcgtgatgctgcagcctgccccccaggacagcggcaagagctgtggggtggactttgaggtgaaggcctttgccacagacagcacagatgctgaggaggacaagatccccaagaagagctctgtgcggctgctgatcaggaaggtgcagcacgcccccctggagatgggcccccagcccagggctgaggccgcctggcagttcttcatgtctgacaagcccctgcacctggccgtgtccctgaacaaggagatctacttccacggggagcccatccctgtgacagtgacagtgaccaacaacacagagaagacagtgaagaagatcaaggcctttgtggagcaggtggccaacgtggtgctgtacagcagtgactactacgtgaagcctgtggccatggaggaggcccaggagaaggtgccccccaacagcaccctgaccaagaccctgaccctgctgcccctgctggccaacaaccgggagcggcggggcatcgccctggatggcaagatcaagcatgaggacaccaacctggccagcagcaccatcatcaaggagggcatcgacagaacagtgctgggcatcctggtgtcctaccagatcaaggtgaagctgactgtgtctggcatgacaggccggcagaaggccagcgaggtggccacagaggtgcccttccggctgatgcacccccagccagaagatcctggccagttctcctaccaggatgccaacctggtgtttgaggagtttgcccggcacaacctgaaggatgctggggaggccgaggagggcaagagggacaagaatgatgtggatgaatag

SEQ ID NO: 168811 - DNA, 1218 bp, synthetic construct
  misc_feature 1..1218: note = Description of Artificial Sequence: Synthetic coding sequence
  source 1..1218: mol_type = other DNA
atggccgccagcggcaagaccagcaagtctgagcccaaccacgtgatcttcaagaagatcagccgggacaagtctgtgaccatctacctgggcaacagagactacatcgaccacgtgtcccaggtgcagcctgtggatggagtggtgctggtggaccctgacctggtgaagggcaagaaggtgtatgtgaccctgacctgtgccttccgctatggccaggaggacattgatgtgattggcctgaccttccggcgggacctgtacttcagccgggtgcaggtgtacccacctgtgggcgccgccagcacccccaccaagctgcaggagagcctgctgaagaagctgggcagcaacacctaccccttcctgctgaccttcccagactacctgccctgcagcgtgatgctgcagcctgccccccaggacagcggcaagagctgtggggtggactttgaggtgaaggcctttgccacagacagcacagatgctgaggaggacaagatccccaagaagagctctgtgcggctgctgatcaggaaggtgcagcacgcccccctggagatgggcccccagcccagggctgaggccgcctggcagttcttcatgtctgacaagcccctgcacctggccgtgtccctgaacaaggagatctacttccacggggagcccatccctgtgacagtgacagtgaccaacaacacagagaagacagtgaagaagatcaaggcctttgtggagcaggtggccaacgtggtgctgtacagcagtgactactacgtgaagcctgtggccatggaggaggcccaggagaaggtgccccccaacagcaccctgaccaagaccctgaccctgctgcccctgctggccaacaaccgggagcggcggggcatcgccctggatggcaagatcaagcatgaggacaccaacctggccagcagcaccatcatcaaggagggcatcgacagaacagtgctgggcatcctggtgtcctaccagatcaaggtgaagctgactgtgtctggcttcctgggggagctgaccagcagcgaggtggccacagaggtgcccttccggctgatgcacccccagccagaagatcctgccaaggagagctaccaggatgccaacctggtgtttgaggagtttgcccggcacaacctgaaggatgctggggaggccgaggagggcaagagggacaagaatgatgtggatgaatag

SEQ ID NO: 168812 - DNA, 510 bp, synthetic construct
  misc_feature 1..510: note = Description of Artificial Sequence: Synthetic coding sequence
  source 1..510: mol_type = other DNA
atggccgccagcggcaagaccagcaagtctgagcccaaccacgtgatcttcaagaagatcagccgggacaagtctgtgaccatctacctgggcaacagagactacatcgaccacgtgtcccaggtgcagcctgtggatggagtggtgctggtggaccctgacctggtgaagggcaagaaggtgtatgtgaccctgacctgtgccttccgctatggccaggaggacattgatgtgattggcctgaccttccggcgggacctgtacttcagccgggtgcaggtgtacccacctgtgggcgccgccagcacccccaccaagctgcaggagagcctgctgaagaagctgggcagcaacacctaccccttcctgctgaccttcccagactacctgccctgcagcgtgatgctgcagcctgccccccaggacagcggcaagagctgtggggtggactttgaggtgaaggcctttgccacagacagcacagatgctgaggaggacaagatcccctag

SEQ ID NO: 168813 - DNA, 708 bp, synthetic construct
  misc_feature 1..708: note = Description of Artificial Sequence: Synthetic coding sequence
  source 1..708: mol_type = other DNA
atgctgcagcctgccccccaggacagcggcaagagctgtggggtggactttgaggtgaaggcctttgccacagacagcacagatgctgaggaggacaagatccccaagaagagctctgtgcggctgctgatcaggaaggtgcagcacgcccccctggagatgggcccccagcccagggctgaggccgcctggcagttcttcatgtctgacaagcccctgcacctggccgtgtccctgaacaaggagatctacttccacggggagcccatccctgtgacagtgacagtgaccaacaacacagagaagacagtgaagaagatcaaggcctttgtggagcaggtggccaacgtggtgctgtacagcagtgactactacgtgaagcctgtggccatggaggaggcccaggagaaggtgccccccaacagcaccctgaccaagaccctgaccctgctgcccctgctggccaacaaccgggagcggcggggcatcgccctggatggcaagatcaagcatgaggacaccaacctggccagcagcaccatcatcaaggagggcatcgacagaacagtgctgggcatcctggtgtcctaccagatcaaggtgaagctgactgtgtctggcttcctgggggagctgaccagcagcgaggtggccacagaggtgcccttccggctgatgcacccccagccagaagatcctgggaagtag

SEQ ID NO: 168814 - DNA, 204 bp, synthetic construct
  misc_feature 1..204: note = Description of Artificial Sequence: Synthetic coding sequence
  source 1..204: mol_type = other DNA
atggccgccagcggcaagaccagcaagtctgagcccaaccacgtgatcttcaagaagatcagccgggacaagtctgtgtctggggcccaggtgaccatctacctgggcaacagagactacatcgaccacgtgtcccaggtgcagcctgtggatggagtggtgctggtggaccctgacctggtgaagggcaagaaggtgtcctag

SEQ ID NO: 168815 - DNA, 633 bp, synthetic construct
  misc_feature 1..633: note = Description of Artificial Sequence: Synthetic coding sequence
  source 1..633: mol_type = other DNA
atggccacagaaacagtggagctgcacaagctgaagctggccgagctgaagcaggagtgcctggcccggggcctggagaccaagggcatcaagcaggacctgatccaccggctgcaggcctacctggaggagcacgccgaggaggaggccaatgaagaagatgtgctgggagatgaaacagaggaggaggagaccaagcccatcgagctgcctgtgaaggaggaggagcccccagagaagacagtggatgtggccgctgagaagaaggtggtgaagatcaccagcgagatcccccagacagagaggatgcagaagagagctgagcgcttcaacgtgcctgtgtccctggagagcaagaaggccgcccgggccgccaggtttggcatcagctctgtgcccaccaagggcctgagcagtgacaacaagcccatggtgaacctggacaagctgaaggagcgggcccagagatttggcctgaatgtgagcagcatcagcaggaagtcagaagatgatgagaagctgaagaagaggaaggagagatttggaattgtgaccagcagcgctggcaccggcaccacagaggacacagaggccaagaagaggaagagagctgagagatttggaattgcctag

SEQ ID NO: 168816 - DNA, 453 bp, synthetic construct
  misc_feature 1..453: note = Description of Artificial Sequence: Synthetic coding sequence
  source 1..453: mol_type = other DNA
atggaggaggagaccaagcccatcgagctgcctgtgaaggaggaggagcccccagagaagacagtggatgtggccgctgagaagaaggtggtgaagatcaccagcgagatcccccagacagagaggatgcagaagagagctgagcgcttcaacgtgcctgtgtccctggagagcaagaaggccgcccgggccgccaggtttggcatcagctctgtgcccaccaagggcctgagcagtgacaacaagcccatggtgaacctggacaagctgaaggagcgggcccagagatttggcctgaatgtgagcagcatcagcaggaagtcagaagatgatgagaagctgaagaagaggaaggagagatttggaattgtgaccagcagcgctggcaccggcaccacagaggacacagaggccaagaagaggaagagagctgagagatttggaattgcctag

SEQ ID NO: 168817 - DNA, 633 bp, synthetic construct; identical to SEQ ID NO: 168815
  misc_feature 1..633: note = Description of Artificial Sequence: Synthetic coding sequence
  source 1..633: mol_type = other DNA

SEQ ID NO: 168818 - DNA, 879 bp, synthetic construct
  misc_feature 1..879: note = Description of Artificial Sequence: Synthetic coding sequence
  source 1..879: mol_type = other DNA
atggccggcaagaagaatgtgctgagcagcctggccgtgtatgcagaggacagcgagcctgagagtgatggagaggccggcatcgaggccgtgggcagcgctgctgaggagaagggcggcctggtgtctgatgcctacggggaggatgacttcagccggctgggcggagatgaagatggctatgaggaggaggaggatgagaacagccggcagagcgacaacacagaagctgagaagagggacccccaggagctggtggccagcttcagcgagcgggtgaggaacatgagcccagatgagatcaagatccccccagagcccccaggccgctgcagcaaccacctgcaggacaagatccagaagctgtatgaaaggaagatcaaggagggcatggacatgaactacatcatccagaggaagaaggagttcaggaaccccagcatctatgagaagctgatccagttctgtgccattgatgagctgggcaccaactaccccaaggacatgtttgacccccacggctggagcgaagattcctactatgaggccctggccaaggcccagaagattgagatggacaagctggagaaggccaagaaggagaggaccaagattgaatttgtgacaggcaccaagaagggcaccaccaccaatgccaccagcaccaccaccaccacagccagcacagctgtggctgatgcccagaagaggaagagcaagtgggacagcgccatccctgtgaccaccatcgcccagcccaccatcctgaccaccacagccaccctgcctgctgtggtgacagtgaccaccagcgccagcggcagcaagaccaccgtcatctctgctgtgggcaccatcgtgaagaaggccaagcagtag

SEQ ID NO: 168819 - DNA, 927 bp, synthetic construct
  misc_feature 1..927: note = Description of Artificial Sequence: Synthetic coding sequence
  source 1..927: mol_type = other DNA
atggccggcaagaagaatgtgctgagcagcctggccgtgtatgcagaggacagcgagcctgagagtgatggagaggccggcatcgaggccgtgggcagcgctgctgaggagaagggcggcctggtgtctgatgcctacggggaggatgacttcagccggctgggcggagatgaagatggctatgaggaggaggaggatgagaacagccggcagagtgaagatgatgattctgaaacagagaagccagaggctgatgaccccaaggacaacacagaagctgagaagagggacccccaggagctggtggccagcttcagcgagcgggtgaggaacatgagcccagatgagatcaagatccccccagagcccccaggccgctgcagcaaccacctgcaggacaagatccagaagctgtatgaaaggaagatcaaggagggcatggacatgaactacatcatccagaggaagaaggagttcaggaaccccagcatctatgagaagctgatccagttctgtgccattgatgagctgggcaccaactaccccaaggacatgtttgacccccacggctggagcgaagattcctactatgaggccctggccaaggcccagaagattgagatggacaagctggagaaggccaagaaggagaggaccaagattgaatttgtgacaggcaccaagaagggcaccaccaccaatgccaccagcaccaccaccaccacagccagcacagctgtggctgatgcccagaagaggaagagcaagtgggacagcgccatccctgtgaccaccatcgcccagcccaccatcctgaccaccacagccaccctgcctgctgtggtgacagtgaccaccagcgccagcggcagcaagaccaccgtcatctctgctgtgggcaccatcgtgaagaaggccaagcagtag

SEQ ID NO: 168820 - DNA, 507 bp, synthetic construct
  misc_feature 1..507: note = Description of Artificial Sequence: Synthetic coding sequence
  source 1..507: mol_type = other DNA
atggccggcaagaagaatgtgctgagcagcctggccgtgtatgcagaggacagcgagcctgagagtgatggagaggccggcatcgaggccgtgggcagcgctgctgaggagaagggcggcctggtgtctgatgcctacggggaggatgacttcagccggctgggcggagatgaagatggctatgaggaggaggaggatgagaacagccggcagagtgaagatgatgattctgaaacagagaagccagaggctgatgaccccaaggacaacacagaagctgagaagagggacccccaggagctggtggccagcttcagcgagcgggtgaggaacatgagcccagatgagatcaagatccccccagagcccccaggccgctgcagcaaccacctgcaggacaagatccagaagctgtatgaaaggaagatcaaggagggcatggacatgaactacatcatccagaggaagaaggagttcaggaaccccagccagggcccagaaaattag

SEQ ID NO: 168821 - DNA, 927 bp, synthetic construct; identical to SEQ ID NO: 168819
  misc_feature 1..927: note = Description of Artificial Sequence: Synthetic coding sequence
  source 1..927: mol_type = other DNA

SEQ ID NO: 168822 - DNA, 366 bp, synthetic construct
  misc_feature 1..366: note = Description of Artificial Sequence: Synthetic coding sequence
  source 1..366: mol_type = other DNA
atgtccttcatctttgagtggatctacaacggcttcagctctgtgctgcagttcctgggcctgtacaagaagagcggcaagctggtgttcctgggcctggacaatgctgggaagaccaccctgctgcacatgctgaaggatgaccggctgggccagcacgtgcccaccctgcaccccaccagcgaggagctgaccatcgccggcatgaccttcaccacctttgacctgggcggccacgagcaggccaggagagtgtggaagaactacctgcctgccatcaatggcatcgtgttcctggtggactgtgccgaccacagccggctggtggagagcaaggtggagctgaatgtgtgctttgtgctgtag

SEQ ID NO: 168823 - DNA, 597 bp, synthetic construct
  misc_feature 1..597: note = Description of Artificial Sequence: Synthetic coding sequence
  source 1..597: mol_type = other DNA
atgtccttcatctttgagtggatctacaacggcttcagctctgtgctgcagttcctgggcctgtacaagaagagcggcaagctggtgttcctgggcctggacaatgctgggaagaccaccctgctgcacatgctgaaggatgaccggctgggccagcacgtgcccaccctgcaccccaccagcgaggagctgaccatcgccggcatgaccttcaccacctttgacctgggcggccacgagcaggccaggagagtgtggaagaactacctgcctgccatcaatggcatcgtgttcctggtggactgtgccgaccacagccggctggtggagagcaaggtggagctgaatgccctgatgacagatgagaccatcagcaatgtgcccatcctgatcctgggcaacaagattgacagaacagatgccatcagcgaggagaagctgcgggagatcttcggcctgtatggccagaccactggaaaaggaaatgtgaccctgaaggagctgaatgcccggcccatggaggtgttcatgtgcagcgtgctgaagaggcagggctacggggagggcttccgctggctgagccagtacattgattag

SEQ ID NO: 168824 - DNA, 597 bp, synthetic construct; identical to SEQ ID NO: 168823
  misc_feature 1..597: note = Description of Artificial Sequence: Synthetic coding sequence
  source 1..597: mol_type = other DNA

SEQ ID NO: 168825 - DNA, 597 bp, synthetic construct; identical to SEQ ID NO: 168823
  misc_feature 1..597: note = Description of Artificial Sequence: Synthetic coding sequence
  source 1..597: mol_type = other DNA

SEQ ID NO: 168826 - DNA, 597 bp, synthetic construct; identical to SEQ ID NO: 168823
  misc_feature 1..597: note = Description of Artificial Sequence: Synthetic coding sequence
  source 1..597: mol_type = other DNA

SEQ ID NO: 168827 - DNA, 354 bp, synthetic construct
  misc_feature 1..354: note = Description of Artificial Sequence: Synthetic coding sequence
  source 1..354: mol_type = other DNA
atgggcctgtccttctggtggacagtgcagatcatcctggcctcctggaaccccaagctgagcctgatgatctactgcagcagcctgctgaccctggccccaaatgccctgatgacagatgagaccatcagcaatgtgcccatcctgatcctgggcaacaagattgacagaacagatgccatcagcgaggagaagctgcgggagatcttcggcctgtatggccagaccactggaaaaggaaatgtgaccctgaaggagctgaatgcccggcccatggaggtgttcatgtgcagcgtgctgaagaggcagggctatggagagggcttccgctggctgagccagtacatcgactag

SEQ ID NO: 168828 - DNA, 597 bp, synthetic construct; identical to SEQ ID NO: 168823
  misc_feature 1..597: note = Description of Artificial Sequence: Synthetic coding sequence
  source 1..597: mol_type = other DNA

SEQ ID NO: 168829 - DNA, 348 bp, synthetic construct
  misc_feature 1..348: note = Description of Artificial Sequence: Synthetic coding sequence
  source 1..348: mol_type = other DNA
tgaagcttctggtggacagtgcagatcatcctggcctcctggaaccccaagctgagcctgatgatctactgcagcagcctgctgaccctggccccaaatgccctgatgacagatgagaccatcagcaatgtgcccatcctgatcctgggcaacaagattgacagaacagatgccatcagcgaggagaagctgcgggagatcttcggcctgtatggccagaccactggaaaaggaaatgtgaccctgaaggagctgaatgcccggcccatggaggtgttcatgtgcagcgtgctgaagaggcagggctatggagagggcttccgctggctgagccagtacatcgactag

SEQ ID NO: 168830 - DNA, 468 bp, synthetic construct
  misc_feature 1..468: note = Description of Artificial Sequence: Synthetic coding sequence
  source 1..468: mol_type = other DNA
atgctgaaggatgaccggctgggccagcacgtgcccaccctgcaccccaccagcgaggagctgaccatcgccggcatgaccttcaccacctttgacctgggcggccacgagcaggcccggcgggtgtggaagaactacctgcctgccatcaatggaattgtgttcctggtggactgtgccgaccacagccggctggtggagagcaaggtggagctgaatgccctgatgacagatgagaccatcagcaatgtgcccatcctgatcctgggcaacaagattgacagaacagatgccatcagcgaggagaagctgcgggagatcttcggcctgtatggccagaccactggaaaaggaaatgtgaccctgaaggagctgaatgcccggcccatggaggtgttcatgtgcagcgtgctgaagaggcagggctatggagagggcttccgctggctgagccagtacatcgactag

SEQ ID NO: 168831 - DNA, 393 bp, synthetic construct
  misc_feature 1..393: note = Description of Artificial Sequence: Synthetic coding sequence
  source 1..393: mol_type = other DNA
atgaccttcaccacctttgacctgggcggccacgtgcaggccaggagagtgtggaagaactacctgcctgccatcaatggcatcgtgttcctggtggactgtgccgaccacgagcggctgctggagagcaaggaggagctggacagcctgatgacagatgagaccatcgccaacgtgcccatcctgatcctgggcaacaagattgacaggcctgaggccatcagcgaggagcggctgcgggagatgtttggcctgtatggccagaccaccgggaagggcagcatcagcctgaaggagctgaatgcccggcccctggaggtgttcatgtgcagcgtgctgaagaggcagggctacggggagggcttccgctggatggcccagtacattgattag

SEQ ID NO: 168832 - DNA, 597 bp, synthetic construct
  misc_feature 1..597: note = Description of Artificial Sequence: Synthetic coding sequence
  source 1..597: mol_type = other DNA
atgtccttcatctttgactggatctacagcggcttcagctctgtgctgcagttcctgggcctgtacaagaagacaggcaagctggtgttcctgggcctggacaatgctgggaagaccaccctgctgcacatgctgaaggatgaccggctgggccagcacgtgcccaccctgcaccccaccagcgaggagctgaccatcgccggcatgaccttcaccacctttgacctgggcggccacgtgcaggccaggagagtgtggaagaactacctgcctgccatcaatggcatcgtgttcctggtggactgtgccgaccacgagcggctgctggagagcaaggaggagctggacagcctgatgacagatgagaccatcgccaacgtgcccatcctgatcctgggcaacaagattgacaggcctgaggccatcagcgaggagcggctgcgggagatgtttggcctgtatggccagaccaccgggaagggcagcatcagcctgaaggagctgaatgcccggcccctggaggtgttcatgtgcagcgtgctgaagaggcagggctacggggagggcttccgctggatggcccagtacattgattag

SEQ ID NO: 168833 - DNA, 597 bp, synthetic construct; identical to SEQ ID NO: 168832
  misc_feature 1..597: note = Description of Artificial Sequence: Synthetic coding sequence
  source 1..597: mol_type = other DNA

SEQ ID NO: 168834 - DNA, 312 bp, synthetic construct
  misc_feature 1..312: note = Description of Artificial Sequence: Synthetic coding sequence
  source 1..312: mol_type = other DNA
atgtccttcatctttgactggatctacagcggcttcagctctgtgctgcagttcctgggcctgtacaagaagacaggcaagctggtgttcctgggcctggacaatgctgggaagaccaccctgctgcacatgctgaaggatgaccggctgggccagcacgtgcccaccctgcaccccaccagcgaggagctgaccatcgccggcatgaccttcaccacctttgacctgggcggccacgtgcaggccaggagagtgtggaagaactacctgcctgccatcaatggcatcgtgttcctggtggactgtgcctag

SEQ ID NO: 168835 - DNA, 393 bp, synthetic construct; identical to SEQ ID NO: 168831
  misc_feature 1..393: note = Description of Artificial Sequence: Synthetic coding sequence
  source 1..393: mol_type = other DNA

SEQ ID NO: 168836 - DNA, 513 bp, synthetic construct
  misc_feature 1..513: note = Description of Artificial Sequence: Synthetic coding sequence
  source 1..513: mol_type = other DNA
atgtccttcatctttgactggatctacagcggcttcagctctgtgctgcagttcctgggcctgtacaagaagacaggcaagctggtgttcctgggcctggacaatgctgggaagaccaccctgctgcacatgctgaaggatgaccggctgggccagcacgtgcccaccctgcaccccaccagcgaggagctgaccatcgccggcatgaccttcaccacctttgacctgggcggccacgtgcaggccaggagagtgtggaagaactacctgcctgccatcaatggcatcgtgttcctggtggactgtgccgaccacgagcggctgctggagagcaaggaggagctggacagcctgatgacagatgagaccatcgccaacgtgcccatcctgatcctgggcaacaagattgacaggcctgaggccatcagcgaggagcggctgcgggagatgtttggcctgtatggccagaccaccgggaagggcagcatcagcctgaaggagctgaatgcctag

SEQ ID NO: 168837 - DNA, 393 bp, synthetic construct; identical to SEQ ID NO: 168831
  misc_feature 1..393: note = Description of Artificial Sequence: Synthetic coding sequence
  source 1..393: mol_type = other DNA

SEQ ID NO: 168838 - DNA, 393 bp, synthetic construct; identical to SEQ ID NO: 168831
  misc_feature 1..393: note = Description of Artificial Sequence: Synthetic coding sequence
  source 1..393: mol_type = other DNA

SEQ ID NO: 168839 - DNA, 2796 bp, synthetic construct
  misc_feature 1..2796: note = Description of Artificial Sequence: Synthetic coding sequence
  source 1..2796: mol_type = other DNA
atgagggccctggtgctgctgggctgcctgctggccagcctgctcttcagcggccaggccgagctgcaggtgtctgccagcggcggcacagaagatgtgggcaacctgctggagaaccacttctctgctggagatgccagcctggaggagaaggagcgggccctgtatgctgacacagccccccaggacaagaagctgctgctgcactacccagatggccgggaggccgagagccccaagaagaccccagccagcgctgccagcgctggccctgaccctgaggccagcctgagcaatgccagcgccacagagagccccccacctggagagagagatgacagagatgctgctggccctggagaggagaagaatggcccccctgtggccagcgccctgcccccaggaggagccaagggccctgtggaggaggagtggccagagcccagcagcggggagggccagggcgaggaggagactggatttggcctgcccacagagggcacagccagcggggaggccggcggccaggccggcggccacgagctgcctgaggaggtgcaggaggtgcagggcgacagcctggtgcagggcgctgtggccggcacagctgagcccaaggccgagggcgccagcccccacagtgaaggagatggagtgggccccctgaatgctgaggccgagggcagccctggccctggagaggagcctgctgtgcctgagggcgccccagatgtggccgctgtgggcggggagagcgagccagacatcgacacccaggccagcgagggcacagaggaccagggcgagcccggccctgctgctgaggccagcgctgagcccggcggggcccagagcgtgaaggccggggacacagaggagaaccagagccctgagatgacagaggaggatgctgatgaggccagcagcgaggaggagagcggagatggcagcggcagcgaggaggagggcggcgtgcccagcgaggaggagagtgaagaagattctggagatggagccagcagcgaggaggccgagggcgccagcgaggaggccacagagccccaggaggccggggagccccaggaggcccgggagccccaggagggcggggacctgcaggaggccgaggagagccaggagggcggggacccccaggaggccgaggagccccaggagggcggggccccccaggagggcggggagccccaggagggcggggacccccaggaggcccgggagccccaggaggcccgggagccccaggagggcgctgagctgcctgaggccaccggcaccaccagccaccgggacagaggagcccagcccggccctgaggagctgaacacagagagcatgggcagcgagaccctggacatgaaggccgaggagcctgaggagggccaccagcgggagagccccatcatcgtggcccaggaggagacagaagatgccaatgaggaggcccccctgcgggacaggagccacatcgagaagaccctgatgctgaatgaagacaagcccagtgatgactacagcgctgtgctgcagaggctgaggaagatctaccacagcagcatcaagcccctggagcagagctacaagtacaatgagctgcggcagcacgagatcacagatggagagatcaccagcaagcccatggtgctcttcctgggcccctggagcgtgggcaagagcaccatgatcaactacctgctgggcctggagaacacccgctaccagctgtacacaggagctgagcccaccaccagcgagttcaccgtgctgatgcacggccccaagctgaagaccatcgagggcatcgtgatggctgctgacagcgcccggagcttcagccccctggagaagtttggccagaacttcctggagaagctgattggcatcgaggtgccccacaagctgctggagcgggtgacctttgtggacaccccaggcatcatcgagaacaggaagcagcaggagcggggctaccccttcaatgatgtgtgccagtggttcatcgacagagctgacctgatctttgtggtgtttgaccccaccaagctggatgtgggcctggagctggagatgctgttccggcagctgaagggccgggagagccagatccgcatcatcctgaacaaggctgacaacctggccacccagatgctgatgagggtgtatggagccctcttctggagcctggcccccctcatcaacgtgacagagcccccccgggtgtatgtgagcagcttctggccccaggagtacaagccagacacccaccaggagctgttcctgcaggaggagatcagcctgctggaggacctgaaccaggtgattgaaaatcggctggagaacaagatcgccttcatccggcagcacgccatccgggtgcgcatccacgccctgctggtggaccgctacctgcagacctacaaggacaagatgaccttcttcagtgatggagagctggtgttcaaggacatcgtggaggaccctgacaagttctacatcttcaagaccatcctggccaagaccaacgtgtccaagtttgacctgcccaaccgggaggcctacaaggacttcttcggcatcaaccccatcagcagcttcaagctgctgagccagcagtgcagctacatgggcggctgcttcctggagaagattgagcgggccatcacccaggagctgcccggcctgctgggcagcctgggcctgggcaagaaccctggggccctgaactgtgacaagacaggctgcagcgagacccccaagaaccgctacaggaagcactag

SEQ ID NO: 168840 - DNA, 1422 bp, synthetic construct
  misc_feature 1..1422: note = Description of Artificial Sequence: Synthetic coding sequence
  source 1..1422: mol_type = other DNA
atgagggccctggtgctgctgggctgcctgctggccagcctgctcttcagcggccaggccgaggagacagaagatgccaatgaggaggcccccctgcgggacaggagccacatcgagaagaccctgatgctgaatgaagacaagcccagtgatgactacagcgctgtgctgcagaggctgaggaagatctaccacagcagcatcaagcccctggagcagagctacaagtacaatgagctgcggcagcacgagatcacagatggagagatcaccagcaagcccatggtgctcttcctgggcccctggagcgtgggcaagagcaccatgatcaactacctgctgggcctggagaacacccgctaccagctgtacacaggagctgagcccaccaccagcgagttcaccgtgctgatgcacggccccaagctgaagaccatcgagggcatcgtgatggctgctgacagcgcccggagcttcagccccctggagaagtttggccagaacttcctggagaagctgattggcatcgaggtgccccacaagctgctggagcgggtgacctttgtggacaccccaggcatcatcgagaacaggaagcagcaggagcggggctaccccttcaatgatgtgtgccagtggttcatcgacagagctgacctgatctttgtggtgtttgaccccaccaagctggatgtgggcctggagctggagatgctgttccggcagctgaagggccgggagagccagatccgcatcatcctgaacaaggctgacaacctggccacccagatgctgatgagggtgtatggagccctcttctggagcctggcccccctcatcaacgtgacagagcccccccgggtgtatgtgagcagcttctggccccaggagtacaagccagacacccaccaggagctgttcctgcaggaggagatcagcctgctggaggacctgaaccaggtgattgaaaatcggctggagaacaagatcgccttcatccggcagcacgccatccgggtgcgcatccacgccctgctggtggaccgctacctgcagacctacaaggacaagatgaccttcttcagtgatggagagctggtgttcaaggacatcgtggaggaccctgacaagttctacatcttcaagaccatcctggccaagaccaacgtgtccaagtttgacctgcccaaccgggaggcctacaaggacttcttcggcatcaaccccatcagcagcttcaagctgctgagccagcagtgcagctacatgggcggctgcttcctggagaagattgagcgggccatcacccaggagctgcccggcctgctgggcagcctgggcctgggcaagaaccctggggccctgaactgtgacaagacaggctgcagcgagacccccaagaaccgctacaggaagcactag

SEQ ID NO: 168841 - DNA, 1296 bp, synthetic construct
  misc_feature 1..1296: note = Description of Artificial Sequence: Synthetic coding sequence
  source 1..1296: mol_type = other DNA
atgctgaatgaagacaagcccagtgatgactacagcgctgtgctgcagaggctgaggaagatctaccacagcagcatcaagcccctggagcagagctacaagtacaatgagctgcggcagcacgagatcacagatggagagatcaccagcaagcccatggtgctcttcctgggcccctggagcgtgggcaagagcaccatgatcaactacctgctgggcctggagaacacccgctaccagctgtacacaggagctgagcccaccaccagcgagttcaccgtgctgatgcacggccccaagctgaagaccatcgagggcatcgtgatggctgctgacagcgcccggagcttcagccccctggagaagtttggccagaacttcctggagaagctgattggcatcgaggtgccccacaagctgctggagcgggtgacctttgtggacaccccaggcatcatcgagaacaggaagcagcaggagcggggctaccccttcaatgatgtgtgccagtggttcatcgacagagctgacctgatctttgtggtgtttgaccccaccaagctggatgtgggcctggagctggagatgctgttccggcagctgaagggccgggagagccagatccgcatcatcctgaacaaggctgacaacctggccacccagatgctgatgagggtgtatggagccctcttctggagcctggcccccctcatcaacgtgacagagcccccccgggtgtatgtgagcagcttctggccccaggagtacaagccagacacccaccaggagctgttcctgcaggaggagatcagcctgctggaggacctgaaccaggtgattgaaaatcggctggagaacaagatcgccttcatccggcagcacgccatccgggtgcgcatccacgccctgctggtggaccgctacctgcagacctacaaggacaagatgaccttcttcagtgatggagagctggtgttcaaggacatcgtggaggaccctgacaagttctacatcttcaagaccatcctggccaagaccaacgtgtccaagtttgacctgcccaaccgggaggcctacaaggacttcttcggcatcaaccccatcagcagcttcaagctgctgagccagcagtgcagctacatgggcggctgcttcctggagaagattgagcgggccatcacccaggagctgcccggcctgctgggcagcctgggcctgggcaagaaccctggggccctgaactgtgacaagacaggctgcagcgagacccccaagaaccgctacaggaagcactag

SEQ ID NO: 168842 - DNA, 1164 bp, synthetic construct
  misc_feature 1..1164: note = Description of Artificial Sequence: Synthetic coding sequence
  source 1..1164: mol_type = other DNA
atggccgagaccctcttctggacccccctgctggtggtgctgctggccggcctgggggacacagaggcccagcagaccaccctgcaccccctggtgggccgggtgtttgtgcacaccctggaccacgagaccttcctgagcctgcctgagcacgtggccgtgcccccagctgtgcacatcacctaccacgcccacctgcagggccacccagacctgccccgctggctgcgctacacccagaggagcccccaccaccctggcttcctgtatggcagcgccaccccagaggaccggggcctgcaggtgattgaggtgacagcctacaacagagacagctttgacaccacccggcagaggctggtgctggagatcggggaccctgagggccccctgctgccctaccaggccgagttcctggtgcgcagccatgatgctgaggaggtgctgcccagcaccccagccagccgcttcctgagcgccctgggcggcctgtgggagcctggagagctgcagctgctgaatgtgaccagcgccctggaccggggcggccgggtgcccctgcccatcgagggcaggaaggagggcgtgtacatcaaggtgggcagcgccagccccttcagcacctgcctgaagatggtggccagcccagacagccacgcccgctgtgcccagggccagccccccctgctgagctgctatgacaccctggccccccacttccgggtggactggtgcaatgtgaccctggtggacaagtctgtgcctgagccagcagatgaggtgcccaccccaggagatggcatcctggagcatgaccccttcttctgccccccaacagaggccccagaccgggacttcctggtggatgccctggtgaccctgctggtgcccctgctggtggccctgctgctgaccctgctgctggcctacgtgatgtgctgcagaagagagggccgcctgaagagggacctggccaccagtgacatccagatggtgcaccactgcaccatccacggcaacacagaggagctgcggcagatggccgccagccgggaggtgccccggcccctgagcaccctgcccatgttcaacgtgcacactggagagcggctgcccccccgggtggacagcgcccaggtgcccctcatcctggaccagcactag

SEQ ID NO: 168843 - DNA, 792 bp, synthetic construct
  misc_feature 1..792: note = Description of Artificial Sequence: Synthetic coding sequence
  source 1..792: mol_type = other DNA
atggccgagaccctcttctggacccccctgctggtggtgctgctggccggcctgggggacacagaggcccagcagaccaccctgcaccccctggtgggccgggtgtttgtgcacaccctggaccacgagaccttcctgagcctgcctgagcacgtggccgtgcccccagctgtgcacatcacctaccacgcccacctgcagggccacccagacctgccccgctggctgcgctacacccagaggagcccccaccaccctggcttcctgtatggcagcgccaccccagaggaccggggcctgcaggtgattgaggtgacagcctacaacagagacagctttgacaccacccggcagaggctggtgctggagatcggggaccctgagggccccctgctgccctaccaggccgagttcctggtgcgcagccatgatgctgaggaggtgctgcccagcaccccagccagccgcttcctgagcgccctgggcggcctgtgggagcctggagagctgcagctgctgaatgtgaccagcgccctggaccggggcggccgggtgcccctgcccatcgagggcaggaaggagggcctgaagagggacctggccaccagtgacatccagatggtgcaccactgcaccatccacggcaacacagaggagctgcggcagatggccgccagccgggaggtgccccggcccctgagcaccctgcccatgttcaacgtgcacactggagagcggctgcccccccgggtggacagcgcccaggtgcccctcatcctggaccagcactag

SEQ ID NO: 168844 - DNA, 537 bp, synthetic construct
  misc_feature 1..537: note = Description of Artificial Sequence: Synthetic coding sequence
  source 1..537: mol_type = other DNA
atgtctgtgacagcctacaacagagacagctttgacaccacccggcagaggctggtgctggagatcggggaccctgagggccccctgctgccctaccaggccgagttcctggtgcgcagccatgatgctgaggaggtgctgcccagcaccccagccagccgcttcctgagcgccctgggcggcctgtgggagcctggagagctgcagctgctgaatgtgaccagcgccctggaccggggcggccgggtgcccctgcccatcgagggcaggaaggagggcgtgtacatcaaggtgggcagcgccagccccttcagcacctgcctgaagatggtggccagcccagacagccacgcccgctgtgcccagggccagccccccctgctgagctgctatgacaccctggccccccacttccgggtggactggtgcaatgtgaccctggtgagaagagaccccggcagcggcggcggcgtgggccacggcccccaccccagcccccccagcctgccctgctgcttcctgagccccagcctgtag

SEQ ID NO: 168845 - DNA, 792 bp, synthetic construct
  misc_feature 1..792: note = Description of Artificial Sequence: Synthetic coding sequence
  source 1..792: mol_type = other DNA
atggccgagaccctcttctggacccccctgctggtggtgctgctggccggcctgggggacacagaggcccagcagaccaccctgcaccccctggtgggccgggtgtttgtgcacaccctggaccacgagaccttcctgagcctgcctgagcacgtggccgtgcccccagctgtgcacatcacctaccacgcccacctgcagggccacccagacctgccccgctggctgcgctacacccagaggagcccccaccaccctggcttcctgtatggcagcgccaccccagaggaccggggcctgcaggtgattgaggtgacagcctacaacagagacagctttgacaccacccggcagaggctggtgctggagatcggggaccctgagggccccctgctgccctaccaggccgagttcctggtgcgcagccatgatgctgaggaggtgctgcccagcaccccagccagccgcttcctgagcgccctgggcggcctgtgggagcctggagagctgcagctgctgaatgtgaccagcgccctggaccggggcggccgggtgcccctgcccatcgagggcaggaaggaggtgctgctgcggcacctgggcacccccctcatccagatggtgcaccactgcaccatccacggcaacacagaggagctgcggcagatggccgccagccgggaggtgccccggcccctgagcaccctgcccatgttcaacgtgcacactggagagcggctgcccccccgggtggacagcgcccaggtgcccctcatcctggaccagcactag

SEQ ID NO: 168846 - DNA, 957 bp, synthetic construct
  misc_feature 1..957: note = Description of Artificial Sequence: Synthetic coding sequence
  source 1..957: mol_type = other DNA
atggctgctgctgctgctgctgctgctgagcagcagagcagcaatggacctgtgaagaagtccatgagggagaaggctgtggagaggagatctgtgaacaaggagcacaacagcaacttcaaggccggctacatccccattgatgaagatcggctgcacaagacaggcctgcggggcaggaaaggaaacctggccatctgtgtgatcatcctgctcttcatcctggccgtcatcaacctgatcatcaccctggtgatctgggccgtcatccgcatcggccccaacggctgtgacagcatggagttccatgaaagtggcctgctgcgcttcaagcaggtgtctgacatgggcgtcatccaccccctgtacaagagcacagtgggcggcagaagaaatgaaaacctggtgatcaccggcaacaaccagcccatcgtgttccagcagggcaccaccaagctgtctgtggagaacaacaagaccagcatcaccagtgacatcggcatgcagttctttgaccccaggacccagaacatcctcttcagcacagattatgagacccatgagttccacctgcccagcggcgtgaagagcctgaatgtgcagaaggccagcacagagcgcatcaccagcaatgccaccagtgacctgaacatcaaggtggatggccgggccatcgtgagaggaaatgaaggagtcttcatcatgggcaagaccatcgagttccacatgggcggcaacatggagctgaaggccgagaacagcatcatcctgaatggatctgtgatggtgtccaccacccggctgcccagcagcagcagcggggaccagctgggcagcggggactgggtgcgctacaagctgtgcatgtgtgctgatggcaccctcttcaaggtgcaggtgaccagccagaacatgggctgccagatcagtgacaacccctgtggcaacacccactag

SEQ ID NO: 168847 - DNA, 747 bp, synthetic construct
  misc_feature 1..747: note = Description of Artificial Sequence: Synthetic coding sequence
  source 1..747: mol_type = other DNA
atggctgctgctgctgctgctgctgctgagcagatcaccctggtgatctgggccgtcatccgcatcggccccaacggctgtgacagcatggagttccatgaaagtggcctgctgcgcttcaagcaggtgtctgacatgggcgtcatccaccccctgtacaagagcacagtgggcggcagaagaaatgaaaacctggtgatcaccggcaacaaccagcccatcgtgttccagcagggcaccaccaagctgtctgtggagaacaacaagaccagcatcaccagtgacatcggcatgcagttctttgaccccaggacccagaacatcctcttcagcacagattatgagacccatgagttccacctgcccagcggcgtgaagagcctgaatgtgcagaaggccagcacagagcgcatcaccagcaatgccaccagtgacctgaacatcaaggtggatggccgggccatcgtgagaggaaatgaaggagtcttcatcatgggcaagaccatcgagttccacatgggcggcaacatggagctgaaggccgagaacagcatcatcctgaatggatctgtgatggtgtccaccacccggctgcccagcagcagcagcggggaccagctgggcagcggggactgggtgcgctacaagctgtgcatgtgtgctgatggcaccctcttcaaggtgcaggtgaccagccagaacatgggctgccagatcagtgacaacccctgtggcaacacccactag

SEQ ID NO: 168848 - DNA, 873 bp, synthetic construct
  misc_feature 1..873: note = Description of Artificial Sequence: Synthetic coding sequence
  source 1..873: mol_type = other DNA
atgatgccccaggagcagtacacccaccacaggagcaccatgcctggctctgtgggcccccaggtgtacaaggtgggcatctacggctggaggaagcgctgcctgtacttctttgtgctgctgctgatgatcctgatcctggtgaacctggccatgaccatctggatcctgaaggtgatgaacttcaccattgatggcatgggcaacctgcgcatcacagagaagggcctgaagctggagggggacagcgagttcctgcagcccctgtatgccaaggagatccagagcaggcctggaaatgccctgtacttcaagagcgccagaaatgtgacagtgaacatcctgaatgaccagaccaaggtgctgacccagctgatcaccggccccaaggctgtggaggcctacggcaagaagtttgaggtgaagacagtgtctgggaagctgctcttctctgctgacaacaatgaggtggtggtgggcgctgagcggctgcgggtgctgggcgctgagggcaccgtcttccccaagagcattgagacccccaacgtgcgggctgaccccttcaaggagctgcggctggagagccccaccaggagcctggtgatggaggcccccaagggcgtggagatcaatgctgaggccggcaacatggaggccacctgcaggacagagctgcggctggagagcaaggatggagagatcaagctggatgctgccaagatccggctgccccggctgccccacggcagctacacccccaccggcacccggcagaaggtgtttgagatctgtgtgtgtgccaacggccgcctcttcctgagccaggccggggccggcagcacctgccagatcaacacctctgtgtgcctgtag

SEQ ID NO: 168849 - DNA, 870 bp, synthetic construct
  misc_feature 1..870: note = Description of Artificial Sequence: Synthetic coding sequence
  source 1..870: mol_type = other DNA
atgccccaggagcagtacacccaccacaggagcaccatgcctggctctgtgggcccccaggtgtacaaggtgggcatctacggctggaggaagcgctgcctgtacttctttgtgctgctgctgatgatcctgatcctggtgaacctggccatgaccatctggatcctgaaggtgatgaacttcaccattgatggcatgggcaacctgcgcatcacagagaagggcctgaagctggagggggacagcgagttcctgcagcccctgtatgccaaggagatccagagcaggcctggaaatgccctgtacttcaagagcgccagaaatgtgacagtgaacatcctgaatgaccagaccaaggtgctgacccagctgatcaccggccccaaggctgtggaggcctacggcaagaagtttgaggtgaagacagtgtctgggaagctgctcttctctgctgacaacaatgaggtggtggtgggcgctgagcggctgcgggtgctgggcgctgagggcaccgtcttccccaagagcattgagaccccaaatgtgcgggctgaccccttcaaggagctgcggctggagagccccaccaggagcctggtgatggaggcccccaagggcgtggagatcaatgctgaggccggcaacatggaggccacctgcaggacagagctgcggctggagagcaaggatggagagatcaagctggatgctgccaagatccggctgccccggctgccccacggcagctacacccccaccggcacccggcagaaggtgtttgagatctgtgtgtgtgccaacggccgcctcttcctgagccaggccggggccggcagcacctgccagatcaacacctctgtgtgcctgtag

SEQ ID NO: 168850 - DNA, 771 bp, synthetic construct
  misc_feature 1..771: note = Description of Artificial Sequence: Synthetic coding sequence
  source 1..771: mol_type = other DNA
atgatgccccaggagcagtacacccaccacaggagcaccatgcctggctctgtgggcccccaggtgtacaaggtgggcatctacggctggaggaagcgctgcctgtacttctttgtgctgctgctgatgatcctgatcctggtgaacctggccatgaccatctggatcctgaaggtgatgaacttcaccattgatggcatgggcaacctgcgcatcacagagaagggcctgaagctggagggggacagcgagttcctgcagcccctgtatgccaaggagatccagagcaggcctggaaatgccctgtacttcaagagcgccagaaatgtgacagtgaacatcctgaatgaccagaccaaggtgctgacccagctgatcaccggccccaaggctgtggaggcctacggcaagaagtttgaggtgaagacagtgtctgggaagctgctcttctctgctgacaacaatgaggtggtggtgggcgctgagcggctgcgggtgctgggcgctgagggcaccgtcttccccaagagcattgagacccccaacgtgcgggctgaccccttcaaggagctgcggctggagagccccaccaggagcctggtgatggaggcccccaagggcgtggagatcaatgctgaggccggcaacatggaggccacctgcaggacagagctgcggctggagagcaaggatggagaggtgagagatgagaaggacaggagcagcaagagctacagcttcaaccggcccaccctgcccatcactggatag

SEQ ID NO: 168851 - DNA, 771 bp, synthetic construct; identical to SEQ ID NO: 168850
  misc_feature 1..771: note = Description of Artificial Sequence: Synthetic coding sequence
  source 1..771: mol_type = other DNA

SEQ ID NO: 168852 - DNA, 1314 bp, synthetic construct
  misc_feature 1..1314: note = Description of Artificial Sequence: Synthetic coding sequence
  source 1..1314: mol_type = other DNA
atgcagctgccccgctggtgggagctgggggacccctgtgcctggacaggccagggccggggcaccaggaggatgagccctgccaccaccggcaccttcctgctgactgtgtacagcatcttcagcaaggtgcacagcgacagaaatgtgtaccccagcgctggggtgctgtttgtgcacgtgctggagcgggagtacttcaagggggagttccccccctaccccaagccaggagagatcagcaatgaccccatcaccttcaacaccaacctgatgggctacccagaccggcccggctggctgcgctacatccagaggaccccctacagtgatggagtgctgtatggcagccccacagcagaaaatgtgggcaagcccaccatcatcgagatcacagcctacaacagaaggacctttgaaacagcccggcacaacctgatcatcaacatcatgtctgctgaggacttccccctgccctaccaggccgagttcttcatcaagaacatgaatgtggaggagatgctggccagcgaggtgctgggggacttcctgggcgctgtgaagaatgtgtggcagcctgagcggctgaatgccatcaacatcaccagcgccctggaccggggcggccgggtgcccctgcccatcaatgacctgaaggagggcgtgtatgtgatggtgggcgcagatgtgcccttcagcagctgcctgcgggaggtggagaacccccagaaccagctgcgctgcagccaggagatggagcccgtcatcacctgtgacaagaagttccgcacccagttctacatcgactggtgcaagatcagcctggtggacaagaccaagcaggtgtccacctaccaggaggtgatccggggggagggcatcctgcctgatggaggagagtacaagcccccaagtgacagcctgaagagccgggactactacacagacttcctgatcaccctggccgtgcccagcgctgtggccctggtgctcttcctgatcctggcctacatcatgtgctgccggcgggagggcgtggagaagaggaacatgcagaccccagacatccagctggtgcaccacagcgccatccagaagagcaccaaggagctgcgggacatgagcaagaaccgggagatcgcctggcccctgagcaccctgcccgtcttccaccctgtgactggagagatcatcccccccctgcacacagacaactatgacagcaccaacatgcccctgatgcagacccagcagaacctgccccaccagacccagatcccccagcagcagaccaccgggaagtggtacccctag

SEQ ID NO: 168853 - DNA, 1416 bp, synthetic construct
  misc_feature 1..1416: note = Description of Artificial Sequence: Synthetic coding sequence
  source 1..1416: mol_type = other DNA
atgcagctgccccgctggtgggagctgggggacccctgtgcctggacaggccagggccggggcaccaggaggatgagccctgccaccaccggcaccttcctgctgacagccttcctgctgagctgtgctgatggcatcaatggaacagtgaactggaagacccggcaggccaacaacttcatcatcagcaggaagatggccgccggcatgaaggatgtgtacagcatcttcagcaaggtgcacagcgacagaaatgtgtaccccagcgctggggtgctgtttgtgcacgtgctggagcgggagtacttcaagggggagttccccccctaccccaagccaggagagatcagcaatgaccccatcaccttcaacaccaacctgatgggctacccagaccggcccggctggctgcgctacatccagaggaccccctacagtgatggagtgctgtatggcagccccacagcagaaaatgtgggcaagcccaccatcatcgagatcacagcctacaacagaaggacctttgaaacagcccggcacaacctgatcatcaacatcatgtctgctgaggacttccccctgccctaccaggccgagttcttcatcaagaacatgaatgtggaggagatgctggccagcgaggtgctgggggacttcctgggcgctgtgaagaatgtgtggcagcctgagcggctgaatgccatcaacatcaccagcgccctggaccggggcggccgggtgcccctgcccatcaatgacctgaaggagggcgtgtatgtgatggtgggcgcagatgtgcccttcagcagctgcctgcgggaggtggagaacccccagaaccagctgcgctgcagccaggagatggagcccgtcatcacctgtgacaagaagttccgcacccagttctacatcgactggtgcaagatcagcctggtggacaagaccaagcaggtgtccacctaccaggaggtgatccggggggagggcatcctgcctgatggaggagagtacaagcccccaagtgacagcctgaagagccgggactactacacagacttcctgatcaccctggccgtgcccagcgctgtggccctggtgctcttcctgatcctggcctacatcatgtgctgccggcgggagggcgtggagaagaggaacatgcagaccccagacatccagctggtgcaccacagcgccatccagaagagcaccaaggagctgcgggacatgagcaagaaccgggagatcgcctggcccctgagcaccctgcccgtcttccaccctgtgactggagagatcatcccccccctgcacacagacaactatgacagcaccaacatgcccctgatgcagacccagcagaacctgccccaccagacccagatcccccagcagcagaccaccggggagtgctag

SEQ ID NO: 168854 - DNA, 1356 bp, synthetic construct
  misc_feature 1..1356: note = Description of Artificial Sequence: Synthetic coding sequence
  source 1..1356: mol_type = other DNA
atgcagctgccccgctggtgggagctgggggacccctgtgcctggacaggccagggccggggcaccaggaggatgagccctgccaccaccggcaccttcctgctgactgtgtacagcatcttcagcaaggtgcacagcgacagaaatgtgtaccccagcgctggggtgctgtttgtgcacgtgctggagcgggagtacttcaagggggagttccccccctaccccaagccaggagagatcagcaatgaccccatcaccttcaacaccaacctgatgggctacccagaccggcccggctggctgcgctacatccagaggaccccctacagtgatggagtgctgtatggcagccccacagcagaaaatgtgggcaagcccaccatcatcgagatcacagcctacaacagaaggacctttgaaacagcccggcacaacctgatcatcaacatcatgtctgctgaggacttccccctgccctaccaggccgagttcttcatcaagaacatgaatgtggaggagatgctggccagcgaggtgctgggggacttcctgggcgctgtgaagaatgtgtggcagcctgagcggctgaatgccatcaacatcaccagcgccctggaccggggcggccgggtgcccctgcccatcaatgacctgaaggagggcgtgtatgtgatggtgggcgcagatgtgcccttcagcagctgcctgcgggaggtggagaacccccagaaccagctgcgctgcagccaggagatggagcccgtcatcacctgtgacaagaagttccgcacccagttctacatcgactggtgcaagatcagcctggtggacaagaccaagcaggtgtccacctaccaggaggtgatccggggggagggcatcctgcctgatggaggagagtacaagcccccaagtgacagcctgaagagccgggactactacacagacttcctgatcaccctggccgtgcccagcgctgtggccctggtgctcttcctgatcctggcctacatcatgtgctgccggcgggagggcgtcatccagctggtgcaccacagcgccatccagaagagcaccaaggagctgcgggacatgagcaagaaccgggagatcgcctggcccctgagcaccctgcctgtgttccaccctgtgactggagagatcatcccccccctgcacacagacaactatgacagcaccaacatgcccctgatgcagacccagcagaacctgccccaccagacccagatcccccagcagcagaccactggagacttccggctgaccaccttccagagatttgaggtgaatggcatccctgaggagaggaagctgacagaggccatgaacctgtag

SEQ ID NO: 168855 - DNA, 1389 bp, synthetic construct
  misc_feature 1..1389: note = Description of Artificial Sequence: Synthetic coding sequence
  source 1..1389: mol_type = other DNA
atgcagctgccccgctggtgggagctgggggacccctgtgcctggacaggccagggccggggcaccaggaggatgagccctgccaccaccggcaccttcctgctgactgtgtacagcatcttcagcaaggtgcacagcgacagaaatgtgtaccccagcgctggggtgctgtttgtgcacgtgctggagcgggagtacttcaagggggagttccccccctaccccaagccaggagagatcagcaatgaccccatcaccttcaacaccaacctgatgggctacccagaccggcccggctggctgcgctacatccagaggaccccctacagtgatggagtgctgtatggcagccccacagcagaaaatgtgggcaagcccaccatcatcgagatcacagcctacaacagaaggacctttgaaacagcccggcacaacctgatcatcaacatcatgtctgctgaggacttccccctgccctaccaggccgagttcttcatcaagaacatgaatgtggaggagatgctggccagcgaggtgctgggggacttcctgggcgctgtgaagaatgtgtggcagcctgagcggctgaatgccatcaacatcaccagcgccctggaccggggcggccgggtgcccctgcccatcaatgacctgaaggagggcgtgtatgtgatggtgggcgcagatgtgcccttcagcagctgcctgcgggaggtggagaacccccagaaccagctgcgctgcagccaggagatggagcccgtcatcacctgtgacaagaagttccgcacccagttctacatcgactggtgcaagatcagcctggtggacaagaccaagcaggtgtccacctaccaggaggtgatccggggggagggcatcctgcctgatggaggagagtacaagcccccaagtgacagcctgaagagccgggactactacacagacttcctgatcaccctggccgtgcccagcgctgtggccctggtgctcttcctgatcctggcctacatcatgtgctgccggcgggagggcgtggagaagaggaacatgcagaccccagacatccagctggtgcaccacagcgccatccagaagagcaccaaggagctgcgggacatgagcaagaaccgggagatcgcctggcccctgagcaccctgcccgtcttccaccctgtgactggagagatcatcccccccctgcacacagacaactatgacagcaccaacatgcccctgatgcagacccagcagtggagctttgcccctgtggcccaggccggcgtgcagtggagcgacctgggcagcctgcagcccccacctccaagaaacctgccccaccagacccagatcccccagcagcagaccaccgggaagtggtacccctag

SEQ ID NO: 168856 - DNA, 2118 bp, synthetic construct
  misc_feature 1..2118: note = Description of Artificial Sequence: Synthetic coding sequence
  source 1..2118: mol_type = other DNA
atgacagacaacagcaacaaccagctggtggtgcgggccaagttcaacttccagcagaccaatgaagatgagctgtccttcagcaaaggagatgtgatccacgtgaccagggtggaggagggcggctggtgggagggcaccctgaatggaagaacaggctggttccccagcaactacgtgcgggaggtgaaggccagcgagaagcctgtgagccccaagagcggcaccctgaagagcccccccaagggctttgacaccacagccatcaacaagagctactacaacgtggtgctgcagaacatcctggagacagaaaatgagtacagcaaggagctgcagacagtgctgagcacctacctgcggcccctgcagaccagcgagaagctgagcagcgccaacatctcctacctgatgggcaacctggaggagatctgcagcttccagcagatgctggtgcagagcctggaggagtgcaccaagctgcctgaggcccagcagagggtgggcggctgcttcctgaacctgatgccccagatgaagaccctgtacctgacctactgtgccaaccaccccagcgctgtgaatgtgctgacagagcacagcgaggagctgggggagttcatggagaccaagggggccagcagccctggcatcctggtgctgaccaccggcctgagcaagcccttcatgaggctggacaagtaccccaccctgctgaaggagctggagcggcacatggaggactaccacacagaccggcaggacatccagaagtccatggccgccttcaagaacctgagcgcccagtgccaggaggtgaggaagaggaaggagctggagctgcagatcctgacagaggccatccggaactgggagggagatgacatcaagaccctgggcaatgtgacctacatgagccaggtgctgatccagtgtgccggcagcgaggagaagaatgaaagatacctgctgctcttccccaacgtgctgctgatgctgagcgccagccccaggatgagcggcttcatctaccagggcaagctgcccaccaccggcatgaccatcaccaagctggaggacagcgagaaccacagaaatgcctttgagatcagcggctccatgattgagcgcatcctggtgtcctgcaacaaccagcaggacctgcaggagtgggtggagcacctgcagaagcagaccaaggtgacctctgtgggcaaccccaccatcaagccccacagcgtgcccagccacaccctgcccagccaccctgtgacccccagcagcaagcatgctgacagcaagccagcccccctgaccccagcctaccacaccctgccccaccccagccaccacggcaccccccacaccaccatcaactggggccccctggagccccccaagacccccaagccctggagcctgagctgcctgcggcctgccccacccctgcggcccagcgctgccctgtgctacaaggaggacctgagcaagagccccaagaccatgaagaagctgctgcccaagaggaagccagagaggaagcccagtgatgaggagtttgccagcaggaagagcacagctgccctggaggaggatgcccagatcctgaaggtgattgaggcctactgcaccagcgccaagacccggcagaccctgaacagcacctggcagggcacagacctgatgcacaaccacgtgctggctgatgatgaccagcccagcctggacagcctgggccgccgcagcagcctgagccggctggagcccagcgacctgtctgaggacagcgactatgacagcatctggacagcccacagctacaggatgggcagcaccagccgcagcaggaaggagagcgccccccaggtgctgctgcctgaggaggagaagatcatcgtggaggagaccaagagcaatggccagaccgtcatcgaggagaagagcctggtggacacagtgtatgccctgaaggatgaggtgcaggagctgcggcaggacaacaagaagatgaagaagagcctggaggaggagcagagggccaggaaggacctggagaagctggtgaggaaggtgctgaagaacatgaatgaccctgcctgggatgagaccaacctgtag

SEQ ID NO: 168857 - DNA, 876 bp, synthetic construct
  misc_feature 1..876: note = Description of Artificial Sequence: Synthetic coding sequence
  source 1..876: mol_type = other DNA
atggtgcgggagcagtacaccacagccacagagggcatctgcatcgagaggcctgagaaccagtatgtgtacaagattggcatctacggctggaggaagcgctgcctgtacctgtttgtgctgctgctgctgatcatcctggtggtgaacctggccctgaccatctggatcctgaaggtgatgtggttctccccagctggcatgggccacctgtgtgtgaccaaggatggcctgcggctggagggggagagcgagttcctgttccccctgtatgccaaggagatccacagccgggtggacagcagcctgctgctgcagagcacccagaatgtgacagtgaatgccaggaacagcgagggggaggtgacaggccgcctgaaggtgggccccaagatggtggaggtgcagaaccagcagttccagatcaacagcaatgatggcaagcccctcttcaccgtggatgagaaggaggtggtggtgggcacagacaagctgcgggtgacaggccctgagggcgccctgtttgagcacagcgtggagacccccctggtgcgggctgaccccttccaggacctgcggctggagagccccaccaggagcctgtccatggatgccccccggggcgtgcacatccaggcccatgctgggaagattgaggccctgagccagatggacatcctcttccacagcagtgatggcatgctggtgctggatgctgagaccgtgtgcctgcccaagctggtgcagggcacctggggccccagcggcagcagccagagcctgtatgagatctgtgtgtgcccagatggcaagctgtacctgtctgtggccggcgtgtccaccacctgccaggagcacaaccacatctgcctgtag

SEQ ID NO: 168858 - DNA, 876 bp, synthetic construct; identical to SEQ ID NO: 168857
  misc_feature 1..876: note = Description of Artificial Sequence: Synthetic coding sequence
  source 1..876: mol_type = other DNA

SEQ ID NO: 168859 - DNA, 96 bp, synthetic construct
  misc_feature 1..96: note = Description of Artificial Sequence: Synthetic coding sequence
  source 1..96: mol_type = other DNA
atgggcatcaacacccgggagctgttcctgaacttcaccatcgtgctgatcaccgtcatcctgatgtggctgctggtgcgcagctaccagtactag

SEQ ID NO: 168860 - DNA, 96 bp, synthetic construct; identical to SEQ ID NO: 168859
  misc_feature 1..96: note = Description of Artificial Sequence: Synthetic coding sequence
  source 1..96: mol_type = other DNA

SEQ ID NO: 168861 - DNA, 96 bp, synthetic construct; identical to SEQ ID NO: 168859
  misc_feature 1..96: note = Description of Artificial Sequence: Synthetic coding sequence
  source 1..96: mol_type = other DNA

SEQ ID NO: 168862 - DNA, 732 bp, synthetic construct
  misc_feature 1..732: note = Description of Artificial Sequence: Synthetic coding sequence
  source 1..732: mol_type = other DNA
atgggcaagaacaagcagccccggggccagcagaggcagggcggccccccagctgctgatgctgctggcccagatgacatggagcccaagaagggcactggagcccccaaggaatgtggggaggaggagcccaggacctgctgcggctgccgcttccccctgctgctggccctgctgcagctggccctgggcattgctgtgacagtggtgggcttcctgatggccagcatcagcagcagcctgctggtgcgggacacccccttctgggccggcatcatcgtgtgcctggtggcctacctgggcctcttcatgctgtgtgtgtcctaccaggtggatgagaggacctgcatccagttctccatgaagctgctgtacttcctgctgagcgccctgggcctgactgtgtgtgtgctggccgtggcctttgctgcccaccactacagccagctgacccagttcacctgtgagaccaccctggacagctgccagtgcaagctgcccagcagcgagcccctgagcaggacctttgtgtacagagatgtgacagactgcacctctgtgacaggcaccttcaagctgttcctgctgatccagatgatcctgaacctggtgtgtggcctggtgtgcctgctggcctgctttgtgatgtggaagcaccgctaccaggtgttctacgtgggcgtgcgcatctgcagcctgacagccagcgagggcccccagcagaagatctag

SEQ ID NO: 168863 - DNA, 423 bp, synthetic construct
  misc_feature 1..423: note = Description of Artificial Sequence: Synthetic coding sequence
  source 1..423: mol_type = other DNA
atgctgtgtgtgtcctaccaggtggatgagaggacctgcatccagttctccatgaagctgctgtacttcctgctgagcgccctgggcctgactgtgtgtgtgctggccgtggcctttgctgcccaccactacagccagctgacccagttcacctgtgagaccaccctggacagctgccagtgcaagctgcccagcagcgagcccctgagcaggacctttgtgtacagagatgtgacagactgcacctctgtgacaggcaccttcaagctgttcctgctgatccagatgatcctgaacctggtgtgtggcctggtgtgcctgctggcctgctttgtgatgtggaagcaccgctaccaggtgttctacgtgggcgtgcgcatctgcagcctgacagccagcgagggcccccagcagaagatctag

SEQ ID NO: 168864 - DNA, 654 bp, synthetic construct
  misc_feature 1..654: note = Description of Artificial Sequence: Synthetic coding sequence
  source 1..654: mol_type = other DNA
atggagcccaagaagggcactggagcccccaaggaatgtggggaggaggagcccaggacctgctgcggctgccgcttccccctgctgctggccctgctgcagctggccctgggcattgctgtgacagtggtgggcttcctgatggccagcatcagcagcagcctgctggtgcgggacacccccttctgggccggcatcatcgtgtgcctggtggcctacctgggcctcttcatgctgtgtgtgtcctaccaggtggatgagaggacctgcatccagttctccatgaagctgctgtacttcctgctgagcgccctgggcctgactgtgtgtgtgctggccgtggcctttgctgcccaccactacagccagctgacccagttcacctgtgagaccaccctggacagctgccagtgcaagctgcccagcagcgagcccctgagcaggacctttgtgtacagagatgtgacagactgcacctctgtgacaggcaccttcaagctgttcctgctgatccagatgatcctgaacctggtgtgtggcctggtgtgcctgctggcctgctttgtgatgtggaagcaccgctaccaggtgttctacgtgggcgtgcgcatctgcagcctgacagccagcgagggcccccagcagaagatctag

SEQ ID NO: 168865 - DNA, 387 bp, synthetic construct
  misc_feature 1..387: note = Description of Artificial Sequence: Synthetic coding sequence
  source 1..387: mol_type = other DNA
atgggcaagaacaagcagccccggggccagcagaggcagggcggccccccagctgctgatgctgctggcccagatgacatggagcccaagaagggcactggagcccccaaggaatgtggggaggaggagcccaggacctgctgcggctgccgcttccccctgctgctggccctgctgcagctggccctgggcattgctgtgacagtggtgggcttcctgatggccagcatcagcagcagcctgctggtgcgggacacccccttctgggccggcatcatcgtgtgcctggtggcctacctgggcctcttcatgctgtgtgtgtcctaccaggtggatgagaggacctgcatccagttctccatgaagatccactgccacgacttctag

SEQ ID NO: 168866 - DNA, 363 bp, synthetic construct
  misc_feature 1..363: note = Description of Artificial Sequence: Synthetic coding sequence
  source 1..363: mol_type = other DNA
atgctgtgtgtgtcctaccaggtggatgagaggacctgcatccagttctccatgaagctgctgtacttcctgctgagcgccctgggcctgactgtgtgtgtgctggccgtggcctttgctgcccaccactacagccagctgacccagttcacctgtgagaccaccctggacagctgccagtgcaagctgcccagcagcgagcccctgagcaggacctttgtgtacagagatgtgacagactgcacctctgtgacaggcaccttcaagctgttcctgctgatccagatgatcctgaacctggtgtgtggcctggtgtgcctgctggcctgctttgtgatgtggaagcaccgctaccaggtgtag

SEQ ID NO: 168867 - DNA, 423 bp, synthetic construct; identical to SEQ ID NO: 168863
  misc_feature 1..423: note = Description of Artificial Sequence: Synthetic coding sequence
  source 1..423: mol_type = other DNA

SEQ ID NO: 168868 - DNA, 2292 bp, synthetic construct
  misc_feature 1..2292: note = Description of Artificial Sequence: Synthetic coding sequence
  source 1..2292: mol_type = other DNA
atggaccacctgaatgaggccacccagggcaaggagcacagcgagatgagcaacaacgtgtctgaccccaagggccccccagccaagatcgcccggctggagcagaatggcagccccctgggccggggccgcctgggcagcactggagccaagatgcagggcgtgcccctgaagcacagcggccacctgatgaagaccaacctgaggaagggcaccatgctgcctgtgttctgtgtggtggagcactatgaaaatgccattgaatatgactgcaaggaggagcacgccgagtttgtgctggtgaggaaggacatgctgttcaaccagctgattgagatggccctgctgagcctgggctacagccacagcagcgctgcccaggccaagggcctcatccaggtgggcaagtggaaccctgtgcccctgtcctatgtgacagatgccccagatgccaccgtggccgacatgctgcaggatgtgtaccacgtggtgaccctgaagatccagctgcacagctgccccaagctggaggacctgcccccagagcagtggagccacaccaccgtgagaaatgccctgaaggacctgctgaaggacatgaaccagagcagcctggccaaggagtgccccctgagccagagcatgatcagcagcatcgtgaacagcacctactatgccaacgtgtctgctgccaagtgccaggagtttggccgctggtacaagcacttcaagaagaccaaggacatgatggtggagatggacagcctgtctgagctgagccagcagggcgccaaccacgtgaactttggccagcagcctgtgcccggcaacacagctgagcagccccccagccctgcccagctgagccacggcagccagcccagcgtgaggacccccctgcccaacctgcaccctggcctggtgtccacccccatcagcccccagctggtgaaccagcagctggtgatggcccagctgctgaaccagcagtatgctgtgaaccggctgctggcccagcagagcctgaaccagcagtacctgaaccaccccccacctgtgagccgctccatgaacaagcccctggagcagcaggtgtccaccaacacagaggtgtcctctgagatctaccagtgggtgagagatgagctgaagagagctggcatcagccaggccgtgtttgcccgggtggccttcaacagaacccagggcctgctgtctgagatcctgaggaaggaggaggaccccaagacagccagccagagcctgctggtgaacctgcgggccatgcagaacttcctgcagctgcctgaggccgagcgggaccgcatctaccaggatgagcgggagaggagcctgaatgctgccagcgccatgggccctgcccccctcatcagcaccccacccagcaggcctccccaggtgaagacagccaccatcgccacagaaagaaatggcaagccagagaacaacaccatgaacatcaatgccagcatctatgatgagatccagcaggagatgaagagggccaaggtgtcccaggccctgtttgccaaggtggccgccaccaagagccagggctggctgtgtgagctgctgcgctggaaggaggaccccagcccagaaaatagaaccctgtgggagaacctgtccatgatccgccgcttcctgagcctgccccagcctgagagagatgccatctatgagcaggagagcaatgctgtgcaccaccacggggacaggcctccccacatcatccacgtgcctgctgagcagatccagcagcagcagcagcagcagcagcagcagcagcagcagcagcaggcccctcctccaccccagccccagcagcagccccagacaggcccccggctgcccccccggcagcccaccgtggccagccctgctgagagtgatgaggagaaccggcagaagacccggcccaggaccaagatctctgtggaggccctgggcatcctgcagagcttcatccaggatgtgggcctgtacccagatgaggaggccatccagaccctgagcgcccagctggacctgcccaagtacaccatcatcaagttcttccagaaccagcgctactacctgaagcaccacggcaagctgaaggacaacagcggcctggaggtggatgtggccgagtacaaggaggaggagctgctgaaggacctggaggagagcgtgcaggacaagaacaccaacaccctcttctctgtgaagctggaggaggagctgtctgtggagggcaacacagacatcaacacagacctgaaggactag

SEQ ID NO: 168869 - DNA, 351 bp, synthetic construct
  misc_feature 1..351: note = Description of Artificial Sequence: Synthetic coding sequence
  source 1..351: mol_type = other DNA
atggaccacctgaatgaggccacccagggcaaggagcacagcgagatgagcaacaacgtgtctgaccccaagggccccccagccaagatcgcccggctggagcagaatggcagccccctgggccggggccgcctgggcagcactggagccaagatgcagggcgtgcccctgaagcacagcggccacctgatgaagaccaacctgaggaagggcaccatgctgcctgtgttctgtgtggtggagcactatgaaaatgccattgaatatgactgcaaggaggagcacgccgagtttgtgctggtgaggaaggacatgctgttcaaccagctgattgagatggccctgctgtag

SEQ ID NO: 168870 - DNA, 675 bp, synthetic construct
  misc_feature 1..675: note = Description of Artificial Sequence: Synthetic coding sequence
  source 1..675: mol_type = other DNA
atggaccacctgaatgaggccacccagggcaaggagcacagcgagatgagcaacaacgtgtctgaccccaagggccccccagccaagatcgcccggctggagcagaatggcagccccctgggccggggccgcctgggcagcactggagccaagatgcagggcgtgcccctgaagcacagcggccacctgatgaagaccaacctgaggaagggcaccatgctgcctgtgttctgtgtggtggagcactatgaaaatgccattgaatatgactgcaaggaggagcacgccgagtttgtgctggtgaggaaggacatgctgttcaaccagctgattgagatggccctgctgagcctgggctacagccacagcagcgctgcccaggccaagggcctcatccaggtgggcaagtggaaccctgtgcccctgtcctatgtgacagatgccccagatgccaccgtggccgacatgctgcaggatgtgtaccacgtggtgaccctgaagatccagctgcacagctgccccaagctggaggacctgcccccagagcagtggagccacaccaccgtgagaaatgccctgaaggacctgctgaaggacatgaaccagagcagcctggccaaggagtgccccctgagccagagcatgatcagcagcatcgtgaacagcacctactag

SEQ ID NO: 168871 - DNA, 216 bp, synthetic construct
  misc_feature 1..216: note = Description of Artificial Sequence: Synthetic coding sequence
  source 1..216: mol_type = other DNA
atggaccacctgaatgaggccacccagggcaaggagcacagcgagatgagcaacaacgtgtctgaccccaagggccccccagccaagatcgcccggctggagcagaatggcagccccctgggccggggccgcctgggcagcactggagccaagatgcagggcgtgcccctgaagcacagcggccacctgatgaagaccaacctgaggaagggctag

SEQ ID NO: 168872 - DNA, 27 bp, synthetic construct
  misc_feature 1..27: note = Description of Artificial Sequence: Synthetic coding sequence
  source 1..27: mol_type = other DNA
atggaccacctgaatgaggccacctag

SEQ ID NO: 168873 - DNA, 519 bp, synthetic construct
  misc_feature 1..519: note = Description of Artificial Sequence: Synthetic coding sequence
  source 1..519: mol_type = other DNA
atggaccacctgaatgaggccacccagggcaaggagcacagcgagatgagcaacaacgtgtctgaccccaagggccccccagccaagatcgcccggctggagcagaatggcagccccctgggccggggccgcctgggcagcactggagccaagatgcagggcgtgcccctgaagcacagcggccacctgatgaagaccaacctgaggaagggcaccatgctgcctgtgttctgtgtggtggagcactatgaaaatgccattgaatatgactgcaaggaggagcacgccgagtttgtgctggtgaggaaggacatgctgttcaaccagctgattgagatggccctgctgagcctgggctacagccacagcagcgctgcccaggccaagggcctcatccaggtgggcaagtggaaccctgtgcccctgtcctatgtgacagatgccccagatgccaccgtggccgacatgctgcaggatgtgtaccacgtggtgaccctgaagatccagctgcacaggtag

SEQ ID NO: 168874 - DNA, 2292 bp, synthetic construct; identical to SEQ ID NO: 168868
  misc_feature 1..2292: note = Description of Artificial Sequence: Synthetic coding sequence
  source 1..2292: mol_type = other DNA

SEQ ID NO: 168875 - DNA, 393 bp, synthetic construct
  misc_feature 1..393: note = Description of Artificial Sequence: Synthetic coding sequence
  source 1..393: mol_type = other DNA
atggaccacctgaatgaggccacccagggcaaggagcacagcgagatgagcaacaacgtgtctgaccccaagggccccccagccaagatcgcccggctggagcagaatggcagccccctgggccggggccgcctgggcagcactggagccaagatgcagggcgtgcccctgaagcacagcggccacctgatgaagaccaacctgaggaagggcaccatgctgcctgtgttctgtgtggtggagcactatgaaaatgccattgaatatgactgcaaggaggagcacgccgagtttgtgctggtgaggaaggacatgctgttcaaccagctgattgagatggccctgctgagcctgggctacagccacagcagcgctgcccaggccaagggctag

SEQ ID NO: 168876 - DNA, 2388 bp, synthetic construct
  misc_feature 1..2388: note = Description of Artificial Sequence: Synthetic coding sequence
  source 1..2388: mol_type = other DNA
atggaccacctgaatgaggccacccagggcaaggagcacagcgagatgagcaacaacgtgtctgaccccaagggccccccagccaagatcgcccggctggagcagaatggcagccccctgggccggggccgcctgggcagcactggagccaagatgcagggcgtgcccctgaagcacagcggccacctgatgaagaccaacctgaggaagggcaccatgctgcctgtgttctgtgtggtggagcactatgaaaatgccattgaatatgactgcaaggaggagcacgccgagtttgtgctggtgaggaaggacatgctgttcaaccagctgattgagatggccctgctgagcctgggctacagccacagcagcgctgcccaggccaagggcctcatccaggtgggcaagtggaaccctgtgcccctgtcctatgtgacagatgccccagatgccaccgtggccgacatgctgcaggatgtgtaccacgtggtgaccctgaagatccagctgcacagctgccccaagctggaggacctgcccccagagcagtggagccacaccaccgtgagaaatgccctgaaggacctgctgaaggacatgaaccagagcagcctggccaaggagtgccccctgagccagagcatgatcagcagcatcgtgaacagcacctactatgccaacgtgtctgctgccaagtgccaggagtttggccgctggtacaagcacttcaagaagaccaaggacatgatggtggagatggacagcctgtctgagctgagccagcagggcgccaaccacgtgaactttggccagcagcctgtgcccggcaacacagctgagcagccccccagccctgcccagctgagccacggcagccagcccagcgtgaggacccccctgcccaacctgcaccctggcctggtgtccacccccatcagcccccagctggtgaaccagcagctggtgatggcccagctgctgaaccagcagtatgctgtgaaccggctgctggcccagcagagcctgaaccagcagtacctgaaccaccccccacctgtgagccgctccatgaacaagcccctggagcagcaggtgtccaccaacacagaggtgtcctctgagatctaccagtgggtgagagatgagctgaagagagctggcatcagccaggccgtgtttgcccgggtggccttcaacagaacccagggcctgctgtctgagatcctgaggaaggaggaggaccccaagacagccagccagagcctgctggtgaacctgcgggccatgcagaacttcctgcagctgcctgaggccgagcgggaccgcatctaccaggatgagcgggagaggagcctgaatgctgccagcgccatgggccctgcccccctcatcagcaccccacccagcaggcctccccaggtgaagacagccaccatcgccacagaaagaaatggcaagccagagaacaacaccatgaacatcaatgccagcatctatgatgagatccagcaggagatgaagagggccaaggtgtcccaggccctgtttgccaaggtggccgccaccaagagccagggctggctgtgtgagctgctgcgctggaaggaggaccccagcccagaaaatagaaccctgtgggagaacctgtccatgatccgccgcttcctgagcctgccccagcctgagagagatgccatctatgagcaggagagcaatgctgtgcaccaccacggggacaggcctccccacatcatccacgtgcctgctgagcagatccagagccccagccccaccaccctgggcaagggggagagcagaggagtcttcctgcccggcctgcccaccccagccccctggctgggcgccgccccccagcagcagcagcagcagcagcagcagcagcagcagcagcagcaggcccctcctccaccccagccccagcagcagccccagacaggcccccggctgcccccccggcagcccaccgtggccagccctgctgagagtgatgaggagaaccggcagaagacccggcccaggaccaagatctctgtggaggccctgggcatcctgcagagcttcatccaggatgtgggcctgtacccagatgaggaggccatccagaccctgagcgcccagctggacctgcccaagtacaccatcatcaagttcttccagaaccagcgctactacctgaagcaccacggcaagctgaaggacaacagcggcctggaggtggatgtggccgagtacaaggaggaggagctgctgaaggacctggaggagagcgtgcaggacaagaacaccaacaccctcttctctgtgaagctggaggaggagctgtctgtggagggcaacacagacatcaacacagacctgaaggactag

SEQ ID NO: 168877 - DNA, 2202 bp, synthetic construct
  misc_feature 1..2202: note = Description of Artificial Sequence: Synthetic coding sequence
  source 1..2202: mol_type = other DNA
atggagaggagaagtgagagcccctgcctgcgggacagcccagaccggcgcagcggcagcccagatgtgaagggccccccacctgtgaaggtggcccggctggagcagaatggcagccccatgggcgcccggggccggcccaacggggctgtggccaaggctgtgggcggcctgatgatccctgtgttctgtgtggtggagcagctggatggcagcctggagtatgacaaccgggaggagcacgccgagtttgtgctggtgaggaaggatgtgctcttcagccagctggtggagacagccctgctggccctgggctacagccacagcagcgctgcccaggcccagggcatcatcaagctgggccgctggaaccccctgcccctgtcctatgtgacagatgccccagatgccaccgtggccgacatgctgcaggatgtgtaccacgtggtgaccctgaagatccagctgcagagctgcagcaagctggaggacctgcctgctgagcagtggaaccacgccaccgtgagaaatgccctgaaggagctgctgaaggagatgaaccagagcaccctggccaaggagtgccccctgagccagagcatgatcagcagcatcgtgaacagcacctactatgccaacgtgtctgccaccaagtgccaggagtttggccgctggtacaagaagtacaagaagatcaaggtggagcgggtggagcgggagaacctgagtgactactgtgtgctgggccagaggcccatgcacctgcccaacatgaaccagctggccagcctgggcaagaccaatgagcagagcccccacagccagatccaccacagcacccccatccggaaccaggtgcctgccctgcagcccatcatgagccctggcctgctgagcccccagctgagcccccagctggtgcggcagcagatcgccatggcccacctgatcaaccagcagattgctgtgtcccggctgctggcccaccagcacccccaggccatcaaccagcagttcctgaaccacccccccatccccagggctgtgaagccagagcccaccaacagctctgtggaggtgtccccagacatctaccagcaggtgagagatgagctgaagagggcctctgtgtcccaggccgtgtttgcccgggtggccttcaacagaacccagggcctgctgtctgagatcctgaggaaggaggaggaccccaggacagccagccagagcctgctggtgaacctgcgggccatgcagaacttcctgaacctgcctgaggtggagcgggaccgcatctaccaggatgagcgggagaggtccatgaaccccaacgtgtccatggtgagcagcgccagcagcagccccagcagcagcaggaccccccaggccaagaccagcacccccaccacagacctgcccatcaaggtggatggagccaacatcaacatcacagctgccatctatgatgagatccagcaggagatgaagagggccaaggtgtcccaggccctgtttgccaaggtggccgccaacaagagccagggctggctgtgtgagctgctgcgctggaaggagaaccccagccctgagaacagaaccctgtgggagaacctgtgcaccatccgccgcttcctgaacctgccccagcacgagagagatgtgatctatgaggaggagagccgccaccaccacagcgagaggatgcagcacgtggtgcagctgcccccagagcctgtgcaggtgctgcaccggcagcagagccagcctgccaaggagagcagccccccccgggaggaggcccctcctcctcctccacccacagaggacagctgtgccaagaagcccaggagcaggaccaagatcagcctggaggccctgggcatcctgcagagcttcatccatgatgtgggcctgtacccagaccaggaggccatccacaccctgagcgcccagctggacctgcccaagcacaccatcatcaagttcttccagaaccagcgctaccacgtgaagcaccacggcaagctgaaggagcacctgggcagcgctgtggatgtggccgagtacaaggatgaggagctgctgacagagagcgaggagaatgattctgaggagggcagcgaggagatgtacaaggtggaggccgaggaggagaatgctgacaagagcaaggccgccccagctgagattgaccagaggtag

SEQ ID NO: 168878 - DNA, 2202 bp, synthetic construct; identical to SEQ ID NO: 168877
  misc_feature 1..2202: note = Description of Artificial Sequence: Synthetic coding sequence
  source 1..2202: mol_type = other DNA

SEQ ID NO: 168879 - DNA, 1848 bp, synthetic construct
  misc_feature 1..1848: note = Description of Artificial Sequence: Synthetic coding sequence
  source 1..1848: mol_type = other DNA
atggagaggagaagtgagagcccctgcctgcgggacagcccagaccggcgcagcggcagcccagatgtgaagggccccccacctgtgaaggtggcccggctggagcagaatggcagccccatgggcgcccggggccggcccaacggggctgtggccaaggctgtgggcggcctgatgatccctgtgttctgtgtggtggagcagctggatggcagcctggagtatgacaaccgggaggagcacgccgagtttgtgctggtgaggaaggatgtgctcttcagccagctggtggagacagccctgctggccctgggctacagccacagcagcgctgcccaggcccaggtggagcgggtggagcgggagaacctgagtgactactgtgtgctgggccagaggcccatgcacctgcccaacatgaaccagctggccagcctgggcaagaccaatgagcagagcccccacagccagatccaccacagcacccccatccggaaccaggtgcctgccctgcagcccatcatgagccctggcctgctgagcccccagctgagcccccagctggtgcggcagcagatcgccatggcccacctgatcaaccagcagattgctgtgtcccggctgctggcccaccagcacccccaggccatcaaccagcagttcctgaaccacccccccatccccagggctgtgaagccagagcccaccaacagctctgtggaggtgtccccagacatctaccagcaggtgagagatgagctgaagagggcctctgtgtcccaggccgtgtttgcccgggtggccttcaacagaacccagggcctgctgtctgagatcctgaggaaggaggaggaccccaggacagccagccagagcctgctggtgaacctgcgggccatgcagaacttcctgaacctgcctgaggtggagcgggaccgcatctaccaggatgagcgggagaggtccatgaaccccaacgtgtccatggtgagcagcgccagcagcagccccagcagcagcaggaccccccaggccaagaccagcacccccaccacagacctgcccatcaaggtggatggagccaacatcaacatcacagctgccatctatgatgagatccagcaggagatgaagagggccaaggtgtcccaggccctgtttgccaaggtggccgccaacaagagccagggctggctgtgtgagctgctgcgctggaaggagaaccccagccctgagaacagaaccctgtgggagaacctgtgcaccatccgccgcttcctgaacctgccccagcacgagagagatgtgatctatgaggaggagagccgccaccaccacagcgagaggatgcagcacgtggtgcagctgcccccagagcctgtgcaggtgctgcaccggcagcagagccagcctgccaaggagagcagccccccccgggaggaggcccctcctcctcctccacccacagaggacagctgtgccaagaagcccaggagcaggaccaagatcagcctggaggccctgggcatcctgcagagcttcatccatgatgtgggcctgtacccagaccaggaggccatccacaccctgagcgcccagctggacctgcccaagcacaccatcatcaagttcttccagaaccagcgctaccacgtgaagcaccacggcaagctgaaggagcacctgggcagcgctgtggatgtggccgagtacaaggatgaggagctgctgacagagagcgaggagaatgattctgaggagggcagcgaggagatgtacaaggtggaggccgaggaggagaatgctgacaagagcaaggccgccccagctgagattgaccagaggtag

SEQ ID NO: 168880 - DNA, 2202 bp, synthetic construct; identical to SEQ ID NO: 168877
  misc_feature 1..2202: note = Description of Artificial Sequence: Synthetic coding sequence
  source 1..2202: mol_type = other DNA

SEQ ID NO: 168881 - DNA, 2748 bp, synthetic construct
  misc_feature 1..2748: note = Description of Artificial Sequence: Synthetic coding sequence
  source 1..2748: mol_type = other DNA
atggccgagaccctgagcggcctgggggacagcggggccgccggggctgctgccctgagcagcgccagcagcgagaccggcacccggcggctgagtgacctgcgggtgattgacctgcgggcagagctgaggaagagaaatgtggacagcagcggcaacaagtctgtgctgatggagcggctgaagaaggccattgaagatgaaggaggcaacccagatgaaattgagatcaccagcgagggcaacaagaagaccagcaagaggagcagcaaaggaaggaagccagaggaggagggcgtggaggacaatggcctggaggagaacagcggagatggccaggaggatgtggagaccagcctggagaacctgcaggacatcgacatcatggacatctctgtgctggatgaagctgagattgacaatggatctgtggccgactgtgtggaggatgatgatgctgacaacctgcaggagagcctgagtgacagccgggagctggtggagggggagatgaaggagctgcctgagcagctgcaggagcacgccatcgaggacaaggagaccatcaacaacctggacaccagcagcagtgacttcaccatcctgcaggagattgaggagcccagcctggagccagaaaatgagaagatcctggacatcctgggggagacctgcaagtctgagcctgtgaaggaggagagcagcgagctggagcagccctttgcccaggacaccagctctgtgggccctgacaggaagctggccgaggaggaggacctgtttgattctgcccaccctgaggagggggacctggacctggccagcgagagcacagcccacgcccagagcagcaaggctgacagcctgctggccgtggtgaagcgggagcctgctgagcagcctggagatggagagaggacagactgtgagcctgtgggcctggagcctgctgtggagcagagcagcgctgccagcgagctggccgaggccagcagcgaggagctggccgaggcccccacagaggcccccagccctgaggcccgggacagcaaggaggatggcaggaagtttgattttgatgcctgcaatgaggtgcccccagcccccaaggagagcagcaccagcgagggcgctgaccagaagatgagcagcccagaagatgacagcgacaccaagaggctgagcaaggaggagaagggccgcagcagctgtggcaggaacttctgggtgtctggcctgagcagcaccacccgggccacagacctgaagaacctcttcagcaaatatggcaaggtggtgggcgccaaggtggtgaccaatgcccggagccctggggcccgctgctacggctttgtgaccatgagcacagctgaggaggccaccaagtgcatcaaccacctgcacaagacagagctgcacggcaagatgatctctgtggagaaggccaagaatgaacctgtgggcaagaagaccagtgacaagagggacagtgatggcaagaaggagaagagcagcaacagcgacaggagcaccaacctgaagagagatgacaagtgtgacaggaaggatgatgccaagaagggagatgatggcagcggggagaagagcaaggaccaggatgaccagaagccaggccccagcgagaggagccgggccaccaagagcggcagccggggcacagagaggacagtggtgatggacaagagcaagggcgtgcctgtgatctctgtgaagaccagcggcagcaaggagcgggccagcaagagccaggacaggaagagcgccagccgggagaagaggtctgtggtgtcctttgacaaggtgaaggagcccaggaagagccgggacagcgagagccacagccgggtgcgggagaggtctgagcgggagcagaggatgcaggcccagtgggagcgggaggagcgggagcggctggagatcgcccgggagcggctggccttccagaggcagaggctggagcgggagaggatggagcgggagcggctggagcgggagaggatgcacgtggagcacgagaggagaagagagcaggagcgcatccaccgggagcgggaggagctgcggcggcagcaggagctgcgctatgagcaggagcggcggcctgctgtgagaagaccctatgacctggacagaagagatgatgcctactggccagaggccaagagagctgccctggatgagcgctaccacagcgacttcaaccggcaggaccgcttccatgactttgaccaccgggaccggggccgctacccagaccacagcgtggaccggcgggagggcagccgctccatgatgggagagcgggagggccagcactacccagagcggcacggcggccctgagcggcacggccgggacagcagagatggctggggcggctacggcagtgacaagaggatgtctgagggccggggcctgcccccaccaccccggcgggactggggagaccacggccggcgggaggatgaccgctcctggcagggcacagcagatggcggcatgatggaccgggaccacaagcgctggcagggcggggagaggtccatgagcggccacagcggccctggccacatgatgaacagaggaggcatgagcggccggggcagctttgcccctggaggagccagccggggccaccccatcccccacggcggcatgcagggcggctttggaggccagagccggggcagccggcccagtgatgcccgcttcacccggcgctactag

SEQ ID NO: 168882 - DNA, 2244 bp, synthetic construct
  misc_feature 1..2244: note = Description of Artificial Sequence: Synthetic coding sequence
  source 1..2244: mol_type = other DNA
atgaaggagctgcctgagcagctgcaggagcacgccatcgaggacaaggagaccatcaacaacctggacaccagcagcagtgacttcaccatcctgcaggagattgaggagcccagcctggagccagaaaatgagaagatcctggacatcctgggggagacctgcaagtctgagcctgtgaaggaggagagcagcgagctggagcagccctttgcccaggacaccagctctgtgggccctgacaggaagctggccgaggaggaggacctgtttgattctgcccaccctgaggagggggacctggacctggccagcgagagcacagcccacgcccagagcagcaaggctgacagcctgctggccgtggtgaagcgggagcctgctgagcagcctggagatggagagaggacagactgtgagcctgtgggcctggagcctgctgtggagcagagcagcgctgccagcgagctggccgaggccagcagcgaggagctggccgaggcccccacagaggcccccagccctgaggcccgggacagcaaggaggatggcaggaagtttgattttgatgcctgcaatgaggtgcccccagcccccaaggagagcagcaccagcgagggcgctgaccagaagatgagcagcccagaagatgacagcgacaccaagaggctgagcaaggaggagaagggccgcagcagctgtggcaggaacttctgggtgtctggcctgagcagcaccacccgggccacagacctgaagaacctcttcagcaaatatggcaaggtggtgggcgccaaggtggtgaccaatgcccggagccctggggcccgctgctacggctttgtgaccatgagcacagctgaggaggccaccaagtgcatcaaccacctgcacaagacagagctgcacggcaagatgatctctgtggagaaggccaagaatgaacctgtgggcaagaagaccagtgacaagagggacagtgatggcaagaaggagaagagcagcaacagcgacaggagcaccaacctgaagagagatgacaagtgtgacaggaaggatgatgccaagaagggagatgatggcagcggggagaagagcaaggaccaggatgaccagaagccaggccccagcgagaggagccgggccaccaagagcggcagccggggcacagagaggacagtggtgatggacaagagcaagggcgtgcctgtgatctctgtgaagaccagcggcagcaaggagcgggccagcaagagccaggacaggaagagcgccagccgggagaagaggtctgtggtgtcctttgacaaggtgaaggagcccaggaagagccgggacagcgagagccacagccgggtgcgggagaggtctgagcgggagcagaggatgcaggcccagtgggagcgggaggagcgggagcggctggagatcgcccgggagcggctggccttccagaggcagaggctggagcgggagaggatggagcgggagcggctggagcgggagaggatgcacgtggagcacgagaggagaagagagcaggagcgcatccaccgggagcgggaggagctgcggcggcagcaggagctgcgctatgagcaggagcggcggcctgctgtgagaagaccctatgacctggacagaagagatgatgcctactggccagaggccaagagagctgccctggatgagcgctaccacagcgacttcaaccggcaggaccgcttccatgactttgaccaccgggaccggggccgctacccagaccacagcgtggaccggcgggagggcagccgctccatgatgggagagcgggagggccagcactacccagagcggcacggcggccctgagcggcacggccgggacagcagagatggctggggcggctacggcagtgacaagaggatgtctgagggccggggcctgcccccaccaccccggggccggcgggactggggagaccacggccggcgggaggatgaccgctcctggcagggcacagcagatggcggcatgatggaccgggaccacaagcgctggcagggcggggagaggtccatgagcggccacagcggccctggccacatgatgaacagaggaggcatgagcggccggggcagctttgcccctggaggagccagccggggccaccccatcccccacggcggcatgcagggcggctttggaggccagagccggggcagccggcccagtgatgcccgcttcacccggcgctactag

SEQ ID NO: 168883 - DNA, 2547 bp, synthetic construct
  misc_feature 1..2547: note = Description of Artificial Sequence: Synthetic coding sequence
  source 1..2547: mol_type = other DNA
atggccgagaccctgagcggcctgggggacagcggggccgccggggctgctgccctgagcagcgccagcagcgagaccggcacccggcggctgagtgacctgcgggtgattgacctgcgggcagagctgaggaagagaaatgtggacagcagcggcaacaagtctgtgctgatggagcggctgaagaaggccattgaagatgaaggaggcaacccagatgaaattgagatcaccagcgagggcaacaagaagaccagcaagaggagcagcaaaggaaggaagccagaggaggagggcgtggaggacaatggcctggaggagaacagcggagatggccagatcgaggacaaggagaccatcaacaacctggacaccagcagcagtgacttcaccatcctgcaggagattgaggagcccagcctggagccagaaaatgagaagatcctggacatcctgggggagacctgcaagtctgagcctgtgaaggaggagagcagcgagctggagcagccctttgcccaggacaccagctctgtgggccctgacaggaagctggccgaggaggaggacctgtttgacagcgcccaccctgaggagggggacctggacctggccagcgagagcacagcccacgcccagagcagcaaggctgacagcctgctggccgtggtgaagcgggagcctgctgagcagcctggagatggagagaggacagactgtgagcctgtgggcctggagcctgctgtggagcagagcagcgctgccagcgagctggccgaggccagcagcgaggagctggccgaggcccccacagaggcccccagccctgaggcccgggacagcaaagaagatggcaggaagtttgattttgatgcctgcaatgaggtgcccccagcccccaaggagagcagcaccagcgagggcgctgaccagaagatgagcagcccagaagatgacagcgacaccaagaggctgagcaaggaggagaagggccgcagcagctgtggcaggaacttctgggtgtctggcctgagcagcaccacccgggccacagacctgaagaacctcttcagcaaatatggcaaggtggtgggcgccaaggtggtgaccaatgcccggagccctggggcccgctgctacggctttgtgaccatgagcacagctgaggaggccaccaagtgcatcaaccacctgcacaagacagagctgcacggcaagatgatctctgtggagaaggccaagaatgaacctgtgggcaagaagaccagtgacaagagggacagtgatggcaagaaggagaagagcagcaacagcgacaggagcaccaacctgaagagagatgacaagtgtgacaggaaggatgatgccaagaagggagatgatggcagcggggagaagagcaaggaccaggatgaccagaagccaggccccagcgagaggagccgggccaccaagagcggcagccggggcacagagaggacagtggtgatggacaagagcaaaggagtgcctgtgatctctgtgaagaccagcggcagcaaggagcgggccagcaagagccaggacaggaagagcgccagccgggagaagaggtctgtggtgtcctttgacaaggtgaaggagcccaggaagagccgggacagcgagagccacagccgggtgcgggagaggtctgagcgggagcagaggatgcaggcccagtgggagcgggaggagcgggagcggctggagatcgcccgggagcggctggccttccagaggcagaggctggagcgggagaggatggagcgggagcggctggagcgggagaggatgcacgtggagcatgaaagaagaagagagcaggagcgcatccaccgggagcgggaggagctgcggcggcagcaggagctgcgctatgagcaggagaggaggcctgctgtgcggcggccctatgacctggacagaagagatgatgcctactggccagaggccaagagagctgccctggatgagcgctaccacagcgacttcaaccggcaggaccgcttccatgactttgaccaccgggaccggggccgctacccagaccacagcgtggacagaagagagggcagccgctccatgatgggagagcgggagggccagcactacccagagagacatggaggccctgagagacatggccgggacagcagagatggctggggcggctacggcagtgacaagaggatgtctgagggccggggcctgcccccaccaccccggggcagaagagactggggagaccatggaagaagagaagatgaccgctcctggcagggcacagcagatggcggcatgatggaccgggaccacaagcgctggcagggcggggagaggtccatgagcggccacagcggccctggccacatgatgaacagaggaggcatgagcggccggggcagctttgcccctgggggcgccagccggggccaccccatcccccatggaggcatgcagggcggctttggaggccagagccggggcagccggcccagtgatgcccgcttcacccggcgctactag

SEQ ID NO: 168884 - DNA, 2280 bp, synthetic construct
  misc_feature 1..2280: note = Description of Artificial Sequence: Synthetic coding sequence
  source 1..2280: mol_type = other DNA
atgaaggtggtgatcctgaccaagctgaagctgcccccccgggagaccaggaagcaccagaggggcctggccaagattgaggacaaggagaccatcaacaacctggacaccagcagcagtgacttcaccatcctgcaggagattgaggagcccagcctggagccagaaaatgagaagatcctggacatcctgggggagacctgcaagtctgagcctgtgaaggaggagagcagcgagctggagcagccctttgcccaggacaccagctctgtgggccctgacaggaagctggccgaggaggaggacctgtttgacagcgcccaccctgaggagggggacctggacctggccagcgagagcacagcccacgcccagagcagcaaggctgacagcctgctggccgtggtgaagcgggagcctgctgagcagcctggagatggagagaggacagactgtgagcctgtgggcctggagcctgctgtggagcagagcagcgctgccagcgagctggccgaggccagcagcgaggagctggccgaggcccccacagaggcccccagccctgaggcccgggacagcaaagaagatggcaggaagtttgattttgatgcctgcaatgaggtgcccccagcccccaaggagagcagcaccagcgagggcgctgaccagaagatgagcagcccagaagatgacagcgacaccaagaggctgagcaaggaggagaagggccgcagcagctgtggcaggaacttctgggtgtctggcctgagcagcaccacccgggccacagacctgaagaacctcttcagcaaatatggcaaggtggtgggcgccaaggtggtgaccaatgcccggagccctggggcccgctgctacggctttgtgaccatgagcacagctgaggaggccaccaagtgcatcaaccacctgcacaagacagagctgcacggcaagatgatctctgtggagaaggccaagaatgaacctgtgggcaagaagaccagtgacaagagggacagtgatggcaagaaggagaagagcagcaacagcgacaggagcaccaacctgaagagagatgacaagtgtgacaggaaggatgatgccaagaagggagatgatggcagcggggagaagagcaaggaccaggatgaccagaagccaggccccagcgagaggagccgggccaccaagagcggcagccggggcacagagaggacagtggtgatggacaagagcaaaggagtgcctgtgatctctgtgaagaccagcggcagcaaggagcgggccagcaagagccaggacaggaagagcgccagccgggagaagaggtctgtggtgtcctttgacaaggtgaaggagcccaggaagagccgggacagcgagagccaccgggtgcgggagaggtctgagcgggagcagaggatgcaggcccagtgggagcgggaggagcgggagcggctggagatcgcccgggagcggctggccttccagaggcagaggctggagcgggagaggatggagcgggagcggctggagcgggagaggatgcacgtggagcacgagaggagaagagagcaggagcgcatccaccgggagcgggaggagctgcggcggcagcaggagctgcgctatgagcaggagcggcggcctgctgtgagaagaccctatgacctggacagaagagatgatgcctactggccagaggccaagagagctgccctggatgagcgctaccacagcgacttcaaccggcaggaccgcttccatgactttgaccaccgggaccggggccgctacccagaccacagcgtggaccggcgggagggcagccgctccatgatgggagagcgggagggccagcactacccagagcggcacggcggccctgagcggcacggccgggacagcagagatggctggggcggctacggcagtgacaagaggatgtctgagggccggggcctgcccccaccaccccggggccggcgggactggggagaccacggccggcgggaggatgaccgctcctggcagggcacagcagatggcggcatgatggaccgggaccacaagcgctggcagggcggggagaggtccatgagcggccacagcggccctggccacatgatgaacagaggaggcatgagcggccggggcagctttgcccctggaggagccagccggggccaccccatcccccacggcggcatgcagggcggctttggaggccagagccggggcagccggcccagtgatgcccgcttcacccggcgctactag

SEQ ID NO: 168885 - DNA, 2439 bp, synthetic construct
  misc_feature 1..2439: note = Description of Artificial Sequence: Synthetic coding sequence
  source 1..2439: mol_type = other DNA
atggccgagaccctgagcggcctgggggacagcggggccgccggggctgctgccctgagcagcgccagcagcgagaccggcacccggcggctgagtgacctgcgggtgattgacctgcgggcagagctgaggaagagaaatgtggacagcagcggcaacaagtctgtgctgatggagcggctgaagaaggccattgaagatgaaggaggcaacccagatgaaattgagatcaccagcgagggcaacaagaagaccagcaagaggagcagcaaaggaaggaagccagaggaggagggcgtggaggacaatggcctggagccagaaaatgagaagatcctggacatcctgggggagacctgcaagtctgagcctgtgaaggaggagagcagcgagctggagcagccctttgcccaggacaccagctctgtgggccctgacaggaagctggccgaggaggaggacctgtttgacagcgcccaccctgaggagggggacctggacctggccagcgagagcacagcccacgcccagagcagcaaggctgacagcctgctggccgtggtgaagcgggagcctgctgagcagcctggagatggagagaggacagactgtgagcctgtgggcctggagcctgctgtggagcagagcagcgctgccagcgagctggccgaggccagcagcgaggagctggccgaggcccccacagaggcccccagccctgaggcccgggacagcaaagaagatggcaggaagtttgattttgatgcctgcaatgaggtgcccccagcccccaaggagagcagcaccagcgagggcgctgaccagaagatgagcagcccagaagatgacagcgacaccaagaggctgagcaaggaggagaagggccgcagcagctgtggcaggaacttctgggtgtctggcctgagcagcaccacccgggccacagacctgaagaacctcttcagcaaatatggcaaggtggtgggcgccaaggtggtgaccaatgcccggagccctggggcccgctgctacggctttgtgaccatgagcacagctgaggaggccaccaagtgcatcaaccacctgcacaagacagagctgcacggcaagatgatctctgtggagaaggccaagaatgaacctgtgggcaagaagaccagtgacaagagggacagtgatggcaagaaggagaagagcagcaacagcgacaggagcaccaacctgaagagagatgacaagtgtgacaggaaggatgatgccaagaagggagatgatggcagcggggagaagagcaaggaccaggatgaccagaagccaggccccagcgagaggagccgggccaccaagagcggcagccggggcacagagaggacagtggtgatggacaagagcaaaggagtgcctgtgatctctgtgaagaccagcggcagcaaggagcgggccagcaagagccaggacaggaagagcgccagccgggagaagaggtctgtggtgtcctttgacaaggtgaaggagcccaggaagagccgggacagcgagagccacagccgggtgcgggagaggtctgagcgggagcagaggatgcaggcccagtgggagcgggaggagcgggagcggctggagatcgcccgggagcggctggccttccagaggcagaggctggagcgggagaggatggagcgggagcggctggagcgggagaggatgcacgtggagcatgaaagaagaagagagcaggagcgcatccaccgggagcgggaggagctgcggcggcagcaggagctgcgctatgagcaggagaggaggcctgctgtgcggcggccctatgacctggacagaagagatgatgcctactggccagaggccaagagagctgccctggatgagcgctaccacagcgacttcaaccggcaggaccgcttccatgactttgaccaccgggaccggggccgctacccagaccacagcgtggacagaagagagggcagccgctccatgatgggagagcgggagggccagcactacccagagagacatggaggccctgagagacatggccgggacagcagagatggctggggcggctacggcagtgacaagaggatgtctgagggccggggcctgcccccaccaccccggggcagaagagactggggagaccatggaagaagagaagatgaccgctcctggcagggcacagcagatggcggcatgatggaccgggaccacaagcgctggcagggcggggagaggtccatgagcggccacagcggccctggccacatgatgaacagaggaggcatgagcggccggggcagctttgcccctgggggcgccagccggggccaccccatcccccatggaggcatgcagggcggctttggaggccagagccggggcagccggcccagtgatgcccgcttcacccggcgctactag

SEQ ID NO: 168886 - DNA, 2862 bp, synthetic construct
  misc_feature 1..2862: note = Description of Artificial Sequence: Synthetic coding sequence
  source 1..2862: mol_type = other DNA
atggccgagaccctgcccggcagcggggacagcggccctggaacagccagcctgggccctggggtggccgagaccggcacccggcggctgtctgagctgcgggtcatcgacctgcgggcagagctgaagaagaggaacctggacacaggaggcaacaagtctgtgctgatggagcggctgaagaaggctgtgaaggaggagggccaggaccctgatgagatcggcatcgagctggaggccaccagcaagaagagcgccaagagatgtgtgaagggcctgaagatggaggaggagggcacagaagataatggcctggaggatgacagcagagatggccaggaggacatggaggccagcctggagaacctgcagaacatgggcatgatggacatgtctgtgctggatgaaacagaggtggccaacagcagcgccccagactttggagaagatggaacagatggcctgctggacagcttctgtgacagcaaggagtatgtggccgcccagctgcggcagctgcctgcccagcccccagagcacgctgtggatggagagggcttcaagaacaccctggagaccagcagcctgaacttcaaggtgaccccagacatcgaggagagcctgctggagccagaaaatgagaagatcctggacatcctgggggagacctgcaagtctgagcctgtgaaggaggagagcagcgagctggagcagccctttgcccaggacaccagctctgtgggccctgacaggaagctggccgaggaggaggacctgtttgacagcgcccaccctgaggagggggacctggacctggccagcgagagcacagcccacgcccagagcagcaaggctgacagcctgctggccgtggtgaagcgggagcctgctgagcagcctggagatggagagaggacagactgtgagcctgtgggcctggagcctgctgtggagcagagcagcgctgccagcgagctggccgaggccagcagcgaggagctggccgaggcccccacagaggcccccagccctgaggcccgggacagcaaagaagatggcaggaagtttgattttgatgcctgcaatgaggtgcccccagcccccaaggagagcagcaccagcgagggcgctgaccagaagatgagcagcttcaaggaggagaaggacatcaagcccatcatcaaggatgagaagggccgggtgggcagcggcagcggcaggaacctgtgggtgtctggcctgagcagcaccacccgggccacagacctgaagaacctcttcagcaaatatggcaaggtggtgggcgccaaggtggtgaccaatgcccggagccctggggcccgctgctacggctttgtgaccatgagcaccagtgatgaggccaccaagtgcatcagccacctgcacaggacagagctgcacggccgcatgatctctgtggagaaggccaagaatgaacctgctgggaagaagctgagtgacagaaaagaatgtgaggtgaagaaggagaagctgagctctgtggacagacaccacagcgtggagatcaagattgagaagacagtcatcaagaaggaggagaagattgagaagaaggaggagaagaagccagaggacatcaagaaggaggagaaggaccaggatgagctgaagccaggccccaccaacagaagccgggtgaccaagagcggcagccggggcatggagaggacagtggtgatggacaagagcaagggggagcctgtgatctctgtgaagaccaccagccgcagcaaggagaggagcagcaagagccaggacaggaagtctgagagcaaggagaagagggacatcctgagctttgacaagatcaaggagcagcgggagcgggagcggcagaggcagcgggagcgggagatccgggagacagagaggagaagagagcgggagcagcgggagcgggagcagaggctggaggccttccacgagaggaaggagaaggcccggctgcagcgggagcggctgcagctggagtgccagaggcagaggctggagcgggagaggatggagcgggagcggctggagcgggagaggatgagggtggagcgggagaggaggaaggagcaggagcgcatccaccgggagcgggaggagctgcggcggcagcaggagcagctgcgctatgagcaggagaggaggcctggaagaagaccctatgacctggacagaagagatgatgcctactggccagagggcaagagggtggccatggaggaccgctacagagctgacttccccaggccagaccaccgcttccatgactttgaccaccgggaccggggccagtaccaggaccacgccatcgacagaagagagggcagccggcccatgatgggagaccacagagatggccagcactatggagatgacagacatggccatggaggccccccagagcggcacggccgggacagcagagatggctggggcggctacggcagtgacaagaggctgtctgagggccggggcctgcccccaccaccccggggcggccgggactggggcgagcacaaccagaggctggaggagcaccaggcccgggcctggcagggcgccatggatgctggggccgccagccgggagcacgcccgctggcagggcggggagcggggcctgagcggccccagcggccctggccacatggccagccggggcggcgtggccggccggggcggctttgcccagggcggccacagccagggccacgtggtgcctgggggcggcctggagggcggcggcgtggccagccaggaccggggcagccgggtgccccacccccacccccaccccccaccctacccccacttcacccggcgctactag

SEQ ID NO: 168887 - DNA, 1533 bp, synthetic construct
  misc_feature 1..1533: note = Description of Artificial Sequence: Synthetic coding sequence
  source 1..1533: mol_type = other DNA
atggccgagaccctgcccggcagcggggacagcggccctggaacagccagcctgggccctggggtggccgagaccggcacccggcggctgtctgagctgcgggtcatcgacctgcgggcagagctgaagaagaggaacctggacacaggaggcaacaagtctgtgctgatggagcggctgaagaaggctgtgaaggaggagggccaggaccctgatgagatcggcatcgagctggaggccaccagcaagaagagcgccaagagatgtgtgaagggcctgaagatggaggaggagggcacagaagataatggcctggaggatgacagcagagatggccaggaggacatggaggccagcctggagaacctgcagaacatgggcatgatggacatgtctgtgctggatgaaacagaggtggccaacagcagcgccccagactttggagaagatggaacagatggcctgctggacagcttctgtgacagcaaggagtatgtggccgcccagctgcggcagctgcctgcccagcccccagagcacgctgtgggcaacctggagacccggcaggatgtgcccaccagcagcagcctgcgggtgtctgtggccgctgtgcctgtgccccacctgtctgtggagaatgagaagatcctggacatcctgggggagacctgcaagtctgagcctgtgaaggaggagagcagcgagctggagcagccctttgcccaggacaccagctctgtgggccctgacaggaagctggccgaggaggaggacctgtttgacagcgcccaccctgaggagggggacctggacctggccagcgagagcacagcccacgcccagagcagcaaggctgacagcctgctggccgtggtgaagcgggagcctgctgagcagcctggagatggagagaggacagactgtgagcctgtgggcctggagcctgctgtggagcagagcagcgctgccagcgagctggccgaggccagcagcgaggagctggccgaggcccccacagaggcccccagccctgaggcccgggacagcaaagaagatggcaggaagtttgattttgatgcctgcaatgaggtgcccccagcccccaaggagagcagcaccagcgagggcgctgaccagaagatgagcagcttcaaggaggagaaggacatcaagcccatcatcaaggatgagaagggccgggtgggcagcggcagcggcaggaacctgtgggtgtctggcctgagcagcaccacccgggccacagacctgaagaacctcttcagcaaatatggcaaggtggtgggcgccaaggtggtgaccaatgcccggagccctggggcccgctgctacggctttgtgaccatgagcaccagtgatgaggccaccaagtgcatcagccacctgcacaggacagagctgcacggccgcatgatctctgtggagaaggccaagaatgaacctgctgggaagaagctgagtgacagaaaagaatgtgaggtgaagaaggagaagctgagctctgtggacagatag

SEQ ID NO: 168888 - DNA, 786 bp, synthetic construct
  misc_feature 1..786: note = Description of Artificial Sequence: Synthetic coding sequence
  source 1..786: mol_type = other DNA
atggccgagaccctgcccggcagcggggacagcggccctggaacagccagcctgggccctggggtggccgagaccggcacccggcggctgtctgagctgcgggtcatcgacctgcgggcagagctgaagaagaggaacctggacacaggaggcaacaagtctgtgctgatggagcggctgaagaaggctgtgaaggaggagggccaggaccctgatgagatcggcatcgagctggaggccaccagcaagaagagcgccaagagatgtgtgaaggcccccagccctgaggcccgggacagcaaggaggatggcaggaagtttgattttgatgcctgcaatgaggtgcccccagcccccaaggagagcagcaccagcgagggcgctgaccagaagatgagcagcttcaaggaggagaaggacatcaagcccatcatcaaggatgagaagggccgggtgggcagcggcagcggcaggaacctgtgggtgtctggcctgagcagcaccacccgggccacagacctgaagaacctcttcagcaaatatggcaaggtggtgggcgccaaggtggtgaccaatgcccggagccctggggcccgctgctacggctttgtgaccatgagcaccagtgatgaggccaccaagtgcatcagccacctgcacaggacagagctgcacggccgcatgatctctgtggagaaggccaagaatgaacctgctgggaagaagctgagtgacagaaaagaatgtgaggtgaagaaggagaagctgagctctgtggacagatag

SEQ ID NO: 168889 - DNA, 1221 bp, synthetic construct
  misc_feature 1..1221: note = Description of Artificial Sequence: Synthetic coding sequence
  source 1..1221: mol_type = other DNA
atggccgagaccctgcccggcagcggggacagcggccctggaacagccagcctgggccctggggtggccgagaccggcacccggcggctgtctgagctgcgggtcatcgacctgcgggcagagctgaagaagaggaacctggacacaggaggcaacaagtctgtgctgatggagcggctgaagaaggctgtgaaggaggagggccaggaccctgatgagatcggcatcgagctggaggccaccagcaagaagagcgccaagagatgtgtgaagggcctgaagatggaggaggagggcacagaagataatggcctggaggtggagaatgagaagatcctggacatcctgggggagacctgcaagtctgagcctgtgaaggaggagagcagcgagctggagcagccctttgcccaggacaccagctctgtgggccctgacaggaagctggccgaggaggaggacctgtttgacagcgcccaccctgaggagggggacctggacctggccagcgagagcacagcccacgcccagagcagcaaggctgacagcctgctggccgtggtgaagcgggagcctgctgagcagcctggagatggagagaggacagactgtgagcctgtgggcctggagcctgctgtggagcagagcagcgctgccagcgagctggccgaggccagcagcgaggagctggccgaggcccccacagaggcccccagccctgaggcccgggacagcaaagaagatggcaggaagtttgattttgatgcctgcaatgaggtgcccccagcccccaaggagagcagcaccagcgagggcgctgaccagaagatgagcagcttcaaggaggagaaggacatcaagcccatcatcaaggatgagaagggccgggtgggcagcggcagcggcaggaacctgtgggtgtctggcctgagcagcaccacccgggccacagacctgaagaacctcttcagcaaatatggcaaggtggtgggcgccaaggtggtgaccaatgcccggagccctggggcccgctgctacggctttgtgaccatgagcaccagtgatgaggccaccaagtgcatcagccacctgcacaggacagagctgcacggccgcatgatctctgtggagaaggccaagaatgaacctgctgggaagaagctgagtgacagaaaagaatgtgaggtgaagaaggagaagctgagctctgtggacagatag

SEQ ID NO: 168890 - DNA, 606 bp, synthetic construct
  misc_feature 1..606: note = Description of Artificial Sequence: Synthetic coding sequence
  source 1..606: mol_type = other DNA
atggccgagaccggcacccggcggctgtctgagctgcgggtgattgacctgcgggcagagctgaagaagaggaacctggacaccggcggcaacaagtctgtgctgatggagcggctgaagaaggctgtgaaggaggagggccaggaccctgatgaaattggaattgagctggaggccaccagcaagaagagcgccaagagatgtgtgaagggcctgaagatggaggaggagggcacagaggacaatggcctggaggatgacagcagagatggccaggaggacatggaggccagcctggagaacctgcagaacatgggcatgatggacatgtctgtgctggatgaaacagaggtggccaacagcagcgccccagactttggagaagatggaacagatggcctgctggacagcttctgtgacagcaaggagtatgtggccgcccagctgcggcagctgcctgcccagcccccagagcacgctgtggatggagagggcttcaagaacaccctggagaccagcagcctgaacttcaaggtgaccccagacatcgaggagagcctgctggagcccggcacagacaagaggaacaccaccgtgatggtgtag

SEQ ID NO: 168891 - DNA, 1821 bp, synthetic construct
  misc_feature 1..1821: note = Description of Artificial Sequence: Synthetic coding sequence
  source 1..1821: mol_type = other DNA
atgaaggtgcgctctgctggaggagatggagatgccctgtgtgtgacagaggaggacctggccggagatgatgaggacatgcccaccttcccctgcacccagaagggccggcccggcccccgctgcagccgctgccagaagaacctgagcctgcacacctctgtgcgcatcctgtacctgttcctggccctgctgctggtggccgtggccgtgctggccagcctggtgttcaggaaggtggacagcctgtctgaggacatcagcctgacccagagcatctatgacaagaagctggtgctgatgcagaagaacctgcagggcctggaccccaaggccctgaacaactgcagcttctgccacgaggccggccagctgggccctgagatcaggaagctgcaggaggagctggagggcatccagaagctgctgctggcccaggaggtgcagctggaccagaccctgcaggcccaggaggtgctgagcaccaccagccggcagatcagccaggagatgggcagctgcagcttcagcatccaccaggtgaaccagagcctgggcctcttcctggcccaggtgcggggctggcaggccaccacagctggcctggacctgagcctgaaggacctgacccaggagtgctatgatgtgaaggctgctgtgcaccagatcaacttcaccgtgggccagaccagcgagtggattcatggcatccagaggaagacagatgaggagaccctgaccctgcagaagatcgtgacagactggcagaactacaccaggctcttcagcggcctgcggaccaccagcaccaagacaggagaggccgtgaagaacatccaggccaccctgggcgccagcagccagaggatcagccagaacagcgagagcatgcatgacctggtgctgcaggtgatgggcctgcagctgcagctggacaacatcagcagcttcctggatgaccacgaggagaacatgcatgacctgcagtaccacacccactacgcccagaacagaacagtggagagatttgagagcctggagggccgcatggccagccatgaaattgaaattggcaccatcttcaccaacatcaatgccacagacaaccacgtgcacagcatgctgaagtacctggatgatgtgcggctgagctgcaccctgggcttccacacccatgctgaggagctgtactacctgaacaagtctgtgtccatcatgctgggcaccacagacctgctgcgggagcgcttcagcctgctgagcgcccggctggacctgaatgtgaggaacctgtccatgattgtggaggagatgaaggctgtggacacccagcacggggagatcctgagaaatgtgaccatcctgcggggggcccctggccccccaggcccccggggcttcaagggggacatgggcgtgaagggccctgtgggcggccggggccccaagggggaccccggcagcctgggccccctgggcccccagggcccccagggccagcctggagaggccggccctgtgggggagcggggccctgtgggcccccggggcttccctggcctgaagggcagcaagggcagctttggcaccggcggcccccggggccagcccggccccaagggggacatcggccccccaggccctgagggccccccaggcagccctggccccagcggcccccagggcaagccaggcattgctgggaagacaggcagccctggccagagaggagccatgggccccaagggggagcccggcatccagggccccccaggcctgcccggccccccaggccccccaggcagccagagcttctactag

SEQ ID NO: 168892 - DNA, 1401 bp, synthetic construct
  misc_feature 1..1401: note = Description of Artificial Sequence: Synthetic coding sequence
  source 1..1401: mol_type = other DNA
atgaaggtgcgctctgctggaggagatggagatgccctgtgtgtgacagaggaggacctggccggagatgatgaggacatgcccaccttcccctgcacccagaagggccggcccggcccccgctgcagccgctgccagaagaacctgagcctgcacacctctgtgcgcatcctgtacctgttcctggccctgctgctggtggccgtggccgtgctggccagcctggtgttcaggaaggtggacagcctgtctgaggacatcagcctgacccagagcatctatgacaagaagctggtgctgatgcagaagaacctgcagggcctggaccccaaggccctgaacaactgcagcttctgccacgaggccggccagctgggccctgagatcaggaagctgcaggaggagctggagggcatccagaagctgctgctggcccaggaggtgcagctggaccagaccctgcaggcccaggaggtgctgagcaccaccagccggcagatcagccaggagatgggcagctgcagcttcagcatccaccaggtgaaccagagcctgggcctcttcctggcccaggtgcggggctggcaggccaccacagctggcctggacctgagcctgaaggacctgacccaggagtgctatgatgtgaaggctgctgtgcaccagatcaacttcaccgtgggccagaccagcgagtggattcatggcatccagaggaagacagatgaggagaccctgaccctgcagaagatcgtgacagactggcagaactacaccaggctcttcagcggcctgcggaccaccagcaccaagacaggagaggccgtgaagaacatccaggccaccctgggcgccagcagccagaggatcagccagaacagcgagagcatgcatgacctggtgctgcaggtgatgggcctgcagctgcagctggacaacatcagcagcttcctggatgaccacgaggagaacatgcatgacctgcagtaccacacccactacgcccagaacagaacagtggagagatttgagagcctggagggccgcatggccagccatgaaattgaaattggcaccatcttcaccaacatcaatgccacagacaaccacgtgcacagcatgctgaagtacctggatgatgtgcggctgagctgcaccctgggcttccacacccatgctgaggagctgtactacctgaacaagtctgtgtccatcatgctgggcaccacagacctgctgcgggagcgcttcagcctgctgagcgcccggctggacctgaatgtgaggaacctgtccatgattgtggaggagatgaaggctgtggacacccagcacggggagatcctgagaaatgtgaccatcctgcggggccacaccctcttcagccacaaccgcatctag

SEQ ID NO: 168893 - DNA, 1008 bp, synthetic construct
  misc_feature 1..1008: note = Description of Artificial Sequence: Synthetic coding sequence
  source 1..1008: mol_type = other DNA
atgggccgctgctgcttctacacagctggcaccctgagcctgctgctgctggtgacctctgtgaccctgctggtggcccgggtcttccagaaggctgtggaccagagcattgagaagaagatcgtgctgagaaatggaacagaggcctttgacagctgggagaagccacccctgcctgtgtacacccagttctacttcttcaacgtgaccaaccctgaggagatcctgcggggggagaccccccgggtggaggaggtgggcccctacacctaccgcagcctggactggtggatcacagacaagtgcaacatgatcaatggaacagatggagacagcttccaccccctcatcaccaaggatgaggtgctgtatgtgttccccagcgacttctgccgctctgtgtacatcaccttcagtgactatgaatctgtgcagggcctgcctgccttccgctacaaggtgcctgctgagatcctggccaacaccagtgacaatgccggcttctgcatccctgagggcaactgcctgggcagcggcgtgctgaatgtgtccatctgcaagaatggagcccccatcatcatgtccttcccccacttctaccaggctgatgaaagatttgtgtctgccatcgagggcatgcaccccaaccaggaggaccacgagacctttgtggacatcaaccccctgaccggcatcatcctgaaggccgccaagcgcttccagatcaacatctacgtgaagaagctggatgactttgtggagactggagacatccgcaccatggtgtttcctgtgatgtacctgaatgaatctgtgcacatcgacaaggagacagccagccggctgaagtccatgatcaacaccaccctcatcatcaccaacatcccctacatcatcatggccctgggcgtcttcttcggcctggtgttcacctggctggcctgcaagggccagggctccatggatgagggcacagcagatgagcgggcccccctcatccgcacctag

SEQ ID NO: 168894 - DNA, 1530 bp, synthetic construct
  misc_feature 1..1530: note = Description of Artificial Sequence: Synthetic coding sequence
  source 1..1530: mol_type = other DNA
atgggctgcagcgccaaggcccgctgggccgccggggccctgggcgtggccggcctgctgtgtgctgtgctgggcgctgtgatgattgtgatggtgcccagcctcatcaagcagcaggtgctgaagaatgtgagaattgaccccagcagcctgtccttcaacatgtggaaggagatccccatccccttctacctgtctgtgtacttctttgatgtgatgaaccccagcgagatcctgaagggggagaagccccaggtgcgggagcggggcccctacgtgtaccgggagttccgccacaagagcaacatcaccttcaacaacaatgacacagtgtccttcctggagtaccgcaccttccagttccagcccagcaagagccacggcagcgagagtgactacatcgtgatgcccaacatcctggtgctgggcgctgctgtgatgatggagaacaagcccatgaccctgaagctgatcatgaccctggccttcaccaccctgggggagcgggccttcatgaacagaacagtgggggagatcatgtggggctacaaggaccccctggtgaacctgatcaacaagtacttccctggcatgttccccttcaaggacaagtttggcctgtttgctgagctgaacaacagcgacagcggcctcttcaccgtcttcaccggggtgcagaacatcagccgcatccacctggtggacaagtggaatggcctgagcaaggtggacttctggcacagcgaccagtgcaacatgatcaatggcaccagcggccagatgtggccacccttcatgaccccagagagcagcctggagttctacagccctgaggcctgccgctccatgaagctgatgtacaaggagagcggcgtgtttgagggcatccccacctacagatttgtggcccccaagaccctgtttgccaacggcagcatctaccccccaaatgaaggcttctgcccctgcctggagagcggcatccagaatgtgtccacctgccgcttcagcgcccccctcttcctgagccacccccacttcctgaatgctgaccctgtgctggccgaggccgtgacaggcctgcaccccaaccaggaggcccacagcctcttcctggacatccaccctgtgacaggcatccccatgaactgcagcgtgaagctgcagctgagcctgtacatgaagtctgtggccggcatcggccagacaggcaagattgagcctgtggtgctgcccctgctgtggtttgctgagagcggggccatggagggggagaccctgcacaccttctacacccagctggtgctgatgcccaaggtgatgcactacgcccagtatgtgctgctggccctgggctgtgtgctgctgctggtgcctgtgatctgccagatccgcagccaggagaagtgctacctgttctggagcagcagcaagaagggcagcaaggacaaggaggccatccaggcctacagcgagagcctgatgaccagcgcccccaagggctctgtgctgcaggaggccaagctgtag

SEQ ID NO: 168895 - DNA, 1521 bp, synthetic construct
  misc_feature 1..1521: note = Description of Artificial Sequence: Synthetic coding sequence
  source 1..1521: mol_type = other DNA
atgggctgcagcgccaaggcccgctgggccgccggggccctgggcgtggccggcctgctgtgtgctgtgctgggcgctgtgatgattgtgatggtgcccagcctcatcaagcagcaggtgctgaagaatgtgagaattgaccccagcagcctgtccttcaacatgtggaaggagatccccatccccttctacctgtctgtgtacttctttgatgtgatgaaccccagcgagatcctgaagggggagaagccccaggtgcgggagcggggcccctacgtgtaccgggagttccgccacaagagcaacatcaccttcaacaacaatgacacagtgtccttcctggagtaccgcaccttccagttccagcccagcaagagccacggcagcgagagtgactacatcgtgatgcccaacatcctggtgctgggcgctgctgtgatgatggagaacaagcccatgaccctgaagctgatcatgaccctggccttcaccaccctgggggagcgggccttcatgaacagaacagtgggggagatcatgtggggctacaaggaccccctggtgaacctgatcaacaagtacttccctggcatgttccccttcaaggacaagtttggcctgtttgctgagctgaacaacagcgacagcggcctcttcaccgtcttcaccggggtgcagaacatcagccgcatccacctggtggacaagtggaatggcctgagcaaggtggacttctggcacagcgaccagtgcaacatgatcaatggcaccagcggccagatgtggccacccttcatgaccccagagagcagcctggagttctacagccctgaggcctgccgctccatgaagctgatgtacaaggagagcggcgtgtttgagggcatccccacctacagatttgtggcccccaagaccctgtttgccaacggcagcatctaccccccaaatgaaggcttctgcccctgcctggagagcggcatccagaatgtgtccacctgccgcttcagcgcccccctcttcctgagccacccccacttcctgaatgctgaccctgtgctggccgaggccgtgacaggcctgcaccccaaccaggaggcccacagcctcttcctggacatccaccctgtgacaggcatccccatgaactgcagcgtgaagctgcagctgagcctgtacatgaagtctgtggccggcatcggccagacaggcaagattgagcctgtggtgctgcccctgctgtggtttgctgagagcggggccatggagggggagaccctgcacaccttctacacccagctggtgctgatgcccaaggtgatgcactacgcccagtatgtgctgctggccctgggctgtgtgctgctgctggtgcctgtgatctgccagatccgcagccagggccctgaggacacagtgtcccagcccggcctggccgccggccctgacaggcctcccagcccctacacccccctgctgcctgacagccccagcggccagccccccagccccacagcctag

SEQ ID NO: 168896 - DNA, 1230 bp, synthetic construct
  misc_feature 1..1230: note = Description of Artificial Sequence: Synthetic coding sequence
  source 1..1230: mol_type = other DNA
atgggctgcagcgccaaggcccgctgggccgccggggccctgggcgtggccggcctgctgtgtgctgtgctgggcgctgtgatgattgtgatggtgcccagcctcatcaagcagcaggtgctgaagggagctgctgtgatgatggagaacaagcccatgaccctgaagctgatcatgaccctggccttcaccaccctgggggagcgggccttcatgaacagaacagtgggggagatcatgtggggctacaaggaccccctggtgaacctgatcaacaagtacttccctggcatgttccccttcaaggacaagtttggcctgtttgctgagctgaacaacagcgacagcggcctcttcaccgtcttcaccggggtgcagaacatcagccgcatccacctggtggacaagtggaatggcctgagcaaggtggacttctggcacagcgaccagtgcaacatgatcaatggcaccagcggccagatgtggccacccttcatgaccccagagagcagcctggagttctacagccctgaggcctgccgctccatgaagctgatgtacaaggagagcggcgtgtttgagggcatccccacctacagatttgtggcccccaagaccctgtttgccaacggcagcatctaccccccaaatgaaggcttctgcccctgcctggagagcggcatccagaatgtgtccacctgccgcttcagcgcccccctcttcctgagccacccccacttcctgaatgctgaccctgtgctggccgaggccgtgacaggcctgcaccccaaccaggaggcccacagcctcttcctggacatccaccctgtgacaggcatccccatgaactgcagcgtgaagctgcagctgagcctgtacatgaagtctgtggccggcatcggccagacaggcaagattgagcctgtggtgctgcccctgctgtggtttgctgagagcggggccatggagggggagaccctgcacaccttctacacccagctggtgctgatgcccaaggtgatgcactacgcccagtatgtgctgctggccctgggctgtgtgctgctgctggtgcctgtgatctgccagatccgcagccaggagaagtgctacctgttctggagcagcagcaagaagggcagcaaggacaaggaggccatccaggcctacagcgagagcctgatgaccagcgcccccaagggctctgtgctgcaggaggccaagctgtag

SEQ ID NO: 168897 - DNA, 1659 bp, synthetic construct
  misc_feature 1..1659: note = Description of Artificial Sequence: Synthetic coding sequence
  source 1..1659: mol_type = other DNA
atgggctgcagcgccaaggcccgctgggccgccggggccctgggcgtggccggcctgctgtgtgctgtgctgggcgctgtgatgattgtgatggtgcccagcctcatcaagcagcaggtgctgaagaatgtgagaattgaccccagcagcctgtccttcaacatgtggaaggagatccccatccccttctacctgtctgtgtacttctttgatgtgatgaaccccagcgagatcctgaagggggagaagccccaggtgcgggagcggggcccctacgtgtaccgggagttccgccacaagagcaacatcaccttcaacaacaatgacacagtgtccttcctggagtaccgcaccttccagttccagcccagcaagagccacggcagcgagagtgactacatcgtgatgcccaacatcctggtgctgggcgctgctgtgatgatggagaacaagcccatgaccctgaagctgatcatgaccctggccttcaccaccctgggggagcgggccttcatgaacagaacagtgggggagatcatgtggggctacaaggaccccctggtgaacctgatcaacaagtacttccctggcatgttccccttcaaggacaagtttggcctgtttgctgagctgaacaacagcgacagcggcctcttcaccgtcttcaccggggtgcagaacatcagccgcatccacctggtggacaagtggaatggcctgagcaaggtggacttctggcacagcgaccagtgcaacatgatcaatggcaccagcggccagatgtggccacccttcatgaccccagagagcagcctggagttctacagccctgaggcctgccgctccatgaagctgatgtacaaggagagcggcgtgtttgagggcatccccacctacagatttgtggcccccaagaccctgtttgccaacggcagcatctaccccccaaatgaaggcttctgcccctgcctggagagcggcatccagaatgtgtccacctgccgcttcagcgcccccctcttcctgagccacccccacttcctgaatgctgaccctgtgctggccgaggccgtgacaggcctgcaccccaaccaggaggcccacagcctcttcctggacatccaccctgtgacaggcatccccatgaactgcagcgtgaagctgcagctgagcctgtacatgaagtctgtggccggcatcggccagacaggcaagattgagcctgtggtgctgcccctgctgtggtttgctgagagcggggccatggagggggagaccctgcacaccttctacacccagctggtgctgatgcccaaggtgatgcactacgcccagtatgtgctgctggccctgggctgtgtgctgctgctggtgcctgtgatctgccagatccgcagccaggtgggcgccggccagagagctgcccgggctgacagccacagcctggcctgctggggcaaaggagccagtgacaggaccctgtggcccacagctgcctggagccccccacctgctgctgtgctgcggctgtgccgcagcggcagcggccactgctggggcctgcggagcaccctggccagctttgcctgccgggtggccaccaccctgcctgtgctggagggcctgggccccagcctgggcggcggcaccggcagctag

SEQ ID NO: 168898 - DNA, 1551 bp, synthetic construct
  misc_feature 1..1551: note = Description of Artificial Sequence: Synthetic coding sequence
  source 1..1551: mol_type = other DNA
atgtgtgctgtgggcaatgtgagaattgaccccagcagcctgtccttcaacatgtggaaggagatccccatccccttctacctgtctgtgtacttctttgatgtgatgaaccccagcgagatcctgaagggggagaagccccaggtgcgggagcggggcccctacgtgtaccgggagttccgccacaagagcaacatcaccttcaacaacaatgacacagtgtccttcctggagtaccgcaccttccagttccagcccagcaagagccacggcagcgagagtgactacatcgtgatgcccaacatcctggtgctgggcgctgctgtgatgatggagaacaagcccatgaccctgaagctgatcatgaccctggccttcaccaccctgggggagcgggccttcatgaacagaacagtgggggagatcatgtggggctacaaggaccccctggtgaacctgatcaacaagtacttccctggcatgttccccttcaaggacaagtttggcctgtttgctgagctgaacaacagcgacagcggcctcttcaccgtcttcaccggggtgcagaacatcagccgcatccacctggtggacaagtggaatggcctgagcaaggtggacttctggcacagcgaccagtgcaacatgatcaatggcaccagcggccagatgtggccacccttcatgaccccagagagcagcctggagttctacagccctgaggcctgccgctccatgaagctgatgtacaaggagagcggcgtgtttgagggcatccccacctacagatttgtggcccccaagaccctgtttgccaacggcagcatctaccccccaaatgaaggcttctgcccctgcctggagagcggcatccagaatgtgtccacctgccgcttcagcgcccccctcttcctgagccacccccacttcctgaatgctgaccctgtgctggccgaggccgtgacaggcctgcaccccaaccaggaggcccacagcctcttcctggacatccaccctgtgacaggcatccccatgaactgcagcgtgaagctgcagctgagcctgtacatgaagtctgtggccggcatcggccagacaggcaagattgagcctgtggtgctgcccctgctgtggtttgctgagagcggggccatggagggggagaccctgcacaccttctacacccagctggtgctgatgcccaaggtgatgcactacgcccagtatgtgctgctggccctgggctgtgtgctgctgctggtgcctgtgatctgccagatccgcagccaggtgggcgccggccagagagctgcccgggctgacagccacagcctggcctgctggggcaagggggccagtgacaggaccctgtggcccacagctgcctggagccccccacctgctgctgtgctgcggctgtgccgcagcggcagcggccactgctggggcctgcggagcaccctggccagctttgcctgccgggtggccaccaccctgcctgtgctggagggcctgggccccagcctgggcggcggcactggaggcctgtag

SEQ ID NO: 168899 - DNA, 1539 bp, synthetic construct
  misc_feature 1..1539: note = Description of Artificial Sequence: Synthetic coding sequence
  source 1..1539: mol_type = other DNA
atgaatgtgagaattgaccccagcagcctgtccttcaacatgtggaaggagatccccatccccttctacctgtctgtgtacttctttgatgtgatgaaccccagcgagatcctgaagggggagaagccccaggtgcgggagcggggcccctacgtgtaccgggagttccgccacaagagcaacatcaccttcaacaacaatgacacagtgtccttcctggagtaccgcaccttccagttccagcccagcaagagccacggcagcgagagtgactacatcgtgatgcccaacatcctggtgctgggcgctgctgtgatgatggagaacaagcccatgaccctgaagctgatcatgaccctggccttcaccaccctgggggagcgggccttcatgaacagaacagtgggggagatcatgtggggctacaaggaccccctggtgaacctgatcaacaagtacttccctggcatgttccccttcaaggacaagtttggcctgtttgctgagctgaacaacagcgacagcggcctcttcaccgtcttcaccggggtgcagaacatcagccgcatccacctggtggacaagtggaatggcctgagcaaggtggacttctggcacagcgaccagtgcaacatgatcaatggcaccagcggccagatgtggccacccttcatgaccccagagagcagcctggagttctacagccctgaggcctgccgctccatgaagctgatgtacaaggagagcggcgtgtttgagggcatccccacctacagatttgtggcccccaagaccctgtttgccaacggcagcatctaccccccaaatgaaggcttctgcccctgcctggagagcggcatccagaatgtgtccacctgccgcttcagcgcccccctcttcctgagccacccccacttcctgaatgctgaccctgtgctggccgaggccgtgacaggcctgcaccccaaccaggaggcccacagcctcttcctggacatccaccctgtgacaggcatccccatgaactgcagcgtgaagctgcagctgagcctgtacatgaagtctgtggccggcatcggccagacaggcaagattgagcctgtggtgctgcccctgctgtggtttgctgagagcggggccatggagggggagaccctgcacaccttctacacccagctggtgctgatgcccaaggtgatgcactacgcccagtatgtgctgctggccctgggctgtgtgctgctgctggtgcctgtgatctgccagatccgcagccaggtgggcgccggccagagagctgcccgggctgacagccacagcctggcctgctggggcaagggggccagtgacaggaccctgtggcccacagctgcctggagccccccacctgctgctgtgctgcggctgtgccgcagcggcagcggccactgctggggcctgcggagcaccctggccagctttgcctgccgggtggccaccaccctgcctgtgctggagggcctgggccccagcctgggcggcggcactggaggcctgtag

SEQ ID NO: 168900 - DNA, 441 bp, synthetic construct
  misc_feature 1..441: note = Description of Artificial Sequence: Synthetic coding sequence
  source 1..441: mol_type = other DNA
atgggctgcagcgccaaggcccgctgggccgccggggccctgggcgtggccggcctgctgtgtgctgtgctgggcgctgtgatgattgtgatggtgcccagcctcatcaagcagcaggtgctgaagaatgtgagaattgaccccagcagcctgtccttcaacatgtggaaggagatccccatccccttctacctgtctgtgtacttctttgatgtgatgaaccccagcgagatcctgaagggggagaagccccaggtgcgggagcggggcccctacgtgtaccgggagttccgccacaagagcaacatcaccttcaacaacaatgacacagtgtccttcctggagtaccgcaccttccagttccagcccagcaagagccacggcagcgagagtgactacatcgtgatgcccaacatcctggtgctggtgcggctgccctag

SEQ ID NO: 168901 - DNA, 1446 bp, synthetic construct
  misc_feature 1..1446: note = Description of Artificial Sequence: Synthetic coding sequence
  source 1..1446: mol_type = other DNA
atgggctgcagcgccaaggcccgctgggccgccggggccctgggcgtggccggcctgctgtgtgctgtgctgggcgctgtgatgattgtgatggtgcccagcctcatcaagcagcaggtgctgaagaatgtgagaattgaccccagcagcctgtccttcaacatgtggaaggagatccccatccccttctacctgtctgtgtacttctttgatgtgatgaaccccagcgagatcctgaagggggagaagccccaggtgcgggagcggggcccctacgtgtaccgggagttccgccacaagagcaacatcaccttcaacaacaatgacacagtgtccttcctggagtaccgcaccttccagttccagcccagcaagagccacggcagcgagagtgactacatcgtgatgcccaacatcctggtgctgggcgctgctgtgatgatggagaacaagcccatgaccctgaagctgatcatgaccctggccttcaccaccctgggggagcgggccttcatgaacagaacagtgggggagatcatgtggggctacaaggaccccctggtgaacctgatcaacaagtacttccctggcatgttccccttcaaggacaagtttggcctgtttgctgagctgaacaacagcgacagcggcctcttcaccgtcttcaccggggtgcagaacatcagccgcatccacctggtggacaagtggaatggcctgagcaaggtggacttctggcacagcgaccagtgcaacatgatcaatggcaccagcggccagatgtggccacccttcatgaccccagagagcagcctggagttctacagccctgaggcctgccgctccatgaagctgatgtacaaggagagcggcgtgtttgagggcatccccacctacagatttgtggcccccaagaccctgtttgccaacggcagcatctaccccccaaatgaaggcttctgcccctgcctggagagcggcatccagaatgtgtccacctgccgcttcagcgcccccctcttcctgagccacccccacttcctgaatgctgaccctgtgctggccgaggccgtgacaggcctgcaccccaaccaggaggcccacagcctcttcctggacatccaccctgtgacaggcatccccatgaactgcagcgtgaagctgcagctgagcctgtacatgaagtctgtggccggcatcggccagacaggcaagattgagcctgtggtgctgcccctgctgtggtttgctgagagcggggccatggagggggagaccctgcacaccttctacacccagctggtgctgatgcccaaggagaagtgctacctgttctggagcagcagcaagaagggcagcaaggacaaggaggccatccaggcctacagcgagagcctgatgaccagcgcccccaagggctctgtgctgcaggaggccaagctgtag

SEQ ID NO: 168902 - DNA, 1437 bp, synthetic construct
  misc_feature 1..1437: note = Description of Artificial Sequence: Synthetic coding sequence
  source 1..1437: mol_type = other DNA
atgggccgctgctgcttctacacagctggcaccctgagcctgctgctgctggtgacctctgtgaccctgctggtggcccgggtcttccagaaggctgtggaccagagcattgagaagaagatcgtgctgagaaatggaacagaggcctttgacagctgggagaagccacccctgcctgtgtacacccagttctacttcttcaacgtgaccaaccctgaggagatcctgcggggggagaccccccgggtggaggaggtgggcccctacacctaccgggagctgaggaacaaggccaacatccagtttggagacaatggcaccaccatctctgctgtgagcaacaaggcctacgtgtttgagcgggaccagagcgtgggggaccccaagattgacctgatccgcaccctgaacatccctgtgctgaccgtcatcgagtggagccaggtgcacttcctgcgggagatcatcgaggccatgctgaaggcctaccagcagaagctgtttgtgacccacacagtggatgagctgctgtggggctacaaggatgagatcctgagcctcatccacgtgttccggccagacatcagcccctacttcggcctcttctatgagaagaatggcaccaatgatggagactatgtgttcctgactggagaagattcctacctgaacttcaccaagatcgtggagtggaatggcaagaccagcctggactggtggatcacagacaagtgcaacatgatcaatggaacagatggagacagcttccaccccctcatcaccaaggatgaggtgctgtatgtgttccccagcgacttctgccgctctgtgtacatcaccttcagtgactatgagagcgtgcagggcctgcctgccttccgctacaaggtgcctgctgagatcctggccaacaccagtgacaatgccggcttctgcatccctgagggcaactgcctgggcagcggcgtgctgaatgtgtccatctgcaagaatggagcccccatcatcatgtccttcccccacttctaccaggctgatgaaagatttgtgtctgccatcgagggcatgcaccccaaccaggaggaccacgagacctttgtggacatcaaccccctgaccggcatcatcctgaaggccgccaagcgcttccagatcaacatctacgtgaagaagctggatgactttgtggagaccggggacatccgcaccatggtgtttcctgtgatgtacctgaatgaatctgtgcacatcgacaaggagacagccagccggctgaagtccatgatcaacaccaccctcatcatcaccaacatcccctacatcatcatggccctgggcgtcttcttcggcctggtgttcacctggctggcctgcaagggccagggctccatggatgagggcacagcagatgagcgggcccccctcatccgcacctag

SEQ ID NO: 168903 - DNA, 1710 bp, synthetic construct
  misc_feature 1..1710: note = Description of Artificial Sequence: Synthetic coding sequence
  source 1..1710: mol_type = other DNA
atgggcctgggcctgctgctgcccctgctgctgctgtggacccggggcacccagggcagcgagctggaccccaagggccagcacgtgtgtgtggccagcagccccagcgctgagctgcagtgctgtgccggctggaggcagaaggaccaggagtgcaccatccccatctgtgagggcccagatgcctgccagaaggatgaggtgtgtgtgaagccaggcctgtgccgctgcaagccaggcttcttcggggcccactgcagcagccgctgccccggccagtactggggccctgactgccgggagagctgcccctgccacccccacggccagtgtgagcccgccactggagcctgccagtgccaggccgaccgctggggcgcccgctgtgagttcccctgtgcctgtggcccccacggccgctgtgaccctgccactggagtgtgccactgtgagcccggctggtggagcagcacctgccggcggccctgccagtgcaacacagctgctgcccgctgtgagcaggccaccggggcctgtgtgtgcaagccaggctggtggggccgccgctgcagcttccgctgcaactgccacggcagcccctgtgagcaggacagcggccgctgtgcctgccggcccggctggtggggccctgagtgccagcagcagtgtgaatgtgtgcggggccgctgcagcgctgccagcggggagtgcacctgccccccaggcttccggggggcccgctgtgagctgccctgcccagctggcagccatggagtgcagtgtgcccacagctgtggccgctgcaagcacaatgagccctgcagcccagacaccggcagctgtgagagctgtgagcccggctggaatggcacccagtgccagcagccctgcctgcccggcaccttcggggagagctgtgagcagcagtgcccccactgcagacatggagaggcctgtgagccagacaccggccactgccagagatgtgaccccggctggctgggcccccgctgtgaggacccctgccccaccggcacctttggagaggactgtggcagcacctgccccacctgtgtgcagggcagctgtgacacagtgactggagactgtgtgtgcagcgctggctactggggccccagctgcaatgccagctgcccagctggcttccacggcaacaactgcagcgtgccctgtgaatgtcctgagggcctgtgccaccctgtgtctggcagctgccagcccggcagcggcagccgggacacagccctgattgctggcagcctggtgcccctgctgctgctcttcctgggcctggcctgctgtgcctgctgctgctgggcccccaggagtgacctgaaggacaggcctgccagagatggagccaccgtgtccaggatgaagctgcaggtgtggggcaccctgaccagcctgggcagcaccctgccctgccgcagcctgagcagccacaagctgccctgggtgacagccagcagcagccggcccctgcctgctggccccctgatgacccccagccaccccatcctgagcctggagcggcagatgaggttcctgcccaccgtgtgccaccccaagaagggctggagcctgtggccccggcagggccggcagaggcctgcctggctgcaggtgctgagccggcccctgcggaccccacccaggcacagccccagccgggcccccccagcctag

SEQ ID NO: 168904 - DNA, 2613 bp, synthetic construct
  misc_feature 1..2613: note = Description of Artificial Sequence: Synthetic coding sequence
  source 1..2613: mol_type = other DNA
atggagggcgccggccccagaggagctggccctgcccggaggagaggagctgggggcccccccagccccctgctgcccagcctgctgctgctgctgctgctgtggatgctgcctgacacagtggccccccaggagctgaacccccggggcagaaatgtgtgccgggcccctggcagccaggtgcccacctgctgtgccggctggaggcagcagggagatgaatgtggcattgctgtgtgtgagggcaacagcacctgcagtgaaaatgaggtgtgtgtgcggcctggagaatgtcgctgccgccacggctactttggagccaactgtgacaccaagtgcccccggcagttctggggccctgactgcaaggagctgtgcagctgccacccccacggccagtgtgaagatgtgacaggccagtgcacctgccacgcccggcgctggggcgcccgctgtgagcacgcctgccagtgccagcacggcacctgccaccccaggtctggggcctgccgctgtgagcccggctggtggggcgcccagtgtgccagcgcctgctactgcagcgccaccagccgctgtgacccccagacaggagcctgcctgtgccacgccggctggtggggccgcagctgcaacaaccagtgtgcctgcaacagcagcccctgtgagcagcagagcggccgctgccagtgccgggagaggaccttcggggcccgctgtgaccgctactgccagtgcttccggggccgctgccaccctgtggatggcacctgtgcctgtgagcccggctaccggggcaagtactgccgggagccctgcccagctggcttctacggcctgggctgcagaagaagatgtggccagtgcaagggccagcagccctgcaccgtggccgagggccgctgcctgacctgtgagcccggctggaatggcaccaagtgtgaccagccctgtgccaccggcttctatggagagggctgcagccaccgctgccccccctgcagagatggccacgcctgcaaccacgtgacaggcaagtgcacccgctgcaatgccggctggattggagacagatgtgagaccaagtgcagcaatggcacctacggggaggactgtgcctttgtgtgtgccgactgtggcagcggccactgtgacttccagagcggccgctgcctgtgcagccctggggtgcacggcccccactgcaatgtgacctgccccccaggcctgcatggagctgactgtgcccaggcctgcagctgccacgaggacacctgtgaccctgtgactggagcctgccacctggagaccaaccagaggaaaggagtgatgggcgctggggccctgctggtgctgctggtgtgcctgctgctgagcctgctgggctgctgctgtgcctgccggggcaaggaccccacccggcggccccggccccggcgggagctgagcctgggcaggaagaaggccccccaccggctgtgtggccgcttcagccgcatctccatgaagctgccccgcatccccctgcggcggcagaagctgcccaaggtggtggtggcccaccacgacctggacaacaccctgaactgcagcttcctggagcccccatctggcctggagcagcccagccccagctggagcagccgggccagcttcagcagctttgacaccacagatgagggccctgtgtactgtgtgccccatgaggaggccccagctgagagccgggaccctgaggtgcccaccgtgcctgctgaggccccagcccccagccctgtgcccctgaccaccccagccagcgctgaggaggccatccccctgcctgccagcagtgacagcgagaggtctgccagctctgtggagggccctggaggagccctgtatgcccgggtggcccggcgggaggcccggcctgcccgggcccggggggagattggaggcctgagcctgagccccagccctgagaggaggaagcccccacctccagaccctgccaccaagcccaaggtgtcctggatccacggcaagcacagcgctgctgctgctggccgggcccccagccccccacctcctggcagcgaggccgcccccagccccagcaagaggaagaggacccccagcgacaagagcgcccacacagtggagcacggcagccccaggacccgggaccccaccccccggcccccaggcctgcctgaggaggccacagccctggccgcccccagccccccccgggcccgggcccgggccgccccccggcccctgggcgcccacggcagaagaagaagccctgccaagagagctgaggccgcctccatgctggccgcagatgtgcggggcaagaccaggagcctgggccgggcagaggtggccctgggcgcccagggcccccgggagaagccagccccaccccagaaggccaagaggtctgtgcccccagccagccctgcccgggcccccccagccacagagaccccaggccctgagaaggccgccacagacctgcctgcccctgagacccccaggaagaagacccccatccagaagccacccaggaagaagagccgggaggccgccggggagctgggccgggccggggcccccaccctgtag

SEQ ID NO: 168905 - DNA, 2493 bp, synthetic construct
  misc_feature 1..2493: note = Description of Artificial Sequence: Synthetic coding sequence
  source 1..2493: mol_type = other DNA
atgggcctgggcctgctgctgcccctgctgctgctgtggacccggggcacccagggcagcgagctggaccccaagggccagcacgtgtgtgtggccagcagccccagcgctgagctgcagtgctgtgccggctggaggcagaaggaccaggagtgcaccatccccatctgtgagggcccagatgcctgccagaaggatgaggtgtgtgtgaagccaggcctgtgccgctgcaagccaggcttcttcggggcccactgcagcagccgctgccccggccagtactggggccctgactgccgggagagctgcccctgccacccccacggccagtgtgagcccgccactggagcctgccagtgccaggccgaccgctggggcgcccgctgtgagttcccctgtgcctgtggcccccacggccgctgtgaccctgccactggagtgtgccactgtgagcccggctggtggagcagcacctgccggcggccctgccagtgcaacacagctgctgcccgctgtgagcaggccaccggggcctgtgtgtgcaagccaggctggtggggccgccgctgcagcttccgctgcaactgccacggcagcccctgtgagcaggacagcggccgctgtgcctgccggcccggctggtggggccctgagtgccagcagcagtgtgaatgtgtgcggggccgctgcagcgctgccagcggggagtgcacctgccccccaggcttccggggggcccgctgtgagctgccctgcccagctggcagccatggagtgcagtgtgcccacagctgtggccgctgcaagcacaatgagccctgcagcccagacaccggcagctgtgagagctgtgagcccggctggaatggcacccagtgccagcagccctgcctgcccggcaccttcggggagagctgtgagcagcagtgcccccactgcagacatggagaggcctgtgagccagacaccggccactgccagagatgtgaccccggctggctgggcccccgctgtgaggacccctgccccaccggcacctttggagaggactgtggcagcacctgccccacctgtgtgcagggcagctgtgacacagtgactggagactgtgtgtgcagcgctggctactggggccccagctgcaatgccagctgcccagctggcttccacggcaacaactgcagcgtgccctgtgaatgtcctgagggcctgtgccaccctgtgtctggcagctgccagcccggcagcggcagccgggacacagccctgattgctggcagcctggtgcccctgctgctgctcttcctgggcctggcctgctgtgcctgctgctgctgggcccccaggagtgacctgaaggacaggcctgccagagatggagccaccgtgtccaggatgaagctgcaggtgtggggcaccctgaccagcctgggcagcaccctgccctgccgcagcctgagcagccacaagctgccctgggtgacagtgagccaccacgaccctgaggtgcccttcaaccacagcttcatcgagccccccagcgctggctgggccacagatgacagcttcagcagtgaccctgagagcggggaggctgatgaggtgcctgcctactgtgtgcccccccaggagggcatggtgcctgtggcccaggccggcagcagcgaggccagcctggccgccggggccttccccccaccagaagatgccagcaccccatttgccatccccaggaccagcagcctggcccgggccaagaggccttctgtgtcctttgctgagggcaccaagtttgccccccagagcagaagaagcagcggggagctgagcagccccctgaggaagcccaagaggctgagcagaggagcccagagcggccctgagggccgggaggccgaggagagcacaggccctgaggaggccgaggcccctgagagcttccctgctgctgccagccctggggacagcgccaccggccacagaagaccacccctgggcggccgcacagtggccgagcacgtggaggccatcgagggctctgtgcaggagagcagcggccctgtgaccaccatctacatgctggccggcaagccccggggcagcgagggccctgtgcgctctgtgttccgccacttcggcagcttccagaagggccaggccgaggccaaggtgaagagggccatccccaagccaccccggcaggccctgaacaggaagaagggcagccctggcctggccagcggctctgtgggccagagccccaacagcgcccccaaggccggcctgcccggggccaccggccccatggctgtgcggcctgaggaggccgtgcggggcctgggcgccggcacagagagcagccggcgggcccaggagcctgtgtctggctgcggcagccctgagcaggacccccagaagcaggccgaggaggagcggcaggaggagccagaatatgaaaatgtggtgcccatcagcaggcctcctgagccctag

SEQ ID NO: 168906 - DNA, 2235 bp, synthetic construct
  misc_feature 1..2235: note = Description of Artificial Sequence: Synthetic coding sequence
  source 1..2235: mol_type = other DNA
atgggcctgggcctgctgctgcccctgctgctgctgtggacccggggcacccagggcagcgagctggaccccaagggccagcacgtgtgtgtggccagcagccccagcgctgagctgcagtgctgtgccggctggaggcagaaggaccaggagtgcaccatccccatctgtgagggcccagatgcctgccagaaggatgaggtgtgtgtgaagccaggcctgtgccgctgcaagccaggcttcttcggggcccactgcagcagccgctgccccggccagtactggggccctgactgccgggagagctgcccctgccacccccacggccagtgtgagcccgccactggagcctgccagtgccaggccgaccgctggggcgcccgctgtgagttcccctgtgcctgtggcccccacggccgctgtgaccctgccactggagtgtgccactgtgagcccggctggtggagcagcacctgccggcggccctgccagtgcaacacagctgctgcccgctgtgagcaggccaccggggcctgtgtgtgcaagccaggctggtggggccgccgctgcagcttccgctgcaactgccacggcagcccctgtgagcaggacagcggccgctgtgcctgccggcccggctggtggggccctgagtgccagcagcagtgtgaatgtgtgcggggccgctgcagcgctgccagcggggagtgcacctgccccccaggcttccggggggcccgctgtgagctgccctgcccagctggcagccatggagtgcagtgtgcccacagctgtggccgctgcaagcacaatgagccctgcagcccagacaccggcagctgtgagagctgtgagcccggctggaatggcacccagtgccagcagccctgcctgcccggcaccttcggggagagctgtgagcagcagtgcccccactgcagacatggagaggcctgtgagccagacaccggccactgccagcgctgcagcggcagccgggacacagccctgattgctggcagcctggtgcccctgctgctgctcttcctgggcctggcctgctgtgcctgctgctgctgggcccccaggagtgacctgaaggacaggcctgccagagatggagccaccgtgtccaggatgaagctgcaggtgtggggcaccctgaccagcctgggcagcaccctgccctgccgcagcctgagcagccacaagctgccctgggtgacagtgagccaccacgaccctgaggtgcccttcaaccacagcttcatcgagccccccagcgctggctgggccacagatgacagcttcagcagtgaccctgagagcggggaggctgatgaggtgcctgcctactgtgtgcccccccaggagggcatggtgcctgtggcccaggccggcagcagcgaggccagcctggccgccggggccttccccccaccagaagatgccagcaccccatttgccatccccaggaccagcagcctggcccgggccaagaggccttctgtgtcctttgctgagggcaccaagtttgccccccagagcagaagaagcagcggggagctgagcagccccctgaggaagcccaagaggctgagcagaggagcccagagcggccctgagggccgggaggccgaggagagcacaggccctgaggaggccgaggcccctgagagcttccctgctgctgccagccctggggacagcgccaccggccacagaagaccacccctgggcggccgcacagtggccgagcacgtggaggccatcgagggctctgtgcaggagagcagcggccctgtgaccaccatctacatgctggccggcaagccccggggcagcgagggccctgtgcgctctgtgttccgccacttcggcagcttccagaagggccaggccgaggccaaggtgaagagggccatccccaagccaccccggcaggccctgaacaggaagaagggcagccctggcctggccagcggctctgtgggccagagccccaacagcgcccccaaggccggcctgcccggggccaccggccccatggctgtgcggcctgaggaggccgtgcggggcctgggcgccggcacagagagcagccggcgggcccaggagcctgtgtctggctgcggcagccctgagcaggacccccagaagcaggccgaggaggagcggcaggaggagccagaatatgaaaatgtggtgcccatcagcaggcctcctgagccctag

SEQ ID NO: 168907 - DNA, 1710 bp, synthetic construct; identical to SEQ ID NO: 168903
  misc_feature 1..1710: note = Description of Artificial Sequence: Synthetic coding sequence
  source 1..1710: mol_type = other DNA

SEQ ID NO: 168908 - DNA, 2595 bp, synthetic construct
  misc_feature 1..2595: note = Description of Artificial Sequence: Synthetic coding sequence
  source 1..2595: mol_type = other DNA
atggagggcgccggccccagaggagctggccctgcccggaggagaggagctgggggcccccccagccccctgctgcccagcctgctgctgctgctgctgctgtggatgctgcctgacacagtggccccccaggagctgaacccccggggcagaaatgtgtgccgggcccctggcagccaggtgcccacctgctgtgccggctggaggcagcagggagatgaatgtggcattgctgtgtgtgagggcaacagcacctgcagtgaaaatgaggtgtgtgtgcggcctggagaatgtcgctgccgccacggctactttggagccaactgtgacaccaagtgcccccggcagttctggggccctgactgcaaggagctgtgcagctgccacccccacggccagtgtgaagatgtgacaggccagtgcacctgccacgcccggcgctggggcgcccgctgtgagcacgcctgccagtgccagcacggcacctgccaccccaggtctggggcctgccgctgtgagcccggctggtggggcgcccagtgtgccagcgcctgctactgcagcgccaccagccgctgtgacccccagacaggagcctgcctgtgccacgccggctggtggggccgcagctgcaacaaccagtgtgcctgcaacagcagcccctgtgagcagcagagcggccgctgccagtgccgggagaggaccttcggggcccgctgtgaccgctactgccagtgcttccggggccgctgccaccctgtggatggcacctgtgcctgtgagcccggctaccggggcaagtactgccgggagccctgcccagctggcttctacggcctgggctgcagaagaagatgtggccagtgcaagggccagcagccctgcaccgtggccgagggccgctgcctgacctgtgagcccggctggaatggcaccaagtgtgaccagccctgtgccaccggcttctatggagagggctgcagccaccgctgccccccctgcagagatggccacgcctgcaaccacgtgacaggcaagtgcacccgctgcaatgccggctggattggagacagatgtgagaccaagtgcagcaatggcacctacggggaggactgtgcctttgtgtgtgccgactgtggcagcggccactgtgacttccagagcggccgctgcctgtgcagccctggggtgcacggcccccactgcaatgtgacctgccccccaggcctgcatggagctgactgtgcccaggcctgcagctgccacgaggacacctgtgaccctgtgactggagcctgccacctggagaccaaccagaggaaaggagtgatgggcgctggggccctgctggtgctgctggtgtgcctgctgctgagcctgctgggctgctgctgtgcctgccggggcaaggaccccacccggcgggagctgagcctgggcaggaagaaggccccccaccggctgtgtggccgcttcagccgcatctccatgaagctgccccgcatccccctgcggcggcagaagctgcccaaggtggtggtggcccaccacgacctggacaacaccctgaactgcagcttcctggagccccccagcggcctggagcagcccagccccagctggagcagccgggccagcttcagcagctttgacaccacagatgagggccctgtgtactgtgtgccccatgaggaggccccagctgagagccgggaccctgaggtgcccaccgtgcctgctgaggccccagcccccagccctgtgcccctgaccaccccagccagcgctgaggaggccatccccctgcctgccagcagtgacagcgagaggtctgccagctctgtggagggccctgggggcgccctgtatgcccgggtggcccggcgggaggcccggcctgcccgggcccggggggagatcggcggcctgagcctgagccccagccctgagaggaggaagcccccacctccagaccctgccaccaagcccaaggtgtcctggattcatggcaagcacagcgctgctgctgctggccgggcccccagccccccacctcctggcagcgaggccgcccccagccccagcaagaggaagaggacccccagcgacaagagcgcccacacagtggagcacggcagccccaggacccgggaccccacccccaggcctcctggcctgcctgaggaggccacagccctggccgcccccagccccccccgggcccgggcccgggcccggcccggcctgctggagcccacagatgctgggggcccccccaggtctgccccagctgcctccatgctggccgcagatgtgcggggcaagaccaggagcctgggccgggcagaggtggccctgggcgcccagggcccccgggagaagccagccccaccccagaaggccaagaggtctgtgcccccagccagccctgcccgggcccccccagccacagagaccccaggccctgagaaggccgccacagacctgcctgcccctgagacccccaggaagaagacccccatccagaagccacccaggaagaagagccgggaggccgccggggagctgggccgggccggggcccccaccctgtag

SEQ ID NO: 168909 - DNA, 2598 bp, synthetic construct
  misc_feature 1..2598: note = Description of Artificial Sequence: Synthetic coding sequence
  source 1..2598: mol_type = other DNA
atggagggcgccggccccagaggagctggccctgcccggaggagaggagctgggggcccccccagccccctgctgcccagcctgctgctgctgctgctgctgtggatgctgcctgacacagtggccccccaggagctgaacccccggggcagaaatgtgtgccgggcccctggcagccaggtgcccacctgctgtgccggctggaggcagcagggagatgaatgtggcattgctgtgtgtgagggcaacagcacctgcagtgaaaatgaggtgtgtgtgcggcctggagaatgtcgctgccgccacggctactttggagccaactgtgacaccaagtgcccccggcagttctggggccctgactgcaaggagctgtgcagctgccacccccacggccagtgtgaagatgtgacaggccagtgcacctgccacgcccggcgctggggcgcccgctgtgagcacgcctgccagtgccagcacggcacctgccaccccaggtctggggcctgccgctgtgagcccggctggtggggcgcccagtgtgccagcgcctgctactgcagcgccaccagccgctgtgacccccagacaggagcctgcctgtgccacgccggctggtggggccgcagctgcaacaaccagtgtgcctgcaacagcagcccctgtgagcagcagagcggccgctgccagtgccgggagaggaccttcggggcccgctgtgaccgctactgccagtgcttccggggccgctgccaccctgtggatggcacctgtgcctgtgagcccggctaccggggcaagtactgccgggagccctgcccagctggcttctacggcctgggctgcagaagaagatgtggccagtgcaagggccagcagccctgcaccgtggccgagggccgctgcctgacctgtgagcccggctggaatggcaccaagtgtgaccagccctgtgccaccggcttctatggagagggctgcagccaccgctgccccccctgcagagatggccacgcctgcaaccacgtgacaggcaagtgcacccgctgcaatgccggctggattggagacagatgtgagaccaagtgcagcaatggcacctacggggaggactgtgcctttgtgtgtgccgactgtggcagcggccactgtgacttccagagcggccgctgcctgtgcagccctggggtgcacggcccccactgcaatgtgacctgccccccaggcctgcatggagctgactgtgcccaggcctgcagctgccacgaggacacctgtgaccctgtgactggagcctgccacctggagaccaaccagaggaaaggagtgatgggcgctggggccctgctggtgctgctggtgtgcctgctgctgagcctgctgggctgctgctgtgcctgccggggcaaggaccccacccggcgggagctgagcctgggcaggaagaaggccccccaccggctgtgtggccgcttcagccgcatctccatgaagctgccccgcatccccctgcggcggcagaagctgcccaaggtggtggtggcccaccacgacctggacaacaccctgaactgcagcttcctggagccccccagcggcctggagcagcccagccccagctggagcagccgggccagcttcagcagctttgacaccacagatgagggccctgtgtactgtgtgccccatgaggaggccccagctgagagccgggaccctgaggtgcccaccgtgcctgctgaggccccagcccccagccctgtgcccctgaccaccccagccagcgctgaggaggccatccccctgcctgccagcagtgacagcgagaggtctgccagctctgtggagggccctgggggcgccctgtatgcccgggtggcccggcgggaggcccggcctgcccgggcccggggggagatcggcggcctgagcctgagccccagccctgagaggaggaagcccccacctccagaccctgccaccaagcccaaggtgtcctggattcatggcaagcacagcgctgctgctgctggccgggcccccagccccccacctcctggcagcgaggccgcccccagccccagcaagaggaagaggacccccagcgacaagagcgcccacacagtggagcacggcagccccaggacccgggaccccacccccaggcctcctggcctgcctgaggaggccacagccctggccgcccccagccccccccgggcccgggcccgggccgccccccggcccctgggcgcccatggaagaagaagaagccctgccaagagagctgaggccgcctccatgctggccgcagatgtgcggggcaagaccaggagcctgggccgggcagaggtggccctgggcgcccagggcccccgggagaagccagccccaccccagaaggccaagaggtctgtgcccccagccagccctgcccgggcccccccagccacagagaccccaggccctgagaaggccgccacagacctgcctgcccctgagacccccaggaagaagacccccatccagaagccacccaggaagaagagccgggaggccgccggggagctgggccgggccggggcccccaccctgtag

SEQ ID NO: 168910 - DNA, 1728 bp, synthetic construct
  misc_feature 1..1728: note = Description of Artificial Sequence: Synthetic coding sequence
  source 1..1728: mol_type = other DNA
atgcacaaggaggccgagatgctgattggcccccagctggatgagaagcgctggggctggaggctgggagatggcagcgctgccccacccttcctgccccaggccctgtccttcctgctgctgctgcccctggccagcgccctgcagcccacccccctgcccttccaggagctgcggctggtgggcggccccagccgctgccggggccgcctggaggtgatgcatggaggctcctggggctctgtgtgtgatgatgactgggatgtggtggatgccaacgtggtgtgccggcagctgggctgcggcctggccctgcctgtgccccggcccctggccttcggccagggccggggccccatcctgctggacaacgtggagtgccggggccaggaggccgccctgtctgaatgtggcagccggggctggggcgtgcacaactgcttccactatgaagatgtggccgtgctgtgtgatgagttcctgcccacccagccccccaccaggaagatgctgaccagccgggccccacccaccaccctgcccaacgggaagtctgagggctctgtgcggctggtgggcggggccaacctgtgccagggccgggtggagatcctgcacagcggcctgtggggcaccgtgtgtgatgatgactggggcctgcctgatgctgctgtggtgtgccggcagctgggctgtggggccgccatggccgccaccaccaatgccttcttcggctacggcaccggccacatcctgctggacaacgtgcactgtgagggcggggagccccggctggccgcctgccagagcctgggctggggcgtgcacaactgtggccaccatgaagatgctggggccctgtgtgccggcctgggcccccccaccctgacagccctgcccagcagcgccacccgggaggactgggcctggcagacagaccccagcgccactggagtgggcccccagcccagccgggagacagccctgctgaccacagctgcctgggccgccggcaagaagagcggccgcctgcggctggtgggcggccctggcccctgccggggccgggtggaggtgctgcacgccggcggctggggcaccgtgtgtgatgatgactgggactttgctgatgcccgggtggcctgccgggaggccggctgcggccctgccctgggcgccaccggcctgggccacttcggctacggccggggccctgtgctgctggacaacgtgggctgtgccggcacagaggcccggctgagtgactgcttccacctgggctggggccagcacaactgtggccaccatgaagatgctggggccctgtgtgccggccctgaggagctgggcctgcaggtgcagcaggacggcagcgagaccaccagggtgcccaccccccggcccagagatggccacctgcggctggtgaatggagcccaccgctgtgagggccgggtggagctgtacctgggccagcgctggggcaccgtgtgtgatgatgcctgggacctgcgggctgctggggtgctgtgccggcagctgggctgcggccaggccctggccgcccctggagaggcccacttcggccctggccggggccccatcctgctggacaacgtgaagtgccgcggggaggagagcgccctgctgctgtgcagccacatccgctgggatgcccacaactgtgaccacagtgaagatgcctctgtgctgtgccagcccagctag

SEQ ID NO: 168911 - DNA, 849 bp, synthetic construct
  misc_feature 1..849: note = Description of Artificial Sequence: Synthetic coding sequence
  source 1..849: mol_type = other DNA
atgagcaatgtgaccctgaggaagatgagccccactggaaatgagatgaagagcaccacccagggcaccaccaggaagcagcaggacttccacgaggtgaacaagaggaggaccttcctgcaggacaacagctggatcaagaagaggcctgaggaggagaaggatgagaactacggccgggtggtgctgaacagacacaacagccatgatgccctggacaggaaggtgaatgaaagagatgtgcccaaggccaccatcagccgctacagcagtgatgacaccctggaccgctccatgtccatgttccgcagcctggaggtgaccaagctgcagcccggcggcagcctgaatgccaacaccagcaacaccatcgccagcaccagcgccaccacccctgtgaagaagaagaggcagagctggttccccccacctcctcctggctacaatgccagcagcagcacaggcacccggcggcgggagcccggggtgcacccccccatcccccccaagcccagcagccctgtgagcagccccaaccagctgcggcaggacaaccggcagatccacccccccaagccaggagtgtacacagagaccaacagatctgctgagaggaacatcagcgaggagctggacaacctgatcaagatgaacaagagcctgaacagaaaccagggcctggacagcctcttccgggccaaccccaaggtggaggagcgggagaagagggccaagagcctggagagcctcatctacatgagcaccaggacagacaaggatggcaagggcatccagagcctgggcagccccatcaaggtgaaccagaggacagacaagaatgagaagtag

SEQ ID NO: 168912 - DNA, 2067 bp, synthetic construct
  misc_feature 1..2067: note = Description of Artificial Sequence: Synthetic coding sequence
  source 1..2067: mol_type = other DNA
atgagcaatgtgaccctgaggaagatgagccccactggaaatgagatgaagagcaccacccagggcaccaccaggaagcagcaggacttccacgaggtgaacaagaggaggaccttcctgcaggacaacagctggatcaagaagaggcctgaggaggagaaggatgagaactacggccgggtggtgctgaacagacacaacagccatgatgccctggacaggaaggtgaatgaaagagatgtgcccaaggccaccatcagccgctacagcagtgatgacaccctggaccgcatcagtgacagaaatgatgctgccaagacctacaaggccaacaccctggacaaccagctgaccaacagatccatgtccatgttccgcagcctggaggtgaccaagctgcagcccggcggcagcctgaatgccaacaccagcaacaccatcgccagcaccagcgccaccacccctgtgaagaagaagaggcagagctggttccccccacctcctcctggctacaatgccagcagcagcacaggcaccaggagaagagagcccggggtgcacccccccatcccccccaagcccagcagccctgtgagcagccccaaccagctgcggcaggacaaccggcagatccacccccccaagccaggagtgtacacagagaccaacagatctgctgagaggaacatccgcagccaggacctggacaacatcgtgaaggtggccaccagcctgcagaggagtgacaagggggaggagctggacaacctgatcaagatgaacaagagcctgaacagaaaccagggcctggacagcctcttccgggccaaccccaaggtggaggagcgggagaagagggccaagagcctggagagcctcatctacatgagcaccaggacagacaaggatggcaagggcatccagagcctgggcagccccatcaaggtgaaccagaggacagacaagaatgagaagggccggcagaacctggagagcgtggccaaggtgaatgccaggatgaacaagaccagcagaagaagtgaggacctggacaatgccacagaggtgaaccccaagggccacgagaacaccaccgggaagaaggacctggatggcctcatcaaggtggaccctgagaccaacaagaacatcacccggggccagagcctggacaacctgatcaaggtgaccccagaggtgaagaggagcaaccagggcagcaaggacctgaacaacttcatcaaggtgtacccaggcacagagaagagcacagagggcggccagagcctggacagcctcatcaaggtgaccccagagaggaacagaaccaaccagggcaaccaggacctggagaacctgatcaaggtgatccccagcgccaacaagagcagcgagcagggcctggatgagcacatcaacgtgagccccaaggctgtgaagaacacagatggcaagcaggacctggacaagctgatcaaggtgaaccctgagatcttcaccaacaaccagaggaaccaggacctggccaacctgatcaaggtgaacccagctgtgatccggaacaaccagagccaggacctggacaacctgatcaaggtgaagcccagcgccctgaggaacaccaacagagaccagaacctggagaacctgattgaggtgaacagccacgtgtctgagaacaagaatggcagcagcaacacaggagccaagcaggccggcccccaggacacagtggtgtacaccaggacctacgtggagaacagcaagagccccaaggatggctaccaggagaacatcagcggcaagtacatccagacagtgtacagcaccagtgacaggagcgtcatcgagcgggacatgtgcacctactgcaggaagcccctgggcgtggagaccaagatgatcctggatgagctgcagatctgctgccacagcacctgcttcaagtgtgagatctgcaagcagcccctggagaacctgcaggccggggacagcatctggatctaccggcagaccatccactgtgagccctgctacagcaagatcatggccaagtggatcccctag

SEQ ID NO: 168913 - DNA, 2007 bp, synthetic construct
  misc_feature 1..2007: note = Description of Artificial Sequence: Synthetic coding sequence
  source 1..2007: mol_type = other DNA
atgagcaatgtgaccctgaggaagatgagccccactggaaatgagatgaagagcaccacccagggcaccaccaggaagcagcaggacttccacgaggtgaacaagaggaggaccttcctgcaggacaacagctggatcaagaagaggcctgaggaggagaaggatgagaactacggccgggtggtgctgaacagacacaacagccatgatgccctggacaggaaggtgaatgaaagagatgtgcccaaggccaccatcagccgctacagcagtgatgacaccctggaccgcatcagtgacagaaatgatgctgccaagacctacaaggccaacaccctggacaaccagctgaccaacagatccatgtccatgttccgcagcctggaggtgaccaagctgcagcccggcggcagcctgaatgccaacaccagcaacaccatcgccagcaccagcgccaccacccctgtgaagaagaagaggcagagctggttccccccacctcctcctggctacaatgccagcagcagcacaggcaccaggagaagagagcccggggtgcacccccccatcccccccaagcccagcagccctgtgagcagccccaaccagctgcggcaggacaaccggcagatccacccccccaagccaggagtgtacacagagaccaacagatctgctgagaggaacatcagcgaggagctggacaacctgatcaagatgaacaagagcctgaacagaaaccagggcctggacagcctcttccgggccaaccccaaggtggaggagcgggagaagagggccaagagcctggagagcctcatctacatgagcaccaggacagacaaggatggcaagggcatccagagcctgggcagccccatcaaggtgaaccagaggacagacaagaatgagaagggccggcagaacctggagagcgtggccaaggtgaatgccaggatgaacaagaccagcagaagaagtgaggacctggacaatgccacagaggtgaaccccaagggccacgagaacaccaccgggaagaaggacctggatggcctcatcaaggtggaccctgagaccaacaagaacatcacccggggccagagcctggacaacctgatcaaggtgaccccagaggtgaagaggagcaaccagggcagcaaggacctgaacaacttcatcaaggtgtacccaggcacagagaagagcacagagggcggccagagcctggacagcctcatcaaggtgaccccagagaggaacagaaccaaccagggcaaccaggacctggagaacctgatcaaggtgatccccagcgccaacaagagcagcgagcagggcctggatgagcacatcaacgtgagccccaaggctgtgaagaacacagatggcaagcaggacctggacaagctgatcaaggtgaaccctgagatcttcaccaacaaccagaggaaccaggacctggccaacctgatcaaggtgaacccagctgtgatccggaacaaccagagccaggacctggacaacctgatcaaggtgaagcccagcgccctgaggaacaccaacagagaccagaacctggagaacctgattgaggtgaacagccacgtgtctgagaacaagaatggcagcagcaacacaggagccaagcaggccggcccccaggacacagtggtgtacaccaggacctacgtggagaacagcaagagccccaaggatggctaccaggagaacatcagcggcaagtacatccagacagtgtacagcaccagtgacaggagcgtcatcgagcgggacatgtgcacctactgcaggaagcccctgggcgtggagaccaagatgatcctggatgagctgcagatctgctgccacagcacctgcttcaagtgtgagatctgcaagcagcccctggagaacctgcaggccggggacagcatctggatctaccggcagaccatccactgtgagccctgctacagcaagatcatggccaagtggatcccctag

SEQ ID NO: 168914 - DNA, 1941 bp, synthetic construct
  misc_feature 1..1941: note = Description of Artificial Sequence: Synthetic coding sequence
  source 1..1941: mol_type = other DNA
atgagcaatgtgaccctgaggaagatgagccccactggaaatgagatgaagagcaccacccagggcaccaccaggaagcagcaggacttccacgaggtgaacaagaggaggaccttcctgcaggacaacagctggatcaagaagaggcctgaggaggagaaggatgagaactacggccgggtggtgctgaacagacacaacagccatgatgccctggacaggaaggtgaatgaaagagatgtgcccaaggccaccatcagccgctacagcagtgatgacaccctggaccgcatcagtgacagaaatgatgctgccaagacctacaaggccaacaccctggacaaccagctgaccaacagatccatgtccatgttccgcagcctggaggtgaccaagctgcagcccggcggcagcctgaatgccaacaccagcaacaccatcgccagcaccagcgccaccacccctgtgaagaagaagcgggagcccggggtgcacccccccatcccccccaagcccagcagccctgtgagcagccccaaccagctgcggcaggacaaccggcagatccacccccccaagccaggagtgtacacagagaccaacagatctgctgagaggaacatccgcagccaggacctggacaacatcgtgaaggtggccaccagcctgcagaggagtgacaagggggaggagctggacaacctgatcaagatgaacaagagcctgaacagaaaccagggcctggacagcctcttccgggccaaccccaaggtggaggagcgggagaagagggccaagagcctggagagcctcatctacatgagcaccaggacagacaaggatggcaagggcatccagagcctgggcagccccatcaaggtgaaccagaggacagacaagaatgagaagggccggcagaacctggagagcgtggccaaggtgaatgccaggatgaacaagaccagcagaagaagtgaggacctggacaatgccacagaggtgaaccccaagggccacgagaacaccactggaggccagagcctggacaacctgatcaaggtgaccccagaggtgaagaggagcaaccagggcagcaaggacctgaacaacttcatcaaggtgtacccaggcacagagaagagcacagagggcggccagagcctggacagcctcatcaaggtgaccccagagaggaacagaaccaaccagggcaaccaggacctggagaacctgatcaaggtgatccccagcgccaacaagagcagcgagcagggcctggatgagcacatcaacgtgagccccaaggctgtgaagaacacagatggcaagcaggacctggacaagctgatcaaggtgaaccctgagatcttcaccaacaaccagaggaaccaggacctggccaacctgatcaaggtgaacccagctgtgatccggaacaaccagagccaggacctggacaacctgatcaaggtgaagcccagcgccctgaggaacaccaacagagaccagaacctggagaacctgattgaggtgaacagccacgtgtctgagaacaagaatggcagcagcaacacaggagccaagcaggccggcccccaggacacagtggtgtacaccaggacctacgtggagaacagcaagagccccaaggatggctaccaggagaacatcagcggcaagtacatccagacagtgtacagcaccagtgacaggagcgtcatcgagcgggacatgtgcacctactgcaggaagcccctgggcgtggagaccaagatgatcctggatgagctgcagatctgctgccacagcacctgcttcaagtgtgagatctgcaagcagcccctggagaacctgcaggccggggacagcatctggatctaccggcagaccatccactgtgagccctgctacagcaagatcatggccaagtggatcccctag

SEQ ID NO: 168915 - DNA, 2148 bp, synthetic construct
  misc_feature 1..2148: note = Description of Artificial Sequence: Synthetic coding sequence
  source 1..2148: mol_type = other DNA
atggcccgggagctgtaccacgaggagtttgcccgggccggcaagcaggccggcctgcaggtgtggagaattgagaagctggagctggtgcctgtgccccagagcgcccatggagacttctacgtgggagatgcctacctggtgctgcacacagccaagaccagccggggcttcacctaccacctgcacttctggctgggcaaggaatgttcccaggatgagagcacagctgctgccatcttcaccgtgcagatggatgactacctgggcggcaagcctgtgcagaaccgggagctgcagggctatgagagcaatgactttgtgtcctacttcaagggcggcctgaagtacaaggccggcggcgtggccagcggcctgaaccacgtgctgaccaatgacctgacagccaagaggctgctgcacgtgaagggcagaagagtggtgcgggccacagaggtgcccctgtcctgggacagcttcaacaagggggactgcttcatcatcgacctgggcacagagatctaccagtggtgtggcagcagctgcaacaagtatgagcggctgaaggccaaccaggtggccaccggcatccgctacaatgaaaggaagggccgctctgagctgattgtggtggaggagggcagcgagcccagcgagctgatcaaggtgctgggggagaagccagagctgcctgatggaggagatgatgatgacatcatcgctgacatcagcaacaggaagatggccaagctgtacatggtgtctgatgccagcggctccatgagggtgacagtggtggccgaggagaaccccttctccatggccatgctgctgtctgaggagtgcttcatcctggaccatggagctgccaagcagatctttgtgtggaagggcaaggatgccaacccccaggagaggaaggccgccatgaagacagctgaggagttcctgcagcagatgaactacagcaagaacacccagatccaggtgctgcctgagggcggggagacccccatcttcaagcagttcttcaaggactggagggacaaggaccagagtgatggctttgggaaggtgtatgtgacagagaaggtggcccagatcaagcagatcccctttgatgccagcaagctgcacagcagcccccagatggccgcccagcacaacatggtggatgatggcagcggcaaggtggagatctggagggtggagaacaacggccgcatccaggtggaccagaacagctatggagagttctacggcggggactgctacatcatcctgtacacctacccccggggccagatcatctacacctggcagggcgccaatgccaccagagatgagctgaccaccagcgccttcctgactgtgcagctggacaggagcctgggcggccaggccgtgcagatccgggtgtcccagggcaaggagcctgtgcacctgctgagcctcttcaaggacaagcccctcatcatctacaagaatggcaccagcaagaagggcggccaggccccagccccacccaccaggctcttccaggtgagaagaaacctggccagcatcaccagaattgtggaggtggatgtggatgccaacagcctgaacagcaatgatgtgtttgtgctgaagctgccccagaacagcggctacatctgggtgggcaagggggccagccaggaggaggagaagggagcagaatatgtggcctctgtgctgaagtgcaagaccctgcgcatccaggagggggaggagcctgaggagttctggaacagcctgggcggcaagaaggactaccagaccagccccctgctggagacccaggccgaggaccaccccccccggctgtatggctgcagcaacaagacaggccgcttcgtcatcgaggagatccctggagagttcacccaggatgacctggccgaggatgatgtgatgctgctggatgcctgggagcagatcttcatctggattggcaaggatgccaatgaggtggagaagaaggagagcctgaagagcgccaagatgtacctggagacagaccccagcggccgggacaagaggacccccatcgtcatcatcaagcagggccacgagccccccaccttcaccggctggttcctgggctgggacagcagcaagtggtag

SEQ ID NO: 168916 - DNA, 1407 bp, synthetic construct
  misc_feature 1..1407: note = Description of Artificial Sequence: Synthetic coding sequence
  source 1..1407: mol_type = other DNA
atggccaagctgtacatggtgtctgatgccagcggctccatgagggtgacagtggtggccgaggagaaccccttctccatggccatgctgctgtctgaggagtgcttcatcctggaccacggggccgccaagcagatctttgtgtggaagggcaaggatgccaacccccaggagaggaaggccgccatgaagacagctgaggagttcctgcagcagatgaactacagcaagaacacccagatccaggtgctgcctgagggcggggagacccccatcttcaagcagttcttcaaggactggagggacaaggaccagagtgatggctttgggaaggtgtatgtgacagagaaggtggcccagatcaagcagatcccctttgatgccagcaagctgcacagcagcccccagatggccgcccagcacaacatggtggatgatggcagcggcaaggtggagatctggagggtggagaacaacggccgcatccaggtggaccagaacagctatggagagttctatggaggagactgctacatcatcctgtacacctacccccggggccagatcatctacacctggcagggcgccaatgccaccagagatgagctgaccaccagcgccttcctgactgtgcagctggacaggagcctgggcggccaggccgtgcagatccgggtgtcccagggcaaggagcctgtgcacctgctgagcctcttcaaggacaagcccctcatcatctacaagaatggcaccagcaagaagggcggccaggccccagccccacccaccaggctcttccaggtgagaagaaacctggccagcatcacccgcatcgtggaggtggatgtggatgccaacagcctgaacagcaatgatgtgtttgtgctgaagctgccccagaacagcggctacatctgggtgggcaaaggagccagccaggaggaggagaagggagcagaatatgtggcctctgtgctgaagtgcaagaccctgcgcatccaggagggggaggagcctgaggagttctggaacagcctgggcggcaagaaggactaccagaccagccccctgctggagacccaggccgaggaccaccccccccggctgtatggctgcagcaacaagacaggccgctttgtgattgaggagatccctggagagttcacccaggatgacctggctgaagatgatgtgatgctgctggatgcctgggagcagatcttcatctggattggcaaggatgccaatgaggtggagaagaaggagagcctgaagagcgccaagatgtacctggagacagaccccagcggccgggacaagaggacccccatcgtcatcatcaagcagggccacgagccccccaccttcaccggctggttcctgggctgggacagcagcaagtggtag

SEQ ID NO: 168917 - DNA, 1407 bp, synthetic construct; identical to SEQ ID NO: 168916
  misc_feature 1..1407: note = Description of Artificial Sequence: Synthetic coding sequence
  source 1..1407: mol_type = other DNA

SEQ ID NO: 168918 - DNA, 3864 bp, synthetic construct
  misc_feature 1..3864: note = Description of Artificial Sequence: Synthetic coding sequence
  source 1..3864: mol_type = other DNA
atggagcccatctacccctttgcccggccccagatgaacacccgcttccccagcagcaggatggtgcccttccacttcccccccagcaaatgtgccctgtggaaccccacccccactggagacttcatctacctgcacctgagctactacagaaaccccaagctggtggtgacagagaagaccatccggctggcctacagacatgccaagcagaacaagaagaacagcagctgcttcctgctgggcagcctgacagcagatgaagatgaggagggcgtgaccctgactgtggacagatttgaccccggccgggaggtgcctgagtgcctggagatcacccccacagccagcctgcccggggacttcctgatcccctgcaaggtgcacacccaggagctgtgcagccgggagatgattgtgcacagcgtggatgacttcagcagcgccctgaaggccctgcagtgccacatctgcagcaaggacagcctggactgtgggaagctgctgagcctgcgggtgcacatcaccagccgggagagcctggacagcgtggagtttgacctgcactgggccgctgtgaccctggccaacaacttcaagtgcacccctgtgaagcccatccccatcatccccacagccctggccaggaacctgagcagcaacctgaacatcagccaggtgcagggcacctacaagtatggctacctgaccatggatgagaccaggaagctgctgctgctgctggagagtgaccccaaggtgtacagcctgcccctggtgggcatctggctgagcggcatcacccacatctacagcccccaggtgtgggcctgctgcctgcgctacatcttcaacagctctgtgcaggagagggtcttcagcgagagcggcaacttcatcatcgtgctgtacagcatgacccacaaggagcctgagttctatgagtgcttcccctgtgatggcaagatcccagacttccgcttccagctgctgaccagcaaggagaccctgcacctgttcaagaatgtggagcccccagacaagaaccccatccgctgtgagctgtctgctgagagccagaatgctgagacagagttcttcagcaaggccagcaagaacttcagcatcaagaggagcagccagaagctgagcagcggcaagatgcccatccatgaccatgattctggagtggaggatgaggacttcagcccccggcccatccccagcccccaccctgtgtcccagaagatcagcaagatccagcccagcgtgcctgagctgagcctggtgctggatggcaacttcatcgagagcaaccccctgcccacccccctggagatggtgaacaatgaaaatcctcctctcatcaaccacctggagcacctgaagcccctgcagccccagctgtatgatgagaagcacagccctgaggtggaggccggggagcccagcctgcggggcatccccaaccagctgaaccaggacaagccagccctgctgcggcactgcaaggtgcggcagcccccagcctacaagaagggcaacccccacaccagaaattccatcaagcccagcagccacaacggccccagccatgacatctttgagaagctgcagacagtgtctgctggaaatgtgcagaatgaggagtaccccatccggcccagcaccctgaacagccggcagagcagcctggccccccagagccagccccatgactttgtgttcagcccccacaacagcggccggcccatggagctgcagatccccaccccacccctgcccagctactgcagcaccaacgtgtgccgctgctgccagcaccacagccacatccagtacagccccctgaacagctggcagggcgccaacacagtgggcagcatccaggatgtgcagagcgaggccctgcagaagcacagcctcttccaccccagcggctgcccagccctgtactgcaatgccttctgcagcagcagcagccccatcgccctgcggccccagggcgacatgggcagctgcagcccccacagcaacatcgagcccagccctgtggcccggccccccagccacatggacctgtgcaacccccagccctgcaccgtgtgcatgcacacccccaagacagaaagtgacaatggcatgatgggcctgagcccagatgcctaccgcttcctgacagagcaggaccggcagctgcggctgctgcaggcccagatccagaggctgctggaggcccagagcctgatgccctgcagccccaagaccacagctgtggaggacacagtgcaggccggccggcagatggagctggtgtctgtggaggcccagagcagccctggcctgcacatgaggaagggcgtgtccattgctgtgtccactggagccagcctcttctggaatgctgctggggaggaccaggagccagacagccagatgaagcaggatgacaccaagatcagcagcgaggacatgaacttctctgtggacatcaacaatgaggtgaccagcctgcccggcagcgccagcagcctgaaggctgtggacatccccagctttgaggagagcaacattgctgtggaggaggagttcaaccagcccctgtctgtgagcaacagcagcctggtggtgaggaaggagccagatgtgcctgtgttcttccccagcggccagctggccgagagcgtgtccatgtgcctgcagacaggccccactggaggagccagcaacaacagcgagaccagcgaggagcccaagattgagcacgtgatgcagcccctgctgcaccagcccagcgacaaccagaagatctaccaggacctgctgggccaggtgaaccacctgctgaacagcagcagcaaggagacagagcagcccagcaccaaggctgtgatcatcagccatgaatgtaccaggacccagaatgtgtaccacaccaagaagaagacccaccacagccggctggtggacaaggactgtgtgctgaatgccaccctgaagcagctgcggagcctgggcgtgaagattgacagccccaccaaggtgaagaagaatgcccacaacgtggaccacgcctctgtgctggcctgcatcagccctgaggccgtcatcagcggcctgaactgcatgagctttgccaacgtgggcatgagcggcctgagccccaacggggtggacctgtccatggaggccaatgccatcgccctgaagtacctgaatgaaaaccagctgagccagctgtctgtgaccaggagcaaccagaacaactgtgaccccttcagcctgctgcacatcaacacagacaggagcacagtgggcctgagcctcatcagccccaacaacatgagctttgccaccaagaagtacatgaagagatatggcctgctgcagagcagtgacaacagtgaagatgaggaggagcccccagacaatgctgacagcaagtctgagtacctgctgaaccagaacctgcggagcatccctgagcagctgggcggccagaaggagcccagcaagaatgaccacgagatcatcaactgcagcaactgtgagagcgtgggcaccaatgctgacacccctgtgctgaggaacatcaccaatgaggtgctgcagaccaaggccaagcagcagctgacagagaagccagccttcctggtgaagaacctgaagcccagccctgctgtgaacctgaggacaggcaaggccgagttcacccagcaccctgagaaggaaaatgaaggagacatcaccatcttccctgagagcctgcagcccagcgagaccctgaagcagatgaacagcatgaacagcgtgggcaccttcctggatgtgaagaggctgcggcagctgcccaagctgttctag

SEQ ID NO: 168919 - DNA, 3864 bp, synthetic construct; identical to SEQ ID NO: 168918
  misc_feature 1..3864: note = Description of Artificial Sequence: Synthetic coding sequence
  source 1..3864: mol_type = other DNA

SEQ ID NO: 168920 - DNA, 3864 bp, synthetic construct; identical to SEQ ID NO: 168918
  misc_feature 1..3864: note = Description of Artificial Sequence: Synthetic coding sequence
  source 1..3864: mol_type = other DNA

SEQ ID NO: 168921 - DNA, 633 bp, synthetic construct
  misc_feature 1..633: note = Description of Artificial Sequence: Synthetic coding sequence
  source 1..633: mol_type = other DNA
cagctgtatgatgagaagcacagccctgaggtggaggccggggagcccagcctgcggggcatccccaaccagctgaaccaggacaagccagccctgctgcggcactgcaagccctgcaccgtgtgcatgcacacccccaagacagaaagtgacaatggcatgatgggcctgagcccagatgcctaccgcttcctgacagagcaggaccggcagctgcggctgctgcaggcccagatccagaggctgctggaggcccagagcctgatgccctgcagccccaagaccacagctgtggaggacacagtgcaggccggccggcagatggagctggtgtctgtggaggcccagagcagccctggcctgcacatgaggaaaggagtgtccattgctgtgtccactggagccagcctcttctggaatgctgctggggaggaccaggagccagacagccagatgaagcaggatgacaccaagatcagcagcgaggacatgaacttctctgtggacatcaacaatgaggtgaccagcctgcccggcagcgccagcagcctgaaggctgtggacatccccagctttgaggagagcaacattgctgtggaggaggagttcaaccagcccctgtctgtgtcctag

SEQ ID NO: 168922 - DNA, 3867 bp, synthetic construct
  misc_feature 1..3867: note = Description of Artificial Sequence: Synthetic coding sequence
  source 1..3867: mol_type = other DNA
atggagcccatctacccctttgcccggccccagatgaacacccgcttccccagcagcaggatggtgcccttccacttcccccccagcaaatgtgccctgtggaaccccacccccactggagacttcatctacctgcacctgagctactacagaaaccccaagctggtggtgacagagaagaccatccggctggcctacagacatgccaagcagaacaagaagaacagcagctgcttcctgctgggcagcctgacagcagatgaagatgaggagggcgtgaccctgactgtggacagatttgaccccggccgggaggtgcctgagtgcctggagatcacccccacagccagcctgcccggggacttcctgatcccctgcaaggtgcacacccaggagctgtgcagccgggagatgattgtgcacagcgtggatgacttcagcagcgccctgaaggccctgcagtgccacatctgcagcaaggacagcctggactgtgggaagctgctgagcctgcgggtgcacatcaccagccgggagagcctggacagcgtggagtttgacctgcactgggccgctgtgaccctggccaacaacttcaagtgcacccctgtgaagcccatccccatcatccccacagccctggccaggaacctgagcagcaacctgaacatcagccaggtgcagggcacctacaagtatggctacctgaccatggatgagaccaggaagctgctgctgctgctggagagtgaccccaaggtgtacagcctgcccctggtgggcatctggctgagcggcatcacccacatctacagcccccaggtgtgggcctgctgcctgcgctacatcttcaacagctctgtgcaggagagggtcttcagcgagagcggcaacttcatcatcgtgctgtacagcatgacccacaaggagcctgagttctatgagtgcttcccctgtgatggcaagatcccagacttccgcttccagctgctgaccagcaaggagaccctgcacctgttcaagaatgtggagcccccagacaagaaccccatccgctgtgagctgtctgctgagagccagaatgctgagacagagttcttcagcaaggccagcaagaacttcagcatcaagaggagcagccagaagctgagcagcggcaagatgcccatccatgaccatgattctggagtggaggatgaggacttcagcccccggcccatccccagcccccaccctgtgtcccagaagatcagcaagatccagcccagcgtgcctgagctgagcctggtgctggatggcaacttcatcgagagcaaccccctgcccacccccctggagatggtgaacaatgaaaatcctcctctcatcaaccacctggagcacctgaagcccctgcagccccagctgtatgatgagaagcacagccctgaggtggaggccggggagcccagcctgcggggcatccccaaccagctgaaccaggacaagccagccctgctgcggcactgcaaggtgcggcagcccccagcctacaagaagggcaacccccacaccagaaattccatcaagcccagcagccacaacggccccagccatgacatctttgagaagctgcagacagtgtctgctggaaatgtgcagaatgaggagtaccccatccggcccagcaccctgaacagccggcagagcagcctggccccccagagccagccccatgactttgtgttcagcccccacaacagcggccggcccatggagctgcagatccccaccccacccctgcccagctactgcagcaccaacgtgtgccgctgctgccagcaccacagccacatccagtacagccccctgaacagctggcagggcgccaacacagtgggcagcatccaggatgtgcagagcgaggccctgcagaagcacagcctcttccaccccagcggctgcccagccctgtactgcaatgccttctgcagcagcagcagccccatcgccctgcggccccagggcgacatgggcagctgcagcccccacagcaacatcgagcccagccctgtggcccggccccccagccacatggacctgtgcaacccccagccctgcaccgtgtgcatgcacacccccaagacagaaagtgacaatggcatgatgggcctgagcccagatgcctaccgcttcctgacagagcaggaccggcagctgcggctgctgcaggcccagatccagaggctgctggaggcccagagcctgatgccctgcagccccaagaccacagctgtggaggacacagtgcaggccggccggcagatggagctggtgtctgtggaggcccagagcagccctggcctgcacatgaggaagggcgtgtccattgctgtgtccactggagccagcctcttctggaatgctgctggggaggaccaggagccagacagccagatgaagcaggatgacaccaagatcagcagcgaggacatgaacttctctgtggacatcaacaatgaggtgaccagcctgcccggcagcgccagcagcctgaaggctgtggacatccccagctttgaggagagcaacattgctgtggaggaggagttcaaccagcccctgtctgtgagcaacagcagcagcctggtggtgaggaaggagccagatgtgcctgtgttcttccccagcggccagctggccgagagcgtgtccatgtgcctgcagacaggccccaccggcggggccagcaacaacagcgagaccagcgaggagcccaagattgaacatgtgatgcagcccctgctgcaccagcccagcgacaaccagaagatctaccaggacctgctgggccaggtgaaccacctgctgaacagcagcagcaaggagacagagcagcccagcaccaaggccgtcatcatcagccatgagtgcaccaggacccagaatgtgtaccacaccaagaagaagacccaccacagccggctggtggacaaggactgtgtgctgaatgccaccctgaagcagctgcggagcctgggcgtgaagattgacagccccaccaaggtgaagaagaatgcccacaacgtggaccacgcctctgtgctggcctgcatcagccctgaggccgtcatcagcggcctgaactgcatgagctttgccaacgtgggcatgagcggcctgagccccaatggagtggacctgtccatggaggccaatgccatcgccctgaagtacctgaatgaaaaccagctgagccagctgtctgtgaccaggagcaaccagaacaactgtgaccccttcagcctgctgcacatcaacacagacaggagcacagtgggcctgagcctcatcagccccaacaacatgagctttgccaccaagaagtacatgaagagatatggcctgctgcagagcagtgacaacagtgaagatgaggaggagcccccagacaatgctgacagcaagtctgagtacctgctgaaccagaacctgcggagcatccctgagcagctgggcggccagaaggagcccagcaagaatgaccacgagatcatcaactgcagcaactgtgagagcgtgggcaccaatgctgacacccctgtgctgaggaacatcaccaatgaggtgctgcagaccaaggccaagcagcagctgacagagaagccagccttcctggtgaagaacctgaagcccagccctgctgtgaacctgaggacaggcaaggccgagttcacccagcaccctgagaaggaaaatgaaggagacatcaccatcttccctgagagcctgcagcccagcgagaccctgaagcagatgaacagcatgaacagcgtgggcaccttcctggatgtgaagaggctgcggcagctgcccaagctgttctag

SEQ ID NO: 168923 - DNA, 606 bp, synthetic construct
  misc_feature 1..606: note = Description of Artificial Sequence: Synthetic coding sequence
  source 1..606: mol_type = other DNA
atgagctttgccaccctgcggcctgcccctcctggccgctacctgtacccagaggtgagccccctgtctgaagatgaggaccggggcagtgacagcagcggcagtgatgagaagccctgccgggtgcacgccgcccgctgtggcctgcagggcgcccggcggcgggccggcggcagaagagctgggggcggcggccctgggggccggcccggccgggagccccggcagaggcacacagccaatgcccgggagcgggacaggaccaacagcgtgaacacagccttcaccgccctgcggaccctcatccccacagagcctgctgacaggaagctgagcaagattgagaccctgcggctggccagcagctacatcagccacctgggcaatgtgctgctggccggggaggcctgtggagatggccagccctgccacagcggccctgccttcttccacgccgcccgggccggcagccccccacctcctcctcctcctcctccagccagagatggagagaacacccagcccaagcagatctgcaccttctgcctgagcaaccagaggaagctgagcaaggaccgggacaggaagacagccatccgctcctag

SEQ ID NO: 168924 - DNA, 642 bp, synthetic construct
  misc_feature 1..642: note = Description of Artificial Sequence: Synthetic coding sequence
  source 1..642: mol_type = other DNA
atgcagctgcccctggccctgtgcctggtgtgcctgctggtgcacacagccttccgggtggtggagggccagggctggcaggccttcaagaatgatgccacagagatcatccctgagctgggggagtacccagagcccccacctgagctggagaacaacaagaccatgaacagagcagaaaatggaggccggcccccccaccacccctttgagaccaaggatgtgtctgagtacagctgccgggagctgcacttcacccgctacgtgacagatggcccctgccgcagcgccaagcctgtgacagagctggtgtgcagcggccagtgtggccctgcccggctgctgcccaatgccatcggccggggcaagtggtggaggcccagcggccctgacttccgctgcatcccagaccgctaccgggcccagagggtgcagctgctgtgccctggaggagaggccccccgggccaggaaggtgcggctggtggccagctgcaagtgcaagaggctgacccgcttccacaaccagagcgagctgaaggactttggaacagaggccgcccggccccagaagggcaggaagccccggccccgggcccggagcgccaaggccaaccaggccgagctggagaatgcctactag

SEQ ID NO: 168925 - DNA, 906 bp, synthetic construct
  misc_feature 1..906: note = Description of Artificial Sequence: Synthetic coding sequence
  source 1..906: mol_type = other DNA
atggccatgctggtgctggtgcccggccgggtgatgaggcccctgggcggccagctgtggaggttcctgccccggggcctggagttctggggccctgctgagggcacagcccgggtgctgctgcggcagttctgtgcccggcaggccgaggcctggagggccagcggccggcccggctactgcctgggcacccggcccctgagcacagcccggcccccaccaccctggagccagaagggccctggggacagcacccggcccagcaagccaggccctgtgtcctggaagagcctggccatcacctttgccatcggcggggccctgctggccggcatgaagcacgtgaagaaggagaaggccgagaagctggagaaggagcggcagaggcacatcggcaagcccctgctgggcggccccttcagcctgaccacccacactggagagaggaagacagacaaggactacctgggccagtggctgctgatctacttcggcttcacccactgcccagatgtgtgcccagaggagctggagaagatgatccaggtggtggatgaaattgacagcatcaccaccctgcctgacctgacccccctcttcatcagcattgatcctgagcgggacaccaaggaggccatcgccaactacgtgaaggagttcagccccaagctggtgggcctgaccggcacccgggaggaggtggaccaggtggcccgggcctacagagtgtactacagccctggccccaaggatgaagatgaggactacatcgtggaccacaccatcatcatgtacctgattggaccagatggagagttcctggactacttcggccagaacaagaggaaaggagaaattgctgccagcatcgccacccacatgaggccctacaggaagaagagctag

SEQ ID NO: 168926 - DNA, 813 bp, synthetic construct
  misc_feature 1..813: note = Description of Artificial Sequence: Synthetic coding sequence
  source 1..813: mol_type = other DNA
atggccatgctggtgctggtgcccggccgggtgatgaggcccctgggcggccagctgtggaggttcctgccccggggcctggagttctggggccctgctgagggcacagcccgggtgctgctgcggcagttctgtgcccggcaggccgaggcctggagggccagcggccggcccggctactgcctgggcacccggcccctgagcacagcccggcccccaccaccctggagccagaagggccctggggacagcacccggcccagcaagccaggccctgtgtcctggaagagcctggccatcacctttgccatcggcggggccctgctggccggcatgaagcacgtgaagaaggagaaggccgagaagctggagaaggagcggcagaggcacatcggcaagcccctgctgggcggccccttcagcctgaccacccacactggagagaggaagacagacaaggactacctggacagcatcaccaccctgcctgacctgacccccctcttcatcagcattgatcctgagcgggacaccaaggaggccatcgccaactacgtgaaggagttcagccccaagctggtgggcctgaccggcacccgggaggaggtggaccaggtggcccgggcctacagagtgtactacagccctggccccaaggatgaagatgaggactacatcgtggaccacaccatcatcatgtacctgattggaccagatggagagttcctggactacttcggccagaacaagaggaagggggagattgctgccagcatcgccacccacatgaggccctacaggaagaagagctag

SEQ ID NO: 168927 - DNA, 801 bp, synthetic construct
  misc_feature 1..801: note = Description of Artificial Sequence: Synthetic coding sequence
  source 1..801: mol_type = other DNA
atgctgctgctgaccaggagccccacagcctggcaccggctgagccagctgaagccccgggtgctgcccggcaccctgggcggccaggccctgcacctgcgctcctggctgctgagccggcagggccctgctgagaccggcggccagggccagccccagggccctggcctgcggacccggctgctgatcaccggcctgtttggagctggcctgggcggggcctggctggccctgcgggcagagaaggagcggctgcagcagcagaagaggacagaggccctgcggcaggccgctgtgggccagggcgacttccacctgctggaccaccggggccgggcccgctgcaaggctgacttccggggccagtgggtgctgatgtacttcggcttcacccactgcccagacatctgcccagatgagctggagaagctggtgcaggtggtgcggcagctggaggccgagcccggcctgccccctgtgcagcccgtcttcatcaccgtggaccctgagagagatgatgtggaggccatggcccgctacgtgcaggacttccacccccggctgctgggcctgaccggcagcaccaagcaggtggcccaggccagccacagctacagagtgtactacaatgccggccccaaggatgaggaccaggactacatcgtggaccacagcatcgccatctacctgctgaacccagatggcctcttcacagactactacggccgcagccgctctgctgagcagatcagtgacagcgtgagaagacacatggccgccttccgctctgtgctgtcctag

SEQ ID NO: 168928 - DNA, 801 bp, synthetic construct; identical to SEQ ID NO: 168927
  misc_feature 1..801: note = Description of Artificial Sequence: Synthetic coding sequence
  source 1..801: mol_type = other DNA

SEQ ID NO: 168929 - DNA, 411 bp, synthetic construct
  misc_feature 1..411: note = Description of Artificial Sequence: Synthetic coding sequence
  source 1..411: mol_type = other DNA
atgctgctgctgaccaggagccccacagcctggcaccggctgagccagctgaagccccgggtgctgcccggcaccctgggcggccaggccctgcacctgcgctcctggctgctgagccggcagggccctgctgagaccggcggccagggccagccccagggccctggcctgcggacccggctgctgatcaccggcctgtttggagctggcctgggcggggcctggctggccctgcgggcagagaaggagcggctgcagcagcagaagaggacagaggccctgcggcaggccgctgtgggccagggcgacttccacctgctggaccaccggggccgggcccgctgcaaggctgacttccggggccagtgggtgctgatgtacttcggcttcacccactgcccagacatctag

SEQ ID NO: 168930 - DNA, 411 bp, synthetic construct; identical to SEQ ID NO: 168929
  misc_feature 1..411: note = Description of Artificial Sequence: Synthetic coding sequence
  source 1..411: mol_type = other DNA

SEQ ID NO: 168931 - DNA, 801 bp, synthetic construct; identical to SEQ ID NO: 168927
  misc_feature 1..801: note = Description of Artificial Sequence: Synthetic coding sequence
  source 1..801: mol_type = other DNA

SEQ ID NO: 168932 - DNA, 801 bp, synthetic construct; identical to SEQ ID NO: 168927
  misc_feature 1..801: note = Description of Artificial Sequence: Synthetic coding sequence
  source 1..801: mol_type = other DNA

SEQ ID NO: 168933 - DNA, 1047 bp, synthetic construct
  misc_feature 1..1047: note = Description of Artificial Sequence: Synthetic coding sequence
  source 1..1047: mol_type = other DNA
atgcccaggagcttcctggtgaagaaggtgaagctggatgccttcagcagcgctgacctggagagcgcctacggccgggcccggagtgacctgggcgcccccctgcatgacaagggctacctgagtgactatgtgggccccagctctgtgtatgatggagatgctgaggccgccctgctgaagggccccagccctgagcccatgtatgctgctgctgtgcggggggagctgggccctgctgctgctggcagcgcccccccacccacccccaggcctgagctggccacagctgctgggggctacatcaatggagatgctgctgtgtctgagggctatgctgctgatgccttcttcatcacagatggccgcagcaggaggaaggccagcaatgccggcagcgctgctgcccccagcacagccagcgctgctgccccagatggagatgctgggggcggcggcggggccggcggccgcagcctgggcagcggccctgggggccggggcggcacccgggccggggccggcacagaggcccgggccggccctggagctgctggagctgggggcagacatgcctgtggagaatgtgggaagacctacgccaccagcagcaacctgagccgccacaagcagacccacaggagcctggacagccagctggcccggcgctgccccacctgtgggaaggtgtatgtgtccatgcctgccatggccatgcacctgctgacccatgacctgcggcacaagtgtggggtgtgtgggaaggccttcagccggccctggctgctgcagggccacatgaggagccacactggagagaagcccttcggctgtgcccactgcggcaaggcctttgctgacaggagcaacctgcgggcccacatgcagacccacagcgccttcaagcacttccagtgcaagcgctgcaagaagagctttgccctgaagagctacctgaacaagcactatgaaagtgcctgcttcaagggcggggccggcggccctgctgccccagccccaccccagctgagccctgtgcaggcctag

SEQ ID NO: 168934 - DNA, 4893 bp, synthetic construct
  misc_feature 1..4893: note = Description of Artificial Sequence: Synthetic coding sequence
  source 1..4893: mol_type = other DNA
atgctgaagtgcatccccctgtggcgctgcaacagacatgtggagagcgtggacaagaggcactgcagcctgcaggccgtgcctgaggagatctaccgctacagccgcagcctggaggagctgctgctggatgccaaccagctgcgggagctgcccaagcccttcttccggctgctgaacctgaggaagctgggcctgagtgacaatgagatccagaggctgcccccagaggtggccaacttcatgcagctggtggagctggatgtgtccagaaatgacatccctgagatccctgagagcatcaagttctgcaaggccctggagattgctgacttcagcggcaaccccctgagccggctgcctgatggcttcacccagctgcggagcctggcccacctggccctgaatgatgtgtccctgcaggccctgcctggagatgtgggcaacctggccaacctggtgaccctggagctgcgggagaacctgctgaagagcctgcctgccagcctgtccttcctggtgaagctggagcagctggacctgggcggcaatgacctggaggtgctgcctgacaccctgggcgccctgcccaacctgcgggagctgtggctggacaggaaccagctgagcgccctgcccccagagctgggcaacctgcggcggctggtgtgcctggatgtgtctgaaaatcggctggaggagctgcctgctgagctgggcggcctggtgctgctgacagacctgctgctgagccagaacctgctgcggcggctgcctgatggcatcggccagctgaagcagctgagcatcctgaaggtggaccagaaccggctgtgtgaggtgacagaggccatcggggactgtgagaacctgtctgagctgatcctgacagagaacctgctgatggccctgcccaggagcctgggcaagctgaccaagctgaccaacctgaatgtggacaggaaccacctggaggccctgcccccagaaattggaggctgtgtggccctgtctgtgctgagcctgcgggacaaccggctggccgtgctgcccccagagctggcccacaccacagagctgcacgtgctggatgtggccggcaaccggctgcagagcctgccctttgccctgacccacctgaacctgaaggccctgtggctggccgagaaccaggcccagcccatgctgcgcttccagacagaagatgatgccaggactggagagaaggtgctgacctgctacctgctgccccagcagcccccacccagcctggaggatgctggccagcagggcagcctgtctgagacctggagcgatgccccacccagccgggtgtctgtcatccagttcctggaggcccccatcggagatgaagatgctgaggaggccgctgctgagaagaggggcctgcagaggcgggccaccccccaccccagcgagctgaaggtgatgaagaggagcattgagggcagaagaagtgaggcctgcccctgccagcctgacagcggcagccccctgcctgctgaggaggagaagaggctgtctgctgagagcggcctgtctgaggacagccggcccagcgccagcacagtgtctgaggccgagcctgagggccccagcgctgaggcccagggcggcagccagcaggaggccaccacagctggaggagaggaggatgctgaggaggactaccaggagcccaccgtgcactttgctgaagatgccctgctgcctggagatgaccgggagattgaggagggccagcctgaggccccctggaccctgcccggcggccggcagaggctcatcaggaaggacaccccccactacaagaagcacttcaagatcagcaagctgccccagcctgaggccgtggtggccctgctgcagggcatgcagccagatggagagggccctgtggcccctgggggctggcacaacggcccccacgccccctgggccccccgggcccagaaggaggaggaggaggaggaggagggcagcccccaggaggaggaggtggaggaggaggaggagaacagagctgaggaggaggaggccagcacagaggaggaggacaaggagggcgctgtggtgtctgcccccagcgtgaagggcgtgtcctttgaccaggccaacaacctgctgattgaaccagcccgcatcgaggaggaggagctgaccctgaccatcctgcggcagacaggaggcctgggcatcagcattgctgggggcaagggcagcaccccctacaagggagatgatgagggcatcttcatcagccgggtgtctgaggagggccctgctgcccgggccggcgtgcgggtgggggacaagctgctggaggtgaatggagtggccctgcagggcgctgagcaccacgaggccgtggaggccctgcggggagctggaacagctgtgcagatgagggtgtggagggagaggatggtggagccagaaaatgctgtgaccatcacccccctgcggccagaagatgactacagcccccgggagaggagaggaggcggcctgcggctgcccctgctgcccccagagagccctggccccctgcggcagagacatgtggcctgcctggcccggtctgagcggggcctgggcttcagcattgctgggggcaagggcagcaccccctacagagctggagatgctggcatctttgtgtccagaattgctgagggcggggccgcccaccgggccggcaccctgcaggtgggggacagagtgctgagcatcaatggagtggatgtgacagaggcccggcatgaccatgctgtgtccctgctgacagctgccagccccaccatcgccctgctgctggagcgggaggccggcggccccctgccccccagccccctgccccacagcagccccccaacagctgctgtggccaccaccagcatcaccacagccaccccaggagtgcccggcctgcccagcctggcccccagcctgctggccgccgccctggagggcccctaccctgtggaggagatccggctgccccgggccggcggccccctgggcctgagcatcgtgggcggcagtgaccacagcagccacccctttggagtgcaggagcccggggtcttcatcagcaaggtgctgccccggggcctggccgcccggagcggcctgcgggtgggggaccgcatcctggccgtgaatggccaggatgtgagagatgccacccaccaggaggccgtgtctgccctgctgcggccctgcctggagctgagcctgctggtgcggcgggaccctgcccctcctggcctgcgggagctgtgcatccagaaggcccctggagagcggctgggcatcagcatccggggcggggcccggggccatgctggcaacccccgggaccccacagatgagggcatcttcatcagcaaggtgagccccaccggggctgctggaagagatggccgcctgcgggtgggcctgcggctgctggaggtgaaccagcagagcctgctgggcctgacccacggggaggccgtgcagctgctgcggtctgtgggggacaccctgactgtgctggtgtgtgatggctttgaggccagcacagatgctgccctggaggtgtcccctggggtgattgccaacccctttgctgctggcatcggccacaggaacagcctggagagcatcagcagcattgaccgggagctgagccctgagggccctgggaaggagaaggagctgcccggccagaccctgcactggggccctgaggccacagaggccgccggccggggcctgcagcccctgaagctggactaccgggccctggccgctgtgcccagcgctggctctgtgcagagggtgcccagcggggccgccggcggcaagatggccgagagcccctgcagccccagcggccagcagccccccagcccccccagcccagatgagctgcctgccaacgtgaagcaggcctaccgggcctttgctgctgtgcccaccagccaccccccagaagatgccccagcccagccccccaccccaggccctgctgccagccctgagcagctgtccttccgggagcggcagaagtactttgagctggaggtgcgggtgccccaggccgagggcccccccaagagggtgtccctggtgggcgcagatgacctgaggaagatgcaggaggaggaggccaggaagctgcagcagaagagggcccagatgctgcgggaggccgctgaggccggggctgaggcccggctggccctggatggagagaccctgggggaggaggagcaggaggatgagcagcccccctgggccagccccagccccaccagccggcagagccctgccagccccccacccctgggcggcggggcccctgtgaggacagccaaggccgagaggaggcaccaggagcggctgcgggtgcagagccctgagcccccagcccctgagcgggccctgagccctgctgagctgcgggccctggaggccgagaagagggccctgtggagggctgccaggatgaagagcctggagcaggatgccctgcgggcccagatggtgctgagccgcagccaggagggccggggcacccggggccccctggagcggctggccgaggcccccagccctgcccccacccccagccccacccctgtggaggacctgggcccccagaccagcaccagccctggccgcctgagcccagactttgctgaggagctgcggagcctggagcccagccccagccctggcccccaggaggaggatggagaggtggccctggtgctgctgggccggcccagccctggagctgtgggcccagaagatgtggccctgtgcagcagcagaagacctgtgcggcccggccggcggggcctgggccctgtgcccagctag

SEQ ID NO: 168935 - DNA, 4650 bp, synthetic construct
  misc_feature 1..4650: note = Description of Artificial Sequence: Synthetic coding sequence
  source 1..4650: mol_type = other DNA
atgcagctggtggagctggatgtgtccagaaatgacatccctgagatccctgagagcatcaagttctgcaaggccctggagattgctgacttcagcggcaaccccctgagccggctgcctgatggcttcacccagctgcggagcctggcccacctggccctgaatgatgtgtccctgcaggccctgcctggagatgtgggcaacctggccaacctggtgaccctggagctgcgggagaacctgctgaagagcctgcctgccagcctgtccttcctggtgaagctggagcagctggacctgggcggcaatgacctggaggtgctgcctgacaccctgggcgccctgcccaacctgcgggagctgtggctggacaggaaccagctgagcgccctgcccccagagctgggcaacctgcggcggctggtgtgcctggatgtgtctgagaaccggctggaggagctgcctgctgagctgggcggcctggtgctgctgacagacctgctgctgagccagaacctgctgcggcggctgcctgatggcatcggccagctgaagcagctgagcatcctgaaggtggaccagaaccggctgtgtgaggtgacagaggccatcggggactgtgagaacctgtctgagctgatcctgacagagaacctgctgatggccctgcccaggagcctgggcaagctgaccaagctgaccaacctgaatgtggacaggaaccacctggaggccctgcccccagagatcggcggctgtgtggccctgtctgtgctgagcctgcgggacaaccggctggccgtgctgcccccagagctggcccacaccacagagctgcacgtgctggatgtggccggcaaccggctgcagagcctgccctttgccctgacccacctgaacctgaaggccctgtggctggccgagaaccaggcccagcccatgctgcgcttccagacagaagatgatgccaggactggagagaaggtgctgacctgctacctgctgccccagcagcccccacccagcctggaggatgctggccagcagggcagcctgtctgagacctggagcgatgccccacccagccgggtgtctgtcatccagttcctggaggcccccatcggagatgaagatgctgaggaggccgctgctgagaagaggggcctgcagaggcgggccaccccccaccccagcgagctgaaggtgatgaagaggagcattgagggccgccgctctgaggcctgcccctgccagccagattctggcagccccctgcctgctgaggaggagaagaggctgtctgctgagagcggcctgtctgaggacagccggcccagcgccagcacagtgtctgaggccgagcctgagggccccagcgctgaggcccagggcggcagccagcaggaggccaccacagctggaggagaagaagatgctgaggaggactaccaggagcccaccgtgcactttgctgaagatgccctgctgcctggagatgaccgggagattgaggagggccagcctgaggccccctggaccctgcccggcggccggcagaggctcatcaggaaggacaccccccactacaagaagcacttcaagatcagcaagctgccccagcctgaggccgtggtggccctgctgcagggcatgcagccagatggagagggccctgtggcccctgggggctggcacaacggcccccacgccccctgggccccccgggcccagaaggaggaggaggaggaggaggagggcagcccccaggaggaggaggtggaggaggaggaggagaacagagctgaggaggaggaggccagcacagaggaggaggacaaggagggcgctgtggtgtctgcccccagcgtgaagggcgtgtcctttgaccaggccaacaacctgctgattgagcccgccagaattgaggaggaggagctgaccctgaccatcctgcggcagacaggaggcctgggcatcagcattgctgggggcaagggcagcaccccctacaagggagatgatgagggcatcttcatcagccgggtgtctgaggagggccctgctgcccgggccggcgtgcgggtgggggacaagctgctggaggtgaatggagtggccctgcagggcgctgagcaccatgaagctgtggaggccctgcggggggccggcacagctgtgcagatgagggtgtggagggagaggatggtggagccagaaaatgctgtgaccatcacccccctgcggccagaagatgactacagcccccgggagcggcggggcggcggcctgcggctgcccctgctgcccccagagagccctggccccctgcggcagagacatgtggcctgcctggcccggtctgagcggggcctgggcttcagcattgctgggggcaagggcagcaccccctacagagctggagatgctggcatctttgtgtccagaattgctgagggcggggccgcccacagagctggcaccctgcaggtgggggacagagtgctgagcatcaacggggtggatgtgacagaggcccggcatgaccatgctgtgtccctgctgacagctgccagccccaccatcgccctgctgctggagcgggaggccggcggccccctgccccccagccccctgccccacagcagccccccaacagctgctgtggccaccaccagcatcaccacagccaccccaggagtgcccggcctgcccagcctggcccccagcctgctggccgccgccctggagggcccctaccctgtggaggagatccggctgcccagggctgggggccccctgggcctgagcatcgtgggcggcagtgaccacagcagccaccccttcggcgtgcaggagcccggggtcttcatcagcaaggtgctgccccggggcctggccgcccggagcggcctgcgggtgggggaccgcatcctggccgtgaatggccaggatgtgagagatgccacccaccaggaggccgtgtctgccctgctgcggccctgcctggagctgagcctgctggtgagaagagatcctgcccctcctggcctgcgggagctgtgcatccagaaggcccctggagagcggctgggcatcagcatccggggcggggcccggggccacgccggcaacccccgggaccccacagatgagggcatcttcatcagcaaggtgagccccactggagctgctggaagagatggccgcctgcgggtgggcctgcggctgctggaggtgaaccagcagagcctgctgggcctgacccatggagaggccgtgcagctgctgcggtctgtgggggacaccctgactgtgctggtgtgtgatggctttgaggccagcacagatgctgccctggaggtgtccccaggagtcatcgccaacccctttgctgctggcatcggccacaggaacagcctggagagcatcagcagcattgaccgggagctgagccctgagggccctgggaaggagaaggagctgcccggccagaccctgcactggggccctgaggccacagaagctgctggccggggcctgcagcccctgaagctggactaccgggccctggccgctgtgcccagcgctggctctgtgcagagggtgcccagcggggctgctgggggcaagatggccgagagcccctgcagccccagcggccagcagccccccagcccccccagcccagatgagctgcctgccaacgtgaagcaggcctaccgggcctttgctgctgtgcccaccagccaccccccagaagatgccccagcccagccccccaccccaggccctgctgccagccctgagcagctgtccttccgggagcggcagaagtactttgagctggaggtgcgggtgccccaggccgagggcccccccaagagggtgtccctggtgggcgcagatgacctgaggaagatgcaggaggaggaggccaggaagctgcagcagaagagggcccagatgctgcgggaggccgctgaggccggggctgaggcccggctggccctggatggagagaccctgggggaggaggagcaggaggatgagcagcccccctgggccagccccagccccaccagccggcagagccctgccagccccccacccctgggcggcggggcccctgtgaggacagccaaggccgagcggcggcaccaggagcggctgcgggtgcagagccctgagcccccagcccctgagcgggccctgagccctgctgagctgcgggccctggaggccgagaagagggccctgtggagggctgccaggatgaagagcctggagcaggatgccctgcgggcccagatggtgctgagccgcagccaggagggccggggcacccggggccccctggagcggctggccgaggcccccagccctgcccccacccccagccccacccctgtggaggacctgggcccccagaccagcaccagccctggccgcctgagcccagactttgctgaggagctgcggagcctggagcccagccccagccctggcccccaggaggaggatggagaggtggccctggtgctgctgggccggcccagccctggagctgtgggcccagaagatgtggccctgtgcagcagccggcggcctgtgcggcctggaagaagaggcctgggccctgtgcccagctag

SEQ ID NO: 168936 - DNA, 2268 bp, synthetic construct
  misc_feature 1..2268: note = Description of Artificial Sequence: Synthetic coding sequence
  source 1..2268: mol_type = other DNA
atgcagccagatggagagggccctgtggcccctgggggctggcacaacggcccccacgccccctgggccccccgggcccagaaggaggaggaggaggaggaggagggcagcccccaggaggaggaggtggaggaggaggaggagaacagagctgaggaggaggaggccagcacagaggaggaggacaaggagggcgctgtggtgtctgcccccagcgtgaagggcgtgtcctttgaccaggccaacaacctgctgattgagcccgccagaattgaggaggaggagctgaccctgaccatcctgcggcagacaggaggcctgggcatcagcattgctgggggcaagggcagcaccccctacaagggagatgatgagggcatcttcatcagccgggtgtctgaggagggccctgctgcccgggccggcgtgcgggtgggggacaagctgctggaggtgaatggagtggccctgcagggcgctgagcaccatgaagctgtggaggccctgcggggggccggcacagctgtgcagatgagggtgtggagggagaggatggtggagccagaaaatgctgtgaccatcacccccctgcggccagaagatgactacagcccccgggagcggcggggcggcggcctgcggctgcccctgctgcccccagagagccctggccccctgcggcagagacatgtggcctgcctggcccggtctgagcggggcctgggcttcagcattgctgggggcaagggcagcaccccctacagagctggagatgctggcatctttgtgtccagaattgctgagggcggggccgcccacagagctggcaccctgcaggtgggggacagagtgctgagcatcaacggggtggatgtgacagaggcccggcatgaccatgctgtgtccctgctgacagctgccagccccaccatcgccctgctgctggagcgggaggccggcggccccctgccccccagccccctgccccacagcagccccccaacagctgctgtggccaccaccagcatcaccacagccaccccaggagtgcccggcctgcccagcctggcccccagcctgctggccgccgccctggagggcccctaccctgtggaggagatccggctgcccagggctgggggccccctgggcctgagcatcgtgggcggcagtgaccacagcagccaccccttcggcgtgcaggagcccggggtcttcatcagcaaggtgctgccccggggcctggccgcccggagcggcctgcgggtgggggaccgcatcctggccgtgaatggccaggatgtgagagatgccacccaccaggaggccgtgtctgccctgctgcggccctgcctggagctgagcctgctggtgagaagagatcctgcccctcctggcctgcgggagctgtgcatccagaaggcccctggagagcggctgggcatcagcatccggggcggggcccggggccacgccggcaacccccgggaccccacagatgagggcatcttcatcagcaaggtgagccccactggagctgctggaagagatggccgcctgcgggtgggcctgcggctgctggaggtgaaccagcagagcctgctgggcctgacccatggagaggccgtgcagctgctgcggtctgtgggggacaccctgactgtgctggtgtgtgatggctttgaggccagcacagatgctgccctggaggtgtccccaggagtcatcgccaacccctttgctgctggcatcggccacaggaacagcctggagagcatcagcagcattgaccgggagctgagccctgagggccctgggaaggagaaggagctgcccggccagaccctgcactggggccctgaggccacagaagctgctggccggggcctgcagcccctgaagctggactaccgggccctggccgctgtgcccagcgctggctctgtgcagagggtgcccagcggggctgctgggggcaagatggccgagagcccctgcagccccagcggccagcagccccccagcccccccagcccagatgagctgcctgccaacgtgaagcaggcctaccgggcctttgctgctgtgcccaccagccaccccccagaagatgccccagcccagccccccaccccaggccctgctgccagccctgagcagctgtccttccgggagcggcagaagtactttgagctggaggtgcgggtgccccaggccgagggccccctgcggcctggaagaagaggcctgggccctgtgcccagctag

SEQ ID NO: 168937 - DNA, 4968 bp, synthetic construct
  misc_feature 1..4968: note = Description of Artificial Sequence: Synthetic coding sequence
  source 1..4968: mol_type = other DNA
atgctgaagtgcatccccctgtggcgctgcaacagacatgtggagagcgtggacaagaggcactgcagcctgcaggccgtgcctgaggagatctaccgctacagccgcagcctggaggagctgctgctggatgccaaccagctgcgggagctgcccaagcccttcttccggctgctgaacctgaggaagctgggcctgagtgacaatgagatccagaggctgcccccagaggtggccaacttcatgcagctggtggagctggatgtgtccagaaatgacatccctgagatccctgagagcatcaagttctgcaaggccctggagattgctgacttcagcggcaaccccctgagccggctgcctgatggcttcacccagctgcggagcctggcccacctggccctgaatgatgtgtccctgcaggccctgcctggagatgtgggcaacctggccaacctggtgaccctggagctgcgggagaacctgctgaagagcctgcctgccagcctgtccttcctggtgaagctggagcagctggacctgggcggcaatgacctggaggtgctgcctgacaccctgggcgccctgcccaacctgcgggagctgtggctggacaggaaccagctgagcgccctgcccccagagctgggcaacctgcggcggctggtgtgcctggatgtgtctgaaaatcggctggaggagctgcctgctgagctgggcggcctggtgctgctgacagacctgctgctgagccagaacctgctgcggcggctgcctgatggcatcggccagctgaagcagctgagcatcctgaaggtggaccagaaccggctgtgtgaggtgacagaggccatcggggactgtgagaacctgtctgagctgatcctgacagagaacctgctgatggccctgcccaggagcctgggcaagctgaccaagctgaccaacctgaatgtggacaggaaccacctggaggccctgcccccagaaattggaggctgtgtggccctgtctgtgctgagcctgcgggacaaccggctggccgtgctgcccccagagctggcccacaccacagagctgcacgtgctggatgtggccggcaaccggctgcagagcctgccctttgccctgacccacctgaacctgaaggccctgtggctggccgagaaccaggcccagcccatgctgcgcttccagacagaagatgatgccaggactggagagaaggtgctgacctgctacctgctgccccagcagcccccacccagcctggaggatgctggccagcagggcagcctgtctgagacctggagcgatgccccacccagccgggtgtctgtcatccagttcctggaggcccccatcggagatgaagatgctgaggaggccgctgctgagaagaggggcctgcagaggcgggccaccccccaccccagcgagctgaaggtgatgaagaggagcattgagggcagaagaagtgaggcctgcccctgccagcctgacagcggcagccccctgcctgctgaggaggagaagaggctgtctgctgagagcggcctgtctgaggacagccggcccagcgccagcacagtgtctgaggccgagcctgagggccccagcgctgaggcccagggcggcagccagcaggaggccaccacagctggaggagaggaggatgctgaggaggactaccaggagcccaccgtgcactttgctgaagatgccctgctgcctggagatgaccgggagattgaggagggccagcctgaggccccctggaccctgcccggcggccggcagaggctcatcaggaaggacaccccccactacaagaagcacttcaagatcagcaagctgccccagcctgaggccgtggtggccctgctgcagggcatgcagccagatggagagggccctgtggcccctgggggctggcacaacggcccccacgccccctgggccccccgggcccagaaggaggaggaggaggaggaggagggcagcccccaggaggaggaggtggaggaggaggaggagaacagagctgaggaggaggaggccagcacagaggaggaggacaaggagggcgctgtggtgtctgcccccagcgtgaagggcgtgtcctttgaccaggccaacaacctgctgattgaaccagcccgcatcgaggaggaggagctgaccctgaccatcctgcggcagacaggaggcctgggcatcagcattgctgggggcaagggcagcaccccctacaagggagatgatgagggcatcttcatcagccgggtgtctgaggagggccctgctgcccgggccggcgtgcgggtgggggacaagctgctggaggtgaatggagtggccctgcagggcgctgagcaccacgaggccgtggaggccctgcggggagctggaacagctgtgcagatgagggtgtggagggagaggatggtggagccagaaaatgctgtgaccatcacccccctgcggccagaagatgactacagcccccgggagaggagaggaggcggcctgcggctgcccctgctgcccccagagagccctggccccctgcggcagagacatgtggcctgcctggcccggtctgagcggggcctgggcttcagcattgctgggggcaagggcagcaccccctacagagctggagatgctggcatctttgtgtccagaattgctgagggcggggccgcccaccgggccggcaccctgcaggtgggggacagagtgctgagcatcaatggagtggatgtgacagaggcccggcatgaccatgctgtgtccctgctgacagctgccagccccaccatcgccctgctgctggagcgggaggccggcggccccctgccccccagccccctgccccacagcagccccccaacagctgctgtggccaccaccagcatcaccacagccaccccaggagtgcccggcctgcccagcctggcccccagcctgctggccgccgccctggagggcccctaccctgtggaggagatccggctgccccgggccggcggccccctgggcctgagcatcgtgggcggcagtgaccacagcagccacccctttggagtgcaggagcccggggtcttcatcagcaaggtgctgccccggggcctggccgcccggagcggcctgcgggtgggggaccgcatcctggccgtgaatggccaggatgtgagagatgccacccaccaggaggccgtgtctgccctgctgcggccctgcctggagctgagcctgctggtgcggcgggaccctgcccctcctggcctgcgggagctgtgcatccagaaggcccctggagagcggctgggcatcagcatccggggcggggcccggggccatgctggcaacccccgggaccccacagatgagggcatcttcatcagcaaggtgagccccaccggggctgctggaagagatggccgcctgcgggtgggcctgcggctgctggaggtgaaccagcagagcctgctgggcctgacccacggggaggccgtgcagctgctgcggtctgtgggggacaccctgactgtgctggtgtgtgatggctttgaggccagcacagatgctgccctggaggtgtcccctggggtgattgccaacccctttgctgctggcatcggccacaggaacagcctggagagcatcagcagcattgaccgggagctgagccctgagggccctgggaaggagaaggagctgcccggccagaccctgcactggggccctgaggccacagaggccgccggccggggcctgcagcccctgaagctggactaccgggccctggccgctgtgcccagcgctggctctgtgcagagggtgcccagcggggccgccggcggcaagatggccgagagcccctgcagccccagcggccagcagccccccagcccccccagcccagatgagctgcctgccaacgtgaagcaggcctaccgggcctttgctgctgtgcccaccagccaccccccagaagatgccccagcccagccccccaccccaggccctgctgccagccctgagcagctgtccttccgggagcggcagaagtactttgagctggaggtgcgggtgccccaggccgagggcccccccaagagggtgtccctggtgggcgcagatgacctgaggaagatgcaggaggaggaggccaggaagctgcagcagaagagggcccagatgctgcgggaggccgctgaggccggggctgaggcccggctggccctggatggagagaccctgggggaggaggagcaggaggatgagcagcccccctgggccagccccagccccaccagccggcagagccctgccagccccccacccctgggcggcggggcccctgtgaggacagccaaggccgagaggaggcaccaggagcggctgcgggtgcagagccctgagcccccagcccctgagcgggccctgagccctgctgagctgcgggccctggaggccgagaagagggccctgtggagggctgccaggatgaagagcctggagcaggatgccctgcgggcccagatggtgctgagccgcagccaggagggccggggcacccggggccccctggagcggctggccgaggcccccagccctgcccccacccccagccccacccctgtggaggacctgggcccccagaccagcaccagccctggccgcctgcccctgagcggcaagaagtttgactaccgggcctttgctgccctgcccagcagcaggcctgtgtatgacatccagagcccagactttgctgaggagctgcggagcctggagcccagccccagccctggcccccaggaggaggatggagaggtggccctggtgctgctgggccggcccagccctggagctgtgggcccagaagatgtggccctgtgcagcagccggcggcctgtgcggcctggaagaagaggcctgggccctgtgcccagctag

SEQ ID NO: 168938 - DNA, 2427 bp, synthetic construct
  misc_feature 1..2427: note = Description of Artificial Sequence: Synthetic coding sequence
  source 1..2427: mol_type = other DNA
atgtggttctttgcccgggaccctgtgcgggacttcccctttgagctgatccctgagcccccagagggcggcctgcccggcccctgggccctgcaccggggcaggaagaaggccaccggcagccctgtgtccatctttgtgtatgatgtgaagccaggagctgaggagcagacccaggtggccaaggccgccttcaagcgcttcaagaccctgcggcaccccaacatcctggcctacattgatggcctggagacagagaagtgcctgcacgtggtgacagaagctgtgacccccctgggcatctacctgaaggcccgggtggaggccggcggcctgaaggagctggagatctcctggggcctgcaccagatcgtgaaggccctgtccttcctggtgaatgactgcagcctcatccacaacaacgtgtgcatggctgctgtgtttgtggaccgggccggggagtggaagctgggcggcctggactacatgtacagcgcccagggcaatggaggcggcccccccaggaagggcatccctgagctggagcagtatgaccccccagagctggccgacagcagcggccgggtggtgcgggagaagtggagcgctgacatgtggaggctgggctgcctgatctgggaggtgttcaacggccccctgcccagggctgctgccctgagaaatcctgggaagatccccaagaccctggtgccccactactgtgagctggtgggcgccaaccccaaggtgcggcccaacccagcccgcttcctgcagaactgccgggcccctgggggcttcatgagcaacagatttgtggagaccaacctcttcctggaggagatccagatcaaggagcctgctgagaagcagaagttcttccaggagctgagcaagagcctggatgccttccctgaggacttctgccgccacaaggtgctgccccagctgctgacagcctttgaatttggaaatgctggagctgtggtgctgacccccctcttcaaggtgggcaagttcctgtctgctgaggagtaccagcagaagatcatccctgtggtggtgaagatgttcagcagcacagaccgggccatgaggatccggctgctgcagcagatggagcagttcatccagtacctggatgagcccaccgtgaacacccagatcttcccccacgtggtgcacggcttcctggacaccaacccagccatccgggagcagacagtgaagtccatgctgctgctggcccccaagctgaatgaggccaacctgaatgtggagctgatgaagcactttgcccggctgcaggccaaggatgagcagggccccatccgctgcaacaccaccgtgtgcctgggcaagattggcagctacctgagcgccagcaccaggcaccgggtgctgaccagcgccttcagccgggccacccgggacccctttgcccccagccgggtggccggcgtgctgggctttgctgccacccacaacctgtacagcatgaatgactgtgcccagaagatcctgcctgtgctgtgtggcctgactgtggaccctgagaagtctgtgcgggaccaggccttcaaggccatccgctccttcctgagcaagctggagagcgtgtctgaggaccccacccagctggaggaggtggagaaggatgtgcacgccgccagcagccctggcatgggcggggccgccgcctcctgggccggctgggccgtgactggagtgagcagcctgaccagcaagctgatccgcagccaccccaccacagcccccacagagaccaacatcccccagaggcccaccccagagggcgtgcctgccccagcccccacccctgtgcctgccacccccaccaccagcggccactgggagacccaggaggaggacaaggacacagctgaggacagcagcacagctgaccgctgggatgatgaggactggggcagcctggagcaggaggccgagagcgtgctggcccagcaggatgactggagcactggaggccaggtgtcccgggccagccaggtgagcaacagcgaccacaagagcagcaagagccctgagagtgactggagctcctgggaggccgagggctcctgggagcagggctggcaggagcccagcagccaggagcccccaccagatggcacccggctggccagcgagtacaactggggcggccctgagagcagtgacaagggggacccctttgccaccctgagcgcccggcccagcacccagcccaggccagacagctggggcgaggacaactgggagggcctggagacagacagccggcaggtgaaggccgagctggccaggaagaagcgggaggagaggagaagagagatggaggccaagagagctgagaggaaggtggccaagggccccatgaagctgggcgccaggaagctggactag

SEQ ID NO: 168939 - DNA, 2346 bp, synthetic construct
  misc_feature 1..2346: note = Description of Artificial Sequence: Synthetic coding sequence
  source 1..2346: mol_type = other DNA
atgtggttctttgcccgggaccctgtgcgggacttcccctttgagctgatccctgagcccccagagggcggcctgcccggcccctgggccctgcaccggggcaggaagaaggccaccggcagccctgtgtccatctttgtgtatgatgtgaagccaggagctgaggagcagacccaggtggccaaggccgccttcaagcgcttcaagaccctgcggcaccccaacatcctggcctacattgatggcctggagacagagaagtgcctgcacgtggtgacagaagctgtgacccccctgggcatctacctgaaggcccgggtggaggccggcggcctgaaggagctggagatctcctggggcctgcaccagatcgtgaaggccctgtccttcctggtgaatgactgcagcctcatccacaacaacgtgtgcatggctgctgtgtttgtggaccgggccggggagtggaagctgggcggcctggactacatgtacagcgcccagggcaatggaggcggcccccccaggaagggcatccctgagctggagcagtatgaccccccagagctggccgacagcagcggccgggtggtgcgggagaagtggagcgctgacatgtggaggctgggctgcctgatctgggaggtgttcaacggccccctgcccagggctgctgccctgagaaatcctgggaagatccccaagaccctggtgccccactactgtgagctggtgggcgccaaccccaaggtgcggcccaacccagcccgcttcctgcagaactgccgggcccctgggggcttcatgagcaacagatttgtggagaccaacctcttcctggaggagatccagatcaaggagcctgctgagaagcagaagttcttccaggagctgagcaagagcctggatgccttccctgaggacttctgccgccacaaggtgctgccccagctgctgacagcctttgaatttggaaatgctggagctgtggtgctgacccccctcttcaaggtgggcaagttcctgtctgctgaggagtaccagcagaagatcatccctgtggtggtgaagatgttcagcagcacagaccgggccatgaggatccggctgctgcagcagatggagcagttcatccagtacctggatgagcccaccgtgaacacccagatcttcccccacgtggtgcacggcttcctggacaccaacccagccatccgggagcagacagtgaagtccatgctgctgctggcccccaagctgaatgaggccaacctgaatgtggagctgatgaagcactttgcccggctgcaggccaaggatgagcagggccccatccgctgcaacaccaccgtgtgcctgggcaagattggcagctacctgagcgccagcaccaggcaccgggtgctgaccagcgccttcagccgggccacccgggacccctttgcccccagccgggtggccggcgtgctgggctttgctgccacccacaacctgtacagcatgaatgactgtgcccagaagatcctgcctgtgctgtgtggcctgactgtggaccctgagaagtctgtgcgggaccaggccttcaaggccatccgctccttcctgagcaagctggagagcgtgtctgaggaccccacccagctggaggaggtggagaaggatgtgcacgccgccagcagccctggcatgggcggggccgccgcctcctgggccggctgggccgtgactggagtgagcagcctgaccagcaagctgatccgcagccaccccaccacagcccccacagagaccaacatcccccagaggcccaccccagagggcgtgcctgccccagcccccacccctgtgcctgccacccccaccaccagcggccactgggagacccaggaggaggacaaggacacagctgaggacagcagcacagctgaccgctgggatgatgaggactggggcagcctggagcaggaggccgagagcgtgctggcccagcaggatgactggagcactggaggccaggtgtcccgggccagccaggtgagcaacagcgaccacaagagcagcaagagccctgagagtgactggagctcctgggaggccgagggctcctgggagcagggctggcaggagcccagcagccaggagcccccaccagatggcacccggctggccagcgagtacaactggggcggccctgagagcagtgacaagggggacccctttgccaccctgagcgcccggcccagcacccaggacaggagccggctgtcctggccaggccgcagcgcccggagcggcggcggccgctggaggcccaatgccccccggggccgctggccccgggccccctag

SEQ ID NO: 168940 - DNA, 2124 bp, synthetic construct
  misc_feature 1..2124: note = Description of Artificial Sequence: Synthetic coding sequence
  source 1..2124: mol_type = other DNA
atgtggttctttgcccgggaccctgtgcgggacttcccctttgagctgatccctgagcccccagagggcggcctgcccggcccctgggccctgcaccggggcaggaagaaggccaccggcagccctgtgtccatctttgtgtatgatgtgaagccaggagctgaggagcagacccaggtggccaaggccgccttcaagcgcttcaagaccctgcggcaccccaacatcctggcctacattgatggcctggagacagagaagtgcctgcacgtggtgacagaagctgtgacccccctgggcatctacctgaaggcccgggtggaggccggcggcctgaaggagctggagatctcctggggcctgcaccagatcgtgaaggccctgtccttcctggtgaatgactgcagcctcatccacaacaacgtgtgcatggctgctgtgtttgtggaccgggccggggagtggaagctgggcggcctggactacatgtacagcgcccagggcaatggaggcggcccccccaggaagggcatccctgagctggagcagtatgaccccccagagctggccgacagcagcggccgggtggtgcgggagaagtggagcgctgacatgtggaggctgggctgcctgatctgggaggtgttcaacggccccctgcccagggctgctgccctgagaaatcctgggaagatccccaagaccctggtgccccactactgtgagctggtgggcgccaaccccaaggtgcggcccaacccagcccgcttcctgcagaactgccgggcccctgggggcttcatgagcaacagatttgtggagaccaacctcttcctggaggagatccagatcaaggagcctgctgagaagcagaagttcttccaggagctgagcaagagcctggatgccttccctgaggacttctgccgccacaaggtgctgccccagctgctgacagcctttgaatttggaaatgctggagctgtggtgctgacccccctcttcaaggtgggcaagttcctgtctgctgaggagtaccagcagaagatcatccctgtggtggtgaagatgttcagcagcacagaccgggccatgaggatccggctgctgcagcagatggagcagttcatccagtacctggatgagcccaccgtgaacacccagatcttcccccacgtggtgcacggcttcctggacaccaacccagccatccgggagcagacagtgaagtccatgctgctgctggcccccaagctgaatgaggccaacctgaatgtggagctgatgaagcactttgcccggctgcaggccaaggatgagcagggccccatccgctgcaacaccaccgtgtgcctgggcaagattggcagctacctgagcgccagcaccaggcaccgggtgctgaccagcgccttcagccgggccacccgggacccctttgcccccagccgggtggccggcgtgctgggctttgctgccacccacaacctgtacagcatgaatgactgtgcccagaagatcctgcctgtgctgtgtggcctgactgtggaccctgagaagtctgtgcgggaccaggccttcaaggccatccgctccttcctgagcaagctggagagcgtgtctgaggaccccacccagctggaggaggtggagaaggatgtgcacgccgccagcagccctggcatgggcggggccgccgcctcctgggccggctgggccgtgactggagtgagcagcctgaccagcaagctgatccgcagccaccccaccacagcccccacagagaccaacatcccccagaggcccaccccagagggccactgggagacccaggagcccccaccagatggcacccggctggccagcgagtacaactggggcggccctgagagcagtgacaagggggacccctttgccaccctgagcgcccggcccagcacccagcccaggccagacagctggggcgaggacaactgggagggcctggagacagacagccggcaggtgaaggccgagctggccaggaagaagcgggaggagcggcggcgggagatggaggccaagagagctgagaggaaggtggccaagggccccatgaagctgggcgccaggaagctggactag

SEQ ID NO: 168941 - DNA, 1071 bp, synthetic construct
  misc_feature 1..1071: note = Description of Artificial Sequence: Synthetic coding sequence
  source 1..1071: mol_type = other DNA
atgtggttctttgcccgggaccctgtgcgggacttcccctttgagctgatccctgagcccccagagggcggcctgcccggcccctgggccctgcaccggggcaggaagaaggccaccggcagccctgtgtccatctttgtgtatgatgtgaagccaggagctgaggagcagacccaggtggccaaggccgccttcaagcgcttcaagaccctgcggcaccccaacatcctggcctacattgatggcctggagacagagaagtgcctgcacgtggtgacagaagctgtgacccccctgggcatctacctgaaggcccgggtggaggccggcggcctgaaggagctggagatctcctggggcctgcaccagatcgtgaaggccctgtccttcctggtgaatgactgcagcctcatccacaacaacgtgtgcatggctgctgtgtttgtggaccgggccggggagtggaagctgggcggcctggactacatgtacagcgcccagggcaatggaggcggcccccccaggaagggcatccctgagctggagcagtatgaccccccagagctggccgacagcagcggccgggtggtgcgggagaagtggagcgctgacatgtggaggctgggctgcctgatctgggaggtgttcaacggccccctgcccagggctgctgccctgagaaatcctgggaagatccccaagaccctggtgccccactactgtgagctggtgggcgccaaccccaaggtgcggcccaacccagcccgcttcctgcagaactgccgggcccctgggggcttcatgagcaacagatttgtggagaccaacctcttcctggaggagatccagcccaaggacccccggctgaaggagttcctgccccagcccccacccctcttcctgccccccctgcagccccaggccactggaagaagaagaagaaggaccaggacccagcagaggacagctgccctgctgacagatggcaccaccaagacaggagctgcctggagcagaagacccagcctgtgctggcccagcaggaccaccggggcccctggggccaagtag

SEQ ID NO: 168942 - DNA, 2376 bp, synthetic construct
  misc_feature 1..2376: note = Description of Artificial Sequence: Synthetic coding sequence
  source 1..2376: mol_type = other DNA
atgtggttctttgcccgggaccctgtgcgggacttcccctttgagctgatccctgagcccccagagggcggcctgcccggcccctgggccctgcaccggggcaggaagaaggccaccggcagccctgtgtccatctttgtgtatgatgtgaagccaggagctgaggagcagacccaggtggccaaggccgccttcaagcgcttcaagaccctgcggcaccccaacatcctggcctacattgatggcctggagacagagaagtgcctgcacgtggtgacagaagctgtgacccccctgggcatctacctgaaggcccgggtggaggccggcggcctgaaggagctggagatctcctggggcctgcaccagatcgtgaaggccctgtccttcctggtgaatgactgcagcctcatccacaacaacgtgtgcatggctgctgtgtttgtggaccgggccggggagtggaagctgggcggcctggactacatgtacagcgcccagggcaatggaggcggcccccccaggaagggcatccctgagctggagcagtatgaccccccagagctggccgacagcagcggccgggtggtgcgggagaagtggagcgctgacatgtggaggctgggctgcctgatctgggaggtgttcaacggccccctgcccagggctgctgccctgagaaatcctgggaagatccccaagaccctggtgccccactactgtgagctggtgggcgccaaccccaaggtgcggcccaacccagcccgcttcctgcagaactgccgggcccctgggggcttcatgagcaacagatttgtggagaccaacctcttcctggaggagatccagatcaaggagcctgctgagaagcagaagttcttccaggagctgagcaagagcctggatgccttccctgaggacttctgccgccacaaggtgctgccccagctgctgacagcctttgaatttggaaatgctggagctgtggtgctgacccccctcttcaaggtgggcaagttcctgtctgctgaggagtaccagcagaagatcatccctgtggtggtgaagatgttcagcagcacagaccgggccatgaggatccggctgctgcagcagatggagcagttcatccagtacctggatgagcccaccgtgaacacccagatcttcccccacgtggtgcacggcttcctggacaccaacccagccatccgggagcagacagtgaagtccatgctgctgctggcccccaagctgaatgaggccaacctgaatgtggagctgatgaagcactttgcccggctgcaggccaaggatgagcagggccccatccgctgcaacaccaccgtgtgcctgggcaagattggcagctacctgagcgccagcaccaggcaccgggtgctgaccagcgccttcagccgggccacccgggacccctttgcccccagccgggtggccggcgtgctgggctttgctgccacccacaacctgtacagcatgaatgactgtgcccagaagatcctgcctgtgctgtgtggcctgactgtggaccctgagaagtctgtgcgggaccaggccttcaaggccatccgctccttcctgagcaagctggagagcgtgtctgaggaccccacccagctggaggaggtggagaaggatgtgcacgccgccagcagccctggcatgggcggggccgccgcctcctgggccggctgggccgtgactggagtgagcagcctgaccagcaagctgatccgcagccaccccaccacagcccccacagagaccaacatcccccagaggcccaccccagagggccactgggagacccaggaggaggacaaggacacagctgaggacagcagcacagctgaccgctgggatgatgaggactggggcagcctggagcaggaggccgagagcgtgctggcccagcaggatgactggagcactggaggccaggtgtcccgggccagccaggtgagcaacagcgaccacaagagcagcaagagccctgagagtgactggagctcctgggaggccgagggctcctgggagcagggctggcaggagcccagcagccaggagcccccaccagatggcacccggctggccagcgagtacaactggggcggccctgagagcagtgacaagggggacccctttgccaccctgagcgcccggcccagcacccagcccaggccagacagctggggcgaggacaactgggagggcctggagacagacagccggcaggtgaaggccgagctggccaggaagaagcgggaggagcggcggcgggagatggaggccaagagagctgagaggaaggtggccaagggccccatgaagctgggcgccaggaagctggactag

SEQ ID NO: 168943 - DNA, 2343 bp, synthetic construct
  misc_feature 1..2343: note = Description of Artificial Sequence: Synthetic coding sequence
  source 1..2343: mol_type = other DNA
atgtggttctttgcccgggaccctgtgcgggacttcccctttgagctgatccctgagcccccagagggcggcctgcccggcccctgggccctgcaccggggcaggaagaaggccaccggcagccctgtgtccatctttgtgtatgatgtgaagccaggagctgaggagcagacccaggtggccaaggccgccttcaagcgcttcaagaccctgcggcaccccaacatcctggcctacattgatggcctggagacagagaagtgcctgcacgtggtgacagaagctgtgacccccctgggcatctacctgaaggcccgggtggaggccggcggcctgaaggagctggagatctcctggggcctgcaccagatcgtgaaggccctgtccttcctggtgaatgactgcagcctcatccacaacaacgtgtgcatggctgctgtgtttgtggaccgggccggggagtggaagctgggcggcctggactacatgtacagcgcccagggcaatggaggcggcccccccaggaagggcatccctgagctggagcagtatgaccccccagagctggccgacagcagcggccgggtggtgcgggagaagtggagcgctgacatgtggaggctgggctgcctgatctgggaggtgttcaacggccccctgcccagggctgctgccctgagaaatcctgggaagatccccaagaccctggtgccccactactgtgagctggtgggcgccaaccccaaggtgcggcccaacccagcccgcttcctgcagaactgccgggcccctgggggcttcatgagcaacagatttgtggagaccaacctcttcctggaggagatccagatcaaggagcctgctgagaagcagaagttcttccaggagctgagcaagagcctggatgccttccctgaggacttctgccgccacaaggtgctgccccagctgctgacagcctttgaatttggaaatgctggagctgtggtgctgacccccctcttcaaggtgggcaagttcctgtctgctgaggagtaccagcagaagatcatccctgtggtggtgaagatgttcagcagcacagaccgggccatgaggatccggctgctgcagcagatggagcagttcatccagtacctggatgagcccaccgtgaacacccagatcttcccccacgtggtgcacggcttcctggacaccaacccagccatccgggagcagacagtgaagtccatgctgctgctggcccccaagctgaatgaggccaacctgaatgtggagctgatgaagcactttgcccggctgcaggccaaggatgagcagggccccatccgctgcaacaccaccgtgtgcctgggcaagattggcagctacctgagcgccagcaccaggcaccgggtgctgaccagcgccttcagccgggccacccgggacccctttgcccccagccgggtggccggcgtgctgggctttgctgccacccacaacctgtacagcatgaatgactgtgcccagaagatcctgcctgtgctgtgtggcctgactgtggaccctgagaagtctgtgcgggaccaggccttcaaggccatccgctccttcctgagcaagctggagagcgtgtctgaggaccccacccagctggaggaggtggagaaggatgtgcacgccgccagcagccctggcatgggcggggccgccgcctcctgggccggctgggccgtgactggagtgagcagcctgaccagcaagctgatccgcagccaccccaccacagcccccacagagaccaacatcccccagaggcccaccccagagggcgtgcctgccccagcccccacccctgtgcctgccacccccaccaccagcggccactgggagacccaggaggaggacaaggacacagctgaggacagcagcacagctgaccgctgggatgatgaggactggggcagcctggaggaggccgagagcgtgctggcccagcaggatgactggagcactggaggccaggtgtcccgggccagccaggtgagcaacagcgaccacaagagcagcaagagccctgagagtgactggagctcctgggaggccgagggctcctgggagcagggctggcaggagcccagcagccaggagcccccaccagatggcacccggctggccagcgagtacaactggggcggccctgagagcagtgacaagggggacccctttgccaccctgagcgcccggcccagcacccaggacaggagccggctgtcctggccaggccgcagcgcccggagcggcggcggccgctggaggcccaatgccccccggggccgctggccccgggccccctag

SEQ ID NO: 168944 - DNA, 2124 bp, synthetic construct; identical to SEQ ID NO: 168940
  misc_feature 1..2124: note = Description of Artificial Sequence: Synthetic coding sequence
  source 1..2124: mol_type = other DNA

SEQ ID NO: 168945 - DNA, 2364 bp, synthetic construct
  misc_feature 1..2364: note = Description of Artificial Sequence: Synthetic coding sequence
  source 1..2364: mol_type = other DNA
atgtggttctttgcccgggaccctgtgcgggacttcccctttgagctgatccctgagcccccagagggcggcctgcccggcccctgggccctgcaccggggcaggaagaaggccaccggcagccctgtgtccatctttgtgtatgatgtgaagccaggagctgaggagcagacccaggtggccaaggccgccttcaagcgcttcaagaccctgcggcaccccaacatcctggcctacattgatggcctggagacagagaagtgcctgcacgtggtgacagaagctgtgacccccctgggcatctacctgaaggcccgggtggaggccggcggcctgaaggagctggagatctcctggggcctgcaccagatcgtgaaggccctgtccttcctggtgaatgactgcagcctcatccacaacaacgtgtgcatggctgctgtgtttgtggaccgggccggggagtggaagctgggcggcctggactacatgtacagcgcccagggcaatggaggcggcccccccaggaagggcatccctgagctggagcagtatgaccccccagagctggccgacagcagcggccgggtggtgcgggagaagtggagcgctgacatgtggaggctgggctgcctgatctgggaggtgttcaacggccccctgcccagggctgctgccctgagaaatcctgggaagatccccaagaccctggtgccccactactgtgagctggtgggcgccaaccccaaggtgcggcccaacccagcccgcttcctgcagaactgccgggcccctgggggcttcatgagcaacagatttgtggagaccaacctcttcctggaggagatccagatcaaggagcctgctgagaagcagaagttcttccaggagctgagcaagagcctggatgccttccctgaggacttctgccgccacaaggtgctgccccagctgctgacagcctttgaatttggaaatgctggagctgtggtgctgacccccctcttcaaggtgggcaagttcctgtctgctgaggagtaccagcagaagatcatccctgtggtggtgaagatgttcagcagcacagaccgggccatgaggatccggctgctgcagcagatggagcagttcatccagtacctggatgagcccaccgtgaacacccagatcttcccccacgtggtgcacggcttcctggacaccaacccagccatccgggagcagacagtgaagtccatgctgctgctggcccccaagctgaatgaggccaacctgaatgtggagctgatgaagcactttgcccggctgcaggccaaggatgagcagggccccatccgctgcaacaccaccgtgtgcctgggcaagattggcagctacctgagcgccagcaccaggcaccgggtgctgaccagcgccttcagccgggccacccgggacccctttgcccccagccgggtggccggcgtgctgggctttgctgccacccacaacctgtacagcatgaatgactgtgcccagaagatcctgcctgtgctgtgtggcctgactgtggaccctgagaagtctgtgcgggaccaggccttcaaggccatccgctccttcctgagcaagctggagagcgtgtctgaggaccccacccagctggaggaggtggagaaggatgtgcacgccgccagcagccctggcatgggcggggccgccgcctcctgggccggctgggccgtgactggagtgagcagcctgaccagcaagctgatccgcagccaccccaccacagcccccacagagaccaacatcccccagaggcccaccccagagggcgtgcctgccccagcccccacccctgtgcctgccacccccaccaccagcggccactgggagacccaggaggaggacaaggacacagctgaggacagcagcacagctgaccgctgggatgatgaggactggggcagcctggagcaggaggccgagagcgtgctggcccagcaggatgactggagcactggaggccaggtgtcccgggccagccagagccccaccggggctgctgggaagctgcgggcccctggcaacagagctggccgcagccaggcccccaggagccacctgctgactgtgcacggctggccagccagcatcaccggggtggcccagagccctgccacccgggccacccccagcctgccctgcctgcacgtgcctgcccccagccggggccagaccctgggcgtgaggaccaccggccgggccagccggctgactgtggacaggagccggctgtcctggccaggccgcagcgcccggagcggcggcggccgctggaggcccaatgccccccggggccgctggccccgggccccctag

SEQ ID NO: 168946 - DNA, 663 bp, synthetic construct
  misc_feature 1..663: note = Description of Artificial Sequence: Synthetic coding sequence
  source 1..663: mol_type = other DNA
atgatcaagcccaagtggggcggcctggtgtgggcccagtggcacggccccctggcccggcccagcggcaccctgccctttgccagctccatgcccagccctgtggatgccagcagcgcagatggcggcagcggcctgggcagccacaggaggaagaggaccaccttcagcaagggccagctgctggagctggagcgggcctttgctgcctggccctaccccaacatcagcacccatgagcacctggcctgggtgacctgcctgcctgaggccaaggtgcaggtgtggttccagaagcgctgggccaagatcatcaagaacaggaagagcggcatcctgagccctggcagcgagtgcccccagagcagctgcagcctgcctgacaccctgcagcagccctgggacccccagatgcctggccagcccccacccagcagcggcaccccccagaggacctctgtgtgccgccacagcagctgcccagcccctggcctgagcccccggcagggctgggagggcgccaaggctgtggccccctggggcagcgctggggccagcgaggtgcaccccagcctggagcgggccaccccccagaccagcctgggcagcctgagtgacctgatctatgccctggccatcgtggtgaatgtggaccacagctag

SEQ ID NO: 168947 - DNA, 651 bp, synthetic construct
  misc_feature 1..651: note = Description of Artificial Sequence: Synthetic coding sequence
  source 1..651: mol_type = other DNA
atgggcggcagcggcgtgggcacagcctggcacggccccctggcccggcccagcggcaccctgccctttgccagctccatgcccagccctgtggatgccagcagcgcagatggcggcagcggcctgggcagccacaggaggaagaggaccaccttcagcaagggccagctgctggagctggagcgggcctttgctgcctggccctaccccaacatcagcacccatgagcacctggcctgggtgacctgcctgcctgaggccaaggtgcaggtgtggttccagaagcgctgggccaagatcatcaagaacaggaagagcggcatcctgagccctggcagcgagtgcccccagagcagctgcagcctgcctgacaccctgcagcagccctgggacccccagatgcctggccagcccccacccagcagcggcaccccccagaggacctctgtgtgccgccacagcagctgcccagcccctggcctgagcccccggcagggctgggagggcgccaaggctgtggccccctggggcagcgctggggccagcgaggtgcaccccagcctggagcgggccaccccccagaccagcctgggcagcctgagtgacctgatctatgccctggccatcgtggtgaatgtggaccacagctag

SEQ ID NO: 168948 - DNA, 648 bp, synthetic construct
  misc_feature 1..648: note = Description of Artificial Sequence: Synthetic coding sequence
  source 1..648: mol_type = other DNA
atgatgaccaccggctggacaggcctgtgcctgccccctgtgaaccccagccgggtgagcagcagcagcctggagaccagcaccacagagagcatctttgcccatgatggcggcagcggcctgggcagccacaggaggaagaggaccaccttcagcaagggccagctgctggagctggagcgggcctttgctgcctggccctaccccaacatcagcacccatgagcacctggcctgggtgacctgcctgcctgaggccaaggtgcaggtgtggttccagaagcgctgggccaagatcatcaagaacaggaagagcggcatcctgagccctggctctgaatgtccccagagcagctgcagcctgcctgacaccctgcagcagccctgggacccccagatgcctggccagcccccacccagcagcggcaccccccagaggacctctgtgtgccgccacagcagctgcccagcccctggcctgagcccccggcagggctgggagggcgccaaggctgtggccccctggggcagcgctggggccagcgaggtgcaccccagcctggagcgggccaccccccagaccagcctgggcagcctgagtgacctgatctatgccctggccatcgtggtgaatgtggaccacagctag

SEQ ID NO: 168949 - DNA, 648 bp, synthetic construct; identical to SEQ ID NO: 168948
  misc_feature 1..648: note = Description of Artificial Sequence: Synthetic coding sequence
  source 1..648: mol_type = other DNA

SEQ ID NO: 168950 - DNA, 1212 bp, synthetic construct
  misc_feature 1..1212: note = Description of Artificial Sequence: Synthetic coding sequence
  source 1..1212: mol_type = other DNA
atgagcggccgggtgggggacctgagcccccggcagaaggaggccctggccaagttcagagaaaatgtgcaggatgtgctgcctgccctgcccaacccagatgactacttcctgctgcgctggctgcgggcccggagctttgacctgcagaagtctgaggccatgctgaggaagcacgtggagttcaggaagcagaaggacatcgacaacatcatctcctggcagcccccagaggtgatccagcagtacctgagcggcggcatgtgtggctatgacctggatggctgccctgtgtggtatgacatcatcggccccctggatgccaagggcctgctcttcagcgccagcaagcaggacctgctgcggaccaagatgagagaatgtgagctgctgctgcaggagtgtgcccaccagaccaccaagctgggcaggaaggtggagaccatcaccatcatctatgactgtgagggcctgggcctgaagcacctgtggaagccagctgtggaggcctatggagagttcctgtgcatgtttgaggagaactacccagagaccctgaagaggctgtttgtggtgaaggcccccaagctgtttcctgtggcctacaacctgatcaagcccttcctgtctgaggacaccaggaagaagatcatggtgctgggcgccaactggaaggaggtgctgctgaagcacatcagcccagaccaggtgcctgtggagtatggaggcaccatgacagatcctgatggcaaccccaagtgcaagagcaagatcaactacggcggggacatccccaggaagtactacgtgcgggaccaggtgaagcagcagtatgagcacagcgtgcagatcagccggggcagcagccaccaggtggagtatgagatcctcttccctggctgtgtgctgcgctggcagttcatgtctgatggagcagatgtgggcttcggcatcttcctgaagaccaagatgggagagcggcagagagctggggagatgacagaggtgctgcccaaccagcgctacaacagccacctggtgcctgaagatggcaccctgacctgcagcgaccccggcatctacgtgctgcgctttgacaacacctacagcttcatccacgccaagaaggtgaacttcaccgtggaggtgctgctgcctgacaaggccagcgaggagaagatgaagcagctgggcgccggcacccccaagtag

SEQ ID NO: 168951 - DNA, 963 bp, synthetic construct
  misc_feature 1..963: note = Description of Artificial Sequence: Synthetic coding sequence
  source 1..963: mol_type = other DNA
atgagcggccgggtgggggacctgagcccccggcagaaggaggccctggccaagttcagagaaaatgtgcaggatgtgctgcctgccctgcccaacccagatgactacttcctgctgcgctggctgcgggcccggagctttgacctgcagaagtctgaggccatgctgaggaagctgggcaggaaggtggagaccatcaccatcatctatgactgtgagggcctgggcctgaagcacctgtggaagccagctgtggaggcctacggggagttcctgtgcatgtttgaggagaactacccagagaccctgaagaggctgtttgtggtgaaggcccccaagctgtttcctgtggcctacaacctgatcaagcccttcctgtctgaggacaccaggaagaagatcatggtgctgggcgccaactggaaggaggtgctgctgaagcacatcagcccagaccaggtgcctgtggagtatggaggcaccatgacagatcctgatggcaaccccaagtgcaagagcaagatcaactatggaggagacatccccaggaagtactacgtgcgggaccaggtgaagcagcagtatgagcacagcgtgcagatcagccggggcagcagccaccaggtggagtatgagatcctcttccctggctgtgtgctgcgctggcagttcatgtctgatggagcagatgtgggcttcggcatcttcctgaagaccaagatgggagagcggcagagagctggggagatgacagaggtgctgcccaaccagcgctacaacagccacctggtgcctgaagatggcaccctgacctgcagcgaccccggcatctacgtgctgcgctttgacaacacctacagcttcatccacgccaagaaggtgaacttcaccgtggaggtgctgctgcctgacaaggccagcgaggagaagatgaagcagctgggcgccggcacccccaagtag

SEQ ID NO: 168952 - DNA, 990 bp, synthetic construct
  misc_feature 1..990: note = Description of Artificial Sequence: Synthetic coding sequence
  source 1..990: mol_type = other DNA
atgctgaggaaggtgatccagcagtacctgagcggcggcatgtgtggctatgacctggatggctgccctgtgtggtatgacatcatcggccccctggatgccaagggcctgctcttcagcgccagcaagcaggacctgctgcggaccaagatgagagaatgtgagctgctgctgcaggagtgtgcccaccagaccaccaagctgggcaggaaggtggagaccatcaccatcatctatgactgtgagggcctgggcctgaagcacctgtggaagccagctgtggaggcctatggagagttcctgtgcatgtttgaggagaactacccagagaccctgaagaggctgtttgtggtgaaggcccccaagctgtttcctgtggcctacaacctgatcaagcccttcctgtctgaggacaccaggaagaagatcatggtgctgggcgccaactggaaggaggtgctgctgaagcacatcagcccagaccaggtgcctgtggagtatggaggcaccatgacagatcctgatggcaaccccaagtgcaagagcaagatcaactacggcggggacatccccaggaagtactacgtgcgggaccaggtgaagcagcagtatgagcacagcgtgcagatcagccggggcagcagccaccaggtggagtatgagatcctcttccctggctgtgtgctgcgctggcagttcatgtctgatggagcagatgtgggcttcggcatcttcctgaagaccaagatgggagagcggcagagagctggggagatgacagaggtgctgcccaaccagcgctacaacagccacctggtgcctgaagatggcaccctgacctgcagcgaccccggcatctacgtgctgcgctttgacaacacctacagcttcatccacgccaagaaggtgaacttcaccgtggaggtgctgctgcctgacaaggccagcgaggagaagatgaagcagctgggcgccggcacccccaagtag

SEQ ID NO: 168953 - DNA, 1179 bp, synthetic construct
  misc_feature 1..1179: note = Description of Artificial Sequence: Synthetic coding sequence
  source 1..1179: mol_type = other DNA
atgagcggccgggtgggggacctgagcccccggcagaaggaggccctggccaagttcagagaaaatgtgcaggatgtgctgcctgccctgcccaacccagatgactacttcctgctgcgctggctgcgggcccggagctttgacctgcagaagtctgaggccatgctgaggaagcacgtggagttcaggaagcagaaggacatcgacaacatcatctcctggcagcccccagaggtgatccagcagtacctgagcggcggcatgtgtggctatgacctggatggctgccctgtgtggtatgacatcatcggccccctggatgccaagggcctgctcttcagcgccagcaagcaggacctgctgcggaccaagatgagagaatgtgagctgctgctgcaggagtgtgcccaccagaccaccaagctgggcaggaaggtggagaccatcaccatcatctatgactgtgagggcctgggcctgaagcacctgtggaagccagctgtggaggcctatggagagttcctgtgcatgtttgaggagaactacccagagaccctgaagaggctgtttgtggtgaaggcccccaagctgtttcctgtggcctacaacctgatcaagcccttcctgtctgaggacaccaggaagaagatcatggtgctgggcgccaactggaaggaggtgctgctgaagcacatcagcccagaccaggtgcctgtggagtatggaggcaccatgacagatcctgatggcaaccccaagtgcaagagcaagatcaactacggcggggacatccccaggaagtactacgtgcgggaccaggtgaagcagcagtatgagcacagcgtgcagatcagccggggcagcagccaccaggtggagtatgagatcctcttccctggctgtgtgctgcgctggcagttcatgtctgatggagcagatgtgggcttcggcatcttcctgaagaccaagatgggagagcggcagagagctggggagatgacagaggtgctgcccaaccagcgctacaacagccacctggtgcctgaagatggcaccctgacctgcagcgaccccggcatctgcaagtacctgtgcctgggcaatgccctgaagccccacgtgcagctgagcgcctgtgaggtgcccctgcccccctggatcttcggctctgaatgttag

SEQ ID NO: 168954 - DNA, 1119 bp, synthetic construct
  misc_feature 1..1119: note = Description of Artificial Sequence: Synthetic coding sequence
  source 1..1119: mol_type = other DNA
atgagcaaggccttcggcctgctgcggcagatctgccagagcatcctggccgagagcagccagagccctgctgacctggaggagaagaaggaggaggacagcaacatgaagcgggagcagccccgggagcggccccgggcctgggactacccccacggcctggtgggcctgcacaacatcggccagacctgctgcctgaacagcctcatccaggtgtttgtgatgaatgtggacttcacccgcatcctgaagaggatcaccgtgcccagaggagcagatgagcagaggagatctgtgcccttccagatgctgctgctgctggagaagatgcaggacagccggcagaaggctgtgcggcccctggagctggcctactgcctgcagaagtgcaatgtgcccctgtttgtgcagcatgatgctgcccagctgtacctgaagctgtggaacctgatcaaggaccagatcacagatgtgcacctggtggagcggctgcaggccctgtacaccatccgggtgaaggacagcctcatctgtgtggactgtgccatggagagcagcaggaacagctccatgctgaccctgcccctgagcctgtttgatgtggacagcaagcccctgaagaccctggaggatgccctgcactgcttcttccagccccgggagctgagcagcaagagcaagtgcttctgtgagaactgtgggaagaagacccggggcaagcaggtgctgaagctgacccacctgccccagaccctgaccatccacctgatgaggttcagcatccggaacagccagaccaggaagatctgccacagcctgtacttcccccagagcctggacttcagccagatcctgcccatgaagcgggagagctgtgatgctgaggagcagagcggcggccagtatgagctgtttgctgtgattgcccacgtgggcatggctgacagcggccactactgtgtgtacatcagaaatgctgtggatggcaagtggttctgcttcaatgacagcaacatctgcctggtgtcctgggaggacatccagtgcacctacggcaaccccaactaccactggcaggagacagcctacctgctggtgtacatgaagatggagtgctag

SEQ ID NO: 168955 - DNA, 1062 bp, synthetic construct
  misc_feature 1..1062: note = Description of Artificial Sequence: Synthetic coding sequence
  source 1..1062: mol_type = other DNA
atggagttcaggaagaccatggacatcgaccacatcctggactggcagcccccagaggtgatccagaagtacatgcctgggggcctgtgtggctatgacagagatggctgccctgtgtggtatgacatcatcggccccctggaccccaagggcctgctcttctctgtgaccaagcaggacctgctgaagaccaagatgagggactgtgagcgcatcctgcatgaatgtgacctgcagacagagcggctgggcaagaagattgagaccatcgtgatgatctttgactgtgagggcctgggcctgaagcacttctggaagcccctggtggaggtgtaccaggagttcttcggcctgctggaggagaactacccagagaccctgaagttcatgctgattgtgaaggccaccaagctgtttcctgtgggctacaacctgatgaagcccttcctgtctgaggacaccaggaggaagatcatcgtgctgggcaacaactggaaggagggcctgctgaagctgatcagccctgaggagctgcctgcccagtttggaggcaccctgacagatcctgatggcaaccccaagtgcctgaccaagatcaactatggaggagagatccccaagtccatgtatgtgcgggaccaggtgaagacccagtatgagcacagcgtgcagatcaacagaggcagcagccaccaggtggagtatgagatcctcttccctggctgtgtgctgcgctggcagttcagcagtgatggagctgacattggatttggagtcttcctgaagaccaagatgggagagcggcagagagctggggagatgacagatgtgctgcccagccagcgctacaatgcccacatggtgcctgaagatggcaacctgacctgcagcgaggccggcgtgtatgtggagagcgagagcggcaagagctgctgccacctgcctgtgatcatctgcagccatgagctgcagaacagccacagcaacagccaggtgatggcctaccagatggtgaggaagtgcaagctgagccggcccctgcccctgcctgccagcaactag

SEQ ID NO: 168956 - DNA, 1026 bp, synthetic construct
  misc_feature 1..1026: note = Description of Artificial Sequence: Synthetic coding sequence
  source 1..1026: mol_type = other DNA
atggagttcaggaagaccatggacatcgaccacatcctggactggcagcccccagaggtgatccagaagtacatgcctgggggcctgtgtggctatgacagagatggctgccctgtgtggtatgacatcatcggccccctggaccccaagggcctgctcttctctgtgaccaagcaggacctgctgaagaccaagatgagggactgtgagcgcatcctgcatgaatgtgacctgcagacagagcggctgggcaagaagattgagaccatcgtgatgatctttgactgtgagggcctgggcctgaagcacttctggaagcccctggtggaggtgtaccaggagttcttcggcctgctggaggagaactacccagagaccctgaagttcatgctgattgtgaaggccaccaagctgtttcctgtgggctacaacctgatgaagcccttcctgtctgaggacaccaggaggaagatcatcgtgctgggcaacaactggaaggagggcctgctgaagctgatcagccctgaggagctgcctgcccagtttggaggcaccctgacagatcctgatggcaaccccaagtgcctgaccaagatcaactatggaggagagatccccaagtccatgtatgtgcgggaccaggtgaagacccagtatgagcacagcgtgcagatcaacagaggcagcagccaccaggtggagtatgagatcctcttccctggctgtgtgctgcgctggcagttcagcagtgatggagctgacattggatttggagtcttcctgaagaccaagatgggagagcggcagagagctggggagatgacagatgtgctgcccagccagcgctacaatgcccacatggtgcctgaagatggcaacctgacctgcagcgaggccggcgtgtatgtgctgcgctttgacaacacctacagctttgtgcacgccaagaaggtgtccttcaccgtggaggtgctgctgcctgatgagggcatgcagaagtatgacaaggagctgacccctgtgtag

SEQ ID NO: 168957 - DNA, 972 bp, synthetic construct
  misc_feature 1..972: note = Description of Artificial Sequence: Synthetic coding sequence
  source 1..972: mol_type = other DNA
atggtgatccagaagtacatgcctgggggcctgtgtggctatgacagagatggctgccctgtgtggtatgacatcatcggccccctggaccccaagggcctgctcttctctgtgaccaagcaggacctgctgaagaccaagatgagggactgtgagcgcatcctgcatgaatgtgacctgcagacagagcggctgggcaagaagattgagaccatcgtgatgatctttgactgtgagggcctgggcctgaagcacttctggaagcccctggtggaggtgtaccaggagttcttcggcctgctggaggagaactacccagagaccctgaagttcatgctgattgtgaaggccaccaagctgtttcctgtgggctacaacctgatgaagcccttcctgtctgaggacaccaggaggaagatcatcgtgctgggcaacaactggaaggagggcctgctgaagctgatcagccctgaggagctgcctgcccagtttggaggcaccctgacagatcctgatggcaaccccaagtgcctgaccaagatcaactatggaggagagatccccaagtccatgtatgtgcgggaccaggtgaagacccagtatgagcacagcgtgcagatcaacagaggcagcagccaccaggtggagtatgagatcctcttccctggctgtgtgctgcgctggcagttcagcagtgatggagctgacattggatttggagtcttcctgaagaccaagatgggagagcggcagagagctggggagatgacagatgtgctgcccagccagcgctacaatgcccacatggtgcctgaagatggcaacctgacctgcagcgaggccggcgtgtatgtgctgcgctttgacaacacctacagctttgtgcacgccaagaaggtgtccttcaccgtggaggtgctgctgcctgatgagggcatgcagaagtatgacaaggagctgacccctgtgtag

SEQ ID NO: 168958 - DNA, 972 bp, synthetic construct; identical to SEQ ID NO: 168957
  misc_feature 1..972: note = Description of Artificial Sequence: Synthetic coding sequence
  source 1..972: mol_type = other DNA

SEQ ID NO: 168959 - DNA, 1221 bp, synthetic construct
  misc_feature 1..1221: note = Description of Artificial Sequence: Synthetic coding sequence
  source 1..1221: mol_type = other DNA
atgagcagccgggtgggggacctgagcccccagcagcaggaggccctggcccgcttccgggagaacctgcaggacctgctgcccatcctgcccaatgctgatgactacttcctgctgcgctggctgcgggccaggaactttgacctgcagaagtctgaggacatgctgcggcggcacatggagttcaggaagcagcaggacctggacaacatcgtgacctggcagcccccagaggtgatccagctgtatgattctgggggcctgtgtggctatgactatgagggctgccctgtgtacttcaacatcatcggcagcctggaccccaagggcctgctgctgagcgccagcaagcaggacatgatcaggaagaggatcaaggtgtgtgagctgctgctgcatgaatgtgagctgcagacccagaagctgggcaggaagattgagatggccctgatggtgtttgacatggagggcctgagcctgaagcacctgtggaagccagctgtggaggtgtaccagcagttcttcagcatcctggaggccaactacccagagaccctgaagaacctgattgtcatccgggcccccaagctgtttcctgtggccttcaacctggtgaagagcttcatgtctgaggagaccaggaggaagatcgtcatcctgggggacaactggaagcaggagctgaccaagttcatcagcccagaccagctgcctgtggagtttggaggcaccatgacagatcctgatggcaaccccaagtgcctgaccaagatcaactacggcggggaggtgcccaagagctactacctgtgtgagcaggtgcggctgcagtatgagcacaccaggtctgtgggccggggcagcagcctgcaggtggagaatgagatcctcttccctggctgtgtgctgcgctggcagtttgccagtgatggaggagacatcggctttggagtcttcctgaagaccaagatgggagagcagcagagcgcccgggagatgacagaggtgctgcccagccagcgctacaatgcccacatggtgcctgaagatggcagcctgacctgcctgcaggccggcgtgtatgtgctgcgctttgacaacacctacagcaggatgcacgccaagaagctgagctacacagtggaggtgctgctgcctgacaaggccagcgaggagaccctgcagagcctgaaggccatgaggcccagccccacccagtag

SEQ ID NO: 168960 - DNA, 1083 bp, synthetic construct
  misc_feature 1..1083: note = Description of Artificial Sequence: Synthetic coding sequence
  source 1..1083: mol_type = other DNA
atgagcagccgggtgggggacctgagcccccagcagcaggaggccctggcccgcttccgggagaacctgcaggacctgctgcccatcctgcccaatgctgatgactacttcctgctgcgctggctgcgggccaggaactttgacctgcagaagtctgaggacatgctgcggcggcacatggagttcaggaagcagcaggacctggacaacatcgtgacctggcagcccccagaggtgatccagctgtatgattctgggggcctgtgtggctatgactatgagggctgccctgtgtacttcaacatcatcggcagcctggaccccaagggcctgctgctgagcgccagcaagcaggacatgatcaggaagaggatcaaggtgtgtgagctgctgctgcatgaatgtgagctgcagacccagaagctgggcaggaagattgagatggccctgatggtgtttgacatggagggcctgagcctgaagcacctgtggaagccagctgtggaggtgtaccagcagttcttcagcatcctggaggccaactacccagagaccctgaagaacctgattgtcatccgggcccccaagctgtttcctgtggccttcaacctggtgaagagcttcatgtctgaggagaccaggaggaagatcgtcatcctgggggacaactggaagcaggagctgaccaagttcatcagcccagaccagctgcctgtggagtttggaggcaccatgacagatcctgatggcaaccccaagtgcctgaccaagatcaactacggcggggaggtgcccaagagctactacctgtgtgagcaggtgcggctgcagtatgagcacaccaggtctgtgggccggggcagcagcctgcaggtggagaatgagatcctcttccctggctgtgtgctgcgctggcagtttgccagtgatggaggagacatcggctttggagtcttcctgaagaccaagatgggagagcagcagagcgcccgggagatgacagaggtgctgcccagccagcgctacaatgcccacatggtgcctgaagatggcagcctgacctgcctgcaggccggcgtgtag

SEQ ID NO: 168961 - DNA, 1083 bp, synthetic construct
  misc_feature 1..1083: note = Description of Artificial Sequence: Synthetic coding sequence
  source 1..1083: mol_type = other DNA
atgctgcggcggcacatggagttcaggaagcagcaggacctggacaacatcgtgacctggcagcccccagaggtgatccagctgtatgattctgggggcctgtgtggctatgactatgagggctgccctgtgtacttcaacatcatcggcagcctggaccccaagggcctgctgctgagcgccagcaagcaggacatgatcaggaagaggatcaaggtgtgtgagctgctgctgcatgaatgtgagctgcagacccagaagctgggcaggaagattgagatggccctgatggtgtttgacatggagggcctgagcctgaagcacctgtggaagccagctgtggaggtgtaccagcagttcttcagcatcctggaggccaactacccagagaccctgaagaacctgattgtcatccgggcccccaagctgtttcctgtggccttcaacctggtgaagagcttcatgtctgaggagaccaggaggaagatcgtcatcctgggggacaactggaagcaggagctgaccaagttcatcagcccagaccagctgcctgtggagtttggaggcaccatgacagatcctgatggcaaccccaagtgcctgaccaagatcaactacggcggggaggtgcccaagagctactacctgtgtgagcaggtgcggctgcagtatgagcacaccaggtctgtgggccggggcagcagcctgcaggtggagaatgagatcctcttccctggctgtgtgctgcgctggcagtttgccagtgatggaggagacatcggctttggagtcttcctgaagaccaagatgggagagcagcagagcgcccgggagatgacagaggtgctgcccagccagcgctacaatgcccacatggtgcctgaagatggcagcctgacctgcctgcaggccggcgtgtatgtgcggggcctgtgcagcctcatcaccagccccagcctgcagatgagctgtgccagcaccacccccacagctggctgcatgcccaggagcagcgccaccctgtggcgctgctgcttccccacccggcccctgcggcggcgctgccgggtgtccagaagatag

SEQ ID NO: 168962 - DNA, 1176 bp, synthetic construct
  misc_feature 1..1176: note = Description of Artificial Sequence: Synthetic coding sequence
  source 1..1176: mol_type = other DNA
atgctgatgaccaccagcagctgtgccggctgtgagctggagaccctgacctgcaggaaccccaagacctgcagcgagggccccaagagcccccagcccaccagctgcccccacgccctgcgggcctggcacatggagttcaggaagcagcaggacctggacaacatcgtgacctggcagcccccagaggtgatccagctgtatgacagcggcggcctgtgtggctatgactatgagggctgccctgtgtacttcaacatcatcggcagcctggaccccaagggcctgctgctgagcgccagcaagcaggacatgatcaggaagaggatcaaggtgtgtgagctgctgctgcatgaatgtgagctgcagacccagaagctgggcaggaagattgagatggccctgatggtgtttgacatggagggcctgagcctgaagcacctgtggaagccagctgtggaggtgtaccagcagttcttcagcatcctggaggccaactacccagagaccctgaagaacctgattgtcatccgggcccccaagctgtttcctgtggccttcaacctggtgaagagcttcatgtctgaggagaccaggaggaagatcgtcatcctgggggacaactggaagcaggagctgaccaagttcatcagcccagaccagctgcctgtggagtttggaggcaccatgacagatcctgatggcaaccccaagtgcctgaccaagatcaactatggaggagaggtgcccaagagctactacctgtgtgagcaggtgcggctgcagtatgagcacaccaggtctgtgggccggggcagcagcctgcaggtggagaatgagatcctcttccctggctgtgtgctgcgctggcagtttgccagtgatggaggagacattggatttggagtcttcctgaagaccaagatgggagagcagcagagcgcccgggagatgacagaggtgctgcccagccagcgctacaatgcccacatggtgcctgaagatggcagcctgacctgcctgcaggccggcgtgtatgtgctgcgctttgacaacacctacagcaggatgcacgccaagaagctgagctacacagtggaggtgctgctgcctgacaaggccagcgaggagaccctgcagagcctgaaggccatgaggcccagccccacccagtag

SEQ ID NO: 168963 - DNA, 2256 bp, synthetic construct
  misc_feature 1..2256: note = Description of Artificial Sequence: Synthetic coding sequence
  source 1..2256: mol_type = other DNA
ccagctgctgctgccagcagcctggagcgggagacagagcgcttccgggagctgctgctgtatggcaggaagaaggatgccctggagagcgccatgaagaatggcctgtggggccacgccctgctgctggccagcaagatggacagcaggacccacgcccgggtgatgaccaggtttgccaacagcctgcccatcaatgaccccctgcagacagtgtaccagctgatgagcggccgcatgcctgctgccagcacctgctgcggagatgagaagtggggagactggaggccccacctggccatggtgctgagcaacctgaacaacaacatggatgtggagagcaggaccatggccaccatgggagacaccctggccagccggggcctgctggatgctgcccacttctgctacctgatggcccaggccggcttcggcgtgtacaccaagaagaccaccaagctggtgctgattggcagcaaccacagcctgcccttcctgaagtttgccaccaatgaggccatccagaggacagaggcctatgaatatgcccagagcctgggcgctgagacctgccccctgcccagcttccaggtgttcaagttcatctacagctgccgcctggccgagatgggcctggccacccaggccttccactactgtgaggccatcgccaagagcatcctgacccagccccacctgtacagccctgtgctgatcagccagctggtgcagatggccagccagctgcggctgtttgacccccagctgaaggagaagccagaggaggagagcctggccgcccccacctggctggtgcacctgcagcaggtggagcggcagatcaaggagggcgccggcgtgtggcaccaggatggagccctgccccagcagtgccccggcacccccagcagcgagatggagcagctggaccggcccggcctgagccagcccggggccctgggcatcgccaaccccctgctggccgtgcctgcccccagccctgagcacagcagccccagcgtgcggctgctgcccagcgccccccagaccctgcctgatggccccctggccagccctgcccgggtgcccatgtttcctgtgcccctgcccccaggccccctggagcccggccctggctgtgtgaccccaggccctgccctgggcttcctggagcccagcggccctggcctgcccccaggagtgccccccctgcaggagaggaggcacctgctgcaggaggcccggagcccagaccccggcatcgtgccccaggaggcccctgtgggcaacagcctgtctgagctgtctgaggagaactttgatggcaagtttgccaacctgacccccagcaggacagtgcctgacagcgaggcccctcctggctgggacagagctgacagcggccccacccagccccccctgagcctgagccctgcccctgagaccaagaggcctggccaggccgccaagaaggagaccaaggagcccaagaagggggagagctggttcttccgctggctgcccgggaagaagaagacagaggcctacctgcctgatgacaagaacaagagcatcgtgtgggatgagaagaagaaccagtgggtgaacctgaatgaacctgaggaggagaagaaggcccctcctcctccacccacctccatgcccaagacagtgcaggccgcccccccagccctgcccggccccccaggggcccctgtgaacatgtacagccggcgggctgctggcacccgggcccgctacgtggatgtgctgaaccccagcggcacccagaggtctgagcccgccctggccccagctgactttgtggcccccctggcccccctgcccatccccagcaacctgtttgtgcccaccccagatgctgaggagccccagctgcctgatggcaccggccgggagggccctgctgctgcccggggcctggccaaccctgagcccgcccctgagcccaaggtgctgagcagcgctgccagcctgcccggcagcgagctgcccagcagcaggcctgagggcagccagggcggggagctgagccgctgcagctccatgagcagcctgagccgggaggtgtcccagcacttcaaccaggcccctggggacctgcctgctgctgggggcccccccagcggggccatgcccttctacaacccagcccagctggcccaggcctgtgccaccagcggcagcagccggctgggccgcatcggccagaggaagcacctggtgctgaactag

SEQ ID NO: 168964 - DNA, 6480 bp, synthetic construct
  misc_feature 1..6480: note = Description of Artificial Sequence: Synthetic coding sequence
  source 1..6480: mol_type = other DNA
atgcctggcctggaccggcccctgagccggcagaacccccatgatggagtggtgaccccagctgccagccccagcctgccccagcccggcctgcagatgcctggccagtggggccctgtgcagggcggcccccagcccagcggccagcacaggagcccctgcccagagggccctgtgcccagcggcgtgccctgtgccacctctgtgccccacttccccacccccagcatcctgcaccagggccctggccacgagcagcacagccccctggtggcccctcctgctgccctgcccagtgatggaagagatgaggtgagccacctgcagagcggcagccacctggccaacaacagcgaccctgagagcaccttccggcagaacccccgcatcgtgaaccactgggccagccctgagctgcggcagaaccctggggtgaagaatgagcacaggcctgccagcgccctggtgaaccccctggcccggggggacagccctgagaacagaacccaccaccccctgggcgctggggccggcagcggctgtgcccccctggaggccgacagcggggccagcggggccctggccatgttcttccagggcggggagacagaaaatgaggagaacctgagcagcgagaaggccggcctgagcggccaggccgactttgatgacttctgcagcagccctggcctgggccggcccccagcccccacccacgtgggcgccggcagcctgtgccaggccctgctgcccggccccagcaatgaagctgctggagatgtgtggggagacacagccagcactggagtgcctgatgccagcggcagccagtatgaaaatgtggagaacctggagtttgtgcagaaccaggaggtgctgcccagcgagcccctgaacctggaccccagcagccccagcgaccagttccgctatggccccctgcccggccctgctgtgcccaggcatggagctgtgtgccacactggagccccagatgccaccctgcacacagtgcacccagacagcgtgagcagcagctacagcagccgcagccacggccgcctgagcggcagcgcccggccccaggagctggtgggcaccttcatccagcaggaggtgggcaagccagaagatgaggccagcggcagcttcttcaagcagattgacagcagccctgtgggcggggagacagatgagaccaccgtgtcccagaactaccggggctctgtgtcccagcccagcacccccagcccccccaagcccaccggcatcttccagaccagcgccaacagcagctttgagcctgtgaagagccacctggtgggcgtgaagccctttgaggccgaccgggccaacgtggtgggggaggtgcgggagacctgtgtgcggcagaagcagtgcaggcctgctgctgccctgcctgatgccagccctggcaacctggagcagcccccagacaacatggagaccctgtgtgccccccaggtgtgccccctgcccctgaacagcaccacagaagctgtgcacatgctgccccacgccggggccccacccctggacacagtgtacccagcccctgagaagaggccttctgcccggacccagggccctgtgaagtgtgagagccctgccaccaccctgtgggcccagagcgagctgcctgactttggaggaaatgtgctgctggccccagctgccccagccctgtatgtgtgtgccaagccccagccccctgtggtgcagcccccagaggaggccatgagcggccagcagagcaggaaccccagcagcgctgcccctgtgcagagcagaggaggcattggagccagcgagaacctggagaacccccccaagatgggagaggaggaggccctgcagagccaggccagcagcggctacgccagcctgctgagcagccccccaacagagagcctgcagaacccccctgtgctgattgcccagcctgaccacagctacaacctggcccagcccatcaacttctctgtgtccctgagcaacagccatgagaagaaccagagctggagggaggccctggtgggggacaggcctgctgtgtcctcctgggccctgggcggggacagcggggagaacaccagcctgagcggcatccccaccagctctgtgctgagcctgagcctgcccagctctgtggcccagagcaacttcccccagggcagcggggccagcgagatggtgagcaaccagcctgccaacctgctggtgcagccccccagccagcctgtgcctgagaacctggtgcctgagagccagaaggacaggaaggccggcagcgccctgcccggctttgccaacagccctgctggcagcacctctgtggtgctggtgcccccagcccacggcaccctggtgcctgatggcaacaaggccaaccacagcagccaccaggaggacacctatggagccctggacttcaccctgagcaggaccctggagaaccctgtgaatgtgtacaaccccagccacagcgacagcctggccagccagcagagcgtggccagccacccccggcagagcggccctggggcccccaacctggaccgcttctaccagcaggtgaccaaggatgcccagggccagcccggcctggagcgggcccagcaggagctggtgcccccccagcagcaggccagccccccccagctgcccaaggccatgttttctgagctgagcaaccctgagagcctgcctgcccagggccaggcccagaacagcgcccagagccctgccagcctggtgctggtggatgctggccagcagctgcccccccggcccccccagagcagctctgtgtccctggtgagcagcggcagcggccaggccgctgtgcccagcgagcagccctggccccagcctgtgcctgccctggcccctggccccccaccccaggacctggccgcctactactactaccggcccctgtatgatgcctaccagccccagtacagcctgccctacccacctgagcctggagctgccagcctgtactaccaggatgtgtacagcctgtatgagccccgctaccggccctatgatggagctgccagcgcctatgcccagaactaccgctacccagagcctgagcggcccagcagccgggccagccacagcagcgagcggcccccaccccggcagggctacccagagggctactacagcagcaagagcggctggagcagccagagcgactactatgccagctactacagcagccagtatgactatggagaccccggccactgggaccgctaccactacagcgcccgggtgcgggaccccaggacctatgaccggcgctactggtgtgatgctgaatatgatgcctacagaagagagcacagcgcctttggagacaggcctgagaagagggacaacaactggaggtatgacccccgcttcaccggcagctttgatgatgatcctgacccccaccgggacccctatggagaggaggtggacagaagatctgtgcacagcgagcacagcgcccggagcctgcacagcgcccacagcctggccagccgccgcagcagcctgagcagccacagccaccagagccagatctaccgcagccacaacgtggccgccggcagctatgaggcccccctgcccccaggcagcttccacggggactttgcctacggcacctaccgcagcaacttcagcagcggccctggcttcccagaatatggctacccagctgacacagtgtggccagccatggagcaggtgagcagccggcccaccagccctgagaagttctctgtgccccacgtgtgtgcccgcttcggccctgggggccagctgatcaaggtgatccccaacctgcccagcgagggccagcctgccctggtggaggtgcacagcatggaggccctgctgcagcacaccagcgagcaggaggagatgagggccttccctggccccctggccaaggatgacacccacaaggtggatgtgatcaactttgcccagaacaaggccatgaagtgcctgcagaatgaaaacctgattgacaaggagagcgccagcctgctgtggaacttcatcgtgctgctgtgccggcagaatggcaccgtggtgggcacagacattgctgagctgctgctgcgggaccacaggacagtgtggctgcccgggaagagccccaatgaggccaacctgattgacttcaccaatgaggccgtggagcaggtggaggaggaggagagcggggaggcccagctgtccttcctgaccggcggccctgctgctgctgccagcagcctggagcgggagacagagcgcttccgggagctgctgctgtatggcaggaagaaggatgccctggagagcgccatgaagaatggcctgtggggccacgccctgctgctggccagcaagatggacagcaggacccacgcccgggtgatgaccaggtttgccaacagcctgcccatcaatgaccccctgcagacagtgtaccagctgatgagcggccgcatgcctgctgccagcacctgctgcggagatgagaagtggggagactggaggccccacctggccatggtgctgagcaacctgaacaacaacatggatgtggagagcaggaccatggccaccatgggagacaccctggccagccggggcctgctggatgctgcccacttctgctacctgatggcccaggccggcttcggcgtgtacaccaagaagaccaccaagctggtgctgattggcagcaaccacagcctgcccttcctgaagtttgccaccaatgaggccatccagaggacagaggcctatgaatatgcccagagcctgggcgctgagacctgccccctgcccagcttccaggtgttcaagttcatctacagctgccgcctggccgagatgggcctggccacccaggccttccactactgtgaggccatcgccaagagcatcctgacccagccccacctgtacagccctgtgctgatcagccagctggtgcagatggccagccagctgcggctgtttgacccccagctgaaggagaagccagaggaggagagcctggccgcccccacctggctggtgcacctgcagcaggtggagcggcagatcaaggagggcgccggcgtgtggcaccaggatggagccctgccccagcagtgccccggcacccccagcagcgagatggagcagctggaccggcccggcctgagccagcccggggccctgggcatcgccaaccccctgctggccgtgcctgcccccagccctgagcacagcagccccagcgtgcggctgctgcccagcgccccccagaccctgcctgatggccccctggccagccctgcccgggtgcccatgtttcctgtgcccctgcccccaggccccctggagcccggccctggctgtgtgaccccaggccctgccctgggcttcctggagcccagcggccctggcctgcccccaggagtgccccccctgcaggagaggaggcacctgctgcaggaggcccggagcccagaccccggcatcgtgccccaggaggcccctgtgggcaacagcctgtctgagctgtctgaggagaactttgatggcaagtttgccaacctgacccccagcaggacagtgcctgacagcgaggcccctcctggctgggacagagctgacagcggccccacccagccccccctgagcctgagccctgcccctgagaccaagaggcctggccaggccgccaagaaggagaccaaggagcccaagaagggggagagctggttcttccgctggctgcccgggaagaagaagacagaggcctacctgcctgatgacaagaacaagagcatcgtgtgggatgagaagaagaaccagtgggtgaacctgaatgaacctgaggaggagaagaaggcccctcctcctccacccacctccatgcccaagacagtgcaggccgcccccccagccctgcccggccccccaggggcccctgtgaacatgtacagccggcgggctgctggcacccgggcccgctacgtggatgtgctgaaccccagcggcacccagaggtctgagcccgccctggccccagctgactttgtggcccccctggcccccctgcccatccccagcaacctgtttgtgcccaccccagatgctgaggagccccagctgcctgatggcaccggccgggagggccctgctgctgcccggggcctggccaaccctgagcccgcccctgagcccaaggtgctgagcagcgctgccagcctgcccggcagcgagctgcccagcagcaggcctgagggcagccagggcggggaggcccctggggacctgcctgctgctgggggcccccccagcggggccatgcccttctacaacccagcccagctggcccaggcctgtgccaccagcggcagcagccggctgggccgcatcggccagaggaagcacctggtgctgaactag

SEQ ID NO: 168965 - DNA, 7074 bp, synthetic construct
  misc_feature 1..7074: note = Description of Artificial Sequence: Synthetic coding sequence
  source 1..7074: mol_type = other DNA
atgcagcccccaccccagacagtgcccagcggcatggccggccccccacctgctggcaaccccaggtctgtgttctgggccagcagcccctacagaagaagagccaacaacaatgctgctgtggcccccaccacctgccccctgcagcctgtgacagacccctttgccttcagccggcaggccctgcagagcacccccctgggcagcagcagcaagagcagcccccctgtgctgcagggccctgccccagctggcttcagccagcaccctggcctgctggtgccccacacccacgcccgggacagcagccagggcccctgtgagcccctgcccggccccctgacccagccccgggcccacgccagccccttcagcggggccctgaccccatctgcccctcctggccctgagatgaacagatctgctgaggtgggccccagcagcgagcctgaggtgcagaccctgccctacctgccccactacatccctggggtggaccctgagaccagccatggaggccacccccacggcaacatgcctggcctggaccggcccctgagccggcagaacccccatgatggagtggtgaccccagctgccagccccagcctgccccagcccggcctgcagatgcctggccagtggggccctgtgcagggcggcccccagcccagcggccagcacaggagcccctgcccagagggccctgtgcccagcggcgtgccctgtgccacctctgtgccccacttccccacccccagcatcctgcaccagggccctggccacgagcagcacagccccctggtggcccctcctgctgccctgcccagtgatggaagagatgaggtgagccacctgcagagcggcagccacctggccaacaacagcgaccctgagagcaccttccggcagaacccccgcatcgtgaaccactgggccagccctgagctgcggcagaaccctggggtgaagaatgagcacaggcctgccagcgccctggtgaaccccctggcccggggggacagccctgagaacagaacccaccaccccctgggcgctggggccggcagcggctgtgcccccctggaggccgacagcggggccagcggggccctggccatgttcttccagggcggggagacagaaaatgaggagaacctgagcagcgagaaggccggcctgagcggccaggccgactttgatgacttctgcagcagccctggcctgggccggcccccagcccccacccacgtgggcgccggcagcctgtgccaggccctgctgcccggccccagcaatgaagctgctggagatgtgtggggagacacagccagcactggagtgcctgatgccagcggcagccagtatgaaaatgtggagaacctggagtttgtgcagaaccaggaggtgctgcccagcgagcccctgaacctggaccccagcagccccagcgaccagttccgctatggccccctgcccggccctgctgtgcccaggcatggagctgtgtgccacactggagccccagatgccaccctgcacacagtgcacccagacagcgtgagcagcagctacagcagccgcagccacggccgcctgagcggcagcgcccggccccaggagctggtgggcaccttcatccagcaggaggtgggcaagccagaagatgaggccagcggcagcttcttcaagcagattgacagcagccctgtgggcggggagacagatgagaccaccgtgtcccagaactaccggggctctgtgtcccagcccagcacccccagcccccccaagcccaccggcatcttccagaccagcgccaacagcagctttgagcctgtgaagagccacctggtgggcgtgaagccctttgaggccgaccgggccaacgtggtgggggaggtgcgggagacctgtgtgcggcagaagcagtgcaggcctgctgctgccctgcctgatgccagccctggcaacctggagcagcccccagacaacatggagaccctgtgtgccccccaggtgtgccccctgcccctgaacagcaccacagaagctgtgcacatgctgccccacgccggggccccacccctggacacagtgtacccagcccctgagaagaggccttctgcccggacccagggccctgtgaagtgtgagagccctgccaccaccctgtgggcccagagcgagctgcctgactttggaggaaatgtgctgctggccccagctgccccagccctgtatgtgtgtgccaagccccagccccctgtggtgcagcccccagaggaggccatgagcggccagcagagcaggaaccccagcagcgctgcccctgtgcagagcagaggaggcattggagccagcgagaacctggagaacccccccaagatgggagaggaggaggccctgcagagccaggccagcagcggctacgccagcctgctgagcagccccccaacagagagcctgcagaacccccctgtgctgattgcccagcctgaccacagctacaacctggcccagcccatcaacttctctgtgtccctgagcaacagccatgagaagaaccagagctggagggaggccctggtgggggacaggcctgctgtgtcctcctgggccctgggcggggacagcggggagaacaccagcctgagcggcatccccaccagctctgtgctgagcctgagcctgcccagctctgtggcccagagcaacttcccccagggcagcggggccagcgagatggtgagcaaccagcctgccaacctgctggtgcagccccccagccagcctgtgcctgagaacctggtgcctgagagccagaaggacaggaaggccggcagcgccctgcccggctttgccaacagccctgctggcagcacctctgtggtgctggtgcccccagcccacggcaccctggtgcctgatggcaacaaggccaaccacagcagccaccaggaggacacctatggagccctggacttcaccctgagcaggaccctggagaaccctgtgaatgtgtacaaccccagccacagcgacagcctggccagccagcagagcgtggccagccacccccggcagagcggccctggggcccccaacctggaccgcttctaccagcaggtgaccaaggatgcccagggccagcccggcctggagcgggcccagcaggagctggtgcccccccagcagcaggccagccccccccagctgcccaaggccatgttttctgagctgagcaaccctgagagcctgcctgcccagggccaggcccagaacagcgcccagagccctgccagcctggtgctggtggatgctggccagcagctgcccccccggcccccccagagcagctctgtgtccctggtgagcagcggcagcggccaggccgctgtgcccagcgagcagccctggccccagcctgtgcctgccctggcccctggccccccaccccaggacctggccgcctactactactaccggcccctgtatgatgcctaccagccccagtacagcctgccctacccacctgagcctggagctgccagcctgtactaccaggatgtgtacagcctgtatgagccccgctaccggccctatgatggagctgccagcgcctatgcccagaactaccgctacccagagcctgagcggcccagcagccgggccagccacagcagcgagcggcccccaccccggcagggctacccagagggctactacagcagcaagagcggctggagcagccagagcgactactatgccagctactacagcagccagtatgactatggagaccccggccactgggaccgctaccactacagcgcccgggtgcgggaccccaggacctatgaccggcgctactggtgtgatgctgaatatgatgcctacagaagagagcacagcgcctttggagacaggcctgagaagagggacaacaactggaggtatgacccccgcttcaccggcagctttgatgatgatcctgacccccaccgggacccctatggagaggaggtggacagaagatctgtgcacagcgagcacagcgcccggagcctgcacagcgcccacagcctggccagccgccgcagcagcctgagcagccacagccaccagagccagatctaccgcagccacaacgtggccgccggcagctatgaggcccccctgcccccaggcagcttccacggggactttgcctacggcacctaccgcagcaacttcagcagcggccctggcttcccagaatatggctacccagctgacacagtgtggccagccatggagcaggtgagcagccggcccaccagccctgagaagttctctgtgccccacgtgtgtgcccgcttcggccctgggggccagctgatcaaggtgatccccaacctgcccagcgagggccagcctgccctggtggaggtgcacagcatggaggccctgctgcagcacaccagcgagcaggaggagatgagggccttccctggccccctggccaaggatgacacccacaaggtggatgtgatcaactttgcccagaacaaggccatgaagtgcctgcagaatgaaaacctgattgacaaggagagcgccagcctgctgtggaacttcatcgtgctgctgtgccggcagaatggcaccgtggtgggcacagacattgctgagctgctgctgcgggaccacaggacagtgtggctgcccgggaagagccccaatgaggccaacctgattgacttcaccaatgaggccgtggagcaggtggaggaggaggagagcggggaggcccagctgtccttcctgaccggcggccctgctgctgctgccagcagcctggagcgggagacagagcgcttccgggagctgctgctgtatggcaggaagaaggatgccctggagagcgccatgaagaatggcctgtggggccacgccctgctgctggccagcaagatggacagcaggacccacgcccgggtgatgaccaggtttgccaacagcctgcccatcaatgaccccctgcagacagtgtaccagctgatgagcggccgcatgcctgctgccagcacctgctgcggagatgagaagtggggagactggaggccccacctggccatggtgctgagcaacctgaacaacaacatggatgtggagagcaggaccatggccaccatgggagacaccctggccagccggggcctgctggatgctgcccacttctgctacctgatggcccaggccggcttcggcgtgtacaccaagaagaccaccaagctggtgctgattggcagcaaccacagcctgcccttcctgaagtttgccaccaatgaggccatccagaggacagaggcctatgaatatgcccagagcctgggcgctgagacctgccccctgcccagcttccaggtgttcaagttcatctacagctgccgcctggccgagatgggcctggccacccaggccttccactactgtgaggccatcgccaagagcatcctgacccagccccacctgtacagccctgtgctgatcagccagctggtgcagatggccagccagctgcggctgtttgacccccagctgaaggagaagccagaggaggagagcctggccgcccccacctggctggtgcacctgcagcaggtggagcggcagatcaaggagggcgccggcgtgtggcaccaggatggagccctgccccagcagtgccccggcacccccagcagcgagatggagcagctggaccggcccggcctgagccagcccggggccctgggcatcgccaaccccctgctggccgtgcctgcccccagccctgagcacagcagccccagcgtgcggctgctgcccagcgccccccagaccctgcctgatggccccctggccagccctgcccgggtgcccatgtttcctgtgcccctgcccccaggccccctggagcccggccctggctgtgtgaccccaggccctgccctgggcttcctggagcccagcggccctggcctgcccccaggagtgccccccctgcaggagaggaggcacctgctgcaggaggcccggagcccagaccccggcatcgtgccccaggaggcccctgtgggcaacagcctgtctgagctgtctgaggagaactttgatggcaagtttgccaacctgacccccagcaggacagtgcctgacagcgaggcccctcctggctgggacagagctgacagcggccccacccagccccccctgagcctgagccctgcccctgagaccaagaggcctggccaggccgccaagaaggagaccaaggagcccaagaagggggagagctggttcttccgctggctgcccgggaagaagaagacagaggcctacctgcctgatgacaagaacaagagcatcgtgtgggatgagaagaagaaccagtgggtgaacctgaatgaacctgaggaggagaagaaggcccctcctcctccacccacctccatgcccaagacagtgcaggccgcccccccagccctgcccggccccccaggggcccctgtgaacatgtacagccggcgggctgctggcacccgggcccgctacgtggatgtgctgaaccccagcggcacccagaggtctgagcccgccctggccccagctgactttgtggcccccctggcccccctgcccatccccagcaacctgtttgtgcccaccccagatgctgaggagccccagctgcctgatggcaccggccgggagggccctgctgctgcccggggcctggccaaccctgagcccgcccctgagcccaaggtgctgagcagcgctgccagcctgcccggcagcgagctgcccagcagcaggcctgagggcagccagggcggggagctgagccgctgcagctccatgagcagcctgagccgggaggtgtcccagcacttcaaccaggcccctggggacctgcctgctgctgggggcccccccagcggggccatgcccttctacaacccagcccagctggcccaggcctgtgccaccagcggcagcagccggctgggccgcatcggccagaggaagcacctggtgctgaactag

SEQ ID NO: 168966 - DNA, 1158 bp, synthetic construct
  misc_feature 1..1158: note = Description of Artificial Sequence: Synthetic coding sequence
  source 1..1158: mol_type = other DNA
atggacctgctgcccaccagcatcctgctggccagcctgtggatctgcagccacctgcaccccccaggagtgtctgtggacctgccccccaccagcatcctgctggtgtccctgtggatctgcagccacctgcaccccccaggagtgtctgtggaccggcccccaccacccagctcctggtgcctgtgtggcagcccccccaccagcatcctgctggtgtccctgtggatctgcagccccccacccagctcctggtgcctgtgtggcagcgcccccaccagcatcctgctggtgtccctgtggatctggaggctgtggggcctgacagaaggagagagctggttcttccgctggctgcccgggaagaagaagacagaggcctacctgcctgatgacaagaacaagagcatcgtgtgggatgagaagaagaaccagtgggtgaacctgaatgaacctgaggaggagaagaaggcccctcctcctccacccacctccatgcccaagacagtgcaggccgcccccccagccctgcccggccccccaggggcccctgtgaacatgtacagccggcgggctgctggcacccgggcccgctacgtggatgtgctgaaccccagcggcacccagaggtctgagcccgccctggccccagctgactttgtggcccccctggcccccctgcccatccccagcaacctgtttgtgcccacccctgtgtcctctgtgcggccccagggccgcagcggcagaaatgatggcctgctggccctgagcagcccagatgctgaggagccccagctgcctgatggcaccggccgggagggccctgctgctgcccggggcctggccaaccctgagcccgcccctgagcccaaggtgctgagcagcgctgccagcctgcccggcagcgagctgcccagcagcaggcctgagggcagccagggcggggagctgagccgctgcagctccatgagcagcctgagccgggaggtgtcccagcacttcaaccaggcccctggggacctgcctgctgctgggggcccccccagcggggccatgcccttctacaacccagcccagctggcccaggcctgtgccaccagcggcagcagccggctgggccgcatcggccagaggaagcacctggtgctgaactag

SEQ ID NO: 168967 - DNA, 6405 bp, synthetic construct
  misc_feature 1..6405: note = Description of Artificial Sequence: Synthetic coding sequence
  source 1..6405: mol_type = other DNA
atgcctggcctggaccggcccctgagccggcagaacccccatgatggagtggtgaccccagctgccagccccagcctgccccagcccggcctgcagatgcctggccagtggggccctgtgcagggcggcccccagcccagcggccagcacaggagcccctgcccagagggccctgtgcccagcggcgtgccctgtgccacctctgtgccccacttccccacccccagcatcctgcaccagggccctggccacgagcagcacagccccctggtggcccctcctgctgccctgcccagtgatggaagagatgaggtgagccacctgcagagcggcagccacctggccaacaacagcgaccctgagagcaccttccggcagaacccccgcatcgtgaaccactgggccagccctgagctgcggcagaaccctggggtgaagaatgagcacaggcctgccagcgccctggtgaaccccctggcccggggggacagccctgagaacagaacccaccaccccctgggcgctggggccggcagcggctgtgcccccctggaggccgacagcggggccagcggggccctggccatgttcttccagggcggggagacagaaaatgaggagaacctgagcagcgagaaggccggcctgagcggccaggccgactttgatgacttctgcagcagccctggcctgggccggcccccagcccccacccacgtgggcgccggcagcctgtgccaggccctgctgcccggccccagcaatgaagctgctggagatgtgtggggagacacagccagcactggagtgcctgatgccagcggcagccagtatgaaaatgtggagaacctggagtttgtgcagaaccaggaggtgctgcccagcgagcccctgaacctggaccccagcagccccagcgaccagttccgctatggccccctgcccggccctgctgtgcccaggcatggagctgtgtgccacactggagccccagatgccaccctgcacacagtgcacccagacagcgtgagcagcagctacagcagccgcagccacggccgcctgagcggcagcgcccggccccaggagctggtgggcaccttcatccagcaggaggtgggcaagccagaagatgaggccagcggcagcttcttcaagcagattgacagcagccctgtgggcggggagacagatgagaccaccgtgtcccagaactaccggggctctgtgtcccagcccagcacccccagcccccccaagcccaccggcatcttccagaccagcgccaacagcagctttgagcctgtgaagagccacctggtgggcgtgaagccctttgaggccgaccgggccaacgtggtgggggaggtgcgggagacctgtgtgcggcagaagcagtgcaggcctgctgctgccctgcctgatgccagccctggcaacctggagcagcccccagacaacatggagaccctgtgtgccccccaggtgtgccccctgcccctgaacagcaccacagaagctgtgcacatgctgccccacgccggggccccacccctggacacagtgtacccagcccctgagaagaggccttctgcccggacccagggccctgtgaagtgtgagagccctgccaccaccctgtgggcccagagcgagctgcctgactttggaggaaatgtgctgctggccccagctgccccagccctgtatgtgtgtgccaagccccagccccctgtggtgcagcccccagaggaggccatgagcggccagcagagcaggaaccccagcagcgctgcccctgtgcagagcagaggaggcattggagccagcgagaacctggagaacccccccaagatgggagaggaggaggccctgcagagccaggccagcagcggctacgccagcctgctgagcagccccccaacagagagcctgcagaacccccctgtgctgattgcccagcctgaccacagctacaacctggcccagcccatcaacttctctgtgtccctgagcaacagccatgagaagaaccagagctggagggaggccctggtgggggacaggcctgctgtgtcctcctgggccctgggcggggacagcggggagaacaccagcctgagcggcatccccaccagctctgtgctgagcctgagcctgcccagctctgtggcccagagcaacttcccccagggcagcggggccagcgagatggtgagcaaccagcctgccaacctgctggtgcagccccccagccagcctgtgcctgagaacctggtgcctgagagccagaaggacaggaaggccggcagcgccctgcccggctttgccaacagccctgctggcagcacctctgtggtgctggtgcccccagcccacggcaccctggtgcctgatggcaacaaggccaaccacagcagccaccaggaggacacctatggagccctggacttcaccctgagcaggaccctggagaaccctgtgaatgtgtacaaccccagccacagcgacagcctggccagccagcagagcgtggccagccacccccggcagagcggccctggggcccccaacctggaccgcttctaccagcaggtgaccaaggatgcccagggccagcccggcctggagcgggcccagcaggagctggtgcccccccagcagcaggccagccccccccagctgcccaaggccatgttttctgagctgagcaaccctgagagcctgcctgcccagggccaggcccagaacagcgcccagagccctgccagcctggtgctggtggatgctggccagcagctgcccccccggcccccccagagcagctctgtgtccctggtgagcagcggcagcggccaggccgctgtgcccagcgagcagccctggccccagcctgtgcctgccctggcccctggccccccaccccaggacctggccgcctactactactaccggcccctgtatgatgcctaccagccccagtacagcctgccctacccacctgagcctggagctgccagcctgtactaccaggatgtgtacagcctgtatgagccccgctaccggccctatgatggagctgccagcgcctatgcccagaactaccgctacccagagcctgagcggcccagcagccgggccagccacagcagcgagcggcccccaccccggcagggctacccagagggctactacagcagcaagagcggctggagcagccagagcgactactatgccagctactacagcagccagtatgactatggagaccccggccactgggaccgctaccactacagcgcccgggtgcgggaccccaggacctatgaccggcgctactggtgtgatgctgaatatgatgcctacagaagagagcacagcgcctttggagacaggcctgagaagagggacaacaactggaggtatgacccccgcttcaccggcagctttgatgatgatcctgacccccaccgggacccctatggagaggaggtggacagaagatctgtgcacagcgagcacagcgcccggagcctgcacagcgcccacagcctggccagccgccgcagcagcctgagcagccacagccaccagagccagatctaccgcagccacaacgtggccgccggcagctatgaggcccccctgcccccaggcagcttccacggggactttgcctacggcacctaccgcagcaacttcagcagcggccctggcttcccagaatatggctacccagctgacacagtgtggccagccatggagcaggtgagcagccggcccaccagccctgagaagttctctgtgccccacgtgtgtgcccgcttcggccctgggggccagctgatcaaggtgatccccaacctgcccagcgagggccagcctgccctggtggaggtgcacagcatggaggccctgctgcagcacaccagcgagcaggaggagatgagggccttccctggccccctggccaaggatgacacccacaaggtggatgtgatcaactttgcccagaacaaggccatgaagtgcctgcagaatgaaaacctgattgacaaggagagcgccagcctgctgtggaacttcatcgtgctgctgtgccggcagaatggcaccgtggtgggcacagacattgctgagctgctgctgcgggaccacaggacagtgtggctgcccgggaagagccccaatgaggccaacctgattgacttcaccaatgaggccgtggagcaggtggaggaggaggagagcggggaggcccagctgtccttcctgaccggcggccctgctgctgctgccagcagcctggagcgggagacagagcgcttccgggagctgctgctgtatggcaggaagaaggatgccctggagagcgccatgaagaatggcctgtggggccacgccctgctgctggccagcaagatggacagcaggacccacgcccgggtgatgaccaggtttgccaacagcctgcccatcaatgaccccctgcagacagtgtaccagctgatgagcggccgcatgcctgctgccagcacctgctgcggagatgagaagtggggagactggaggccccacctggccatggtgctgagcaacctgaacaacaacatggatgtggagagcaggaccatggccaccatgggagacaccctggccagccggggcctgctggatgctgcccacttctgctacctgatggcccaggccggcttcggcgtgtacaccaagaagaccaccaagctggtgctgattggcagcaaccacagcctgcccttcctgaagtttgccaccaatgaggccatccagaggacagaggcctatgaatatgcccagagcctgggcgctgagacctgccccctgcccagcttccaggtgttcaagttcatctacagctgccgcctggccgagatgggcctggccacccaggccttccactactgtgaggccatcgccaagagcatcctgacccagccccacctgtacagccctgtgctgatcagccagctggtgcagatggccagccagctgcggctgtttgacccccagctgaaggagaagccagaggaggagagcctggccgcccccacctggctggtgcacctgcagcaggtggagcggcagatcaaggagggcgccggcgtgtggcaccaggatggagccctgccccagcagtgccccggcacccccagcagcgagatggagcagctggaccggcccggcctgagccagcccggggccctgggcatcgccaaccccctgctggccgtgcctgcccccagccctgagcacagcagccccagcgtgcggctgctgcccagcgccccccagaccctgcctgatggccccctggccagccctgcccgggtgcccatgtttcctgtgcccctgcccccaggccccctggagcccggccctggctgtgtgaccccaggccctgccctgggcttcctggagcccagcggccctggcctgcccccaggagtgccccccctgcaggagaggaggcacctgctgcaggaggcccggagcccagaccccggcatcgtgccccaggaggcccctgtgggcaacagcctgtctgagctgtctgaggagaactttgatggcaagtttgccaacctgacccccagcaggacagtgcctgacagcgaggcccctcctggctgggacagagctgacagcggccccacccagccccccctgagcctgagccctgcccctgagaccaagaggcctggccaggccgccaagaaggagaccaaggagcccaagaagggggagagctggttcttccgctggctgcccgggaagaagaagacagaggcctacctgcctgatgacaagaacaagagcatcgtgtgggatgagaagaagaaccagtgggtgaacctgaatgaacctgaggaggagaagaaggcccctcctcctccacccacctccatgcccaagacagtgcaggccgcccccccagccctgcccggccccccaggggcccctgtgaacatgtacagccggcgggctgctggcacccgggcccgctacgtggatgtgctgaaccccagcggcacccagaggtctgagcccgccctggccccagctgactttgtggcccccctggcccccctgcccatccccagcaacctgtttgtgcccaccccagatgctgaggagccccagctgcctgatggcaccggccgggagggccctgctgctgcccggggcctggccaaccctgagcccgcccctgagcccaaggcccctggggacctgcctgctgctgggggccccccatctggggccatgcccttctacaacccagcccagctggcccaggcctgtgccaccagcggcagcagccggctgggcagaattggccagaggaagcacctggtgctgaactag

SEQ ID NO: 168968 - DNA, 423 bp, synthetic construct
  misc_feature 1..423: note = Description of Artificial Sequence: Synthetic coding sequence
  source 1..423: mol_type = other DNA
atggacctgctgcccaccagcatcctgctggccagcctgtggatctgcagccacctgcaccccccaggagtgtctgtggacctgccccccaccagcatcctgctggtgtccctgtggatctgcagccacctgcaccccccaggagtgtctgtggaccggcccccaccacccagctcctggtgcctgtgtggcagcccccccaccagcatcctgctggtgtccctgtggatctgcagccccccacccagctcctggtgcctgtgtggcagcgcccccaccagcatcctgctggtgtccctgtggatctggaggctgtggggcctgacagaggtgggccacgtggagtttgtgttcctgccctggctgatctcctggaacatcatgttcagcaagctgttcagctgcttcctgtacctgggctag

SEQ ID NO: 168969 - DNA, 2205 bp, synthetic construct
  misc_feature 1..2205: note = Description of Artificial Sequence: Synthetic coding sequence
  source 1..2205: mol_type = other DNA
atgttttctgagctgagcaaccctgagagcctgcctgcccagggccaggcccagaacagcgcccagagccctgccagcctggtgctggtggatgctggccagcagctgcccccccggcccccccagagcagctctgtgtccctggtgagcagcggcagcggccaggccgctgtgcccagcgagcagccctggccccagcctgtgcctgccctggcccctggccccccaccccaggacctggccgcctactactactaccggcccctgtatgatgcctaccagccccagtacagcctgccctacccacctgagcctggagctgccagcctgtactaccaggatgtgtacagcctgtatgagccccgctaccggccctatgatggagctgccagcgcctatgcccagaactaccgctacccagagcctgagcggcccagcagccgggccagccacagcagcgagcggcccccaccccggcagggctacccagagggctactacagcagcaagagcggctggagcagccagagcgactactatgccagctactacagcagccagtatgactatggagaccccggccactgggaccgctaccactacagcgcccgggtgcgggaccccaggacctatgaccggcgctactggtgtgatgctgaatatgatgcctacagaagagagcacagcgcctttggagacaggcctgagaagagggacaacaactggaggtatgacccccgcttcaccggcagctttgatgatgatcctgacccccaccgggacccctatggagaggaggtggacagaagatctgtgcacagcgagcacagcgcccggagcctgcacagcgcccacagcctggccagccgccgcagcagcctgagcagccacagccaccagagccagatctaccgcagccacaacgtggccgccggcagctatgaggcccccctgcccccaggcagcttccacggggactttgcctacggcacctaccgcagcaacttcagcagcggccctggcttcccagaatatggctacagacctgccctgggcttcctggagcccagcggccctggcctgcccccaggagtgccccccctgcaggagaggaggcacctgctgcaggaggcccggagcccagaccccggcatcgtgccccaggaggcccctgtgggcaacagcctgtctgagctgtctgaggagaactttgatggcaagtttgccaacctgacccccagcaggacagtgcctgacagcgaggcccctcctggctgggacagagctgacagcggccccacccagccccccctgagcctgagccctgcccctgagaccaagaggcctggccaggccgccaagaaggagaccaaggagcccaagaagggggagagctggttcttccgctggctgcccgggaagaagaagacagaggcctacctgcctgatgacaagaacaagagcatcgtgtgggatgagaagaagaaccagtgggtgaacctgaatgaacctgaggaggagaagaaggcccctcctcctccacccacctccatgcccaagacagtgcaggccgcccccccagccctgcccggccccccaggggcccctgtgaacatgtacagccggcgggctgctggcacccgggcccgctacgtggatgtgctgaaccccagcggcacccagaggtctgagcccgccctggccccagctgactttgtggcccccctggcccccctgcccatccccagcaacctgtttgtgcccacccctgtgcggccccagggccgctctggaagaaatgatggcctgctggccctgagcagcccagatgctgaggagccccagctgcctgatggcaccggccgggagggccctgctgctgcccggggcctggccaaccctgagcccgcccctgagcccaaggtgctgagcagcgctgccagcctgcccggcagcgagctgcccagcagcaggcctgagggcagccagggcggggagctgagccgctgcagctccatgagcagcctgagccgggaggtgtcccagcacttcaaccaggcccctggggacctgcctgctgctgggggccccccatctggggccatgcccttctacaacccagcccagctggcccaggcctgtgccaccagcggcagcagccggctgggcagaattggccagaggaagcacctggtgctgaactag

SEQ ID NO: 168970 - DNA, 5184 bp, synthetic construct
  misc_feature 1..5184: note = Description of Artificial Sequence: Synthetic coding sequence
  source 1..5184: mol_type = other DNA
atgttcttccagggcggggagacagaaaatgaggagaacctgagcagcgagaaggccggcctgagcggccaggccgactttgatgacttctgcagcagccctggcctgggccggcccccagcccccacccacgtgggcgccggcagcctgtgccaggccctgctgcccggccccagcaatgaggccgctggagatgtgtggggagacacagccagcactggagtgcctgatgccagcggcagccagtatgaaaatgtggagaacctggagtttgtgcagaaccaggaggtgctgcccagcgagcccctgaacctggaccccagcagccccagcgaccagttccgctatggccccctgcccggccctgctgtgcccaggcatggagctgtgtgccacactggagccccagatgccaccctgcacacagtgcacccagattctgtgagcagcagctacagcagccgcagccacggccgcctgagcggcagcgcccggccccaggagctggtgggcaccttcatccagcaggaggtgggcaagccagaagatgaggccagcggcagcttcttcaagcagattgacagcagccctgtgggcggggagacagatgagaccaccgtgtcccagaactaccggggctctgtgtcccagcccagcacccccagcccccccaagcccaccggcatcttccagaccagcgccaacagcagctttgagcctgtgaagagccacctggtgggcgtgaagccctttgaagctgaccgggccaacgtggtgggggaggtgcgggagacctgtgtgcggcagaagcagtgcaggcctgctgctgccctgcctgatgccagccctggcaacctggagcagcccccagacaacatggagaccctgtgtgccccccaggtgtgccccctgcccctgaacagcaccacagaggccgtgcacatgctgccccatgctggggccccacccctggacacagtgtacccagcccctgagaagaggcccagcgcccggacccagggccctgtgaagtgtgagagccctgccaccaccctgtgggcccagagcgagctgcctgactttggaggaaatgtgctgctggccccagctgccccagccctgtatgtgtgtgccaagccccagccccctgtggtgcagcccccagaggaggccatgagcggccagcagagcaggaaccccagcagcgctgcccctgtgcagagccggggcggcatcggggccagcgagaacctggagaacccccccaagatgggagaggaggaggccctgcagagccaggtgaccaaggatgcccagggccagcccggcctggagcgggcccagcaggagctggtgcccccccagcagcaggccagccccccccagctgcccaaggccatgttttctgagctgagcaaccctgagagcctgcctgcccagggccaggcccagaacagcgcccagagccctgccagcctggtgctggtggatgctggccagcagctgcccccccggcccccccagagcagctctgtgtccctggtgagcagcggcagcggccaggccgctgtgcccagcgagcagccctggccccagcctgtgcctgccctggcccctggccccccaccccaggacctggccgcctactactactaccggcccctgtatgatgcctaccagccccagtacagcctgccctacccacctgagcctggagctgccagcctgtactaccaggatgtgtacagcctgtatgagccccgctaccggccctatgatggagctgccagcgcctatgcccagaactaccgctacccagagcctgagcggcccagcagccgggccagccacagcagcgagcggcccccaccccggcagggctacccagagggctactacagcagcaagagcggctggagcagccagagcgactactatgccagctactacagcagccagtatgactatggagaccccggccactgggaccgctaccactacagcgcccgggtgcgggaccccaggacctatgaccggcgctactggtgtgatgctgaatatgatgcctacagaagagagcacagcgcctttggagacaggcctgagaagagggacaacaactggaggtatgacccccgcttcaccggcagctttgatgatgatcctgacccccaccgggacccctatggagaggaggtggacagaagatctgtgcacagcgagcacagcgcccggagcctgcacagcgcccacagcctggccagccgccgcagcagcctgagcagccacagccaccagagccagatctaccgcagccacaacgtggccgccggcagctatgaggcccccctgcccccaggcagcttccacggggactttgcctacggcacctaccgcagcaacttcagcagcggccctggcttcccagaatatggctacccagctgacacagtgtggccagccatggagcaggtgagcagccggcccaccagccctgagaagttctctgtgccccacgtgtgtgcccgcttcggccctgggggccagctgatcaaggtgatccccaacctgcccagcgagggccagcctgccctggtggaggtgcacagcatggaggccctgctgcagcacaccagcgagcaggaggagatgagggccttccctggccccctggccaaggatgacacccacaaggtggatgtgatcaactttgcccagaacaaggccatgaagtgcctgcagaatgaaaacctgattgacaaggagagcgccagcctgctgtggaacttcatcgtgctgctgtgccggcagaatggcaccgtggtgggcacagacattgctgagctgctgctgcgggaccacaggacagtgtggctgcccgggaagagccccaatgaggccaacctgattgacttcaccaatgaggccgtggagcaggtggaggaggaggagagcggggaggcccagctgtccttcctgaccggcggccctgctgctgctgccagcagcctggagcgggagacagagcgcttccgggagctgctgctgtatggcaggaagaaggatgccctggagagcgccatgaagaatggcctgtggggccacgccctgctgctggccagcaagatggacagcaggacccacgcccgggtgatgaccaggtttgccaacagcctgcccatcaatgaccccctgcagacagtgtaccagctgatgagcggccgcatgcctgctgccagcacctgctgcggagatgagaagtggggagactggaggccccacctggccatggtgctgagcaacctgaacaacaacatggatgtggagagcaggaccatggccaccatgggagacaccctggccagccggggcctgctggatgctgcccacttctgctacctgatggcccaggccggcttcggcgtgtacaccaagaagaccaccaagctggtgctgattggcagcaaccacagcctgcccttcctgaagtttgccaccaatgaggccatccagaggacagaggcctatgaatatgcccagagcctgggcgctgagacctgccccctgcccagcttccaggtgttcaagttcatctacagctgccgcctggccgagatgggcctggccacccaggccttccactactgtgaggccatcgccaagagcatcctgacccagccccacctgtacagccctgtgctgatcagccagctggtgcagatggccagccagctgcggctgtttgacccccagctgaaggagaagccagaggaggagagcctggccgcccccacctggctggtgcacctgcagcaggtggagcggcagatcaaggagggcgccggcgtgtggcaccaggatggagccctgccccagcagtgccccggcacccccagcagcgagatggagcagctggaccggcccggcctgagccagcccggggccctgggcatcgccaaccccctgctggccgtgcctgcccccagccctgagcacagcagccccagcgtgcggctgctgcccagcgccccccagaccctgcctgatggccccctggccagccctgcccgggtgcccatgtttcctgtgcccctgcccccaggccccctggagcccggccctggctgtgtgaccccaggccctgccctgggcttcctggagcccagcggccctggcctgcccccaggagtgccccccctgcaggagaggaggcacctgctgcaggaggcccggagcccagaccccggcatcgtgccccaggaggcccctgtgggcaacagcctgtctgagctgtctgaggagaactttgatggcaagtttgccaacctgacccccagcaggacagtgcctgacagcgaggcccctcctggctgggacagagctgacagcggccccacccagccccccctgagcctgagccctgcccctgagaccaagaggcctggccaggccgccaagaaggagaccaaggagcccaagaagggggagagctggttcttccgctggctgcccgggaagaagaagacagaggcctacctgcctgatgacaagaacaagagcatcgtgtgggatgagaagaagaaccagtgggtgaacctgaatgaacctgaggaggagaagaaggcccctcctcctccacccacctccatgcccaagacagtgcaggccgcccccccagccctgcccggccccccaggggcccctgtgaacatgtacagccggcgggctgctggcacccgggcccgctacgtggatgtgctgaaccccagcggcacccagaggtctgagcccgccctggccccagctgactttgtggcccccctggcccccctgcccatccccagcaacctgtttgtgcccaccccagatgctgaggagccccagctgcctgatggcaccggccgggagggccctgctgctgcccggggcctggccaaccctgagcccgcccctgagcccaaggtgctgagcagcgctgccagcctgcccggcagcgagctgcccagcagcaggcctgagggcagccagggcggggaggcccctggggacctgcctgctgctgggggcccccccagcggggccatgcccttctacaacccagcccagctggcccaggcctgtgccaccagcggcagcagccggctgggccgcatcggccagaggaagcacctggtgctgaactag

SEQ ID NO: 168971 - DNA, 6465 bp, synthetic construct
  misc_feature 1..6465: note = Description of Artificial Sequence: Synthetic coding sequence
  source 1..6465: mol_type = other DNA
atgcctggcctggaccggcccctgagccggcagaacccccatgatggagtggtgaccccagctgccagccccagcctgccccagcccggcctgcagatgcctggccagtggggccctgtgcagggcggcccccagcccagcggccagcacaggagcccctgcccagagggccctgtgcccagcggcgtgccctgtgccacctctgtgccccacttccccacccccagcatcctgcaccagggccctggccacgagcagcacagccccctggtggcccctcctgctgccctgcccagtgatggaagagatgaggtgagccacctgcagagcggcagccacctggccaacaacagcgaccctgagagcaccttccggcagaacccccgcatcgtgaaccactgggccagccctgagctgcggcagaaccctggggtgaagaatgagcacaggcctgccagcgccctggtgaaccccctggcccggggggacagccctgagaacagaacccaccaccccctgggcgctggggccggcagcggctgtgcccccctggaggccgacagcggggccagcggggccctggccatgttcttccagggcggggagacagaaaatgaggagaacctgagcagcgagaaggccggcctgagcggccaggccgactttgatgacttctgcagcagccctggcctgggccggcccccagcccccacccacgtgggcgccggcagcctgtgccaggccctgctgcccggccccagcaatgaagctgctggagatgtgtggggagacacagccagcactggagtgcctgatgccagcggcagccagtatgaaaatgtggagaacctggagtttgtgcagaaccaggaggtgctgcccagcgagcccctgaacctggaccccagcagccccagcgaccagttccgctatggccccctgcccggccctgctgtgcccaggcatggagctgtgtgccacactggagccccagatgccaccctgcacacagtgcacccagacagcgtgagcagcagctacagcagccgcagccacggccgcctgagcggcagcgcccggccccaggagctggtgggcaccttcatccagcaggaggtgggcaagccagaagatgaggccagcggcagcttcttcaagcagattgacagcagccctgtgggcggggagacagatgagaccaccgtgtcccagaactaccggggctctgtgtcccagcccagcacccccagcccccccaagcccaccggcatcttccagaccagcgccaacagcagctttgagcctgtgaagagccacctggtgggcgtgaagccctttgaggccgaccgggccaacgtggtgggggaggtgcgggagacctgtgtgcggcagaagcagtgcaggcctgctgctgccctgcctgatgccagccctggcaacctggagcagcccccagacaacatggagaccctgtgtgccccccaggtgtgccccctgcccctgaacagcaccacagaagctgtgcacatgctgccccacgccggggccccacccctggacacagtgtacccagcccctgagaagaggccttctgcccggacccagggccctgtgaagtgtgagagccctgccaccaccctgtgggcccagagcgagctgcctgactttggaggaaatgtgctgctggccccagctgccccagccctgtatgtgtgtgccaagccccagccccctgtggtgcagcccccagaggaggccatgagcggccagcagagcaggaaccccagcagcgctgcccctgtgcagagcagaggaggcattggagccagcgagaacctggagaacccccccaagatgggagaggaggaggccctgcagagccaggccagcagcggctacgccagcctgctgagcagccccccaacagagagcctgcagaacccccctgtgctgattgcccagcctgaccacagctacaacctggcccagcccatcaacttctctgtgtccctgagcaacagccatgagaagaaccagagctggagggaggccctggtgggggacaggcctgctgtgtcctcctgggccctgggcggggacagcggggagaacaccagcctgagcggcatccccaccagctctgtgctgagcctgagcctgcccagctctgtggcccagagcaacttcccccagggcagcggggccagcgagatggtgagcaaccagcctgccaacctgctggtgcagccccccagccagcctgtgcctgagaacctggtgcctgagagccagaaggacaggaaggccggcagcgccctgcccggctttgccaacagccctgctggcagcacctctgtggtgctggtgcccccagcccacggcaccctggtgcctgatggcaacaaggccaaccacagcagccaccaggaggacacctatggagccctggacttcaccctgagcaggaccctggagaaccctgtgaatgtgtacaaccccagccacagcgacagcctggccagccagcagagcgtggccagccacccccggcagagcggccctggggcccccaacctggaccgcttctaccagcaggtgaccaaggatgcccagggccagcccggcctggagcgggcccagcaggagctggtgcccccccagcagcaggccagccccccccagctgcccaaggccatgttttctgagctgagcaaccctgagagcctgcctgcccagggccaggcccagaacagcgcccagagccctgccagcctggtgctggtggatgctggccagcagctgcccccccggcccccccagagcagctctgtgtccctggtgagcagcggcagcggccaggccgctgtgcccagcgagcagccctggccccagcctgtgcctgccctggcccctggccccccaccccaggacctggccgcctactactactaccggcccctgtatgatgcctaccagccccagtacagcctgccctacccacctgagcctggagctgccagcctgtactaccaggatgtgtacagcctgtatgagccccgctaccggccctatgatggagctgccagcgcctatgcccagaactaccgctacccagagcctgagcggcccagcagccgggccagccacagcagcgagcggcccccaccccggcagggctacccagagggctactacagcagcaagagcggctggagcagccagagcgactactatgccagctactacagcagccagtatgactatggagaccccggccactgggaccgctaccactacagcgcccgggtgcgggaccccaggacctatgaccggcgctactggtgtgatgctgaatatgatgcctacagaagagagcacagcgcctttggagacaggcctgagaagagggacaacaactggaggtatgacccccgcttcaccggcagctttgatgatgatcctgacccccaccgggacccctatggagaggaggtggacagaagatctgtgcacagcgagcacagcgcccggagcctgcacagcgcccacagcctggccagccgccgcagcagcctgagcagccacagccaccagagccagatctaccgcagccacaacgtggccgccggcagctatgaggcccccctgcccccaggcagcttccacggggactttgcctacggcacctaccgcagcaacttcagcagcggccctggcttcccagaatatggctacccagctgacacagtgtggccagccatggagcaggtgagcagccggcccaccagccctgagaagttctctgtgccccacgtgtgtgcccgcttcggccctgggggccagctgatcaaggtgatccccaacctgcccagcgagggccagcctgccctggtggaggtgcacagcatggaggccctgctgcagcacaccagcgagcaggaggagatgagggccttccctggccccctggccaaggatgacacccacaaggtggatgtgatcaactttgcccagaacaaggccatgaagtgcctgcagaatgaaaacctgattgacaaggagagcgccagcctgctgtggaacttcatcgtgctgctgtgccggcagaatggcaccgtggtgggcacagacattgctgagctgctgctgcgggaccacaggacagtgtggctgcccgggaagagccccaatgaggccaacctgattgacttcaccaatgaggccgtggagcaggtggaggaggaggagagcggggaggcccagctgtccttcctgaccggcggccctgctgctgctgccagcagcctggagcgggagacagagcgcttccgggagctgctgctgtatggcaggaagaaggatgccctggagagcgccatgaagaatggcctgtggggccacgccctgctgctggccagcaagatggacagcaggacccacgcccgggtgatgaccaggtttgccaacagcctgcccatcaatgaccccctgcagacagtgtaccagctgatgagcggccgcatgcctgctgccagcacctgctgcggagatgagaagtggggagactggaggccccacctggccatggtgctgagcaacctgaacaacaacatggatgtggagagcaggaccatggccaccatgggagacaccctggccagccggggcctgctggatgctgcccacttctgctacctgatggcccaggccggcttcggcgtgtacaccaagaagaccaccaagctggtgctgattggcagcaaccacagcctgcccttcctgaagtttgccaccaatgaggccatccagaggacagaggcctatgaatatgcccagagcctgggcgctgagacctgccccctgcccagcttccaggtgttcaagttcatctacagctgccgcctggccgagatgggcctggccacccaggccttccactactgtgaggccatcgccaagagcatcctgacccagccccacctgtacagccctgtgctgatcagccagctggtgcagatggccagccagctgcggctgtttgacccccagctgaaggagaagccagaggaggagagcctggccgcccccacctggctggtgcacctgcagcaggtggagcggcagatcaaggagggcgccggcgtgtggcaccaggatggagccctgccccagcagtgccccggcacccccagcagcgagatggagcagctggaccggcccggcctgagccagcccggggccctgggcatcgccaaccccctgctggccgtgcctgcccccagccctgagcacagcagccccagcgtgcggctgctgcccagcgccccccagaccctgcctgatggccccctggccagccctgcccgggtgcccatgtttcctgtgcccctgcccccaggccccctggagcccggccctggctgtgtgaccccaggccctgccctgggcttcctggagcccagcggccctggcctgcccccaggagtgccccccctgcaggagaggaggcacctgctgcaggaggcccggagcccagaccccggcatcgtgccccaggaggcccctgtgggcaacagcctgtctgagctgtctgaggagaactttgatggcaagtttgccaacctgacccccagcaggacagtgcctgacagcgaggcccctcctggctgggacagagctgacagcggccccacccagccccccctgagcctgagccctgcccctgagaccaagaggcctggccaggccgccaagaaggagaccaaggagcccaagaagggggagagctggttcttccgctggctgcccgggaagaagaagacagaggcctacctgcctgatgacaagaacaagagcatcgtgtgggatgagaagaagaaccagtgggtgaacctgaatgaacctgaggaggagaagaaggcccctcctcctccacccacctccatgcccaagacagtgcaggccgcccccccagccctgcccggccccccaggggcccctgtgaacatgtacagccggcgggctgctggcacccgggcccgctacgtggatgtgctgaaccccagcggcacccagaggtctgagcccgccctggccccagctgactttgtggcccccctggcccccctgcccatccccagcaacctgtttgtgcccaccccagatgctgaggagccccagctgcctgatggcaccggccgggagggccctgctgctgcccggggcctggccaaccctgagcccgcccctgagcccaagctgagccgctgcagctccatgagcagcctgagccgggaggtgtcccagcacttcaaccaggcccctggggacctgcctgctgctgggggccccccatctggggccatgcccttctacaacccagcccagctggcccaggcctgtgccaccagcggcagcagccggctgggcagaattggccagaggaagcacctggtgctgaactag

SEQ ID NO: 168972 - DNA, 1521 bp, synthetic construct
  misc_feature 1..1521: note = Description of Artificial Sequence: Synthetic coding sequence
  source 1..1521: mol_type = other DNA
tgaagcgccttcggggacaggcctgagaagagggacaacaactggaggtatgacccccgcttcaccggcagctttgatgatgatcctgacccccaccgggacccctacggggaggaggtggaccggcgctctgtgcacagcgagcacagcgcccggagcctgcacagcgcccacagcctggccagcagaagaagcagcctgagcagccacagccaccagagccagatctaccgcagccacaacgtggccgccggcagctatgaggcccccctgcccccaggcagcttccatggagactttgcctacggcacctaccgcagcaacttcagcagcggccctggcttcccagaatatggctacccagccctgggcttcctggagcccagcggccctggcctgcccccaggagtgccccccctgcaggagaggaggcacctgctgcaggaggcccggagcccagaccccggcatcgtgccccaggaggcccctgtgggcaacagcctgtctgagctgtctgaggagaactttgatggcaagtttgccaacctgacccccagcaggacagtgcctgacagcgaggcccctcctggctgggacagagctgacagcggccccacccagccccccctgagcctgagccctgcccctgagaccaagaggcctggccaggccgccaagaaggagaccaaggagcccaagaagggggagagctggttcttccgctggctgcccgggaagaagaagacagaggcctacctgcctgatgacaagaacaagagcatcgtgtgggatgagaagaagaaccagtgggtgaacctgaatgaacctgaggaggagaagaaggcccctcctcctccacccacctccatgcccaagacagtgcaggccgcccccccagccctgcccggccccccaggggcccctgtgaacatgtacagccggcgggctgctggcacccgggcccgctacgtggatgtgctgaaccccagcggcacccagaggtctgagcccgccctggccccagctgactttgtggcccccctggcccccctgcccatccccagcaacctgtttgtgcccacccctgtgcggccccagggccgctctggaagaaatgatggcctgctggccctgagcagcccagatgctgaggagccccagctgcctgatggcaccggccgggagggccctgctgctgcccggggcctggccaaccctgagcccgcccctgagcccaaggtgctgagcagcgctgccagcctgcccggcagcgagctgcccagcagcaggcctgagggcagccagggcggggagctgagccgctgcagctccatgagcagcctgagccgggaggtgtcccagcacttcaaccaggcccctggggacctgcctgctgctgggggccccccatctggggccatgcccttctacaacccagcccagctggcccaggcctgtgccaccagcggcagcagccggctgggcagaattggccagaggaagcacctggtgctgaactag

SEQ ID NO: 168973 - DNA, 3180 bp, synthetic construct
  misc_feature 1..3180: note = Description of Artificial Sequence: Synthetic coding sequence
  source 1..3180: mol_type = other DNA
gcccgggtgcgggaccccaggacctatgaccggcgctactggtgtgatgctgaatatgatgcctacagaagagagcacagcgcctttggagacaggcctgagaagagggacaacaactggaggtatgacccccgcttcaccggcagctttgatgatgatcctgacccccaccgggacccctatggagaggaggtggacagaagatctgtgcacagcgagcacagcgcccggagcctgcacagcgcccacagcctggccagccgccgcagcagcctgagcagccacagccaccagagccagatctaccgcagccacaacgtggccgccggcagctatgaggcccccctgcccccaggcagcttccacggggactttgcctacggcacctaccgcagcaacttcagcagcggccctggcttcccagaatatggctacccagctgacacagtgtggccagccatggagcaggtgagcagccggcccaccagccctgagaagttctctgtgccccacgtgtgtgcccgcttcggccctgggggccagctgatcaaggtgatccccaacctgcccagcgagggccagcctgccctggtggaggtgcacagcatggaggccctgctgcagcacaccagcgagcaggaggagatgagggccttccctggccccctggccaaggatgacacccacaaggtggatgtgatcaactttgcccagaacaaggccatgaagtgcctgcagaatgaaaacctgattgacaaggagagcgccagcctgctgtggaacttcatcgtgctgctgtgccggcagaatggcaccgtggtgggcacagacattgctgagctgctgctgcgggaccacaggacagtgtggctgcccgggaagagccccaatgaggccaacctgattgacttcaccaatgaggccgtggagcaggtggaggaggaggagagcggggaggcccagctgtccttcctgaccggcggccctgctgctgctgccagcagcctggagcgggagacagagcgcttccgggagctgctgctgtatggcaggaagaaggatgccctggagagcgccatgaagaatggcctgtggggccacgccctgctgctggccagcaagatggacagcaggacccacgcccgggtgatgaccaggtttgccaacagcctgcccatcaatgaccccctgcagacagtgtaccagctgatgagcggccgcatgcctgctgccagcacctgctgcggagatgagaagtggggagactggaggccccacctggccatggtgctgagcaacctgaacaacaacatggatgtggagagcaggaccatggccaccatgggagacaccctggccagccggggcctgctggatgctgcccacttctgctacctgatggcccaggccggcttcggcgtgtacaccaagaagaccaccaagctggtgctgattggcagcaaccacagcctgcccttcctgaagtttgccaccaatgaggccatccagaggacagaggcctatgaatatgcccagagcctgggcgctgagacctgccccctgcccagcttccaggtgttcaagttcatctacagctgccgcctggccgagatgggcctggccacccaggccttccactactgtgaggccatcgccaagagcatcctgacccagccccacctgtacagccctgtgctgatcagccagctggtgcagatggccagccagctgcggctgtttgacccccagctgaaggagaagccagaggaggagagcctggccgcccccacctggctggtgcacctgcagcaggtggagcggcagatcaaggagggcgccggcgtgtggcaccaggatggagccctgccccagcagtgccccggcacccccagcagcgagatggagcagctggaccggcccggcctgagccagcccggggccctgggcatcgccaaccccctgctggccgtgcctgcccccagccctgagcacagcagccccagcgtgcggctgctgcccagcgccccccagaccctgcctgatggccccctggccagccctgcccgggtgcccatgtttcctgtgcccctgcccccaggccccctggagcccggccctggctgtgtgaccccaggccctgccctgggcttcctggagcccagcggccctggcctgcccccaggagtgccccccctgcaggagaggaggcacctgctgcaggaggcccggagcccagaccccggcatcgtgccccaggaggcccctgtgggcaacagcctgtctgagctgtctgaggagaactttgatggcaagtttgccaacctgacccccagcaggacagtgcctgacagcgaggcccctcctggctgggacagagctgacagcggccccacccagccccccctgagcctgagccctgcccctgagaccaagaggcctggccaggccgccaagaaggagaccaaggagcccaagaagggggagagctggttcttccgctggctgcccgggaagaagaagacagaggcctacctgcctgatgacaagaacaagagcatcgtgtgggatgagaagaagaaccagtgggtgaacctgaatgaacctgaggaggagaagaaggcccctcctcctccacccacctccatgcccaagacagtgcaggccgcccccccagccctgcccggccccccaggggcccctgtgaacatgtacagccggcgggctgctggcacccgggcccgctacgtggatgtgctgaaccccagcggcacccagaggtctgagcccgccctggccccagctgactttgtggcccccctggcccccctgcccatccccagcaacctgtttgtgcccaccccagatgctgaggagccccagctgcctgatggcaccggccgggagggccctgctgctgcccggggcctggccaaccctgagcccgcccctgagcccaaggtgctgagcagcgctgccagcctgcccggcagcgagctgcccagcagcaggcctgagggcagccagggcggggaggcccctggggacctgcctgctgctgggggcccccccagcggggccatgcccttctacaacccagcccagctggcccaggcctgtgccaccagcggcagcagccggctgggccgcatcggccagaggaagcacctggtgctgaactag

SEQ ID NO: 168974 - DNA, 603 bp, synthetic construct
  misc_feature 1..603: note = Description of Artificial Sequence: Synthetic coding sequence
  source 1..603: mol_type = other DNA
atgcccaagacagtgcaggccgcccccccagccctgcccggccccccaggggcccctgtgaacatgtacagcagaagagctgctggcacccgggcccgctacgtggatgtgctgaaccccagcggcacccagaggtctgagcccgccctggccccagctgactttgtggcccccctggcccccctgcccatccccagcaacctgtttgtgcccacccctgtgtcctctgtgcggccccagggccgctctggaagaaatgatggcctgctggccctgagcagcccagatgctgaggagccccagctgcctgatggcaccggccgggagggccctgctgctgcccggggcctggccaaccctgagcccgcccctgagcccaaggtgctgagcagcgctgccagcctgcccggcagcgagctgcccagcagcaggcctgagggcagccagggcggggaggcccctggggacctgcctgctgctgggggccccccatctggggccatgcccttctacaacccagcccagctggcccaggcctgtgccaccagcggcagcagccggctgggcagaattggccagaggaagcacctggtgctgaactag

SEQ ID NO: 168975 - DNA, 924 bp, synthetic construct
  misc_feature 1..924: note = Description of Artificial Sequence: Synthetic coding sequence
  source 1..924: mol_type = other DNA
atgtccatgatcctgagcgccagcgtcatccgggtgagagatggcctgcccctgagcgccagcacagattatgagcagagcacaggcatgcaggagtgcaggaagtacttcaagatgctgagcaggaagctggcccagctgcctgaccgctgcaccctgaagacaggccactacaacatcaacttcatcagcagcctgggcgtgtcctacatgatgctgtgcacagagaactaccccaacgtgctggccttctccttcctggatgagctgcagaaggagttcatcaccacctacaacatgatgaagaccaacacagctgtgcggccctactgcttcattgaatttgacaacttcatccagaggaccaagcagcgctacaacaaccccaggagcctgagcaccaagatcaacctgagtgacatgcagacagagatcaagctgcggcccccctaccagatctccatgtgtgagctgggcagcgccaacggggtgaccagcgccttctctgtggactgcaagggagctgggaagatcagcagcgcccaccagaggctggagcccgccaccctgtctggaattgtgggcttcatcctgagcctgctgtgtggggccctgaacctgatccggggcttccacgccatcgagagcctgctgcagagtgatggagatgacttcaactacatcatcgccttcttcctgggcacagctgcctgcctgtaccagtgctacctgctggtgtactacacaggctggagaaatgtgaagagcttcctgaccttcggcctcatctgcctgtgcaacatgtacctgtatgagctgaggaacctgtggcagctgttcttccacgtgacagtgggcgcctttgtgaccctgcagatctggctgcggcaggcccagggcaaggccccagactatgatgtgtag

SEQ ID NO: 168976 - DNA, 330 bp, synthetic construct
  misc_feature 1..330: note = Description of Artificial Sequence: Synthetic coding sequence
  source 1..330: mol_type = other DNA
atgtccatgatcctgagcgccagcgtcatccgggtgagagatggcctgcccctgagcgccagcacagattatgagcagagcacaggcatgcaggagtgcaggaagtacttcaagatgctgagcaggaagctggcccagctgcctgaccgctgcaccctgaagacaggccactacaacatcaacttcatcagcagcctgggcgtgtcctacatgatgctgtgcacagagaactaccccaacgtgctggccttctccttcctggatgagctgcagaaggagttcatcaccacctacaacatgatgaagaccaacacagctgtgcggccctag

SEQ ID NO: 168977 - DNA, 870 bp, synthetic construct
  misc_feature 1..870: note = Description of Artificial Sequence: Synthetic coding sequence
  source 1..870: mol_type = other DNA
atgtccatgatcctgagcgccagcgtcatccgggtgagagatggcctgcccctgagcgccagcacagattatgagcagagcacaggcatgcaggagtgcaggaagtacttcaagatgctgagcaggaagctggcccagctgcctgaccgctgcaccctgaagacaggccactacaacatcaacttcatcagcagcctgggcgtgtcctacatgatgctgtgcacagagaactaccccaacgtgctggccttctccttcctggatgagctgcagaaggagttcatcaccacctacaacatgatgaagaccaacacagctgtgcggccctactgcttcattgaatttgacaacttcatccagaggaccaagcagcgctacaacaaccccaggagcctgagcaccaagatcaacctgagtgacatgcagacagagatcaagctgcggcccccctaccagatctccatgtgtgagctgggcagcgccaacggggtgaccagcgccttctctgtggactgcaagggagctgggaagatcagcagcgcccaccagaggctggagcccgccaccctgtctggaattgtgggcttcatcctgagcctgctgtgtggggccctgaacctgatccggggcttccacgccatcgagagcctgctgcagagtgatggagatgacttcaactacatcatcgccttcttcctgggcacagctgcctgcctgtaccagtgctacctgctggtgtactacacaggctggagaaatgtgaagagcttcctgaccttcggcctcatctgcctgtgcaacatgtacctgtatgagctgaggaacctgtggcagctgttcttccacgtgacagtgggcgcctttgtgtag

SEQ ID NO: 168978 - DNA, 417 bp, synthetic construct
  misc_feature 1..417: note = Description of Artificial Sequence: Synthetic coding sequence
  source 1..417: mol_type = other DNA
atgtccatgatcctgagcgccagcgtcatccgggtgagagatggcctgcccctgagcgccagcacagattatgagcagagcacaggcatgcaggagtgcaggaagtacttcaagatgctgagcaggaagctggcccagctgcctgaccgctgcaccctgaagacaggccactacaacatcaacttcatcagcagcctgggcgtgtcctacatgatgctgtgcacagagaactaccccaacgtgctggccttctccttcctggatgagctgcagaaggagttcatcaccacctacaacatgatgaagaccaacacagctgtgcggccctactgcttcattgaatttgacaacttcatccagaggaccaagcagcgctacaacaaccccaggagcctgagcaccaagatcaacctgtag

SEQ ID NO: 168979 - DNA, 657 bp, synthetic construct
  misc_feature 1..657: note = Description of Artificial Sequence: Synthetic coding sequence
  source 1..657: mol_type = other DNA
atgtccatgatcctgagcgccagcgtcatccgggtgagagatggcctgcccctgagcgccagcacagattatgagcagagcacaggcatgcaggagtgcaggaagtacttcaagatgctgagcaggaagctggcccagctgcctgaccgctgcaccctgaagacaggccactacaacatcaacttcatcagcagcctgggcgtgtcctacatgatgctgtgcacagagaactaccccaacgtgctggccttctccttcctggatgagctgcagaaggagttcatcaccacctacaacatgatgaagaccaacacagctgtgcggccctactgcttcattgaatttgacaacttcatccagaggaccaagcagcgctacaacaaccccaggagcctgagcaccaagatcaacctgagtgacatgcagacagagatcaagctgcggcccccctaccagatctccatgtgtgagctgggcagcgccaacggggtgaccagcgccttctctgtggactgcaagggagctgggaagatcagcagcgcccaccagaggctggagcccgccaccctgtctggaattgtgggcttcatcctgagcctgctgtgtggggccctgaacctgatccggggcttccacgccatcgagagcctgctgtag

SEQ ID NO: 168980 - DNA, 306 bp, synthetic construct
  misc_feature 1..306: note = Description of Artificial Sequence: Synthetic coding sequence
  source 1..306: mol_type = other DNA
atgtccatgatcctgagcgccagcgtcatccgggtgagagatggcctgcccctgagcgccagcacagattatgagcagagcacaggcatgcaggagtgcaggaagtacttcaagatgctgagcaggaagctggcccagctgcctgaccgctgcaccctgaagacaggccactacaacatcaacttcatcagcagcctgggcgtgtcctacatgatgctgtgcacagagaactaccccaacgtgctggccttctccttcctggatgagctgcagaaggagttcatcaccacctacaacatgatgtag

SEQ ID NO: 168981 - DNA, 924 bp, synthetic construct; identical to SEQ ID NO: 168975
  misc_feature 1..924: note = Description of Artificial Sequence: Synthetic coding sequence
  source 1..924: mol_type = other DNA

SEQ ID NO: 168982 - DNA, 2298 bp, synthetic construct
  misc_feature 1..2298: note = Description of Artificial Sequence: Synthetic coding sequence
  source 1..2298: mol_type = other DNA
atgaccacctacctggagttcatccagcagaatgaggagagagatggagtgcgcttctcctggaatgtgtggcccagcagccggctggaggccaccaggatggtggtgcctgtggccgccctcttcacccccctgaaggagaggccagacctgccccccatccagtatgagcctgtgctgtgcagcaggaccacctgcagagctgtgctgaaccccctgtgccaggtggactaccgggccaagctgtgggcctgcaacttctgctaccagaggaaccagtttcctccttcctatgccggcatcagcgagctgaaccagcctgctgagctgctgccccagttcagcagcattgaatatgtggtgctgcggggcccccagatgcccctcatcttcctgtatgtggtggacacctgcatggaggatgaggacctgcaggccctgaaggagagcatgcagatgagcctgagcctgctgcccccaacagccctggtgggcctcatcacctttggaaggatggtgcaggtgcatgagctgggctgtgagggcatcagcaagagctatgtgttccggggcaccaaggacctgagcgccaagcagctgcaggagatgctgggcctgagcaaggtgcccctgacccaggccacccggggcccccaggtgcagcagcccccacccagcaaccgcttcctgcagcctgtgcagaagattgacatgaacctgacagacctgctgggggagctgcagagggacccctggcctgtgccccagggcaagaggcccctgcggagcagcggcgtggccctgagcattgctgtgggcctgctggagtgcaccttccccaacacaggagcccgcatcatgatgttcatcggcggccctgccacccagggccctggcatggtggtgggagatgagctgaagacccccatccgctcctggcatgacatcgacaaggacaatgccaagtatgtgaagaagggcaccaagcactttgaggccctggccaacagagctgccaccactggacatgtgattgacatctatgcctgtgccctggaccagacaggcctgctggagatgaagtgctgccccaacctgactggaggctacatggtgatgggagacagcttcaacaccagcctcttcaagcagaccttccagagggtcttcaccaaggacatgcacggccagttcaagatgggctttggaggcaccctggagatcaagaccagccgggagatcaagatcagcggggccatcggcccctgtgtgtccctgaacagcaagggcccctgtgtgtctgaaaatgagatcggcaccggcggcacctgccagtggaagatctgtggcctgagccccaccaccaccctggccatctactttgaggtggtgaaccagcacaatgcccccatcccccagggcggccgcggggccatccagtttgtgacccagtaccagcacagcagcggccagaggcgcatccgggtgaccaccatcgccaggaactgggcagatgcccagacccagatccagaacattgctgccagctttgaccaggaggccgccgccatcctgatggcccggctggccatctacagagctgagacagaggagggcccagatgtgctgcgctggctggaccggcagctgatccggctgtgccagaagtttggagagtaccacaaggatgaccccagcagcttccgcttcagcgagaccttcagcctgtacccccagttcatgttccacctgcggcgcagcagcttcctgcaggtgttcaacaacagcccagatgagagcagctactaccgccaccacttcatgaggcaggacctgacccagagcctcatcatgatccagcccatcctgtatgcctacagcttcagcggccccccagagcctgtgctgctggacagcagcagcatcctggccgaccgcatcctgctgatggacaccttcttccagatcctgatctaccacggggagaccatcgcccagtggaggaagagcggctaccaggacatgccagaatatgagaacttccgccacctgctgcaggcccctgtggatgatgcccaggagatcctgcacagccgcttccccatgccccgctacatcgacacagagcacggcggcagccaggcccgcttcctgctgagcaaggtgaaccccagccagacccacaacaacatgtatgcctggggccaggagagcggggcccccatcctgacagatgatgtgtccctgcaggtgttcatggaccacctgaagaagctggccgtgtcctctgctgcctag

SEQ ID NO: 168983 - DNA, 1992 bp, synthetic construct
  misc_feature 1..1992: note = Description of Artificial Sequence: Synthetic coding sequence
  source 1..1992: mol_type = other DNA
atgcccctcatcttcctgtatgtggtggacacctgcatggaggatgaggacctgcaggccctgaaggagagcatgcagatgagcctgagcctgctgcccccaacagccctggtgggcctcatcacctttggaaggatggtgcaggtgcatgagctgggctgtgagggcatcagcaagagctatgtgttccggggcaccaaggacctgagcgccaagcagctgcaggagatgctgggcctgagcaaggtgcccctgacccaggccacccggggcccccaggtgcagcagcccccacccagcaaccgcttcctgcagcctgtgcagaagattgacatgaacctgacagacctgctgggggagctgcagagggacccctggcctgtgccccagggcaagaggcccctgcggagcagcggcgtggccctgagcattgctgtgggcctgctggagtgcaccttccccaacacaggagcccgcatcatgatgttcatcggcggccctgccacccagggccctggcatggtggtgggagatgagctgaagacccccatccgctcctggcatgacatcgacaaggacaatgccaagtatgtgaagaagggcaccaagcactttgaggccctggccaacagagctgccaccactggacatgtgattgacatctatgcctgtgccctggaccagacaggcctgctggagatgaagtgctgccccaacctgactggaggctacatggtgatgggagacagcttcaacaccagcctcttcaagcagaccttccagagggtcttcaccaaggacatgcacggccagttcaagatgggctttggaggcaccctggagatcaagaccagccgggagatcaagatcagcggggccatcggcccctgtgtgtccctgaacagcaagggcccctgtgtgtctgaaaatgagatcggcaccggcggcacctgccagtggaagatctgtggcctgagccccaccaccaccctggccatctactttgaggtggtgaaccagcacaatgcccccatcccccagggcggccgcggggccatccagtttgtgacccagtaccagcacagcagcggccagaggcgcatccgggtgaccaccatcgccaggaactgggcagatgcccagacccagatccagaacattgctgccagctttgaccaggaggccgccgccatcctgatggcccggctggccatctacagagctgagacagaggagggcccagatgtgctgcgctggctggaccggcagctgatccggctgtgccagaagtttggagagtaccacaaggatgaccccagcagcttccgcttcagcgagaccttcagcctgtacccccagaggcgggacttccccaagaccagcggggagatcctggagaaccaggagaaggcccggagcgcctgcctgaagttcatgttccacctgcggcgcagcagcttcctgcaggtgttcaacaacagcccagatgagagcagctactaccgccaccacttcatgaggcaggacctgacccagagcctcatcatgatccagcccatcctgtatgcctacagcttcagcggccccccagagcctgtgctgctggacagcagcagcatcctggccgaccgcatcctgctgatggacaccttcttccagatcctgatctaccacggggagaccatcgcccagtggaggaagagcggctaccaggacatgccagaatatgagaacttccgccacctgctgcaggcccctgtggatgatgcccaggagatcctgcacagccgcttccccatgccccgctacatcgacacagagcacggcggcagccaggcccgcttcctgctgagcaaggtgaaccccagccagacccacaacaacatgtatgcctggggccaggagagcggggcccccatcctgacagatgatgtgtccctgcaggtgttcatggaccacctgaagaagctggccgtgtcctctgctgcctag

SEQ ID NO: 168984 - DNA, 1692 bp, synthetic construct
  misc_feature 1..1692: note = Description of Artificial Sequence: Synthetic coding sequence
  source 1..1692: mol_type = other DNA
atgctgggcctgagcaaggtgcccctgacccaggccacccggggcccccaggtgcagcagcccccacccagcaaccgcttcctgcagcctgtgcagaagattgacatgaacctgacagacctgctgggggagctgcagagggacccctggcctgtgccccagggcaagaggcccctgcggagcagcggcgtggccctgagcattgctgtgggcctgctggagtgcaccttccccaacacaggagcccgcatcatgatgttcatcggcggccctgccacccagggccctggcatggtggtgggagatgagctgaagacccccatccgctcctggcatgacatcgacaaggacaatgccaagtatgtgaagaagggcaccaagcactttgaggccctggccaacagagctgccaccactggacatgtgattgacatctatgcctgtgccctggaccagacaggcctgctggagatgaagtgctgccccaacctgactggaggctacatggtgatgggagacagcttcaacaccagcctcttcaagcagaccttccagagggtcttcaccaaggacatgcacggccagttcaagatgggctttggaggcaccctggagatcaagaccagccgggagatcaagatcagcggggccatcggcccctgtgtgtccctgaacagcaagggcccctgtgtgtctgaaaatgagatcggcaccggcggcacctgccagtggaagatctgtggcctgagccccaccaccaccctggccatctactttgaggtggtgaaccagcacaatgcccccatcccccagggcggccgcggggccatccagtttgtgacccagtaccagcacagcagcggccagaggcgcatccgggtgaccaccatcgccaggaactgggcagatgcccagacccagatccagaacattgctgccagctttgaccaggaggccgccgccatcctgatggcccggctggccatctacagagctgagacagaggagggcccagatgtgctgcgctggctggaccggcagctgatccggctgtgccagaagtttggagagtaccacaaggatgaccccagcagcttccgcttcagcgagaccttcagcctgtacccccagttcatgttccacctgcggcgcagcagcttcctgcaggtgttcaacaacagcccagatgagagcagctactaccgccaccacttcatgaggcaggacctgacccagagcctcatcatgatccagcccatcctgtatgcctacagcttcagcggccccccagagcctgtgctgctggacagcagcagcatcctggccgaccgcatcctgctgatggacaccttcttccagatcctgatctaccacggggagaccatcgcccagtggaggaagagcggctaccaggacatgccagaatatgagaacttccgccacctgctgcaggcccctgtggatgatgcccaggagatcctgcacagccgcttccccatgccccgctacatcgacacagagcacggcggcagccaggcccgcttcctgctgagcaaggtgaaccccagccagacccacaacaacatgtatgcctggggccaggagagcggggcccccatcctgacagatgatgtgtccctgcaggtgttcatggaccacctgaagaagctggccgtgtcctctgctgcctag

SEQ ID NO: 168985 - DNA, 2211 bp, synthetic construct
  misc_feature 1..2211: note = Description of Artificial Sequence: Synthetic coding sequence
  source 1..2211: mol_type = other DNA
atgaccacctacctggagttcatccagcagaatgaggagagagatggagtgcgcttctcctggaatgtgtggcccagcagccggctggaggccaccaggatggtggtgcctgtggccgccctcttcacccccctgaaggagaggccagacctgccccccatccagtatgagcctgtgctgtgcagcaggaccacctgcagagctgtgctgaaccccctgtgccaggtggactaccgggccaagctgtgggcctgcaacttctgctaccagaggaaccagaggggcccccagatgcccctcatcttcctgtatgtggtggacacctgcatggaggatgaggacctgcaggccctgaaggagagcatgcagatgagcctgagcctgctgcccccaacagccctggtgggcctcatcaccttcggccgcatggtgcaggtgcatgagctgggctgtgagggcatcagcaagagctatgtgttccggggcaccaaggacctgagcgccaagcagctgcaggagatgctgggcctgagcaaggtgcccctgacccaggccacccggggcccccaggtgcagcagcccccacccagcaaccgcttcctgcagcctgtgcagaagattgacatgaacctgacagacctgctgggggagctgcagagggacccctggcctgtgccccagggcaagaggcccctgcggagcagtggagtggccctgagcattgctgtgggcctgctggagtgcaccttccccaacacaggagcccgcatcatgatgtttattggaggccctgccacccagggccctggcatggtggtgggagatgagctgaagacccccatccgctcctggcatgacatcgacaaggacaatgccaagtatgtgaagaagggcaccaagcactttgaggccctggccaacagagctgccaccaccggccacgtgattgacatctatgcctgtgccctggaccagacaggcctgctggagatgaagtgctgccccaacctgaccggcggctacatggtgatgggagacagcttcaacaccagcctcttcaagcagaccttccagagggtcttcaccaaggacatgcacggccagttcaagatgggctttggaggcaccctggagatcaagaccagccgggagatcaagatcagcggggccatcggcccctgtgtgtccctgaacagcaagggcccctgtgtgtctgaaaatgaaattggaactggaggcacctgccagtggaagatctgtggcctgagccccaccaccaccctggccatctactttgaggtggtgaaccagcacaatgcccccatcccccagggcggccgcggggccatccagtttgtgacccagtaccagcacagcagcggccagaggcgcatccgggtgaccaccatcgccaggaactgggcagatgcccagacccagatccagaacattgctgccagctttgaccaggaggccgccgccatcctgatggcccggctggccatctacagagctgagacagaggagggcccagatgtgctgcgctggctggaccggcagctgatccggctgtgccagaagtttggagagtaccacaaggatgaccccagcagcttccgcttcagcgagaccttcagcctgtacccccagttcatgttccacctgcggcgcagcagcttcctgcaggtgttcaacaacagcccagatgagagcagctactaccgccaccacttcatgaggcaggacctgacccagagcctcatcatgatccagcccatcctgtatgcctacagcttcagcggccccccagagcctgtgctgctggacagcagcagcatcctggccgaccgcatcctgctgatggacaccttcttccagatcctgatctaccatggagagaccatcgcccagtggaggaagagcggctaccaggacatgccagaatatgagaacttccgccacctgctgcaggcccctgtggatgatgcccaggagatcctgcacagccgcttccccatgccccgctacatcgacacagaacatggaggcagccaggcccgcttcctgctgagcaaggtgaaccccagccagacccacaacaacatgtatgcctggggccaggagagcggggcccccatcctgacagatgatgtgtccctgcaggtgttcatggaccacctgaagaagctggccgtgagcagcgctgcctag

SEQ ID NO: 168986 - DNA, 510 bp, synthetic construct
  misc_feature 1..510: note = Description of Artificial Sequence: Synthetic coding sequence
  source 1..510: mol_type = other DNA
atgaccacctacctggagttcatccagcagaatgaggagagagatggagtgcgcttctcctggaatgtgtggcccagcagccggctggaggccaccaggatggtggtgcctgtggccgccctcttcacccccctgaaggagaggccagacctgccccccatccagtatgagcctgtgctgtgcagcaggaccacctgcagagctgtgctgaaccccctgtgccaggtggactaccgggccaagctgtgggcctgcaacttctgctaccagaggaaccagtttcctccttcctatgccggcatcagcgagctgaaccagcctgctgagctgctgccccagttcagcagcattgaatatgtggtgctgcggggcccccagatgcccctcatcttcctgtatgtggtggacacctgcatggaggatgaggacctgcaggccctgaaggagagcatgcagatgagcctgagcctgctgcccccaacagccctggtgggcctcatcaccttctag

SEQ ID NO: 168987 - DNA, 285 bp, synthetic construct
  misc_feature 1..285: note = Description of Artificial Sequence: Synthetic coding sequence
  source 1..285: mol_type = other DNA
atgaccacctacctggagttcatccagcagaatgaggagagagatggagtgcgcttctcctggaatgtgtggcccagcagccggctggaggccaccaggatggtggtgcctgtggccgccctcttcacccccctgaaggagaggccagacctgccccccatccagtatgagcctgtgctgtgcagcaggaccacctgcagagctgtgctgaaccccctgtgccaggtggactaccgggccaagctgtgggcctgcaacttctgctaccagaggaaccaggtgtag

SEQ ID NO: 168988 - DNA, 423 bp, synthetic construct
  misc_feature 1..423: note = Description of Artificial Sequence: Synthetic coding sequence
  source 1..423: mol_type = other DNA
atgaccacctacctggagttcatccagcagaatgaggagagagatggagtgcgcttctcctggaatgtgtggcccagcagccggctggaggccaccaggatggtggtgcctgtggccgccctcttcacccccctgaaggagaggccagacctgccccccatccagtatgagcctgtgctgtgcagcaggaccacctgcagagctgtgctgaaccccctgtgccaggtggactaccgggccaagctgtgggcctgcaacttctgctaccagaggaaccagtttcctccttcctatgccggcatcagcgagctgaaccagcctgctgagctgctgccccagttcagcagcattgaatatgtggtgctgcggggcccccagatgcccctcatcttcctgtatgtggtggacacctgcatggagtag

SEQ ID NO: 168989 - DNA, 123 bp, synthetic construct
  misc_feature 1..123: note = Description of Artificial Sequence: Synthetic coding sequence
  source 1..123: mol_type = other DNA
atgaccacctacctggagttcatccagcagaatgaggagagagatggagtgcgcttctcctggaatgtgtggcccagcagccggctggaggccaccaggatggtggtgcctgtggccgcctag

SEQ ID NO: 168990 - DNA, 2304 bp, synthetic construct
  misc_feature 1..2304: note = Description of Artificial Sequence: Synthetic coding sequence
  source 1..2304: mol_type = other DNA
atggccacctacctggagttcatccagcagaatgaggagagagatggagtgcgcttctcctggaatgtgtggcccagcagccggctggaggccaccaggatggtggtgcccctggcctgcctgctgacccccctgaaggagaggccagacctgccccctgtgcagtatgagcctgtgctgtgcagccggcccacctgcaaggctgtgctgaaccccctgtgccaggtggactaccgggccaagctgtgggcctgcaacttctgcttccagaggaaccagtttcctccagcctacggcggcatcagcgaggtgaaccagcctgctgagctgatgccccagttcagcaccattgaatatgtgatccagagaggagcccagagccccctcatcttcctgtatgtggtggacacctgcctggaggaggatgacctgcaggccctgaaggagagcctgcagatgagcctgagcctgctgcccccagatgccctggtgggcctcatcacctttggaaggatggtgcaggtgcatgagctgagctgtgagggcatcagcaagagctatgtgttccggggcaccaaggacctgacagccaagcagatccaggacatgctgggcctgaccaagccagccatgcccatgcagcaggcccggcctgcccagccccaggagcacccctttgccagcagccgcttcctgcagcctgtgcacaagattgacatgaacctgacagacctgctgggggagctgcagagggacccctggcctgtgacccagggcaagaggcccctgcggagcactggagtggccctgagcattgctgtgggcctgctggagggcaccttccccaacacaggagcccgcatcatgctgttcaccggcggcccccccacccagggccctggcatggtggtgggagatgagctgaagatccccatccgctcctggcatgacatcgagaaggacaatgcccgcttcatgaagaaggccaccaagcactatgagatgctggccaacagaacagctgccaacggccactgcatcgacatctatgcctgtgccctggaccagacaggcctgctggagatgaagtgctgtgccaacctgactggaggctacatggtgatgggagacagcttcaacaccagcctcttcaagcagaccttccagaggatcttcaccaaggacttcaatggagacttcaggatggccttcggggccaccctggatgtgaagaccagccgggagctgaagattgctggggccatcggcccctgtgtgtccctgaatgtgaagggcccctgtgtgtctgaaaatgagctgggcgtgggcggcaccagccagtggaagatctgtggcctggaccccaccagcaccctgggcatctactttgaggtggtgaaccagcacaacacccccatcccccagggcggccgcggggccatccagtttgtgacccactaccagcacagcagcacccagaggcgcatccgggtgaccaccatcgccaggaactgggcagatgtgcagagccagctgcggcacattgaagctgcctttgaccaggaggccgctgctgtgctgatggcccggctgggcgtcttccgggcagagagcgaggagggcccagatgtgctgcgctggctggaccggcagctgatccggctgtgccagaagtttggccagtacaacaaggaggaccccaccagcttccggctgagtgacagcttcagcctgtacccccagttcatgttccacctgcggcgcagccccttcctgcaggtgttcaacaacagcccagatgagagcagctactaccgccaccactttgcccggcaggacctgacccagagcctcatcatgatccagcccatcctgtacagctacagcttccacggccccccagagcctgtgctgctggacagcagcagcatcctggccgaccgcatcctgctgatggacaccttcttccagatcgtcatctacctgggggagaccatcgcccagtggaggaaggccggctaccaggacatgccagaatatgagaacttcaagcacctgctgcaggcccccctggatgatgcccaggagatcctgcaggcccgcttccccatgccccgctacatcaacacagagcacggcggcagccaggcccgcttcctgctgagcaaggtgaaccccagccagacccacaacaacctgtatgcctggggccaggagaccggggcccccatcctgacagatgatgtgtccctgcaggtgttcatggaccacctgaagaagctggccgtgtcctctgcctgctag

SEQ ID NO: 168991 - DNA, 2304 bp, synthetic construct; identical to SEQ ID NO: 168990
  misc_feature 1..2304: note = Description of Artificial Sequence: Synthetic coding sequence
  source 1..2304: mol_type = other DNA

SEQ ID NO: 168992 - DNA, 2304 bp, synthetic construct; identical to SEQ ID NO: 168990
  misc_feature 1..2304: note = Description of Artificial Sequence: Synthetic coding sequence
  source 1..2304: mol_type = other DNA

SEQ ID NO: 168993 - DNA, 2304 bp, synthetic construct; identical to SEQ ID NO: 168990
  misc_feature 1..2304: note = Description of Artificial Sequence: Synthetic coding sequence
  source 1..2304: mol_type = other DNA

SEQ ID NO: 168994 - DNA, 741 bp, synthetic construct
  misc_feature 1..741: note = Description of Artificial Sequence: Synthetic coding sequence
  source 1..741: mol_type = other DNA
cagaggcgcatccgggtgaccaccatcgccaggaactgggcagatgtgcagagccagctgcggcacattgaagctgcctttgaccaggaggccgctgctgtgctgatggcccggctgggcgtcttccgggcagagagcgaggagggcccagatgtgctgcgctggctggaccggcagctgatccggctgtgccagaagtttggccagtacaacaaggaggaccccaccagcttccggctgagtgacagcttcagcctgtacccccagttcatgttccacctgcggcgcagccccttcctgcaggtgttcaacaacagcccagatgagagcagctactaccgccaccactttgcccggcaggacctgacccagagcctcatcatgatccagcccatcctgtacagctacagcttccacggccccccagagaccatcgcccagtggaggaaggccggctaccaggacatgccagaatatgagaacttcaagcacctgctgcaggcccccctggatgatgcccaggagatcctgcaggcccgcttccccatgccccgctacatcaacacagaacatggaggcagccaggcccgcttcctgctgagcaaggtgaaccccagccagacccacaacaacctgtatgcctggggccaggagactggagcccccatcctgacagatgatgtgtccctgcaggtgttcatggaccacctgaagaagctggccgtgagcagcgcctgctag

SEQ ID NO: 168995 - DNA, 996 bp, synthetic construct
  misc_feature 1..996: note = Description of Artificial Sequence: Synthetic coding sequence
  source 1..996: mol_type = other DNA
atggccacctacctggagttcatccagcagaatgaggagagagatggagtgcgcttctcctggaatgtgtggcccagcagccggctggaggccaccaggatggtggtgcccctggcctgcctgctgacccccctgaaggagaggccagacctgccccctgtgcagtatgagcctgtgctgtgcagccggcccacctgcaaggctgtgctgaaccccctgtgccaggtggactaccgggccaagctgtgggcctgcaacttctgcttccagaggaaccagtttcctccagcctacggcggcatcagcgaggtgaaccagcctgctgagctgatgccccagttcagcaccattgaatatgtgatccagagaggagcccagagccccctcatcttcctgtatgtggtggacacctgcctggaggaggatgacctgcaggccctgaaggagagcctgcagatgagcctgagcctgctgcccccagatgccctggtgggcctcatcacctttggaaggatggtgcaggtgcatgagctgagctgtgagggcatcagcaagagctatgtgttccggggcaccaaggacctgacagccaagcagatccaggacatgctgggcctgaccaagccagccatgcccatgcagcaggcccggcctgcccagccccaggagcacccctttgccagcagccgcttcctgcagcctgtgcacaagattgacatgaacctgacagacctgctgggggagctgcagagggacccctggcctgtgacccagggcaagaggcccctgcggagcactggagtggccctgagcattgctgtgggcctgctggagggcaccttccccaacacaggagcccgcatcatgctgttcaccggcggcccccccacccagggccctggcatggtggtgggagatgagctgaagatccccatccgctcctggcatgacatcgagaaggacaatgcccgcttcatgaagaaggccaccaagtag

SEQ ID NO: 168996 - DNA, 1200 bp, synthetic construct
  misc_feature 1..1200: note = Description of Artificial Sequence: Synthetic coding sequence
  source 1..1200: mol_type = other DNA
atggccgagaggagaagacacaagaagaggatccaggaggtgggggagcccagcaaggaggagaaggctgtggccaagtacctgcgcttcaactgccccaccaagagcaccaacatgatgggccaccgggtggactacttcatcgccagcaaggctgtggactgcctgctggacagcaagtgggccaaggccaagaagggggaggaggccctcttcaccacccgggagagcgtggtggactactgcaaccggctgctgaagaagcagttcttccaccgggccctgaaggtgatgaagatgaagtatgacaaggacatcaagaaggagaaggacaagggcaaggccgagagcggcaaggaggaggacaagaagagcaagaaggagaacatcaaggatgagaagaccaagaaggagaaggagaagaagaaggatggagagaaggaggagagcaagaaggaggagaccccaggcacccccaagaagaaggagaccaagaagaagttcaagctggagccccatgatgaccaggtgttcctggatggaaatgaggtgtatgtgtggatctatgaccctgtgcacttcaagacctttgtgatgggcctcatcctggtgattgctgtgattgctgccaccctcttccccctgtggccagctgagatgagggtgggcgtgtactacctgtctgtgggcgccggctgctttgtggccagcatcctgctgctggccgtggcccgctgcatcctcttcctgatcatctggctgatcaccggcggccgccaccacttctggttcctgcccaacctgacagcagatgtgggcttcatcgacagcttccggcccctgtacacccatgagtacaagggccccaaggctgacctgaagaaggatgagaagtctgagaccaagaagcagcagaagagtgacagcgaggagaagagtgacagcgagaagaaggaggatgaggagggcaaggtgggccctggcaaccacggcacagagggcagcggcggggagcggcacagcgacacagacagcgacagaagagaagatgacaggagccagcacagcagtggaaatggaaatgactttgagatgatcaccaaggaggagctggagcagcagacagatggagactgtgaagaagatgaggaggaggagaatgatggagagacccccaagagcagccatgagaagagctag

SEQ ID NO: 168997 - DNA, 1200 bp, synthetic construct; identical to SEQ ID NO: 168996
  misc_feature 1..1200: note = Description of Artificial Sequence: Synthetic coding sequence
  source 1..1200: mol_type = other DNA

SEQ ID NO: 168998 - DNA, 372 bp, synthetic construct
  misc_feature 1..372: note = Description of Artificial Sequence: Synthetic coding sequence
  source 1..372: mol_type = other DNA
atggccgagaggagaagacacaagaagaggatccaggaggtgggggagcccagcaaggatgagaagtctgagaccaagaagcagcagaagagtgacagcgaggagaagagtgacagcgagaagaaggaggatgaggagggcaaggtgggccctggcaaccacggcacagagggcagcggcggggagcggcacagcgacacagacagcgacagaagagaagatgacaggagccagcacagcagtggaaatggaaatgactttgagatgatcaccaaggaggagctggagcagcagacagatggagactgtgaagaagatgaggaggaggagaatgatggagagacccccaagagcagccatgagaagagctag

SEQ ID NO: 168999 - DNA, 2283 bp, synthetic construct
  misc_feature 1..2283: note = Description of Artificial Sequence: Synthetic coding sequence
  source 1..2283: mol_type = other DNA
atggccggccagcagttccagtatgatgattctggcaacaccttcttctacttcctgaccagctttgtgggcctcatcgtcatcccagccacctactacctgtggccccgggaccagaatgctgagcagatccggctgaagaacatcaggaaggtgtatggccgctgcatgtggtaccgcctgcggctgctgaagccccagcccaacatcatccccaccgtgaagaagatcgtgctgctggccggctgggccctcttcctgttcctggcctacaaggtgtccaagacagaccgggagtaccaggagtacaacccctatgaggtgctgaacctggaccccggggccaccgtggccgagatcaagaagcagtaccgcctgctgagcctgaagtaccacccagacaagggaggagatgaggtgatgttcatgagaattgccaaggcctatgctgccctgacagatgaggagagcaggaagaactgggaggagtttggaaatccagatggcccccaggccaccagctttggaattgccctgcctgcctggatcgtggaccagaagaacagcatcctggtgctgctggtgtatggcctggccttcatggtgatcctgcctgtggtggtgggctcctggtggtaccgcagcatccgctacagcggggaccagatcctgatccgcaccacccagatctacacctactttgtgtacaagaccaggaacatggacatgaagaggctcatcatggtgctggccggggccagcgagtttgacccccagtacaacaaggatgccaccagccggcccacagacaacatcctgatcccccagctgatccgggagatcggcagcatcaacctgaagaagaatgaaccacccctgacctgcccctacagcctgaaggcccgggtgctgctgctgagccacctggccaggatgaagatccctgagaccctggaggaggaccagcagttcatgctgaagaagtgcccagccctgctgcaggagatggtgaatgtcatctgccagctgattgtgatggccaggaaccgggaggagcgggagttccgggcccccaccctggccagcctggagaactgcatgaagctgagccagatggctgtgcagggcctgcagcagttcaagagccccctgctgcagctgccccacatcgaggaggacaacctgcggcgggtgagcaaccacaagaagtacaagatcaagaccatccaggacctggtgtccctgaaggagagtgacagacacaccctgctgcacttcctggaggatgagaagtatgaggaggtgatggctgtgctgggcagcttcccctacgtgaccatggacatcaagagccaggtgctggatgatgaggacagcaacaacatcaccgtgggcagcctggtgacagtgctggtgaagctgacccggcagaccatggccgaggtgtttgagaaggagcagagcatctgtgccgctgaggagcagcctgcagaagatggccagggcgagaccaacaagaacagaaccaagggcggctggcagcagaagagcaagggccccaagaagacagccaagagcaagaagaagaagcccctgaagaagaagcccacccctgtgctgctgccccagagcaagcagcagaagcagaagcaggccaatggagtggtgggcaatgaggccgctgtgaaggaggatgaggaggaggtgtctgacaagggcagtgacagcgaggaggaggagaccaacagagacagccagagcgagaaggatgatggcagtgaccgggacagcgaccgggagcaggatgagaagcagaacaaggatgatgaagctgagtggcaggagctgcagcagagcatccagaggaaggagcgggccctgctggagaccaagagcaagatcacccaccctgtgtacagcctgtacttccctgaggagaagcaggagtggtggtggctgtacatcgctgacaggaaggagcagaccctcatctccatgccctaccacgtgtgcaccctgaaggacacagaggaggtggagctgaagtttcctgcccctgggaagccaggcaactaccagtacacagtgttcctgcggagtgacagctacatgggcctggaccagatcaagcccctgaagctggaggtgcatgaggccaagcctgtgcctgagaaccacccccagtgggacacagccattgaaggagatgaggaccaggaggacagcgagggctttgaggacagctttgaggaggaggaggaggaggaggaggatgatgactag

SEQ ID NO: 169000 - DNA, 1254 bp, synthetic construct
  misc_feature 1..1254: note = Description of Artificial Sequence: Synthetic coding sequence
  source 1..1254: mol_type = other DNA
atgttcatgagaattgccaaggcctatgctgccctgacagatgaggagagcaggaagaactgggaggagtttggaaatccagatggcccccaggccaccagctttggaattgccctgcctgcctggatcgtggaccagaagaacagcatcctggtgctgctggtgtatggcctggccttcatggtgatcctgcctgtggtggtgggctcctggtggtaccgcagcatccgctacagcggggaccagatcctgatccgcaccacccagatctacacctactttgtgtacaagaccaggaacatggacatgaagaggctcatcatggtgctggccggggccagcgagtttgacccccagtacaacaaggatgccaccagccggcccacagacaacatcctgatcccccagctgatccgggagatcggcagcatcaacctgaagaagaatgaaccacccctgacctgcccctacagcctgaaggcccgggtgctgctgctgagccacctggccaggatgaagatccctgagaccctggaggaggaccagcagttcatgctgaagaagtgcccagccctgctgcaggagatggtgaatgtcatctgccagctgattgtgatggccaggaaccgggaggagcgggagttccgggcccccaccctggccagcctggagaactgcatgaagctgagccagatggctgtgcagggcctgcagcagttcaagagccccctgctgcagctgccccacatcgaggaggacaacctgcggcgggtgagcaaccacaagaagtacaagatcaagaccatccaggacctggtgtccctgaaggagagtgacagacacaccctgctgcacttcctggaggatgagaagtatgaggaggtgatggctgtgctgggcagcttcccctacgtgaccatggacatcaagagccaggtgctggatgatgaggacagcaacaacatcaccgtgggcagcctggtgacagtgctggtgaagctgacccggcagaccatggccgaggtgtttgagaaggagcagagcatctgtgccgctgaggagcagcctgcagaagatggccagggcgagaccaacaagaacagaaccaagggcggctggcagcagaagagcaagggccccaagaagacagccaagaagaagaaggagaccttcaagaagaagacctacacctgtgccatcaccaccgtgaaggccacagagaccaaggccggcaagtggagccgctgggagtag

SEQ ID NO: 169001 - DNA, 1137 bp, synthetic construct
  misc_feature 1..1137: note = Description of Artificial Sequence: Synthetic coding sequence
  source 1..1137: mol_type = other DNA
gagcacgagcgggagttccgggcccccaccctggccagcctggagaactgcatgaagctgagccagatggctgtgcagggcctgcagcagttcaagagccccctgctgcagctgccccacatcgaggaggacaacctgcggcgggtgagcaaccacaagaagtacaagatcaagaccatccaggacctggtgtccctgaaggagagtgacagacacaccctgctgcacttcctggaggatgagaagtatgaggaggtgatggctgtgctgggcagcttcccctacgtgaccatggacatcaagagccaggtgctggatgatgaggacagcaacaacatcaccgtgggcagcctggtgacagtgctggtgaagctgacccggcagaccatggccgaggtgtttgagaaggagcagagcatctgtgccgctgaggagcagcctgcagaagatggccagggcgagaccaacaagaacagaaccaagggcggctggcagcagaagagcaagggccccaagaagacagccaagagcaagaagaagaagcccctgaagaagaagcccacccctgtgctgctgccccagagcaagcagcagaagcagaagcaggccaacggggtggtgggcaatgaagctgctgtgaaggaggatgaggaggaggtgtctgacaagggcagtgacagcgaggaggagtggcaggagctgcagcagagcatccagaggaaggagcgggccctgctggagaccaagagcaagatcacccaccctgtgtacagcctgtacttccctgaggagaagcaggagtggtggtggctgtacatcgctgacaggaaggagcagaccctcatctccatgccctaccacgtgtgcaccctgaaggacacagaggaggtggagctgaagtttcctgcccctgggaagccaggcaactaccagtacacagtgttcctgcggagtgacagctacatgggcctggaccagatcaagcccctgaagctggaggtgcatgaggccaagcctgtgcctgagaaccacccccagtgggacacagccattgaaggagatgaggaccaggaggacagcgagggctttgaggacagctttgaggaggaggaggaggaggaggaggatgatgactag
